United States Patent Application Publication US 2026/0055430 A1 - sequence listing, part 2

SEQ ID NO: 2157 - protein, 550 aa, Unknown
  Description of Unknown: Integrase B2158 sequence
  PTHR30461:SF3,cd00338,SM00857,G3DSA:1.10.10.2600,IPR036162, PF13408,IPR025827,PS51737,G3DSA:3.40.50.1390,IPR006119, IPR038109,PF07508,IPR011109,SSF53041, PTHR30461,PS51736,Coil,PF00239
MKKFPIDLSCLTEEEISQFQEDPYTLYNGDQNVAIYLRYSSTGQSDQSIEGQLRDCRTFCKANHYRIVAIYVDRATTARKDVEKRVHLMEMISDSAKQNWEYVIVWKLDRFARNRNDSAIMKMRLRKNGVKVLSATEHLTDSPESIILESVLEGMAEFFSAELSQKVTRGMRESALKCHSVGGHIPLGYKVENHKLVVDPDTAHIVQEAFSLYANGESVAAICRKFNSAGYKTAKNTEFNRSSFKAMFRNTRYIGTYTYKDIVIENGIPAIIDKELFETVQRRLSKTATAPARGKAKVDYLLSGKLFCGHCGASMNGESGAGRHGKVYHYYSCYTKKRKLGCDKRPLKKDYIEGIVARDALNLLTDQLIDEIADMAIRQSEQDLINDTHIPQLTAQLSEVEKSIMNITAAIEKGIASETLMNRLVQLEHEKKTLNKEIKAEEKFVYRIDRDQIVFWLSQFKYGNIEDEDFRRRLIDLLVNSVTVWDEPDGYKITTAYNLTSCKTKTFRVEKNPAAEEATGFDFGESECAIPPQAIHCGGFLLSVGGWDVP

SEQ ID NO: 2158 - protein, 550 aa, Unknown
  Description of Unknown: Integrase B2159 sequence
  PTHR30461:SF3,cd00338,SM00857,G3DSA:1.10.10.2600,IPR036162, PS51737,G3DSA:3.40.50.1390,IPR006119,IPR038109,PF07508, IPR011109,SSF53041,PTHR30461,mobidb-lite,Coil, PF00239
MYYQPKIDFKPEEVIDYLRKSRSDDPLLTVEEVLSKHEAMLDEWAEKHLGAVVPEENKYREVVSGETIAERPEINRVLRLIESPKYKAVAVVEPQRLTRGDLEDIGRLMKLLKHTNTLVITPQRIYDLRDEYDWDAFERELKRGNDYLEYTKKILNRGRLLSVSQGNYVGNTPPYGYDKTFVTEGKRKCPILVPNKAEADVVRMMFDLYVNKDMGCTNICKKFDEMGIKPPKGDYWSPAAMTKMLQNIHYIGKVKWNHRKTLTIVEEGEFKKTRPVAQVGEFLIYDGKHEAIIPEELFNAAQAKKGKNTRQKPNTKVRNPFAGLIWCRCGRAMSLRTYKNRDAAPRLLCDGQTHCKTGSCLYSEMEERVISILTDCINDFVIRLKNDEGDSAKLHARLIKNLEAKQKELDEKELAQWEAQADPDPAKRMPPHIFQQLNEKLLKEKEEVRQALCKAYESMPEPVNYEEKITQFSEALNALKDPNIDAATKNRLLKACIERIEYHRDTPQRIKSQQVRYYDQKQKRTRYKSPLSTGGNWTSPEIVLDVKLKA

SEQ ID NO: 2159 - protein, 550 aa, Unknown
  Description of Unknown: Integrase B2160 sequence
  PTHR30461:SF3,SM00857,G3DSA:1.10.10.2600,IPR036162,PS51737, G3DSA:3.40.50.1390,IPR006119,IPR038109,PF07508,IPR011109, SSF53041,PF00239,PTHR30461,Coil,cd00338
MYYQPKIDFKPEEVIDYLRKSRSDDPLLTVEEVLSKHEAMLDEWAEQHLGAVVPEENKYREVVSGETIAERPEINRVLRLIESPRYKAVAVVEPQRLTRGDLEDIGRLMKLLKHTNTLVITPQRIYDLRDEYDWDAFERELKRGNDYLEYTKKILNRGRLLSVSQGNFVGNTAPYGYDKTFVTEGKRKCPILIPNKEEADVVRMMFDLYVNKDMGCTTICKKFDEMGIKPPRGEHWSAAAMTKMLENIHYIGKVKWNHRKTLTIVEEGEFKKTRPVAKVGEYLIYDGKHEAIVPEELFNAAQAKKGKNTRQKPNTKIRNPFAGLIWCKCGRAMSLRIYKNRDAAPRLLCDGQTHCRTGSCLYTEIEDRVKVILSDCIKDFEVRLKNNEGDSVKLHMRLINNLEAKQKELEAKELAQWEAQADPDPAKRMPPHIFQKLNEKLLKEKEEVRQALCKAYESMPEPVDYEEKIKLFTEALNALRNPDVDAATKNRLLKACIERIEYHRDAPQRIRSKQVRYYDKEQKRTRFKSPLNTGGNWTSPEIVLDVKLRV

SEQ ID NO: 2160 - protein, 550 aa, Unknown
  Description of Unknown: Integrase B2161 sequence
  PTHR30461:SF3,cd00338,SM00857,G3DSA:1.10.10.2600,IPR036162, PF13408,IPR025827,G3DSA:3.40.50.1390,PS51737,IPR006119, IPR038109,PF07508,IPR011109,SSF53041, PTHR30461,PS51736,Coil,PF00239
MARKKNIAAGLDAVIYARYSSHNQREVSIEQQIAECTKHAAALGLRIVGTYEDRAISGKTDNRPRFQQMMRDAEKGKFQAVVAWKSNRIGRNMLQAMVNEAKLDDYGVKVFYAEEDFDDTAAGRFALRNMMNVNQFYSENMAEDITRGLYDNANKCMANGRQPLGYKRGADGKVMLDEPAAAVVREIFTRVAAGDLFVDIARDLNAKGIKTSKGATWNKGSFQSICQNERYKGIYIYGNVRIVDGIPRIVSDELWYKVQEAMRMKKNPVGTRHRVGAEDYLLTGKLRCGHCGSYMTGVSGTSRNGELHYYYTCQKRRTEHACNKKNVRRDVIEPAIAQAIKMYCLTDDVIEWVANRTVEYWEKHDNDLHIEALEQQLEENKKATSNMLKAIEMGIITDATRSRMIELETEQSKLAVQLNAAKADVVKIDRDDLIDELQIFRDMDVNNRSVQAELFKDFLVAAYIYDDNRLKLVFSFMGKDNSIEIPLETGEDPPDGEDSPDAKMFVLTPDCSTRNESTTQKCVVLFCCCQTSEGLAHPGECRAWTARGSP

SEQ ID NO: 2161 - protein, 550 aa, Unknown
  Description of Unknown: Integrase B2162 sequence
  PTHR30461:SF3,SM00857,G3DSA:1.10.10.2600,IPR036162,PF13408, PS51737,G3DSA:3.40.50.1390,IPR025827,IPR006119,IPR038109, PF07508,IPR011109,SSF53041,PTHR30461,PS51736, cd00338,PF00239
MSKRESKSGQKCLAAEQIGVIYARYSSHNQKEESIEQQIAECSDFAAKNGIRIVGIYADKAVSGRSDRRPNFQRMMRDAEKRHFQIVVAYKSNRIARNMLNALQYEARLDLFGIKTLYAKEEFGNTAAGRFALRTMMNVNQFYSENMGEDIKRGMVDNANECKVNGMLPLGYVKSKEGKYAVAPGEAAVVREIFDSFLKDVPVAEIARSLNQRGIRTKLGREWNKNSFHIMLKNDNYIGVYRHSGVVVEDGIPPILEREVFAAVQEKLANKKKTAGRRSANGEYLLTGKLFCGYCGSYMIGVSGTGENGTVHNYYQCQKRHAESRCEKKNVRRDFIEKLIARLTQDYILQDETIEWIADSTMSFQAVARRKSGITQLERDLADNRKIAKNIMAAIEQGIITETTKARLLEVEGTIHDLERSLSIAKAASQPIERERVVFSLEQMREGNVGSKEHQKKLIDTFVKSVTLWDDRIQIDYYHTPGKHKFSYSLEELTSKVENESNAADVRAESLQVHHKRVIRTRYGDGEIRITAFGFVFLCPLPCSKKEADV

SEQ ID NO: 2162 - protein, 550 aa, Unknown
  Description of Unknown: Integrase B2163 sequence
  PTHR30461:SF3,SM00857,G3DSA:1.10.10.2600,IPR036162,PF13408, IPR025827,PS51737,G3DSA:3.40.50.1390,IPR006119,IPR038109, PF07508,IPR011109,SSF53041,PF00239,PTHR30461, PS51736,Coil,cd00338
MIVVAYARYSSEAQRDGYSIEAQVRAITEWAEREGHTVLRVYIDEARSATTDNRERFQDMISDAAKGEFQAVVVHKLDRFARNRYDSAVYRHALKQHGVRVISVLEPLDDSPESAMMEAVLEGMAEYYSRNLSREVRKGKKEAALLGRFVGGPVPFGYSVTKDHRYAINEEEALVIRQMFSMLENGSSFADVARWATSQGYRTRTGRYFTEAGISCLVSNTLLIGRYTYAAKSRVGQEPIVFDDAIPPIIDAATFWRVNEMKKARERGPRPRKKEEEYLLTGYLFCELCGRHVYGFKSKSSFTTKDGEKHEYEKRAYRCSTKGGVNPGRRLDPGYVRNACALKNLPKEALESFVFSAIDDVLFGGLTADWIVAELTVRKKTEKRPDQAVLSSYKKELSKIKTQKERLLDLYLSGGIDKGVYSARAGDFAAREQFLAAEVSRLSTPATADVDANKIKAALDAFRKSANADSPEYKRRLLSAFVEKITVSNERLVIYFKFPVPGAGDKIEKDYGDYFVRKPNNNLSFICLRTEFSMTAVLAGNWREYVVSLV

SEQ ID NO: 2163 - protein, 550 aa, Unknown
  Description of Unknown: Integrase B2164 sequence
  PTHR30461:SF3,cd00338,SM00857,G3DSA:1.10.10.2600,IPR036162, PS51737,G3DSA:3.40.50.1390,IPR006119,IPR038109,PF07508, IPR011109,SSF53041,PTHR30461,Coil,PF00239
MYYQPKIDFTPDEVIDYLRKSRSDDPTLTVEEVLAKHEAILDEWSEKNLGGIVPEENKYREVVSGETLKERPEINKVIKRIESPKIKAIQIVEPQRLTRGDLEDIGRIMKLLKHTNTLVITPNRIYNLHDDYDWDALERELKRGNEFLEYTKKILNRGRLLSVSQGNYIGNTPPYGYRKEFVMEGKKKCPILVPNKDEAEVVRMMFDLYVNEDMGCWNICKKFDEMGIKPPKGDHWSANAMTKMLENIHYIGKVKWNHRKTITIVEDGEFVQTRPVAKIGEYLIYDGKHKAIVSEELFNAAQAKKGKNARLKPNTKIRNPLAGLLWCKCGRAMSLRTYKAHNAQPRLLCDGQTYCKTGSCTYDEMIVRVEEILKNCISDFEVRLKSDEGDSAKLHARLIKNLEKKKKELEAKELAQWETQSHPDPAQRMPQHIFQQLNEKLLKEKEEVQQALCKAYESMPEPVDYEEKIKMFQDALDALQNPDASAAEKNKLLKACIERIEYHRDKPERIKSQQVRFYDPVLKKTRNRSPLKTGGNWTTPNIELDVKLKV

SEQ ID NO: 2164 - protein, 550 aa, Unknown
  Description of Unknown: Integrase B2165 sequence
  PTHR30461:SF3,SM00857,G3DSA:1.10.10.2600,IPR036162,PF13408, IPR025827,G3DSA:3.40.50.1390,PS51737,IPR006119,IPR038109, PF07508,SSF53041,IPR011109,PF00239, PTHR30461,PS51736,Coil,cd00338
MKTKKLPIDLSMLTVEEQQQFVDDPTTLVRGNINVTLYLRFSSDRQSEQSIEGQLRDCIAYCKRKEYRITAIYIDRATTARKDIEKRVQFQQMISDSKHGLWELVIVWKLDRFARNREDSAVFKMRLRKNGVRVESATEAISNTPEGIILESVLEGIAEYYSADLSQKITRGMRESALKGHSIGGHVPLGYKIENHRLVVNPATAPIVQEAFERYANGESIADICRLFNLKGYRTAKGVEFNRSSFKSLFRNTRYIGTYTYKEIKMEDTIPAIIDKELFEMVQKRLSKVAEAPARGKAKVDYLLSGKLFCGHCGASMNGESGTSKTGTVHNYYSCYGRKRKQGCDKRPLRKEWIETIVAQDALNLLTDDTIEELADMALFQSEQDMKETTRIPALTAQQKEIEQSISNITKAIEKGVASDTLLNRLTDLEKEKKNILKQITEENKLFYQIDRKQITAWLYQFKNGDISDDSFKRQLIDLLVNSVTVWDEPDGYRITTAYNLTTCKTKTFRVDSSGQEFGLEGLSSTIGRISEPYIVWGTVFVQTKRHSLS

SEQ ID NO: 2165 - protein, 550 aa, Unknown
  Description of Unknown: Integrase B2166 sequence
  PTHR30461:SF3,SM00857,G3DSA:1.10.10.2600,IPR036162,PS51737, G3DSA:3.40.50.1390,IPR006119,IPR038109,PF07508,IPR011109, SSF53041,PTHR30461,Coil,cd00338,PF00239
MYRPPELTLNPDEVLVYLRKSRSDDPLMSVEEVLAKHETILDEWSEKNLGGLVPEENKYREVVSGETLKERPEINTVLRRIESPKIKAVAAVEPQRLTRGDLEDIGRLMKLFKHTKTLIITPTRTYDLQDDYDWDAFERELKRGNEFLEYTKKILNRGRLLSVSQGNYIGSIPPYGYKKVFVTDGKRKCPTLEVVEDQAEIVRTIFDLFVNQNYGSCKIRNYLNDMHVPAPKGEKWTENGMRDMLTNVHYIGKVKWNWRKNITTVEESEIVTHRPKAQPGEYLIFDGKHEAIISEALFSAAQEKIGHTGRVKSEHEMVNPFAGILFCKCGKALTMKVQKGADGNMSSRFYCANLRNCGTSSCMCNEIVEKVSDTLKQAIQDFTVMLDSGDKESIKRHTARIKILETKLQDLEKREMALWEAQADPDLSVRMPNHIFLALNDKIVKEREQTTLMLEQTYASMPNPKLYRENIQRFSDAVEALNSPEVPAAIKNKLLKACIERIEYSKPKAERIKSSSKRIWVNGHRIRTNPLPTGGNWTSPEISLDIKLRV

SEQ ID NO: 2166 - protein, 550 aa, Unknown
  Description of Unknown: Integrase B2167 sequence
  PTHR30461:SF3,cd00338,SM00857,G3DSA:1.10.10.2600,IPR036162, PS51737,G3DSA:3.40.50.1390,IPR006119,IPR038109,PF07508, IPR011109,SSF53041,PTHR30461,Coil, PF00239
MYYQPKIDFKPEEVIDYLRKSRSDDPLLTVEEVLSKHEAMLDEWAEKHLGAVVPEENKYREVVSGETIAERPEINRVLRLIESPKYKAVAVVEPQRLTRGDLEDIGRLMKLLKHTNTLVITPQRIYDLRDEYDWDAFERELKRGNDYLEYTKKILNRGRLLSVSQGNYVGNTPPYGYDKTFVTEGKRKCPILVPNKAEADVVRMMFDLYVNKDMGCTNICKKFDEMGIKPPKGDYWSPAAMTKMLQNIHYIGKVKWNHRKTLTIVEEGEFKKTRPVAQVGEFLIYDGKHEAIIPEELFNAAQAKKGKNTRQKPNTKVRNPFAGLIWCKCGRAMSLRTYKNRDAAPRLLCDGQTHCKTGSCLYSEMEERVISILTDCINDFVIRLKNDEGDSAKLHARLIKNLEAKQKELDEKELAQWEAQADPDPAKRMPPHIFQQLNEKLLKEKEEVRQALCKAYESMPEPVNYEEKITQFSEALNALKDPNIDAATKNRLLKACIERIEYHRDTPQRIKSQQVRYYDPKQKRTRYKSPLSTGGNWTSPEIVLDVKLKA

SEQ ID NO: 2167 - protein, 550 aa, Unknown
  Description of Unknown: Integrase B2168 sequence
  PTHR30461:SF3,SM00857,G3DSA:1.10.10.2600,IPR036162,PF13408, PS51737,G3DSA:3.40.50.1390,IPR025827,IPR006119,IPR038109, PF07508,IPR011109,SSF53041,PTHR30461,Coil, cd00338,PF00239
MLENLIADLRRVYCLYRVSTLGQVEKDDIPMQKQYCREFVGQHPGWEIIKEFSEKGVSGFKVSAKDRDAIQEIQRDALQNKFDILLVFMFDRLGRREDETPFVVEWFVKNGIEVWSAKEGQQRFDTHVDKLLNYIRYWQASGESIKTSVRTKTRMEQLTQEGHFTGGGVPFGYRLEHKGRTNKRNQDVGDLVIDPDEAEIVKLIFQKYLCEGYGAQRLCRYLAEQGITNRKGRNIPTTSINRIIKNPIYTGVIRNGDSQSEVLPELQIIDAETYERAQQMMEKRVTHHGDVPLNTKGRSLLVGNVYCGHCGGRLTLTTSGRKRVRKDGTIVRETRARYQCHYNVRHPGECDGQSGYGVDKLDKLVDQIIRIQLGRIQNAPSQELIAKQQAQEVELVKSRLNLLNEQYRQKQREYQDLRAETIKVIQGTSRLNADLLNSLVSETAEQIKQLAAQIQSTTAELEETVQTASQVLREYDQLISWGEMYDHCTFEAKKMIVAKFVKAIRVRRDYEIDIEFNVSFEEFQALYLEGEPEEAKRPGTDTVLAIETKK

SEQ ID NO: 2168 - protein, 550 aa, Unknown
  Description of Unknown: Integrase B2169 sequence
  PTHR30461:SF3,SM00857,G3DSA:1.10.10.2600,IPR036162,PS51737, G3DSA:3.40.50.1390,IPR006119,IPR038109,PF07508,IPR011109, SSF53041,PTHR30461,Coil,mobidb-lite,cd00338, PF00239
MYYQPKIDFKPEEVIDYLRKSRSDDPLLTVEEVLSKHEAMLDEWAEKHLGAVVPEENKYREVVSGETIAERPEINRVLRLIESPKYKAVAVVEPQRLTRGDLEDIGRLMKLLKHTNTLVITPQRIYDLRDEYDWDAFERELKRGNDYLEYTKKILNRGRLLSVSQGNYVGNTPPYGYDKTFVTEGKRKCPILVPNKAEADVVRMMFDLYVNKDMGCTNICKKFDEMGIKPPKGDYWSPAAMTKMLQNIHYIGKVKWNHRKTLTIVEEGEFKKTRPVAQVGEFLIYDGKHEAIIPEELFNAAQAKKGKNTRQKPNTKVRNPFAGLIWCRCGRAMSLRTYKNRDAAPRLLCDGQTHCKTGSCLYSEMEERVISILTDCIKDFEIRLKNDEGDSAKLHARLIKNLEAKQKELDEKELAQWEAQADPDPAKRMPPHIFQQLNEKLLKEKEEVRQALCKAYESMPEPVNYEEKITQFSEALNALKDPNIDAATKNRLLKACIERIEYHRDTPQRIKSQQVRYYDQKQKRTRYKSPLSTGGNWTSPEIVLDVKLKA

SEQ ID NO: 2169 - protein, 550 aa, Unknown
  Description of Unknown: Integrase B2170 sequence
  PTHR30461:SF3,cd00338,SM00857,G3DSA:1.10.10.2600,IPR036162, PF13408,PS51737,IPR025827,G3DSA:3.40.50.1390,IPR006119, IPR038109,PF07508,IPR011109,SSF53041,PTHR30461, Coil,PF00239
MKKFKFPIDLSMLTEEEINQFQEDPSTLLQGDTDVCLYLRFSSERQKEQSIEGQLRDCIAYCKRKNYRIVAIYVDRATTARKDVEKRVHFQEMITASVHQTWKLVIVWKLDRFARNREDSAVFKMRLRKNGVKVESATEGISKNPEGIILEAVLEGIAEYYSADLSQKITRGMRESALKCHSIGGHVPLGYKIEDHKLVINPDTAHIVQEAFELYANGETVADICRMFNAKGYRTAKGAEFNRNSFKSMFRNRRYIGVYRYKDFEKEGGVPPIIDKDLFETVQKRLSANAEAPARGKAKVDYLLAGKLFCGHCGGSMNGESGTSKTGAVHNYYACYTRKRQHSCDKKPLRKEWIEQIVAQDAMELLTDDAIQEMADMAISQTEKDLRENTRIPELSERMKETESGIANITKAVEKGIASDALMNRLVELEKEKKNLLRLIAEEEKYVCKIDRDQIVYWLTKFKDGNIEDENFKRIIIDLMVNSVTVWDEPDGFRITTAYNLTSCKNKTFRISSSSDQGFGFEGLESTRWTLHEHLLFQRRLCRKGVAVMS

SEQ ID NO: 2170 - protein, 550 aa, Unknown
  Description of Unknown: Integrase B2171 sequence
  PTHR30461:SF3,SM00857,G3DSA:1.10.10.2600,IPR036162,PF13408, PS51737,G3DSA:3.40.50.1390,IPR025827,IPR006119,IPR038109, PF07508,IPR011109,SSF53041,PTHR30461,Coil, PS51736,cd00338,PF00239
MKKFPIDLSCLTEEEISQFQEDPYTLYNGDQDVALYLRYSSTGQSDQSIEGQLRDCRTFCKANHYRIVAIYVDRATTARKDVEKRVHLMEMVADSAKQNWEYVIVWKLDRFARNRNDSAIMKMRLRKNGVKVLSATEHLTDSPESIILESVLEGMAEFFSAELSQKVTRGMRESALKCHSVGGHIPLGYKVENHKLVVDPDTAHIVQEAFSLYANGESVADICRKFNSAGYKTAKNTEFNRSSFKAMFRNTRYIGTYTYKDIVIENGIPAIIDKELFETVQRRLSKTATAPARGKAKVDYLLSGKLFCGHCGASMNGESGAGRHGKVYHYYSCYTKKRKLGCDKRPLKKDYIEGIVARDALNLLTDQLIDEIADMAIRQSEQDLINDTHIPQLTAQLSEVEKSITNITAAIEKGIASETLMNRLVQFEHEKKTLNKEIKAEEKFVYRIDRDQIVFWLSQFKYGNIEDEDFRRRLIDLLVNSVTVWDEPDGYKITTAYNLTSCKTKTFRVEKNPAAEEATGFDFGESECTSNSKSPTRPPVIFYTARWSSG

SEQ ID NO: 2171 - protein, 550 aa, Unknown
  Description of Unknown: Integrase B2172 sequence
  PTHR30461:SF3,SM00857,G3DSA:1.10.10.2600,IPR036162,PS51737, G3DSA:3.40.50.1390,IPR006119,IPR038109,PF07508,SSF53041, IPR011109,PF00239,PTHR30461,mobidb-lite,Coil, cd00338
MYYQPKIDFKPEEVIDYLRKSRSDDPLLTVEEVLSKHEAMLDEWAEKHLGAVVPEENKYREVVSGETIAERPEINRVLRLIESPRYKAVAVVEPQRLTRGDLEDIGRLMKLLKHTNTLVITPQRIYDLRDEYDWDAFERELKRGNDYLEYTKKILNRGRLLSVSQGNYVGNTAPYGYDKTFVTEGKRKCPILVPNKEEADVVRMMFDLYVNKDMGCTNICKKFDAMGIKPPKGEYWSANAVTKMLQNIHYIGKVKWNHRKTMTIVEEGEFKKTRPVAKVGEYLIYDGKHEAIIPEELFNAAQAKKGKNTRQKPNTKIRNPFAGLLWCKCGRAMSLRTYKNRDAAPRLLCDGQTHCRTGSCLYTEIEDRVKVILSDCIKDFEVRLKNNEGDSVKLHMRLIKNLETKQKELEEKELAQWEAQADPDPAKRMPQHIFQQLNEKLLKEKEDVRQALCKAYESMPEPVNYEEKIAQFTEALNALNSHDVDAETKNRLLKACIDRIEYHREAPQRIRSQQVRYYDKEQKRTRHKSPLNTGGNWTSPEIVLDVILKA

SEQ ID NO: 2172 - protein, 550 aa, Unknown
  Description of Unknown: Integrase B2173 sequence
  PTHR30461:SF3,SM00857,G3DSA:1.10.10.2600,IPR036162,PF13408, PS51737,G3DSA:3.40.50.1390,IPR025827,IPR006119,IPR038109, PF07508,IPR011109,SSF53041,PF00239,PTHR30461, Coil,cd00338
MKKFKFPIDLSMLTEEEINQFREDPSTLFQGDTDICLYLRFSSERQKEQSIEGQLRDCIAYCKRKNYRIVAIYVDRATTARKDIEKRVHFQEMITASVHQTWKLVIVWKLDRFARNREDSAVFKMRLRKNGVKVESATEGISKNPEGIILEAVLEGIAEYYSADLSQKITRGMRESALKCHSIGGHVPLGYKIEDHKLVINPDTAHIVQEAFELYANGETVADICRMFNAKGYRTAKGAEFNRNSFKSMFRNRRYIGVYRYKDFEKEGGVPPIIDKDLFETVQKRLSANAEAPARGKAKVDYLLAGKLFCGHCGGSMNGESGTSKTGAVHNYYACYTRKRQHSCDKKPLRKEWIEQIVAQDAMELLTDDAIQEMADMAISQTEKDLRENTRIPELSERMKETESGIANITKAVEKGIASDALMSRLVELEKEKKNLLRLIAEEEKYVCKIDRDQIVYWLTKFKDGNIEDENFKRIIIDLMVNSVTVWDEPDGFRITTAYNLTSCKNKTFRIPSSSDKGFGFEGLESTTREPYEPTRFVWLSFVSGLFCAT

SEQ ID NO: 2173 - protein, 550 aa, Unknown
  Description of Unknown: Integrase B2174 sequence
  PTHR30461:SF3,SM00857,G3DSA:1.10.10.2600,IPR036162,PS51737, G3DSA:3.40.50.1390,IPR006119,IPR038109,PF07508,SSF53041, IPR011109,PF00239,PTHR30461,PS51736,Coil, cd00338
MYYQPKINFSPNEVIAYLRKSRSDDPLLTVEEVLSKHETMLDEWAEKNLGAAVPEENKFREVVSGETIAERPEINRVLRLIESPKYKAVAVVEPQRLTRGDLEDIGRIMKLLKHTSTLVITPQRIYDLRDEYDWDTFERELKRGNDYLEYTKKILNRGRLLSVSQGNYIGNVPPYGYSKTFVTEGKRRYPILVPNKEEADVVRMMFDLYVNKDMGCQNICNRFDEMGIKPPKGKHWSPSAMAKMLENIHYIGKVKWNYRKTLTIVEEGEFKKTRPIAKAGEYLIYDGKHEAIVSEELFNAAQAKKGKHTRQKPNTKIRNPFAGLLWCKCGRAMSLRAYKSNISAPRLLCDGQTHCKTGSCLYSEMNERVCSILTNCIHDFEIRLQNNEGDSVKQHMRLIKNLEAKQKELEEKELAQWEAQADPDPAKRMPQHIFQQLNEKLLKEKEEVRQTLCKAYESMPEPVNYEEKIAQFTEALNALKNPKVDAATKNRLLKACIDRIEYYRDAPQRIRSQKVIYYDPEQKRTRCKSPLNVGGNWTAPEIILDVKLKV

SEQ ID NO: 2174 - protein, 550 aa, Unknown
  Description of Unknown: Integrase B2175 sequence
  PTHR30461:SF3,IPR036162,PS51737,IPR011109,PTHR30461, PF00239,G3DSA:1.10.10.2600,IPR006119,PF14287,SSF53041, IPR025378,SM00857,IPR025827,cd03770,IPR038109, PS51736,PF13408,G3DSA:3.40.50.1390,PF07508
MSRKKQVNQKITALYCRISLEDGGDNESMSISNQKLMLRDFAEKNGMFQYEYYVDDGYTGRNFNRPSFQRMIADIEAGKIGCVITKDLSRLGRNYIEAGSYIEIFFPKHNVRYIAITDGVDSLTRQEMDITPFKNILNDMYSRDISKKVLAGRMTRSRQGKFCGGQPPLGLMRDPEDKGHLIRDPETAPVIRKIYDMALDGWGCMRIAKQLMDDKVPITRVKSNTECDVNYYSWGSARISHILRNPFYKGAHLVCRTHQKGIRSNTYDIIPREDWEIIEDCHEAIISPEEWEQVQEIIDRRPTIMKGNSCPFYNLFHGIIYCATCGKSMQVRYEKVGRTGKNRFTGEQREPIDKAYYICQTYNRLGKNACTSHKIEARDLYNLVLKDIQELAKTALKDADAFYQRLSSRMERRYLLDASQTQKECQRLESRNCEIDEMFLSLYTDKAKGILTEQRFMKLTATLEQEQEANQKRLRDLLLMMRHSDEQENEVRTFIKEIRRYAAIEELDEAVLNRLISKILVGEVKKIDGQKVQEVRIVYNFVGEIPEITA

SEQ ID NO: 2175 - protein, 550 aa, Unknown
  Description of Unknown: Integrase B2176 sequence
  PTHR30461:SF3,cd00338,SM00857,G3DSA:1.10.10.2600,IPR036162, PF13408,IPR025827,PS51737,G3DSA:3.40.50.1390,IPR006119, IPR038109,PF07508,IPR011109,SSF53041,PTHR30461, Coil,PF00239
MKKFKFPIDLSMLTEEEINQFREDPSTLFQGEIDVCLYLRFSSERQKEQSIEGQLRDCIAHCKRKSYRIVAIFVDRATTARKDVEKRVHFQEMITASVHQTWKLVIVWKLDRFARNREDSAVFKMRLRKNGVKVESATEGISKNPEGIILEAVLEGIAEYYSADLSQKITRGMRESALKCHSIGGHVPLGYKIEDHRLVINPNTAHIVQEAFELYANGETVADICRMFNTKGYRTAKGAEFNRNSFKSMFRNKRYIGVYTYKEIEKEGGVPAIIDKELFETVQRRLSANAEAPARGKAKVDYLLSGKLFCGHCGASMNGESGAGRHGKVYHYYSCYTKKRKLGCDKRPLKKDYIEGIVARDALNLLTDQLIDEIADMAIRQSEQDLINDTHIPQLTAQLSEVEKSITNITAAIEKGIASETLMNRLVQLEHEKKTLNKEIKAEEKFVYRIDRDQIVFWLSQFKYGNIEDEDFRRRLIDLLVNSVTVWDEPDGYKITTAYNLTSCKTKTFRVEKNPAAEEATGFDFGGSECTKSPRNRLISRTFAFHKFRF

SEQ ID NO: 2176 - protein, 550 aa, Unknown
  Description of Unknown: Integrase B2177 sequence
  PTHR30461:SF3,cd00338,SM00857,G3DSA:1.10.10.2600,IPR036162, PF13408,PS51737,IPR025827,G3DSA:3.40.50.1390,IPR006119, IPR038109,PF07508,IPR011109,SSF53041,PTHR30461, PS51736,Coil,PF00239
MARKKNIAAGLDAVIYARYSSHNQREVSIEQQIAECTKHAAALGLRIVGTYEDRAISGKTDNRPRFQQMMRDAEKGKFQAVVAWKSNRIGRNMLQAMVNEAKLDDYGVKVFYAEEDFDDTAAGRFALRNMMNVNQFYSENMAEDITRGLYDNASKCMANGRHPLGYKRGEDGRVVLDEANAAVVREIFTRVAAGDLFVDIARDLNAQGIKTSKGANWNKGSFQSICQNERYRGIYIYGDVRVADGIPRIVSDDLWYRVQEAMRMKKNPVGTRHRVGAEDYLLTGKLRCGHCGSYMTGVSGTSRNGELHYYYTCQKRRTEHACDKKNIRRDVIEPAVAQAIKMYCLTDDVIEWMADRTVEYWEKHDNDLQIEALEQQLEENKKATSNMLKAIEMGIITEATRTRMVELETEQSRLSVQLNAAKEDVVKIDREQIISYLELLQQGDIHDRDFQMELFKNFLVAVYVYDDNRMKLVFSCMGDQNSVEIPLETGEDPPDGGLSPDAKMFVLTPDSSTRRKSTARKRVVLFCCCQTSEGLAHPGERRAWTARGSP

SEQ ID NO: 2177 - protein, 550 aa, Unknown
  Description of Unknown: Integrase B2178 sequence
  PTHR30461:SF3,IPR036162,PS51737,IPR011109,PTHR30461, PF00239,G3DSA:1.10.10.2600,IPR006119,PF14287,SSF53041, IPR025378,SM00857,IPR025827,cd03770,IPR038109, PS51736,PF13408,G3DSA:3.40.50.1390,PF07508
MSRKKQVYEKITALYCRISLDDGGDNESMSISNQKLMLRDFAEKHGMFQYEYYVDEGYTGRNFNRPSFQRMIADIEAGKIGCVITKDLSRLGRNYIEAGSYIEIFFPKHNVRYIAVTDGVDSLTRQEMDITPFKNILNDMYSRDISKKVLAGRMTRSRQGKFCGGQPPLGLMRDPEDKGHLILDPETAPVIRKIYDMALDGWGCMRIAKQLMDDKIPITRVKSNTECDVNYYSWGSARISHILRNPFYKGAHLVCRTHQKGIRSNTYDIIPREEWEVIEGCHEAIVTPEEWEQVQEIIDRRPTIMKGNACPFYNLFHGLVYCATCGKSMQVRYEKVGRTGKNRFTGEMREPIDRAYYICQTYNRLGKNACTSHKIEARDLYNLVLKDIQELAEQAMKDADAFYQRLSSRMECRYLVDASQTEKERKRLEVRNQEIDGMFLSLYTDKAKGILTEQRFMKLTAALEQEQEANQKRLHDLAVMQSRADAQESEVRTFIKEIRRYAAIEELDESVLNRLISKILIGEVKKVDGQKVQEVRIVYNFVGEIPEIAA

SEQ ID NO: 2178 - protein, 550 aa, Unknown
  Description of Unknown: Integrase B2179 sequence
  PTHR30461:SF3,IPR036162,PS51737,IPR011109,PTHR30461, PS00397,PF00239,G3DSA:1.10.10.2600,IPR006119,SSF53041, SM00857,IPR025827,IPR038109,PS51736,cd03768, IPR006118,PF13408,G3DSA:3.40.50.1390,PF07508,Coil
MKIAIYCRVSTHHQIDKESLPFQEQDLKNYCECVLGSNNYVVFKDPGYSGKNTERPDFKNMFERIRKNEFTHLLVWKIDRISRNLLDFCSMYNELKQYNCTFISKNEQFDTSSAMGEAMLKIILVFAELERNLTSERVSAIMINRAQEGRWNGANVPLGYYWDASSAFPLIDNAESEIIKSIYNIYEKEQSANRVLDYLVENNIKTKRGGNWTTKTICDVIRNPFYMGTYRYNYRESARGKLKDSSEWIIKENNHQAIISKKQWQKCNDIMDENARTNHSKNRRYNQIHIFRGLLRCNVCGGNMYGAKDRPRKDGFRPSRYRCSNSHKETCNNKIVTDVTLGPFVINYLINFINLINNSKQINSIDDIKSFLLNGIDFKDIDLTEDTLFNIYVSLNINNKLIPLPDTESKDMKVNSEEIKLTREINKFKKALKRLDDLYYFDEKGISEKDYLIKKKDFENKLNDANNKLKSISENEPTNFYDFDFLSSASEFLLQNNIKKHIDFKMFYMTIDNEKIYNFVKSLVKEIFINEDGSIYSITFKNGLVHYFIY

SEQ ID NO: 2179 - protein, 550 aa, Unknown
  Description of Unknown: Integrase B2180 sequence
  cd00338,SM00857,G3DSA:1.10.10.2600,IPR036162,PS51736, PS51737,G3DSA:3.40.50.1390,PF13408,IPR025827,IPR006119, IPR038109,PF07508,SSF53041,IPR011109,PTHR30461, mobidb-lite,Coil,PF00239
MTQSRPEPKVIVIPAKEESPQDQEKKKNLRVAAYCRVSTKKDEQLNSYENQKAYYTEKIMANPDWTMADIFADEGITGTSACKRKDFLRMIRQCRQGKIDMILAKSVSRFARNTVDTLNYTRELRGMGIPVIFEEQNINSIYPESEFLITIHGAFAQSESEGISSRVKWGKHQAMRTGKANIQYKTLLGYEKNPDGEMVVNAEQAETVRRIFEMYLSGQTLRSIKEALESGGFKNSAGTMEWTTSNLRTILSDEKYCGDVLLQKTFIQDCISKKVIKNTGQLPMYLIQNHHEAIIPRDRFDAVQVELARRKTLTSSTKRSAPTGMSRYSGKYALSGLLFCGECGTAYRRVVWTQHGEKRAVWRCSSRLDYGKKYCKESPTLDESPLQQAVLAAINASMSGCKVLADQLVDAMEQELAPIPGESMSLGDIDRAVAELGKQFDTLLAEAANGDADEYAERFRTISTTMEELKRRKAAILGIRQEQEQISRRIHAAASAMTAATVGITEWDDCVVYQLLEKVTVLTGNRIKVTFRNGVEIEQTVDQPKRRKFI

SEQ ID NO: 2180 - protein, 550 aa, Unknown
  Description of Unknown: Integrase B2181 sequence
  PTHR30461:SF3,SM00857,G3DSA:1.10.10.2600,IPR036162,PS51737, G3DSA:3.40.50.1390,IPR006119,IPR038109,PF07508,SSF53041, IPR011109,PF00239,PTHR30461,Coil,cd00338
MYYQPKIDFKPEEVIDYLRKSRSDDPLLTVEEVLSKHEAMLDEWAEKHLGAVVPEENKYREVVSGETIAERPEINRVLRLIESPKYKAVAVVEPQRLTRGDLEDIGRLMKLLKHTNTLVITPQRVYDLRDEYDWDAFERELKRGNDYLEYTKKILNRGRLLSVSQGNYVGNTPPYGYDKTFVTEGKRKCPILVPNKAEADVVRMMFDLYVNKDMGCTNICKKFDEMGIKPPKGDYWSPAAMTKMLQNIHYIGKVKWNHRKTLTIVEEGEFKKTRPVAQVGEFLIYDGKHEAIIPEELFNAAQAKKGKNTRQKPNTKVRNPFAGLIWCRCGRAMSLRTYKNRDAAPRLLCDGQTHCKTGSCLYSEMEERVISILTDCIKDFEIRLKNDEGDSAKLHARLIKNLEAKQKELDEKELAQWEAQADPDPAKRMPPHIFQQLNEKLLKEKEEVRQALCKAYESMPEPVNYEEKITQFSEALNALKDPNIDAATKNRLLKACIERIEYHRDTPQRIKSQQVRYYDQKQKRTRYKSPLCTGGNWTSPEIVLDVKLKA

SEQ ID NO: 2181 - protein, 550 aa, Unknown
  Description of Unknown: Integrase B2182 sequence
  PTHR30461:SF3,cd00338,SM00857,G3DSA:1.10.10.2600,IPR036162, PS51737,G3DSA:3.40.50.1390,IPR006119,IPR038109,PF07508, IPR011109,SSF53041,PTHR30461,Coil, PF00239
MYYQPKIDFKPEEVIDYLRKSRSDDPLLTVEEVLSKHEAMLDEWAEKHLGAVVPEENKYREVVSGETIAERPEINRVLRLIESPKYKAVAVVEPQRLTRGDLEDIGRLMKLLKHTNTLVITPQRIYDLRDEYDWDAFERELKRGNDYLEYTKKILNRGRLLSVSQGNYVGNTPPYGYDKTFVTEGKRKCPILVPNKAEADVVRMMFDLYVNKDMGCTNICKKFDEMGIKPPKGDYWSPAAMTKMLQNIHYIGKVKWNHRKTLTIVEEGEFKKTRPVAQVGEFLIYDGKHEAIIPEELFNAAQAKKGKNTRQKPNTKVRNPFAGLIWCKCGRAMSLRTYKNRDAAPRLLCDGQTHCKTGSCLYSEMEERVISILTDCIKDFEIRLKNDEGDSAKLHARLIKNLEAKQKELDEKELAQWEAQADPDPAKRMPPHIFQQLNEKLLKEKEEVRQALCKAYESMPEPVNYEEKITQFSEALNALKDPNIDAATKNRLLKACIERIEYHRDTPQRIKSQQVRYYDPKQKRTRYKSPLSTGGNWTSPEIVLDVKLKA

SEQ ID NO: 2182 - protein, 550 aa, Unknown
  Description of Unknown: Integrase B2183 sequence
  PTHR30461:SF3,SM00857,G3DSA:1.10.10.2600,IPR036162,PS51737, G3DSA:3.40.50.1390,IPR006119,IPR038109,PF07508,IPR011109, SSF53041,PF00239,PTHR30461,mobidb-lite,Coil, cd00338
MYYQPKIDFKPEEVIDYLRKSRSDDPLLTVEEVLSKHEAMLDEWAEKNLGGVVPEENKYREVVSGETIAERPEINRVLRLIESPRYKAVAVVEPQRLTRGDLEDIGRLMKLLKHTNTLVATPQRIYDLRDEYDWDAFERELKRGNDYLEYTKKILSRGRLLSVSQGNYVGNTPPYGYDKTFVTEGKRKCPILVPNKAEADVVRIMFDLYVNKDMGCWNICKKFDEMGIKPPKGDHWSANAMTKMLQNIHYIGKVKWNHRKTLTVVEEGEFKKTRPVAKVGEYMIYDGKHEAIIDEALFNAAQAKKGRNTRQKPTTKIRNPLAGLLYCKCGRAMSLRTYKAHNTEPRLLCDGQTYCKTGSCTYAEMEERVCNILRDCIHDFEIRLKNNEGDSIKLHARLIKNLEAKQKELDEKELAQWEAQADPDPAKRMPPHIFQQLNEKLLREKEEVRQALCKAYESMPEPVDYEEKIEQFTTALNAMQDAKMDAATKNRLLKDCFERIEYHRDAPQRIKSQQVRYYDKEQKRTRHKSPLNTGGNWTSPEITLDVKLRV

SEQ ID NO: 2183 - protein, 549 aa, Unknown
  Description of Unknown: Integrase B2184 sequence
  SM00857,G3DSA:1.10.10.2600,IPR036162,PF13408,IPR025827, PS51737,G3DSA:3.40.50.1390,IPR006119,IPR038109,PF07508, SSF53041,IPR011109,PTHR30461,Coil,cd00338, PF00239
MAYRKITDIRDTIGMRAVFYARVSTAEEEQLNAIELQIEENRGCIKEHGWKLVGEYIDRSKSGTMVKGRDDYQRLYEDLYEDLFDIVVIKDQERLQRNTLDWYLFINRVVQTGKLLFMYMDGKFYSPDDALITGVRAIIAEEFSRNLSKKLHNYHDHRIEKARQGQEIALQGSGNVYGWDKKDGKYYINPEQAKVRRLMCEGIMARKGSTLIAKELNDAGYRNTVGKPWKPMDIPKFVYDCKNVGTMIINKERHDFESKQTIKLPKEEWVYVENALPPIVTQEEWDLICKIHEERVIATGSDRRGKKTSGYSFSGKLVCGICGAPYWRKQRVSKDEYWVCSTKQTKGRRTRKRDSTMGKAGEINPLGCDNENISYNSLMEIMGVVSERLQANTDTIKHDMINWLTKLRKQLLEANGGHTEADLQRELSRKSKLLDAYLDGILNKQEYQKKAEELDERIIQLKAETEKNKANSGDIEEIDKVLANIDEEVSRYVDGNEKLKVEYLLEHLEQVQIFPDKVIVIVPILSEGIVVEKDQYVSREKWSRKNYSN

SEQ ID NO: 2184 - protein, 549 aa, Unknown
  Description of Unknown: Integrase B2185 sequence
  PTHR30461:SF3,cd00338,SM00857,G3DSA:1.10.10.2600,IPR036162, PF13408,IPR025827,PS51737,G3DSA:3.40.50.1390,IPR006119, IPR038109,PF07508,IPR011109,SSF53041,PTHR30461, PS51736,Coil,PF00239
MASQKYKKKSDNLIITGVIYARYSSHSQKEESIEQQIEECTAFAVTNGISVVGIYADKAISGRTDRRNEFQRLMRDAEKRKFDVVIAYKSNRISRNMLNALQYESRLDSFGIKTLYAKEEFGNTAAGRFALRTMMNVNQFYSENMAEDIRRGLKDNAAECKVNGSLPYGYKKGEDGKYAIDEPRAAIVREIFSKIVDDVPYADIIRSLNDRGILTKTRKPFNKNSFNRMLRNERYIGIYEHSGVRVVGGVPAIISEEVFYAVQRKLQEGLNSDGAKRKSNSDYLLTGKLYCGECGSPMVGYAGTSRNGTLHYYYTCKSRGNDGCTKHNVRRDFIEQFVVDLTRACLSRADVTDWLVSGYIELKKQAQETSDVPVMEEELSSRKKALDNIMKAIEAGIFNETTSARMQELETEIHDLERSIALGKAMFEEPVDGERMRFYLEKLRNGTPDNQAYRKELLRTMVKAIRLWDDRIEIEYNFTGTDGDGNNYRVVTEFLKGDSGSASGVHTEPPQPHQIRLIVLIREYLKLSTFFFLQKCLRHKAFRQSDTLE

SEQ ID NO: 2185 - protein, 549 aa, Unknown
  Description of Unknown: Integrase B2186 sequence
  PTHR30461:SF3,IPR036162,PS51737,IPR011109,PTHR30461, PF00239,G3DSA:1.10.10.2600,IPR006119,PF14287,SSF53041, IPR025378,SM00857,IPR025827,cd03770,IPR038109, PS51736,PF13408,G3DSA:3.40.50.1390,PF07508,Coil
MNRNKKIVKKVTALYCRISLDDGNANESMSISNQKLLLKDYAEKNGLLPYEYYVDDGYTGRNFNRPSFKRMIADIEAGKVGCVITKDLSRLGRNYIEAGGYIEVFFPKHNVRYIAVTDGVDSLTRQEMDITPFKNILNDMYSRDISKKVLAGRMTRSRQGKFCGGQPPLGLMRDPADRGHLVLDPQTAPTIRKIYDLALNGWGCMRIAKQLMEEKIPITRVKSNTACDVNYYSWGSARISHILRNPFYKGAHLVCRTHQKGIRSGTVDTIPRKDWEVIEDCHEAIVSPEDWEKVQELIDRRPPIMQGNACPFYNLFHGMVYCATCGKSMQARYEKVGRTGKNRFTGKEREPIDKAYYICQTYNRLGKDACTSHKIEARDLYNLVLKDIQELAEMALKDADAFYRRLCSRMERRYLSDASEMEKERERLEKRNQEIDEMFLNLYTDKAKGILSEQRFLKLTAAMEKEQEENQSRIKDLSLLLHRSNEQENDVRSFIREIRRYAAIQELDETVLNRLISRILVGEINKVDGEKVQEVKIIYNFVGEIPAAQ

SEQ ID NO: 2186 - protein, 549 aa, Unknown
  Description of Unknown: Integrase B2187 sequence
  PTHR30461:SF3,IPR036162,PS51737,IPR011109,PTHR30461, PF00239,G3DSA:1.10.10.2600,IPR006119,SSF53041,cd00338, SM00857,IPR025827,IPR038109,PS51736,cd18688, PF13408,G3DSA:3.40.50.1390,PF07508,Coil
MQTIPIDLSALTPEERQQFADNPSVLSSDCEAVCCLYMRYSSDRQTEQSIEGQLRELIAYCKHHSYRVAAIYVDRAISAHASMDKRPAFQQMLADSARSSWKTVLVYKLDRFARNREDSAIARMRLRKNGCNVESAKEGISKNPEGVILEALLEGMAEYYSLELSQKVRRGMSETARKGNSTGGTTPLGYTVVDKRLQIDPMTAHLVEEAFRRYADGDTVAAICDDFNARGYRTTRGTKFNKSSFKNVFRNEKYIGVYKFDDVRADNAVPRIISDELWRAVQSRLKTSEQAPARGKAKVPYLLSGKIFCGHCGAPMVGECGRGKGGKTYNYYSCANRKKAHLCDKKPVPKDWLEDVVAQDALDVLTDEIIEFVAEIAAQQSEEDIQKNTQIPVIRKKISEIENKIRNLTKALECASVAPDAIVERLAELEAQKKGLSTQLSDEERGVIPLTKESVVVYLKAVREKAVPLETQKAMLIEMLVNSVTVYDDEPGFLKFVTAYRLTQIPSKTYRVPTPAVSPCSDIGRVGSPEKARFGVLFRLFQKTKGLLK

SEQ ID NO: 2187 - protein, 549 aa, Unknown
  Description of Unknown: Integrase B2188 sequence
  PTHR30461:SF3,cd00338,SM00857,G3DSA:1.10.10.2600,IPR036162, PF13408,PS51737,IPR025827,G3DSA:3.40.50.1390,IPR006119, IPR038109,PF07508,IPR011109,SSF53041,PTHR30461, PS51736,Coil,PF00239
MYSTVSGPIHPPLAFGYCRKSTTGQREESIEAQQRAIVAYAAAMGYQLVHIYKDHGNSGRSGERPEFQQMLQDAVPAGVQFIIVHKLDRFFRNAERQTLIEAQLRRQGIRVLSASEHFDDTPQGQFMRNITKAINQWYSANLATEVMKGMRENAMGARNTGGPPPLGYAVDKTTGKFVLQPTEAAAVQMIFRMYRQGCGYTEIIDALNAAGHVTRRGRPFGKNSLYDILRNEKYTGTYVWNRLAPADPDGRTNRRNLKPRSEWVCVEGGMPQIITPEEFKEVQAEMNNRKHRSAAYTAKAFYLLSGLVYCGGCGGSMSGEAHRYKSHGKPVEYRYYTCSAKKRLHADGEHARPVPAASLEGAVVDYLQRVIFNPANMDTLCAALLQSMEPDPRHTDLAADLKRQAAEVQLKIDRIYAAIEKGLDPSSAIERINTLQQQRLALLAQATDLDMTDDVAKINIDQLREVWSRIQLKDMEPVQLRAVIREMVHKIIVFDDGPGGFRVRIILNPGHVAPANIPENVETASLSELQDFSTNGGRGLPLPKAAYLV

SEQ ID NO: 2188 - protein, 549 aa, Unknown
  Description of Unknown: Integrase B2189 sequence
  SM00857,G3DSA:1.10.10.2600,IPR036162,PF13408,IPR025827, G3DSA:3.40.50.1390,PS51737,IPR006119,IPR038109,PF07508, SSF53041,IPR011109,PTHR30461,Coil,cd00338, PF00239
MAYRKITDIRDTIGMRAVFYARVSTAEEEQLNAIELQIEENRGCIKDHGWKLVGEYIDRSKSGTMVKGRDDYQRLYEDLYEDLFDIVVIKDQERLQRNTLDWYLFINRVVQTGKLLFMYMDGKFYSPDDALITGVRAIIAEEFSRNLSKKLHNYHDHRIEKARQGQEIALQGSGNVYGWDKKDGKYYINPEQAKVRRLMCEGIMARKGSTLIAKELNDAGYRNTVGKPWKPMDIPKFVYDCKNVGTMIINKERHDFESKQTIKLPKEEWVYVENALPPIVTQEEWDLICKIHEERVIATGSDRRGKKTSGYSFSGKLVCGICGAPYWRKQRVSKDEYWVCSTKQTKGRRTRKRDSTMGKAGEINPLGCDNENISYNSLMEIMGVVSERLQANTDTIKHDMINWLTKLRKQLLEANGGHTEADLQRELSRKSKLLDAYLDGILNKQEYQKKAEELDERIIQLKAETEKNKANSGDIAEIDKVLANIDEEVSRYVDGNEKLKVEYLLEHLEQVQIFPDKVIVIVPILSEGIVVEKTQYVSREKWCWKKHNI

SEQ ID NO: 2189 - protein, 549 aa, Unknown
  Description of Unknown: Integrase B2190 sequence
  PTHR30461:SF3,SM00857,G3DSA:1.10.10.2600,IPR036162,PF13408, PS51737,G3DSA:3.40.50.1390,IPR025827,IPR006119,IPR038109, PF07508,IPR011109,SSF53041,PTHR30461,PS51736, cd00338,PF00239
MAKRSAKKNEYSSAEQIGVIYARYSSHNQKEESIEQQIAECSDFAAKNGIRIVGIYADKAVSGRSDRRPNFQRMMRDAEKRQFQIVVAYKSNRIARNMLNALQYEARLDLLGIKTLYAKEEFGNTAAGRFALRTMMNVNQFYSENMGEDIKRGMVDNANECKVNGMLPLGYVKSKEGKYAIAPDEAAVVREIFDSVLKDVPVAEIARSLNQRGIHTKLGREWNKNSFHIMLKNDNYIGVYRHSGVVVEDGIPPILEKEVFTAVQEKLANKKKTAGRRSANGEYLLTGKLFCGYCGSYMIGVSGTGENGTVHNYYQCQKRHAEGRCEKKNVRRDFIEKLIARLTQDYILQDDTIEWIADSTMSFQAMARRESGVAQLERDLADNRKVAKNIMAAIEQGIITETTKARLLEVEGTIHDLERSLSIAKAASQPIERERVVFSLEQMREGNVGSKEHQKKLIDTFVKSVTLWDDRIQIDYYHTPGKHKFSYSLEELTSKAENESNASDVRTDSLELHHKRVIRTQYGDGEIRITAFGFVFLCPLPSSKKEADV

SEQ ID NO: 2190 - protein, 549 aa, Unknown
  Description of Unknown: Integrase B2191 sequence
  SM00857,G3DSA:1.10.10.2600,IPR036162,PF13408,IPR025827, PS51737,G3DSA:3.40.50.1390,IPR006119,IPR038109,PF07508, SSF53041,IPR011109,PTHR30461,Coil,cd00338, PF00239
MAYRKITDIRDTIGMRAVFYARVSTAEEEQLNAIELQIEENRGCIKDHGWKLVGEYIDRSKSGTMVKGRDDYQRLYEDLYEDLFDIVVIKDQERLQRNTLDWYLFINRVVQTGKLLFMYMDGKFYSPDDALITGVRAIIAEEFSRNLSKKLHNYHDHRIEKARQGQEIALQGSGNVYGWNKKDGKYYINPEQAKVRRLMCEGIMARKGSTLIAKELNDAGYRNTVGKPWKPMDIPKFVYDCKNVGTMIINKERHDFESKQTIKLPKEEWVYVENALPPIVTQEEWDLICKIHEERVIATGSDRRGKKTSGYSFSGKLVCGICGAPYWRKQRVSKDEYWVCSTKQTKGRRTRKRDSTMGKAGEINPLGCDNENISYNSLMEIMEVVSERLQANTDTIKQDMINWLTKLRKQLLEANGGHTEADLQRELSRKSKLLDAYLDGILNKQEYQTKAEELDERIIQLKAETEKNKANSGDIAEIDKVLANIDEEVSRYVDGNEKLKVEYLLEHLEQVQIFPDKVIVIVPILSEGIVVEKTQYVSREKRRWKNNAV

SEQ ID NO: 2191 - protein, 549 aa, Unknown
  Description of Unknown: Integrase B2192 sequence
  SM00857,G3DSA:1.10.10.2600,IPR036162,PF13408,IPR025827, PS51737,G3DSA:3.40.50.1390,IPR006119,IPR038109,PF07508, SSF53041,IPR011109,PTHR30461,Coil,cd00338, PF00239
MAYRKITDIRDTIGMRAVFYARVSTAEEEQLNAIELQIEENRGCIKDHGWKLVGEYIDRSKSGTMVKGRDDYQRLYEDLYEDLFDIVVIKDQERLQRNTLDWYLFINRVVQTGKLLFMYMDGKFYSPDDALITGVRAIIAEEFSRNLSKKLHNYHDHRIEKARQGQEIALQGSGNVYGWDKKDGKYYINPEQARVRRLMCEGIMARKGSTLIAKELNDAGYRNTVGKPWKPMDIPKFVYDCKNVGTMIINKERHDFESKQTIKLPKEEWVYVENALPPIVTQEEWDLICKIHEERVIATGSDRRGKKTSGYSFSGKLVCGICGAPYWRKQRVSKDEYWVCSTKQTKGRRTRKRDSTMGKAGEINPLGCDNENISYNSLMEIMGVVSERLQANTDTIKHDMINWLTKLRKQLLEANGGHTEVDLQRELSRKSKLLDAYLDGILNKQEYQKKAEELDERIIQLKAETEKNKANSGDIAEIDKVLANIDEEVSRYVDGNEKLKVEYLLEHLEQVQIFPDKVIVIVPILSDGIVVEKAQYVSREKWFRKDYIL

SEQ ID NO: 2192 - protein, 549 aa, Unknown
  Description of Unknown: Integrase B2193 sequence
  SM00857,G3DSA:1.10.10.2600,IPR036162,PF13408,IPR025827, G3DSA:3.40.50.1390,PS51737,IPR006119,IPR038109,PF07508, SSF53041,IPR011109,PTHR30461,Coil,cd00338, PF00239
MAYRKITDIRDTIGMRAVFYARVSTAEEEQLNAIELQIEENRGCIKDHGWKLVGEYIDRSKSGTMVKGRDDYQRLYDDLYEDLFDIVVIKDQERLQRNTLDWYLFINRVVQTGKLLFMYMDGKFYSPDDALITGVRAIIAEEFSRNLSKKLHNYHDHRIEKARQGQEIALQGSGNVYGWDKKDGKYYINPEQAKVRRLMCEGIMARKGSTLIAKELNEAGYRNTVGKPWKPMDIPKFVYDCKNVGTMIINKERHDFESKQTIKLPKEEWVYVENALPPIVTQEEWDLICKIHEERVIATGSDRRGKKTSGYSFSGKLVCGICGAPYWRKQRVSKDEYWVCSTKQTKGRRTRKRDSTMGKAGEINPLGCDNENISYNSLMEIMGVVSERLQANTDTIKHDMINWLTKLRKQLLEANGGHTEADLQRELSRKSKLLDAYLDGILNKQEYQKKAEELDERIIQLKTETEKNKANSGDIAEIDKVLANIDEEVSRYVDGNEKLKVEYLLEHLEQVQIFPDKVIVIVPILSEGIVVEKTQYVSREKRRRKKYGN

SEQ ID NO: 2193 - protein, 549 aa, Unknown
  Description of Unknown: Integrase B2194 sequence
  SM00857,G3DSA:1.10.10.2600,IPR036162,PF13408,IPR025827, G3DSA:3.40.50.1390,PS51737,IPR006119,IPR038109,PF07508, SSF53041,IPR011109,PTHR30461,Coil,cd00338, PF00239
MAYRKITDIKATIGMRAVFYARVSTAEEEQLNAIELQIEENRGCIKDHGWKLVGEYIDRSKSGTMVKGRDDYQRLYEDLYEDLFDIVVIKDQERLQRNTLDWYLFINRVVQTGKLLFMYMDGKFYSPDDALITGVRAIIAEEFSRNLSKKLHNYHDHRIEKARQGQEIALQGSGNVYGWDKKDGKYYINPEQAKVRRLMCEGIMARKGSTLIAKELNEAGYRNTVGKPWKPMDIPKFVYDCKNVGTMIINKERHDFESKQTIKLPKEEWVYVENALPPIVTQEEWDLICKIHEERVIATGSDRRGKKTSGYSFSGKLVCGICGAPYWRKQRVSKDEYWVCSTKQTKGRKTRKRDSTMGKAGEINPLGCDNENISYNSLMEIMEVVSERLQANTDTIKQDMINWLTKLRKQLLEANGGHTEADLQRELSRKSKLLDAYLDGILSKEEYQRKAEELDERIIQLKAETEKNKANSGDIAEIDKVLDNIDEEVARYVDGNEKLKVEYLLEHLEQVQIFPDKVIVIVPILSEGIVVEKTQYVSREKWGWEKHNI

SEQ ID NO: 2194 - protein, 549 aa, Unknown
  Description of Unknown: Integrase B2195 sequence
  PTHR30461:SF3,SM00857,G3DSA:1.10.10.2600,IPR036162,PF13408, IPR025827,G3DSA:3.40.50.1390,PS51737,IPR006119,IPR038109, PF07508,SSF53041,IPR011109,PTHR30461,PS51736, cd00338,PF00239
MMKFPIDLSMLTEEEIDQFREDPSTLFEGDTDVSLYLRFSSERQREQSIEGQLRDCRAFCKMNRYRIVAIYVDRATTARKDVEKRTHFQEMIRDSDKQPWEAVVVWKLDRFARNRTDSALFKFRLRKNGVRVISATEAISEKPEGIILEAVLEGMAEFYSADLSQKITRGMRESALKCHSIGGHVPLGYKIENHKLVIDPNTAHIVQEAFQLYANGETVADICRLFNFKGYRTAKGVEFNRNSFKSMFRNKRYIGIYTYKDIEIEGGVPAIIDKELFETVHHRLSVNAEAPARGKAKVDYLLAGKLFCGHCGGSMNGESGTSKTGAIHNYYTCYTRKRQHSCDKKPLKKDWIEYIVAQDAMALMTDEVIEELADMAMAQTEQDLKENTRIPELSDRLKEIESGISNITRAIEKGIASDTLMERLVELEKDKKKVLRLLADEEKYICRIDREQIIFWLNKFKGGSIKDEGFRRVMIDLIVNSVTVWDEPDGFRITTAYNLTSCKNKTYRVSPSSGKEFGFEGPESTIERKSEPYIVWGTVFVQTKRHALP

SEQ ID NO: 2195 - protein, 549 aa, Unknown
  Description of Unknown: Integrase B2196 sequence
  PTHR30461:SF3,cd00338,SM00857,G3DSA:1.10.10.2600,IPR036162, PF13408,IPR025827,G3DSA:3.40.50.1390,PS51737,IPR006119, IPR038109,PF07508,SSF53041,IPR011109,PTHR30461, PS51736,Coil,PF00239
MDLCKIRNEISRGESIYNIPLRVTFYARVSTDKDEQLNSLDNQILYFKNFIMENSNWKYVPGYIDEGISGTSVKNRTNFLKMIHDAKKGKFDLILTKEISRFSRNTVDSIKYTQELLASDVGVLFLSDNINTILPDSELRLTIMSSIAQEEVRKLSERVRFGMKRSREKGHVLGNNVITGFTKEKGKLKIDEKEAKMIRRIYSLYASGEYGLSKISKILYEEGYKTKKGDYIHITTLRRMITNPKYKGFYCTNTVMTKDYRNKKQIRLPMDEWIIEDSKGEIPAIVSEELWDKANKLLKIKKVNYLKNVAEPRVFSKRYPYSGNIYCEHHNSKYKRVNNNGNSYWICNEYATHGDKTCKTPKLYEKELDKIFKNVYSYLINNFDEIKGKLINIYKNSTFNACNEIEKLKKEINNLNYKKESLLELYIEKVIEKSEFETRNDKYNNKIENIKKEKKELEKKDINATLKQIKKLELGDFINENFERLSKLLIDKIVVKKSADKTRVILNIYINLFNITYIWDYNNFEKISSLCSHNENHDSNNCFRKRKSK

SEQ ID NO: 2196 - protein, 549 aa, Unknown
  Description of Unknown: Integrase B2197 sequence
  PTHR30461:SF3,IPR036162,PS51737,IPR011109,PTHR30461, PF00239,G3DSA:1.10.10.2600,IPR006119,SSF53041,cd00338, SM00857,IPR025827,IPR038109,mobidb-lite,PS51736, PF13408,G3DSA:3.40.50.1390,PF07508,Coil
MRKKSNLNAATRAVIYARYSSANQRDCSIEQQVAKCRELAARLGLTVIDVYEDRAISGKTDRRPNFQRMMKDADLRQFDVVLAWKSNRMGRNMLQAMTNEERLRDNGIRTVYAEEDFDDTAAGRFALRNMMNVNQFYSENMAEDITRGLMDNAAKCLSNGSLPLGYKPGDDRHVVLDEAEAAIVQEIFTRVSCYEPFIDIARDLNRRGIKTKKGSEWGRSSFHTICRNERYRGIYIYRDVRIEGGMPRIVSDELFYKVQEVLKVKKNPQGRRKRSGYEEYLLTGKLFCGHCGSPMTGIAGTSKTGAMHYYYTCQKRRTDHSCDKKAVRRDQIERAVGVAIQQQLLTDENIQMMADKLMEYNARTETKYRLQGLQDQLNANKTATANILKAIEMGIITDATKARLLELEKEQGQLLVKIDEAKAEMVPISRNDFVKLLYIYKEGEPTDKKYLAALFDNFLVRVDLYDDHLKITFDPTGGRQPIDMPIGAEKSPESPGDSSESSNFEASSHDAEKFVLALHNCTKASVLTAFERLLRTLAFFIQRVSLRRS

SEQ ID NO: 2197 - protein, 549 aa, Unknown
  Description of Unknown: Integrase B2198 sequence
  PTHR30461:SF3,SM00857,G3DSA:1.10.10.2600,IPR036162,PS51736, PS51737,G3DSA:3.40.50.1390,IPR006119,IPR038109,PF07508, IPR011109,SSF53041,PTHR30461,Coil,mobidb-lite, cd00338,PF00239
MYYKEYPKIYYYETKEYGRKSRMDDPLLTVAETLQRHSEIIDEYAQKYLGGSIPEENKYMEVGSGESIADRPEITRLLKDIEDPAVKAIVVVDVQRLSRGDLEDAGKLIRLLRYTNTLVITPMKTYDLRDEYDRDAFERELKRGNEYLEYFKKIQARGRLASVKAGNYVGSVAPYGFDRIEKYDEVAKKNYFTLIERKDQADIVRMIFNWYCNDDIGVTAICRRLEDIGAKTKTGCATWKPSIIFGILENVHYIGCVRWNWRKTVKIIENQEIKKLRPKAKVDEYLIFEGKHDGIVSEEVFNRARIIKGTRHRTKRNLSLKNPFSGLMYCKTCGSKIGYNTFKRNGVEYAPPKLVCNNQVHCKTGSVDYNEVLDYMCKVLKDCIEDFKVRIENDQDDSVKLHKDLIERLTKQLKETEQKEQDQWEAQYDPDPNKRLPQHIFEKLNKKVLAEKEEINRALEKAKGSAPKHIDYREELVKTTDALKALKDSDLDAKIANQYLKAIIDRIEYHRPEIVRINKKNAEIFETDVRKGLQYHVAPYTIRVKLKCE

SEQ ID NO: 2198 - protein, 549 aa, Unknown
  Description of Unknown: Integrase B2199 sequence
  PTHR30461:SF3,SM00857,G3DSA:1.10.10.2600,IPR036162,PF13408, PS51737,G3DSA:3.40.50.1390,IPR025827,IPR006119,IPR038109, PF07508,IPR011109,SSF53041,PTHR30461,PS51736, cd00338,PF00239
MAKRSAKKNEYQSAEQVGVIYARYSSHNQKEESIEQQISECSDFAAKNGIRIVGIYADKAVSGRSDRRPNFQRMMRDAEKRQFQIVIAYKSNRIARNMLNALQYEARLDLLGIKTLYAKEEFGNTAAGRFALRTMMNVNQFYSENMGEDIKRGMVDNANECKVNGMLPLGYVKSKEGKYAIAPDEAAVVREIFDSVLKDVPVAEIARSLNQRGIHTKLGREWNKNSFHIMLTNDNYIGVYRHSGVVVEDGIPPILEKEVFAAVQEKLANKKKTAGRRSANGEYLLTGKLFCGYCGSYMIGVSGTGENGTVHNYYQCQKRHAEGRCEKKNVRRDFIEKLIARLTQDYILQDDTIEWIADSTMSFQAMARRESGVAQLERDLADNRKVAKNIMAAIEQGIITETTKARLLEVEGTIHDLERSLSIAKAASQPIERERVVFSLEQMREGNVGSKEHQKKLIDTFVKSVTLWDDRIQIDYYHTPGKHKFSYSLEELTSKAENESNASDVRTDSLELHHKRVIRTRYGDGEIHITAFGFVFLCPLPCSKKEAAV

SEQ ID NO: 2199 - protein, 549 aa, Unknown
  Description of Unknown: Integrase B2200 sequence
  PTHR30461:SF3,IPR036162,PS51737,IPR011109,PTHR30461, PF00239,G3DSA:1.10.10.2600,PF14287,IPR006119,SSF53041, IPR025378,SM00857,IPR025827,cd03770,IPR038109, PS51736,PF13408,G3DSA:3.40.50.1390,PF07508,Coil
MKQSNQNEITALYCRLSQDDGVDGESNSIQNQRNILERYAREHRFPNPRFYVDDGYSGGSFNRPGFQQMMTDMENGKIRTIITKDLSRLGRNQLHTGLYIEERFPMFGVRYIAINDNVDTDRSESTELMPFKNLFNEWFIRDTSRKIRAVQRAKAERGERLGTRAPYGYRKDEQDRKKLVVDEEAAAVVRRIFALCAAGQGPSQIARLLKREQVLCPTTYAYKTFGVAHSSLNLNDPYGWSDSTIANMLENEIYLGNTINLRYSTRSYKDKRKVEHPREKCMVLENTHPALVSREVWDIVQRVRQHKRRPTKMDEQNKYSGLVVCADCGSTMVLHRAHTMSRSYNHFTCRTYKKDGTLCTAHYIRECVLDDVVLEDLRRVTAMAREHTQEFAAYIGSRQSADIRKEARGLERELTAMKKRSRELDSIFKRLYEDSVLGRITAEQFQTLSGSYTQEMEVLNRAIPEKETAIQRLREQVSGTDHFISLAKRYTDIQELTPELLRLFIQKIVVHEKDVKWSKHAQQTVEIHYNDIGYVELTSPEGQSTPKGA

SEQ ID NO: 2200 - protein, 549 aa, Unknown
  Description of Unknown: Integrase B2201 sequence
  PTHR30461:SF3,cd00338,SM00857,G3DSA:1.10.10.2600,IPR036162, PF13408,PS51737,G3DSA:3.40.50.1390,IPR025827,IPR006119, IPR038109,PF07508,SSF53041,IPR011109,PTHR30461, PS51736,Coil,PF00239
MDLCKIRNEISRGESIYNIPLRVTFYARVSTDKDEQLNSLDNQILYFKNFIMENSNWKYVPGYIDEGISGTSVKNRTNFLKMIHDAKKGKFDLILTKEISRFSRNTVDSIKYTQELLASDVGVLFLSDNINTILPDSELRLTIMSSIAQEEVRKLSERVRFGMKRSREKGHVLGNNVITGFTKEKGKLKIDEKEAKMIRRIYSLYASGEYGLSKISKILYEEGYKTKKGDYIHITTLRRMITNPKYKGFYCTNTVMTKDYRNKKQIRLPMDEWIIEDSKGEIPAIVSEELWDKANKLLKIKKVNYLKNVAEPRVFSKRYPYSGNIYCEHHNSKYKRVNNNGNSYWICNEYATHGDKTCKSPKLYEKELDKIFKNVYSYLINNFDEIKGKLINIYKNSTFNACNEIEKLKKEINNLNYKKESLLELYIEKVIEKSEFETRNDKYNNKIENIKKEKKELEKKDINATLKQIKKLELGDFINENFERLSKLLIDKIVVKKSADKTRVILNIYINLFNITYIWDYNNFEKISSLCSHNENHDSNNCFRKRKSK

SEQ ID NO: 2201 - protein, 549 aa, Unknown
  Description of Unknown: Integrase B2202 sequence
  PTHR30461:SF3,SM00857,G3DSA:1.10.10.2600,IPR036162,PF13408, PS51737,G3DSA:3.40.50.1390,IPR025827,IPR006119,IPR038109, PF07508,SSF53041,IPR011109,PTHR30461,PS51736, cd00338,PF00239
MAKRSAKKNEYQSAEQVGVIYARYSSHNQKEESIEQQIAECSDFAAKNGIRIVGIYADKAVSGRSDRRPNFQRMMRDAEKRQFQIVVAYKSNRIARNMLNALQYEARLDLLGIKTLYAKEEFGNTAAGRFALRTMMNVNQFYSENMGEDIKRGMVDNANECKVNGMLPLGYVKSKEGKYAIAPDEAAVVREIFDSVLKDVPVAEIARSLNQRGIHTKLGREWNKNSFHIMLKNDNYIGVYRHSGVVVEDGIPPILEKEVFAAVQEKLANKKKTAGRRSANGEYLLTGKLFCGYCGSYMIGVSGTGENGTVHNYYQCQKRHAEGRCEKKNVRRDFIEKLIARLTQDYILQDDTIEWIADSTMSFQAMARRESGVAQLERDLADNRKVAKNIMAAIEQGIITETTKARLLEVEGTIHDLERSLSIAKAASQPIERERVVFSLEQMREGNVGSKEHQKKLIDTFVKSVTLWDDRIQIDYYHTPGKHKFSYSLEELTSKAENESNASDVRTDSLELHHKRVIRTRYGDGEIRITAFGFVFLCPLPSSKKEADV

SEQ ID NO: 2202 - protein, 549 aa, Unknown
  Description of Unknown: Integrase B2203 sequence
  PTHR30461:SF3,SM00857,G3DSA:1.10.10.2600,IPR036162,PF13408, IPR025827,G3DSA:3.40.50.1390,PS51737,IPR006119,IPR038109, PF07508,SSF53041,IPR011109,PTHR30461,Coil, PS51736,cd00338,PF00239
MPDDCAVIYARYSSHAQRDVSIEDQVADCRIYAERLGLTVLEVYADHATTGRSDDRCQFQRMIQDAKKGRWKTVLTWKTDRFARNRYDSAVYKARLKRYGVHVQYAKESIPDGPEGILMEGMLESYAEYFSANLAQNVRRGLNSNAQKCKLNGPAPLGYRRGSDGGYEIVESEAAVVRRIYQSITQGTGYAELVRELNAAGIKTKRGSSWTKNSFHKILRNEAYIGVYQYGEHRTEDAIPPIITKEEFAAVQNKLETYKKHNAHTGEIREYLLTGKLFCGNCGEGMVGICGTSKSGVRHYYYMCKGHQAHRCDLKNVKAAQLEDQVVSYTMQYVLQDDVIAELVDKLLEYQAQQQDSGMLEALRAELADVQGRLDNLMEAIEAGIITKTTKARLSELESEQERLTHSITVETCRNTGLSREQLIFLFDMFRAGDMRDLDFRRRLIDTFVNAVFVYDDGRLKIVYNFREGNETVTKEFVDSVESGAVDSVRMVVNSVYHGHPKGCPFSFSLKASSPISNGRSGCFNINIVSKQEVIGGITAEALLLTAPD

SEQ ID NO: 2203 - protein, 549 aa, Unknown
  Description of Unknown: Integrase B2204 sequence
  SM00857,G3DSA:1.10.10.2600,IPR036162,PF13408,IPR025827, G3DSA:3.40.50.1390,PS51737,IPR006119,IPR038109,PF07508, IPR011109,SSF53041,PTHR30461,Coil,cd00338, PF00239
MAYRKITDIRDTIGMRAVFYARVSTAEEEQLNAIELQIEENRGCIKDHGWKLVGEYIDRSKSGTMVKGRDDYQRLYEDLYEDLFDIVVIKDQERLQRNTLDWYLFINRVVQTGKLLFMYMDGKFYSPDDALITGVRAIIAEEFSRNLSKKLHNYHDHRIEKARQGQEIALQGSGNVYGWDKKDGKYYINPEQAKVRRIMCEGIMARKGSTLIAKELNDAGYRNTVGKPWKPMDIPKFVYDCKNVGTMIINKERHDFESKQTIKLPKEEWVYVENALPPIVTQEEWDLICKIHEERVIATGSDRRGKKTSGYSFSGKLVCGICGAPYWRKQRVSKDEYWVCSTKQTKGRRTRKRDSTMGKAGEINPLGCDNENISYNSLMEIMGVVSERLQANTDTIKHDMINWLTKLRKQLLEANGGHTEADLQRELSRKSKLLDAYLDGILNKQEYQKKAEELDERIIQLKAETEKNKANSGDIAEIDKVLANIDEEVSRYVDGNEKLKVEYLLEHLEQVQIFPDKVIVIVPILSDGIVVEKTQYLSREKWCRKNNAV

SEQ ID NO: 2204 - protein, 549 aa, Unknown
  Description of Unknown: Integrase B2205 sequence
  PTHR30461:SF3,IPR036162,PS51737,IPR011109,PTHR30461, PF00239,G3DSA:1.10.10.2600,IPR006119,SSF53041,cd00338, SM00857,IPR025827,IPR038109,PS51736,cd18688, PF13408,G3DSA:3.40.50.1390,PF07508,Coil
MQTIPIDLSALTPEERQQFADNPSVLSSDCEAVCCLYMRYSSDRQTEQSIEGQLRELIAYCKHHSYRVAAIYVDRAISAHASMDKRPAFQQMLSDSARSSWKTVLVYKLDRFARNREDSAIARMRLRKNGCNVESAKEGISKNPEGVILEALLEGMAEYYSLELSQKVRRGMSETARKGNSTGGTTPLGYTVVDKRLQIDPMTAHLVEEAFRRYADGDTVAAICDDFNARGYRTTRGTKFNKSSFKNVFRNEKYIGVYKFDDVRADNAVPRIISDELWRAVQSRLKASEQAPARGKAKVPYLLSGKIFCGHCGAPMVGECGRGKGGKTYNYYSCANRKKAHLCDKKPVPKDWLEDVVAQDALDVLTDEIIEFVAEIAAQQSEEDIQKNTQIPVIRKKISEIENKIRNLTKALECASVAPDAIVERLAELEAQKKGLSTQLSDEERGVIPLTKESVVVYLKAVREKAVPLETQKAMLIEMLVNSVTVYDDEPGFLKFVTAYRLTQIPSKTYRVPTPAVSPCSDIGRVGSPEKARFGVLFRLFQKTKDLLK

SEQ ID NO: 2205 - protein, 549 aa, Unknown
  Description of Unknown: Integrase B2206 sequence
  PTHR30461:SF3,SM00857,G3DSA:1.10.10.2600,IPR036162,PF13408, PS51737,G3DSA:3.40.50.1390,IPR025827,IPR006119,IPR038109, PF07508,IPR011109,SSF53041,PTHR30461,Coil, PS51736,cd00338,PF00239
MKKKFPIDLSMLTPEEIDQFREDPYTLYHGDIEVSLYLRFSSERQKEQSIEGQLRDCRAFCKRSGYRIVAIYVDRALTARKDAEKRVQFQQMIVDSEKRHWQYLVVWKLDRFARNRNDSAIYKMRLKKNGVRVISATENISENPEGIILEAVLEGMAEFYSAELSQKITRGMRESAMKCHSIGGHVPLGYKIKDHKLVIDPVGAAIVQEAFQLYANGDTVADICRLFNNKGYRTAKGAEFNRNSFKSMFKNERYIGIYTYRDLRIEDGVPAIVDKELFEIVQQRLRKNGEAPARGKAKVDYLLSGKLFCGHCGASMNGESGTGRHGGKFHYYSCYNRKRHRNCDKKPLKKEYIERVVVEDAITLLTDEVIEELADMAISQSDIDLKENTRVPELTAKCDEIDKAIGNITKAIEKGIASDALMERLMVLEKDKKDALRQLREEEKYIYRIDRDQVIYWLYQFKEGDIEDENFRRHIIDLLVNSVTVWDEPDGYRITSAYNLTSAPTKTFKVNGAFSGEGFGFEKLTSTISTAAYLLRWIFYCQRGENMVS

SEQ ID NO: 2206 - protein, 549 aa, Unknown
  Description of Unknown: Integrase B2207 sequence
  SM00857,G3DSA:1.10.10.2600,IPR036162,PF13408,IPR025827, G3DSA:3.40.50.1390,PS51737,IPR006119,IPR038109,PF07508, SSF53041,IPR011109,PTHR30461,Coil,cd00338, PF00239
MAYRKITDIRDTIGMRAVFYARVSTAEEEQLNAIELQIEENRGCIKDHGWKLVGEYIDRSKSGTMVKGRDDYQRLYEDLYEDLFDIVVIKDQERLQRNTLDWYLFINRVVQTGKLLFMYMDGKFYSPDDALITGVRAIIAEEFSRNLSKKLHNYHDHRIEKARQGQEIALQGSGNVYGWDKKDGKYYINPEQAKVRRLMCEGIMARKGSTLIAKELNDAGYRNTVGKPWKPMDIPKFVYDCKNVGTMIINKERHDFESKQTIKLPKEEWVYVENALPPIVTQEEWDLICKIHEERVIATGSDRRGKKTSGYSFSGKLVCGICGAPYWRKQRVSKDEYWVCSTKQTKGRRTRKRDSTMGKAGEINPLGCDNENISYNSLMEIMGVVSERLQANTDTIKHDMINWLTKLRKQLLEANGGHTEADLQRELSRKSKLLDAYLDGILNKQEYQKKAEELDERIIQLKAETEKNKANSGDIAEIDKVLANIDEEVSRYVDGNEKLKVEYLLEHLEQVQIFPDKVIVIVPILSEGIVVEKTQYVSREKWCRKDNAY

SEQ ID NO: 2207 - protein, 549 aa, Unknown
  Description of Unknown: Integrase B2208 sequence
  PTHR30461:SF3,SM00857,G3DSA:1.10.10.2600,IPR036162,PF13408, PS51737,IPR025827,G3DSA:3.40.50.1390,IPR006119,IPR038109, PF07508,SSF53041,IPR011109,PF00239,PTHR30461, PS51736,Coil,cd00338
MKKFPIDLSCLTEEEISQFQEDPYTLYNGDQDVALYLRYSSTGQSDQSIEGQLRDCRAFCKANHYRIVAIYVDRATTARKDVEKRVHLMEMVADSAKQNWEYVIVWKLDRFARNRNDSAIMKMRLRKNGVKVLSATEHLTDSPESIILESVLEGMAEFFSAELSQKVTRGMRESALKCHSVGGHIPLGYKVENHKLVVDPDTAHIVQEAFSLYANGESVADICRKFNSAGYKTAKNTEFNRSSFKAMFRNTRYIGTYTYKDIVIENGIPAIIDKELFETVQRRLSKTATAPARGKAKVDYLLSGKLFCGHCGASMNGESGAGRHGKVYHYYSCYTKKRKLGCDKRPLKKDYIEGIVARDALNLLTDQLIDEIADMAIRQSEQDLINDTHIPQLTAQLSEVEKSITNITAAIEKGIASETLMNRLVQLEHEKKTLNKEIKAEEKFVYRIDRDQIVFWLSQFKYGNIEDEDFRRRLIDLLVNSVTVWDEPDGYKITTAYNLTSCKTKTFRVEKNPAAKEATGFDFGESECAMKKSCNPWDCKTFLFFLLCR

SEQ ID NO: 2208 - protein, 549 aa, Unknown
  Description of Unknown: Integrase B2209 sequence
  PTHR30461:SF3,IPR036162,PS51737,IPR011109,PTHR30461, PF00239,G3DSA:1.10.10.2600,IPR006119,PF14287,SSF53041, IPR025378,SM00857,IPR025827,cd03770,IPR038109, PS51736,PF13408,G3DSA:3.40.50.1390,PF07508,Coil
MSRKKQVYEKITALYCRISLDDGGDNESMSISNQKLMLRDFAEKHGMFQYEYYVDDGYTGRNFNRPSFQRMIADIEAGKVGCVVTKDLSRLGRNYIEAGSYIEIFFPKHNVRYIAVTDGVDSLTRQEMDITPFKNILNDMYSRDISKKVLAGITTRSRQGKFCGGTPPFGLMRDPEDKGHLILDPETAPIIRKIYDYALDGLGCMRISKRLMEEKIPITRVKANTEFDANYYSWGGARISHILRNPFYKGAHLVFRTHQKGIRSNTYDIIPRDQWEVIEGCHEAIVTPEEWQQVQELIDRRPTIQGNSCPFYNLFHGLVYCATCGKSMQVRYEKVGRTGKNRFTGEMREPIDKAYYICQTYNRMGCKVCSSHKIEARDLYNLVLKDIQELAAQAMKDADAFYQRLSSRMERRYLVDASQTEKERKRLEARNQEIDGMFLSLYTDKAKGVLTEQRFMKLTAALEQEQEANQKRLHDLALMQSRADAQESEVRTFIKEIRRYAAIEELDEAVLNRLISKILIGEVKKVDGQKVQEVKIVYNFVGEIPEIAA

SEQ ID NO: 2209 - protein, 549 aa, Unknown
  Description of Unknown: Integrase B2210 sequence
  PTHR30461:SF3,SM00857,G3DSA:1.10.10.2600,IPR036162,PF13408, IPR025827,G3DSA:3.40.50.1390,PS51737,IPR006119,IPR038109, PF07508,IPR011109,SSF53041,PTHR30461,Coil, cd00338,PF00239
MARTATKHPAKPKRGKKLEAEEPGVLYGRYSSHNQKDISVEQQFEKGYGLAGEYGIRIVETYADRAVSGRTDKRKDFQRMMADAAKGKFRYVIAWKSNRMGRNMLEALVNEAKLQELGVRVLYVEEDFDDTAAGRFAARSMMNVNQFYSENMAEDIKRGLYDNASNCMVANGHLPYGYKRDDTLHYVIDEAKAAVIREIFVRVSCGEPLVDIYDSLNARGIKTSYGRPWGRSSFQKILSNERYREIYIYGDVRKEGGIPRIVSDELYFKVQEVLKTKKNPQGRHRVNGDYLLTGKLFCGNCKSPMIGISGTGRTGKLHYYYVCQKKRSEKTCDKKNVRRDEVEYQIAKAIFDNALQDQVIEWIADSTIAYNDRKEAEGHIGILEDQFADVQRSLKNIMSAIEQGIVTETTKSRLLELESERSEIEGKIAAAKADIVPVNREQLIEWLLSLREGDIHDKKYQARLFDTFLIAAYLYDDGTAKLVFSFAGDKNTVTVPLAEAVDSVEENTAEGSFKLCLAPPIPNTKVFGIFVYSQKNLYISNGKVLNPNG

SEQ ID NO: 2210 - protein, 549 aa, Unknown
  Description of Unknown: Integrase B2211 sequence
  PTHR30461:SF3,IPR036162,PS51737,IPR011109,PTHR30461, PF00239,G3DSA:1.10.10.2600,IPR006119,SSF53041,cd00338, SM00857,IPR025827,IPR038109,PS51736,mobidb-lite, PF13408,G3DSA:3.40.50.1390,PF07508,Coil
MRKKSNLNAATRAVIYARYSSANQRDCSIEQQVAKCRELAARLGLTVIDVYEDRAISGKTDRRPNFQRMMKDADLRQFDVVLAWKSNRMGRNMLQAMTNEERLRDNGIRTVYAEEDFDDTAAGRFALRNMMNVNQFYSENMAEDITRGLMDNAAKCLSNGSLPLGYKPGDDRHVVLDEAEAAIVQEIFTRVSCYEPFIDIARDLNRRGIKTKKGSEWGRSSFHTICRNERYRGIYIYRDVRIEGGMPRIVSDELFYKVQEVLKVKKNPQGRRKRSGYEEYLLTGKLFCGHCGSPMTGIAGTSKTGAMHYYYTCQKRRTDHSCDKKAVRRDQIERAVGVAIQQQLLTDENIQMMADKLMEYNARTETKYRLQGLQDQLNANKTATANILKAIEMGIITDATKARLLELEKEQGQLLVKIDEAKAEMVPISRNDFVKLLYIYKEGEPTDKKYLAALFDNFLVRVDLYDDHLKITFDPTGGRQPIDMPIGAEESPESPGDSPESSDFEASPQDAEKFVLALHNRTKASVLTAFERLLRTLAFFIQRVSLRRS

SEQ ID NO: 2211 - protein, 549 aa, Unknown
  Description of Unknown: Integrase B2212 sequence
  SM00857,G3DSA:1.10.10.2600,IPR036162,PS51737,G3DSA:3.40.50.1390, IPR006119,IPR038109,PF07508,IPR011109,SSF53041, PF00239,PTHR30461,Coil,cd00338
MEEFYDVIDYNTILEKINNDLNNEIYLFYLRKSREDIEYEKENKEYKTLERHQKRLITLATSMGIKVNEDYIIPEVVSGDSIAERNSIKVVLKLIEHPKVKGVWVIDVQRLTRGDLGDQDKIIKTFKYTNTLIMTPEKEYNLQFPADEEYLIDKLAYSRKEYLGIKKRLTEGRKDSVMEGKVPYSRAAFGYERYKLKGQKGYSLRIVPEQAEIVKDIFKMCLEGKGTFAIATELNKLGIPSPNGCKWRKNGIREMLHNKTYIGKVKWQERQQIKIIEDSQIKTKTKRNKENEYLICDGLHEAIISEEDFEKVQELLKQSSTKYVPLDLSMKNPLSGILRCSVCGKVMARREGGQNVYYSPRGSGLNPKYYKAKDLVWCSTNKECGTVSNNLEDVEDMIIESLKEIVKQRKQILNNYTKNENTVLDNINNQLEIIDNQIIKEEKKLNKLRDFLEDGIYDKKVYIERSSIILSNLEKLKNKKLEINENNEHLKMEKLREAIPKVEKGIKEYYKLDVVDRNIFLNEFIEKVLYTKTKIRSESDLKLDIYPKF

SEQ ID NO: 2212 - protein, 549 aa, Unknown
  Description of Unknown: Integrase B2213 sequence
  PTHR30461:SF3,cd00338,SM00857,G3DSA:1.10.10.2600, IPR036162,PF13408,PS51737,IPR025827, G3DSA:3.40.50.1390,IPR006119,IPR038109,PF07508, IPR011109,SSF53041,PTHR30461,PS51736,Coil,PF00239
MYSTVSGPMHPPLAFGYCRKSTTGQREESIEAQQRAIVAYAAAMGYQLVHIYKDHGNSGRSGERPEFQQMLQDAVPAGVQFIIVHKLDRFFRNAERQTLIEAQLRRQGIRVLSASEHFDDTPQGQFMRNITKAINQWYSANLATEVMKGMRENAMGARNTGGPPPLGYAVDKTTGKFVLQPTEAAAVQMIFRMYRQGCGYTEIIDALNAAGHVTRRGRPFGKNSLYDILRNEKYTGTYVWNRLAPADPDGRTNRRNLKPRSEWVCVEGGMPQIITPEEFKEVQAEMNNRKHRSAAYTAKAFYLLSGLVYCGGCGGSMSGEAHRYKSHGKPVEYRYYTCSAKKRLHADGEHARPVPAASLEGAVVDYLQRVIFNPANMDTLCAALLQSMEPDPRHTDLAADLKRQAAEVQLKIDRIYAAIEKGLDPSSAIERINTLQQQRLALLAQATDLDMTDDVAKINIDQLREVWSRIQLKDMEPVQLRAVIREMVHKIIVFDDGPGGFRVRIILNPGHVAPANIPENVETASLSELQDFSTNGGRGLPLPKAAYLV

SEQ ID NO: 2213 - protein, 549 aa, Unknown
  Description of Unknown: Integrase B2214 sequence
  SM00857,G3DSA:1.10.10.2600,IPR036162,PF13408,IPR025827, G3DSA:3.40.50.1390,PS51737,IPR006119,IPR038109,PF07508, IPR011109,SSF53041,PTHR30461,Coil,cd00338, PF00239
MAYRKITDIRDTIGMRAVFYARVSTAEEEQLNAIELQIEENRGCIKDHGWKLVGEYIDCSKSGTMVKGRDDYQRLYEDLYEDLFDIVVIKDQERLQRNTLDWYLFINRVVQTGKLLFMYMDGKFYSPDDALITGVRAIIAEEFSRNLSKKLHNYHDHRIEKARQGQEIALQGSGNVYGWDKKDGKYYINPEQAKVRRLMCEGIMARKGSTLIAKELNDAGYRNTVGKPWKPMDIPKFVYDCKNVGTMIINKERHDFESKQTIKLPKEEWVYVENALPPIVTQEEWDLICKIHEERVIATGSDRRGKKTSGYSFSGKLVCGICGAPYWRKQRVSKDEYWVCSTKQTKGRRTRKRDSTMGKAGEINPLGCDNENISYNSLMEIMGVVSERLQANTDTIKQDMINWLTKLRKQLLEANGGHTEADLQRELSRKSKLLDAYLDGILNKQEYQKKAEELDERIIQLKAETEKNKANSGDIAEIDKVLANIDEEVSRYVDGNEKLKVEYLLEHLEQVQIFPDKVIVIVPILSEGIVVEKTQYVSREKWCRKKHNI

SEQ ID NO: 2214 - protein, 549 aa, Unknown
  Description of Unknown: Integrase B2215 sequence
  PTHR30461:SF3,cd00338,SM00857,G3DSA:1.10.10.2600,IPR036162, PF13408,IPR025827,G3DSA:3.40.50.1390,PS51737,IPR006119, IPR038109,PF07508,IPR011109,SSF53041,PTHR30461, PS51736,Coil,PF00239
MDSSPFLMQERMGIELMAKNKKAGFEPDMQDAVIYTRYSSHNQRDCSIEQQVADCEIFARQNNLRVVKVYADRHLSGTTDNRPQFQQMLKDAAHGHWAYVICWKIDRFARNRYDSATYKFRLKKAGVRVLYAKESIPDGPEGILLESVLEGSAEYYSAALAQNIRRGMKYNAEQCKVNSGSIPFGYCKGPDGRFAIHEANAEVVREIFRKAAAGMPFVDIANDLNSRGLKTSRGGRWNKGSFRLLMNEAYIGVYHFSDTRIEGGMPALIDQGTFWAANERLKANSSVRGRHQDGGDYLLTGKLKCAHCGSYMIGFSGTGKSGELHYYYGCQKRRRERTCKKANVPREWIERVVVKAALDYVLRPDVMEWIADAVMEYQEREAASAQLAALTAELEENQKATDNVMKAIEAGIITSTTKQRLLDLEAKAQDLKRAIELEKLSHVRLERDQVLFWLDRFRGGSLQSQEFRRKVIDAFVSVVYLSDDHLRIAFNYSGGSNAEADFDLVMDAEAAAGELSKKFAQGHVASTKQEKSEPVSDWRRVRIFRFLRV

SEQ ID NO: 2215 - protein, 549 aa, Unknown
  Description of Unknown: Integrase B2216 sequence
  SM00857,G3DSA:1.10.10.2600,IPR036162,PF13408,PS51737, G3DSA:3.40.50.1390,IPR025827,IPR006119,IPR038109,PF07508, IPR011109,SSF53041,PTHR30461,Coil,cd00338, PF00239
MAYRKITDIRDTIGMRAVFYARVSTAEEEQLNAIELQIEENRGCIKEHGWKLVGEYIDRSKSGTMVKGRDDYQRLYEDLYEDLFDIVVIKDQERLQRNTLDWYLFINRVVQTGKLLFMYMDGKFYSPDDALITGVRAIIAEEFSRNLSKKLHNYHDHRIEKARQGQEIALQGSGNVYGWDKKDGKYYINPEQAKIRRLMCEGIMARKGSTLIAKELNDAGYRNTVGKPWKPMDIPKFVYDCKNVGTMIINKERHDFESKQTIKLPKEEWVYVENALPPIVTQEEWDLICKIHEERVIATGSDRRGKKTSGYSFSGKLVCGICGAPYWRKQRVSKDEYWVCSTKQTKGRRTRKRDSTMGKAGEINPLGCDNENISYNSLMEIMGVVSERLQANTDTIKHDMINWLTKLRKQLLEANGGHTEADLQRELSRKSKLLDAYLDGILNKQEYQKKAEELDERIIQLKAETEKNKANSGDIAEIDKVLANIDEEVSRYVDGNEKLKVEYLLEHLEQVQIFPDKVIVIVPILSEGIVVEKTQYVSREKWCRKKYSV

SEQ ID NO: 2216 - protein, 549 aa, Unknown
  Description of Unknown: Integrase B2217 sequence
  PTHR30461:SF3,SM00857,G3DSA:1.10.10.2600,IPR036162,PF13408, PS51737,G3DSA:3.40.50.1390,IPR025827,IPR006119,IPR038109, PF07508,IPR011109,SSF53041,PF00239,PTHR30461, PS51736,Coil,cd00338
MKITKFPIDLSMLTEEEIDQFRQDPSTLFEGDTDVCLYLRFSSERQREQSIEGQLRDCRTFCKLNSYRITAIYVDRATTARKDVEKRVHFQEMIRDSEKKPWEYVVVWKLDRFARNRTDSALFKFRLRKNGVKVISATENISEKPEGIILEAVLEGMAEFYSADLSQKITRGMRESALKCHSIGGHVPLGYKIEDHKLVINPATAHIVQEAFELYANGETVADICRIFNTKGYRTAKGVEFNRNSFKSMFRNKRYIGVYTYKDIEVEGGVPAIIDKELFETVGHRLSKNAEAPARGKAKVDYLLAGKLFCGHCGGSMNGESGTSKTGAIHNYYTCYTRKRKHACDKKPLKKDWIEYIVAQDAMELLTDDTIQELADMAISQTEQDLRENTRIPELTDRMKETESGITNITKAVEKGIASDALMNRLVELEKEKKNLLRLLAEEEKYVCKIERSQIVYWLTEFKGGRIEDERYRRIIIDLMINSVTVWDEPDGFRITTAYNLTSCKSKTFRIAPSGEKGFGFEGSESTNMHQGEPRKGFAFGVSCSAKIG

SEQ ID NO: 2217 - protein, 549 aa, Unknown
  Description of Unknown: Integrase B2218 sequence
  PTHR30461:SF3,SM00857,G3DSA:1.10.10.2600,IPR036162,PF13408, IPR025827,PS51737,G3DSA:3.40.50.1390,IPR006119,IPR038109, PF07508,IPR011109,SSF53041,PF00239,PTHR30461, PS51736,Coil,cd00338
MRVSVNLNAQKPDTTTNAVIYARYSSHGQTEQSIEGQLAKGHEYAAAQGYTVVHEYIDRAMTGRNDNREAFQKMLSDTGKHQFQVVIVWKVDRFGRNREEIAFNKHTCKKNGVRVEYVAESLPNSPEAVILESVLEGMAEYYSIQLSQNIRRGQLESAKKCQCVGGSVPLGYTLDSDKHFVIDPQTAPVVKKIFDLYAEGATISEITGQLNEQGIRTARKQLFTKNSLTKLLKNEKYIGVYTYKDIVRVEGGVPAIVDESTFDRVQELLKINRRAPSHTWTKVEYLLTDKLFCGHCGSPMVGESGFSHTGAKYSYYGCIKRRREKACDKKPVRQDWIEALVLDETVKLLHDDELMEYIIDRTWEYYQVTDKVQEEKAVLEAQLAEVDKAINNLVRAIEAGIFNAATKSRMDELDAQKAALTASLADLELTSGIRITRDHIEYFLLRLRDLDVKDRECQKRLVQTFVNAVFIYDDGRVKITYNYSGQSSTITLNQIASAEKGKGFVCCLPCSTSRNPWRCKGFGFFSAAVYPHHTHKRFLFRTHEKPLCA

SEQ ID NO: 2218 - protein, 549 aa, Unknown
  Description of Unknown: Integrase B2219 sequence
  PTHR30461:SF3,IPR036162,PS51737,IPR011109,PTHR30461, PF00239,G3DSA:1.10.10.2600,IPR006119,SSF53041,G3DSA:3.30.420.40, SM00857,IPR025827,cd03770,IPR038109,PF00814,PS51736 ,SSF53067,PF13408,G3DSA:3.40.50.1390,PF07508,Coil,IPR000905
MEQRPLPTALYCRLSREDGDRMESDSIGNQRKLLEEYIENHPELTVAECYADDGYTGTNFQRPAFQRMLRDMESGRIRCVLVKDLSRFGRDYIETGRYLERWLPEHGVRFIAVTDNIDSARGAYDMMMPLKNLFNTQYARDISQKVKSSLHAKQQRGEFIGAFASYGYCKDPQNHNRLVIDPPAAEVVRRIFTLFENGTGKLRIARHLNEEGIPCPSEYKRLTGEKYRNNHRLAATTYWTYATIHRILQNEMYIGNMEQGRDDRLQMHGKARRKDRSLWTVVPGTHQPIIEQDQWQRVQTLLNANARTPDFQQNVSPFAGFLKCGDCGRAMVRTAWGGKTFYTCGSYKRCGASVCSKHYIAHDALTKVILDDLNRLIAGVENLRQLAQQSAGGVYDLPRASIEGHPLDMSFSGLKTAVVNLTHNAEQKGEPLDRAALARDFTRAVSDELVPRAMLAARTCGRKTLVAAGGVAANTILRADLMAACAHESVKLYLPPLRLCGDNGAMIGAQGYYEYLAGARADLSLNAYATRDIDDAVVAYRAQVRDIFA

SEQ ID NO: 2219 - protein, 549 aa, Unknown
  Description of Unknown: Integrase B2220 sequence
  PTHR30461:SF3,SM00857,G3DSA:1.10.10.2600,IPR036162,PS51737, G3DSA:3.40.50.1390,IPR006119,IPR038109,PF07508,SSF53041, IPR011109,PTHR30461,Coil,PS51736,cd00338, PF00239
MKSTIYARYSTDKQRESSIDDQTRLCRQRAQTEGFEITAIYSDDGVSGSMPVSRRSGGAKLIADALAGRFDALIVESLDRLSRDQVEQESIIRRFEHHGIIIIGVSDGYDSRMDGRKIMRGVRGLINELYLDDLRHKTHRGQEGQVARGFLAGGKSYGYNIIKTDKGSRPEINEQEAKQVKWIFTRYAEGWSAQKIAAELNRQRIPSPRGGTWAVSGIYGSPAKGCGILNNEMYIGRYVWNRSQWVKDPDTGNRQRIDRPESEWKITEMPELRIIDDNLWQAVRNRMGKHGKKIIGRKATTLFGGLMTCPYCGGSIIAVSSRLYGCNTRKDRGSSVCKGILFSRDDADKNLLAILQDEMLTDEAIHEIEDQVHAILARRQKDQRDQKNAAEHRLKELDAEINRLVDAIASIGLSNALKSRLQAAESERDALQAQQSAQKAINKPIHKMDIVGRIRKKIGEMKTVLTSDTKRARKIIADMLGEIRITEKAGNVIAEYDNATQKLLLVSSGVSLNVVAGARYQLERHTKIIAKRKPSIYRLQDQNKQPPKK

SEQ ID NO: 2220 - protein, 549 aa, Unknown
  Description of Unknown: Integrase B2221 sequence
  PTHR30461:SF3,SM00857,G3DSA:1.10.10.2600,IPR036162,PF13408, IPR025827,G3DSA:3.40.50.1390,PS51737,IPR006119,IPR038109, PF07508,IPR011109,SSF53041,PTHR30461,Coil, PS51736,cd00338,PF00239
MQQALNAVIYARYSSHSQQEQSIEGQLRDCYAYAQREGLQVVGEYIDRAISGKTDERPDFQRMIADASKKQFQRVIVWKLDRFARNRYDSAHYKAKLKKYGVKVVSATENISDEPEGIILEGLLESMAEYYSANLSKHVRRGQRESIINGTYLGGVPPIGYKVENKRLVIDERTAPTIRYMFEQYAKGVPKREIIAELNARGIRNKKGKPLTLSSMQAALRNEKYIGIYRYSGQEVTGGCEALIDEATFRKVQERLDKVKHAPAAAKAKIDYLLQGKAFCGYCGSRMVGESGRGKMGNTYHYYACGKRKKEHTCAKKNEKKDFIEWYVVEQTVEYVLTPDRMDYIAAALVAQYEKDFGDNRIKDYEKQLERINGEIRSLVDTLAVCPPSARQPIFDKMELLDVQKTDLEIDIAKLRVAARVQLTEEQIKVWLKQFCKGDLDDMEFRERIIDVFINSVYLYDDKTVIYYNIEGGKQVSYMEMLDSAEEPPFADDPQGSSGVRISNDTPRHLLHRNSIGIAVVFLRQRKPVGQALTNALRTITIDKNYIMR

SEQ ID NO: 2221 - protein, 548 aa, Unknown
  Description of Unknown: Integrase B2222 sequence
  cd00338,SM00857,G3DSA:1.10.10.2600,IPR036162,PF13408, PS51737,G3DSA:3.40.50.1390,IPR025827,IPR006119,IPR038109, PF07508,IPR011109,SSF53041,PTHR30461,PS51736, Coil,PF00239
MSTGTELRAVFYARVSTEEEKQLNALEKQIQENKDVIRDHGWRLVGEYIDEGKTGTTTKRRNDYKRLLKDMTENKFDIVVCKDQDRLQRNTLDWYLFVDNLVTNNLKLFMYLDNKFFKPSEDALITGVKAIIAEEYSRNLSKKLNNSNKRRIERALNGEEVSAMGNGKSLAFKIVNGKWVKDEEEAKLGKKIFELYLEYDSIRKVRDWVNEHGYTNSVGKPFTSESISRILKNEKAKGVIVMGKYHHDFDKKKIVRRSEEELVRIPAPELAYVSEEVFDKVQERLRAKTGNGRGVNAYSDPLSGKIYCGSCGRKLWKHASNGYVNWMCASQVAKGDVECNGTRITTVAIRNIYKKITDNLEVNKEVVKQDIVKWLNELKATLSDTSVNEKIQKDLDKMERKRTKLLEAYLEDFISKDDYKAKYEAIEGQIEEKKKLLVPVEENEDIKVIESVLQNIDDEIDAYVKTLDMEESKVDFLIEHTKRITVLENRDIIIELDLVAGAIIAGKDFLLYVHDTMPQHHGPKHLHPSGPQTAPRCCFRDRFSCDQP

SEQ ID NO: 2222 - protein, 548 aa, Unknown
  Description of Unknown: Integrase B2223 sequence
  PTHR30461:SF3,SM00857,G3DSA:1.10.10.2600,IPR036162,PF13408, PS51737,G3DSA:3.40.50.1390,IPR025827,IPR006119,IPR038109, PF07508,IPR011109,SSF53041,PTHR30461,Coil, PS51736,cd00338,PF00239
MNNFGYSAPRAFGYCRKSTTGQREESIEAQQRAIVSYAAASGFELVKVYKDHGNSGRNGERPQFTQMVQDAIEGGAQFIIVHKLDRFFRNAERQTLVEAQLRRYGVRVLSASEHFDDTPQGQFMRNVTKAINQWYSANLAQEVVKGLRENAMSARNTGGPPPLGYAVDKATGKFVIAPREAEAVQLIFRLYLQDVGYAGILDALNAGGYTTRRGRPFGKNSLYDILRNEKYTGLYIWNRLAPADFDGKTNRRRLKPRDEWVCVENGMPRIIDPADWQRVQDEMEKRRHRNAQHKAKAFYLLSGLVVCGGCGGQMGGEMRRYKSHGQPVEYRYYSCINKKRLHDDGGHVRAVPADKLEKAVVDYLQHVVLRPETMDAICAAVLGATQPGTPPAERASELRKEIGILQQKIDRLYAAIENGLDAPITIQRINDLRKQQAALQAEVDALGEDVRKTADTVEQLRRVWANIRLENMQPEQLRAFIRKFVEKIIVYDDDDGGHRVRIVLNPAHVTPDKLPENLITAPLSELDTFFGYDRQRSTPAKSRLSRLR

SEQ ID NO: 2223 - protein, 548 aa, Unknown
  Description of Unknown: Integrase B2224 sequence
  PTHR30461:SF3,cd00338,SM00857,G3DSA:1.10.10.2600,IPR036162, PF13408,IPR025827,G3DSA:3.40.50.1390,PS51737,IPR006119, IPR038109,PF07508,IPR011109,SSF53041,PTHR30461, PS51736,Coil,PF00239
MSATIPSLMQAPRAFGYCRKSTNEQREESLEAQQRAIVTFAATAGYELVQVYKDHGNSGRRGERPEFQRMLADAAAAGVQYIIVHKLDRFFRNADQQTVVEMQLRRQGIQVISAAEHFDATPQGQFMRNVTKAINQWYSANLAQEVAKGLRENALTARTTGGPPPLGYTVDKSTGQYAIVPREAEAVQLIFKLYQQGAGYTEIIDALNAGGYVTRRGQPFGKNSLYDILRNEKYTGLYIWNRLAPADVDGRTSRRRLKPRDEWVCVENGMPQIIPTEQWQAVQDEMDKRKHRNAQYKAKAFYLLSGLVYCGGCGGVMSGEMHRYNSHGKAVEYRYYRCTAQHRQHDGGAHAHRVNADRLENAVIDYIQHIVLDPVNMDALCVAVLEALQPDGRNAERAKELKQEAGIIQQKVDRLYQAIENGLDAAGAIERINALQKQRMTLLAQANDLDISAESAAASVDELRRVWSGINLRELQPEKMRVIVRDLIYKIVVFDDGPRGSRLRIILNPARLNPSAIPKAIETMPFSELQNFSHTGGSGLPLPKAQQL

SEQ ID NO: 2224 - protein, 548 aa, Unknown
  Description of Unknown: Integrase B2225 sequence
  PTHR30461:SF3,SM00857,G3DSA:1.10.10.2600,IPR036162,PF13408, PS51737,G3DSA:3.40.50.1390,IPR025827,IPR006119,IPR038109, PF07508,IPR011109,SSF53041,PTHR30461,Coil, PS51736,cd00338,PF00239
MATKKKKTVPRQDGVYNRAVIYARYSPGPNQRDESIEGQIRECKDVAKRHGLMVIHEYIDKRMTGTNDDRPDFQRMLRDADRGLFDVVIVWKNDRFARNRYDSAIYKQRLKRNGVKILYAKEHIPDGPEGIILESVLEGMAEYYSANLAQNIRRGQRENALEGKFVGGTVPLGYKLDAEKRYVLDKEKAPLVLEIFERYVAGEAVIDICNDLNARGYLTARKRKFNRSSLHRILANEKYTGLYRFEDIETPGAVPRIISDELFQAAAVRAARNKKHRRTMQEEHVEYMLTGKIFCGHCGESMGGSWGTSKSGVRHYYYVCNGRKTKKSSCRKKPERKEKLEKIVIHSVVNNIICNDNVINYIVDRCMLIQEREIDRSPADTLRRELADTETALKNVMTAIEAGIITATTKDRLVELEERCATLKQGIAAAEITPPKLSREQLLFIFEKYKNRDINDINFVRDVIDTFVHAVYVYDDKILITFNYSDDNTVEVPLSEIEKAAADAASDVFDFCGVISTIPKKLITGIIHCNQLFYFPILIILRPHRASP

SEQ ID NO: 2225 - protein, 548 aa, Unknown
  Description of Unknown: Integrase B2226 sequence
  PTHR30461:SF3,SM00857,G3DSA:1.10.10.2600,IPR036162,PF13408, PS51737,G3DSA:3.40.50.1390,IPR025827,IPR006119,IPR038109, PF07508,SSF53041,IPR011109,PTHR30461,Coil, PS51736,cd00338,PF00239
MKKFPIDLSCLTEEEISQFQEDPYTLYNGDQNVAIYLRYSSTGQSDQSIEGQLRDCRTFCKANHYRIVAIYVDRATTARKDVEKRVHLMEMISDSAKQNWEYVIIWKLDRFARNRNDSAIMKMRLRKNGVKVLSATEHLTDSPESIILESVLEGMAEFFSAELSQKVTRGMRESALKCHSVGGHIPLGYKVENHKLVVDPDTAHIVQEAFSLYANGESVADICRKFNSAGYKTAKNTEFNRSSFKAMFRNTRYIGTYTYKDIVIENGIPAIIDKELFETVQRRLSKTATAPARGKAKVDYLLSGKLFCGHCGASMNGESGAGRHGKVYHYYSCYTKKRKLGCDKRPLKKDYIEGIVARDALNLLTDQLIDEIADMAIRQSEQDLINDTHIPQLTAQLSEVEKSITNITAAIEKGIASETLMNRLVQLEHEKKTLNKEIKAEEKFVYRIDRDQIIFWLSQFKYGNIEDEDFRRRLIDLLVNSVTVWDEPDGYKITTAYNLTSCKTKTFRVEKNPAAEEATGFDFGESECTKSPRNRLISRTFAFHKFRF

SEQ ID NO: 2226 - protein, 548 aa, Unknown
  Description of Unknown: Integrase B2227 sequence
  PTHR30461:SF3,cd00338,SM00857,G3DSA:1.10.10.2600,IPR036162, PF13408,IPR025827,G3DSA:3.40.50.1390,PS51737,IPR006119, IPR038109,PF07508,IPR011109,SSF53041,PTHR30461, PS51736,Coil,PF00239
MSATIPSLMQAPRAFGYCRKSTNEQREESLEAQQRAIVTFAATAGYELVQVYKDHGNSGRRGERPEFQRMLADAAAAGVQYIIVHKLDRFFRNADQQTVVEMQLRRQGIQVISAAEHFDATPQGQFMRNVTKAINQWYSANLAQEVAKGLRENALTARTTGGPPPLGYTVDKSTGQYAIVPREAEAVQLIFKLYQQGAGYTEIIDALNAGGYVTRRGQPFGKNSLYDILRNEKYTGLYIWNRLAPADVDGRTSRRRLKPRDEWVCVENGMPQIIPTEQWQAVQDEMDKRKHRNAQYKAKAFYLLSGLVYCGGCGGVMSGEMHRYNSHGKAVEYRYYRCTAQHRQHDGGAHAHRVNADRLENAVIDYIQHIVLDPVNMDALCVAVLEALQPDGRNAERAKELKQEAGIIQQKVDRLYQAIENGLDAAGAIERINALQKQRMTLLAQANDLDISAESAAASVDELRRVWSGINLRELQPEKMRVIVRDLIYKIVVFDDGPRGSRLRIILNPARLNPAAIPKAIETMPFSELQNFSHTAGSGLPLPKAQQL

SEQ ID NO: 2227 - protein, 548 aa, Unknown
  Description of Unknown: Integrase B2228 sequence
  PTHR30461:SF3,SM00857,G3DSA:1.10.10.2600,IPR036162,PS51737, G3DSA:3.40.50.1390,IPR006119,IPR038109,PF07508,IPR011109, SSF53041,PTHR30461,Coil,cd00338,PF00239
MYKEYPKFYNYEVKEYGRKSRTDDPLLSTDEILEKHSKIVEEYAVKYLGGPIPDDNKYMEVASGESLKDRPEITRLLKDIEDPAVKAIIVVEVQRLSRGDLEDAGRLIRLLRYTNTYVITPMKIYDLRDEYDRDAFERELKRGNEYLEYFKKIQARGRLASVKDGNYIGSTAPYGFDRIEKFEADGKKSYHTLIERKDQADVVRMIFNWYCEEDIGVTAICRRLEDIGAKTKTGQSTWKPSIIFSILENHHYIGCTRWNWRKTVKIIEDQEIKKLRPKAKVDEFLLFEGKHDGIISEEQFNKAREIRGKRHRTRRDLTLKNPFSGIMFCKRCGHKIGYNTYTRNGVEYAPPKLVCNNQVHCKSGSVKYSEVFEYVRKVLKDCIGDFEVRIENDQDDSLKLHTDLMARLTKQLADLEKKEMEQWEAQYDPDPAVRLPQHIFAKLNEKVLKEKEEVNKALEKAKGSAPKHINYRDELIKTKDALRILEDVELDAKTKNQYLKTVIDKMVYERDPIVQITKDNAEKYNVDLSKGMQYYNPPYKITIELKCD

SEQ ID NO: 2228 - protein, 548 aa, Unknown
  Description of Unknown: Integrase B2229 sequence
  PTHR30461:SF3,SM00857,G3DSA:1.10.10.2600,IPR036162,PF13408, IPR025827,G3DSA:3.40.50.1390,PS51737,IPR006119,IPR038109, PF07508,IPR011109,SSF53041,PTHR30461, Coil,PS51736,cd00338,PF00239
MKKFPIDLSCLTEEEISQFQEDPYTLYNGDQNVAIYLRYSSTGQSDQSIEGQLRDCRTFCKANHYRIVAIYVDRATTARKDVEKRVHLMEMISDSAKQNWEYVIVWKLDRFARNRNDSAIMKMRLRKNGVKVLSATEHLTDSPESIILESVLEGMAEFFSAELSQKVTRGMRESALKCHSVGGHIPLGYKVENHKLVVDPDTAHIVQKAFSLYANGESVAAICRKFNSAGYKTAKNTEFNRSSFKAMFRNTRYIGTYTYKDIVIENGIPAIIDKELFEAVQRRLSKTATAPARGKAKVDYLLSGKLFCGHCGASMNGESGAGRHGKVYHYYSCYTKKRKLGCDKRPLKKDYIEGIVARDALNLLTDQLIDEIADMAIRQSEQDLINDTHIPQLTAQLSEVEKSITNITAAIEKGIASETLMNRLVQLEHEKKTISKEIKAEEKFVYRIDRDQIVFWLSQFKYGNIEDENFRRRLIDLLVNSVTVWDEPDGYKITTAYNLTSCKTKTFRVEKNPAAEEATGFDFGESECTKSPRNRLISMTFAFHKLRF

SEQ ID NO: 2229 - protein, 548 aa, Unknown
  Description of Unknown: Integrase B2230 sequence
  PTHR30461:SF3,SM00857,G3DSA:1.10.10.2600,IPR036162,PS51737, G3DSA:3.40.50.1390,IPR006119,IPR038109,PF07508,IPR011109, SSF53041,PTHR30461,Coil,PS51736,cd00338, PF00239
MKSTIYARYSTDKQRESSIDDQTRLCRQRAQTEGFDITAIYSDDGVSGSMPVSRRSGGAKLIADALAGRFDALIVESLDRLSRDQVEQESIIRRFEHHGIIIIGVSDGYDSRMDGRKIMRGVRGLINELYLDDLRHKTHRGQEGQVARGFLAGGKSYGYNIVKTDKGSRPEINDQEAKQVKWIFTRYADGWSVQKIAAELNRQGIPSPRGGTWAVSGIYGSPAKGCGILNNEMYIGRYVWNRSQWVKDPDTGNRQRIDRPESEWKITEMPELRIIDDNLWQAVRNRMGKHGKKIIGRKATTLFGGLMTCPYCGGSIIAVSSRLYGCNTRKDRGASVCKGILFSRDDADKNLLAILQDEMLTDEAIHEIEDQVHAILASRQKDQRDQKNAAEKRLKELDAEINRLVDAIASIGLSNALKSRLQAAESERDALQAQQSEKAINKPIHKMDIVGRIRKKIGEMKTVLTSDTKRARKIIADMLGEIRITEKAGNVIAEYDNATQKLLLVSSGVSLNVVAGARYQLERHTKIIAKRKPSIYRLQNQNKQPLKK

SEQ ID NO: 2230 - protein, 548 aa, Unknown
  Description of Unknown: Integrase B2231 sequence
  PTHR30461:SF3,SM00857,G3DSA:1.10.10.2600,IPR036162,PS51737, G3DSA:3.40.50.1390,IPR006119,IPR038109,PF07508,IPR011109, SSF53041,PF00239,PTHR30461,PS51736,Coil, cd00338
MYKEYPTFYYYDTREYGRKSRTDDPLLSTEEVLEKHSKIIEEYATKYLGGPIPPENKYMEVGSGESLRDRPEITRLLKDIEDPAVKAIIVVDVQRLSRGDLEDAGRLIRLLRYTNTYVITPMKIYDLRDEYDRDAFERELKRGNEYLEYFKKIQARGKLLSVKEGNYVGSTAPYGFDRIEKFEANGKKSYYTLIERKDQADVVRMIFNWYCEEDIGVTAICRRLEDIGAKTKTGHKIWKPSIIFSILENHHYIGCTRWNWRKTVKIIEDQEIKKLRPKAKVDEFLLFEGKHDGIISEDQFNKAREIRGKRHRTRRDLTLKNPFSGIMFCKKCGHKIGYNTYTRNGVEYAPPKLVCNNQVHCKTGSVNFQEVFDYVRKVLRDCIEDFEVRIENDQDDSFKLHRDLVDRLEKQLKDLEKKEIEQWDAQYDPDPNKRLPPHIFAKLNEKVLKEKEEVNRALDKAKDSMPKQVDYREELIKTTDALRVLEDPKLDAKTKNQYLKTVISKMVYKRDPNVQISKENAEKYGIEISKGLRYYTPPYKITIELKCD

SEQ ID NO: 2231 - protein, 548 aa, Unknown
  Description of Unknown: Integrase B2232 sequence
  PTHR30461:SF3,cd00338,SM00857,G3DSA:1.10.10.2600,IPR036162, PF13408,IPR025827,G3DSA:3.40.50.1390,PS51737,IPR006119, IPR038109,PF07508,IPR011109,SSF53041,PTHR30461, PS51736,Coil,PF00239
MSATIPSLMQAPRAFGYCRKSTNEQREESLEAQQRAIVTFAATAGYELVQVYKDHGNSGRRGERPEFQRMLADAAAAGVQYIIVHKLDRFFRNADQQTVVEMQLRRQGIQVISAAEHFDATPQGQFMRNVTKAINQWYSANLAQEVAKGLRENALTARTTGGPPPLGYTVDKSTGQYAIVPREAEAVQLIFKLYQQGAGYTEIIDALNAGGYVTRRGQPFGKNSLYDILRNEKYTGLYIWNRLAPADVDGRTSRRRLKPRDEWVCVENGMPQIIPTEQWQAVQDEMDKRKHRNAQYKAKAFYLLSGLVYCGGCGGVMSGEMHRYNSHGKAVEYRYYRCTAQHRQHDGGAHAHRVNADRLENAVIDYIQHIVLDPVNMDALCVAVLEALQPDGRNAERAKELKQEAGIIQQKVDRLYQAIENGLDAAGAIERINALQKQRMTLLAQANDLDVSAESAAASVDELRRVWSGINLRELQPEKMRAIVRDLIYKIVVFDDGPRGSRLRIILNPARLNPAAIPKAIETMPFSELQNFSHTAGSGLPLPKAQQL

SEQ ID NO: 2232 - protein, 548 aa, Unknown
  Description of Unknown: Integrase B2233 sequence
  PTHR30461:SF3,SM00857,G3DSA:1.10.10.2600,IPR036162,PF13408, IPR025827,PS51737,G3DSA:3.40.50.1390,IPR006119,IPR038109, PF07508,SSF53041,IPR011109,PTHR30461,Coil, PS51736,cd00338,PF00239
MKFKYPAMGTTKNAVIYARYSSHSQREESIEGQLRICHEYAKAEGLAIVGEYIDRAISGTTDARPDFQRMIDDAKKKQFSYVIVYRLDRFARNRYDSVLYKHELKQCGVKVVSATEGIGTGDESILLEALIEASAEYYSMELSRKIKRGRQDSAMKGNFLGGAVPLGYKVVDSKFIIDDETAPIVRYIFERYAAGIGKKQIIDELTAKGYMRRTGKPFTYRAFDSVLRNRKYTGEFTQTGITVEGGCPAIVDTEMFEKVQARLEINRRAPAKAKAKTEYLLSGKMFCGYCGEPMIGISGTGRHEKTFYYYSCVGRRGKSGCKKQHEKKDFIEWYVCEQTVQYMQDPERLSHVAKRIIEINDAEFDGGKVKELERAVENCDNDIRKLVDALTTIPDAGRAALYDKIERIGAAKADMEIDLAKVRVLSEVRYKQEDVEAWIRSMCRGDLMDFEFRRQLIDVFINSVYLFDDRVVIVYNIKNGKQVSAIDVLNAVEELDGVELFPDSAEDSSAGGNGSFLVADAPPYTKNPNLFPIGNGFGFLIFIKDIID

SEQ ID NO: 2233 - protein, 548 aa, Unknown
  Description of Unknown: Integrase B2234 sequence
  PTHR30461:SF3,SM00857,G3DSA:1.10.10.2600,IPR036162,PF13408, PS51737,IPR025827,G3DSA:3.40.50.1390,IPR006119,IPR038109, PF07508,SSF53041,IPR011109,PF00239,PTHR30461, PS51736,Coil,cd00338
MKKFPIDLSCLTEEEISQFQEDPYTLYNGDQEVALYLRYSSTGQSDQSIEGQLRDCRAFCKANHYRIVAIYVDRATTARKDVEKRVHLMEMVADSAKQNWEYVIVWKLDRFARNRNDSAIMKMRLRKNGVKVLSATEHLTDSPESIILESVLEGMAEFFSAELSQKVTRGMRESALKCHSVGGHIPLGYKVENHKLVVDPDTAHIVQEAFSLYANGESVADICRKFNSAGYKTAKNTEFNRSSFKAMFRNTRYIGTYTYKDIVIENGIPAIIDKELFETVQRRLSKTATAPARGKAKVDYLLSGKLFCGHCGASMNGESGAGRHGKVYHYYSCYTKKRKLGCDKRPLKKDYIEGIVARDALNLLTDQLIDEIADMAIRQSEQDLINDTHIPQLTAQLSEVEKSITNITAAIEKGIASETLMNRLVQLEHEKKTLNKEIKAEEKFVYRIDRDQIVFWLSQFKYGNIEDEDFRRRLIDLLVNSVTVWDEPDGYKITTAYNLTSCKAKTFRVEKNPAAEEATGFDFGESECTKSPRNRLISRTFAFHKFRF

SEQ ID NO: 2234 - protein, 548 aa, Unknown
  Description of Unknown: Integrase B2235 sequence
  PTHR30461:SF3,SM00857,G3DSA:1.10.10.2600,IPR036162,PS51737, G3DSA:3.40.50.1390,IPR006119,IPR038109,PF07508,IPR011109, SSF53041,PTHR30461,Coil,cd00338,PF00239
MYKECPKFYNYEVKEYGRKSRTDDPLLSTDEILEKHSKIVEEYAVKYLGGPIPDDNKYMEVASGESLKDRPEITRLLKDIEDPAVKAIIVVEVQRLSRGDLEDAGRLIRLLRYTNTYVITPMKIYDLRDEYDRDAFERELKRGNEYLEYFKKIQARGRLASVKDGNYIGSTAPYGFDRIEKFEADGKKSYHTLIERKDQADVVRMIFNWYCEEDIGVTAICRRLEDIGAKTKTGQSTWKPSIIFSILENHHYIGCTRWNWRKTVKIIEDQEIKKLRPKAKVDEFLLFEGKHDGIIPEEQFNKAREIRGKRHRTRRDLTLKNPFSGIMFCKRCGHKIGYNTYTRHGIEYAPPKLVCNNQVHCKSGSVKYSEVFEYVRRVLKDCISDFEVRIENNQDDSLKLHTDLMARLTKQLADLEKKELEQWDAQYDPDPAKRLPQHIFAKLNEKVLKEKEEVNKALAKAKDSAPKHINYRDELIKTKDALRILEDVELDAKTKNQYLKTVISKMVYERDPIVQITKDNAEKYNMQSSKGTKYYNPPYKITIELKCD

SEQ ID NO: 2235 - protein, 548 aa, Unknown
  Description of Unknown: Integrase B2236 sequence
  PTHR30461:SF3,IPR036162,PS51737,IPR011109,PTHR30461, PS00397,PF00239,G3DSA:1.10.10.2600,IPR006119,SSF53041, cd00338,SM00857,IPR025827,IPR038109, PS51736,IPR006118,PF13408,G3DSA:3.40.50.1390,Coil
MKYAACYCRVSTDEQARFGFSIQAQKDALEKYCKENGYKYEFYIDEGISASSMKKRKALNEMLSKSSTFDMVLFTKLDRLSRNVLDANNINKLLIDNNCTMKAIDEDDIDTSTADGTFIFNLKVSLAQREIGKTSERINFVFKNKREKGEITSGTKKYGYDIVDKHFVVNEKEAENIRNLYQKFIDTNGSPLKTYEYFVTCFPFKGYDAMSNYLRETAYIGKYKLYRKSIYLENYIPRIMDDELFYRVQNLLKRKQKILTKNDKPSLFVGLVFCSVCGNRMYKKQDNRVTSQLIRYCCDNFRKFKIGSTERKCYNSNSIREDTIEDYLLKNLKMKLDEYKVTTKIIKEKAVKSNPKKEENIKNKMYKLKDLYLDDLIDKETYKSEYQKLQAQLQEVQKQTTIVNEKKDFSKVEKILNSDYIKNAGVEDTYIGVAEPIGYGKVASSTVSIFNNILSTRADIAYSVRESLLEAKGNYWSRFINSINPFYWLKIILYIPKSIFSYLGLNTDSILIKVFQLIYWLIGIICTLIITVFPEETKNFIMSFIHFS

SEQ ID NO: 2236 - protein, 548 aa, Unknown
  Description of Unknown: Integrase B2237 sequence
  cd00338,SM00857,G3DSA:1.10.10.2600,IPR036162,PF13408, PS51737,IPR025827,G3DSA:3.40.50.1390,IPR006119,IPR038109, PF07508,IPR011109,SSF53041,PTHR30461,PS51736, Coil,PF00239
MSIGTELRAVFYARVSTEEEKQLNALEKQIHENKDVIRDHGWRLVGEYIDEGKTGTTTKRRNDYKRLLKDMTENKFDIVVCKDQDRLQRNTLDWYLFVDNLVTNNLKLFMYLDNKFFKPSEDALITGVKAIIAEEYSRNLSKKLNNSNKRRIERALNGEEVSAMGNGKSLAFKIVNGKWVKDEEEAKLGKKIFELYLEYDSIRKVRDWVNEHGYTNSVGKPFTSESISRILKNEKAKGVIVMGKYHHDFDKKKIVRRSEEELVRIPAPELAYVSEEVFDKVQERLRAKTGNGRGVNAYSDPLSGKIYCGSCGRKLWKHASNGYVNWMCASQVAKGDVECNGTRITTVAIRNIYKKITDNLEVNKGVVKQDIVKWLNELKATLSDSSVNEKIQKDLDKLERKRTKLLEAYLEDFISKDDYKAKYEAIEGQIEEKKKLLVPVEENEDIKVIESVLQNIDDEIDAYVKTLDMEESKVDFLIEHTKRITVLENRDIIIELDLVAGAIIAGKDFLLYVHDTMPQHHGPKHLHPSGPQTAPRCCFRDRFSCDQP

SEQ ID NO: 2237 - protein, 548 aa, Unknown
  Description of Unknown: Integrase B2238 sequence
  cd03768,PTHR30461:SF3,SM00857,G3DSA:1.10.10.2600,IPR036162, PF13408,PS51737,G3DSA:3.40.50.1390,IPR025827,IPR006119, IPR038109,PF07508,IPR011109,SSF53041,PTHR30461, PS51736,Coil,PF00239
MKVAIYSRKSVFTGKGESIENQIEMCKEYFSRLNGNDVEYSIYEDEGFSGGNINRPRFQQLLKDIKKNSFDALICYRLDRISRNVADFSTTLELLQEHNVDFISIREQFDTSTPMGRAMVYIASVFAQLERETIAERIRDNMLQLSKTGRWLGGVCPLGFTSEKITYVDSEYNERSMFKLSPLEEEMNVVRFIFSKYLATSSIHMALKELLASNIKGKHGGDFASMSLADILKNPVYVQSDSSIKEYYESLGVNFFGEPNGCGIMLYNKKNSKGKLRDMSEWIAAVGKHKGIISSSDWLKVQYSLDRNSKKNNPRQGTSAKALLSGVLKCSICGAPMRVCYGRLRKDGKRNHYYMCTMKAHSCKSRCENPNAKGLELEQEVINRLINYNEETLLRKLTSYADELKSSTPNDMIKNIDKSIDEKKSEMDTLMSQLGKTNNPATQNFILKKADSLSNEIMDLENKLNGIHKKKEQNSIEMRNIEIIMSSFSEFTKLCSTIKDVSNIEDENIKIALRNLINRLVSKISYNGFTKEVVIDIMGSQENCSPSG

SEQ ID NO: 2238 - protein, 548 aa, Unknown
  Description of Unknown: Integrase B2239 sequence
  PTHR30461:SF3,cd00338,SM00857,G3DSA:1.10.10.2600,IPR036162, PF13408,IPR025827,G3DSA:3.40.50.1390,PS51737,IPR006119, IPR038109,PF07508,IPR011109,SSF53041,PTHR30461, PS51736,Coil,PF00239
MSATIPSLMQAPRAFGYCRKSTNEQREESLEAQQRAIVTFAATAGYELVQVYKDHGNSGRRGERPEFQRMLADAAAAGVQYIIVHKLDRFFRNADQQTVVEMQLRRQGIQVISAAEHFDATPQGQFMRNVTKAINQWYSANLAQEVAKGLRENALTARTTGGPPPLGYTVDKSTGQYAIVPREAEAVQLIFKLYQQGAGYTEIIDALNAGGYVTRRGQPFGKNSLYDILRNEKYTGLYIWNRLAPADVDGRTSRRRLKPRDEWVCVENGMPQIIPTEQWQAVQDEMDKRKHRNAQYKAKAFYLLSGLVYCGGCGGVMSGEMHRYNSHGKAVEYRYYRCTAQHRQHDGGAHAHRVNADRLENAVIDYIQHIVLDPVNMDALCVAVLEALQPDGRNAERAKELKQEAGIIQQKVDRLYQAIENGLDAAGAIERINALQKQRMTLLAQANDLDISAESAAASVDELRRVWSGINLRELQPEKMRVIVRDLIYKIVVFDDGPRGSRLLIILNPARLNPSAIPKAIETMPFSELQNFSHTGGSGLPLPKAQQL

SEQ ID NO: 2239 - protein, 548 aa, Unknown
  Description of Unknown: Integrase B2240 sequence
  PTHR30461:SF3,cd00338,SM00857,G3DSA:1.10.10.2600,IPR036162, PF13408,IPR025827,G3DSA:3.40.50.1390,PS51737,IPR006119, IPR038109,PF07508,IPR011109,SSF53041,PTHR30461, PS51736,Coil,PF00239
MSATIPSLMQAPRAFGYCRKSTNEQREESLEAQQRAIVTFAATAGYELVQVYKDHGNSGRRGERPEFQRMLADAAAAGVQYIIVHKLDRFFRNADQQTVVEMQLRRQGIQVISAAEHFDATPQGQFMRNVTKAINQWYSANLAQEVAKGLRENALTARTTGGPPPLGYTVDKSTGQYAIVPREAEAVQLIFKLYQQGAGYTEIIDALNAGGYVTRRGQPFGKNSLYDILRNEKYTGLYIWNRLAPADVDGRTSRRRLKPRDEWVCVENGMPQIIPTEQWQAVQDEMDKRKHRNAQYKAKSFYLLSGLVYCGGCGGTMAGEMHRYNSHGKAVEYRYYRCAAQHRQHDGGVHAHRVNADRLENAVIDYIQHIVLDPVNMDALCVAVLEALQPDGRNAERAKELKQEAGIIQQKVDRLYQAIENGLDAAGAIERINALQKQRMTLLAQANDLDISAESAAASVDELRRVWSGINLRELQPEKMRVIVRDLIYKIVVFDDGPRGSRLRIILNPARLNPAAIPKAIETMPFSELQNFSHTGGSGLPLPKAQQL

SEQ ID NO: 2240 - protein, 548 aa, Unknown
  Description of Unknown: Integrase B2241 sequence
  PTHR30461:SF3,cd00338,SM00857,G3DSA:1.10.10.2600,IPR036162, PF13408,IPR025827,PS51737,G3DSA:3.40.50.1390,IPR006119, IPR038109,PF07508,IPR011109,SSF53041,PTHR30461, PS51736,Coil,PF00239
MCAKKKPAMLEPDMQDAVIYTRYSSHNQRDCSIEQQVADCEIFARQNNLRVVKVYADRHLSGTTDNRPQFQQMLKDASHGHWAYVICWKIDRFARNRYDSATYKFRLKKAGVRVLYAKESIPDGPEGILLESVLEGSAEYYSAALAQNIRRGMKFNAEQCKVNSGSIPFGYCKGPDGRFAIHEANAEVVREIFRKAAAGMPFVDIANDLNSRGLKTSRGGRWNKGSFRLLMNEAYIGVYHFSDTRIEGGMPALIDQGTFWAANERLKANSSVRGRHQDGGDYLLTGKLKCAHCGSYMIGFSGTGKSGELHYYYGCQKRRRERACKKANVPREWIERVVVKAALDYVLRPDVMEWIADAVMEYQEREAASAQLAALTAELEENQKATDNVMKAIEAGIITSTTKQRLLDLEAKAQDLKRAIELEKLSHVRLERDQVLFWLDRFRGGSLQSQEFRRKVIDAFVSVVYLSDDHLRIAFNYSGGSNAEADFDLVMDAEAAAGELSKKFAQGHVASTSKKHLDSLKSRCFFFVYTTLFHALCNDRASRAGGEG

SEQ ID NO: 2241 - protein, 548 aa, Unknown
  Description of Unknown: Integrase B2242 sequence
  PTHR30461:SF3,cd00338,SM00857,G3DSA:1.10.10.2600,IPR036162, PF13408,IPR025827,G3DSA:3.40.50.1390,PS51737,IPR006119, IPR038109,PF07508,IPR011109,SSF53041,PTHR30461, PS51736,Coil,PF00239
MSATIPSLMQAPRAFGYCRKSTNEQREESLEAQQRAIVTFAATAGYELVQVYKDHGNSGRRGERPEFQRMLADAAAAGVQYIIVHKLDRFFRNADQQTVVEMQLRRQGIQVISAAEHFDATPQGQFMRNVTKAINQWYSANLAQEVAKGLRENALTARTTGGPPPLGYTVDKSTGQYAIVPREAEAVQLIFKLYQQGAGYTEIIDALNAGGYVTRRGQPFGKNSLYDILRNEKYTGLYIWNRLAPADVDGRTSRRRLKPRDEWVCVENGMPQIIPTEQWQAVQDEMDKRKHRNAQYKAKAFYLLSGLVYCGGCGGVMSGEMHRYNSHGKAVEYRYYRCTAQHRQHDGGAHAHRVNADRLENAVIDYIQHIVLDPVNMDALCVAVLEALQPDGRNAERAKELKQEAGIIQQKVDRLYQAIENGLDAAGAIERINALQKQRMTLLAQANDLDVSAESAAASVDELRRVWSGINLRELQPEKMRAIVRDLIYKIVVFDDGPRGSRLRIILNPARLNPSAIPKAIETMPFSELQNFSHTAGSGLPLPKAQRL

SEQ ID NO: 2242 - protein, 548 aa, Unknown
  Description of Unknown: Integrase B2243 sequence
  PTHR30461:SF3,cd00338,SM00857,G3DSA:1.10.10.2600,IPR036162, PF13408,IPR025827,PS51737,G3DSA:3.40.50.1390,IPR006119, IPR038109,PF07508,IPR011109,SSF53041,PTHR30461, PS51736,Coil,PF00239
MSATIPSLMQAPRAFGYCRKSTNEQREESLEAQQRAIVTFAATAGYELVQVYKDHGNSGRRGERPEFQRMLADAAVAGVQYIIVHKLDRFFRNADQQTVVEMQLRRQGIQVISAAEHFDATPQGQFMRNVTKAINQWYSANLAQEVAKGLRENALTARTTGGPPPLGYTVDKSTGQYAIVPREAEAVQLIFKLYQQGAGYTEIIDALNAGGYVTRRGQPFGKNSLYDILRNEKYTGLYIWNRLAPADVDGRTSRRRLKPRDEWVCVENGMPQIIPTEQWQAVQDEMDKRKHRNAQYKAKSFYLLSGLVYCGGCGGTMAGETHRYNSHGKAVEYRYYRCAAQHRQHDGGVHAHRVNADRLENAVIDYIQHIVLDPVNMDALCVAVLEALQPDGRNAERAKELKQEAGIIQQKVDRLYQAIENGLDAAGAIERINALQKQRMTLLAQANDLDISAESAAASVDELRRVWSGINLRELQPEKMRVIVRDLIYKIVVFDDGPRGSRLRIILNPARLNPSAIPKAIETMPFSELQNFSHTGGSGLPLPKAQQL

SEQ ID NO: 2243 - protein, 548 aa, Unknown
  Description of Unknown: Integrase B2244 sequence
  PTHR30461:SF3,cd00338,SM00857,G3DSA:1.10.10.2600,IPR036162, PF13408,IPR025827,G3DSA:3.40.50.1390,PS51737,IPR006119, IPR038109,PF07508,IPR011109,SSF53041,PTHR30461, PS51736,Coil,PF00239
MSATIPSLMQAPRAFGYCRKSTNEQREESLEAQQRAIVTFAATAGYELVQVYKDHGNSGRRGERPEFQRMLADAAAAGVQYIIVHKLDRFFRNADQQTVVEMQLRRQGIQVISAAEHFDATPQGQFMRNVTKAINQWYSANLAQEVAKGLRENALTARTTGGPPPLGYTVDKSTGQYAIVPREAEAVQLIFKLYQQGAGYTEIIDALNAGGYVTRRGQPFGKNSLYDILRNEKYTGLYIWNRLAPADVDGRTSRRRLKPRDEWVCVENGMPQIIPTEQWQAVQDEMDKRKHRNAQYKAKSFYLLSGLVYCGGCGGTMAGEMHRYNSHGKAVEYRYYRCTAQHRQHDGGVHAHRVNADRLENAVIDYIQHIVLDPVNMDALCVAVLEALQPDGRNAERAKELKQEAGIIQQKVDRLYQAIENGLDAAGAIERINALQKQRMTLLAQANDLDISAESAAASVDELRRVWSGINLRELQPEKMRVIVRDLIYKIVVFDDGPRGSRLRIILNPARLNPSAIPKAIETMPFSELQNFSHTGGSGLPLPKAQQL

SEQ ID NO: 2244 - protein, 548 aa, Unknown
  Description of Unknown: Integrase B2245 sequence
  PTHR30461:SF3,SM00857,G3DSA:1.10.10.2600,IPR036162,PS51737, G3DSA:3.40.50.1390,IPR006119,IPR038109,PF07508,SSF53041, IPR011109,PF00239,PTHR30461,PS51736,Coil, cd18722,cd00338
MYKEYPTFYYYDTREYGRKSRTDDPLLTTEEVLEKHSKIIEEYAIKYLGGPIPPENKYMEVGSGESLKDRPEITRLLKDIEDPAVKAIIVVDVQRLSRGDLEDAGRLIRLLRYTNTYVITPMKIYDLRDEYDRDAFERELKRGNEYLEYFKKIQARGKLLSVKEGNYVGSTAPYGFDRIEKFEANGKKSYYTLIEREDQADVVRMIFNWYCEEDIGVTAICRRLESIGAKTKTGCKTWKPSIIFSILENHHYIGCTRWNWRKTVKIIEDQEIKKLRPKAKVDEFLLFEGKHDGIISEEQFNKAREIRGKRHRTRRDLTLKNPFSGIMFCKKCGHKIGYNTYTRNGIEYAPPKLVCNNQVHCKTGSVNFQEVFNYVRKVLRDCIEDFEVRIENDRDDSFKLHRDLVERLEKQLKDLEKKEIDQWDAQYDPDPNKRLPQHIFAKLNEKVLKEKEEVNKALDKARDSMPKHVDYREELIKTTDALRILEDPELDAKTKNQYLKMVISKMVYERDPNVRISKENAEKYGFEISKGLHYHTPPYKITIELKCD

SEQ ID NO: 2245 - protein, 548 aa, Unknown
  Description of Unknown: Integrase B2246 sequence
  PTHR30461:SF3,SM00857,G3DSA:1.10.10.2600,IPR036162,PS51737, G3DSA:3.40.50.1390,IPR006119,IPR038109,PF07508,IPR011109, SSF53041,PF00239,PTHR30461,mobidb-lite,Coil, cd00338
MYKEYPKFYYYESLEYGRKSRMDDPLLSVEETLQRHSEIIDEYARKYLGGSIPEENRYMEVGSGESLKDRPEITRLLKAIENPAIKAIVVVDVQRLSRGDLEDAGKLIRLLRYTNTCVITPHKIYDLRDEYDRDAFERELKRGNEYLEYFKKIQARGRLASVKAGNYVGSVAPYGYDRVERYDEVLKKNYFTLVERKDQADVVRMIFNWYCNDDIGVTTICRRLEELGVKTKTGCSTWKPSIIFGILENVHYIGCVRWNWRKTIKVIENQEIKKLRPKAKVDEYLIFEGKHDGIISEEVFNKARIIKGTRHRTKRNLSLKNPFSGIMFCTKCGSKIGYNTYNRNGVEFAPPKLVCNNQVHCKTGSVDYNEVLDYMCKVLRDCIEDFKVRIENDQDDSLKLHKDLIERLTKQLKDAEQKEQDQWEAQYDPDPNKRLPQHIFEKLNKKVLAEKEEINKALDKAKGSAPKHIDYKDELIKTTEALKALEDADLDAKITNQYLKSIIDRIEYDRPQIVRINKKNAEIFETDVRKGLQYHVAPYTIRVKLKCE

SEQ ID NO: 2246 - protein, 548 aa, Unknown
  Description of Unknown: Integrase B2247 sequence
  PTHR30461:SF3,SM00857,G3DSA:1.10.10.2600,IPR036162,PS51737, G3DSA:3.40.50.1390,IPR006119,IPR038109,PF07508,SSF53041, IPR011109,PF00239,PTHR30461,mobidb-lite,Coil, cd00338
MYKEYPKFYYYESLEYGRKSRMDDPLLSVEETLQRHSEIIDEYARKYLGGSIPEENRYMEVGSGESLKDRPEITRLLKAIENPAIKAIIVVDVQRLSRGDLEDAGKLIRLLRYTNTYVITPMKIYDLRDEYDRDAFERELKRGNEYLEYFKKIQARGRLASVKAGNYVGSVAPYGYDRVERYDEVLKKNYFTLVERKDQADVVRMIFNWYCNDDIGVTTICRRLEELGVKTKTGCSTWKPSIIFGILENVHYIGCVRWNWRKTIKIIENQEIKKLRPKAKVDEYLIFEGKHDGIISEEVFNKARIVKGTRHRTKRNLSLKNPFSGIMFCTKCGSKIGYNTYNRNGVEFAPPKLVCNNQVHCKTGSVDYNEVLDYMCKVLRDCIEDFKVRIENDQDDSLKLHKDLIERLTKQLKDAEQKEQDQWEAQYDPDPNKRLPQHIFEKLNKKVLAEKEEINKALDKAKGSAPKHIDYKDELIKTTEALKALEDADLDAKITNQYLKSIIDRIEYDRPQIVRINKKNAEIFETDVRKGLQYHVAPYTIRVKLKCE

SEQ ID NO: 2247 - protein, 548 aa, Unknown
  Description of Unknown: Integrase B2248 sequence
  SM00857,G3DSA:1.10.10.2600,IPR036162,PF13408,PS51737, G3DSA:3.40.50.1390,IPR025827,IPR006119,IPR038109,PF07508, IPR011109,SSF53041,PTHR30461,Coil,PS51736, cd00338,PF00239
MIHGAFILARYSTENQSEASIEVQVERCREWCGKQSLPVLDVFADRAISGMKETRPEYQRMMQALYAGGADTVVIYDQSRMFRNMVYWFQFRETLQRIGVHVVSVTQPTVGGDLNDPAVFLNEGVTALFNQMWVLQTQQKVREGVRQRAKSGKHTGGVPALGYKVENERLVIDETEAETVRLIFGLYAAGQSYTEIIGELNRRSLKTKRGRPFGKNSLHDLLKNEKYVGRVLFGGKPVSYDGTRNSHAARGEYLESACPAIVPRELFDAVQQRLLKNRRSPGRSVVNMDQPLKGKVFCGDCGSAMTICYIIAQKTHSRYAYYKCAAKKRGLSCPSKMIRKDELEDIVASSVLDMLGHPNARATLLDVLRTQRNEFAKVSAPRLDALKKEHSVLQTKIRNSVEAIMNGLSSPELIAQTNAAEARKAEVEAELKTLQDAIEHQGIPDADLPRLLDKLIKNAKSNSAALLSTVLRVEVYPETIKIWTIFDDNPPDRNDKINKKTVPDILPIDVNMDQKFMHKCGDALWRTNIYAKHEIVIAILAARPQKIR

SEQ ID NO: 2248 - protein, 548 aa, Unknown
  Description of Unknown: Integrase B2249 sequence
  SM00857,G3DSA:1.10.10.2600,IPR036162,PF13408,IPR025827, G3DSA:3.40.50.1390,PS51737,IPR006119,IPR038109,PF07508, IPR011109,SSF53041,PTHR30461,Coil,cd00338, PF00239
MAYRKITDIRDTIGMRAVFYARVSTAEEEQLNAIELQIEENRGCIKDHGWKLVGEYIDRSKSGTMVKGRDDYQRLYEDLYEDLFDIVVIKDQERLQRNTLDWYLFINRVVQTGKLLFMYMDGKFYSPDDALITGVRAIIAEEFSRNLSKKLHNYHDHRIEKARQGQEIALQGSGNVYGWDKKDGKYYINPEQAKVRRLMCEGIMARKGSTLIAKELNDAGYRNTVGKPWKPMDIPKFVYDCKNVGTMIINKERHDFESKQTIKLPKEEWVYVENALPPIVTQEEWDLICKIHEERVIATGSDRRGKKTSGYSFSGKLVCGICGAPYWRKQRVSKDEYWVCSTKQTKGRRTRKRDSTMGKAGEINPLGCDNENISYNSLMEIMGVVSERLQANTDTIKQDMINWLTKLRKQLLEANGGHTEADLQRELSRKSKLLDAYLDGILNKQEYQKKAEELDERIIQLKAETEKNKANSGDIAEIDKVLANIDEEVSRYVDGNEKLKVEYLLEHLEQVQIFPDKVIVIVPILSEGIVVEKTQYVSREKYCSKTRK

SEQ ID NO: 2249 - protein, 548 aa, Unknown
  Description of Unknown: Integrase B2250 sequence
  cd03768,PTHR30461:SF3,SM00857,G3DSA:1.10.10.2600,IPR036162, PF13408,IPR025827,G3DSA:3.40.50.1390,PS51737,IPR006119, IPR038109,PF07508,IPR011109,SSF53041,PTHR30461, PS51736,Coil,PF00239
MIAAIYSRKSKFTGIGESIDNQIEMCKEYAKTHLSDKNITDFLVYEDEGFSGGNTNRPEFQRLISDAKANKFNILICYRLDRIRRNVADFSGTLETLQKHDIDFVSIKEQFDTTSPMGRAMIYISSVFAQLERETIAERIRDNMTELAKTGRWLGGVAPVGFRAEQIKCLDENMKERKLMKLVPVPEELEIVKTIYNKYLELKSLSAVETWTLQNNMTTKRGCNFNKSNLRTILTNTAYVKANEKVIHYLESLGITVCGKVNNISGLLTYNKQKTVYGDSGEIKRLFRDKTEWIAAVSKHDGIIEPDDWLKVQKIRKENKDKFPNADKSHTALFSGKLKCAKCGSKMQVTYGHVSKETGKRLYYYRCTLRYWSKNVRCDCKNASANEIDGVVKEALKDFSKNKENLLKTLSQNIKKASKDTNFEDKKTSLNNKLKENESKIDKLLDKFALDDSIQDLLLKKIKALKEENEKIKQEIDSLTADELKENEDELNLDLIRMLLNKCSMIDSLTNDEIKEISNALIEDILWNGDTGDLTINFIGSGESKKKQ

SEQ ID NO: 2250 - protein, 548 aa, Unknown
  Description of Unknown: Integrase B2251 sequence
  PTHR30461:SF3,SM00857,G3DSA:1.10.10.2600,IPR036162,PF13408, IPR025827,PS51737,G3DSA:3.40.50.1390,IPR006119,IPR038109, PF07508,IPR011109,SSF53041,PTHR30461,Coil, PS51736,cd00338,PF00239
MKFKYPAMGTTKNAVIYARYSSHSQREESIEGQLRICHEYAKVEGLAIVGEYIDRAISGTTDARPDFQRMIDDAKKKQFSYVIVYRLDRFARNRYDSVLYKHELKQCGVKVVSATEGIGTGDESILLEALIEASAEYYSMELSRKIKRGRQDSAMKGNFLGGAVPLGYKVVDSKFIIDDETAPIVRYIFERYAAGIGKKQIIDELTAKGYMRRTGKPFTYRAFDSVLRNRKYTGEFTQTGITVEGGCPAIVDTEMFEKVQARLEINRRAPAKAKAKTEYLLSGKMFCGYCGEPMIGISGTGRHEKTFYYYSCVGRRGKSGCKKQHEKKDFIEWYVCEQTVQYMQDPERLSHVAKRIIEINDAEFDGGKVKELERAVENCDNDIRKLVDALTTIPDAGRAALYDKIERIGAAKADMEIDLAKLRVLSEVRYKQEDVEAWIRSMCRGDLMDFEFRRQLIDVFINSVYLFDDRVVIVYNIKHGKQVSAIDVLNAVEELDGVELFPDSAEDSSAGGNGSFLVADAPPKQYNPNLVPIGHGFGFLVFIKDIEV

SEQ ID NO: 2251 - protein, 548 aa, Unknown
  Description of Unknown: Integrase B2252 sequence
  PTHR30461:SF3,cd00338,SM00857,G3DSA:1.10.10.2600,IPR036162, PF13408,IPR025827,G3DSA:3.40.50.1390,PS51737,IPR006119, IPR038109,PF07508,IPR011109,SSF53041,PTHR30461, PS51736,Coil,PF00239
MSATIPSLMQAPRAFGYCRKSTNEQREESLEAQQRAIVTFAATAGYELVQVYKDHGNSGRRGERPEFQRMLADAAAAGVQYIIVHKLDRFFRNADQQTVVEMQLRRQGIQVISAAEHFDATPQGQFMRNVTKAINQWYSANLAQEVAKGLRENALTARTTGGPPPLGYTVDKSTGQYAIVPREAEAVQLIFKLYQQGAGYTEIIDALNAGGYVTRRGQPFGKNSLYDILRNEKYTGLYIWNRLAPADVDGRTSRRRLKPRDEWVCVENGMPQIIPTEQWQAVQDEMDKRKHRNAQYKAKSFYLLSGLVYCGGCGGTMAGETHRYNSHGKAVEYRYYRCAAQHRQHDGGVHAHRVNADRLENAVIDYIQHIVLDPVNMDALCVAVLEALQPDGRNAERAKELKQEAGIIQQKVDRLYQAIENGLDAAGAIERINALQKQRMTLLAQANDLDISAESAAASVDELRRVWSGINLRELQPEKMRVIVRDLIYKIVVFDDGPRGSRLRIILNPARLNPSAIPKAIETMPFSELQNFSHTGGSGLPLPKAQQL

SEQ ID NO: 2252 - protein, 548 aa, Unknown
  Description of Unknown: Integrase B2253 sequence
  PTHR30461:SF3,SM00857,G3DSA:1.10.10.2600,IPR036162,PS51737, G3DSA:3.40.50.1390,IPR006119,IPR038109,PF07508,SSF53041, IPR011109,PTHR30461,Coil,cd00338,PF00239
MYKEYPKFYNYEVKEYGRKSRTDDPLLSTDEILEKHSKIVEEYAVKYLGGPIPEENKYMEVASGESLKDRPEITRLLKDIEDPAVKAIIVVEVQRLSRGDLEDAGRLIRLLRYTNTYVITPMKIYDLRDEYDRDAFERELKRGNEYLEYFKKIQARGRLASVKDGNYIGSTAPYGFDRIEKFEADGKKSYHTLIERKDQADVVRMIFNWYCEEDIGVTAICRRLEDIGAKTKTGQSTWKPSIIFSILENHHYIGCTRWNWRKTVKIIEDQEIKKLRPKAKVDEFLLFEGKHDGIISEEQFNKAREIRGKRHRTRRDLILKNPFSGIMFCKRCGHKIGYNTYTRNGVEYAPPKLVCNNQVHCKSGSVKYSEVFEYVRRVLKDCISDFEVRIENNQDDSLKLHTDLMARLTKQLADLEKKELEQWDAQYDPDPAKRLPQHIFAKLNEKVLKEKEEVNKALAKAKDSAPKHINYRDELIKTKDALRILEDVELDAKTKNQYLKTVISKMVYERDPIVQITKDNAEKYNMQSSKGTKYYNPPYKITIELKCD

SEQ ID NO: 2253 - protein, 548 aa, Unknown
  Description of Unknown: Integrase B2254 sequence
  PTHR30461:SF3,IPR036162,PS51737,IPR011109,PTHR30461, PF00239,G3DSA:1.10.10.2600,IPR006119,SSF53041,cd00338, SM00857,IPR025827,IPR038109,PS51736, mobidb-lite,PF13408,G3DSA:3.40.50.1390,PF07508,Coil
MSTGTELRAVFYARVSTEEEKQLNALEKQIQENKDVIRDHGWRLVGEYIDEGKTGTTTKRRNDYKRLLKDMTENKFDIVVCKDQDRLQRNTLDWYLFVDNLVTNNLKLFMYLDNKFFKPSEDALITGVKAIIAEEYSRNLSKKLNNSNKRRIERALNGEEVSAMGNGKSLAFKIVNGKWVKDEEEAKLGKKIFELYLEYDSIRKVRDWVNEYGYTNSVGKPFTSESISRILKNEKAKGVIVMGKYHHDFDKKKIVRRSEEELVRIPAPELAYVSEEVFDKVQERLRAKTGNGRGVNAYSDPLSGKIYCGSCGRKLWKHASNGYVNWMCASQVAKGDVECNGTRITTVAIRNIYKKITDNLEVNKEVVKQDIVKWLNELKATLSDTSVNEKIQKDLDKLERKRTKLLEAYLEDFISKDDYKAKYEAIEGQIEEKKKLLVPVEENEDIKVIESVLQNIDDEIDAYVKTLDMEESKVDFLIEHTKRITVLENRDIIIELDLVAGAIIAGKDFLLYVHDTMPQHHGRKRPHPPGPPAAPRQPVRDRLRCDQP

SEQ ID NO: 2254 - protein, 548 aa, Unknown
  Description of Unknown: Integrase B2255 sequence
  PTHR30461:SF3,SM00857,G3DSA:1.10.10.2600,IPR036162,PS51737, G3DSA:3.40.50.1390,IPR006119,IPR038109,PF07508,IPR011109, SSF53041,PF00239,PTHR30461,PS51736,Coil, cd00338
MYKEYPHFYYYDTREYGRKSRTDDPLLSTEEVLEKHSRIIEEYAIKYLGGPIPPENKYMEVGSGESLKDRPEITRLLKDIEDPAVRAIIVVDVQRLSRGDLEDAGRLIRLLRYTNTYVITPMKIYDLRDEYDRDAFERELKRGNEYLEYFKKIQARGKLLSVKEGNYVGSTAPYGFDRIEKSEADGKKSYYTLTERKDQADVVRMIFNWYCEEDIGVTAICRRLEDLGVRTKTGHKTWKPSIIFNILENHHYIGCTRWNWRKTVKVIEDQEIKKLRPKAKVDEFLLFEGKHDGIISEEQFNKAREIRGKRHRTRRDLTLKNPFSGIMFCKKCGHKIGYNTYTRNGIEYAPPKLVCNNQVHCKTGSVNFQEVFDYVCKTLRNCIEDFEVRIENDHDDSFKLHRDLVERLGRQLKDLEKKEIEQWDAQYDPDPNKRLPQHIFAKLNEKVLKEKEEVNKALDKAKDSMPRRIDYREELMKTRNALRILEDDSVDAKTKNRYLKTIISKMVYERDPNVRISKENAEQYGFDISKGLRYYTPPYKITIELKCD

SEQ ID NO: 2255 - protein, 548 aa, Unknown
  Description of Unknown: Integrase B2256 sequence
  PTHR30461:SF3,cd00338,SM00857,G3DSA:1.10.10.2600,IPR036162, PF13408,IPR025827,G3DSA:3.40.50.1390,PS51737,IPR006119, IPR038109,PF07508,IPR011109,SSF53041,PTHR30461, PS51736,Coil,PF00239
MRAKKKPAMLEPDMQDAVIYTRYSSHNQRDCSIEQQVADCEIFARQNNLRVVKVYADRHLSGTTDNRPQFQQMLKDAAHGHWAYVICWKIDRFARNRYDSATYKFRLKKAGVRVLYAKESIPDGPEGILLESVLEGSAEYYSAALAQNIRRGMKYNAEQCKVNSGSIPFGYCKGPDGRFAIHEANAEVVREIFRKAAAGMPFVDIANDLNSRGLKTSRGGRWNKGSFRLLMNEAYIGVYHFSDTRIEGGMPALIDQGTFWAANERLKANSSVRGRHQDGGDYLLTGKLKCAHCGSYMIGFSGTGKSGELHYYYGCQKRRRERACKKTNVPREWIERVVVKAALDYVLRPDVMEWIADAVMEYQEREAASAQLAALTAELEENQKATDNVMKAIEAGIITSTTKQRLLDLEAKAQDLKRAIELEKLSHVRLERDQVLFWLDRFRGGSLQSQEFRRKVIDAFVSVVYLSDDHLRIAFNYSGGSNAEADFDLVMDAEAAAGELSKKFAQGHVASTTKKHLDSLKSRCFFFVYTTLFHALCNDRASRADGER

SEQ ID NO: 2256 - protein, 548 aa, Unknown
  Description of Unknown: Integrase B2257 sequence
  PTHR30461:SF3,SM00857,G3DSA:1.10.10.2600,IPR036162,PF13408, IPR025827,PS51737,G3DSA:3.40.50.1390,IPR006119,IPR038109, PF07508,SSF53041,IPR011109,PTHR30461,Coil, PS51736,cd00338,PF00239
MKFKYPAMGTTKNAVIYARYSSHSQREESIEGQLRICHEYAKAEGLAIVGEYIDRAISGTTDARPDFQRMIDDAKKKQFSYVIVYRLDRFARNRYDSVLYKHELKQCGVKVVSATEGIGTGDESILLEALIEASAEYYSMELSRKIKRGRQDSAMKGNFLGGAVPLGYKVVDSKFIIDDETAPIVRYIFERYAAGIGKKQIIDELTAKGYMRRTGKPFTYRAFDSVLRNRKYTGEFTQTGITVEGGCPAIIDTEMFEKVQARLEINRRAPAKAKAKTEYLLSGKMFCGYCGEPMIGISGTGRHGKTFYYYSCVGRRGKSGCKKQHEKKDFIEWYVCEQTVQYMQDPERLSHVAKRIIEINDAEFDGGKVKELERAVENCDNDIRKLVDALTTIPDAGRAALYDKIERIGAAKADMEIDLAKVRVLSEVRYKQEDVEAWIRSMCRGDLMDFEFRRQLIDVFINSVYLFDDRVVIVYNIKNGKQVSAIDVLNAVEELDGVELFPDSAEDSSAGGSGSFLVTDAPPYMKNPNLFPIGNGFGFLIFIKDIID

SEQ ID NO: 2257 - protein, 548 aa, Unknown
  Description of Unknown: Integrase B2258 sequence
  SM00857,G3DSA:1.10.10.2600,IPR036162,PF13408,IPR025827, G3DSA:3.40.50.1390,PS51737,IPR006119,IPR038109,PF07508, IPR011109,SSF53041,PTHR30461,Coil,cd00338, PF00239
MAYRKITDIRDTIGMRAVFYARVSTAEEEQLNAIELQIEENRGCIKDHGWKLVGEYIDRSKSGTMVKGRDDYQRLYEDLYEDLFDIVVIKDQERLQRNTLDWYLFINRVVQTGKLLFMYMDGKFYSPDDALITGVRAIIAEEFSRNLSKKLHNYHDHRIEKARQGQEIALQGSGNVYGWDKKDGKYYINPEQAKVRRLMCEGIMARKGSTLIAKELNDAGYRNTVGKPWKPMDIPKFVYDCKNVGTMIINKERHDFESKQTIKLPKEEWVYVENALPPIVTQEEWDLICKIHEERVIATGSDRRGKKTSGYSFSGKLVCGICGAPYWRKQRVSKDEYWVCSTKQTKGRRTRKRDSTMGKAGEINPLGCDNENISYNSLMEIMGVVSERLQANTDTIKQDMINWLTKLRKQLLEANGGHTEADLQREISRKSKLLDAYLDGILNKQEYQKKAEELDERIIQLKAETEKNKANSGDIAEIDKVLANIDEEVARYVDGNEKLKVEYLLEHLEQVQIFPDKVIVIVPILSEGIVVEKTQYVSREKYCSKTRK

SEQ ID NO: 2258 - protein, 548 aa, Unknown
  Description of Unknown: Integrase B2259 sequence
  PTHR30461:SF3,SM00857,G3DSA:1.10.10.2600,IPR036162,PF13408, IPR025827,G3DSA:3.40.50.1390,PS51737,IPR006119,IPR038109, PF07508,IPR011109,SSF53041,PTHR30461,cd00338, PF00239
MPTSKNTARKYAAGGSSDNSCGVESLRAVIYARYSSSGQREESIEGQLRDCYEFAKKHGIIVIGEYIDKAMTGRVDRRPDFQRMMKDSEKGRFNCVLLWKMDRFARNRYDSAMYKYKLKKNGIRIFYAKETIPDGPEGIILESVMEGYAEYYSENLAQNVKRGNYDSALELKTLGKTCLGLKTGPDGRYMIDQAEAAIVRRIFEEYAEGERAKDIYERLNSEGYRTSRGGKFNKNSLRRILSNKKYIGVYEYEDIYVENGIPAIITDRDLFERVQKMLKINHDAPARGKAQNFLLTTKLFCGLCGSPMIGDGGTSHTGKAYAYYSCTKRKRGRSCKKESVPKDWIEDLVVGELVKIVHNDELIEQIADRVMEYQKREKDQSGLHALEIRQKENEKAISNMLAAIEAGIITPSTKTRLMELEADRADIEKGIAHELLAEPEFERDQIIYFLERFRSGDINDEAYRIMLVDTFLNSVYLYDDDHLVLVMNYSGENCKVDLKLVEGAVSGDGCKGSAFAPSSAVNECSCKSMESILQLFFYARNLLKYFLK

SEQ ID NO: 2259 - protein, 548 aa, Unknown
  Description of Unknown: Integrase B2260 sequence
  PTHR30461:SF3,cd00338,SM00857,G3DSA:1.10.10.2600,IPR036162, PF13408,PS51737,G3DSA:3.40.50.1390,IPR025827,IPR006119, IPR038109,PF07508,IPR011109,SSF53041,PTHR30461, PS51736,Coil,PF00239
MSATIPSLMQAPRAFGYCRKSTNEQREESLEAQQRAIVTFAATAGYELVQVYKDHGNSGRRGERPEFQRMLADAAAAGVQYIIVHKLDRFFRNADQQTVVEMQLRRQGIQVISAAEHFDATPQGQFMRNVTKAINQWYSANLAQEVAKGLRENALTARTTGGPPPLGYTVDKSTGQYAIVPREAEAVQLIFKLYQQGAGYTEIIDALNAGGYVTRRGQPFGKNSLYDILRNEKYTGLYIWNRLAPADVDGRTSRRRLKPRDEWVCVENGMPQIIPTEQWQAVQDEMDKRKHRNAQYKAKSFYLLSGLVYCGGCGGTMAGEMHRYNSHGKAVEYRYYRCAAQHRQHDGGAHAHRVNADRLENAVIDYIQHIVLDPVNMDALCVAVLEALQPDGRNAERAKELKQEAGIIQQKVDRLYQAIENGLDAAGAIERINALQKQRMTLLAQANDLDISAESAAASVDELRRVWSGINLRELQPEKMRVIVRDLIYKIVVFDDGPRGSRLRIILNPARLNPAAIPKAIETMPFSELQNFSHTAGSGLPLPKAQQL

SEQ ID NO: 2260 - protein, 548 aa, Unknown
  Description of Unknown: Integrase B2261 sequence
  PTHR30461:SF3,cd00338,SM00857,G3DSA:1.10.10.2600,IPR036162, PF13408,PS51737,G3DSA:3.40.50.1390,IPR025827,IPR006119, IPR038109,PF07508,IPR011109,SSF53041,PTHR30461, PS51736,Coil,PF00239
MSTGTELRAVFYARVSTEEEKQLNALEKQIQENKDVIRDHGWRLVGEYIDEGKTGTTTKRRNDYKRLLKDMTENKFDIVVCKDQDRLQRNTLDWYLFVDNLVTNNLKLFMYLDNKFFKPSEDALITGVKAIIAEEYSRNLSKKLNNSNKRRIERALNGEEVSAMGNGKSLAFKIVNGKWVKDEEEAKLGKKIFELYLEYDSIRKVRDWVNEHGYTNSVGKPFTSESISRILKNEKAKGVIVMGKYHHDFDKKKIVRRSEEELVRIPAPELAYVSEEVFDKVQERLRAKTGNGRGVNAYSDPLSGKIYCGSCGRKLWKHASNGYVNWMCASQVAKGDVECNGTRITTVAIRNIYKKITDNLEVNKGVVKQYIVKWLNELKATLSDTSVNEKIQKDLDKLERKRTKLLEAYLEDFISKDDYKAKYEAIEGQIEEKKKLLVPVEENEDIKVIESVLQNIDDEIDAYVKTLDMEESKVDFLIEHTKRITVLENRDIIIELDLVAGAIIAGKDFLLYVHDTMPQHHGPKHLHPSGPQTAPRCCFRDRFSCDQP

SEQ ID NO: 2261 - protein, 548 aa, Unknown
  Description of Unknown: Integrase B2262 sequence
  PTHR30461:SF3,SM00857,G3DSA:1.10.10.2600,IPR036162,PF13408, IPR025827,G3DSA:3.40.50.1390,PS51737,IPR006119,IPR038109, PF07508,IPR011109,SSF53041,PTHR30461,Coil, PS51736,cd00338,PF00239
MQASVKKNISVIPAKPAYDRSIRPQMRTLRVAAYCRVSTLMEQQESSYEAQVQYYTEKIKSNPNWKLAGIYADDGKSATSTRKRSDFQSMIDDCMAGKIDMVITKSISRFARNTVDSLTNIRKLKEKNIAVFFEKEGINTLEGSGELLITILSSQAQEESRNISENCHWGIVRRFEAGQVIVNHSKFLGYTKDRDGNLVIVPEEAELVRRIYRLFLEGNSSYRIKRILESEGIKTVTGNTVWQATVIDKMLTNEKYMGDALLQKTYTVDFLTKKKVANKGIVPQYYIEDDHEAIIPKELFYRVQEEKARRGNIYRAAIKKKRGEEKSKYSGKYALSDLMVCAECGQPYRRQVWSKYGKKSAVWRCDNRLKHGSERCRNSPTLKEEILHEAIMTAISKVVEDQGEFVQAFRENVIRIIGNYGSKAEPTEYDTEIQKQEKRLMTLIEESAKGNCQEADFDREYRGVTEQLKELRKKKEQFMKEQRLAEAYDQRVEEMDSYMKKTGVLRREFDNDLVWRLIQTVKVINQNKIEIQFRSGIVMVQRLDAWED

SEQ ID NO: 2262 - protein, 548 aa, Unknown
  Description of Unknown: Integrase B2263 sequence
  PTHR30461:SF3,SM00857,G3DSA:1.10.10.2600,IPR036162,PS51737, G3DSA:3.40.50.1390,IPR006119,IPR038109,PF07508,SSF53041, IPR011109,PTHR30461,Coil,PS51736,cd00338, PF00239
MYKEYPTFYYYDTREYGRKSRTDDPLLSTEEVLEKHSKIIEEYAIKYLGGPIPPENKYMEVGSGESLKDRPEITRLLKDIEDPAVKAIIVVDVQRLSRGDLEDAGRLIRLLRYTNTYIITPMKIYDLRDEYDRDAFERELKRGNEYLEYFKKIQARGKLLSVKEGNYVGSTAPYGFDRIEKFEDNGKKSYHTLTERKDQADIVRMIFNWYCEEDIGVTAICRRLEDIGAKTKTGHTTWKPSIIFSILENHHYIGCTRWNWRKTVKIIEDQEIKKLRPKAKVDEFLLFEGKHDGIISEEQFNKAREIRGKRHRTRRDLTLKNPFSGIMFCKKCGSKIGYNTYTRNGVEYAAPKLVCNNQVHCKTGSVSFQEVFDYVRRVLKDCIEDFEVRIENDHDNSFKLHKDLVERLERQLKDLEKKELDQWDAQYDPDPNKRLPQHIFAKLNEKVLKEKEEVNKALDNAKNSMPKHVDYRNELIKTTDALRVLEDVELDAKTKNQYLKTVISKMVYERDPIVQISKENAEKYGFEISKGLRYYTPPYKITIELKCD

SEQ ID NO: 2263 - protein, 548 aa, Unknown
  Description of Unknown: Integrase B2264 sequence
  PTHR30461:SF3,SM00857,G3DSA:1.10.10.2600,IPR036162,PS51737, G3DSA:3.40.50.1390,IPR006119,IPR038109,PF07508,IPR011109, SSF53041,PTHR30461,Coil,cd00338,PF00239
MYKEYPKFYYYQTKEYGRKSRMDDPLLSVEETLQKHSEIIDEYAQKYLGGSIPEENKYMEIGSGESLKDRPEVSRLLKDIEDPEVKAIIVVDVQRLSRGDLEDAGKLIRLLRYTNTYVITPMKIYDLRDEYDRDAFERELKRGNEYLEYFKKIQARGRLASVKAGNYVGSVAPYGFDRIEKYDETLKKSYFTLIERKDQADVVRMIFNWYCNDDIGVTAICRRLEELGVKTKTGCSIWKPSIIFGILENVHYIGCVRWNWRKTIKVIENQELKKLRPKAKVDEYLIFEGKHDGIISEEVFNKARIIKGNRHRTKGNLSLKNPFSGIMYCKKCGSKIGYNTYSRNGVEYAPPKLVCNNQVHCKTGSVDYNEVLDYMCNVLRDCIADFEVRIENEQDDSLKLHKDLIERLTKQLKDVEKKELDQWEAQYDPDPKKRLPQHIFEKLNEKVLAEKEEINKALDKAKDSVPKHIDYKDELVKTTDALRALEDSDLDAKIANQYLKSIIDRIEYNRPQIVRITKKNAEMFEADIKKGLQYHIAPYTIRVKLKCE

SEQ ID NO: 2264 - protein, 548 aa, Unknown
  Description of Unknown: Integrase B2265 sequence
  PTHR30461:SF3,SM00857,G3DSA:1.10.10.2600,IPR036162,PS51737, G3DSA:3.40.50.1390,IPR006119,IPR038109,PF07508,SSF53041, IPR011109,PF00239,PTHR30461,mobidb-lite, Coil,cd00338
MYKEYPKFYYYESLEYGRKSRMDDPLLSVEETLQRHSEIIDEYARKYLGGSIPEENRYMEVGSGESLKDRPEITRLLKAIENPAIKAIIVVDVQRLSRGDLEDAGKLIRLLRYTNTCVITPHKIYDLRDEYDRDAFERELKRGNEYLEYFKKIQARGRLASVKAGNYVGSVAPYGYDRVERYDEVLKKNYFTLVERKDQADVVRMIFNWYCNDDIGVTTICRRLEELGVKTKTGCSTWKPSIIFGILENVHYIGCVRWNWRKTIKVIENQEIKKLRPKAKVDEYLVFEGKHDGIISEELFYKARMIKGKRHRTKQNLSLKNPFSGIMFCTKCGSKIGYNTYNRNGVEFAPPKLVCNNQVHCKTGSVDYNEVLDYICKVLRDCIEDFKVRIENDQDDSLKLHKDLIERLTKQLKDAEQKEQDQWEAQYDPDPNKRLPQHIFEKLNKKVLAEKEEINKALDKAKGSAPKHIDYKDELIKTTEALKALEDADLDAKITNQYLKSIIDRIEYDRPQIVRINKKNAEIFETDVRKGLQYHVAPYTIRVKLKCE

SEQ ID NO: 2265 - protein, 548 aa, Unknown
  Description of Unknown: Integrase B2266 sequence
  SM00857,G3DSA:1.10.10.2600,IPR036162,PF13408,PS51737, G3DSA:3.40.50.1390,IPR025827,IPR006119,IPR038109,PF07508, IPR011109,SSF53041,PTHR30461,Coil,PS51736, cd00338,PF00239
MIHGAFILARYSTENQSEASIEVQVERCREWCGKQSLPVLDVFADRAISGMKETRPEYQRMMQALYAGGADTVVIYDQSRMFRNMVYWFQFREALQRIGVHVVSVTQPTVGGDLNDPAVFLNEGVTALFNQMWVLQTQQKVREGVRQRAKSGRHTGGIPALGYKVENERLVIDETEAETVRLIFGLYAAGQSYTEIIGELNRRCLKTKRGRPFGKNSLHDLLKNEKYVGRVLFGGKPVSYDGTRNSHAARGEHLVSACPAIVSQELFDAVQQRLLKNRRSPGRSVVNMDQPLKGKVFCGDCGSAMTICYVIAQKTHSRYAYYKCAAKKRGLSCPSKMIRKDELEDIVASSVLDMLGHPNARATLLDVLRTQRNEFAKVSAPRLDALKKEHSVLQTKIRNSVEAIMNGLSSPELIAQTNAAEARKAEVEAELKTLQDVIEHQGIPDADLPRLLDKLIKNAKSNSAALLSTVLRVEVYPETIKIWTIFDDNPPDRNDKINKKTVPDILPIDVNMDPTFMHKCGDALWRTNIYAKHEIVIAILAARPQKIR

SEQ ID NO: 2266 - protein, 548 aa, Unknown
  Description of Unknown: Integrase B2267 sequence
  SM00857,G3DSA:1.10.10.2600,IPR036162,PF13408,IPR025827, G3DSA:3.40.50.1390,PS51737,IPR006119,IPR038109,PF07508, SSF53041,IPR011109,PTHR30461,Coil,cd00338, PF00239
MAYRKITDIRDTIGMRAVFYARVSTAEEEQLNAIELQIEENRGCIKDHGWKLVGEYIDRSKSGTMVKGRDDYQRLYEDLYEDLFDIVVIKDQERLQRNTLDWYLFINRVVQTGKLLFMYMDGKFYSPDDALITGVRAIIAEEFSRNLSKKLHNYHDHRIEKARQGQEIALQGSGNVYGWDKKDGKYYINPEQAKVRRLMCEGIMARKGSTLIAKELNEAGYRNTVGKPWKPMDIPKFVYDCKNVGTMIINKERHDFESKQTIKLPKEEWVYVENALPPIVTQEEWDLICKIHEERVIATGSDKRGKKTSGYSFSGKLVCGICGAPYWRKQRVSKDEYWVCSTKQTKGRKTRKRDSTMGKAGEINPLGCDNENISYNSLMEIMGVVSERLQANTDTIKHDMINWLTKLRKQLLEANGGHTEADLQRELSRKSKLLDAYLDGILNKQEYQKKAEELDERIIQLKAETEKNKANSGDIAEIDKVLANIDEEVARYVDGNEKLKVEYLLEHLEQVQIFPDKVIVIVPILSEGIVVEKTQYVSREKCDCESSF

SEQ ID NO: 2267 - protein, 548 aa, Unknown
  Description of Unknown: Integrase B2268 sequence
  PTHR30461:SF3,cd00338,SM00857,G3DSA:1.10.10.2600,IPR036162, PF13408,IPR025827,G3DSA:3.40.50.1390,PS51737,IPR006119, IPR038109,PF07508,IPR011109,SSF53041,PTHR30461, PS51736,Coil,PF00239
MAKKKKPAGGNAIIYARYSSHNQRDVSIEQQIEACRKHAAELGLTITDTYEDRAISGRTDNRPAFQRMMRDAEDGKFQYVLAWKSNRMGRNMMQAMVNESRLMDCGVKVFYAEEDFDDSAAGRFALRSMMNVNQFYSDNLAEDVRRGLMDNASKCMANGRQPLGYKRGEDGKVVVDEPAAAIVREIYTRIASGEMFMAIARDLNRRGIKTQSGSEWNKSSFKVLCRNERYRGIYIYGDTRIEGGIPPIVDDVLWYKVQEVLKVKKSKNRHHCPSDEDYLLTGKLRCGKCGGYMIGMSGRSKTGDVHHYYACQNRRVGHTCDKKNIRRDVVEPAVAQAIKQYCLTDDAIEWITDQTIAYWEDEDRKLQIDSIENDLSAVQSSISNVMKAIEMGVITETTRDRLIELERQQTDLKSKLALAKEEIVHVDRKDLISSLLAFRHGNVHDRAYQEKLFSAFLIAVYVYDDDHLKLVFNSFGKDDTVNIALDLGENDDNSGLSDVSKSSPILSNGQPRSHPVYAGWFFCSILLYKNSVPPLRRYAHFYAVITGC

SEQ ID NO: 2268 - protein, 548 aa, Unknown
  Description of Unknown: Integrase B2269 sequence
  PTHR30461:SF3,cd00338,SM00857,G3DSA:1.10.10.2600,IPR036162, PF13408,PS51737,G3DSA:3.40.50.1390,IPR025827,IPR006119, IPR038109,PF07508,IPR011109,SSF53041,PTHR30461, PS51736,Coil,PF00239
MSTGTELRAVFYARVSTEEEKQLNALEKQIQENKDVIRDHGWRLVGEYIDEGKTGTTTKRRNDYKRLLKDMTENKFDIVVCKDQDRLQRNTLDWYLFVDNLVTNNLKLFMYLDNKFFKPSEDALITGVKAIIAEEYSRNLSKKLNNSNKRRIERALNGEEVSAMGNGKSLAFKIVNGKWVKDEEEAKLGKKIFELYLEYDSIRKVRDWVNEHGYTNSVGKPFTSESISRILKNEKAKGVIVMGKYHHDFDKKKIVRRSEEELVRIPAPELAYVSEEVFDKVQERLRAKTGNGRGVNAYSDPLSGKIYCGSCGRKLWKHASNGYVNWMCASQVAKGDVECNGTRITTVAIRNIYKKITDNLEVNKGVVKQYIVKWLNELKATLSDTSVNEKIQKDLDKLERKRTKLLEAYLEDFISKDDYKAKYEAIEGQIEEKKKLLVPVEENEDIKVIESVLQNIDDEIDAYVKTLDMEESKVDFLIEHTKRITVLENRDIIIELDLVAGAIIAGKDFLLYVHDTMPQHHGPKHLHPSGQQTAPRCCFRDRFSCDQP

SEQ ID NO: 2269 - protein, 548 aa, Unknown
  Description of Unknown: Integrase B2270 sequence
  PTHR30461:SF3,SM00857,G3DSA:1.10.10.2600,IPR036162,PF13408, PS51737,G3DSA:3.40.50.1390,IPR025827,IPR006119,IPR038109, PF07508,IPR011109,SSF53041,PF00239,PTHR30461, PS51736,Coil,cd00338
MNTVIYARYSAGPRQTDQSIEGQLRVCTDFCKQRGLTVIDTYCDRHISGRTDERPEFQRLIADAKRKKFEAVVVYKTDRFARNKYDSAVYKRELKRNGIQIFYAAEAIPDGPEGIILESLMEGLAEYYSAELAQKIKRGMHESALKCQSTGSGRPLGYRVDEQKHFQIDPESAQTVQTIFEQYIKGESNAAICELLNSRGLRTAQGKPFNKNSINRIIKNRKYIGEYRYHDIVVEGGMPAIISKDTFNLAQAEMERRRTRKAPKSPKAEYLLAGRLFCGHCKGPMQGVSGTGKSGNKWYYYYCGNTRGKNKTCDKKQVSRDRLERAVVDFTVRYILQEDVLEELARKVHAAQERQNDTASEIAFYEKKLADNKKSIANVLRAIESGAATQTLPVRLQELENEQAVILGELSFLKGKHLAFTEDQILFALMKHLEPYPGESEQDYRRRIISDFVSEVYLYDDRLLIYFNISSEDGKLKSADLSNIEGSEFDEGLVSSTIMWRQKRCLLRKARLYRAFLLPKRRFFSVPKRRCKIAVFPLWIDLNSHTTE

SEQ ID NO: 2270 - protein, 548 aa, Unknown
  Description of Unknown: Integrase B2271 sequence
  PTHR30461:SF3,SM00857,G3DSA:1.10.10.2600,IPR036162,PF13408, IPR025827,PS51737,G3DSA:3.40.50.1390,IPR006119,IPR038109, PF07508,SSF53041,IPR011109,PTHR30461,Coil, PS51736,cd00338,PF00239
MKFKYPAMGTTKNAVIYARYSSHSQREESIEGQLRICHEYAKAEGLAIVGEYIDRAISGTTDARPDFQRMIDDAKKKQFSYVIVYRLDRFARNRYDSVLYKHELKQCGVKVVSATEGIGTGDESILLEALIEASAEYYSMELSRKIKRGRQDSAMKGNFLGGAVPLGYKVVDSKFIIDDETAPIVRYIFERYAAGIGKKQIIDELTAKGYMRRTGKPFTYRAFDSVLRNRKYTGEFTQTGITVEGGCPAIVDTEMFEKVQARLEINRRAPAKAKAKTEYLLSGKMFCGYCGEPMIGISGTGRHEKTFYYYSCVGRRGKSGCKKQHEKKDFIEWYVCEQTVQYMQDPERLSHVAKRIIEINDAEFDGGKVKELERAVENCDNDIRKLVDALTTIPDAGRAALYDKIERIGAAKADMEIDLAKVRVLSEVRYKQEDVEAWIRSMCRGDLMDFEFRRQLIDVFINSVYLFDDRVVIVYNIKNGKQVSAIDVLNAVEELDGVELSSDSTEDGNAGGSGSFLVADAPPYMKNPNLFPIGNGFGFLIFIKDIID

SEQ ID NO: 2271 - protein, 548 aa, Unknown
  Description of Unknown: Integrase B2272 sequence
  PTHR30461:SF3,cd00338,SM00857,G3DSA:1.10.10.2600,IPR036162, PF13408,IPR025827,G3DSA:3.40.50.1390,PS51737,IPR006119, IPR038109,PF07508,IPR011109,SSF53041,PTHR30461, PS51736,Coil,PF00239
MSATIPSLMQAPRAFGYCRKSTNEQREESLEAQQRAIVTFAATAGYELVQVYKDHGNSGRRGERPEFQRMLADAAAAGVQYIIVHKLDRFFRNADQQTVVEMQLRRQGIQVISAAEHFDATPQGQFMRNVTKAINQWYSANLAQEVAKGLRENALTARTTGGPPPLGYTVDKSTGQYAIVPREAEAVQLIFKLYQQGAGYTEIIDALNAGGYVTRRGQPFGKNSLYDILRNEKYTGLYIWNRLAPADVDGRTSRRRLKPRDEWVCVENGMPQIIPTEQWQAVQDEMDKRKHRNAQYKAKSFYLLSGLVYCGGCGGTMAGEMHRYNSHGKAVEYRYYRCAAQHRQHDGGVHAHRVNADRLENAVIDYIQHIVLDPVNMDALCVAVLEALQPDGRNAERAKELKQEAGIIQQKVDRLYQAIENGLDAAGAIERINALQKQRMTLLAQANDLDISAESAAASVDELRRVWSGINLRELQPEKMRVIVRDLIYKIVVFDDGPRGSRLRIILNPARLNPAAIPKAIETMPFSELQNFSHTAGSGLPLPKAQQL

SEQ ID NO: 2272 - protein, 548 aa, Unknown
  Description of Unknown: Integrase B2273 sequence
  PTHR30461:SF3,SM00857,G3DSA:1.10.10.2600,IPR036162,PS51737, G3DSA:3.40.50.1390,IPR006119,IPR038109,PF07508,SSF53041, IPR011109,PF00239,PTHR30461,mobidb-lite,Coil, cd00338
MYKEYPKFYYYESLEYGRKSRMDDPLLSVEETLQRHSEIIDEYARKYLGGSIPEENRYMEVGSGESLKDRPEITRLLKAIENPAIKAIIVVDVQRLSRGDLEDAGKLIRLLRYTNTCVITPHKIYDLRDEYDRDAFERELKRGNEYLEYFKKIQARGRLASVKAGNYVGSVAPYGYDRVERYDEVLKKNYFTLVERKDQADVVRMIFNWYCNDDIGVTTICRRLEELGVKTKTGCSTWKPSIIFGILENVHYIGCVRWNWRKTIKVIENQEIKKLRPKAKVDEYLVFEGKHDGIISEELFYKARMIKGKRHRTKQNLSLKNPFSGIMFCTKCGSKIGYNTYNRNGVEFAPPKLVCNNQVHCKTGSVDYNEVLDYMCKVLRDCIEDFKVRIENDQDDSLKLHKDLIERLTKQLKDAEQKEQDQWEAQYDPDPNKRLPQHIFEKLNKKVLAEKEEINKALDKAKGSAPKHIDYKDELIKTTEALKALEDADLDAKITNQYLKSIIDRIEYDRPQIVRINKKNAEIFETDVRKGLQYHVAPYTIRVKLKCE

SEQ ID NO: 2273 - protein, 548 aa, Unknown
  Description of Unknown: Integrase B2274 sequence
  PTHR30461:SF3,cd00338,SM00857,G3DSA:1.10.10.2600,IPR036162, PF13408,PS51737,IPR025827,G3DSA:3.40.50.1390,IPR006119, IPR038109,PF07508,IPR011109,SSF53041,PTHR30461, PS51736,Coil,PF00239
MTIAWAYCRFSSDHQREESIDAQIRAIRDYCGRNRITLEKIYRDEARSATTDDRPSFQQMFSDIKEYPCDLVIVHKLDRFSRDRYDSAFYKRKLKERGIRLVSVLENIDGSPESIILESVLEGMSEYYSRNLAREVQKGKKETAYKCLHNGGVPPIGYQVDGSGKYHVDPIESKWIIKAYEMKASGRSYMEIAAYLNGIGARTRRGQGFTKNSFHDLFKNEKYKGVYVYNRAAPKTSGKRNNHLNKSAEDIIRIEGGIPRIVSDELWNEVNMQMKDRTMNARHKAKRTYLLSGIIYCGECGSPMSGNARRAGRNKTEYITYDCNRRHRERTCRAKGINKKYIEDLVISHLENEFFTQENVLQLSQRIFDLQAQRKMEVTPELAALKAELAAKQKEMNNIIDSIKKGGYKDWMGDLGDEIDARIKYLEGKIQYSESIQERQILSQKQIYDYIMKDANLMEKSLEDLKQIVQTYVEKVVVFAEKIEIHLIINNHNPGGKSHPDCGYDGGSDGNRTHVRKHFHRSFSERSFCFKVSPQTSPKSRLYHQLSR

SEQ ID NO: 2274 - protein, 548 aa, Unknown
  Description of Unknown: Integrase B2275 sequence
  PTHR30461:SF3,SM00857,G3DSA:1.10.10.2600,IPR036162,PS51737, G3DSA:3.40.50.1390,IPR006119,IPR038109,PF07508,IPR011109, SSF53041,PTHR30461,Coil,cd00338,PF00239
MYKEYPKFYNYETKEYGRKSRTDDPLLSTDEILEKHSKIVEEYAIKYLGGPIPDENKYMEVGSGESLKERPEITRLLKDIEDPAVKAIIVVDVQRLSRGDLEDAGRLIRLLRYTNTYVITPMKTYDLRDEYDRDAFERELKRGNEYLEYYKKIQARGKLLSVKEGNYVGSTAPYGFDRIEKFTDNGKKSYHTLIERKDQADVVRMIFNWYCEEDIGVTAICRRLENIGAKTKTGQSTWKPSIIFSILENHHYIGCTRWNWRKTVKIIEDQEIKKLRPKAKVDEFLLFEGKHDGIISEEQFNKAREIRGKRHRTRRDLTLKNPFSGIMFCKKCGHKIGYNTYTRNGVEYAPPKLVCNNQVHCKSGSVKYSEVFEYVCKVLRDCISDFEIRIKNSQDDSIKLHTDLMARLTKQLSDLEKKEMEQWEAQYDPDPAKRLPQHIFAKLNEKVLKEKEEVNKALEKAKDSAPKHINYRDELIKTKDALRILEDEKLDAKTKNQYLKTVIDKMVYERGPIVQITKENAEKYNMQAAKGTRYYNPPYKITIELKCE

SEQ ID NO: 2275 - protein, 548 aa, Unknown
  Description of Unknown: Integrase B2276 sequence
  PTHR30461:SF3,SM00857,G3DSA:1.10.10.2600,IPR036162,PF13408, PS51737,G3DSA:3.40.50.1390,IPR025827,IPR006119,IPR038109, PF07508,IPR011109,SSF53041,PTHR30461, Coil,PS51736,cd00338,PF00239
MKKFPIDLSCLTEEEISQFQEDPYTLYNGDQDVALYLRYSSTGQSDQSIEGQLRDCRAFCKANHYRIVAIYVDRATTARKDVEKRVHLMEMVADSAKQNWEYVIVWKLDRFARNRNDSAIMKMRLRKNGVKVLSATEHLTDSPESIILESVLEGMAEFFSAELSQKVTRGMRESALKCHSVGGHIPLGYKVENHKLVVDPDTAHIVQEAFSLYANGESVADICRKFNSAGYKTAKNTEFNRSSFKAMFRNTRYIGTYTYKDIIIENGIPAIIDKELFETVQRRLSKTATAPARGKAKVDYLLSGKLFCGHCGASMNGESGAGRHGKVYHYYSCYTKKRKLGCDKRPLKKDYIEGIVARDALNLLTDQLIDEIADMAIRQSEQDLINDTHIPQLTAQLSEVEKSITNITAAIEKGIASETLMNRLVQLEHEKKTLNKEIKAEEKFVYRIDRDQIIFWLSQFKYGNIEDEDFRRRLIDLLVNSVTVWDEPDGYKITTAYNLTSCKTKTFRVEKNPAAEEATGFDFGESECTKSPRNRLISRTFAFHKFRF

SEQ ID NO: 2276 - protein, 548 aa, Unknown
  Description of Unknown: Integrase B2277 sequence
  PTHR30461:SF3,cd00338,SM00857,G3DSA:1.10.10.2600,IPR036162, PF13408,PS51737,G3DSA:3.40.50.1390,IPR025827,IPR006119, IPR038109,PF07508,IPR011109,SSF53041,PTHR30461, PS51736,Coil,PF00239
MSTGTELRAVFYARVSTEEEKQLNALEKQIQENKDVIRDHGWRLVGEYIDEGKTGTTTKRRNDYKRLLKDMTENKFDIVVCKDQDRLQRNTLDWYLFVDNLVTNNLKLFMYLDNKFFKPSEDALITGVKAIIAEEYSRNLSKKLNNSNKRRIERALNGEEVSAMGNGKSLAFKIVNGKWVKDEEEAKLGKKIFELYLEYDSIRKVRDWVNEHGYTNSVGKPFTSESISRILKNEKAKGVIVMGKYHHDFDKKKIVRRSEEELVRIPAPELAYVSEEVFDKVQERLRAKTGKGRGVNAYSDPLSGKIYCGSCGRKLWKHASNGYVNWMCASQVAKGDVECNGTRITTVAIRNIYKKITDNLEVNKGVVKQDIVKWLNELKATLSDTSVNEKIQKDLDKLERKRTKLLEAYLEDFISKDDYKAKYEAIEGQIEEKKKLLVPVEENEDIKVIESVLQNIDDEIDAYVKTLDMEESKVDFLIEHTKRITVLENRDIIIELDLVAGAIIAGKDFLLYVHDTMPQYHGSKHLHPSGPQTAPRCCFRDRFSCDQP

SEQ ID NO: 2277 - protein, 548 aa, Unknown
  Description of Unknown: Integrase B2278 sequence
  SM00857,G3DSA:1.10.10.2600,IPR036162,PF13408,PS51737, G3DSA:3.40.50.1390,IPR025827,IPR006119,IPR038109,PF07508, IPR011109,SSF53041,PTHR30461,Coil,PS51736, cd00338,PF00239
MIHGAFILARYSTENQSEASIEVQVERCREWCEKQSLPVLDVFADRAISGMKETRPEYQRMMQQLYAGGADTVVIYDQSRMFRNMVYWFQFREALQRIGVRVVSVTQPAVGGDLSDPAVFLNEGVTALFNQMWVLQTQQKVREGVKQRAKSGKHTGGTPALGYRVENERLVIDETEAETVRLIFGLYAAGQSYTEIIGELNRRGLKTKRGRPFGKNSLHDLLKNEKYVGRVLFGGKPVSYDGTRNSHAARGEHLVSACPAIVSQELFDAVQQRLLKNRRSPGRSVVNMDQPLKGKVFCGDCGSAMTICYIISSKTHSRYAYYKCAAKKRGLSCPSKMIRKDELEDIVASSVLDMLGHPNARATLLDVLRTQRNEFAKVSAPRLDALKKEHSVLQTKIRNSVEAIMNGLSSPELIAQTNAAEARKAEVESELKTLQDAIEHQGIPDADLPRLLDKLIKNAKSNSAALLSTVLRVEVYPETIKIWTIFDDNPPDRNDKINKKTVPDILPIDVNMDQKFMHKCGDALWRTNIYAKHEIVIAILAARPQKIR

SEQ ID NO: 2278 - protein, 548 aa, Unknown
  Description of Unknown: Integrase B2279 sequence
  PTHR30461:SF3,SM00857,G3DSA:1.10.10.2600,IPR036162,PF13408, PS51737,G3DSA:3.40.50.1390,IPR025827,IPR006119,IPR038109, PF07508,SSF53041,IPR011109,PF00239,PTHR30461, PS51736,Coil,cd00338
MKKFPIDLSCLTEEEISQFQEDPYTLYNGDQDVALYLRYSSTGQSDQSIEGQLRDCRAFCKANHYRIVAIYVDRATTARKDVEKRVHLMEMVADSAKQNWEYVIVWKLDRFARNRNDSAIMKMRLRKNGVKVLSATEHLTDSPESIILESVLEGMAEFFSAELSQKVTRGMRESALKCHSVGGHIPLGYKVENHKLVVDPDTAHIVQEAFSLYANGESVADICRKFNSAGYKTAKNTEFNRSSFKAMFRNTRYIGTYTYKDIVIENGIPAIIDKELFETVQRRLSKTATAPARGKAKVDYLLSGKLFCGHCGASMNGESGAGRHGKVYHYYSCYTKKRKLGCDKRPLKKDYIEGIVARDALNLLTDQLIDEIADMAIRQSEQDLINDTHIPQLTAQLSEVEKSITNITAAIEKGIASETLMNRLVQLEHEKKTLNKEIKAEEKFVYRIDRDQIVFWLSQFKYGNIEDEDFRRRLIDLLVNSVTVWDEPDGYKITTAYNLTSCKAKTFRVEKNPAAEEATGFDFGESECTKSPRNRLISRTFAFYKFRF

SEQ ID NO: 2279 - protein, 548 aa, Unknown
  Description of Unknown: Integrase B2280 sequence
  PTHR30461:SF3,cd00338,SM00857,G3DSA:1.10.10.2600,IPR036162, PF13408,IPR025827,G3DSA:3.40.50.1390,PS51737,IPR006119, IPR038109,PF07508,IPR011109,SSF53041,PTHR30461, PS51736,Coil,PF00239
MSATIPSLMQAPRAFGYCRKSTNEQREESLEAQQRAIVTFAATAGYELVQVYKDHGNSGRRGERPEFQRMLADAAAAGVQYIIVHKLDRFFRNADQQTVVEMQLRRQGIQVISAAEHFDATPQGQFMRNVTKAINQWYSANLAQEVAKGLRENALTARTTGGPPPLGYTVDKSTGQYAIVPREAEAVQLIFKLYQQGAGYTEIIDALNAGGYVTRRGQPFGKNSLYDILRNEKYTGLYIWNRLAPADVDGRTSRRRLKPRDEWVCVENGMPQIIPTEQWQAVQDEMDKRKHRNAQYKAKAFYLLSGLVYCGGCGGVMSGEMHRYNSHGKAVEYRYYRCTAQHRQHDGGAHAHRVNADRLENAVIDYIQHIVLDPVNMDALCVAVLEALQPDGRNAERAKELKQEAGIIQQKVDRLYQAIENGLDAAGAIERINALQKQRMTLLAQANDLDISAESAAASVDELRRVWSGINLRELQPEKMRVIVRDLIYKIVVFDDGPRGSRLRIILNPARLNPSAIPKAIETMPFSELQNFSHTGGSGLPLPKAQRL

SEQ ID NO: 2280 - protein, 548 aa, Unknown
  Description of Unknown: Integrase B2281 sequence
  SM00857,G3DSA:1.10.10.2600,IPR036162,PF13408,IPR025827, G3DSA:3.40.50.1390,PS51737,IPR006119,IPR038109,PF07508, IPR011109,SSF53041,PTHR30461,Coil,PS51736, cd00338,PF00239
MIHGAFILARYSTENQSEASIEVQVERCREWCGKQSLPVLDVFADRAISGMKETRPEYQRMMQALYAGGADTVVIYDQSRMFRNMVYWFQFRETLQRIGVHVVSVTQPTVGGDLNDPAVFLNEGVTALFNQMWVLQTQQKVREGVRQRAKSGKHTGGIPALGYRVENERLVIDETEAETVRLIFGLYAAGQSYTEIIGELNRRSLKTKRGRPFGKNSLHDLLKNEKYVGRVLFGGKPVSYDGTRNSHAARGEYLESACPPIVSQELFDAVQQRLLKNRRSPGRSVVNMDQPLKGKVFCGDCGSAMTICYIIAQKTHSRYAYYKCAAKKRGLSCPSKMIRKDELEDIVASSVLDMLGHPNARATLLDVLRTQRNEFAKVSAPRLDALKKEHSVLQTKIRNSVEAIMNGLSSPELIAQTNAAEARKADVEAELKTLQDAIEHQGIPDADLPRLLDKLIKNAKSNSAALLSTVLRVEVYPETIKIWTIFDDNPPDRNDKINKKTVPDILPIDVNMDQKFMHKCGDALWRTNIYAKHEIVIAILAARPQKIR

SEQ ID NO: 2281 - protein, 548 aa, Unknown
  Description of Unknown: Integrase B2282 sequence
  PTHR30461:SF3,cd00338,SM00857,G3DSA:1.10.10.2600,IPR036162, PF13408,PS51737,G3DSA:3.40.50.1390,IPR025827,IPR006119, IPR038109,PF07508,IPR011109,SSF53041,PTHR30461, PS51736,Coil,PF00239
MSTGTELRAVFYARVSTEEEKQLNALEKQIQENKDVIRDHGWRLVGEYIDEGKTGTTTKRRNDYKRLLKDMTENKFDIVVCKDQDRLQRNTLDWYLFVDNLVTNNLKLFMYLDNKFFKPSEDALITGVKAIIAEEYSRNLSKKLNNSNKRRIERALNGEEVSAMGNGKSLAFKIVNGKWVKDEEEAKLGKKIFELYLEYDSIRKVRDWVNEHGYTNSVGKPFTSESISRILKNEKAKGVIVMGKYHHDFDKKKIVRRSEEELVRIPAPELAYVSEEVFDKVQERLRAKTGKGRGVNAYSDPLSGKIYCGSCGRKLWKHASNGYVNWMCASQVAKGDVECNGTRITTVAIRNIYKKITDNLEVNKGVVKQDIVKWLNELKATLSDTSVNEKIQKDLDKLERKRTKLLEAYLEDFISKDDYKAKYEAIEGQIEEKKKILVPVEENEDIKVIESVLQNIDDEIDAYVKTLDMEESKVDFLIEHTKRITVLENRDIIIELDLVAGAIIAGKDFLLYVHDTMPQHHGPKYLHPSGPQTAPRCCFRDRFSCDQP

SEQ ID NO: 2282 - protein, 548 aa, Unknown
  Description of Unknown: Integrase B2283 sequence
  SM00857,G3DSA:1.10.10.2600,IPR036162,PF13408,PS51737, G3DSA:3.40.50.1390,IPR025827,IPR006119,IPR038109,PF07508, IPR011109,SSF53041,PF00239,PTHR30461,PS51736, Coil,cd00338
MTHGAYILARYSTENQSEASIEVQVERCREWCEKQNLPVLDVFADRAISGMKETRPEYQRMMQQLSSGGADTVVIYDQSRMFRNMVYWFQFREALQRIGVHVVSVTQPTVGGDLNDPAVFLNEGVTALFNQMWVLQTQQKVREGVRQRAKSGKHTGGTPALGYRVENERLVIDEAEAETVRLIFELYAAGQSYIDIIAELNRRGLKTKRGNAFGKNSIHDLLKNEKYVGRSLFGGKPVSYDGTRNAHAARGEHLEIECPSIVSKELFDSVQARLAANKHQNTGKRVTAVEQPLKGKIFCGACGGAMTIHYKYPARGGDRYEYYKCATKQRGKGCSGMSIRKDELEDTVANAVLAMLGAPKSRDKLLSVLRDQRDSLLKMSAPKLKELQAEYDSLASQIDKAVDAVMAGLTSPALIERTNALESKKAQVAEEIALLKSNVEHSSLRDEQLAPLLDKLIKSAKENPSAILATVLRVEVYPDTIKIWTIFDDGPAPGDGPITKSNVASLVKSPDTGKWSLGTFMGTASGVPTNVPNIFVVAAFSVLRERKK

SEQ ID NO: 2283 - protein, 548 aa, Unknown
  Description of Unknown: Integrase B2284 sequence
  PTHR30461:SF3,cd00338,SM00857,G3DSA:1.10.10.2600,IPR036162, PF13408,PS51737,IPR025827,G3DSA:3.40.50.1390,IPR006119, IPR038109,PF07508,IPR011109,SSF53041,PTHR30461, PS51736,Coil,PF00239
MKKFPIDLSCLTEEEISQFQEDPYTLYNGDQNVAIYLRYSSTGQSDQSIEGQLRDCRTFCKANHYRIVAIYVDRATTARKDVEKRLHLMEMISDSAKQNWEYVIVWKLDRFARNRNDSAIMKMRLRKNGVKVLSATEHLTDSPESIILESVLEGMAEFFSAELSQKVTRGMRESALKCHSVGGHIPLGYKVENHKLVVDPDTAHIVQEAFSLYANGESVADICRKFNSAGYKTAKNTEFNRSSFKAMFRNTRYIGTYTYKDIVIENGIPAIIDKELFETVQRRLSKTATAPARGKAKVDYLLSGKLFCGHCGASMNGESGAGRHGKVYHYYSCYTKKRKLGCDKRPLKKDYIEGIVARDALNLLTDQLIDEIADMAIRQSEQDLINDTHIPQLTAQLSEVEKSITNITAAIEKGIASETLMNRLVQLEHEKKTLNKEIKAEEKFVYRIDRDQIVFWLSQFKYGNIEDEDFRRRLIDLLVNSVTVWDEPDGYKITTAYNLTSCKTKTFRVEKNPAAEEATGFDFGESECTKSPRNRLISRIFAFYKFRF

SEQ ID NO: 2284 - protein, 548 aa, Unknown
  Description of Unknown: Integrase B2285 sequence
  PTHR30461:SF3,SM00857,G3DSA:1.10.10.2600,IPR036162,PS51737, G3DSA:3.40.50.1390,IPR006119,IPR038109,PF07508,SSF53041, IPR011109,PF00239,PTHR30461,mobidb-lite,Coil, cd00338
MYKEYPKFYYYESLEYGRKSRMDDPLLSVEETLQRHSEIIDEYARKYLGGSIPEENRYMEVGSGESLKDRPEITRLLKAIENPAIKAIIVVDVQRLSRGDLEDAGKLIRLLRYTNTCVITPHKIYDLRDEYDRDAFERELKRGNEYLEYFKKIQARGRLASVKAGNYVGSVAPYGYDRVERYDEVLKKNYFTLVERKDQADVVRMIFNWYCNDDIGVTTICRRLEELGVKTKTGCSTWKPSIIFGILENVHYIGCVRWNWRKTIKVIENQEIKKLRPKAKVDEYLIFEGKHDGIISEELFYKARAIKGKRHRTKQNLSLKNPFSGIMFCTKCGSKIGYNTYNRNGVEFAPPKLVCNNQVHCKTGSVDYNEVLDYMCKVLRDCIEDFKVRIENDQDDSLKLHKDLIERLTKQLKDAEQKEQDQWEAQYDPDPNKRLPQHIFEKLNKKVLAEKEEINKALDKAKGSAPKHIDYKDELIKTTEALKALEDADLDAKITNQYLKSIIDRIEYDRPQIVRINKKNAEIFETDVRKGLQYHVAPYTIRVKLKCE

SEQ ID NO: 2285 - protein, 548 aa, Unknown
  Description of Unknown: Integrase B2286 sequence
  PTHR30461:SF3,SM00857,G3DSA:1.10.10.2600,IPR036162,PF13408, PS51737,G3DSA:3.40.50.1390,IPR025827,IPR006119,IPR038109, PF07508,IPR011109,SSF53041,PF00239,PTHR30461, PS51736,Coil,cd00338
MPRKKKLQEVGGLRLVAYYRYSNGGQQTEQSIEGQRRDCEAYAKAHGYKIVHEYIDRHISGKSDSRPAFQQMISDSDSHLFDAVICWKTDRLARSRYDSIIYKTRLRRNGVKILYAAETVVDGPEGIIIEGLMESLAEYYSAELAQKLRRGQRESALKCIALGGNRSFGYDIGPDKHYCINEKQAPAVRYIFEQYAAGATAADIVRELTARGYRTSRGNPFNKNSICRIITNEMYLGVYKYADIRIEGGVPAMIDRELFNRCQTQLAFNRAHGGGKGAPRADYVLVGKLDCGLCGHAMKGASATGHTGSKHYYYTCTQHVEKKCPKTSIEKNYLEQVIVDGVAKYVLTPEKISQIVDCMMELQAKEQEPKGNPEKDALEAELAECRRKQNNILEAIEEGGSARLAARLRTLEEQEAQLTFALGEINNAPTPPQFSREALTFMFEQFRREEDEVDEEYRRRILDTFVSSILLYEDRAEVKFNITDQKTGDFERVILPISANKKPPEDDDITSNSEGSTALRLVEHQGVEPWHRSPGLSHFELIFEKAIW

SEQ ID NO: 2286 - protein, 548 aa, Unknown
  Description of Unknown: Integrase B2287 sequence
  cd03768,PTHR30461:SF3,SM00857,G3DSA:1.10.10.2600,IPR036162, PF13408,PS51737,G3DSA:3.40.50.1390,IPR025827,IPR006119, IPR038109,PF07508,IPR011109,SSF53041,PTHR30461, PS51736,Coil,PF00239
MKVAIYSRKSVFTGKGESIENQIEMCKEYFSRLNQNNVEYFIYEDEGFSGGNINRPRFQQLLKDIKKNSFDALICYRLDRISRNVADFSTTLELLQEHNVDFISIREQFDTSTPMGRAMVYIASVFAQLERETIAERIRDNMLQLSKTGRWLGGVCPLGFTSEKITYVDSEYNERSMFKLSPLEEEMNVVRFIFSKYLATSSIHMALKELLASNIKGKHGGDFASMSLADILKNPVYVQSDSSIKEYYESLGVNFFGEPNGCGIMLYNKKNSKGKLRDMSEWIAAVGKHKGIISSSDWLKVQYSLDRNSKKNNPRQGTSAKALLSGVLKCSICGAPMRVCYGRLRKDGERNHYYMCTMKAHSCKSRCQNPNAKGLELEQEVINRLINYNEETLLRKLTSYADKLKSSTPNDMIKNIDKSIDEKKAEMDTLMSQLGKTNNPATQNFILKKADSLSNEIMDLENKLNGIHKKKEQNSIEMRNIEIIMSSFSEFTKLCSTIKDVSNIEDENIKIALRNLINRLVSRISYNGFTKEVVIDIMGSQENCSPSG

SEQ ID NO: 2287 - protein, 548 aa, Unknown
  Description of Unknown: Integrase B2288 sequence
  cd03768,PTHR30461:SF3,SM00857,G3DSA:1.10.10.2600,IPR036162, PF13408,IPR025827,G3DSA:3.40.50.1390,PS51737,IPR006119, IPR038109,PF07508,IPR011109,SSF53041,PTHR30461, PS51736,Coil,PF00239
MIAAIYSRKSKFTGIGESIDNQIEMCKEYAKTHLSDKNITDFLVYEDEGFSGGNTNRPEFQRLISDAKANKFNILICYRLDRISRNVADFSGTLETLQKHDIDFVSIKEQFDTTSPMGRAMIYISSVFAQLERETIAERIRDNMTELAKTGRWLGGVAPVGFRAEQIKCLDENMKERKLMKLVPVPEELEIVKTIYNKYLELKSLSAVETWTLQNNMTTKRGCNFNKSNLRTILTNTAYVKANEKVIHYLESLGITVCGKVNNISGLLTYNKQKTVYGDSGEIKRLFRDKTEWIAAVSKHDGIIEPDDWLKVQKIRKENKDKFPNADKSHTALFSGKLKCAKCGSKMQVTYGHVSKETGKRLYYYRCTLRYWSKNVRCDCKNASANEIDGVVKEALKDFSKNKENLLKTLSQNIKKASKDTNFEDKKTSLNNKLKENESKIDKLLDKFALDDSIQDLLLKKIKALKEENEKIKQEIDSLTADELKENEDELNLDLIRMLLNKCSMIDSLTNDEIKEISNALIEDILWNGDTGDLTINFIGSGESKKKQ

SEQ ID NO: 2288 - protein, 548 aa, Unknown
  Description of Unknown: Integrase B2289 sequence
  PTHR30461:SF3,SM00857,G3DSA:1.10.10.2600,IPR036162,PS51737, G3DSA:3.40.50.1390,IPR006119,IPR038109,PF07508,IPR011109, SSF53041,PF00239,PTHR30461,PS51736,Coil, cd00338
MYKEYPTFYYYDTREYGRKSRTDDPLLSTEEVLEKHSKIIEEYAIKYLGGPIPPENKYMEVGSGESLKDRPEITRLLKDIENPAVKAIIVVDVQRLSRGDLEDAGRLIRLLRYTNTYVITPMKIYDLRDEYDRDAFERELKRGNEYLEYFKKIQARGKLLSVKEGNYVGSTAPYGFDRIEKFEANGKKSYYTLVERKDQADVVRMIFNWYCEEDIGVTAICRRLENIGAKTKTGCKTWKPSIIFSILENHHYIGCTRWNWRKTVKIIEDQEIKKLRPKAKVDEFLLFEGKHDGIISEEQFNKAREIRGKRHRTRRDLTLKNPFSGIMFCKKCGHKIGYNTYTRNGVEYAPPKLVCNNQVHCKTGSVNFQEVFDYVCKTLRDCIEDFEVRIENDQDDSFKLHRDLVERLEKQLKDLEKKELDQWDAQYDPDPNKRLPQHIFAKLNEKVLKEKEEVNKALNKAKDSMPKHVDYREELMKTTDALRVLEDHELDAKTKNQYLKTVISKIVYERDPNVRISKNNAEKYGFEISKGLRYYTPPYKITIELKCD

SEQ ID NO: 2289 - protein, 548 aa, Unknown
  Description of Unknown: Integrase B2290 sequence
  PTHR30461:SF3,SM00857,G3DSA:1.10.10.2600,IPR036162,PF13408, PS51737,G3DSA:3.40.50.1390,IPR025827,IPR006119,IPR038109, PF07508,SSF53041,IPR011109,PF00239,PTHR30461, PS51736,Coil,cd00338
MKKFPIDLSCLTEEEISQFQEDPYTLYNGDQDVALYLRYSSTGQSDQSIEGQLRDCRAFCKANHYRIVAIYVDRATTAHKDVEKRVHLMEMVADSAKQNWEYVIVWKLDRFARNRNDSAIMKMRLRKNGVKVLSATEHLTDSPESIILESVLEGMAEFFSAELSQKVTRGMRESALKCHSVGGHIPLGYKVENHKLVVNPDTAHIVQEAFSLYANGESVADICRKFNSAGYKTAKNTEFNRSSFKAMFRNTRYIGTYTYKDIVIENGIPAIIDKELFETVQRRLSKTATAPARGKAKVDYLLSGKLFCGHCGASMNGESGAGRHGKVYHYYSCYTKKRKLGCDKRPLKKDYIEGIVARDALNLLTDQLIDEIADMAIRQSEQDLINDTHIPQLTAQLSEVEKSIMNITAAIEKGIASETLMNRLVQLEHEKKTLNKEIKAEEKFVYRIDRDQIVFWLSQFKYGNIEDEDFRRRLIDLLVNSVTVWDEPDGYKITTAYNLTSCKTKTFRVEKNPAAEEATGFDFGESECTKSPRNRLISRTFAFHKFRF

SEQ ID NO: 2290 - protein, 548 aa, Unknown
  Description of Unknown: Integrase B2291 sequence
  PTHR30461:SF3,SM00857,G3DSA:1.10.10.2600,IPR036162,PF13408, PS51737,G3DSA:3.40.50.1390,IPR025827,IPR006119,IPR038109, PF07508,IPR011109,SSF53041,PTHR30461,Coil, PS51736,cd00338,PF00239
MKKFPIDLSCLTEEEISQFQEDPYTLYNGDQNVAIYLRYSSTGQSDQSIEGQLRDCRAFCKANHYRIVAIYVDRATTARKDVEKRVHLMEMVADSAKQNWEYVIVWKLDRFARNRNDSAIMKMRLRKNGVKVLSATEHLTDSPESIILESVLEGMAEFFSAELSQKVTRGMRESALKCHSVGGHIPLGYKVENHKLVVDPDTAHIVQEAFSLYANGESVADICRKFNSAGYKTAKNTEFNRSSFKAMFRNTRYIGTYTYKDIVIENGIPAIIDKELFETVQRRLSKTATAPARGKAKVDYLLSGKLFCGHCGASMNGESGAGRHGKVYHYYSCYTKKRKLGCDKRPLKKDYIEGIVARDALNLLTDQLIDEIADMAIRQSEQDLINDTHIPQLTAQLTEVEKSITNITAAIEKGIASETLMNRLVQLEHEKKTLNKEIKAEEKFVYRIDRDQIVFWLSQFKYGNIEDEDFRRRLIDLLVNSVTVWDEPDGYKITTAYNLTSCKTKTFRVEKNPAAEEATGFDFGESECTKKPAKFARIWQVFCIFRSN

SEQ ID NO: 2291 - protein, 547 aa, Unknown
  Description of Unknown: Integrase B2292 sequence
  PTHR30461:SF3,SM00857,G3DSA:1.10.10.2600,IPR036162,PF13408, IPR025827,PS51737,G3DSA:3.40.50.1390,IPR006119,IPR038109, PF07508,SSF53041,IPR011109,PTHR30461,Coil, PS51736,cd00338,PF00239
MVKKKLRAVFYARVSTEEEKQLNALEKQIQENRDVIISNGWELVDEYIDEGKSGTTTKRRSDYKRMLEDMAEDKFDIVVCKDQDRLQRNTLDWYLFVDRLITNEIQLYFYLENKYFRSNEDALITGIKAIIAEEYSRNLSKKLNNSNKRRIEKALQTGEVSAMGNGKSLGYKIVDKKWVQVPEEIELCKIIWDKYEEFDSIRKVRDFVNDAGYRNSVGKPFTSESIARIIKNEKAKGVLVMGRFHHDFDKKKIVKRSDDEVFRIEIPELAYVSAERFDRVNAHLKSKTNGKRGKRSGSDPLSGKIFCSKCGSVYWKHQSNGYYNWFCSQKYAKGDVACKGSGTVTTVRIRKIYAELTNNLEVNREAVKGSLLKWLQSLKNSLTDEKANNSTLKEIERQEKRKNKLTEAFMDEIISKEDYKAKYAELERSLEELKLKIQPVEENEDVKDIEKVIANIDEEIDAYIKSTGFEDSKIDFLIEHTQRITVNDKHLIIELDLLAGAIITGKDFLLFVHSNMPQHHGPKHLHPSGPQTAPRCCFRDRFSCDQP

SEQ ID NO: 2292 - protein, 547 aa, Unknown
  Description of Unknown: Integrase B2293 sequence
  PTHR30461:SF3,SM00857,G3DSA:1.10.10.2600,IPR036162,PF13408, PS51737,IPR025827,G3DSA:3.40.50.1390,IPR006119,IPR038109, PF07508,IPR011109,SSF53041,PF00239,PTHR30461, Coil,cd00338
MGKRVCCLYRVSTLKQVEKDDIPMQKQRCHEFAAQMGWDIVREFSEKGVSGFKVSAKQRDAIQEIQREAALNTFDILLVFMFDRLGRRDDETPFIVEWFVNNGIEVWSAEEGQQRFDNHVDKLLNYIRYWQASGESIKTSIRTKTRLGQIVMEGRFRGGYAPYGYQLVKKGRMGKKNRELFDIEVNPMEAAAVRRIFELADQYGYGGRKTSTTLKEEGFINLRTSEPFHYSTIQNILINIAYTGVLRSGESVSEIFPELQIITPEQFQRVQKGREQRSADYLAKCAAAYGTETITLKDGSEAEASRPIRSYPRKNTGSALLSGNVYCGHCGGRIFASTARKTHHPTDGGTGRVAIYKCYNRTQHKGNCDGPTTYRAEKVDAVVSKLIRDILQKAGAVSEYDIVQNQIGATASDLQQQIRQAKLELSKKHIEQGRWEGLMLDSLDGKCPFTPEQVKSRLDSVKEAMTSLTASIESLETRLADSDRLTQELKEQHQQLLSWAEMFDNATPAERKLIASHLIRAVTLTRGYGIQIDFNISEAQYLNGMEL

SEQ ID NO: 2293 - protein, 547 aa, Unknown
  Description of Unknown: Integrase B2294 sequence
  PTHR30461:SF3,SM00857,G3DSA:1.10.10.2600,IPR036162,PF13408, IPR025827,G3DSA:3.40.50.1390,PS51737,IPR006119,IPR038109, PF07508,IPR011109,SSF53041,PTHR30461,PS51736, cd00338,PF00239
MARSKRNEYSSAEQIGVIYARYSSHNQKEESIEQQIAECSDFAAKNGIRIVGIYADKAVSGRSDRRPNFQRMMRDAEKRQFQIVIAYKSNRIARNMLNALQYEARLDLLGIKTLYAKEEFGNTAAGRFALRTMMNVNQFYSENMGEDIKRGMVDNANECKVNGMLPLGYVKSKEGKYAIAPDEAAVVREIFDSVLKDVPVAEIARSLNQRGIRTKLGREWNKNSFHIMLKNDNYIGVYRHSGVVVEGGIPPILEKEVFAAVQEKLANKKKTAGRRSANGEYLLTGKLFCGYCGSYMIGVSGTGENGTVHNYYQCQKRHAEGRCEKKNVRRDFIEKLIARLTQDYILQDDTIEWIADSTMSFQAMARRESGVAQLERDLADNRKVAKNIMAAIEQGIITETTKARLLEVEGTIHDLERSLSIAKAAAQPVERERVVFSLEQMREGNVGSKEHQKKLIDTFVKSVTLWDDRIQIDYYHTPGKHKFSYSLEELTSKAENESNASDVRTDSLELHHKRVIRTQYGDGEIRITAFGFVFLCPLPSSKKEADV

SEQ ID NO: 2294 - protein, 547 aa, Unknown
  Description of Unknown: Integrase B2295 sequence
  PTHR30461:SF3,SM00857,G3DSA:1.10.10.2600,IPR036162,PS51737, G3DSA:3.40.50.1390,IPR006119,IPR038109,PF07508,IPR011109, SSF53041,PTHR30461,PS51736,cd00338,PF00239
MRKIIKIEPTEPVLPRRKRVAAYARVSMECERLMHSMSAQISYYSELIQKNPEWEYARVYADNFISGTETKKRQEFQRMISDCEKGLIDIILCKSISRFARNTVDLLETIRHLKDIGVEVRFEKENINSLSGDGELMLTILASFAQEESRSLSENVKWGIRKRFEKGDPCNRNPILGYEWVDDKLVVVPEEAEIVKRIFRNFLDGKSRLETERELNAEGITTKRGYRWIDSNIKVILTNITYTGNMLLQKEYITDPITKHRKKNNGELPKYYVENTHEAIIDMETFRWVQEEMERRKKLGPLANKSLNTCCFTGKIKCPFCHKSYMHEIRTDRGYAEYWLCGSRKIKGGRCTVGGSINHKHLQETCAKVLGLQEFDESVFLERVDVIYVPKRETLEFHLKDGTVVTEACKNTGHQDCWTEERRAATSLKRRNGKRPNRADMTCFSKVIKCVRCGCNFRKGTRTSANGDKVSHWRCSEHKGCNSASLRDDLLRTMAAQVLSIDAFNEEEFERRIDHIDVEEDRLKFYFRDGHSVTEHWPIPRRKKCQK

SEQ ID NO: 2295 - protein, 547 aa, Unknown
  Description of Unknown: Integrase B2296 sequence
  PTHR30461:SF3,SM00857,G3DSA:1.10.10.2600,IPR036162,PF13408, PS51737,G3DSA:3.40.50.1390,IPR025827,IPR006119,IPR038109, PF07508,IPR011109,SSF53041,PF00239, PTHR30461,PS51736,Coil,cd00338
MEAATTTLERRVREIPPTRKPEELLRNYDGKMRVAAYCRVSTDSEEQLNSYEAQKTYYTQKIQDNPDWEMAGIYADEGISGTSLKKRAEFNKMITACKRGRIDFIITKSLSRFARNTVDCLDTVRLLKANGIGVYFEKENINTLTESSEFLVTLFSGFAQAESESLSKNVAWGKEKSAKAGNVHFQYKKMLGYRKGEDGQPEIMPEEAAIVRRIYRRYLDGCTLGKIKRELDEDGIPTAQGVECWSPAIIHNILTNEKYIGDALLLKTYVTDCISQKVRKNRGERVMYYVENNHPAIVSRETFDLVRKEMTRRSSKRKVLQKSGKTELGKYSGKYALTELLVCGECGSPYKRVTWARDGKKRIVWRCVSRLEFGTKYCHVSPTLDEGKLHHAILDAMNEYAAIRQEVCPDVLAMVEEAKQALTQAGTKLLTLKRRLDEVSHEQADLLDSLLANMADADLNARMKALTDEKASLKEQILEAQQEEVGLEEQVAKRQQMWDSLIECSEGYTEFDDEFIRQIIQKITVEDVDTIRIQFRDSDVVLEQGLQ

SEQ ID NO: 2296 - protein, 547 aa, Unknown
  Description of Unknown: Integrase B2297 sequence
  PTHR30461:SF3,cd00338,SM00857,G3DSA:1.10.10.2600,IPR036162, PF13408,PS51737,IPR025827,G3DSA:3.40.50.1390,IPR006119, IPR038109,PF07508,IPR011109,SSF53041,PTHR30461, PS51736,Coil,PF00239
MKAVIYARYSSDSQREESIEGQLRECTEYAERNGITILRSYIDRALSARTADRPEFQNMIKDSEQKLFDVVLIWKLDRFSRDRYDSAHYKRILKKNGVKVVSVKENISDGPEGIILESMLEGYAEYYSAELSEKIHRGQKENALKGRNNGGGIPLGYLLDKKEQKLVLDPVTAPLVREIFQRYADGEIVRTIVEDFNRRGLKTKSGKPFSPNSFNRILKNRKYIGEYRYQDVIIPSGVPAILSDDVFYQVQARLEKNKRAPATAKADVDYLLTTKLFCGLCERMMIGESGTSHTGDKHYYYKCAGAKRKLGCKKKSVKKDFIERAAVILTVNRVLRDEEISRIADSILALQNSEDTTIPALKKQLADTERGIENMLNAIQKGVLTSSTKERLEALEKQRDNLKIAVLQAELQKPKYTKEQIVSWIGQFKYGDVNSREYQKRIIDTFVNSLYLFDDRLVITYNFKGGTEIITLKDVEAVYGSDLKAMSPPKRKTRSHVGFWSFLLSMRVFGLYDFAKCHRILQFVCIICRKNAHGNAHENRTTCPGEG

SEQ ID NO: 2297 - protein, 547 aa, Unknown
  Description of Unknown: Integrase B2298 sequence
  PTHR30461:SF3,cd00338,SM00857,G3DSA:1.10.10.2600,IPR036162, PF13408,IPR025827,PS51737,G3DSA:3.40.50.1390,IPR006119, IPR038109,PF07508,IPR011109,SSF53041,PTHR30461, PS51736,Coil,PF00239
MAKKKATANTSYSAGTRAVIYARYSPGPNQREESIEGQIRECKEIAAKNGLMVIHEYIDKRLSGTRDDRPDFQRMLRDADRGLFDVLLVWKNDRFSRNRYDSAISKRRLKRAGVKIMYAKEHIPDGPEGIILESLLEGLAEYYSANLAQNIRRGQLENALEGKFIGGTIPLGYKLDTEKRYVIDPETAPLVREIFKRYVDGEAIIHICDDLNARGYQTARKKAFNRSSLHRILANEKYIGVYRFEDIEHKDAVPRLISDELFQAASLRAIKNKKSRRTIQAGQVDYLLTGKLFCGHCGETMGGSWGTSKSGTRHYYYVCNGKKTKKSACHKKAERKEDLEKLVVDVVIKNVLCNQAVVDFIIDRCMQIQEQDTDTSAADGLRRELADAEKRLKNLMTAIESGIITATTKARLVELEERCATLKQGIAEAEIRPPKFSREQLEFIFEKYQNRDMDDLSFIRDVIDTFVHAVYVYDNKLLITFNYSGDNTVEIPLSEIEKSVDSAGSQVFDFYGINSTIPKKLITGIIHCNQLFYFPILIILRPHRASP

SEQ ID NO: 2298 - protein, 547 aa, Unknown
  Description of Unknown: Integrase B2299 sequence
  PTHR30461:SF3,SM00857,G3DSA:1.10.10.2600,IPR036162,PF13408, PS51737,G3DSA:3.40.50.1390,IPR025827,IPR006119,IPR038109, PF07508,SSF53041,IPR011109,PF00239,PTHR30461, PS51736,Coil,cd00338
MRDSMRGRIKYCDASDGDSTLGIVYARYSSHNQKEESIEQQVDECMAFAKANNIEIVHVYADKAVTGKTDNRREFQRMMRDAEKKQFQVVIAYKSNRIARNMLNALQYEARLDMLGIKTLYAKEEFGNTAAGRFALRTMMNVNQFYSENMAEDIRRGMADNAAACKVNGALPLGYVKGSDGRYAINPQEAAIVREIFEKYLSGVTCADIAHDLNMRGVKTKAGNAFNKNSFHRMFKNDAYIGVYRHSGVVKEDGIPPIIKKEVFAAMQEKLVTKKNPIGRHRENGDYLLTGKLYCGYCGSYMVGVSGTGKNGTLHHYYQCQQRRVEKNCQKEHVRRDWLEQIVAEYTQAYILQDEIIEWIADSAVSFQAQARRSSNISAIENELADKRKATKNIMAAIEQGIFTETTKNRLLELEANIKELERSLLLARATEQPVEKERIIFTLESLREGNIESKEYQRKLIDTFVKAVYLWDDKIRIEYYHTTRKHSSTYPIKKEDVSNVETEDSVRTSSPQLHHRRAIRTPCGDGEILIADFGIVLLCPLPRGQK

SEQ ID NO: 2299 - protein, 547 aa, Unknown
  Description of Unknown: Integrase B2300 sequence
  PTHR30461:SF3,SM00857,G3DSA:1.10.10.2600,IPR036162,PF13408, IPR025827,PS51737,G3DSA:3.40.50.1390,IPR006119,IPR038109, PF07508,IPR011109,SSF53041,PTHR30461,Coil, PS51736,cd00338,PF00239
MARKKNIAAGLDAVIYARYSSHNQREVSIEQQIAECTKHAAALGLRIVGTYEDRAISGKTDNRPRFQQMMRDAEKGKFQAVVAWKSNRIGRNMLQAMVNEAKLDDYGVKVFYAEEDFDDTAAGRFALRNMMNVNQFYSENMAEDITRGLYDNASKCMANGRQPLGYKRGEDGRVVLDEANAAVVREIFTRVAAGDLFVDIARDLNAQGIKTSKGANWNKGSFQSICQNERYRGIYIYGDVRVADGIPRIVSDDLWYRVQEAMRMKKNPVGTRHRVGAEDYLLTGKLRCGHCGSYMTGVSGTSRNGELHYYYTCQKRRTEHACDKKNIRRDVIEPAVAQAIKMYCLTDDVIAWIADRTVEYWEKHDNDLQIEALEQQLEENKKATSNMLKAIEMGIITEATRTRMVELETEQSRLSVQLNAAKEDVVKIDREQIISYLELLQQGDIHDRDFQMELFKNFLVAVYVYDDNRMKLVFSCMGDQNCVEIPLETGEDPPDGGLSPDAKMFVLTPDSSTQKALYFVGSAVLFFLHLRTLTMQSVWPYRRSNPR

SEQ ID NO: 2300 - protein, 547 aa, Unknown
  Description of Unknown: Integrase B2301 sequence
  PTHR30461:SF3,IPR036162,PS51737,IPR011109,PTHR30461, PF00239,G3DSA:1.10.10.2600,IPR006119,SSF53041,cd00338, SM00857,IPR025827,IPR038109,PS51736,mobidb-lite, PF13408,G3DSA:3.40.50.1390,PF07508,Coil
MKKFPIDLSCLTEEEISQFQEDPYTLYNGDQNVAIYLRYSSTGQSDQSIEGQLRDCRTFCKANHYRIVAIYVDRATTARKDVEKRVHLMEMISDSAKQNWEYVIVWKLDRFARNRNDSAIMKMRLRKNGVKVLSATEHLTDSPESIILESVLEGMAEFFSAELSQKVTRGMRESALKCHSVGGHIPLGYKVENHKLVVDPDTAHIVQEAFSLYANGESVAAICRKFNSAGYKTAKNTEFNRSSFKAMFRNTRYIGTYTYKDIVIENGIPAIIDKELFETVQRRLSKTATAPARGKAKVDYLLSGKLFCGHCGASMNGESGAGRHGKVYHYYSCYTKKRKLGCDKRPLKKDYIEGIVARDALNLLTDQLIDEIADMAIRQSEQDLINDTHIPQLTAQLSEVEKSITNITAAIEKGIASETLMNRLVQLEHEKKTLNKEIKAEEKFVYRIDRDQIVFWLSQFKYGNIEDENFRRRLIDLLVNSVTVWDEPDGYKITTAYNLTSCKTKTFRVEKNPAAEEATGFDFGESECTKSPRNRQECVDKEVSRKH

SEQ ID NO: 2301 - protein, 547 aa, Unknown
  Description of Unknown: Integrase B2302 sequence
  PTHR30461:SF3,SM00857,G3DSA:1.10.10.2600,IPR036162,PF13408, IPR025827,G3DSA:3.40.50.1390,PS51737,IPR006119,IPR038109, PF07508,SSF53041,IPR011109,PTHR30461,PS51736, cd00338,PF00239
MEKKMWKIEQKVTEISKRRRVAAYARVSVESERMQHSLSAQISYYSSLIQKNPAWEYAGVYADYGITGTKIIKRKEFQRMLADAEARKIDIILTKSIQRFARNTVDLLKTVRHLKEIGVEVWFEKENIRSLSGDGELMLTILASFAQEESRSISDNIKWRFQKKYEKGIPHAKFFIYGYRWKDGELVIQKEEAAIVRRVFKGYLAGKTRRDIQRELANIGAHTMYGNLFQDSTIKQMLQNPVYKGNLVIQKTFVIDPITKHQVINHGEKDKYVVENHHEAIIDTATFNQVQKEMAWRKEAGRQRGGYARNFLNISCFTGIIKCGICGKSYIHNIRKYKGKPSEYWSCLSNKGKAEKRCGAYGAIPQPALERACMSALEMATFDKTKFLQKVEKIVVPAYHSLLFYLKDGKVIKQSWKSTALKDMWTEKRKEQVRQRMVQYRKSGLSSRYSAFSERIFCPTCDVKFVRCLETRKNRRVAYWRSRNKHKCVHTSGIQEDWLKKTAAALLGESTFDEQKFREQVEWIEVQKNRTLLFRFYSRENKEVQLP

SEQ ID NO: 2302 - protein, 547 aa, Unknown
  Description of Unknown: Integrase B2303 sequence
  PTHR30461:SF3,cd00338,SM00857,G3DSA:1.10.10.2600,IPR036162, PF13408,PS51737,IPR025827,G3DSA:3.40.50.1390,IPR006119, IPR038109,PF07508,IPR011109,SSF53041,PTHR30461, PS51736,Coil,PF00239
MARKKNIAAGQNAVIYARYSSHNQREVSIEQQVRECMKHAAELGLHVVGTYEDRAISGKTDKRPNFQRMMRDAEKGKFQAVVAWKSNRIGRNMLQAMVNEAKLEDCGVKVFYAEEDFDDTAAGRFALRNMMNVNQFYSENMAEDITRGLYDNASKCMANGRQPLGYKRGEDGRVVLDDANAAVVREIFTRVAAGDLFVDIARDLNAQGIKTSKGANWNKGSFQSICQNERYRGIYIYGDVRVVDGIPRIVSDDLWYRVQEAMRMKKNPVGTRHRVGAEDYLLTGKLRCGHCGSYMTGVSGTSRNGELHYYYTCQKRRTEHACDKKNIRRDVIEPAVAQAIKMYCLTDDVIEWMADRTVEYWEKHDNDLQIEALEQQLEENKKATSNMLKAIEMGIITEATRTRMVELETEQSRLSVQLNAAKEDVVKIDREQIISYLELLQQGDIHDRDFQMELFKNFLVAVYVYDGNRMKLVFSCMGDQNSVEIPLETGEDPPDGGLSPDAKMFVLTPDSSTKKALYFVGSTVLFFLHLRTLTMQSVWPYRRSKPR

SEQ ID NO: 2303 - protein, 547 aa, Unknown
  Description of Unknown: Integrase B2304 sequence
  PTHR30461:SF3,cd00338,SM00857,G3DSA:1.10.10.2600,IPR036162, PS51737,G3DSA:3.40.50.1390,IPR006119,IPR038109,PF07508, IPR011109,SSF53041,PTHR30461,PS51736,Coil, PF00239
MKLLVTYIRWSTKEQDSGDSLRRQTNLIDAFYSKHKNDYYLLPAHRYVDKGKSGFHQQHKNQGSDFRRMFENVMSGAIPEGSLIVVENFDRFSRADIDTAIDDVRQILRKGVSILTLGDGELYDKSALTDPVKLIKHIIIAERAHQESLVKQKRIAQVWNHKTQLARELKKPMGKQAPGWLELSDDGSHYIVDEDKASLVNIIYDKRLSGMSMFAICKWLNEQGYPTINQRKVRISKTKKPDGNWSALSVKHILTSRSVLGYLPAKISTEDRKTVLREEIEGFYPQIVTDSKFYAVQQLLEETGKGKTSSGEHWLYVNILKGLIRCKCGLVMTPTGIRKPVYQGTYRCNGNKESRCSYGTVSRKLLDTQLCSRLFSKLSQLHDEATDTAKLDELQRRLNTVDSELEKLTETLIQLPNITQIQEALRVKQEEKDELIVQLSREKARVKSVSSLDLSGLDMESVEGRTEAQIIIKRLVKEIVVSGNEKLVDIYLHNGNMIRGFPLDGKDDHTLTLEEATDEMQSLDDMLIFGEPVTRIYPAGDMEEVDA

SEQ ID NO: 2304 - protein, 547 aa, Unknown
  Description of Unknown: Integrase B2305 sequence
  PTHR30461:SF3,SM00857,G3DSA:1.10.10.2600,IPR036162,PF13408, PS51737,IPR025827,G3DSA:3.40.50.1390,IPR006119,IPR038109, PF07508,IPR011109,SSF53041,PTHR30461,Coil, cd00338,PF00239
MGKRVCCLYRVSTLKQVEKDDIPMQKQRCHEFAAQMGWDIVREFSEKGVSGFKVSAKQRDAIQEIQREAALNTFDILLVFMFDRLGRRDDETPFIVEWFVNNGIEVWSAEEGQQRFDNHVDKLLNYIRYWQASGESIKTSIRTKTRLGQIVMEGRFRGGYAPYGYQLVKKGRMGKKNRELFDIEVNPMEAAAVRRIFELADQYGYGGRKTSTTLKEEGFINLRTGEPFHYSTIQNILINIAYTGVLRSGESVSEIFPELQIITPEQFQRVQKGREQRSADYLAKCVAAYGTETVTLKDGSEAEVSRPIRSYPRKNTGSALLSGNVYCGHCGGRIFASTARKTHHPTDGSNGRVAIYKCYNRTQHKENCDGPTTYRAEKVDAVVSKLIRDIFQKAGTVSEYDIVHNQIGATASDLQQQIRQAKLELSKKHIEQGRWEGLMLDSLDGKCPFTPEQVKSRLDSVKEAMTSLPANIKSLEARLADSDRLTQELKEQHQQLLSWAEMFDNATPAERKLIASHLIRAVTLTRGYGIQIDFNISEAQYLNGMEL

SEQ ID NO: 2305 - protein, 547 aa, Unknown
  Description of Unknown: Integrase B2306 sequence
  PTHR30461:SF3,SM00857,G3DSA:1.10.10.2600,IPR036162,PF13408, PS51737,G3DSA:3.40.50.1390,IPR025827,IPR006119,IPR038109, PF07508,IPR011109,SSF53041,PTHR30461,Coil, PS51736,cd00338,PF00239
MLRGVVKPRKENFMNAVIYARYSSHSQTEQSIEGQLRDCYEYAKRYDINVVGEYIDRATSGTTDERPDFQRMIADAPKKQFDRIIVWKLDRFARNRYDSALYKHKLKQYGIRVISAMENVGEGDESILLEALLEASAEYYSLDLKKKIKRGQRESIAKGKYCGGPIPYGYKLSDGKLLVDEKNAPVIRYLFEQYASGVPMKEIIDELTRRGVRGSRGGALTYNTFSRALTNTTYIGQYKYNGEVVPGLAEQMIDKELFDRAQVVVKANAHAPAANKAEVEYLLQGKAFCGNCGAHMVGECGRGNNGSVYYYYSCANRKKRHSCRKKNEKKDFIEWYVVEQTLQYVLTPPRIKQIAKAVVAEYDKEFAGSKIDECEKSIRQLDHELNKLVDALVEAPKVAHKRIYERMESFEAQKAAMESDLVKLRIAHDIRFTEEEVRAWLKKFCTGDLFDPEFRRNIIDVFINSVYLYDDRVIIFYNIKGGKQVSYIDVAAALDAAPNAEVSDFITNAPSQKPVNNDWLLYAFVTDNGLVASLPYCISKKGTALLR

SEQ ID NO: 2306 - protein, 547 aa, Unknown
  Description of Unknown: Integrase B2307 sequence
  PTHR30461:SF3,SM00857,G3DSA:1.10.10.2600,IPR036162,PF13408, IPR025827,G3DSA:3.40.50.1390,PS51737,IPR006119,IPR038109, PF07508,IPR011109,SSF53041,PTHR30461,Coil, PS51736,cd00338,PF00239
MVQEKLRAVFYARVSTEEEKQLNALEKQIQENRDIINKNGWILVREYIDEGKSGTTTKRRSSYKRLLADMTEDKFDIIVCKDQERLQRNTLDWYLFVDNLVKNNLKLFMYLDNKFFTPAEDALITGIKAIIAEEYSRNLSKKLNNANKRRVERALAGEEIAAMGNGKSLAFKIVNGKWVKDEKEAELGKKIFELYLQWNSIRKVRDWVNNNGYTNSVGKPFTSESIARILKNEKAKGIIVMGHHHHDFDKKKIVKMPEEQWVRIKAPELAYVSEETFDEVQRRLKAKTGKKRGVNAYSNPLSSKLYCGKCGGKLWKHNSRGYIGWYCSAKLAKGDVQCTGVSTTSVRIRKIYSEISKGLVVNKSAVKSSMLEWLHQLKSSLQVEDQSKQIQKTIEQLERKKNKLTEAYLDEIISKADYREKYSAIEMQITEQQKLLIPVEENEDIKDIEEVIKNIDKEIDDYIASSQFEESKVDYLIEHTKKITVVDKEHYVIDLDLLAGVILTGKDFLLYVHNTMPFPSCSPVLSGFSEEAGTCRQILCRFSSYIL

SEQ ID NO: 2307 - protein, 547 aa, Unknown
  Description of Unknown: Integrase B2308 sequence
  PTHR30461:SF3,cd00338,SM00857,G3DSA:1.10.10.2600,IPR036162, PF13408,PS51737,G3DSA:3.40.50.1390,IPR025827,IPR006119, IPR038109,PF07508,IPR011109,SSF53041,PTHR30461, PS51736,Coil,PF00239
MAKKKKPAGGNAIIYARYSSHNQRDVSIEQQIEACRKHAAELGLTITDTYEDRAISGRTDNRPAFQRMMRDAEGGKFQYVLAWKSNRMGRNMMQAMVNESRLMDCGVKVFYAEEDFDDSAAGRFALRSMMNVNQFYSDNLAEDVRRGLMDNASKCMANGRQPLGYKRGEDGKVVVDEPAAAIVREIYTRIASGEMFMDIARDLNRRGIKTQSGSEWNKSSFKVLCRNERYRGIYIYGDTRIEGGVPPIVDDVLWYKVQEVLKVKKSKNRHHCPSDEDYLLTGKLRCGKCGGYMIGMSGRSKTGDVHHYYACQNRRVGHTCDKKNIRRDVVEPAVAQAIKQYCLTDDAIEWITDQTIAYWEDEDRKLQIDSIENDLSAVQSSISNVMKAIEMGVITETTRDRLIELERQQTDLKSKLALAKEEIVHVDRKDLISSLLAFRHGNVHDRAYQEKLFNAFLIAVYVYDDDHLKLVFNSFGKDDTVNIALDLGENDDNSGLSDVSKSSPILSNGQPKDIRTVWMSFLFFVHRESKRAIQQTLYRSFYVNGNQ

SEQ ID NO: 2308 - protein, 547 aa, Unknown
  Description of Unknown: Integrase B2309 sequence
  PTHR30461:SF3,cd00338,SM00857,G3DSA:1.10.10.2600,IPR036162, PF13408,PS51737,IPR025827,G3DSA:3.40.50.1390,IPR006119, IPR038109,PF07508,IPR011109,SSF53041,PTHR30461, PS51736,Coil,PF00239
MARKKNIAAGQNAVIYARYSSHNQREVSIEQQVRECMKHAAELGLHVVGTYEDRAISGKTDKRPNFQRMMRDAEKGKFQAVVAWKSNRIGRNMLQAMVNEAKLEDCGVKVFYAEEDFDDTAAGRFALRNMMNVNQFYSENMAEDITRGLYDNASKCMANGRQPLGYKRGEDGRVVLDEANAAVVREIFTRVAAGDLFVDIARDLNAQGIKTSKGANWNKGSFQSICQNERYRGIYIYGDVRVADGIPRIVSDDLWYRVQEAMRMKKNPVGTRHRVGAEDYLLTGKLRCGHCGSYMTGVSGTSRNGELHYYYTCQKRRTEHACDKKNIRRDVIEPAVAQAIKMYCLTDDVIAWIADRTVEYWEKHDNDLQIEALEQQLEENKKATSNMLKAIEMGIITEATRTRMVELETEQSRLSVQLNVAKEDVVKIDREQIISYLELLQQGDIHDRDFQMELFKNFLVAVYVYDDNRMKLVFSCMGDQNSVEIPLETGEDPPDGGLSPDAKMFVLTPDSSTQKALYFVGSTVLFFLHLRTLTMQSVWPYRRSKPR

SEQ ID NO: 2309 - protein, 547 aa, Unknown
  Description of Unknown: Integrase B2310 sequence
  PTHR30461:SF3,cd00338,SM00857,G3DSA:1.10.10.2600,IPR036162, PF13408,PS51737,G3DSA:3.40.50.1390,IPR025827,IPR006119, IPR038109,PF07508,IPR011109,SSF53041,PTHR30461, PS51736,Coil,PF00239
MKSPIDLSCLTEEEISQFQEDPYTLYNGDQNVALYLRYSSTGQSDQSIEGQLRDCRTFCKANHYRIVAIYVDRATTARKDVEKRVHLMEMISDSAKQNWEYVIVWKLDRFARNRNDSAIMKMRLRKNGVKVLSATEHLTDSPESIILESVLEGMAEFFSAELSQKVTRGMRESALKCHSVGGHIPLGYKVENHKLVVDPDTAHIVQEAFSLYANGESVADICRKFNSAGYKTAKNTEFNRSSFKAMFRNTRYIGTYTYKDIVIENGIPAIIDKELFETVQRRLSKTATAPARGKAKVDYLLSGKLFCGHCGASMNGESGAGRHGKVYHYYSCYTKKRKLGCDKRPLKKDYIEGIVARDALNLLTDQLIDEIADMAIRQSEQDLINDTHIPQLTAQLSEVEKSITNITVAIEKGIASETLMNRLVQLEHEKKTLNKEIKAEEKFVYRIDRDQIVFWLSQFKYGNIEDEDFRRRLIDLLVNSVTVWDEPDGYKITTAYNLTSCKTKTFRVEKNPAAEEATGFDFGESECTKSPRNRLISRTFAFHKFRF

SEQ ID NO: 2310 - protein, 547 aa, Unknown
  Description of Unknown: Integrase B2311 sequence
  PTHR30461:SF3,cd00338,SM00857,G3DSA:1.10.10.2600,IPR036162, PF13408,PS51737,G3DSA:3.40.50.1390,IPR025827,IPR006119, IPR038109,PF07508,IPR011109,SSF53041,PTHR30461, PS51736,Coil,PF00239
MEAATTTLERRVREIPPTRKPEELLRNYDGKMRVAAYCRVSTDSEEQLNSYEAQKTYYTQKIQDNPDWEMAGIYADEGISGTSLKKRTEFNKMITACKRGRIDFIITKSLSRFARNTVDCLDTVRLLKANGIGVYFEKENINTLTESSEFLVTLFSGFAQAESESLSKNVAWGKEKSAKAGNVHFQYKKMLGYRKGEDGQPEIVPEEAAIVRRIYRRYLDGCTLGKIKRELDEDGVPTAQGVECWSPAIIHNILTNEKYIGDALLQKTYVTDCLSKKVRKNRGERVMYYVENNHPAIISREAFDLVRKEMTRRSSKRKVLQKSGKTELGKYSGKYALTELLVCGECGSPYKRVTWARDGKKRIVWRCVSRLEFGTKYCHASPTLDEGKLHSAILNAMNEYAAIRQEVCPDVLAMVEEAKQALTQTGTKLLTLKRRLDEVSHEQADMLDMLLSNMADADLNARMKALTDEKASLKEQILETQQEEVGLEKQVAKRQQMWDSLIECSEGYTEFDDEFVRQIIQKITVEDADTIRIQFRDSDIVLEQGLQ

SEQ ID NO: 2311 - protein, 547 aa, Unknown
  Description of Unknown: Integrase B2312 sequence
  PTHR30461:SF3,SM00857,G3DSA:1.10.10.2600,IPR036162,PS51737, G3DSA:3.40.50.1390,IPR006119,IPR038109,PF07508,SSF53041, IPR011109,PF00239,PTHR30461,PS51736,Coil, cd00338
MKLLVTYIRWSTKEQDSGDSLRRQTNLIDAFYSKHKNDYYLLPAHRYVDKGKSGFHQQHKAQGSDFRRMFENVMSGAIPEGSLIVVENFDRFSRADIDTAIDDVRQILRKGVSILTLGDGELYDKSALTDPVKLIKHIIIAERAHQESLVKQKRIAQVWNHKTQLARELKKPMGKQAPGWLELSEDGSHYIVDEDKASLVNIIYDKRLSGMSMFAICKWLNEQGYPTINQRKVRISKTKKPDGNWSALSVKHILTSRSVLGYLPAKISTEDRKTVLREEIEGFYPQIVTDSKFYAVQQLLEETGKGKTSSGEHWLYVNILKGLIRCKCGLVMTPTGIRKPVYQGTYRCNGNKESRCSYGTVSRKLLDTQLCSRLFSKLSQLHDEATDTAKLDELQRRLNTVDSELEKLTETLIQLPNITQIQEALRVKQEEKDELIVQLSREKARVKSVSSLDLSGLDMESVEGRTEAQIIIKRLVKEIVVSGNEKLVDIYLHNGNMIRGFPLDGKDDHTLTLEEATDEMQSLDDMLIFGEPVTRIYPAGDMEEVDA

SEQ ID NO: 2312 - protein, 547 aa, Unknown
  Description of Unknown: Integrase B2313 sequence
  SM00857,G3DSA:1.10.10.2600,IPR036162,PF13408,IPR025827, PS51737,G3DSA:3.40.50.1390,IPR006119,IPR038109,PF07508, IPR011109,SSF53041,PTHR30461,Coil,PS51736, cd00338,PF00239
MAFRSILDYRNVLATEGLRAVFYARVSTAEEEQLNAIELQIEENRNAISRHKWKKVDEYIDRSKSGTMVKGRDDYQRLFEDLLSDKFDIVVIKDQERLMRNTLDWYLFINRLVQTGKLLYMYLDDKFYSPDDALITGIKAIIAEEFSRNLSKKLHNYHDGRIAKAREGKEIDLQGSGNVFGWDKVDGKYVINPEQAKVRRLMCEGIMERKGSTLIAKELNDAGYRNTVGKPWKPMDIPKFVYDCRNVGIMIINKERNDFESKKTIKLPESEWVYVKNAFPPIITEEEWALICKIHEERVIATGSNKRGKKTSGYSFSGKIVCGVCGASYWRKQRSTKEEYWVCSTKQQKGRKTRKRDAVGGKAGEVNPVGCDNDNISYNSLMEIMEVVSERLRADTSTIKEDMVNWLTRLKKQLLEANGGATEAELQRELKRKDKLLDAYLDNILSKEEYQKKAIALDDRIIELRREIEANKSNFEDLAEIDRVLKNIDEEVARYIDENNQLKVEYILEHLSQVEIHPDKVIVIVPILSEGIVVEKTQYVSRQKRQR

SEQ ID NO: 2313 - protein, 547 aa, Unknown
  Description of Unknown: Integrase B2314 sequence
  SM00857,G3DSA:1.10.10.2600,IPR036162,PF13408,PS51737, G3DSA:3.40.50.1390,IPR025827,IPR006119,IPR038109,PF07508, SSF53041,IPR011109,PTHR30461,Coil,cd00338, PF00239
MAYRKITDIRDTIGMRAVFYARVSTAEEEQLNAIELQIEENRGCIKDHGWKLVGEYIDRSKSGTMVKGRDDYQRLYEDLYEDLFDIVVIKDQERLQRNTLDWYLFINRVVQTGKLLFMYMDGKFYSPDDALITGVRAIIAEEFSRNLSKKLHNYHDHRIEKARQGQEIALQGSGNVYGWDKKDGKYYINPEQAKVRRLMCEGIMARKGSTLIAKELNDAGYRNTVGKPWKPMDIPKFVYDCKNVGTMIINKERHDFESKQTIKLPKEEWVYVENALPPIVTQEEWDLICKIHEERVIATGSDRRGKKTSGYSFSGKLVCGICGAPYWRKQRVSKDEYWVCSTKQTKGRKTRKRDSTMGKAGEINPLGCDNENISYNSLMEIMGVVSERLQANTDTIKQDMINWLTKLRKQLLEANGGHTEADLQRELSRKSKLLDAYLDGILNKQEYQKKAEELDERIIQLKTETEKNKANSGDIAEIDKVLANIDEEVARYVDGNEKLKVEYLLEHLEQVQIFPDKVIVIVPILSEGIVVEKTQYDPLLRGLYVLY

SEQ ID NO: 2314 - protein, 547 aa, Unknown
  Description of Unknown: Integrase B2315 sequence
  PTHR30461:SF3,cd00338,SM00857,G3DSA:1.10.10.2600,IPR036162, PS51737,G3DSA:3.40.50.1390,IPR006119,IPR038109,PF07508, SSF53041,IPR011109,PTHR30461,PS51736,Coil, PF00239
MKLLVTYIRWSTKEQDSGDSLRRQTNLIDAFYSKHKEEYYLLPAHRYVDKGKSGFHQQHKNQGSDFRRMFENVMSGVIPEGSLIVVENFDRFSRADIDTAIDDVRQILRKGVSILTLGDGELYDKSALTDPVKLIKHIIIAERAHQESLVKQKRIAQVWNHKTQLARELKKPMGKQAPGWLELSEDGSHYIVDEDKASLVNIIYDKRLSGMSMFAICKWLNEQGYPTINQRKVRISKTKKPDGNWSALSVKHILTSRSVLGYLPAKISTEDRKTVLREEIESFYPQIVTDSKFYAVQQLLEETGKGKTSSGEHWLYVNILKGLIRCKCGLVMTPTGIRKPVYQGTYRCNGNKESRCNYGTVSRKLLDTQLCSRLFSKLSQLHDEATDTAKLDELQRRLNTVDGELEKLTETLIQLPNITQIQEALRVKQGEKDELIVQLSREKARVKSVSSLNLSGLDMESVEGRTEAQIIIKRLVKEIVVSGNEKLVDIYLHNGNMIRGFPLDGKDDHTLTLEEATDEMQSLDDMLIFGEPVTRIYPAGDMEEVDA

SEQ ID NO: 2315 - protein, 546 aa, Unknown
  Description of Unknown: Integrase B2316 sequence
  PTHR30461:SF3,cd00338,SM00857,G3DSA:1.10.10.2600,IPR036162, PF13408,PS51737,G3DSA:3.40.50.1390,IPR025827,IPR006119, IPR038109,PF07508,IPR011109,SSF53041,PTHR30461, PS51736,Coil,PF00239
MEETIKAVGYARFSSSMQREESITAQKRYMMMYAKRNNMEVIDWYCDEAKSAKTVNRPAFQKMINDAKNNPEFKAVLVHKTDRFSRNLSDSIQYKKLLEEYGVQVIFVNERFEDNPESHLLYHIMGSVNQFYNENLAREVMKGLKENAYQCKFTGGRPPLGYDVDKDLKLVINEKEAEAVRLIFEMSAEGYGYGETIDKLNILGYKTKKGLPFVKNSLYEILRNEKYKGTYIFNRSCSANSLNKRNNHRRKPEEEIIRIENGCPAIVSSGLWHRANAVKKATRSSYTNAKNTYLLTGLIHCGECGGKFHGNVRYNKNNTNLVYRCSSKKNKRKCESKEIRCEYLDSFVIDKFVEFFFNDDNIKVITKQLNEQYNKSCISDLEYNEAKSTLKILEKSRNNLVEAIAKTGINDIMSDKIKEYEEQIKKTAEFIQKYEKQKVDRVITEDEIREQINHLKDYFYNPKNIIRTKYVLSQYIDRIDISNENVQVQFKVSMSPSGNTDVDYFCVHTEMIKRKYLFDYVCEKVDFEQWNIEKLNKSESEHRKGA

SEQ ID NO: 2316 - protein, 546 aa, Unknown
  Description of Unknown: Integrase B2317 sequence
  PTHR30461:SF3,cd00338,SM00857,G3DSA:1.10.10.2600,IPR036162, PF13408,PS51737,G3DSA:3.40.50.1390,IPR025827,IPR006119, IPR038109,PF07508,IPR011109,SSF53041,PTHR30461, PS51736,Coil,PF00239
MEETIKAVGYARFSSSMQREESITAQKRYMMMYAKRNNMEVIDWYCDEAKSAKTVNRPAFQKMINDAKNNPEFKAVLVHKTDRFSRNLSDSIQYKKLLEEYGVQVIFVNERFEDNPESHLLYHIMGSVNQFYNENLAREVMKGLKENAYQCKFTGGRPPLGYDVDKDLKLVINEKEAEAVRLIFEMSAEGYGYGETIDKLNILGYKTKKGLPFVKNSLYEILRNEKYKGTYIFNRSCSANSLNKRNNHRRKPEEEIIRIENGCPAIVSSGLWHRANAVKKATRSSYTNAKNTYLLTGLIHCGECGGKFHGNVRYNKNNTNLVYRCSSKKNKRKCESKEIRCEYLDSFVIDKFVEFFFNDDNIKVITKQLNEQYNKSCISDLEYNEAKSTLKILEKSRNNLVEAIAKTGINDIMSDKIKEYEEQIKKTAEFIQKYEKQKVDRVITEDEIREQINHLKDYFYNPKNIIRTKYVLSQYIDRIDISNENVQVQFKVSMSPSGNTDGDYFCVHTEMIKRKYLFDYVCEKVDFEQWNIEKLNKSESEHRKGA

SEQ ID NO: 2317 - protein, 546 aa, Unknown
  Description of Unknown: Integrase B2318 sequence
  cd00338,SM00857,G3DSA:1.10.10.2600,IPR036162,PF13408, PS51737,G3DSA:3.40.50.1390,IPR025827,IPR006119,IPR038109, PF07508,IPR011109,SSF53041,PTHR30461,PS51736, Coil,PF00239
MVQEKLRAVFYARVSTEEERQLNALEKQVAECKDAVLQKGWKLVDQYVDEGKSGTQIKRRDEYRRLFEDLENDKFDIVVIKSQDRLQRNTLDWYIWIDRLTTHGKRLYMYLEDTFYSPDNALISGIKAILAEEYSRELSKKINNSYKRRIEAAKNGEKISIVNNSRSLGYDKVNGELVINEKEAEVVRMIFNMYASGEGLRAISNTLYDMGYRNRSGNEIDPTTISRMLSSEKYKGVYVINQRHYDFDTKKTVLNPKSEWVHIPGAVPAIVEPELWDRVQEIKGSKVQSIKNEKRGRNCGKSIFSGKIYCAKCGAKYWRSLENGYVKFKCSSYSKYGKIPGKGCDNKSFSENALYSILQSLSEQIVEINTAEVRKSLLNWLESLRERLRASQGDDTIKEEIRKQTARKEKLTDAYMDGIISKEDYSKRYKELEKTLEDLKDKLLTLEVNEDLQSIEEVIQNIDKEMEEYLQTQSFNESRVEFLNQHLTKVTVNKDSFLLEFDLIGGAILTGKDFYLFVDNPRGNRKSSKGFVRCTGSLVCDCNLWK

SEQ ID NO: 2318 - protein, 546 aa, Unknown
  Description of Unknown: Integrase B2319 sequence
  SM00857,G3DSA:1.10.10.2600,IPR036162,PF13408,IPR025827, G3DSA:3.40.50.1390,PS51737,IPR006119,IPR038109,PF07508, SSF53041,IPR011109,PTHR30461,Coil,cd00338, PF00239
MNEIVTGLDTNKIYKVVFYARVSTEEEKQLNALEKQIEELSEFIKYQSNWILVDHYVDEGRTGTMTKGRHEYNRLYADMLTDKFDIIVMKNIERMNRNTGNYYQFINRMTTENKKLYLLLDRKFYTPEDAFINGIKAMMAEEYSRDLSKKINSAAHRSIKQGVAYGNSKLYGYDKIPQSYIINEEEAEVVRQIFNWYVEGYGFRIIQKKLTNMGVYSSTGTQFSLSTLKRMIKNEKYKGMLVSGKTRYNFETKRNEIVPLDERVYIPNGVPAIVGEEIWNKANMLIVQKSEVFNKNYNQKIGRFSNRFTPEQSALSGKIHCGKCGKVFWHSPYITKVNRLRRDIWMCSTYKSLGVKYCKNHSIEFTKILNKIRSILLEENHNPESIQLTLNILTQSLDDNRESKIEQLSKQVERYQKRLSNLTDLLLDELISKEEYTSKKEELNAKIANTQKMLETTSTDSHSSLNKKQRLQDIKCFLQTNIANVADITDNDIRKFVKDIEVFDDVIVLKTITGNSYDIDPDEVKLTFTPRNKKYLQDIKQNNISV

SEQ ID NO: 2319 - protein, 546 aa, Unknown
  Description of Unknown: Integrase B2320 sequence
  PTHR30461:SF3,SM00857,G3DSA:1.10.10.2600,IPR036162,PF13408, PS51737,IPR025827,G3DSA:3.40.50.1390,IPR006119,IPR038109, PF07508,IPR011109,SSF53041,PTHR30461,Coil, PS51736,cd00338,PF00239
MYSSKRAVIYCRVSTEEESQKNALEGQIKEAIKSVEEKKWILVDQYVDEGKSGTTTKNRPQYNRLIKDLSQDRFDIIVIKSQDRLMRNTLEWYMFIDLVNKNQKQLFFYLENKFYNTEDSLIVGIKAILAEEYSRELSKKINNAHKNGQKECSRIMLNNKTWGYDKINKQVVINEKEAEIVRLIFDLYIKGYGARTISKTLTEMGVKSRSGGDFAYVTIRKIVRNPLYKGDVVMNRLHNDFDSKKVVHIPKEEWIVHKNAVPAIVSEETWQAANSILDTRYQDTFSAQGLPIRIGKNKGDYPLSSKIYCGECGSTYWRRYRRNTKDDVTVYWSCSEYVTQGRKNDQTKRGKNMVKKQFDLQRGCNSPHLKEEDIISGLKMIAENIFSPSDRDSLISESIQLFESSALDNDKKVNGLNENLEKLKKQQEKLLDGYLNDCISEDLYKKKNAILVEEIRTLEAKKAEIGDTEAEVRQKKEYIESVKTEISKIGQNEGCVHKLINIIERITVFQTYMLVSLGAIGEIKLNVERLSYKRTRVTIADEQHNN

SEQ ID NO: 2320 - protein, 546 aa, Unknown
  Description of Unknown: Integrase B2321 sequence
  PTHR30461:SF3,SM00857,G3DSA:1.10.10.2600,IPR036162,PS51737, G3DSA:3.40.50.1390,IPR006119,IPR038109,PF07508,SSF53041, IPR011109,PF00239,PTHR30461,Coil,cd00338
MYKEYPTFYNYETKEYGRKSRTDDPLLSTDEILEKHSKIIEEYAVKYLGGPIPQENKYMEVGSGESLKERPEITRLLKDIEDPAVKAIIVVDVQRLSRGDLEDAGRLIRLLRYTNTYVITPMKTYDLRDEYDRDAFERELKRGNEYLEYYKKIQARGKLLSVKEGNYVGSTAPYGFDRIEKYDGKKSYHTLIERKDQADIVRMIFNWYCEEDIGVTAICRRLEELGAKTKTGHSTWKPSIIFSILENHHYIGCVRWNWRKTVKIIEDQEIKKLRPKAKVDEFLLFEGKHDGIISEEQFNKAREIRGKRHRTRRDLTLKNPFSGIMFCKKCGHKIGYNTYTRHGVEYASPKLVCNNQVHCKSGSVKYSEVFEYVRKVLKDCISDFEVRIENDQDDSVKLHRDLIERLTKQLSELEKKEMEQWEAQYDPDPAKRLPQHIFVKLNEKVLKEKEEVNKALAKAKDSAPKHINYREELIKTKDALRILEDEKLDAKTKNQYLKTVIDKMIYERDPIVQITKANAEKYNMQAAKGTKYYNPPYKITIELKCD

SEQ ID NO: 2321 - protein, 546 aa, Unknown
  Description of Unknown: Integrase B2322 sequence
  PTHR30461:SF3,SM00857,G3DSA:1.10.10.2600,IPR036162,PF13408, PS51737,G3DSA:3.40.50.1390,IPR025827,IPR006119,IPR038109, PF07508,IPR011109,SSF53041,PF00239, PTHR30461,PS51736,Coil,cd00338
MRVSVNLNAQKPDTTTNAVIYARYSSHGQTEQSIEGQLAKGHEYAAAQGYTVVHEYIDRAMTGRNDNREAFQKMLSDTGKHQFQVVIVWKVDRFGRNREEIAFNKHTCKKNGVRVEYVAESLPNSPEAVILESVLEGMAEYYSIQLSQNIRRGQLESAKKCQCVGGSVPLGYTLDSDKHFVIDPQTAPVVKKIFDLYAEGATISEITGQLNEQGIRTARKQLFTKNSLTKLLKNEKYIGVYTYKDIVRVEGGVPAIVDESTFDRVQELLKINRRAPSHTWTKVEYLLTDKLFCGHCGSPMVGESGFSHTGAKYSYYGCIKRRREKACDKKPVRQDWIEALVLDETVKLLHDDELMEYIIDRTWEYYQVTDKVQEEKAVLEAQLAEVDKAINNLVRAIEAGIFNAATKSRMDELDAQKAALTASLADLELTSGIRITRDHIEYFLLRLRDLDVKDRECQKRLVQTFVNAVFIYDDGRVKITYNYSGQSSTITLNQIASAEKGKGFVCCLPCSTSSPRFPRGVAAFFCFGVLGKIGCKYTTNFSCIVL

SEQ ID NO: 2322 - protein, 546 aa, Unknown
  Description of Unknown: Integrase B2323 sequence
  PTHR30461:SF3,SM00857,G3DSA:1.10.10.2600,IPR036162,PF13408, IPR025827,PS51737,G3DSA:3.40.50.1390,IPR006119,IPR038109, PF07508,IPR011109,SSF53041,PTHR30461,Coil, PS51736,cd00338,PF00239
MPHKKKLQEVGGRRLVAYYRYSGGSHQTEQSIEGQRRDCETYARIHGMVILHEYIDRHISGKTDDRPEFQQMIADAGKGMFDYVICWKTDRIARSRYDSIIYKKKLRDNGVELLYAAEANVEGSGGIIVEGLMEALAEYYSAELAEKVRRGMRESALKGKAIGSSRPLGLTVDKDKKYIIDPAGAAAVRYIFEQYAAGAASSAIVAHLNEQGLCTSRGNPFNKSSVVRIIQNEVYRGVYVSPKFDVRIEGAVPAIIDDDLWERAQKMFIRNRQSRSPRNDRADYILSGKLFCGECGTAMKGVSGHSSNGEVYFYYNCPCKDCHRRNIPKDELEGLVIRTVCNDVLQPDVMDHIADSVIEAQTAELNQPNPEKEALQHELADVQRKAKNLLSALENGTAGAMLTNRLAELEQQADTLSYQLSSLESEPKFPVFSKEEVLYLLEQFLIAPSEKTKAYRRRLIDTFVSKIEVSNTELTIYFNIAEEDCGKIKKAPQSNQPEGCSTEKQMVRLLLPQSNFSIFILPTYFYIAIPIFQARKTISVESVTSL

SEQ ID NO: 2323 - protein, 546 aa, Unknown
  Description of Unknown: Integrase B2324 sequence
  PTHR30461:SF3,IPR036162,PS51737,IPR011109,PTHR30461, PF00239,G3DSA:1.10.10.2600,IPR006119,SSF53041,cd00338, SM00857,IPR025827,IPR038109,mobidb-lite,PS51736, PF13408,G3DSA:3.40.50.1390,PF07508,Coil
MGKKQKTNGGDAVIYARYSSHNQRDVSIEQQVEACRKHAAELGLTVTATYEDRAISGKTDKRPSFQRMMRDAEQHKFAYVLAWKSNRIGRNMMQALVNESRLVDCGVKVFYAEEDFDDNAAGRFALRSMMNVNQFYIENMAEDVKRGLYDNAKKGLVNGSLPLGYKRGADGKPEIDEPKAAIVREIYTRVAAGELFASIAADLNARGIRTARGREWNKGSFHVLCHNDRYRGIYMYGDIRIPGGMPRIISDELFYDAQEAYGMKKDNRYGRARHGAENYLLTGKLYCGHCGSYMVGISGTSKTGEMHYYYACQKHRLEHTCEKKAIRRDVIENAVARVIMMYCLDDETIDFIVDSTIAYFKQKDHELHIEAMENELAAVQQAISNLMKAIEAGIITPTTRTRLLDLEEQQAKLSGKINTAKAERVEIDRDDLIAGLQLFRTGDIKNKKFLAKLFNTFLLAVYLYDDNRLKIVFSFTGNHNNIEIPLELDNDCPDSESGSYETEVRMSHLECRKNSGTPPSSGGAEKGDGCSGGRFVRTAPLPPHKK

SEQ ID NO: 2324 - protein, 546 aa, Unknown
  Description of Unknown: Integrase B2325 sequence
  cd03768,SM00857,G3DSA:1.10.10.2600,IPR036162,PS51737, G3DSA:3.40.50.1390,SSF109709,IPR006119,IPR038109,PF07508, IPR011109,SSF53041,PTHR30461,PS51736,PF00239
MVRINCAIYVRKSTEKGLELEFNSLHNQEDACRSYIMAQAFNNWEYFKTYTDGGISGGTMERPALKQMLEDIRRGLIQTVVVYKVDRLSRSIMDFHNMMKEFDKYGCSFVSITQAFDTSTSMGKLTLNMLLSFAQFEREVSSERVRDKIRASKAKGLWTGGVPKLGYDIKDKKLVINPVEAEQVRSIFEGYLQCGSLAELEKFAEIKGFKHKDWITNKGEQRGGKPFKISALHRLLHEKLYLGMIENKRTGQAFKGQHEAIISKDLWDKVQTKLKDNDNCANHTRNRNNNLLTGKLFDSNRTIFTNQANSKNKATKRHYYSIKGLFLPTEQIDKLTKDAIIEILNSNLNGLNKDSAMALKLINFTDMNYFMQRNFIRNFINKIIYQKDRLTFFFNTAPITLSAYTGDSLNPNDNPLEFIADNINNQIIYEKQVVINRGLSSNVYNAGKVGLMSVNDNNRLIIRAFAYAWKFKKLYERGIRMEDIIKQEKMTKRTIYKYLNLAYLSPKIVNQLLNGTLTVNLQTLFEIASKNLSFEEQENLIYNRLI

SEQ ID NO: 2325 - protein, 546 aa, Unknown
  Description of Unknown: Integrase B2326 sequence
  PTHR30461:SF3,SM00857,G3DSA:1.10.10.2600,IPR036162,PF13408, IPR025827,G3DSA:3.40.50.1390,PS51737,IPR006119,IPR038109, PF07508,IPR011109,SSF53041,PTHR30461, Coil,PS51736,cd00338,PF00239
MAKPEVSELAVVYARYSSHSQGEQSIEGQLSNARDYAAAHGYTIVHEYVDRAKSGRTDNRAEFQQMLKDTAKRQFSVIILWKVDRFGRNREEIAINKMKCRKNGVRVEYVAETIPDSPEGVILESVLEGFAEYYSLQLSQNIRRGRAESAEKCQSLGGNRPLGYKTGADKKFVIDENTAPTVKMIFTMYADGKTVTEIVDKLNELGLRTLRGGPFTKNSLHSILKNKKYIGIYEYQGREIKDGVPRIIEDDVFNKVQEMLKINKRAPAKTWSRADYILTDKLFCGKCGALMFGESGTSKTGVKHNYYICSNKKRFRSCDKKAVRQADIEDAVLNATHELLQDDELLDYIVDRTWEYYLAQDNSQEELRNLQRQLAQTDTAISNLIRAIEAGILTEETKKRMDELTQQKADLKASIADREIARGFHLQKSHIAFYLRSLRDADWSDKEAQKRLIQTFVNAVFVYDDHITLTYNFSGDKSTITLHDMQRFEDGEEFGCRASRSTIMWRQKRCLLRKARIYRAFLLPKRRFFSVPKHRCKIAVFPNEVR

SEQ ID NO: 2326 - protein, 546 aa, Unknown
  Description of Unknown: Integrase B2327 sequence
  PTHR30461:SF3,SM00857,G3DSA:1.10.10.2600,IPR036162,PF13408, PS51737,G3DSA:3.40.50.1390,IPR025827,IPR006119,IPR038109, PF07508,IPR011109,SSF53041,PF00239,PTHR30461, PS51736,Coil,cd00338
MEETIKAVGYARFSSSMQREESITAQKRYMMMYAKRNNMEVIDWYCDEAKSAKTVNRPAFQKMINDAKNNPEFKAVLVHKTDRFSRNLSDSIQYKKLLEEYGVQVIFVNERFENNPESHLLYHIMGSVNQFYNENLAREVMKGLKENAYQCKFTGGRPPLGYDVDKDLKLVINEKEAEAVRLIFEMSAEGYGYGETIDKLNILGYKTKKGLPFVKNSLYEILKNEKYKGTYIFNRSCSANSLNKRNNHRRKPEEEIIRIENGCPAIVSSGLWHRANAVKKATRSSFTNAKNTYLLTGLIHCGECGGKFHGNIRYNKNNTNLVYRCSSKKNKRKCESKEIRCEYLDSFVIDKFVEFFFNDDNIKVITKQLNEQYNKSCISDLEYNEAKSTLKILEKSRNNLVQAIAKTGINDIMSDKIKEYEEQIKKTAEFIQKYEKQKIDRVITEDEIREQINHLKDYFYNPKNLIRTKYVLSQYIDRIDISNENVKVQFKVSMSPSDNTDGDCFCVHTEMIKRKYLFDYVCENVDFEQWNIEKLNKSESEHRKGA

SEQ ID NO: 2327 - protein, 546 aa, Unknown
  Description of Unknown: Integrase B2328 sequence
  PTHR30461:SF3,SM00857,G3DSA:1.10.10.2600,IPR036162,PS51737, G3DSA:3.40.50.1390,IPR006119,IPR038109,PF07508,SSF53041, IPR011109,PF00239,PTHR30461,Coil,cd00338
MYKEYPMFYNYETKEYGRKSRTDDPLLSTDEILEKHSKIIEEYAVKYLGGPIPQENKYMEVGSGESLKERPEITRLLKDIEDPAVKAIIVVDVQRLSRGDLEDAGRLIRLLRYTNTYVITPMKTYDLRDEYDRDAFERELKRGNEYLEYYKKIQARGKLLSVKEGNYVGSTAPYGFDRIEKFDGKKSYHTLIERKDQADIVRMIFNWYCEEDIGVTAICRRLEELGAKTKTGHSTWKPSIIFSILENHHYIGCVRWNWRKTVKIIEDQEIKKLRPKAKVDEFLLFEGKHDGIISEEQFNKAREIRGKRHRTRRDLTLKNPFSGIMFCKKCGHKIGYNTYTRHGVEYASPKLVCNNQVHCKSGSVKYSEVFEYVRKVLKDCISDFEVRIENDQDDSVKLHRDLIGRLTKQLANLEKKEMEQWEAQYDPDPAKRLPQHIFVKLNEKVLKEKEEVNKALEKAKGSAPKHINYREELVKTRDALRILEDAELDAKTKNQYLKTVINKMIYERDPIVQITKENAEKYSMQSAKGMQYYNPPYKITIELKCD

SEQ ID NO: 2328 - protein, 546 aa, Unknown
  Description of Unknown: Integrase B2329 sequence
  cd00338,SM00857,G3DSA:1.10.10.2600,IPR036162, PF13408,IPR025827,PS51737,G3DSA:3.40.50.1390, IPR006119,IPR038109,PF07508,IPR011109, SSF53041,PTHR30461,PS51736,Coil,PF00239
MAYRRAQDTKGLRAVFYARVSTAEEEQLNAIELQIEENRNTITKHGWKKVDEYIDRSKSGTMVKGRDEYQRLYEDLLGDAFDVVVIKDQERLMRNTLDWYLFINRLVQTGKILYMYLEDKFYSPDDALITGIKAIIAEEFSRNLSKKLHNYHDGRIEKARKGLEIDLQGSGNVFGWDKVDGKYVINPEQAKVRRLMCEGIMARKGSTQIAKELNDAGYRNTVGKPWKPMDIPKFVYDCKNVGTMIINRERHDFESKQTVKLPESEWVYVKGALPPIVTEEEWALIEKIHEERVVATGCNRRGKKTSGYSFSGKLVCGVCGAPYWRKTKTSNEEYWVCSTKQQKGRKTRARDAVGGKAGEINPEGCDNENISYNALMEIMAIVSERLQADTGFIREFMLGRLDTYEKRITEANRGATEADLQREISRKDKLLDAYLDNLLTKEEYQRKALALDEHILELRREVEANKANLADLAEIQRVRENIDAEVAQYLDENEQLKVEFVLEHLSQVIIYPDKVLVIFDVFGEGVMVEKSQYVSREKRRWKNNAV

SEQ ID NO: 2329 - protein, 546 aa, Unknown
  Description of Unknown: Integrase B2330 sequence
  cd00338,SM00857,G3DSA:1.10.10.2600,IPR036162,PF13408, PS51737,G3DSA:3.40.50.1390,IPR025827,IPR006119,IPR038109, PF07508,IPR011109,SSF53041,PTHR30461,PS51736, Coil,PF00239
MVQEKLRAVFYARVSTEEERQLNALEKQVAECKDAVLQKGWKLVDQYVDEGKSGTQIKRRDEYKRLFEDLENDKFDIVVIKSQDRLQRNTLDWYIWIDRLTTHGKRLYMYLEDTFYSPDNALISGIKAILAEEYSRELSKKINNSYKRRIEAAKNGEKISIVNNSRSLGYDKVNGELVINEKEAEVVRMIFNMYASGEGLRAISNTLYDMGYRNRSGNEIDPTTISRMLSSEKYKGVYVINQRHYDFDTKKTVLNPKSEWVHIPGAVPAIVEPELWDRVQEIKGSKVQSIKNEKRGRNCGKSIFSGKIYCAKCGAKYWRSLENGYVKFKCSSYSKYGKIPGKGCDNKSFSENALYSILQSLSEQIVEINTAEVRKSLLNWLKSLRERLRASQGDDTIKEEIRKQTARKEKLTDAYMDGIISKEDYSKRYKELEKTLEDLKDKLLTLEVNEDLQSIEEVIQNIDKEMEEYLQTQSFNERRVEFLNQHLTKVTVNKDSFLLEFDLIGGAILTGKDFYLFVDNPRGNCKSSKGFVRCTGSLVCDCNLWK

SEQ ID NO: 2330 - protein, 546 aa, Unknown
  Description of Unknown: Integrase B2331 sequence
  SM00857,G3DSA:1.10.10.2600,IPR036162,PF13408,IPR025827, PS51737,G3DSA:3.40.50.1390,IPR006119,IPR038109,PF07508, SSF53041,IPR011109,PTHR30461,Coil,cd00338, PF00239
MNEIVTGLDTNKIYKVVFYARVSTEEEKQLNALEKQIEELSEFIKYQSNWILIDHYVDEGRTGTMTKGRHEYNRLYADMLTDKFDIIVMKNIERMNRNTGNYYQFINRMTTENKKLYLLLDRKFYTPEDAFINGIKAMMAEEYSRDLSKKINSAAHRSIKQGVAYGNSKLYGYDKIPQSYIINEEEAEVVRQIFNWYVEGYGFRIIQKKLTNMGVYSSTGTQFSLSTLKRMIKNEKYKGMLVSGKTRYNFETKRNEIVPLDERVYIPNGIPAIVGEEIWNKANMLIVQKSEVFNKNYNQKIGRFSNRFTPEQSALSGKIHCGKCGKVFWHSPYITKVNRLRRDIWMCSTYKSLGVKYCKNHSIEFTKILNKIRSILLEENHNPESIQLTLNILTQSLDDNRESKIEQLSKQVERYQKRLSNLTDLLLDELISKEEYTSKKEELNAKIANTQKMLETTSTDSHSSLNKKQRLQDIKCFLQTNIANVADITDNDIRKFVKDIEVFDDVIVLKTITGNSYDIDPDEVKLTFTPRNKKYLQDIKQNNVSV

SEQ ID NO: 2331 - protein, 546 aa, Unknown
  Description of Unknown: Integrase B2332 sequence
  cd00338,SM00857,G3DSA:1.10.10.2600,IPR036162,PF13408, PS51737,IPR025827,G3DSA:3.40.50.1390,IPR006119,IPR038109, PF07508,IPR011109,SSF53041,PTHR30461,PS51736, Coil,PF00239
MVQEKLRAVFYARVSTEEERQLNALEKQVAECKDAVLQKGWKLVDQYVDEGKSGTQIKRRDEYKRLFEDLENDKFDIVVIKSQDRLQRNTLDWYIWIDRLTTHGKRLYMYLEDTFYSPDNALISGIKAILAEEYSRELSKKINNSYKRRIEAAKNGEKISIVNNSRSLGYDKVNGELVINEKEAEVVRMIFNMYASGEGLRAISNTLYDMGYRNRSGNEIDPTTISRMLSSEKYKGVYVINQRHYDFDTKKTVLNPKSEWVHIPGAVPAIVEPELWDRVQEIKGSKVQSIKNEKRGRNCGKSIFSGKIYCAKCGAKYWRSLENGYVKFKCSSYSKYGKIPGKGCDNKSFSENALYSILQSLSEQIVEINTAEVRKSLLNWLKSLRERLRASQGDDTIKEEIRKQTARKEKLTDAYMDGIISKEDYSKRYKELEKTLEDLKDKLLTLEVNEDLQSIEEVIQNIDKEMEEYLQTQSFNENRVEFLNHHLTKVTVNKDSFLLEFDLIGGAILTGKDFYLFVDNPRRHCKSSESSSRCAGSLVCDRNMRE

SEQ ID NO: 2332 - protein, 546 aa, Unknown
  Description of Unknown: Integrase B2333 sequence
  PTHR30461:SF3,cd00338,SM00857,G3DSA:1.10.10.2600,IPR036162, PF13408,IPR025827,G3DSA:3.40.50.1390,PS51737,IPR006119, IPR038109,PF07508,IPR011109,SSF53041,PTHR30461, PS51736,Coil,PF00239
MKRTAIYARYSSDNQRAESIDEQIRACRYYAQQTGLYDIVAVYKDEALSGYKNSHKRDGFAQLMADAEAGKFEAVMVYELSRFSRNGSDTIVNTEKLARLGIEFVSVREKLDQTPEGRMMMFVITGMNEYYSANLAIETMRGLKENAYQAKHTGGIPPLGYDLDSNGHYIINPEEAAAVRLIFDMYLEGNGYTAICDELNRRGYRTKRGTLFVRNSMYDLLRNEKYTGSFIYNHMAKAKNGKRNRHAYKSDSEVIRVENAFPAIISKEEYRKVLKLMEQNKRKGARNAAVHDYLLSGKVYCGHCGKSMYGETRYRKEYSYSYYSCNGHKSKICGKHSIRCDKLEAEVIRQLNELFFSDEILDRVSEKIYDDSQNHFMDERAAILRKRSADIKKKIDNGTKAILDGVDSDELRSAVKELSAQKKQIDQQIVQIEAAADNNGRTFEEVREMAKNFSDISKLPRDQQKRIVQKFIWRIYVYDSENPDDGDIVKIVLAPTEAARDELNSMAEDYVAITDMLTSTNGTSQGVPMKNPTCFSEKAGFYFLIS

SEQ ID NO: 2333 - protein, 546 aa, Unknown
  Description of Unknown: Integrase B2334 sequence
  PTHR30461:SF3,SM00857,G3DSA:1.10.10.2600,IPR036162,PF13408, PS51737,IPR025827,G3DSA:3.40.50.1390,IPR006119,IPR038109, PF07508,IPR011109,SSF53041,PTHR30461,Coil, PS51736,cd00338,PF00239
MPEALNAVIYARYSSDRQTEQSIEGQLRECYAFAKANDIAVIDTYIDRAISGKTDNRPAFQKMIEDSAKRQFQAVIVYRLDRFTRNRYDSAIYKARLKKNGVKVLSAMENLNGSPESIIMESLLEGMAEYYSVELSQKITRGMRENALKGKALGGQRVLGYKVNSDCYFEIDETTAPVVVDIFKLYSSGKTVKEICDILNARGVKTARGGAFNKNSLHTILTNKKYIGIYKTKYGEIVGGIPAIIDKELFEMVALRMEQNKKAPARAKAEINYLLSTKLFCGKCRSAMVGESGTSKTGKKYYYYACVKKKREKACDKSNVKKDWIEDLVIQRTVTDILKDDVIEKIADRLVELQKAEAAESGTMLYLQNSLAEIQVSIKNIMTAIEKGIITESTKTRLTELEDEKRNVEIEIAKESIARRIISREQIIYWISSFKDGNITSEKYRQQLIDTFVHAVFVYDDKIVITYNYSGENNTATISDLDLSSPPKEEASNSSFTRMSLRLCIGWGTPDGVPFPFSLPRNAVFCVLRRFKPVGVLVYPSGFFVP

SEQ ID NO: 2334 - protein, 546 aa, Unknown
  Description of Unknown: Integrase B2335 sequence
  PTHR30461:SF3,IPR036162,PS51737,IPR011109,PTHR30461, PF00239,G3DSA:1.10.10.2600,IPR006119,SSF53041,cd00338, SM00857,IPR025827,IPR038109,PS51736,mobidb-lite, PF13408,G3DSA:3.40.50.1390,PF07508,Coil
MGKKQKTNGGDAVIYARYSSHNQRDVSIEQQVEACRKHAAELGLTVTATYEDRAISGKTDKRPSFQRMMRDAEQHKFAYVLAWKSNRIGRNMMQALVNESRLVDCGVKVFYAEEDFDDNAAGRFALRSMMNVNQFYIENMAEDVKRGLYDNAKKGLVNGSLPLGYKRGADGKPEIDEPKAAIVREIYTRVAAGELFASIADDLNARGIKTARGREWNKGSFHVLCHNDRYRGIYMYGDIRIPGGMPRIISDELFYDAQEAYSMKKDNRYGRARHGAENYLLTGKLYCGHCGGYMVGISGTSKTGEMHYYYACQKHRLEHTCEKKATRRDVIENAVARAIMMYCLDDETIDFIVDSTIAYFKQKDHELHIEAMENELAAVQQAISNLMKAIEAGIITPTTRTRLLDLEEQQAKLSAKINTAKAERVEIDRDDLIAGLQLFRTGDIKNKKFLAKLFNTFLIAVYLYDDNRLKIVFSFTGNHNSVEIPLELDNDCPDSEIVSDETEVRMSHLECRKNLGSPPSSGEAEKGDDCSDGRFVRTAPLPPHKK

SEQ ID NO: 2335 - protein, 546 aa, Unknown
  Description of Unknown: Integrase B2336 sequence
  PTHR30461:SF3,SM00857,G3DSA:1.10.10.2600,IPR036162,PF13408, PS51737,G3DSA:3.40.50.1390,IPR025827,IPR006119,IPR038109, PF07508,SSF53041,IPR011109,PF00239,PTHR30461, PS51736,Coil,cd00338
MEETIKAVGYARFSSSMQREESITAQKRYMMMYAKRNNMEVIDWYCDEAKSAKTVNRPAFQKMINDAKNNPEFKAVLVHKTDRFSRNLSDSIQYKKLLEEYGVQVIFVNERFENNPESHLLYHIMGSVNQFYNENLAREVMKGLKENAYQCKFTGGRPPLGYDVDKDLKLVINEKEAEAVRLIFEMSAEGYGYGETIDKLNILGYKTKKGLPFVKNSLYEILRNEKYKGTYIFNRSCSANSLNKRNNHRRKPEEEIIRIENGCPAIVSSGLWHRANAVKKATRSSYTNAKNTYLLTGLIHCGECGGKFHGNVRYNKNNTNLVYRCSSKKNKRKCESKEIRCEYLDSFVIDKFVEFFFNDDNIKVITKQLNEQYNKSCISDLEYNEAKSTLKILEKSRNNLVEAIAKTGINDIMSDKIKEYEEQIKKTAEFIQKYEKQKIDRVITEDEIREQINHLKDYFYNPKNLIRTKYVLSQYIDKIDISNENVQVQFKVSMSPSDNTDGDCFCVHTEMIKRKYLFDYVCEKVDFEQWNIEKLNKSESEHRKGA

SEQ ID NO: 2336 - protein, 546 aa, Unknown
  Description of Unknown: Integrase B2337 sequence
  PTHR30461:SF3,SM00857,G3DSA:1.10.10.2600,IPR036162,PF13408, PS51737,G3DSA:3.40.50.1390,IPR025827,IPR006119,IPR038109, PF07508,IPR011109,SSF53041,PTHR30461,Coil, PS51736,cd00338,PF00239
MSRASPKVITIPANPNLVKDKEIKRQLQVAAYCRVSTDEDEQLTSYEAQKTHYTDKIMTNPDWTMAGIFADEGITGTSAEKRPEFLKMIRKCRQKKIDVVLVKSISRFARNTVDCLKYIRALKELGIAVIFEKENINTLEADSEMLITMMGAFAQAESESISANVRWGKRQAMREGRAIIQYKYLYAYEKGDDGLPRIIPEQAEIYRWICNSFLSGQSLRMIRDTLEREGHPAPNGGSNWSIATIRNMLKSEKYCGDVLMQKSYIQDCISGKVVRNTGQLPMYLIQDHHDAIISRETFNAVQAEFSRRNAGRAPSKKLAPTGRSCYSAKYALTERLVCGDCGTLYRRCVWSKKGVKRAVWRCSSRIDYGTKYCKSSPTIYEKPLQRAILAAINSVMSQKVVLIDQIADAMRMELLPLPGEALSMTEIEKRLSELEQEFQAVFQLSRTEDGGYMKYASTFKRINDELAELKEKKKYLLKQQQDDSASNKRIKDAMDILNAGSAEVTEWDESLIRQLVDMVKVISEDRIIVRLKGGLEIKKALDGERD

SEQ ID NO: 2337 - protein, 546 aa, Unknown
  Description of Unknown: Integrase B2338 sequence
  PTHR30461:SF3,SM00857,G3DSA:1.10.10.2600,IPR036162,PF13408, IPR025827,G3DSA:3.40.50.1390,PS51737,IPR006119,IPR038109, PF07508,IPR011109,SSF53041,PF00239,PTHR30461, PS51736,Coil,cd00338
MRVSVNLNAQKPDTTTNAVIYARYSSHGQTEQSIEGQLAKGHEYAAAQGYTVVHEYIDRAMTGRNDNREAFQKMLSDTGKHQFQVVIVWKVDRFGRNREEIAFNKHTCKKNGVRVEYVAESLPNSPEAVILESVLEGMAEYYSIQLSQNIRRGQLESAKKCQCVGGSVPLGYTLDSDKHFVIDPQTAPVVKKIFDLYAEGATISEITGQLNEQGIRTARKQLFTKNSLTKLLKNEKYIGVYTYKDIVRVEGGVPAIVDKSTFDRVQELLKINRRAPSHTWTKVEYLLTDKLFCGHCGSPMVGESGFSHTGAKYSYYGCIKRRREKACDKKPVRQDWIEALVLDETVKLLHDDELMEYIIDRTWEYYQVTDKVQEEKAVLEAQLAEVDKAINNLVRAIEAGIFNAATKSRMDELDAQKAALTASLADLELTSGIRITRDHIEYFLLRLRDLDVKDRECQKRLVQTFVNAVFIYDDGRVKITYNYSGQSSTITLNQIASAEKGKGFVCCLPCSTSSPRFPRGVAAFFCFGVLGKIGCKYTTNFSCIVL

SEQ ID NO: 2338 - protein, 546 aa, Unknown
  Description of Unknown: Integrase B2339 sequence
  PTHR30461:SF3,cd00338,SM00857,G3DSA:1.10.10.2600,IPR036162, PF13408,IPR025827,G3DSA:3.40.50.1390,PS51737,IPR006119, IPR038109,PF07508,SSF53041,IPR011109,PTHR30461, PS51736,Coil,PF00239
MEETIKAVGYARFSSSMQREESITAQKRYMMMYAKRNNMEVIDWYCDEAKSAKTVNRPAFQKMINDAKNNPEFKAVLVHKTDRFSRNLSDSIQYKKLLEEYGVQVIFVNERFENNPESHLLYHIMGSVNQFYNENLAREVMKGLKENAYQCKFTGGRPPLGYDVDKDLKLVINEKEAEAVRLIFEMSAEGYGYGETIDKLNILGYKTKKGLPFVKNSLYEILRNEKYKGTYIFNRSCSANSLNKRNNHRRKPEEEIIRIENGCPAIVSSGLWHRANAVKKATRSSYTNAKNTYLLTGLIHCGECGGKFHGNVRYNKNNTNLVYRCSYKKNKRKCESKEIRCEYLDSFVIDKFVEFFFNDDNIKVITKQLNEQYNKSCISDLEYNEAKSTLKILEKSRNNLVEAIAKTGINDIMSDKIKEYEEQIKKTAEFIQKYEKQKIDRVITEDEIREQINHLKDYFYNPKNLIRTKYVLSQYIDKIDISNENVQVQFKVSMSPSDNTDGDCFCVHTEMIKRKYLFDYVCEKVDFEQWNIEKLNKSESEHRKGA

SEQ ID NO: 2339 - protein, 546 aa, Unknown
  Description of Unknown: Integrase B2340 sequence
  PTHR30461:SF3,cd00338,SM00857,G3DSA:1.10.10.2600,IPR036162, PF13408,IPR025827,G3DSA:3.40.50.1390,PS51737,IPR006119, IPR038109,PF07508,IPR011109,SSF53041,PTHR30461, PS51736,Coil,PF00239
MNETIKVVGYARFSSSMQREESITAQKRYMMMYAKRNNMEVIDWYCDEAKSAKTVNRPEFQRMINDAKNNPEFKAVLVHKTDRFSRNLSDSIQYKKILEEYGVQVIFVNERFEDNPESHLLYHIMGSVNQFYNENLAREVMKGLKENAYQCKFTGGRPPLGYDVDKDLKLVINEKEAEAVRLIFEMSAEGYGYGETIDKLNILGYKTKKGLPFVKNSLYEILKNEKYKGTYIFNRSCSANSLNKRNNHRRKPEEEIIRIENGCPAIVSSGLWHRANAVKKATRSSFTNAKNTYLLTGLIHCGECGGKFHGNIRYNKNNTNLVYRCSAKKNKRKCESKEIRCEYLDSFVIDKFVEFFFNDDNIKVITKQLNEQYSKSCISDLEYNEAKSTLKILEKSRNNLVEAIAKTGINDIMSDKIKEYEEQIKKTSEFIHKYEKQKIDRIITEDEVREQINHLKDYFYNPKNIIRTKFVLSQYIDRIDITNENVQVKFKVSMSPSGNTDGDYFCVHTETIKRKYLFDYVCEKVDFEQWDIEKLNKSESEHRKGA

SEQ ID NO: 2340 - protein, 546 aa, Unknown
  Description of Unknown: Integrase B2341 sequence
  PTHR30461:SF3,cd00338,SM00857,G3DSA:1.10.10.2600,IPR036162, PF13408,IPR025827,G3DSA:3.40.50.1390,PS51737,IPR006119, IPR038109,PF07508,IPR011109,SSF53041,PTHR30461, PS51736,Coil,PF00239
MNETIKVVGYARFSSSMQREESITAQKRYMMMYAKRNNMEVIDWYCDEAKSAKTVNRPEFQRMINDAKNNPEFKAVLVHKTDRFSRNLSDGIQYKKILEEYGVQVIFVNERFEDNPESHLLYHIMGSVNQFYNENLAREVMKGLKENAYQCKFTGGRPPLGYDVDKDLKLVINEKEAEAVRLIFEMSAEGYGYGETIDKLNILGYKTKKGLPFVKNSLYEILRNEKYKGTYIFNRSCSANSLNKRNNHRRKPEEEIIRIENGCPAIVSSGLWHRANAVKKATRSSYTNAKNTYLLTGLIHCGECGGKFHGNIRYNKNNTNLVYRCSSKKNKRKCESKEIRCEYLDSFVIDKFVEFFFNDDNIKVITKQLNEQYNKSCISDLEYNEAKSTLKILEKSRNNLVEAIAKTGINDIMSDKIKEYEEQIKKTAEFIQKYEKQKIDRVITEDEIREQINHLKDYFYNPKNLIRTKYVLSQYIDKIDISNENVQVQFKVSMSPSDNTDGDCFCVHTEMIKRKYLFDYVCEKVDFEQWNIEKLNKSESEHRKGA

SEQ ID NO: 2341 - protein, 546 aa, Unknown
  Description of Unknown: Integrase B2342 sequence
  PTHR30461:SF3,SM00857,G3DSA:1.10.10.2600,IPR036162,PF13408, PS51737,G3DSA:3.40.50.1390,IPR025827,IPR006119,IPR038109, PF07508,IPR011109,SSF53041,PTHR30461,Coil, PS51736,cd00338,PF00239
MKKFPIDLSCLTEEEISQFQEDPYTLYNGDQDVALYLRYSSTGQSDQSIEGQLRDCRAFCKANHYRIVAIYVDRATTARKDVEKRVHLMEMVADSAKQNWEYVIVWKLDRFARNRNDSAIMKMRLRKNGVKVLSATEHLTDSPESIILESVLEGMAEFFSAELSQKVTRGMRESALKCHSVGGHIPLGYKVENHKLVVDPDTAHIVQEAFSLYANGESVADICRKFNSAGYKTAKNTEFNRSSFKAMFRNTRYIGTYTYKDIIIENGIPAIIDKELFETVQRRLSKTATAPARGKAKVDYLLSGKLFCGHCGASMNGESGAGRHGKVYHYYSCYTKKRKLGCDKRPLKKDYIEGIVARDALNLLTDQLIDEIADMAIRQSEQDLINDTHIPQLTAQLSEVEKSITNITAAIEKGIASETLMNRLVQLEHEKKTLNKEIKAEEKFVYRIDRDQIIFWLSQFKYGNIEDEDFRRRLIDLLVNSVTVWDEPDGYKITTAYNLTSCKTKTFRVEKNPAAEEATGFDFGESECAKKTRNLTVSGLFVCISC

SEQ ID NO: 2342 - protein, 546 aa, Unknown
  Description of Unknown: Integrase B2343 sequence
  PTHR30461:SF3,SM00857,G3DSA:1.10.10.2600,IPR036162,PS51737, G3DSA:3.40.50.1390,IPR006119,IPR038109,PF07508,IPR011109, SSF53041,PF00239,PTHR30461,Coil,cd00338
MYKEYPTFYNYEVKEYGRKSRTDDPLLSTDEILEKHSKIIEEYAVKYLGGPIPQENKYMEVGSGESLKERPEITRLLKDIEDPAVKAIIVVDVQRLSRGDLEDAGRLIRLLRYTNTYVITPMKTYDLRDEYDRDAFERELKRGNEYLEYYKKIQARGKLLSVKEGNYVGSTAPYGFDRIEKFDGKKSYHTLIERKDQADIVRMIFNWYCEEDIGVTAICRRLEELGAKTKTGHSTWKPSIIFSILENHHYIGCVRWNWRKTVKIIEDQEIKKLRPKAKVDEFLLFEGKHDGIISEEQFNKAREIRGKRHRTRRDLTLKNPFSGIMFCKKCGHKIGYNTYTRHGVEYASPKLVCNNQVHCKSGSVKYSEVFEYVRKVLKDCISDFEVRIENDQDDSVKLHRDLIGRLTKQLANLEKKEMEQWEAQYDPDPAKRLPQHIFVKLNEKVLKEKEEVNKALAKAKDSAPKHINYREELIKTKDALRILEDEKLDAKTKNQYLKTVINKMIYERDPIVQITKENAEKYSMQSAKGMQYYNPPYKITIELKCN

SEQ ID NO: 2343 - protein, 546 aa, Unknown
  Description of Unknown: Integrase B2344 sequence
  PTHR30461:SF3,cd00338,SM00857,G3DSA:1.10.10.2600,IPR036162, PS51737,G3DSA:3.40.50.1390,IPR006119,IPR038109,PF07508, SSF53041,IPR011109,PTHR30461,Coil, PF00239
MYKEYPTFYNYETKEYGRKSRTDDPLLSTDEILEKHSKIIEEYAVKYLGGPIPQENKYMEVGSGESLKERPEITRLLKDIEDPAVKAIIVVDVQRLSRGDLEDAGRLIRLLRYTNTYVITPMKTYDLRDEYDRDAFERELKRGNEYLEYYKKIQARGKLLSVKEGNYVGSTAPYGFDRIEKFDGKKSYHTLIERKDQADIVRMIFNWYCEEDIGVTAICRRLEELGVKTKTGHSTWKPSIIFSILENHHYIGCVRWNWRKTVKIIEDQEIKKLRPKAKVDEFLLFEGKHDGIISEEQFNKAREIRGKRHRTRRDLTLKNPFSGIMFCKKCGHKIGYNTYTRHGVEYAPPKLVCNNQVHCKSGSVKYSEVFEYVRKVLKDCISDFEVRIENDQDDSVKLHRDLIGRLTKQLADLEKKEIEQWEAQYDPDPAKRLPQHIFVKLNEKVLKEKEEVNKALAKAKDSAPKHINYREELIKTKDALRILEDEKLDAKTKNQYLKTVINKMIYERDPIVQITKENAEKYSMQSAKGMQYYNPPYKITIELKCD

SEQ ID NO: 2344 - protein, 546 aa, Unknown
  Description of Unknown: Integrase B2345 sequence
  PTHR30461:SF3,SM00857,G3DSA:1.10.10.2600,IPR036162,PF13408, PS51737,G3DSA:3.40.50.1390,IPR025827,IPR006119,IPR038109, PF07508,SSF53041,IPR011109,PF00239,PTHR30461, PS51736,Coil,cd00338
MKKFPIDLSCLTEEEISQFQEDPYTLYNGDQNVAIYLRYSSTGQSDQSIEGQLRDCRTFCKANHYRIVAIYVDRATTARKDVEKRVHLMEMISDSAKQNWEYVIVWKLDRFARNRNDSAIMKMRLRKNGVKVLSATEHLTDSPESIILESVLEGMAEFFSAELSQKVTRGMRESALKCHSVGGHIPLGYKVENHKLVVDPDTAHIVQEAFSLYANGESVAAICRKFNSAGYKTAKNTEFNRSSFKAMFRNTRYIGTYTYKDIVIENGIPAIIDKELFETIQRRLSKTATAPARGKAKVDYLLSGKLFCGHCGASMNGESGAGRHGKVYHYYSCYTKKRKLGCDKRPLKKDYIEGIVARDALNLLTDQLIDEIADMAIRQSEQDLINDTHIPQLTAQLSEVEKSITNITAAIEKGIASETLMNRLVQLEHEKKTLNKEIKAEEKFVYRIDRDQIVFWLSQFKYGNIEDEDFRRRLIDLLVNSVTVWDEPDGYKITTAYNLTSCKTKTFRVEKNPAAEEATGFDFGESECAKKTRNLTVSGLFVCISY

SEQ ID NO: 2345 - protein, 546 aa, Unknown
  Description of Unknown: Integrase B2346 sequence
  PTHR30461:SF3,IPR036162,PS51737,IPR011109,PTHR30461, PF00239,G3DSA:1.10.10.2600,IPR006119,SSF53041,cd00338, SM00857,IPR025827,IPR038109,mobidb-lite,PS51736, PF13408,G3DSA:3.40.50.1390,PF07508,Coil
MGKKQKATGGDAVIYARYSSHNQRDVSIEQQVEACRKHAAELGLTVTATYEDRAISGKTDKRPSFQRMMRDAEQHKFAYVLAWKSNRIGRNMMQALVNESRLVDCGVKVFYAEEDFDDNAAGRFALRSMMNVNQFYIENMAEDVKRGLYDNAKKGLVNGSLPLGYKRGADGKPEIDEPKAAIVREIYTRVAAGELFVSIAADLNARGIRTARGREWNKGSFHVLCHNDRYRGIYMYGDIRIPGGMPRIISDELFYDAQEAYGMKKDNRYGRARHGAENYLLTGKLYCGHCGSYMVGISGTSKTGEMHYYYACQKHRLEHACEKKAIRRDVIENAVARAIMMYCLDDETIDFIVDSTIAYFKQKDHELHIEAMENELAAVQQAISNLMKAIEAGIITPTTRTRLLDLEEQQAKLSAKINTAKAERVEIDRDDLIAGLQLFRTGDIKNKKFLAKLFNTFLLAVYLYDDNRLKIVFSFTGNHNNIEIPLELDNDCPDSESGPYETEVRMSHLECRKNSGTPPSSGGAEKGDGCSSGRFVRTAPLPPHKK

SEQ ID NO: 2346 - protein, 546 aa, Unknown
  Description of Unknown: Integrase B2347 sequence
  PTHR30461:SF3,IPR036162,PS51737,IPR011109,PTHR30461, PF00239,G3DSA:1.10.10.2600,IPR006119,SSF53041,cd00338, SM00857,IPR025827,IPR038109,mobidb-lite,PS51736, PF13408,G3DSA:3.40.50.1390,PF07508,Coil
MPRTSRKAKTSPSAAMRLVAYYRYSGGSRQTEQSIEGQRHDCEAYARAHGMTIAKEYIDRHISGKTDDRPAFQQMISDSDRHLFDAVICWKTDRLARNRYDSAIYKNRLRKNGVKILYAAETIVDGPEGIILEGLMESLAEYYSAELSQKLRRGQRESAMKCIALGGNRSFGYDIGADKHYCINEQQAPAVRYIFEQYAAGHTAAEIVAHLNASGIRTSRGHEFNKNSILRIITNEMYLGVYKYSDIRIEGGVPAMIDRDLFDRCQKQLAYNRARGGCASRDQRADYLLSGKLFCGLCSRPMKGVSGTSHTGDKHYYYACPGRTDKKGCTKSYVEKDALESAIVRATAQYVLAPEILNRIIDQIQTLQAQREKPKPNSEKQALKAQLADVRAKQEHLLDALESGGSVRLVARLQQLDQQEAELNARIEAIQDPVAPRTFTRDELEFMLSQFRRADDEQTTAYRRRLLETFVSSVVLAEDGATVCFNLSASDAADADRISVPFSASSKNKNPAESDENSSNSAGSTALRLVEAMGVEPSFMISRAIR

SEQ ID NO: 2347 - protein, 546 aa, Unknown
  Description of Unknown: Integrase B2348 sequence
  PTHR30461:SF3,IPR036162,PS51737,IPR011109,PTHR30461, PF00239,G3DSA:1.10.10.2600,IPR006119,SSF53041,cd00338, SM00857,IPR025827,IPR038109,mobidb-lite,PS51736, PF13408,G3DSA:3.40.50.1390,PF07508,Coil
MGKKQKATGGDAVIYARYSSHNQRDVSIEQQVEACRKHAAELGLTVTATYEDRAISGKTDKRPSFQRMMRDAEQHKFAYVLAWKSNRMGRNMMQALVNESRLVDCGVKVFYAEEDFDDNAAGRFALRSMMNVNQFYIENMAEDVKRGLYDNAKKGLVNGSLPLGYKRGADGKPEIDEPKAAIVREIYTRVAAGELFASIAADLNARGIRTARGREWNKGSFHVLCHNDRYRGIYMYGDIRIPGGMPRIISDELFYDAQEAYGMKKDNRYGRARHGAENYLLTGKLYCGHCGGYMVGISGTSKSGEMHHYYACQKHRLEHTCEKKAIRRDVIENAVAQAIMMYCLDDETIDFIVDSTIAYFKQKDHELHIEVMENELATVQQAISNLMKAIEAGIITPTTRTRLLDLEEQQAKLSAKINTAKAERVEIDRDDLIAGLQLFRTGDIKNKKFLAKLFNTFLLAVYLYDDNRLKIVFSFTGNHNNIEIPLELDNDCPDSESGPYETEVRMSHLECRKNSGTPPSSGGAEKGDGCSSGRFVRTVPLPPHKK

SEQ ID NO: 2348 - protein, 546 aa, Unknown
  Description of Unknown: Integrase B2349 sequence
  PTHR30461:SF3,SM00857,G3DSA:1.10.10.2600,IPR036162,PF13408, PS51737,G3DSA:3.40.50.1390,IPR025827,IPR006119,IPR038109, PF07508,IPR011109,SSF53041,PF00239,PTHR30461, PS51736,Coil,cd00338
MQRAVIYARYSPGPNQTEQSIEGQVRECTKYAELHDLRIVGTYVDRKISGKTDNRREFQRMIDDSEKHIFDVIILYHTDRFARNRYDSAIYKHKLKENGVELRYATTDIPKGPEGIILESIMEGWAEYYSAELSRKIKRGMRESALKCHSTGAGRCLGYRTAEDKSLVIEPEGAKAVQTVFDMYIKGKSHADICRYLNDCGFRTAQGKLFNKNSVTHIIRNKRYIGVYTYDDITIEDGIPAIISKDTFHLAQLEAARRKTAKRPKEPKAEYLLSGKAFCGHCQKPLVGVSGTGKSGNKWYYYYCQESRAKRGCTKKPVKRDWLEREVVERTVAEVLQPEVIQHIAKKCYDLQMEYRQDNSDVLFYELKLKDVRKAIKNTMHAIESGVKTKTLPARLQELENEEEALEAELAIAKASDFVITTDQIEFLLTQFAEPWECESEEEYHRRIIKCFVHKVFLFDDKLLIYYNVSRDGKTREQSEAELLEEALGEGFDKRSSGSTKRNGHDEKSCPFLLAVELFRTSPILAKERSRVSYPGPLLFKADFTR

SEQ ID NO: 2349 - protein, 546 aa, Unknown
  Description of Unknown: Integrase B2350 sequence
  PTHR30461:SF3,SM00857,G3DSA:1.10.10.2600,IPR036162,PF13408, IPR025827,G3DSA:3.40.50.1390,PS51737,IPR006119,IPR038109, PF07508,SSF53041,IPR011109,PF00239,PTHR30461, PS51736,Coil,cd00338
MKKFPIDLSCLTEEEISQFQEDPYTLYNGDQEVALYLRYSSTGQSDQSIEGQLRDCRAFCKANHYRIVAIYVDRATTARKDVEKRVHLMEMVADSAKQNWEYVIVWKLDRFARNRNDSAIMKMRLRKNGVKVLSATEHLTDSPESIILESVLEGMAEFFSAELSQKVTRGMRESALKCHSVGGHIPLGYKVENHKLVVDPDTAHIVQEAFSLYANGESVADICRKFNSAGYKTAKNTEFNRSSFKAMFRNTRYIGTYTYKDIVIENGIPAIIDKELFETVQRRLSKTATAPARGKAKVDYLLSGKLFCGHCGASMNGESGAGRHGKVYHYYSCYTKKRKLGCDKRPLKKDYIEGIVARDALNLLTDQLIDEIADMAIRQSEQDLINDTHIPQLTAQLSEVEKSITNITAAIEKGIASETLMNRLVQLEHEKKTLNKEIKAEEKFVYRIDRDQIIFWLSQFKYGNIEDEDFRRRLIDLLVNSVTVWDEPDGYKITTAYNLTSCKTKTFRVEKNPAAEEATGFDFGESECAKKTRNRKASGLFVCISC

SEQ ID NO: 2350 - protein, 546 aa, Unknown
  Description of Unknown: Integrase B2351 sequence
  PTHR30461:SF3,SM00857,G3DSA:1.10.10.2600,IPR036162,PF13408, PS51737,G3DSA:3.40.50.1390,IPR025827,IPR006119,IPR038109, PF07508,SSF53041,IPR011109,PF00239,PTHR30461, PS51736,Coil,cd00338
MKKFPIDLSCLTEEEISQFQEDPYTLYNGDQNVAIYLRYSSTGQSDQSIEGQLRDCRTFCKANHYRIVAIYVDRATTARKDVEKRVHLMEMISDSAKQNWEYVIVWKLDRFARNRNDSAIMKMRLRKNGVKVLSATEHLTDSPESIILESVLEGMAEFFSAELSQKVTRGMRESALKCHSVGGHIPLGYKVENHKLVVDPDTAHIVQEAFSLYANGESVADICRKFNSAGYKTAKNTEFNRSSFKAMFRNTRYIGTYTYKDIVIENGIPAIIDKELFETVQRRLSKTATAPARGKAKVDYLLSGKLFCGHCGASMNGESGAGRHGKVYHYYSCYTKKRKLGCDKRPLKKDYIEGIVSRDALNLLTDQLIDEIADMAIRQSEQDLINDTHIPQLTAQLSEVEKSITNITAAIEKGIASETLMNRLVQLEHEKKTLNKEIKAEEKFVYRIDRDQIVFWLSQFKYGNIEDEDFRRRLIDLLVNSVTVWDEPDGYKITTAYNLTSCKTKTFRVEKNPAAEEATGFDFGESECAKKTRNRKVSGLFVCISC

SEQ ID NO: 2351 - protein, 546 aa, Unknown
  Description of Unknown: Integrase B2352 sequence
  PTHR30461:SF3,cd00338,SM00857,G3DSA:1.10.10.2600,IPR036162, PF13408,IPR025827,G3DSA:3.40.50.1390,PS51737,IPR006119, IPR038109,PF07508,SSF53041,IPR011109,PTHR30461, PS51736,Coil,PF00239
MEETIKAVGYARFSSSMQREESITAQKRYMMMYAKRNNMEVIDWYCDEAKSAKTVNRPAFQKMINDAKNNPEFKAVLVHKTDRFSRNLSDSIQYKKLLEEYGVQVIFVNERFENNPESHLLYHIMGSVNQFYNENLAREVMKGLKENAYQCKFTGGRPPLGYDVDKDLKLVINEKEAEAVRLIFEMSAEGYGYGETIDKLNILGYKTKKGLPFVKNSLYEILRNEKYKGTYIFNRSCSANSLNKRNNHRRKPEEEIIRIENGCPAIVSSGLWHRANAVKKATRSSYTNAKNTYLLTGLIHCGECGGKFHGNIRYNKNNTNLVYRCSAKKNKRKCESKEIRCEYLDSFVIDKFVEFFFNDDNIKVITKQLNEQYSKSCISDLEYNEAKSTLKILEKSRNNLVEAIAKTGINDIMSDKIKEYEEQIKKTSEFIHKYEKQKIDRVITEDEVREQINHLKDYFYNPKNIIRTKFVLSQYIDRIDISNDNVQVHFKVSISPSGNTDGDCICVHTEMIKRKYLFDYVCEKVDFEQWNIEKLNKSETEHRKGA

SEQ ID NO: 2352 - protein, 546 aa, Unknown
  Description of Unknown: Integrase B2353 sequence
  cd00338,SM00857,G3DSA:1.10.10.2600,IPR036162,PF13408, IPR025827,G3DSA:3.40.50.1390,PS51737,IPR006119,IPR038109, PF07508,IPR011109,SSF53041,PTHR30461,PS51736, Coil,PF00239
MKKRMIPMAVSSADFDPSMNMVDPMEASAFGVIYARYSSHSQRDVSIEQQVKDCMAYAARNNIYIVACYADRHMTGRTDRRPEFHRMLRDAEAGSWSFVLTWKNDRFARNRYDAAIYKAKLKKCGVRCLFSQEYIPAGPEGILLEAMLEGDAEFRSAQMAVDIKRGLAYNAEHCMVTGAIPFGYRRTKDYTLELDPDRAPLVKEIYDRFLAGWKIIDIANDLNRRGITTASGKPWGRNSFHSMLSNERYTGVYIYGDIRTPGGLPAIIDRDTWLAVQRRLHTKKNPVGRSRSYGDYLLTGKLFCGHCQRPMVGVSGKTRPGKPLYYYYVCQGRRLSHDCQKQNVRRDWLEEKVCAMVAGLVMQDNVVEWMADCVVDYQRRHKEDGTLQALASQLKQTRAAIGNVMAAIEAGIITATTKDRLLELEAQEQKLAQALETEKALRPTYTRERVIFWLEQFRAGDLTDLAFRLRLVTTFVNAIYLYDDHLKVVLNYTGRNSSVDFPLVEDALDSGAVDGGPYSVETGPPKIRPSAFGRWPYFWASLARLA

SEQ ID NO: 2353 - protein, 546 aa, Unknown
  Description of Unknown: Integrase B2354 sequence
  PTHR30461:SF3,cd00338,SM00857,G3DSA:1.10.10.2600,IPR036162, PF13408,PS51737,G3DSA:3.40.50.1390,IPR025827,IPR006119, IPR038109,PF07508,IPR011109,SSF53041,PTHR30461, PS51736,Coil,PF00239
MEETIKAVGYARFSSSMQREESITAQKRYMMMYAKRNNMEVIDWYCDEAKSAKTVNRPAFQKMINDAKNNPEFKAVLVHKTDRFSRNLSDSIQYKKLLEEYGVQVIFVNERFEDNPESHLLYHIMGSVNQFYNENLAREVMKGLKENAYQCKFTGGRPPLGYDVDKDLKLVINEKEAEAVRLIFEMSAEGYGYGETIDKLNILGYKTKKGLPFVKNSLYEILRNEKYKGTYIFKRSCSANSLNKRNNHRRKPEEEIIRIENGCPAIVSSGLWHRANAVKKATRSSYTNAKNTYLLTGLIHCGECGGKFHGNVRYNKNNTNLVYRCSSKKNKRKCESKEIRCEYLDSFVIDKFVEFFFNDDNIKVITKQLNEQYNKSCISDLEYNEAKSTLKILEKSRNNLVEAIAKTGINDIMSDKIKEYEEQIKKTAEFIQKYEKQKVDRVITEDEIREQINHLKDYFYNPKNIIRTKYVLSQYIDRIDISNENVQVQFKVSMSPSGNTDGDYFCVHTEMIKRKYLFDYVCEKVDFEQWNIEKLNKSESEHRKGA

SEQ ID NO: 2354 - protein, 546 aa, Unknown
  Description of Unknown: Integrase B2355 sequence
  PTHR30461:SF3,IPR036162,PS51737,IPR011109,PTHR30461, PF00239,G3DSA:1.10.10.2600,IPR006119,SSF53041,cd00338, SM00857,IPR025827,IPR038109,mobidb-lite,PS51736, PF13408,G3DSA:3.40.50.1390,PF07508,Coil
MPRTSRKAKTSPSAAMRLVAYYRYSGGSRQTEQSIEGQRHDCEAYARAHGMTIAKEYIDRHISGKTDDRPAFQQMISDSDRHLFDAVICWKTDRLARNRYDSAIYKNRLRKNGVKILYAAETIVDGPEGIILEGLMESLAEYYSAELSQKLRRGQRESAMKCIALGGNRSFGYDIGADKHYCINEQQAPAVRYIFEQYAAGHTAAEIVAHLNASGIRTSRGHEFNKNSILRIITNEMYLGVYKYSDIRIEGGVPAMIDRDLFDRCQKQLAYNRARGGCASRDQRADYLLSGKLFCGLCSRPMKGVSGTSHTGDKHYYYVCPGRTDKKGCTKSYVEKDALESAIVRATAQYVLAPEILNRIIDQIQTLQAQREKPKPNSEKQALKAQLADVRAKQEHLLDALESGGSVRLVARLQQLDQQEAELNARIEAIQDPVAPRTFTRDELEFMLSQFRRADDEQTTAYRRRLLETFVSSVVLAEDGATVCFNLSASDAADADRISVPFSASSKNKNPAESGENSSNSAGSTALRLVEAMGVEPSFMISRAIR

SEQ ID NO: 2355 - protein, 546 aa, Unknown
  Description of Unknown: Integrase B2356 sequence
  PTHR30461:SF3,SM00857,G3DSA:1.10.10.2600,IPR036162,PF13408, PS51737,G3DSA:3.40.50.1390,IPR025827,IPR006119,IPR038109, PF07508,IPR011109,SSF53041,PTHR30461,Coil, PS51736,cd00338,PF00239
MPEALNAVIYARYSSDRQTEQSIEGQLRECYAFAKANDIAVIDTYIDRAISGKTDNRPAFQKMIEDSAKRQFQAVIVYRLDRFTRNRYDSAIYKARLKKNGVKVLSAMENLNGSPESIIMESLLEGMAEYYSVELSQKITRGMRENALKGKALGGQRVLGYKVNSDCYFEIDETTAPVVVDIFKLYSSGKTVKEICDILNARGVKTARGGAFNKNSLHTILTNKKYIGIYKTKYGEIVGGIPAIIDKELFEMVALRMEQNKKAPARAKAEINYLLSTKLFCGKCRSAMVGESGTSKTGKKYYYYACVKKKREKACDKSNVKKDWIEDLVIQRTVTDILKDDVIDKIADRLVELQKAEAAESGTMLYLENSLAEIQVSIKNIMTAIEKGIITESTKTRLTELEDEKRNVEIEIAKESIARRIISREQIIYWISSFKDGNITSEKYRQQLIDTFVHAVFVYDDKIVITYNYSGENNTATISDLDLSSPPKEEASNSSFTRMSLRLCIGWGTPDGVPFPFSLPRNAVFCVLRRFKPVGVLVYPSGFFVP

SEQ ID NO: 2356 - protein, 546 aa, Unknown
  Description of Unknown: Integrase B2357 sequence
  cd03768,PTHR30461:SF3,SM00857,G3DSA:1.10.10.2600,IPR036162, PF13408,PS51737,IPR025827,G3DSA:3.40.50.1390,IPR006119, IPR038109,PF07508,IPR011109,SSF53041,PTHR30461, PS51736,Coil,PF00239
MKAAIYSRKSKFTGKGDSIENQIQLCMDYSKSIGIKEFLVYEDEGFSGGNIDRPQFKKMMQDAKDKKFDCLVCYRLDRISRNVSDFSTLIEKLNKLEISFISIKEQFDTSTPMGRAMMFISSVFAQLERETIAERIKDNMYELARSGRWLGGKTPHGFTSKKISFLDENLKERSMYQLEVNDEQMEIVKLIFNKYLELRSLSQLYKYVYHNGIKGPRGGKFDPSSLSGILRNPAYVKANEDILDYLRSLGMEVVGVPDGQCGILTYAKNTSNSIAAIAKHHGVIEPDVWLEVQSILNENKDKIPRISTGKTALLSGLLKCGKCGSNMRIMYKGKRNDEDLKYYYVCGTKRSLGVEGCNCKNLNGPLVENLVIDKIKNCNIESVINAFNSNKAKVDTVFSDVRSEINLLKNSISEKEKLISNLVMELAKNTGSVASEYIISQIESLNGEIDALKSKVSELESSSVDINSASLNLDIIVSNLKKFNYEVDDASLDDKRLLLSTIVDSIVWDDASGNLSIVYMGAKMDDLVSLSDGSHFCSDCRSYIYE

SEQ ID NO: 2357 - protein, 546 aa, Unknown
  Description of Unknown: Integrase B2358 sequence
  PTHR30461:SF3,SM00857,G3DSA:1.10.10.2600,IPR036162,PS51737, G3DSA:3.40.50.1390,IPR006119,IPR038109,PF07508,IPR011109, SSF53041,PTHR30461,Coil,cd00338,PF00239
MYKEYPKFYNYEVKEYGRKSRMDDPLLSTDEILEKHSKIVEEYAVKHLGGPIPDDNKYMEVASGESLKDRPEITRLLKDIENPAVKAIIVVEVQRLSRGDLEDAGKLIKLLRYTNTFVITPMKIYDLRDEYDRDAFERELKRGNEYLEYFKKIQARGKLLSVKEGKYVGSTAPYGFDRVKKTDVKKPYYTLIERKDQADVVRMIFNWYCEEDIGVTAICRRLEDIGAKTKTGQSTWKPSIIFSILENHHYIGCTRWNWRKTVKIIEDQEVKKLRPKAKVDEFLVFEGKHDGIISEEQFNKAREIRGKRHKTRKGLTLKNPFSGIMFCKKCGSKIGYNTYTRNGVEYAAPKLVCNNQVHCKTGSVKYSEVFEYVCKVLRDCIDDFEVRIEDKQDDSLKLHTDLMTRLTKQLANLEKKEIDQWEAQYDPDESKRLPQHIFAKLNEKVLKEKEEVNKALDKAKDSAPKHINYKDELMKTKDALRILEDVELDAKTKNRYLKTVIDKMIYERDQIVQITKDNAEKYNTQSSKGTKYCNPPYKITIELKCD

SEQ ID NO: 2358 - protein, 546 aa, Unknown
  Description of Unknown: Integrase B2359 sequence
  PTHR30461:SF3,SM00857,IPR006118,G3DSA:1.10.10.2600,IPR036162, PS51737,G3DSA:3.40.50.1390,IPR006119,IPR038109,PF07508, IPR011109,SSF53041,PF00239,PTHR30461, PS00397,PS51736,Coil,cd00338
MFETEDLTGQYVNIYIRVSTDEQAKKGYSIDMQEDQCRKYIERLNGAVNKVYIDDGYSGKNLNRPQIKQLMEDLKSKKNRVTAVVTWRCDRMIRSTDYYYQVLKPLFGKQGVILLSATEPNEGQNNPYGKWMRNSQINNAELESGLISIRTVMNLQEKARQGHYPGARVPVGYKRNKNREIIPDEEKRHYIEKIFRLYSTGAYSFETLAAKMRKEGFTHNNKPCSKKTIENILSVYQVFYIGKFNYSFKQNDGTYIVKLCDGKHEPIISLALYEAAMRVKDRASGPKENKHSFLYKGLIRCSISNRLLTPEKQRGANKSGEYEYYRCHRPCPECPKDCKRIIKREVIDKAVIEALETLNITKEQLKNLKEDVKNILHYQANYDEKRKIQIEGDIKKLKNRINQLYDDKLDGIISESTYLDKKLTWENKLENLTLEYTALTKTNIELIRRFEKMFELSENLTQKYLQKSVDKKREILKILCSNFFYEGSELRIELESAFTALIKLALNDKWAHDGLIFELLKSQKFDFLRSKNTLILFEKLETYLIA

SEQ ID NO: 2359 - protein, 546 aa, Unknown
  Description of Unknown: Integrase B2360 sequence
  PTHR30461:SF3,SM00857,G3DSA:1.10.10.2600,IPR036162,PF13408, PS51737,G3DSA:3.40.50.1390,IPR025827,IPR006119,IPR038109, PF07508,IPR011109,SSF53041,PF00239,PTHR30461, PS51736,Coil,cd00338
MNETIKVVGYARFSSSMQREESITAQKRYMMMYAKRNNMEVIDWYCDEAKSAKTVNRPEFQRMINDAKNNPEFKAVLVHKTDRFSRNLSDSIQYKKILEEYGVQVIFVNERFEDNPESHLLYHIMGSVNQFYNENLAREVMKGLKENAYQCKFTGGRPPLGYDVDKDLKLVINEKEAEAVRLIFEMSAEGYGYGETIDKLNILGYKTKKGLPFVKNSLYEILKNEKYKGTYIFNRSCSANSLNKRNNHRRKPEEEIIRIENGCPAIVSSGLWHRANAVKKATRSSYTNAKNTYLLTGLIHCGECGGKFHGNVRYNKNNTNLVYRCSSKKNKRKCESKEIRCEYLDSFVIDKFVEFFFNDDNIKVITKQLNEQYSKSCISDLEYNEAKSTLKILEKSRNNLVEAIAKTGINDIISDKIKEYEEQIKKTAEFIQKYEKQKIDRVITEDEIREQINHLKDYFYNPKNLIRTKYVLSQYIDRIDISNENVQVQFKVSMSPSDNTDGDCFCVHTEMIKRKYLFDYVCEKVDFEQWNIEKLNKSESEHRKGA

SEQ ID NO: 2360 - protein, 546 aa, Unknown
  Description of Unknown: Integrase B2361 sequence
  cd03768,PTHR30461:SF3,SM00857,IPR036162,PF13408, IPR025827,G3DSA:3.40.50.1390,PS51737,IPR006119,PF07508, IPR011109,SSF53041,PTHR30461,PS51736,Coil, PF00239
MFEIKAAIYTRKSKYTEEGESIENQIHMCIDYAEKNLGIKDYVIYQDEGFTGGNTDRPQFQKMMKDLKDKEYTHLICYRLDRISRSVADFSATLEMLNKIKVSFISIKEQFDTSSAMGRAMLNISATFAQLERETIAERIKDNLRELGKTGRWLGGPPPLGYKSVEVENNDAGGKSRKKHILAINENEVDTIKALFKLFMEHKKYNKTATLLNELGYKPRHGKVFNLTIVKQAINNPVYIIADKTIFKYFKSKGSDTYLMDKCDNKKGLMPYHRRDSENKMLDMNEWIISVGDHDGIITSDEWLQCQKIKDEIKSRPSSRHGSSKLFLLSGLIVCSKCGSSMSGRHKVLNGSTYRYYTCNLRNRASSECCNDSLNAYDAEEYVVKNLKSITRETIIDNYKQSEKRQRSKVDNDKLITKYNKEIETNKTMISNLVKRIALIEDDIVETFMEEIKKLKENNIELQSLIDTLEKENSKILEDKISVDDILRNIEHFQNFYDFTEGFEKKQDLIRSIVKFITWDSENRKIRIVLIGSDEKRPTINPLFHL

SEQ ID NO: 2361 - protein, 546 aa, Unknown
  Description of Unknown: Integrase B2362 sequence
  PTHR30461:SF3,IPR036162,PS51737,IPR011109,PTHR30461, PS00397,PF00239,G3DSA:1.10.10.2600,IPR006119,SSF53041, cd00338,SM00857,IPR025827,IPR038109,PS51736, IPR006118,PF13408,G3DSA:3.40.50.1390,PF07508,Coil
MSFFGNKLPERNEIAVVYCRVSTDGQAERGTIESQITYAKDYAKFKGFEIKDFYCDDGVTGMMPLAERPEGKRLTEDAKAGKFNVVYVYKIDRLGRSARETLNAIYSLKESGVILRSLTETFDLETPMGQFFMQLLANIADLDRNNFLERSRLGTERLVKAGKWVGGIVPYGYEINDAKELVLNTRPFPDSDLCEAEVVRMIFDMVGKHNKSSVEVARLLNALGVPTSYSRSTGKRRKKTIGIWRSNTVLRIIRNTTYKGIHYYGKRSGYYSTPIAREVTPIVDEKIWEQANAEIDKNRKSSFRVPASEYMLAGLIKCGVCGANYSGTRNNRDGAYYRCSSRMRKHKIEKNKCNSRYVNSDLLESIVWNELIDLLGNKKTLRAAVKNSLTEMEKKQRNIEPDIEKAEKALQDKELEKARLIQLYTKGTLSEEDVIAPLDALKNELEGLTEHLSALMKEKENIDKAQIIEKEDIDLYVDKIREFLSECDDPKTKKRLIQTLVKKITVISPTDRKKPIEFDIEFRLKVPAHKVYSDGAKKRTDTDSSH

SEQ ID NO: 2362 - protein, 546 aa, Unknown
  Description of Unknown: Integrase B2363 sequence
  PTHR30461:SF3,SM00857,G3DSA:1.10.10.2600,IPR036162,PF13408, IPR025827,G3DSA:3.40.50.1390,PS51737,IPR006119,IPR038109, PF07508,SSF53041,IPR011109,PTHR30461,Coil, PS51736,cd00338,PF00239
MPQTAVKKKVSMIPAKPQYDRSIKLSEKKLRVAAYCRVSTELEEQESSYEAQVEYYTRKIQETDNWKMAGIYADDGKSATNTKKRDDFNAMIKDALDGKIDMILTKSVSRFARNTVDSLLTIRKLKEKNVAVVFEKEGVNTLDGTGEILITILSSLAQEESRNISENTRWGVVRRFENGKMIVNHNKFMGYTKNENGDLVIVPEEAEIVRLIFRLYLEGYSAKKISQYLEENGIKTATGQDRWYDSVIFKMLRNEKYMGDALLQKTYTVDFMTKKKVINKGIVPQYYVEDDHEPIIPKELFYRVQEELARRASMNKAAVTRKKNQKSKFSSEYALTGLLLCGDCGQEYRRVTWSRNGKKKIVWRCSNRLTNGTKNCKKSETLEEGALNRAVMEAINRITRGDGDFVGAFRQNVIRVIGSYGGEQEPDEYDEKIKEKEEEMVALIAENARVGSYTDEFDERYRRIAEEITTLKEEQIEARRKTKLADSYEQRLKDMDSFLEKQTCQIPEFDNDLVRRLIASIKVVSAEKLIIQFQSGIVMEQEIRYE

SEQ ID NO: 2363 - protein, 546 aa, Unknown
  Description of Unknown: Integrase B2364 sequence
  PTHR30461:SF3,SM00857,G3DSA:1.10.10.2600,IPR036162,PF13408, PS51737,G3DSA:3.40.50.1390,IPR025827,IPR006119,IPR038109, PF07508,IPR011109,SSF53041,PF00239,PTHR30461, PS51736,Coil,cd00338
MRVSVNLNAQKPDTTTNAVIYARYSSHGQTEQSIEGQLAKGHEYAAAQGYTVVHEYIDRAMTGRNDNREAFQKMLSDTGKHQFQVVIVWKVDRFGRNREEIAFNKHTCKKNGVRVEYVAESLPNSPEAVILESVLEGMAEYYSIQLSQNIRRGQLESAKKCQCVGGSVPLGYTLDSDKHFVIDPQTAPVVKKIFDLYAEGATISEITGQLNEQGIRTARKQLFTKNSLTKLLKNEKYIGVYTYKDIVRVEGGVPAIVDESTFDRVQELLKINRRAPSHTWTKIEYLLTDKLFCGHCGSPMVGESGFSHTGAKYSYYGCIKRRREKACDKKPVRQDWIEALVLDETVKLLHDDELMEYIIDRTWEYYQVTDKVQEEKAVLEAQLAEVDKAINNLVRAIEAGIFNAATKSRMDELDAQKAALTASLADLELTSGIRITRDHIEYFLLRLRDLDVKDRECQKRLVQTFVNAVFIYDDGRVKITYNYSGQSSTITLNQIASAEKGKGFVCCLPCSTSSPRFPRGVAAFFCFGVLGKIGCKYTTNFSCIVL

SEQ ID NO: 2364 - protein, 546 aa, Unknown
  Description of Unknown: Integrase B2365 sequence
  PTHR30461:SF3,SM00857,G3DSA:1.10.10.2600,IPR036162,PS51737, G3DSA:3.40.50.1390,IPR006119,IPR038109,PF07508,SSF53041, IPR011109,PF00239,PTHR30461,Coil,cd00338
MYKEYPTFYNYETKEYGRKSRTDDPLLSTDEILEKHSKIIEEYAVKYLGGPIPQENKYMEVGSGESLKERPEITRLLKDIEDPAVKAIIVVDVQRLSRGDLEDAGRLIRLLRYTNTYVITPMKTYDLRDEYDRDAFERELKRGNEYLEYYKKIQARGKLLSVKEGNYVGSTAPYGFDRIEKFDGKKSYHTLIERKDQADIVRMIFNWYCEEDIGVTAICRRLEELGAKTKTGHSTWKPSIIFSILENHHYIGCVRWNWRKTVKIIEDQEIKKLRPKAKVDEFLLFEGKHDAIISEEQFNKAREIRGKRHRTRRDLTLKNPFSGIMFCKKCGHKIGYNTYTRHGVEYASPKLVCNNQVHCKSGSVKYSEVFEYVRKVLKDCISDFEVRIENDRDDSVKLHRDLIGRLTKQLANLEKKEMEQWEAQYDPDPAKRLPQHIFVKLNEKVLKEKEEVNKALAKAKDSAPKHINYQEELIKTKDALRILEDEKLDAKTKNQYLKTVVNKMIYERDPIVQITKENAEKYSMQSAKGMQYYNPPYKITIELKCN

SEQ ID NO: 2365 - protein, 546 aa, Unknown
  Description of Unknown: Integrase B2366 sequence
  PTHR30461:SF3,IPR036162,PS51737,IPR011109,PTHR30461, PF00239,G3DSA:1.10.10.2600,IPR006119,PF14287,SSF53041, IPR025378,SM00857,IPR025827,cd03770, IPR038109,PS51736,PF13408,G3DSA:3.40.50.1390,PF07508,Coil
MSRKKQVYEKITALYCRISLDDGGDNESMSISNQKIMLRDFAEKHGMFQYEYYVDDGYTGRNFNRPAFQRMIADIEAGKIGCVITKDLSRLGRNYIEAGSYIEIFFPKHNVRYIAITDGVDSLTRQEMDITPFKNILNDMYSRDISKKVLAGITTRSRQGKFCGGTPPFGLMRDPEDKGHLIIDPETAPIIRKIYDYALDGLGCMRISKRLMEEKIPITHVKANTEFDANYYFWGGARISHILRNPFYKGAHLVFRTHQKGIRSNTYDIIPRDQWEVIEGCHEAIVTPEEWEQVQELIDRRPTIQGNSCPFYNLFHGLVYCATCGKSMQVRYEKVGRTGKNRFTGEMREPIDKAYYICQTYNRMGCKVCSSHKIEARDLYNLVLKDIQELAAQAMKDADAFYQRLSRRMEHRYLVDASQTEKERLRLEARNQEIDGMFLSLYTDKAKGILTEQRFVKLTAALEQEQESNQKRLHDLAMMQGRADAQESEVRTFIKEIRRYAAIEELDEAVLNRLISRILIGEIKKIDGQRTQEVKIIYNFVGEMSR

SEQ ID NO: 2366 - protein, 546 aa, Unknown
  Description of Unknown: Integrase B2367 sequence
  PTHR30461:SF3,SM00857,G3DSA:1.10.10.2600,IPR036162,PS51737, G3DSA:3.40.50.1390,IPR006119,IPR038109,PF07508,SSF53041, IPR011109,PTHR30461,Coil,cd00338,PF00239
MYKEYPTFHYYETKEYGRKSRTDDPLLSTDEILEKHSKIVEEYAIKYLGGPIPEENKYMEVASGESLKDRPEITRLLKDIEDPSVKAIIVVEVQRLSRGDLEDAGRLIRLLRYTNTYVITPMKIYDLRDEYDRDAFERELKRGNEYLEYFKKIQARGRLASVKDGNYIGSTAPYGFDRIEKFDGKKSYHTLVERKDQADVVRMIFNWYCEEDIGVTAICRRLEDLGAKTKTGRTRWEPSIVFSILENHHYIGCTRWNWRKTVKIIEDQEIKKLRPKAKVDEFLLFEGKHDGIISEEQFNKAREIRGKRHRTRRDLTLKNPFSGIMFCKKCGSKIGYNTYTRNGVEYAPPKLVCNNQVHCKTGSVNFHEVFEYVRKVLRDCIDDFEVRIENDHDDSSKLHRDLVERLEKQLKGLEKKEIEQWDAQYDPDPAKRLPQHVFSKLNEKVLKEKEEVNKALDKAKDSVPKHIDYREELMKTTDALRILEDVGLDAKTKNKYLKTVISKMVYERDPIIQISKENAEKYGIEASKGLRYYTPPYKIAIELKCD

SEQ ID NO: 2367 - protein, 545 aa, Unknown
  Description of Unknown: Integrase B2368 sequence
  PTHR30461:SF3,SM00857,G3DSA:1.10.10.2600,IPR036162,PF13408, PS51737,G3DSA:3.40.50.1390,IPR025827,IPR006119,IPR038109, PF07508,IPR011109,SSF53041,PTHR30461, Coil,PS51736,cd00338,PF00239
MLQVAAYCRVSTDKEDQANSFEAQQRYFREYIQRQPDWELQGIYADEGFSGTSTNKRVEFNKMLHAAELGQIDLIVTKEVSRFTRNTVDALQITRELRRRGVGVLFLNDSLDTRTNDGELRLTIMSSFAQDESRRTSERSKWGQMRSMEKGVVFGGSLLGYDVIGGKMTVNPEGAEVVRLIFHKYLQERKGCSTIARELREAGILSSKGNCLWSSATVTKILKNEKYCGDLIQKKTYTPDYLTHEKKYNHGKEPLVELKDHHEPIIDRETWQAVQRELSRRNRATGCGGHGNRYPLSGKIRCGECGKSFSHRTKKRQDGSSYYRWCCFTATNEGLRRTDGAENVIGCSVGRQIRDDIAMDLLRRSVNDVTLDKRAIISSLARIVERVLTSDEDSGEQELRRLELELEKLQARNDTIHDRFFDESITKADYQRAKARCESEMNRVQEKIAAIKQRQTLNTDTQTLKPDIRTAITGIVSGRTADDDFYGHLLQQMTVYRDGRVEVALNLLPAKWVYVLDGLEKYRAKIGGHDASSVPISVSRPLSSG

SEQ ID NO: 2368 - protein, 545 aa, Unknown
  Description of Unknown: Integrase B2369 sequence
  PTHR30461:SF3,cd00338,SM00857,G3DSA:1.10.10.2600,IPR036162, PF13408,PS51737,IPR025827,G3DSA:3.40.50.1390,IPR006119, IPR038109,PF07508,IPR011109,SSF53041,PTHR30461, PS51736,Coil,PF00239
MARKKNIAAGQNAVIYARYSSHNQREVSIEQQVRECMKHAAELGLHVVGTYEDRAISGKTDKRPNFQRMMRDAEKGKFQAVVAWKSNRIGRNMLQAMVNEAKLEDCGVKVFYAEEDFDDTAAGRFALRNMMNVNQFYSENMAEDITRGLYDNASKCMANGRQPLGYKRGEDGRVVLDEANAAVVREIFTRVAAGDLFVDIARDLNAQGIKTSKGANWNKGSFQSICQNERYRGIYIYGDVRVADGIPRIVSDDLWYRVQEAMRMKKNPVGTRHRVGAEDYLLTGKLRCGHCGSYMTGVSGTSRNGELHYYYTCQKRRTEHACDKKNIRRDVIEPAVAQAIKMYCLTDDVIEWMADRTVEYWKKHDNDLQIEALEQQLEENKKATSNMLKAIEMGIITEATRTRMVELETEQSRLSVQLNAAKEDVVKIDREQIISYLELLQQGDIHDRDFQMELFKNFLVAVYVYDDNRMKLVFSCMGDQNSVEIPLETGEDPPDGGLSPDAKMFVLTPDSSTRSERHHTLCGAFFVLHCSRKTQKNFCPLPQPA

SEQ ID NO: 2369 - protein, 545 aa, Unknown
  Description of Unknown: Integrase B2370 sequence
  PTHR30461:SF3,SM00857,G3DSA:1.10.10.2600,IPR036162,PS51737, G3DSA:3.40.50.1390,IPR006119,IPR038109,PF07508,IPR011109, SSF53041,PTHR30461,Coil,cd00338,PF00239
MYKDYPVFYNYEVKEYGRKSRTDDPLLTTDEILAKHSKIIEEYAIKNLGGPIPEENKYMEVGSGESLKERPEITRLLKDIESPAVKAIIVVEVQRLSRGDLEDAGKLIRLLRYTNTYVITPMKIYDLRDEYDRDAFERELKRGNEYLEYYKKIQARGKLSSVKAGNYVGSVAPYGFDRIEKTDGKETYHTLIERKDQADVVRMIFDWYCNDDIGVTAICRRLEDLGVKTKTGGKIWKPSIIFSMLENHHYIGCTRWNWRKTVKVIENQEIKKLRPKAKVDEFLIFEGKHDGIISEEIFNKAREVRGKRHRTKRDLTLKNPFSGIMFCKCGAKMGYNTYTRRGEEYAPPKLVCNNQVHCKSGSVHFDEVMDYVCKVLKDCIADFEVRIENNRDDSIKLHKDLIVRLQDQLKVLEKKEVDQWEAQYDPDPVKRMPQHIFQKLNEKVLAEKEEINKALKKAKDSAPKHIDYRDELIKTTDALNALLDPNMDAKTKNQHLRMIIDKMVYERGPIVRITKENAAKYGIDTSKGLRYYTPPYKIDIDLKCE

SEQ ID NO: 2370 - protein, 545 aa, Unknown
  Description of Unknown: Integrase B2371 sequence
  PTHR30461:SF3,SM00857,G3DSA:1.10.10.2600,IPR036162,PF13408, PS51737,G3DSA:3.40.50.1390,IPR025827,IPR006119,IPR038109, PF07508,IPR011109,SSF53041,PF00239, PTHR30461,PS51736,Coil,cd00338
MLQVAAYCRVSTDKEDQANSFEAQQRYFREYIQRQPDWELQGIYADEGFSGTSTNKRVEFNKMLHAAELGQIDLIVTKEVSRFTRNTVDALQITRELRRRGVGVLFLNDSLDTRTNDGELRLTIMSSFAQDESRRTSERSKWGQMRSMEKGVVFGGSLLGYDVIGGKMTVNPEGAEVVRLIFHKYLQERKGCSTIARELREAGILSSKGNCLWSSATVTKILKNEKYCGDLIQKKTYTPDYLTHEKKYNHGKEPLVELKDHHESIIDWETWQAVQRELSRRNRATGCGGHGNRYPLSGKIRCGECGKSFSHRTKKRQDGSSYYRWCCFTATNEGLRRTDGAGNVIGCSVGRQIRDDIAMDLLRRSVSAVTLDKKSIISSLTRVVESVLASGEDSGEQELRRLELEFEKLQARNDTIHDRFFDESITKADYQRAKARCESEMNRVQEKIAAIKQRQTLNTDTQTLKPDIRAAITGIVSGRTADDDFYGHLLQQMIVYRDGRVEVALNLLPAKWVYVLDGLEKYRAKIGGHDASSVPMSVSRPLSSG

SEQ ID NO: 2371 - protein, 545 aa, Unknown
  Description of Unknown: Integrase B2372 sequence
  cd03768,PTHR30461:SF3,SM00857,G3DSA:1.10.10.2600,IPR036162, PF13408,IPR025827,PS51737,G3DSA:3.40.50.1390,IPR006119, IPR038109,PF07508,SSF53041,IPR011109,PTHR30461, PS51736,Coil,PF00239
MKIAIYSRKSKYTGKGDSIGNQIQMCKDYIETHYRNNDPEYIIYEDEGFSGGNINRPKFQKLLSDIKKEKFDILICYRLDRISRNVSDFSTTLEELQSYGVDFISIKEQFDTTTPMGRAMIYIASVFAQLERETIAERVRDNMVELAKSGKWSGGRTPLGFDSESSSYIDEEGNERKLVKLVKNDEELQLVNLIYDTYLREGSLHKTEVYFASHNIKSNRNILLEKTSLKVILNNPVYAISSPELKRWLEDDGWNVYGEPDGKHSYLSYNKTKQVTRNGRSTKISNDKENWIAAISNCPGIIDADKWIAVQEQFKGNRGSFPKKARTHNAKLVGKIYCAHCNNYMQVVHGNIKKDIGKRQFYYSCSLKKKSKSELCKNKNLKVEDVENLLLLELEKLGKNKKSYIQSLKKKNDAVKKNKDVKLKQNAIQKDIEAKQKILNNLVDKLAVADDIDDIIIQRIRATKNEMQELQQELDKISKEIQDSNYKKLDLDFIESLLEKCADIRQLDSNEQRLLIGVLVDKILWDGNTQNVTVYFIGSGDVKKK

SEQ ID NO: 2372 - protein, 545 aa, Unknown
  Description of Unknown: Integrase B2373 sequence
  PTHR30461:SF3,SM00857,G3DSA:1.10.10.2600,IPR036162,PF13408, PS51737,IPR025827,G3DSA:3.40.50.1390,IPR006119,IPR038109, PF07508,IPR011109,SSF53041,PTHR30461,Coil, PS51736,cd00338,PF00239
MLQVAAYCRVSTDKEDQANSFEAQQRYFREYIQRQPDWELQGIYADEGFSGTSTNKRVEFNKMLHAAELGQIDLIVTKEVSRFTRNTVDALQITRELRRRGVGVLFLNDSLDTRTNDGELRLTIMSSFAQDESRRTSERSKWGQMRSMEKGVVFGGSLLGYDVIGGKMTVNPEGAEVVRLIFHKYLQERKGCSTIARELREAGILSSKGNCLWSSATVTKILKNEKYCGDLIQKKTYTPDYLTHEKKYNHGKEPLVELKDHHESIIDRETWQAVQRELSRRNRATGCGGHGNRYPLSGKIRCGECGKSFSHRTKKRQDGSSYYRWCCFTATNEGLRRTDGAGNVIGCSVGRQIRDDIAMDLLRRSVSAVTLDKKSIISSLTRVVESVLASGEDSGEQELRRLELEFEKLQARSDAILDRFLDESISKEDYQRVKARCENEMNWVQEKIAAIKQRQTLNTDTQTLKPDIRTAITGIVSGRTADDDFYGHLLQQMTVYRDGRVEVALNLLPAKWVYVLDGLEKYRAKIGVHDASSVPMSVSRPLSSG

SEQ ID NO: 2373 - protein, 545 aa, Unknown
  Description of Unknown: Integrase B2374 sequence
  PTHR30461:SF3,SM00857,G3DSA:1.10.10.2600,IPR036162,PF13408, IPR025827,PS51737,G3DSA:3.40.50.1390,IPR006119,IPR038109, PF07508,SSF53041,IPR011109,PTHR30461,Coil, PS51736,cd00338,PF00239
MHGAYILARYSTDRQNEDSIEVQVSACRKWCDERSLPVLDVFADEATSGMKDTRPQYARMMWQLEHGGADTVVIYDQSRMFRKLTAWFDFRDQLARLGVDVVSVTQPMIGGDLRDPATFLTEGSMALFNQMWVLQTRQKVVAKMRYMAEQGLHTGGSPPLGYKVVDGRLVIDAAEAETVRLIFGLYASGMTYREIIRRLNAEERRTKSGGNFGVNSLHDLLKNPKYVGDLVYGKVSKRPDGSRNSHAAAEDAIVVKDVLPAIVDRETWEKVQLKMQENKRSAAGRPASAREYPLKGKVFCRECKSAMLVTGTNRGQRRHYYYICGAKQRKGLCDNSPIPVGGLEALVADAVRQRLGQPESVDGLIRILREERSKLSGSAVQRLRELQKRDCEIAKQLDAAVNAVLGGLHSPTLAAKVNALEAERVKIAHDMQQLRAQVSGAEIDEPHLRELLALAMQDDAAVLSIVVRVEVGKDEIAVWTLLDADPNGDFDFAEDGVPITPSEVSQSYNNSGCPVTGTTNYYNIVTPAGLLLFYIARPRQRDRRS

SEQ ID NO: 2374 - protein, 545 aa, Unknown
  Description of Unknown: Integrase B2375 sequence
  PTHR30461:SF3,SM00857,G3DSA:1.10.10.2600,IPR036162,PF13408, IPR025827,PS51737,G3DSA:3.40.50.1390,IPR006119,IPR038109, PF07508,IPR011109,SSF53041,PF00239,PTHR30461, PS51736,Coil,cd00338
MLQVAAYCRVSTDKEDQANSFEAQQRYFREYIQRQPDWELQGIYADEGFSGTSTNKRVEFNKMLHAAELGQIDLIVTKEVSRFTRNTVDALQITRELRRRGVGVLFLNDSLDTRTNDGELRLTIMSSFAQDESRRTSERSKWGQMRSMEKGVVFGGSLLGYDVIGGKMTVNPEGAEVVRLIFHKYLQERKGCSTIARELREAGILSSKGNCLWSSATVTKILKNEKYCGDLIQKKTYTPDYLTHEKKYNHGKEPLVALKDHHEAIIDRETWQAVQRELSRRNRATGCGGHGNRYPLSGKIRCGECGKSFSHRTKKRQDGSSYYRWCCFTATNEGLRRTDGAGNVIGCSVGRQIRDDIAMDLLRRSVSAVTLDKKSIISSLTRVVESVLASGEDSGEQELRRLELEFEKLQARSDAILDRFLDESISKEDYQRVKARCENEMNRVQEKIAAIKQRQTLNTDTQTLKPDIRTAITGIVSGRTADDDFYGHLLQQMTVYRDGRVEVALNLLPAKWVYVLDGLEKYRDKIGVHDASSVPMSVSRPLSSG

SEQ ID NO: 2375 - protein, 545 aa, Unknown
  Description of Unknown: Integrase B2376 sequence
  cd03768,PTHR30461:SF3,SM00857,IPR036162,PF13408, IPR025827,G3DSA:3.40.50.1390,PS51737,IPR006119,PF07508, IPR011109,SSF53041,PTHR30461,PS51736,Coil, PF00239
MNIAIYPRKSKFSPTSESIANQVAMCREYCDRCFDDPHYLVYDEDEGFSGKSTNRPAYTQMIEDMRAGKFQVLCCYRLDRISRNVRDFAELLDDLQRHNIAFVSVRNNFDTSTPFGRAMVYISSALAQMERETLAERVKDNLYEMARSGRWLGGVTPLGFVAKAQEVHRDDKKRKLLMLSPVEEELAQVRDLFDHFLRLGSVTKLLQYCLEHRIVSRNGNDYSRTTLRLLLTNPVYCTADAEAWAYFSSGDYQLCAQREDFDGVRGIQPFARTRKDDGGTVSRPTSDWIIAPGLHRGILPGAIWVRAQQILQDNRDLGSAYRAPRTENALLSGIIRCAGCGAYMRPKAYGKPLPDGKRRFSYVCLTKIDSCGARCAMPNAPGRDVDALVIKELTSLTSDGGAISTLRSEARLAQGEARRTHAEAVATHEKAIASMQKKVDKLVDALAAGAPEGARQRILCEIDRYEQEIEQHRDALSELNASVLLDTDPSALLDAAFSALESFRTSFSSLTHDEQRRAIRALVDRVTWDGKNVSIEVFGEKTLPK

SEQ ID NO: 2376 - protein, 545 aa, Unknown
  Description of Unknown: Integrase B2377 sequence
  PTHR30461:SF3,SM00857,G3DSA:1.10.10.2600,IPR036162,PF13408, IPR025827,G3DSA:3.40.50.1390,PS51737,IPR006119,IPR038109, PF07508,IPR011109,SSF53041,PTHR30461,cd00338, PF00239
MPTSKNTARKYAAGGSSDNSCGVEPLRAVIYARYSSSGQREESIEGQLRDCYEFAKKHGIIVIGEYIDKAMTGRVDRRPDFQRMMKDSEKGRFNCVLLWKMDRFARNRYDSAMYKYKLKKNGIRIFYAKETIPDGPEGIILESVMEGYAEYYSENLAQNVKRGNYDSALELKTLGKTCLGLKTGPDGRYMIDQAEAAIVRRIFEEYAEGERAKDIYERLNSEGYRTSRGGKFNKNSLRRILSNKKYIGVYEYEDIYVENGIPAIITDRDLFERVQKMLKINHDAPARGKAQNFLLTTKLFCGLCGSPMIGDGGTSHTGKAYAYYSCTKRKRGRSCKKESVPKDWIEDLVVGELVKIVHNDELIEQIADRVMEYQKREKDQSGLHALEIRQKENEKAISNMLAAIEAGIITPSTKTRLMELEADRADIEKGIAHELLAEPEFERDQIIYFLERFRSGDINDEAYRIMLVDTFLNSVYLYDDDHLVLVMNYSGENCKVDLKLVEGAVSGDGCKGSAFAPSSALNGAKPNPVYFFKKVFAVVVNFTRR

SEQ ID NO: 2377 - protein, 545 aa, Unknown
  Description of Unknown: Integrase B2378 sequence
  cd00338,SM00857,G3DSA:1.10.10.2600,IPR036162,PF13408, IPR025827,PS51737,G3DSA:3.40.50.1390,IPR006119,IPR038109, PF07508,IPR011109,SSF53041,PTHR30461,PS51736, Coil,PF00239
MVQEKLRAVFYARVSTEEERQLNALEKQVAECKDAVLQKGWKLVDQYVDEGKSGTQIKRRDEYRRLFEDLENDKFDIVVIKSQDRLQRNTLDWYIWIDRLTTHGKRLYMYLEDTFYSPDNALISGIKAILAEEYSRELSKKINNSYKRRIEAAKNGEKISIVNNSRSLGYDKVNGELVINEKEAEVVRMIFNMYASGEGLRAISNTLYDMGYRNRSGNEIDPTTISRMLSSEKYKGVYVINQRHYDFDTKKTVLNPKSEWVHIPGAVPAIVEPELWDRVQEIKGSKVQSIKNEKRGRNCGKSIFSGKIYCAKCGAKYWRSLENGYVKFKCSSYSKYGKILGKGCDNKSFSENALYSILQSLSEQIVEVNTAEVRKSLLNWLESLRERLRASQGDDTIKEEIRKQTARKEKLTDAYMDGIISKEDYSKRYKELEKTLEDLKDKLLTLEVNEDLQSIEEVIQNIDKEMEEYLQTQSFNESRVEFLNQHLTKVTVNKDSFLLEFDLIGGAILTGKDFYLFVDNPRGHCESGEGSSGCAGSMVCDRNLR

SEQ ID NO: 2378 - protein, 545 aa, Unknown
  Description of Unknown: Integrase B2379 sequence
  PTHR30461:SF3,SM00857,G3DSA:1.10.10.2600,IPR036162,PF13408, IPR025827,G3DSA:3.40.50.1390,PS51737,IPR006119,IPR038109, PF07508,IPR011109,SSF53041,PTHR30461,cd00338, PF00239
MPTSKNTARKYAAGGSSDNSCGVEPLRAVIYARYSSSGQREESIEGQLRDCYEFAKKHGIIVIGEYIDKAMTGRVDRRPDFQRMMKDSEKGRFNCVLLWKMDRFARNRYDSAMYKYKLKKNGIRIFYAKETIPDGPEGIILESVMEGYAEYYSENLAQNVKRGNYDSALELKTLGKTCLGLKTGPDGHYMIDQAEAAIVRRIFEEYAEGERAKDIYERLNSEGYRTSRGGKFNKNSLRRILSNKKYIGVYEYEDIYVENGIPAIITDRDLFERVQKMLKINHDAPARGKAQNFLLTTKLFCGLCGSPMIGDGGTSHTGKAYAYYSCTKRKRGRSCKKESVPKDWIEDLVVGELVKIVHNDELIEQIADRVMEYQKREKDQSGLHALEIRQKENEKAISNMLAAIEAGIITPSTKTRLMELEADRADIEKGIAHELLAEPEFERDQIIYFLERFRSGDINDEAYRIMLVDTFLNSVYLYDDDHLVLVMNYSGENCKVDLKLVEGAVSGDGCKSSAFAPSSALNGAKPNPVYFFKKVFAVVVNFTRK

SEQ ID NO: 2379 - protein, 545 aa, Unknown
  Description of Unknown: Integrase B2380 sequence
  PTHR30461:SF3,IPR036162,PS51737,IPR011109,PTHR30461, PF00239,G3DSA:1.10.10.2600,IPR006119,PF14287,SSF53041, IPR025378,SM00857,IPR025827,cd03770,IPR038109, PS51736,PF13408,G3DSA:3.40.50.1390,PF07508,Coil
MSQSNQMKITALYCRLSQDDGLDGESNSIQNQKRILEQYAIDHRFPNIQFYVDDGYSGASFNRPDFQRMMSDMEDGKIGIIITKDLSRLGRNQLHTGLYIEERFPQFGVRYIAINDNVDTENAESNDLMPFKNLFNEWFVRDTSRKIRAVQRAKAQRGERLGTRAPYGYKKDENAKGKLVVDEEAAAVVRRIFALCAAGRGPSQIAKQLRAENVLCPAVYTYRKFGSGHTCLDLSQPYNWSDSTIANILENETYLGNTVNMKFTTKSYKDKRYMQHPREECLVFEGTHPALITREVWDIVQRVRQNRKRPTKMEELNKYSGLVICADCGSTMVLHRAHTMKPTQNNFTCRTYKKAGSEVCTAHYIRECVLDEIVLEDIRRVTAMAREHTQEFAAYICDRQSAELRREIRRQELELSGMKKREAELGAIFKRLYEDSVLGHITTEQFQSLSASYVAEQEQLKTAIPQKEREVTKLKATVSGADNFIARAKRYTDIQELTPELLRLFIEKIVVHEKDVKWSKHASQTVEIHYTDIGVVGNMNITKSA

SEQ ID NO: 2380 - protein, 545 aa, Unknown
  Description of Unknown: Integrase B2381 sequence
  PTHR30461:SF3,cd00338,SM00857,G3DSA:1.10.10.2600,IPR036162, PF13408,PS51737,IPR025827,G3DSA:3.40.50.1390,IPR006119, IPR038109,PF07508,IPR011109,SSF53041,PTHR30461, PS51736,Coil,PF00239
MARKKNIAAGQNAVIYARYSSHNQREVSIEQQVRECMKHAAELGLHVVGTYEDRAISGKTDKRPNFQRMMRDAEKGKFQAVVAWKSNRIGRNMLQAMVNEAKLEDCGVKVFYAEEDFDDTAAGRFALRNMMNVNQFYSENMAEDITRGLYDNASKCMANGRQPLGYKRGEDGRVVLDEANAAVVREIFTRVAAGDLFVDIARDLNAQGIKTSKGANWNKGSFQSICQNERYRGIYIYGDVRVADGIPRIVSDDLWYRVQEAMRMKKNPVGTRHRVGAEDYLLTGKLRCGHCGSYMTGVSGTSRNGELHYYYTCQKRRTEHACDKKNIRRDVIEPAVAQAIKMYCLTDDVIAWIADRTVEYWEKHDNDLQIEALEQQLEENKKATSNMLKAIEMGIITEATRTRMVELETEQSRLSVQLNAAKEDVVKIDREQIISYLELLQQGDIHDRDFQMELFKNFLVAVYVYDDNRMKLVFSCMGDQNSVEIPLETGEDPPDGGLSPDAKMFVLTPDSSTRSERHHTLCGAFFVLHCSRKTHKNFCPLPQPA

SEQ ID NO: 2381 - protein, 545 aa, Unknown
  Description of Unknown: Integrase B2382 sequence
  PTHR30461:SF3,SM00857,G3DSA:1.10.10.2600,IPR036162,PF13408, PS51737,G3DSA:3.40.50.1390,IPR025827,IPR006119,IPR038109, PF07508,SSF53041,IPR011109,PF00239,PTHR30461, PS51736,Coil,cd00338
MTRKKNIAAGLDAVIYARYSSHNQREVSIEQQIAECTKHAAALGLRIVGTYEDRAISGKTDNRPRFQQMMRDAEKGKFQAVVAWKSNRIGRNMLQAMVNEAKLDDYGVKVFYAEEDFDDTAAGRFALRNMMNVNQFYSENMAEDITRGLYDNANKCMANGRQPLGYKRGADGKVMLDEPAAAVVREIFTRVAAGDLFVDIARDLNAKGIKTSKGAAWNKGSFQSICQNERYKGIYIYGNVRIVDGIPRIVSDELWYKVQEAMRVKKNPVGTRHRVGAEDYLLTGKLRCGHCGSYMTGVSGTSRNGELHYYYTCQKRRTEHACNKKNVRRDVIEPAIAQAIKMYCLTDDVIEWMADQTVQYWEKHDNDLQIEALEQQLAENKKATSNMLKAIEMGIITEATRSRMVELETENSKLTAQLSAAKRDVVKINREDLIDELHVLRSKDIHDREVQAELFKDFLVAAYIYDDNRLKLVFSFMGKDNSVEIPLETGEDPPDGEDSPDAKMFVLTPDCSTKKALYFVGSTVLFFFYSGKKIRGAPLAMQAGQ

SEQ ID NO: 2382 - protein, 545 aa, Unknown
  Description of Unknown: Integrase B2383 sequence
  PTHR30461:SF3,cd00338,SM00857,G3DSA:1.10.10.2600,IPR036162, PF13408,IPR025827,PS51737,G3DSA:3.40.50.1390,IPR006119, IPR038109,PF07508,IPR011109,SSF53041,PTHR30461, mobidb-lite,Coil,PF00239
MPRKPAKHPAKPKRGKKLEIEEPGVLYGRYSSHNQKDISVEQQFEKGYELAAEYGIRIIDTYADRAVSGRTDKRRDFQRMMTDAAKGKFRYVIAWKSNRMGRNMLEALINEARLQDLGVRVLYVEEDFDDTAAGRFAARSMMNVNQFYSENMAEDIKRGLYDNAANCMVANGHLPYGYKADETLHYAIDEPKAAVIREIFTRVSCGEAFVDIMASLNARGIKTSYGRPWGRSSFQKILSNERYRGIYIYGDVRKEGGIPRIVSDELYFKVQEVITTKKNPQGRHRVNGDYLLTGKLFCGHCKSPMTGISGTSRSGNLHYYYVCQKRRTEKTCEKKNLRRDDIELQVAKAIKRRTLDDDTINWIADSVVEYSQHQESASGIGLLEDQLKDTQRSIKNLMAAIEQGIITPTTKARLMELEKEQSDIDRKITMAKADVIPVNRDQLVGWLKKLQAGDVHDKKYQAELFDTFLIAVYVYDNPDGQDYMKVAFNYAGSKNTVEIPLDPSVIDNVENIETGAVRLSSAQVHQKRVIRTRKPPSTWLVACSY

SEQ ID NO: 2383 - protein, 545 aa, Unknown
  Description of Unknown: Integrase B2384 sequence
  PTHR30461:SF3,SM00857,G3DSA:1.10.10.2600,IPR036162,PF13408, PS51737,G3DSA:3.40.50.1390,IPR025827,IPR006119,IPR038109, PF07508,IPR011109,SSF53041,PTHR30461,Coil, PS51736,cd00338,PF00239
MHGAYILARYSTDRQNEDSIEVQVSACRKWCDERSLPVLDVFADEATSGMKDTRPEYARMMWQLEHGGADTVVIYDQSRMFRKLTAWFDFRDQLARLGVDVVSVTQPMIGGDLRDPANFLTEGSMALFNQMWVLQTRQKVVAKMRYMAEQGLHTGGTPPLGYKVVDGRLVIDAAEAETVRLIFGLYASGMTYREIIRRLNAEGRHTKRGGNFGVNSLHDLLKNPKYVGDMVYGKVAKRPDGSRNSHAAAVDAIVVKDALPAIVDREIWEKVQLKMQDNKRSTAGRPASAREYPLKGKVFCRECKSAMLVTASNRGAKRYYYYACAAKHRKGLCDNTPIPAGTLETLVADAVRQRLGQPGNVEGLIRILREERSKLSGSAVQRLRELQKRDCEIAKQLDAAVNAVLGGLHSPTLAAKVNALEAERAKISHDMQQLRAQVSGAEIDEPRLRELLALAMQDDAAVLSIVVRVEVGKDEIAIWTLLDADPNGNFDFSEDGVQIASPDATLNYNNSGCRSTGTTNYYNIVTPAGLLLFYIARPRQRDRRS

SEQ ID NO: 2384 - protein, 545 aa, Unknown
  Description of Unknown: Integrase B2385 sequence
  cd03768,PTHR30461:SF3,SM00857,G3DSA:1.10.10.2600,IPR036162, PF13408,PS51737,G3DSA:3.40.50.1390,IPR025827,IPR006119, IPR038109,PF07508,SSF53041,IPR011109,PTHR30461, PS51736,Coil,PF00239
MKIAIYSRKSKYTGVGDSIENQVQMCKDYANAKYMGQDLEFATYEDEGFSGRNLIRPEFQKLINNINSYDILMCYKLDRISRNVADFSSTLEVLQDAKCDFVSIKENFDTSTPMGRAMIHIASVFAQLERETIAERVKDNMLELAKNGRWSGGRTPLGYKSEPVQYIDEEGNERKAVKLVQDQEELELVKLIYDTYLKQGSLHKTEVWFTQHKIKSNSAVLLEKTSLKIILQNPVYVRSAPEVINYLKDNNWNVYGEADGVHGLLTYNKTESVAGSNGKVTKRVQNKENWIAAVSNVKGIIDADTWIRVQEQFKKNKNTFPNLGKTHTAILTGKLRCSKCKNYMLVQHGRTSVKTGDKIYYYICSMKRKSKGELCNCKNIKANEIEPAVLNLIEELATNKEEFKNKLREKNTASKLDNDIKLKKSALEKQIADKEKQITGLVDKLSLDDSIADILINRIKNYKAEIETLKADLLNISAEIEQNNNYKLAESFLDGFFEQCKDISSQPKEKQRQLINSYVNYINFDSDTEEAELKLYEPGEIKKIN

SEQ ID NO: 2385 - protein, 545 aa, Unknown
  Description of Unknown: Integrase B2386 sequence
  cd00338,SM00857,G3DSA:1.10.10.2600,IPR036162,PF13408, IPR025827,G3DSA:3.40.50.1390,PS51737,IPR006119,IPR038109, PF07508,IPR011109,SSF53041,PTHR30461,PS51736, Coil,PF00239
MQAATQATPPKVVHTIPAKIDLQEEVKNARKQLRVAAYCRVSTKQEDQLNSYDVQRRAYTDKINGEHGWTMVGIYADKGITGTSVKKRDEFNRLMRHCKQGKVDMIITKSVARFARNTLDCLKHTRMLKEHNVDVYFEEQGIHSIQPGAEFYITIYGSIAQSESENISANVRWGKAQSAKEGNVPFQYKRFLGYRRGSDGKPEIDPEQAVVVKRIYERFLAGDSLATIANDLNADGIPTPSGNGQWQRGTIASILTNEKYKGDAILNKTYIRDCLSKKVMINNGERPKYYVENNHPAIIDSATFGRVQEEMARRNGKRKVKQVGTKTEQGHYSSKYALTELLICGECGTPYRRCTWAANGKKKIVWRCISRLDYGKKYCHNSPSIEESVLQEAIMKAVLQTAKQNAEVLKTLKLHIGMGLSADATEDNSLDLQIKIAEIEAEFQKMLKAIAADNVEAFDEEKAKVLMDEKAKLQIQLDRIADTKQKRENAKSRLDEIFAILEALANHPISYDDQIVRQILESVIVESKEKIKVVFIGGLEVTQKL

SEQ ID NO: 2386 - protein, 545 aa, Unknown
  Description of Unknown: Integrase B2387 sequence
  PTHR30461:SF3,SM00857,G3DSA:1.10.10.2600,IPR036162,PF13408, PS51737,G3DSA:3.40.50.1390,IPR025827,IPR006119,IPR038109, PF07508,IPR011109,SSF53041,PF00239,PTHR30461, PS51736,Coil,cd00338
MTVKKFPIDLSCLTEEEISQFQEDPYTLYNGDQEVALYLRYSSTGQSDQSIEGQLRDCRAFCKANHYRIVAIYVDRATTARKDVEKRVHLMEMVADSAKQNWEYVIVWKLDRFARNRNDSAIMKMRLRKNGVKVLSATEHLTDSPESIILESVLEGMAEFFSAELSQKVTRGMRESALKCHSVGGHIPLGYKVENHKLVVDPDTAHIVQEAFSLYANGESVADICRKFNSAGYKTAKNTEFNRSSFKAMFRNTRYIGTYTYKDIVIENGIPAIIDKELFETVQRRLSKTATAPARGKAKVDYLLSGKLFCGHCGASMNGESGAGRHGKVYHYYSCYTKKRKLGCDKRPLKKDYIEGIVARDALNLLTDQLIDEIADMAIRQSEQDLINDTHIPQLTAQLSEVEKSITNITAAIEKGIASETLMNRLVQLEHEKKTLNKEIKAEEKFVCRIDRDQIVFWLSQFKHGNIEDEDFRRRLIDLLVNSVTVWDEPDGYKITTAYNLTSCKTKTFRVEKNPAAEEATGFDFGESECTKSEQALYRLLRLIL

SEQ ID NO: 2387 - protein, 545 aa, Unknown
  Description of Unknown: Integrase B2388 sequence
  PTHR30461:SF3,SM00857,G3DSA:1.10.10.2600,IPR036162,PF13408, PS51737,IPR025827,G3DSA:3.40.50.1390,IPR006119,IPR038109, PF07508,IPR011109,SSF53041,PTHR30461,cd00338, PF00239
MPTSKNTARKYAAGGSSDNSCGVEPLRAVIYARYSSSGQREESIEGQLRDCYEFAKKHGIIVIGEYIDKAMTGRVDRRPDFQRMMKDSEKGRFNCVLLWKMDRFARNRYDSAMYKYKLKKNGIRIFYAKETIPDGPEGIILESVMEGYAEYYSENLAQNVKRGNYDSALELKTLGKTCLGLKTGPDGRYMIDQAEATIVRRIFEEYAEGERAKDIYERLNSEGYRTSRGGKFNKNSLRRILSNKKYIGVYEYEDIYVENGIPAIITDRDLFERVQKMLKINHDAPARGKAQNFLLTTKLFCGLCGSPMIGDGGTSHTGKAYAYYSCTKRKRGRSCKKESVPKDWIEDLVVGELVKIVHNDELIEQIADRVMEYQKREKDQSGLHALEIRQKENEKAISNMLAAIEAGIITPSTKTRLMELEADRADIEKGIAHELLAEPEFERDQIIYFLERFRSGDINDEAYRIMLVDTFLNSVYLYDDDHLVLVMNYSGENCKVDLKLVEGAVSGDGCKGSAFAPSSALNGAKPNPVYFFKKVFAVVVNFTRK

SEQ ID NO: 2388 - protein, 545 aa, Unknown
  Description of Unknown: Integrase B2389 sequence
  PTHR30461:SF3,cd00338,SM00857,G3DSA:1.10.10.2600,IPR036162, PF13408,IPR025827,G3DSA:3.40.50.1390,PS51737,IPR006119, IPR038109,PF07508,IPR011109,SSF53041,PTHR30461, PS51736,Coil,PF00239
MASQKYKKKSDNLIITGVIYARYSSHSQKEESIEQQIEECTAFAVTNGISVVGIYADKAISGRTDRRNEFQRLMRDAEKRKFDVVIAYKSNRISRNMLNALQYESRLDSFGIKTLYAKEEFGNTAAGRFALRTMMNVNQFYSENMAEDIRRGLKDNAAECKVNGSLPYGYKKGEDGKYAIDEPRAAIVREIFSRVVDDVPYADIIRSLNDRGILTKTRKPFNKNSFNRMLRNERYIGIYEHSGVRVVGGVPAIISEEVFYAVQRKLQEGLNSDGAKRKSNSDYLLTGKLYCGECGSPMVGYAGTSRNGTLHYYYTCKSRGNDGCTKHNVRRDFIEQFVVDLTRACLSRADVTDWLVSGYIELKKQAQETSDVPVMEEELSSRKKALDNIMKAIEAGIFNETTSARMQELETEIHDLERSIALGKAMFEEPVDGERMRFYLEKLRNGTPDNQAYRKELLRTMVKAIRLWDDRIEIEYNFTGTDGDGNNYRVVTEFLKGDSGSASGVHTEPPQPHHHGQPILMTLRQTQCHQGFPGFFSSEIFLFFH

SEQ ID NO: 2389 - protein, 545 aa, Unknown
  Description of Unknown: Integrase B2390 sequence
  PTHR30461:SF3,cd00338,SM00857,G3DSA:1.10.10.2600,IPR036162, PF13408,PS51737,G3DSA:3.40.50.1390,IPR025827,IPR006119, IPR038109,PF07508,SSF53041,IPR011109,PTHR30461, PS51736,Coil,PF00239
MQAATQVMPPKVVHTIPATINLQEEVKNAHKQLRVAAYCRVSTKQEDQLNSYDVQRRAYTDKINGESGWTMVGIYADKGITGTSVKKRDDFNRLMRHCKQGKVDMIITKSVARFARNTLDCLKHTRMLKEHNVDVYFEEQGIHSIQPGAEFYITIYGSIAQSESENISANVRWGKSQSAKEGNVPFHYKRFLGYRRGSDGKPEIDPEQAAVVKRIYERFLAGDSLATIANDLNADGIPTPSGIGQWQRGTIESILTNEKYKGDAILNKTYIRDCLSKKVMINNGERPKYYVENNHPAIIDSCTFGRVQEEMARRSGKRKVKQVGTKTEQGRYSSKYALTELLICGECGTPYRRCTWAANGKKKVVWRCINRLDYGKKYCHDSPSIEESVLQEAIMKAVLQTAKQNADVLKTLKLHIGMGLSAETTEDNSLDLQIRIAEVEAEFQKMLKAIAADNVEAFDEEKAKALMDEKAKLQIQLDRIADTKQKRENAKSRLDEIFTIIEALANHPISYDDQIVRQVLESVIVESKEKIKVVFVGGLEVTQLM

SEQ ID NO: 2390 - protein, 545 aa, Unknown
  Description of Unknown: Integrase B2391 sequence
  PTHR30461:SF3,SM00857,G3DSA:1.10.10.2600,IPR036162,PF13408, IPR025827,G3DSA:3.40.50.1390,PS51737,IPR006119,IPR038109, PF07508,IPR011109,SSF53041,PTHR30461,cd00338, PF00239
MPTSKNTARKYAAGGSSDNSCGVEPLRAVIYARYSSSGQREESIEGQLRDCYEFAKKHGIIVIGEYIDKAMTGRVDRRPDFQRMMKDSEKGRFNCVLLWKMDRFARNRYDSAMYKYKLKKNGIRIFYAKETIPDGPEGIILESVMEGYAEYYSENLAQNVKRGNYDSALELKTLGKTCLGLKTGPDGRYMIDQAEAAIVRRIFEEYAEGERAKDIYERLNSEGYRTSRGGKFNKNSLRRILSNKKYIGVYEYEDIYVENGIPAIITDRDLFERVQKMLKINHDAPARGKAQNFLLTTKLFCGLCGSPMIGDGGTSHTGKAYAYYSCTKRKRGRSCKKESVPKDWIEDLVVGELVKIVHNDELIEQIADRVMEYQKREKDQSGLHALEIRQKENEKAISNMLAAIEAGIITPSTKTRLMELEADRADIEKGIAHELLAEPEFERDQIIYFLERFRSGDINDEAYRIMLVDTFLNSVYLYDDDHLVLVMNYSGENCKVDLKLVEGAVSGDGCKGSAFAPSSALNGAKPNPVYFFKKVFAVVVNFARR

SEQ ID NO: 2391 - protein, 545 aa, Unknown
  Description of Unknown: Integrase B2392 sequence
  PTHR30461:SF3,SM00857,G3DSA:1.10.10.2600,IPR036162,PF13408, IPR025827,PS51737,G3DSA:3.40.50.1390,IPR006119,IPR038109, PF07508,IPR011109,SSF53041,PTHR30461,Coil, PS51736,cd00338,PF00239
MQKFGILTESERQILDGASTVVTSGDTPVVVYLRYSSEGQTDQSIEGQLRDCIHYCLRKKYRIVEAYCDRAATASKRIDKRTDFQRMLSDSYRKQWEAVIVWKLDRFARNRQDSMTSRVILKRNGVRVESATEAISSSPEGILMESMLEGLAEYFSADLSQKVLRGRRETALKGHSLGGNIPLGYKIEHKQFVIDSPAAEIVREIFARYAGGEAPHLIVEDLNARGLRNARGNPWRVQNIATLISNERYVGVYQYKDIVMSDAIPPIIEKEVYDAVQLRKKENARNPGAATAKTEYLLSGKLYCGHCGSRMSGESGTSKRGTTYYYYSCSGRKRGKGCDKRLVRKDWIEDVVTKECLAMLDDQLIEEVADAALLAAQLEIDGDTTYQGLLSKKADIEKGIANLTKVLEMGSTSANVVKRLDELETELRDVLIEIDAHKTPVHRLNRKLITYWLSSFQGADYRDPSVRRNLIRLLINSVTVWDTPDGYKLTLAFNLSSRPPKQITPSDLEGEESSIDAVAVPNRASSNTFVEHGSILLRTKYYPFP

SEQ ID NO: 2392 - protein, 545 aa, Unknown
  Description of Unknown: Integrase B2393 sequence
  cd03768,PTHR30461:SF3,SM00857,IPR036162,PF13408, PS51737,G3DSA:3.40.50.1390,IPR025827,IPR006119,PF07508, IPR011109,SSF53041,PTHR30461,PS51736,Coil, PF00239
MNIAIYPRKSKFSPTSESIANQVAMCREYCDRCFDDPHYLVYDEDEGFSGKSTNRPAYTQMIEDMRAGKFQVLCCYRLDRISRNVRDFAELLDDLQRHNIAFVSVRNNFDTSTPFGRAMVYISSALAQMERETLAERVKDNLYEMARSGRWLGGVTPLGFVAKAQEVHRDDKKRKLLMLSPVEEELAQVRDLFDHFLRLGSVTKLLQYCLEHRIVSRNGNDYSRTTLRLLLTNPVYCTADAEAWAYFSSGDYQLCAQREDFDGVRGIQPFARTRKDDGGTVSRPTSDWIIAPGLHRGVLPGAIWVRAQQILQDNRDLGSTYKAPRTENALLSGVIRCAGCGAYMRPKAYGKPLPDGKRRFSYVCLTKIDSCGARCAMPNAPGRDVDALVIKELTSLTSDGGAISTLRSEARLAQGEARRTHAEAVATHEKAIASMQKKVDKLVDALASGAPEGARQRILCEIDRYEQEIEQHRDALSELNASVLLDADPSALLDAAFSALESFRTSFASLTHDEQRRAIRALVDRVTWDGKNVSIEVFGEKTLPK

SEQ ID NO: 2393 - protein, 545 aa, Unknown
  Description of Unknown: Integrase B2394 sequence
  PTHR30461:SF3,SM00857,G3DSA:1.10.10.2600,IPR036162,PF13408, IPR025827,G3DSA:3.40.50.1390,PS51737,IPR006119,IPR038109, PF07508,IPR011109,SSF53041,PTHR30461,cd00338, PF00239
MPTSKTVARKYAAGGGSDNSCGVEPLRAVIYARYSSSGQREESIEGQLRDCYEFAKKHGIIVIGEYIDKAMTGRVDRRPDFQRMMKDSEKGRFNCVLLWKMDRFARNRYDSAMYKYKLKKNGIRIFYAKETIPDGPEGIILESVMEGYAEYYSENLAQNVKRGNYDSALELKTLGKTCLGLKTGPDGRYMIDQAEAVIVRRIFEEYAEGERAKDIYGRLNSEGYRTSRGGKFNKNSLRRILSNKKYIGVYEYEDIYVENGIPAIITDRDLFERVQKMLKINHDAPARGKAQNFLLTTKLFCGLCGSPMIGDGGTSHTGKAYAYYSCTKRKRGRSCKKESVPKDWIEDLIVGELVKIVHNDELIEQIADRVMEYQKREKDQSGLHALEIRQRENEKAISNMLAAIEAGIITPSTKTRLMELEADRADIEKGIAHELLAEPEFERDQIIYFLERFRSGDINDEAYRIMLVDTFLNSVYLYDDDHLVLVMNYSGENCKVDLKLVEGAVSGDGCKGSAFAPSSALNGAKPNPVYFFKKVFAVVVNFTRK

SEQ ID NO: 2394 - protein, 545 aa, Unknown
  Description of Unknown: Integrase B2395 sequence
  cd00338,SM00857,G3DSA:1.10.10.2600,IPR036162,PF13408, IPR025827,G3DSA:3.40.50.1390,PS51737,IPR006119,IPR038109, PF07508,SSF53041,IPR011109,PTHR30461,PS51736, Coil,PF00239
MQTAIQATPPKVVHTIPATINLQEEVKNAHKQLRVAAYCRVSTKQEDQLNSYDVQRRAYTDKINGEPGWTMVGIYADKGITGTSVKKRDDFNRLMRHCKQGKVDMIITKSVARFARNTLDCLKHTRMLKEHNVDVYFEEQGIHSIQPGAEFYITIYGSIAQSESENISANVRWGKAQSAKEGNVPFHYKRFLGYRRGSDGKPEIDPEQAVVVKRIYERFLAGDSLATIANDLNTDGIPTPSGVGKWQRGTIESILTNEKYKGDAILNKTYIRDCLSKKVMINNGERPKYYVENNHPAIIDSATFGRVQEEMARRCGKRKVKQVGTKTEQGRYSSKYALTELLICGECGTPYRRCTWAANGKKKVVWRCINRLDYGKKYCHYSPSIEESVLQEAIMKAVMQTAKQNAEVLKTLKLHIGMGLSAGTTEDNSLDLQIRIAEIEAEFQKMLKAIAADNVEAFDEEKAKALMDEKAKLQIQLDRIADTKQKRENAKSRLDEIFTIIEALANHPISYDDQIVRQILESVIVESKEKIKVVFVGGLEVTQTI

SEQ ID NO: 2395 - protein, 545 aa, Unknown
  Description of Unknown: Integrase B2396 sequence
  cd03768,PTHR30461:SF3,SM00857,IPR036162,PF13408, PS51737,IPR025827,G3DSA:3.40.50.1390,IPR006119,PF07508, IPR011109,SSF53041,PTHR30461,PS51736,Coil, PF00239
MNIAIYPRKSKFSPTSESIANQVAMCREYCDRCFDDPHYLVYDEDEGFSGKSTNRPAYTQMIEDMRAGKFQVLCCYRLDRISRNVRDFAELLDDLQRHNIAFVSVRNNFDTSTPFGRAMVYISSALAQMERETLAERVKDNLYEMARSGRWLGGVTPLGFVAKAQEVHRDDKKRKLLMLSPVEEELAQVRDLFDHFLQLGSVTKLLQYCLEHRIVSRNGNDYSRTTLRLLLTNPVYCTADAEAWAYFSSGDYQLCAQREDFDGVRGIQPFARTRKDDGGTVSRPTSDWIIAPGLHRGILPGAIWVRAQQILQDNRDLGSAYKAPRTENALLSGIIRCAGCGAYMRPKAYGKPLPDGKRRFSYVCLTKIDSCGARCAMPNAPGRDVDALVIKELTSLTSDGGAISTLRSEARLAQGEARRTHAEAVATHEKAIASMQKKVDKLVDALAAGAPEGARQRILCEIDRYEQEIEQHRDALSELNASVLLDADPSALLDAAFSALESFRTSFASLTHDEQRRAIRALVDRVTWDGKNVSIEVFGEKTLPK

SEQ ID NO: 2396 - protein, 545 aa, Unknown
  Description of Unknown: Integrase B2397 sequence
  PTHR30461:SF3,SM00857,G3DSA:1.10.10.2600,IPR036162,PF13408, PS51737,IPR025827,G3DSA:3.40.50.1390,IPR006119,IPR038109, PF07508,IPR011109,SSF53041,PF00239,PTHR30461, PS51736,Coil,cd00338
MCAKKKPAMLEPDMQDAVIYTRYSSHNQRDCSIEQQVADCEIFARQNNLRVVKVYADRHLSGTTDNRPQFQQMLKDASHGHWAYVICWKIDRFARNRYDSATYKFRLKKAGVRVLYAKESIPDGPEGILLESVLEGSAEYYSAALAQNIRRGMKYNAEQCKVNSGSIPFGYCKGPDGRFAIHEANAEVVREIFRKAAAGMPFVDIANDLNSRGLKTSRGGRWNKGSFRLLMNEAYIGVYHFSDTRIEGGMPALIDQGTFWAANERLKANSSVRGRHQDGGDYLLTGKLKCAHCGSYMIGFSGTGKSGELHYYYGCQKRRRERACKKANVPREWIERVVVKAALDYVLRPDVMEWIADAVMEYQEREAASAQLASLTAELEENQKATDNVMKAIEAGIITSTTKQRLLDLEAKAQDLKRAIELEKLSHVRLERDQVLFWLDRFRGGSLQSQEFRRKVIDAFVSVVYLSDDHLRIAFNYSGGSNAEADFDLVMDAEAAAGELSKKFAQGPIASTIQFVLEPDSLRERVRVRFLFIGGFAERVHRAVK

SEQ ID NO: 2397 - protein, 545 aa, Unknown
  Description of Unknown: Integrase B2398 sequence
  PTHR30461:SF3,SM00857,G3DSA:1.10.10.2600,IPR036162,PF13408, IPR025827,G3DSA:3.40.50.1390,PS51737,IPR006119,IPR038109, PF07508,SSF53041,IPR011109,PTHR30461,Coil, PS51736,cd00338,PF00239
MLQVAAYCRVSTDKEDQANSFEAQQRYFRDYIERQPDWVLQGIYADEGISGTSTRKRVEFNKMLHAAELGQIDLIVTKEVSRFTRNTVDALQITRDLRRRGVGVLFLNDSLDTRTNDGELRLTIMSSVAQDESRKTSERSKWGQMRSMEKGVVFGGSLLGYDVIGGKMTVNPEGAEVVRLIFHKYLQERKGCSTIARELREAGILSSKGNCLWSSATVTKILKNEKYCGDLIQKKTYTPDYLTHEKKYNHGKEPLVALKDHHEPIIDRETWQAVQRELSRRNRATGCGGHGNRYPLSGKIRCGECGKSFSHRTKKRQDGSSYYRWCCFTATNEGLRRTDGAGNVIGCSVGRQIRNDIAMDLLRRSVNAVTLDKKAIISNLARVVESILASGGDSGEQELRRLELELEKLQARNDTIHDRFFDESITKADYQRAKARCESEMNRVQEKIAAIKQRQTLNTDTQTLKPDIRAAITGIVSGRTADDDFYGHLLQQMTVYRDGRVEVALNLLPTKWVYVLDGLEKYRAKIGGHDASSVPMSVSSPLSSG

SEQ ID NO: 2398 - protein, 545 aa, Unknown
  Description of Unknown: Integrase B2399 sequence
  PTHR30461:SF3,SM00857,G3DSA:1.10.10.2600,IPR036162,PF13408, IPR025827,PS51737,G3DSA:3.40.50.1390,IPR006119,IPR038109, PF07508,IPR011109,SSF53041,PTHR30461,Coil, PS51736,cd00338,PF00239
MLQVAAYCRVSTDKEDQANSFEAQQRYFREYIQRQPDWELQGIYADEGFSGTSTNKRVEFNKMLHAAELGQIDLIVTKEVSRFTRNTVDALQITRELRRRGVGVLFLNDSLDTRTNDGELRLTIMSSFAQDESRRTSERSKWGQMRSMEKGVVFGGSLLGYDVIGGKMTVNPEGAEVVRLIFHKYLQERKGCSTIARELREAGILSSKGNCLWSSATVTKILKNEKYCGDLIQKKTYTPDYLTHEKKYNHGKEPLVELKDHHEPIIDRETWQAVQRELSRRNRATGCGGHGNRYPLSGKIRCGECGKSFSHRTKKRQDGSSYYRWCCFTATNEGLRRTDGAGNVIGCSVGRQIRDDIAMDLLQRSVNDVTLDKKAIISNLARIVESVLASGEDSGEQELRRLELELEKLQARNDTIHDRFFDESITKADYQRAKARCESEMNRVQEKIAAIKQRQTLNTDTQTLKPDIRTAITGIVSGRTADDDFYGHLLQQMTVYRDGRVEVALNLLPAKWVYVLDGLEKYRDKIGVHDASSVPMSVSSPLSSG

SEQ ID NO: 2399 - protein, 545 aa, Unknown
  Description of Unknown: Integrase B2400 sequence
  PTHR30461:SF3,SM00857,G3DSA:1.10.10.2600,IPR036162,PF13408, IPR025827,G3DSA:3.40.50.1390,PS51737,IPR006119,IPR038109, PF07508,IPR011109,SSF53041,PTHR30461,cd00338, PF00239
MPTSKTAARKYAAGGGSDNSCGVEPLRAVIYARYSSSGQREESIEGQLRDCYEFAKKHGIIVIGEYIDKAMTGRVDRRPDFQRMMKDSEKGRFNCVLLWKMDRFARNRYDSAMYKYKLKKNGIRIFYAKETIPDGPEGIILESVMEGYAEYYSENLAQNVKRGNYDSALELKTLGKTCLGLKTGPDGRYMIDQAEAVIVRRIFEEYAEGERAKDIYGRLNSEGYRTSRGGKFNKNSLRRILSNKKYIGVYEYEDIYVENGIPAIITDRDLFERVQKMLKINHDAPARGKAQNFLLTTKLFCGLCGSPMIGDGGTSHTGKAYAYYSCTKRKRGRSCKKESVPKDWIEDLVVGELVKIVHNDELIEQIADRVMEYQKREKDQSGLHALEIRQKENEKAISNMLAAIEAGIITPSTKTRLMELEADRADIEKGIAHELLAEPEFERDQIIYFLERFRSGDINDEAYRIMLVDTFLNSVYLYDDDHLVLVMNYSGENCKVDLKLVEGAVSGDGCKGSAFAPSSALNGAKPNPVYFFKKVFAVVVNFTRK

SEQ ID NO: 2400 - protein, 545 aa, Unknown
  Description of Unknown: Integrase B2401 sequence
  PTHR30461:SF3,cd00338,SM00857,G3DSA:1.10.10.2600,IPR036162, PF13408,IPR025827,PS51737,G3DSA:3.40.50.1390,IPR006119, IPR038109,PF07508,IPR011109,SSF53041,PTHR30461, PS51736,Coil,PF00239
MARKKNIAAGLDAVIYARYSSHNQREVSIEQQIAECTKHAAALGLRVVGTYEDRAISGKTDNRPRFQQMMRDAEKGKFQAVVAWKSNRIGRNMLQAMVNEAKLDDYGVKVFYAEEDFDDTAAGRFALRNMMNVNQFYSENMAEDITRGLYDNANKCMANGRQPLGYKRGADGKVMLDEPAAAVVREIFTRVATGDLFVDIARDLNAKGIKTSKGAAWNKGSFQSICQNERYKGIYIYGNVRIVDGIPRIVSDELWYRVQEAMRMKKNPVGTRHRVGAEDYLLTGKLRCGHCGSYMTGVSGTSRNGELHYYYTCQKRRTEHACNKKNVRRDVIEPAIAQAIKMYCLTDDVIEWVADRTVEYWEKHDNDLHIEALEQQLEENKKATSNMLKAIEMGIITDATRSRMIELETEQSKLAVQLNAAKADVVKIDRDDLIDELQIFRDMDVNNRSVQAELFKDFLVAAYLYDDNRLKLVFSFMGKEKNVEIPLETGEDPPDGGDSPDTKMFVFAPDCSTKKALYFAGSMVLFFFCSSKKIRNAQLAMQAGQ

SEQ ID NO: 2401 - protein, 545 aa, Unknown
  Description of Unknown: Integrase B2402 sequence
  PTHR30461:SF3,SM00857,G3DSA:1.10.10.2600,IPR036162,PF13408, PS51737,G3DSA:3.40.50.1390,IPR025827,IPR006119,IPR038109, PF07508,IPR011109,SSF53041,PTHR30461,Coil, PS51736,cd00338,PF00239
MGADSCMAASAKKVSANIMIRAVIYARYSSSAQKDESIEQQIEACKEYAQRNGIHIVSVYADRAVSGRTDRRPEFQKMMRHAENGEFTMVLAYKSNRIARNMLNALAYEEKLAKVGVNVSYVKEEFGDNAAGRFALRTMMNLNQFFSESLAEDVKRGMDDNARQCRVNGSIPLGYKKGADGKFAIDENTAPIVREVFQRIAKGETQASIADDLNARQIRTAAGKPWGKGSFHNLLKNERYTGVYIYGDIRIPGGMPAIIDRDLFENAQRRIEIMKTLVKSRRRREDVEYLLTGKLFCGHCNSAMTGSSGTSKTGTVHYYYRCHNQAVAKTCNKKAVRKDSIERLVVGIIRDYVLRDDTIERLADLLMEYRKKVEDSSELGYLEERLKESKATSKNIMKAIEAGIFNKTTNERMQELEQEQAELTEQIAEELRHIPNYTRKQAIYYLESFRHGDLDDKKHQKHLIANFLRAVYLYDDHIKITFDFDDDETGLDVPLETAESEALDSESSCVLINTPRVYHNVLIRTPVKIQMVGRVFVLVFYFDFL

SEQ ID NO: 2402 - protein, 545 aa, Unknown
  Description of Unknown: Integrase B2403 sequence
  PTHR30461:SF3,SM00857,G3DSA:1.10.10.2600,IPR036162,PS51737, G3DSA:3.40.50.1390,IPR006119,IPR038109,PF07508,SSF53041, IPR011109,PTHR30461,Coil,cd00338,PF00239
MYKDYPVFYNYETMEYGRKSRTDDPLLTTDEILAKHSKIIEEYAIKNLGGPIPEKNKYMEVGSGESLKERPEITRLLKDIESPAVKAIIVVEVQRLSRGDLEDAGKLIRLLRYTNTYVITPMKIYDLRDEYDRDAFERELKRGNEYLEYYKKIQARGKLASVKAGNYVGSVAPYGFDRIEKTDGKETYHTLIERKDQADVVRMIFDWYCNDDIGVTAICRRLEELGVKTKTGGKIWKPSIIFSMLENHHYIGCTRWNWRKTIKIIENQEIKKLRPKAKVDEFLIFEGKHDGIISEEVFNKAREIRGKRHRTRRDLTLKNPFSGLMFCKCGAKMGYNTYTRRGIEYAPPKLVCNNQVHCKSGSVHFEEVMDYVCGVLKDCISDFEVRIENNQDDSIKLHMDLIARLQDQLKVLEKKEVDQWEAQYDPDPAKRMPQHIFQKLNEKVLAEKEEINKALKKAKDSAPKHIDYREELIKTTDALNALLDPNMDAKTKNQHLRMIIDKMVYERGPIVRITKENAAKYNVDTSKGLQYYNPPYKIDIDLKCD

SEQ ID NO: 2403 - protein, 545 aa, Unknown
  Description of Unknown: Integrase B2404 sequence
  cd03768,PTHR30461:SF3,SM00857,G3DSA:1.10.10.2600, IPR036162,PF13408,PS51737,G3DSA:3.40.50.1390, IPR025827,IPR006119,IPR038109,PF07508, IPR011109,SSF53041,PTHR30461,PS51736,Coil,PF00239
MKIAIYSRKSKYTGKGDSIGNQIQICKDYIETNYRNKDHEYIIYEDEGFSGGNINRPKFQKLLNDIKKEKFDILICYRLDRISRNVSDFSTTLDEIQSYGVDFISVKEQFDTTTPMGRAMIYIASVFAQLERETIAERVRDNMVELAKSGKWSGGRTPLGFDSEGSSYIDEEGNERRLVKLVKNDEELKLVNLIYDTYLKEGSLHKTEAYFASHNIKSNRNILLEKTSLKVILNNPVYAISSPELKEWLEDDGWNVYGEPDGKHSYLSYNKTKHVTRNGKSIKIPNDKENWIAAISNCPGVIEADKWIQVQEQFKGNRGSFPKKARTHDAKLVGKIYCAHCNNYMQVVHGNIKKDTGKRQHYYSCSLKKKSKNQLCRNKNVKIDAVEDLLLLELERLGKNKKSYIQSLKKKNETVKKKKDVKQKQISIQKEIDAKQKILNNLVDKLAVADDLADIIIQRIRTTKKEMQELQEELDKVSKEIEDSNYKKLDLDFIESLLEKCADITKLDSNEQRLLIGVLIDKILWDSNTQNVTVYFIGSGDEKKK

SEQ ID NO: 2404 - protein, 545 aa, Unknown
  Description of Unknown: Integrase B2405 sequence
  PTHR30461:SF3,SM00857,G3DSA:1.10.10.2600,IPR036162,PF13408, IPR025827,G3DSA:3.40.50.1390,PS51737,IPR006119,IPR038109, PF07508,IPR011109,SSF53041,PTHR30461,cd00338, PF00239
MPTSKNTARKYAAGGSSDNSCGVEPLRAVIYARYSSSGQREESIEGQLRDCYEFAKKHGIIVIGEYIDKAMTGRVDRRPDFQRMMKDSEKGRFNCVLLWKMDRFARNRYDSAMYKYKLKKNGIRIFYAKETIPDGPEGIILESVMEGYAEYYSENLAQNVKRGNYDSALELKTLGKTCLGLKTGPDGRYMIDQAEAAIVRRIFEEYAEGERAKDIYERLNSEGYRTSRGGKFNKNSLRRILSNKKYIGVYEYEDIYVENGIPAIITDRDLFERVQKMLKINHDAPARGKAQNFLLTTKLFCGLCGSPMIGDGGTSHTGKAYAYYSCTKRKRGRSCKKESVPKDWIEDLVVGELVKIVHNDELIEQIADRVMEYQKREKDQSGLHALEIRQKENEKAISNMLAAIEAGIITPSTKTRLMELEADRADIEKGIAHELLAEPEFERDQIIYFLERFRSGDINDEAYRIMLVDTFLNSVYLYDDDHLVLVMNYSGENCKVDLKLVEGAVSGDGCKGSAFAPSSALNGAKPNPVYFFKKVFAVVVNFTWR

SEQ ID NO: 2405 - protein, 545 aa, Unknown
  Description of Unknown: Integrase B2406 sequence
  PTHR30461:SF3,cd00338,SM00857,G3DSA:1.10.10.2600,IPR036162, PF13408,IPR025827,G3DSA:3.40.50.1390,PS51737,IPR006119, IPR038109,PF07508,SSF53041,IPR011109,PTHR30461, PS51736,Coil,PF00239
MSSVDKTAVIYARYSSHGQTEQSIEGQIAAAQKYAEGKGYTIIHIYADRAMTGRNDDREQFQKMLSDTATHQFGVILLWKIDRFGRNREEIAFNRYRCKKNGVRVERVAEDVPDGPEGVILDSVLEGMAEYYSLQLAQNVRRGQRESAKKSQTVGGCNIIGYKVNPDTKRYEVDPKTAPFVTEVFKRYANGETISEIVAWLNVQGVRATRGGEFTVNSLHRLLKNEKYTGVYIFHDIRNEGGMPALTDRATFDKVQEMLKVNRRAPARVWSKTEYLLTDKLFCGHCGAMMVGESGHGRNGTKHSYYTCWNRKKKKSCSKKPVRQDVIEPMVLRVISKMLSDEATLEYIADQVWAVYERSDTSGDTIKALDKQIADVDRALSNVMKAIEMGIINEMTKARMDELTDQKQALSVARAEAGLAGGFKLTRDMILFFLHDMAATNMTDRDCQKRLIKTFVNAIYLYDDHFDIAFNYTSNGKMVVKMQEINDTTSGEVFGRCAQSPAKVSRTPSGVRLFLLAVRRELQWRCKSIQFGRCFGEIYFSLQPT

SEQ ID NO: 2406 - protein, 545 aa, Unknown
  Description of Unknown: Integrase B2407 sequence
  PTHR30461:SF3,SM00857,G3DSA:1.10.10.2600,IPR036162,PF13408, PS51737,IPR025827,G3DSA:3.40.50.1390,IPR006119,IPR038109, PF07508,IPR011109,SSF53041,PTHR30461,cd00338, PF00239
MGKVAYCRVSDKKGIDSFENQKQYFNEFGVEKLYTDFDISGMSLKHRQGFIEMLRDAGLNVTKIDDAKMNYKLVVTTSDREPKFNHIYIKSTSRFSRNSAEAMDIIRCLSSKGVYVTFLDLNKSTKEEGIDMVLSILFTINNEESLAISKRTRWGNAVTASNGVFRAFNLYGYTKKEDKVEIVEEEAEIIKLIYKLRIEENIGSRKIAKEINKLGYRTRKNEEWSANSVMNILTNEAYTGKIIRNKYHCDTLYGNNKRTLKPKEEWVITEAPELRIISDNDWGKAEKLIKSATNENKRGINNGSNIYRDKIKCAKCGSNYTINISSTGRQFYNCNKKKKYGLKECSSRNIDLSKIDEIIENYVGKGYKINSEKIVKEFMEPMISGIINNLKSNYDKNNDKKIEDNMKRLNELQIQSSRIMDLYLIGTFDKKMVEIKGLEVKEEIDKLIKENNELSKGNSLIDKKINYIETLMNFIYSQLENIAEDISKEEFINKYLHSIIIDDNNYIVFTLFNKALEMIVKLTSLEDIENFDEEAKKLLDMELTL

SEQ ID NO: 2407 - protein, 545 aa, Unknown
  Description of Unknown: Integrase B2408 sequence
  cd03768,PTHR30461:SF3,SM00857,G3DSA:1.10.10.2600,IPR036162, PF13408,PS51737,G3DSA:3.40.50.1390,IPR025827,IPR006119, IPR038109,PF07508,IPR011109,SSF53041,PTHR30461, PS51736,Coil,PF00239
MKIAIYSRKSKYTGKGDSIGNQIQMCKDYIETNYRNKDHEYIIYEDEGFSGGNINRPKFQKLLNDIKKEKFDILICYRLDRISRNVSDFSTTLDEIQSYGVDFISVKEQFDTTTPMGRAMIYIASVFAQLERETIAERVRDNMVELAKSGKWSGGRTPLGFNSEGSSYIDEEGNERRLVKLVKNDEELKLVNLIYDTYLKEGSLHKTEAYFASHNIKSNRNILLEKTSLKVILNNPVYAISSLSLKEWLENDGWNVYGEPDGKHSYLSYNKTKHVTRNGKSMKIPNDKENWIAAISNCPGVIEADKWIQVQEQFTGNRGSFPKKARTHDAKLVGKIYCSHCNNYMQVVHGNIKKDTGKRQHYYSCSLKKKSKSELCQNKNVKTDDIENLLLQELERLGKNKKNYIQSLKKKNETVKKKKDVKQKQIEIQKKIDAKQKILNNLVDKLAVADDIDDIIIQRIKTTKNEMQELQQELEKFSQEIEDSNYKKLDLDFIESLLEKCADITKLNSNEQRLLIGVLIDKILWDGNTQNVTIYFIGSGDEKKK

SEQ ID NO: 2408 - protein, 545 aa, Unknown
  Description of Unknown: Integrase B2409 sequence
  PTHR30461:SF3,SM00857,G3DSA:1.10.10.2600,IPR036162,PF13408, IPR025827,G3DSA:3.40.50.1390,PS51737,IPR006119,IPR038109, PF07508,SSF53041,IPR011109,PTHR30461,Coil, PS51736,cd00338,PF00239
MKFKYPAMGTTKNAVIYARYSSHSQREESIEGQLRICHEYAKVEGLAIVGEYIDRAISGTTDARPDFQRMIDDAKKKQFSYVIVYRLDRFARNRYDSVLYKHELKQCGVKVVSATEGIGTGDESILLEALIEASAEYYSMELSRKIKRGRQDSAMKGNFLGGAVPLGYKVVDSKFIIDDETAPIVRYIFERYAAGIGKKQIIDELTAKGYMRRTGKPFTYRAFDSVLRNRKYTGEFTQTGITVEGGCPAIVDTEMFEKVQARLEINRRAPAKAKAKTEYLLSGKMFCGYCGEPMIGISGTGRHEKTFYYYSCVGRRGKSGCKKQHEKKDFIEWYVCEQTVQYMQDPERLSHVAKRIIEINDAEFDGGKVKELERAVENCDNDIRKLVDALTTIPDAGRAALYDKIERIGAAKADMEIDLAKLRVLSEVRYKQEDVEAWIRSMCRGDLMDFEFRRQLIDVFINSVYLFDDRVVIVYNIKHGKQVSAIDVLNAVEELDGVELFPDSAEDSSAGGNGSFLVADAPPKQLKYEPQVFFIKETFGLVFER

SEQ ID NO: 2409 - protein, 545 aa, Unknown
  Description of Unknown: Integrase B2410 sequence
  PTHR30461:SF3,SM00857,G3DSA:1.10.10.2600,IPR036162,PF13408, IPR025827,PS51737,G3DSA:3.40.50.1390,IPR006119,IPR038109, PF07508,IPR011109,SSF53041,PTHR30461,Coil, PS51736,cd00338,PF00239
MHGAYILARYSTDRQNEDSIEVQVSACRKWCDERSLPVLDVFADEATSGMKDTRPQYARMMWQLEHGGADTVVIYDQSRMFRKLTAWFDFRDQLARLGVDVVSVTQPMIGGDLRDPANFLTEGSMALFNQMWVLQTRQKVVAKMRYMAEQGLHTGGTPPLGYKVVDGRLVIDAAEAETVRLIFGLYASGMTYREIIRRLNAEGRHTKRGGNFGVNSLHDLLKNPKYVGDMVYGKVAKRPDGSRNSHAAAVDAIVVKDALPAIVDREIWEKVQLKMQDNKRSTAGRPASAREYPLKGKVFCRECKSAMLVTASNRGAKRYYYYACAAKHRKGLCDNTPIPAGTLETLVADAVRQRLGQPGNVEGLIRILREQRSKLSGSAVQRLRELQKRDKEISKQLDAAVAAVLAGLHSPTLTAKVNALEAERAKIAHDMQQLRAQVSGAEIDEPHLRELLALAMQDDAAVLSIVVRVEVGKDEIAVWTLLDADPNGDFDFAEDGVPITPSEVAPSYNNSGCPATGTTNYYNIVTPAGLLLFYIARPRQRDRRS

SEQ ID NO: 2410 - protein, 545 aa, Unknown
  Description of Unknown: Integrase B2411 sequence
  PTHR30461:SF3,IPR036162,PS51737,IPR011109,PTHR30461, PF00239,G3DSA:1.10.10.2600,IPR006119,PF14287,SSF53041, IPR025378,SM00857,IPR025827,cd03770,IPR038109, PS51736,PF13408,G3DSA:3.40.50.1390,PF07508,Coil
MNNNRQSYNAEEKITALYCRLSRDDELQGDSNSIINQKAILQKYADDNGFRNTFLFVDDGYSGTTFDRPDWNRLMGLVDEGKVGTIIVKDMSRLGRDYLKVGMYTEMVFPNADIRFIAINNGVDSANQAENDMTPFINIFNEFYAKDTSRKIRAVFKAKGQSGKPLSTNPPYGYVKDPEDKTHWLVDEQAAEVVRDIFRLCVQGYGISQIANEITRRNILNPTAYAKASGRSVPDNRDGDNDYTWRSSTISHMLSRPEYLGHTVNFKTYRKSYKQKKQLHHSPSEWQIFENTHEAIVDRETYDIVQRIRDGRRRRTPMGEMPMLSGMVFCADCGAKLYQVRSTGFSPGQEYMVCATYRKKGKEKCTSHQIRNSVIEEFLLEGIRSMTAYVREHEDEFVEMVTKLSKAETEKALRDEKRELEQAESRVHKLDTIIQRLYEDNVEGKISDERFAKMSENYESEQKLLERRITEIRCSIAAQKESSMNVNSFVALVRKHTDIQELNAEVIREFVERVEVFQPARVGGRKVRRLRIVWNCIGEFTPPQL

SEQ ID NO: 2411 - protein, 545 aa, Unknown
  Description of Unknown: Integrase B2412 sequence
  PTHR30461:SF3,cd00338,SM00857,G3DSA:1.10.10.2600,IPR036162, PF13408,IPR025827,G3DSA:3.40.50.1390,PS51737,IPR006119, IPR038109,PF07508,SSF53041,IPR011109,PTHR30461, PS51736,Coil,PF00239
MSSVDKTAVIYARYSSHGQTEQSIDGQIAAAQKYAEGKGYTIIHIYADRAMTGRNDDREQFQKMLSDTATHQFGVILLWKIDRFGRNREEIAFNRYRCKKNGVRVERVAEDVPDGPEGVILDSVLEGMAEYYSLQLAQNVRRGQRESAKKSQTVGGCNIIGYKVNPDTKRYEVDPKTAPFVTEVFKRYANGETISEIVAWLNVQGVRATRGGEFTVNSLHRLLKNEKYTGVYIFHDIRNEGGMPALTDRATFDKVQEMLKVNRRAPARVWSKTEYLLTDKLFCGHCGAMMVGESGHGRNGTKHSYYTCWNRKKKKSCSKKPVRQDVIEPMVLRVISKMLSDEATLEYIADQVWAVYERSDTSGDTIKALDKQIADVDRALSNVMKAIEMGIINEMTKARMDELTDQKQALSVARAEAGLAGGFKLTRDMILFFLHDMAATNMTDRDCQKRLIKTFVNAIYLYDDHFDIAFNYTSNGKMVVKMQEINDTTSGEVFGRCAQSPAKVSRTSSGVRLFLLAVRRELQWRCKSIQFSRCFGGIYFSLQPT

SEQ ID NO: 2412 - protein, 545 aa, Unknown
  Description of Unknown: Integrase B2413 sequence
  PTHR30461:SF3,SM00857,G3DSA:1.10.10.2600,IPR036162,PF13408, IPR025827,G3DSA:3.40.50.1390,PS51737,IPR006119,IPR038109, PF07508,IPR011109,SSF53041,PF00239,PTHR30461, PS51736,Coil,cd00338
MAKRKFNKGGEVRLVAYYRYSGGSGQTEQSIEGQRRDCETYARLHNMTIQKEYVDRHISGKTDDRAAFQQMIADSDKGAFDMVICWKTDRFARNRYDSAVYKKRLRDNGVEIVYAAESNIAGAEGIIIEGVMEALAEYYSAELAEKMRRGMRESALKGQAISRCRALGLKTDERKRFVIDEKTAPTVRFIFEHYAAGESAMSIVEQLNAKGLRTSQGNPFNKSSIPRIIQNEAYRGVYVSKSYDVRIEGAIPAIIDNELWERAQTMLKLNRQLKAKNEPKADYILSGKLYCSCGSLMRGMSGHSATGEVYRYYTCPNKDCHLRNIPKDDLEGKVIQSIVDHLLQPESMEALAEAMVEVQKADAEKPNAERVAIEQSLADVRRRSKNILDAIENGTANAQLCARLNDLTEQEQTLSFQLSSLEKEKPVAFTKEQYLFLLEQFLVEPSERTPEYGRRLVNAFVTSMVVSDRELVINFNVSDETVNKNKKASQTNLQKESSSGMRLVRLTFPQSNLSVTIFPSYFFLTCPLSHQPLSADTSSSISSFR

SEQ ID NO: 2413 - protein, 545 aa, Unknown
  Description of Unknown: Integrase B2414 sequence
  PTHR30461:SF3,SM00857,G3DSA:1.10.10.2600,IPR036162,PF13408, PS51737,G3DSA:3.40.50.1390,IPR025827,IPR006119,IPR038109, PF07508,IPR011109,SSF53041,PTHR30461,Coil, PS51736,cd00338,PF00239
MLQVAAYCRVSTDKEDQANSFEAQQRYFREYIQRQPDWELQGIYADEGFSGTSTNKRVEFNKMLHAAELGQIDLIVTKEVSRFTRNTVDALQITRELRRRGVGVLFLNDSLDTRTNDGELRLTIMSSFAQDESRRTSERSKWGQMRSMEKGVVFGGSLLGYDVIGGKMTVNTEGAEVVRLIFHKYLQERKGCSTIARELREAGILSSKGNCLWSSATVTKILKNEKYCGDLIQKKTYTPDYLTHEKKYNHGKEPLVELKDHHEAIIDRETWQAVQRELSRRNRATGCGGHGNRYPLSGKICCGECGKSFSHRTKKRQDGSSYYRWCCFTATNEGLRRTDGAGNVIGCSVGRQIRDDVAMDLLRRSVSAVTLDKKSIISSLTRVVESVLASGEDSGEQELRRLELELEKLQARNDTIHDRFFDESITKADYQRAKARCESEMNRVQEKIAAIKQRQTLNTDTQTLKPDIRAAITGIVSGRTADDDFYGHLLQQMTVYRDGRVEVALNLLPAKWVYVLDGLEKYRAKIGGHDASSVPMSVSSPLSSG

SEQ ID NO: 2414 - protein, 545 aa, Unknown
  Description of Unknown: Integrase B2415 sequence
  PTHR30461:SF3,cd00338,SM00857,G3DSA:1.10.10.2600,IPR036162, PF13408,PS51737,IPR025827,G3DSA:3.40.50.1390,IPR006119, IPR038109,PF07508,IPR011109,SSF53041,PTHR30461, PS51736,Coil,PF00239
MARKKNIAAGQNAVIYARYSSHNQREVSIEQQVRECMKHAAELGLHVVGTYEDRAISGKTDKRPNFQRMMRDAEKGKFQAVVAWKSNRIGRNMLQAMVNEAKLEDCGVKVFYAEEDFDDTAAGRFALRNMMNVNQFYSENMAEDITRGLYDNASKCMANGRQPLGYKRGEDGRVVLDEANAAVVREIFTRVAAGDLFVDIARDLNAQGIKTSKGANWNKGSFQSICQNERYRGIYIYGDVRVADGIPRIVSDDLWYRVQEAMRMKKNPVGTRHRVGAEDYLLTGKLRCGHCGSYMTGVSGTSRNGELHYYYTCQKRRTEHACDKKNIRRDVIEPAVAQAIKMYCLTDDVIAWIADRTVEYWEKHDNDLQIEALEQQLEENKKATSNMLKAIEMGIITEATRTRMVELETEQSRLSVQLNVAKEDVVKIDREQIISYLELLQQGDIHDRDFQMELFKNFLVAVYVYDDNRMKLVFSCMGDQNSVEIPLETGEDPPDGGLSPDAKMFVLTPDSSTKKALYFVGSTVLFFFIPAKKSGGAPLAMQAGQ

SEQ ID NO: 2415 - protein, 544 aa, Unknown
  Description of Unknown: Integrase B2416 sequence
  PTHR30461:SF3,SM00857,G3DSA:1.10.10.2600,IPR036162,PF13408, IPR025827,G3DSA:3.40.50.1390,PS51737,IPR006119,IPR038109, PF07508,IPR011109,SSF53041,PF00239,PTHR30461, PS51736,Coil,cd00338
MRVSVNLNAQKPDTTTNAVIYARYSSHGQTEQSIEGQLAKGHEYAAAQGYTVVHEYIDRAMTGRNDNREAFQKMLSDTGKHQFQVVIVWKVDRFGRNREEIAFNKHTCKKNGVRVEYVAESLPNSPEAVILESVLEGMAEYYSIQLSQNIRRGQLESAKKCQCVGGSVPLGYTLDSDKHFVIDPQTAPVVKKIFDLYAEGATISEITGQLNEQGIRTARKQLFTKNSLTKLLKNEKYIGVYTYKDIVRVEGGVPAIVDKSTFDRVQELLKINRRAPSHTWTKVEYLLTDKLFCGHCGSPMVGESGFSHTGAKYSYYGCIKRRREKACDKKPVRQDWIEALVLDETVKLLHDDELMEYIIDRTWEYYQVTDKVQEEKAVLEAQLAEVDKAINNLVRAIEAGIFNAATKSRMDELDAQKAALTASLADLELTSGIRITRDHIEYFLLRLRDLDVKDRECQKRLVQTFVNAVFIYDDGRVKITYNYSGQSSTITLNQIASAEKGKGFVCCLPCSTSSPRFPRGVAALFLFWGKIGCESTTNFSCIVL

SEQ ID NO: 2416 - protein, 544 aa, Unknown
  Description of Unknown: Integrase B2417 sequence
  SM00857,G3DSA:1.10.10.2600,IPR036162,PF13408,PS51737, IPR025827,G3DSA:3.40.50.1390,IPR006119,IPR038109,PF07508, SSF53041,IPR011109,PTHR30461,Coil,cd00338, PF00239
MAYRKITDIKDTIGMRAVFYARVSTAEEEQLNAIELQIEENRGCIKDHGWKLVGEYIDRSKSGTMVKGRDDYQRLYEDLYEDLFDIVVIKDQERLQRNTLDWYLFINRVVQTGKLLFMYMDGKFYSPDDALITGVRAIIAEEFSRNLSKKLHNYHDHRIEKARQGQEIALQGSGNVYGWDKKDGKYYINPEQAKVRRLMCEGIMARKGSTLIAKELNDAGYRNTVGKPWKPMDIPKFVYDCKNVGTMIINKERHDFESKQTIKLPKEEWVYVENALPPIVTQEEWDLICKIHEERVIATGSDRRGKKTSGYSFSGKLVCGICGAPYWRKQRVSKDEYWVCSTKQTKGRRTRKRDSTMGKAGEINPLGCDNENISYNSLMEIMRVVSERLQANTDTIKQDMINWLTKLRKQLLEANGGHTEADLQRELSRKSKLLDAYLDGILNKQEYQKKAEELDERLIQLKAETEKNKANSGDIAEIDKVLADIDEEVSRYVDGNEKLKVEYLLEHLEQVQIFPDKVIVIVPILSEGIVVEKTQYVSREKWRR

SEQ ID NO: 2417 - protein, 544 aa, Unknown
  Description of Unknown: Integrase B2418 sequence
  SM00857,G3DSA:1.10.10.2600,IPR036162,PF13408,IPR025827, G3DSA:3.40.50.1390,PS51737,IPR006119,IPR038109,PF07508, SSF53041,IPR011109,PTHR30461,Coil,cd00338, PF00239
MAYRKITDIKDTIGMRAVFYARVSTAEEEQLNAIELQIEENRGCIKDHGWKLVGEYIDRSKSGTMVKGRDDYQRLYEDLYEDLFDIVVIKDQERLQRNTLDWYLFINRVVQTGKLLFMYMDGKFYSPDDALITGVRAIIAEEFSRNLSKKLHNYHDHRIEKARQGQEIALQGSGNVYGWDKKDGKYYINPEQAKVRRLMCEGIMARKGSTLIAKELNDAGYRNTVGKPWKPMDIPKFVYDCKNVGTMIINKERHDFESKQTIKLPKEEWVYVENALPPIVTQEEWDLICKIHEERVIATGSDRRGKKTSGYSFSGKLVCGICGAPYWRKQRVSKDEYWVCSTKQTKGRRTRKRDSTMGKAGEINPLGCDNENISYNSLMEIMGVVSERLQANTDTIKQDMINWLTKLRKQLLEANGGHTEADLQREISRKSKLLDAYLDGILNKQEYQKKAEELDERIIQLKAETEKNKANSGDIAEIDKVLANIDEEVARYIDGNEKLKVEYLLEHLEQVQIFPDKVIVIVPILSEGIVVEKTQYVSREKWRW

SEQ ID NO: 2418 - protein, 544 aa, Unknown
  Description of Unknown: Integrase B2419 sequence
  PTHR30461:SF3,SM00857,G3DSA:1.10.10.2600,IPR036162,PF13408, PS51737,G3DSA:3.40.50.1390,IPR025827,IPR006119,IPR038109, PF07508,IPR011109,SSF53041,PF00239,PTHR30461, PS51736,Coil,cd00338
MRVSVNLNAQKPDTTTNAVIYARYSSHGQTEQSIEGQLAKGHEYAAAQGYTVVHEYIDRAMTGRNDNREAFQKMLSDTGKHQFQVVIVWKVDRFGRNREEIAFNKHTCKKNGVRVEYVAESLPNSPEAVILESVLEGMAEYYSIQLSQNIRRGQLESAKKCQCVGGSVPLGYTLDSDKHFVIDPQTAPVVKKIFDLYAEGATISEITGQLNEQGIRTARKQLFTKNSLTKLLKNEKYIGVYTYKDIVRVEGGVPAIVDESTFDRVQELLKINRRAPSHTWTKVEYLLTDKLFCGHCGSPMVGESGFSHTGAKYSYYGCIKRRREKACDKKPVRQDWIEALVLDETVKLLHDDELMEYIIDRTWEYYQVTDKVQEEKAVLEAQLAEVDKAINNLVRAIEAGIFNAATKSRMDELDAQKAALTASLADLELTSGIRITRDHIEYFLLRLRDLDVKDRECQKRLVQTFVNAVFIYDDGRVKITYNYSGQSSTITLNQIASAEKGKGFVCCLPCSTSSPRFPRGVAALFLFWGKNGCESTTNFSCFVL

SEQ ID NO: 2419 - protein, 544 aa, Unknown
  Description of Unknown: Integrase B2420 sequence
  PTHR30461:SF3,SM00857,G3DSA:1.10.10.2600,IPR036162,PF13408, PS51737,G3DSA:3.40.50.1390,IPR025827,IPR006119,IPR038109, PF07508,IPR011109,SSF53041,PTHR30461,Coil, PS51736,cd00338,PF00239
MPAALAYCMASVNLVFAWADLRIYYTIISLVLERRTDYIMTKNAVIYARFSSDKQREESIDGQIRECRAFAEANEINIINIYIDRAMSARTDQRPSFLQMVKDSAKHLFDYVIVYQLDRFSRSRYDSAIYKHRLKKNGVKVLSAKENIKDDPSGILLESVIEGMAEYYSAELSQKVKRGMTENLLEGKWIGGIVPFGYELTSENKLAISPATGHLVSEIYDKYLSGVKTTDILSKLNSLGIKTQRGCNFTRNSLNRILKNQIYTGTFTWAGTSYPEYAPALITQEQYTAMQNLFESRKRKSNTARRVSPQYALTGKIYCGTCGLPMTGYCGKSHTGTTYYYYQCSSKNNKSEKAQRSRIKCDAKNINRDKLEKLVLDTTISILKDKAALKCIADQCMAIQEAEIAHKPAEQLRLESQIKDIEKRLKNSVKAIENGLISQTITNNIETYEKQLTELKAELDGVKLETHIIPITEEAVIYYLNQLIERANKKDGYSLDTFDDFIRRVVVTGKRVDIYYNYTAVPHVLENPAVKMLRGSSEDCLVTR

SEQ ID NO: 2420 - protein, 544 aa, Unknown
  Description of Unknown: Integrase B2421 sequence
  PTHR30461:SF3,SM00857,G3DSA:1.10.10.2600,IPR036162,PF13408, IPR025827,G3DSA:3.40.50.1390,PS51737,IPR006119,IPR038109, PF07508,SSF53041,IPR011109,PF00239,PTHR30461, PS51736,Coil,cd00338
MSATIPSLMQAPRAFGYCRKSTNEQREESLEAQQRAIVTFAATAGYELVQVYKDHGNSGRRGERPEFQRMLADAAAAGVQYIIVHKLDRFFRNADQQTVVEMQLRRQGIQVISAAEHFDATPQGQFMRNVTKAINQWYSANLAQEVAKGLRENALTARTTGGPPPLGYTVDKSTGQYAIVPREAEAVQLIFKLYQQGAGYTEIIDALNAGGYVTRRGQPFGKNSLYDILRNEKYTGLYIWNRLAPADVDGRTSRRRLKPRDEWVCVENGMPQIIPTEQWQAVQDEMDKRKHRNAQYKAKSFYLLSGLVYCGGCGGTMAGEMHRYNSHGKAVEYRYYRCAAQHRQHDGGVHAHRVNADRLENAVIDYIQHIVLDPVNMDALCVAVLEALQPDGRNAERAKELKQEAGIIQQKVDRLYQAIENGLDAAGAIERINALQKQRMTLLAQANDLDISAESAAASVDELRRVWSGINLRELQPEKMRVIVRDLIYKIVVFDDGPRGSRLRIILNPARLNPSAIPKAIETMPFSELQNFSHTGGSGLPLPR

SEQ ID NO: 2421 - protein, 544 aa, Unknown
  Description of Unknown: Integrase B2422 sequence
  SM00857,G3DSA:1.10.10.2600,IPR036162,PF13408,PS51737, IPR025827,G3DSA:3.40.50.1390,IPR006119,IPR038109,PF07508, SSF53041,IPR011109,PTHR30461,Coil,cd00338, PF00239
MAYRKITDIRDTIGMRAVFYARVSTAEEEQLNAIELQIEENRGCIKDHGWKLVGEYIDRSKSGTMVKGRDDYQRLYEDLYEDLFDIVVIKDQERLQRNTLDWYLFINRVVQTGKLLFMYMDGKFYSPDDALITGVRAIIAEEFSRNLSKKLHNYHDHRIEKARQGQEIALQGSGNVYGWDKKDGKYYINPEQARVRRLMCEGIMARKGSTLIAKELNDAGYRNTVGKPWKPMDIPKFVYDCKNVGTMIINKERHDFESKQTIKLPKEEWVYVENALPPIVTQEEWDLICKIHEERVIATGSDRRGKKTSGYSFSGKLVCGICGAPYWRKQRVSKDEYWVCSTKQTKGRRTRKRDSTMGKAGEINPLGCDNENISYNSLMEIMGVVSERLQANTDTIKQDMINWLTKLRKQLLEANGGHTEADLQRELSRKSKLLDAYLDGILNKQEYQKKAEELDERIIQLKTETEKNKANSGDIAEIDKVLANIDEEVARYVDGNEKLKVEYLLEHLEQVQIFPDKVIVIVPILSEGIVVEKTQYVSREKWRW

SEQ ID NO: 2422 - protein, 544 aa, Unknown
  Description of Unknown: Integrase B2423 sequence
  PTHR30461:SF3,SM00857,G3DSA:1.10.10.2600,IPR036162,PF13408, PS51737,G3DSA:3.40.50.1390,IPR025827,IPR006119,IPR038109, PF07508,SSF53041,IPR011109,PTHR30461,Coil, PS51736,cd00338,PF00239
MPAALAYCMASVNLVFAWADLRIYYTIISLVLERRTDYIMTKNAVIYARFSSDKQREESIDGQIRECRAFAEANEINIINTYIDRAMSARTDQRPSFLQMVKDSAKHLFDYVIVYQLDRFSRSRYDSAIYKHRLKKNGVKVLSAKENIKDDPSGILLESVIEGMAEYYSAELSQKVKRGMTENLLEGKWIGGIVPFGYELTSENKLAISPATGHLVSEIYDKYLSGVKMTDILSKLNSLGIKTQRGCNFTRNSLNRILKNQIYTGTFTWSGTSYPDYAPALITQEQYTAMQNLFESRKRKNNTARRVSPQYALTGKIYCGTCGLPMTGYCGKSHTGTTYYYYQCSSKNNKSEKAARSQIACDAKNINRDKLEKLVLDTTISILKNKDAVKCIADQCMAIQKAELEHKPAEQLRLESQIKEIEKRLKNSVKAVENGLISQTITNNIETYEKQLTELNAQLDGVKLDTHIIPITEEAVIYYLNQLTERANKKDGYSLDTFDDFIRRVVVTGKRVDIYYNYTAVPNILENPAVKMLRGSSEDCLVTR

SEQ ID NO: 2423 - protein, 544 aa, Unknown
  Description of Unknown: Integrase B2424 sequence
  PTHR30461:SF3,SM00857,G3DSA:1.10.10.2600,IPR036162,PF13408, IPR025827,G3DSA:3.40.50.1390,PS51737,IPR006119,IPR038109, PF07508,IPR011109,SSF53041,PF00239,PTHR30461, PS51736,Coil,cd00338
MRVSVNLNAQKPDTTTNAVIYARYSSHGQTEQSIEGQLAKGHEYAAAQGYTVVHEYIDRAMTGRNDNREAFQKMLSDTGKHQFQVVIVWKVDRFGRNREEIAFNKHTCKKNGVRVEYVAESLPNSPEAVILESVLEGMAEYYSIQLSQNIRRGQLESAKKCQCVGGSVPLGYTLDSDKHFVIDPQTAPVVKKIFDLYAEGATISEITGQLNEQGIRTARKQLFTKNSLTKLLKNEKYIGVYTYKDIVRVEGGVPAIVDKSTFDRVQELLKINRRAPSHTWTKVEYLLTDKLFCGHCGSPMVGESGFSHTGAKYSYYGCIKRRREKACDKKPVRQDWIEALVLDETVKLLHDDELMEYIIDRTWEYYQVTDKVQEEKAVLEAQLAEVDKAINNLVRAIEAGIFNAATKSRMDELDAQKAALTASLADLELTSGIRITRDHIEYFLLRLRDLDVKDRECQKRLVQTFVNAVFIYDDGRVKITYNYSGQSSTITLNQIASAEKGKGFVCCLPCSTSSPRFPRGVAALFLFWGKNGCESTTNFSCIVL

SEQ ID NO: 2424 - protein, 544 aa, Unknown
  Description of Unknown: Integrase B2425 sequence
  SM00857,G3DSA:1.10.10.2600,IPR036162,PF13408,PS51737, IPR025827,G3DSA:3.40.50.1390,IPR006119,IPR038109,PF07508, SSF53041,IPR011109,PTHR30461,Coil,cd00338, PF00239
MAYRKITDIRDTIGMRAVFYARVSTAEEEQLNAIELQIEENRGCIKDHGWKLVGEYIDRSKSGTMVKGRDDYQRLYEDLYEDLFDIVVIKDQERLQRNTLDWYLFINRVVQTGKLLFMYMDGKFYSPDDALITGVRAIIAEEFSRNLSKKLHNYHDHRIEKARQGQEIALQGSGNVYGWDKKDGKYYINPEQAKVRRLMCEGIMARKGSTLIAKELNDAGYHNTVGKPWKPMDIPKFVYDCKNVGTMIINKERHDFESKQTIKLPKEEWVYVENALPPIVTQEEWDLICKIHEERVIATGSDRRGKKTSGYSFSGKLVCGICGAPYWRKQRVSKDEYWVCSTKQTKGRRTRKRDSTMGKAGEINPLGCDNENISYNSLMEIMGVVSERLQANTDTIKQDMINWLTKLRKQLLEANGGHTEADLQRELSRKSKLLDAYLDGILNKQEYQKKAEELDERIIQLKAETEKNKANFGDIAEIDKVLANIDEEVARYVDGNEKLKVEYLLEHLEQVQIFPDKVIVIVPILSEGIVVEKTQYVSREKWSW

SEQ ID NO: 2425 - protein, 544 aa, Unknown
  Description of Unknown: Integrase B2426 sequence
  PTHR30461:SF3,SM00857,G3DSA:1.10.10.2600,IPR036162,PF13408, PS51737,G3DSA:3.40.50.1390,IPR025827,IPR006119,IPR038109, PF07508,SSF53041,IPR011109,PF00239,PTHR30461, Coil,cd00338
MEKTVYESNVPRVYTLYRVSTIGQVEKDDIPMQKQVCRDFAKKQGWVVVKEFSEKGISGYKVSAKDRDAIQEIQHDAALGKFDILLVFMFDRLGRRDDETPFIVEWFVKNGVEVWSAMEGQQRFDNHVDKLMNYIRYWQASGESLKTSIRTKTRLGQLTEEGHYTGGTVPYGYRAVDKGRVNKRNRTVLDLEIDEDEAEVIRLIFHKYVDEGYGAQRLSHYLHEQGIKSRDGKGFPNTTVNRIIKNIAYTGIIKNGESQSGYIDELRIIDVSTFSKAQEIMRQRTLPHGNVPLNCKGKSLLVGNIFCAHCGNRLTLTTSGRRVYRADGTVKYEPRMRYQCHYNVRHPGECDGQSGYGVTKLDGIVEKVIRMKFAEIAAAPESEILNHQHKKEIELARIKLDQANAHLAEKQKDLSDYKAETLKVIRGQSNLSVELLNALVKETETMIALAQTRIDAAQTEYESLLASAENLRQEYDRLLTWADLFDTCSFEAKKMIVAQFVKAVRVSRDYNIEIDFNVSFEEFQNFSVKNGEPVILQPLRSHTA

SEQ ID NO: 2426 - protein, 544 aa, Unknown
  Description of Unknown: Integrase B2427 sequence
  PTHR30461:SF3,SM00857,G3DSA:1.10.10.2600,IPR036162,PF13408, IPR025827,PS51737,G3DSA:3.40.50.1390,IPR006119,IPR038109, PF07508,IPR011109,SSF53041,PF00239,PTHR30461, PS51736,Coil,cd00338
MPETPAKTVTVIPATITGPQVKRRSDLLRVAAYCRVSTDDKEQLTSYRNQIDFYTQKISSNPEWTMAGIYADEGITGTIARKRKEFNKLMAACRRGRVDLILTKSVSRFARNTLDCLTYVRMLKELGIGVLFEKENINTLKDSNETILTLCSALAQSESESMSGNITWSKRKAFRDGKVTFQYNRTLGYRRGADGKPEIIPEDARVIRRIFCSYLAGGSLGRICKELMEAGIKNSTGGDEWKASTLLYLLQNEKYCGDALLQKTFVSDCISKKVKKNNGELPQVYVKDNHPAIVSRELFNWVQEEIARRRSRPKATTKPSKTNLGKFSSQYALSELLCCGECGTPYRRVTWTSCDRKRIVWRCISRLESGKKICKSSPTIPEPVLHDAILRGMRLLLDNKAELLASIRDALNAALASSAEGDAPSIQRRIEEKNAAMMKLVQFAVESGATEDYFDAKFAELAAEIAALHAQAEKLEQSDVTRDTLQTRFGEMLKRLESEEPDLETYNDNLVRYYIESITVMSKTQINIRFKMGIEIAEELKYEE

SEQ ID NO: 2427 - protein, 544 aa, Unknown
  Description of Unknown: Integrase B2428 sequence
  PTHR30461:SF3,IPR036162,PS51737,IPR011109,PTHR30461, PF00239,G3DSA:1.10.10.2600,IPR006119,SSF53041,cd00338, SM00857,IPR025827,IPR038109,PS51736,mobidb-lite, PF13408,G3DSA:3.40.50.1390,PF07508,Coil
MNAVIYARFSSHSQREQSIEGQLRDCYEYAKRYDINIVGEYIDRAISGMTDDRPDFQRMIADAPKKQFERIIVWKLDRFARNRYDSALYKHKLKQYGIRVISAMENVGEGDESILLEALLEASAEYYSLDLKKKILRGQRETIAKGRWCGGPIPYGYKAVDGKLVADEKTAPIIRYVFEQYAQGVPMKEIIDELKRRGVRSSRGGELTYTTFSRALTNPVYIGNFMYKGELVPGVADALIDEDTYNKVQIIVKANAHAPAANKAKVEYLLQGKAFCGHCGSHMVGESGKSRNGDVYYYYSCAARKKAHKCRKKNEKKDFIEWYVVEQTLNYVLTPTRMRDIAKAVVAEYDKEFSGSKVQEYEKAIKQYERELDKLVDALVDAPKVAHKRIYEKMETLETQKASMENELVKLRIASEIRFTEEEVRAWLRRFCTGDLFDPEFRRNIIDTFINCIYLYDDRIIIFYNIKGGKQVSFVDLAESLDNESESSGSDLNANAPPEQVRIGLPVRIFCIQHGCAYQKSGRRGGPRFPHREWEMQEGAMAPP

SEQ ID NO: 2428 - protein, 544 aa, Unknown
  Description of Unknown: Integrase B2429 sequence
  SM00857,G3DSA:1.10.10.2600,IPR036162,PF13408,PS51737, IPR025827,G3DSA:3.40.50.1390,IPR006119,IPR038109,PF07508, IPR011109,SSF53041,PF00239,PTHR30461,Coil, cd00338
MAYRKITDIRDTIGMRAVFYARVSTAEEEQLNAIELQIEENRGCIKDHGWKLVGEYIDRSKSGTMVKGRDDYQRLYEDLYEDLFDIVVIKDQERLQRNTLDWYLFINRVVQTGKLLFMYMDGKFYSPDDALITGVRAIIAEEFSRNLSKKLHNYHDHRIEKARQGQEIALQGSGNVYGWDKKDGKYYINPEQAKVRRLMCEGIMARKGSTLIAKELNDAGYRNTVGKPWKPMDIPKFVYDCKNVGTMIINKERHDFESKQTIKLPKEEWVYVENALPPIVTQEEWDLICKIHEERVIATGSDKRGKKTSGYSFSGKLVCGICGAPYWRKQRVSKDEYWVCSTKQTKGRKTRKRDSTMGKAGEINPLGCDNENISYNSLMEIMGVVSERLQANTDTIKHDMINWLTKLRKQLLEANGGHTEADLQRELSRKSKLLDAYLDGILNKQEYQKKAEELDERIIQLKAETEKNKANSGDIAEIDKVLANIDEEVARYVDGNEKLKVEYLLEHLEQVQIFPDKVIVIVPILSEGIVVEKTQYVSREKRSR

SEQ ID NO: 2429 - protein, 544 aa, Unknown
  Description of Unknown: Integrase B2430 sequence
  SM00857,G3DSA:1.10.10.2600,IPR036162,PF13408,IPR025827, PS51737,G3DSA:3.40.50.1390,IPR006119,IPR038109,PF07508, SSF53041,IPR011109,PTHR30461,Coil,cd00338, PF00239
MAYRKITDIKDTIGMRAVFYARVSTAEEEQLNAIELQIEENRGCIKDHGWKLVGEYIDRSKSGTMVKGRDDYQRLYEDLYEDLFDIVVIKDQERLQRNTLDWYLFINRVVQTGKLLFMYMDGKFYSPDDALITGVRAIIAEEFSRNLSKKLHNYHDHRIEKARQGQEIALQGSGNVYGWDKKNGKYYINPEQAKVRRLMCEGIMARKGSTLIAKELNDAGYRNTVGKPWKPMDIPKFVYDCKNVGTMIINKERHDFESKQTIKLPKEEWVYVENALPPIVTQEEWDLICKIHEERVIATGSDRRGKKTSGYSFSGKLVCGICGAPYWRKQRVSKDEYWVCSTKQTKGRRTRKRDSTMGKAGEINPLGCDNENISYNSLMEIMGVVSERLQANTDTIKQDMINWLTKLRKQLIEANGGHTEADLQRELSRKSKLLDAYLDGILNKQEYQTKAEELDERIIQLKAETEKNKANSGDIAEIDKVLANIDEEVSRYVDGNEKLKVEYLLEHLEQVQIFPDKVIVIVPILSEGIVVEKTQYVSREKWRR

SEQ ID NO: 2430 - protein, 544 aa, Unknown
  Description of Unknown: Integrase B2431 sequence
  PTHR30461:SF3,SM00857,G3DSA:1.10.10.2600,IPR036162,PF13408, PS51737,G3DSA:3.40.50.1390,IPR025827,IPR006119,IPR038109, PF07508,IPR011109,SSF53041,PF00239,PTHR30461, PS51736,Coil,cd00338
MRVSVNLNAQKPDTTTNAVIYARYSSHGQTEQSIEGQLAKGHEYAAAQGYTVVHEYIDRAMTGRNDNREAFQKMLSDTGKHQFQVVIVWKVDRFGRNREEIAFNKHTCKKNGVRVEYVAESLPNSPEAVILESVLEGMAEYYSIQLSQNIRRGQLESAKKCQCVGGSVPLGYTLDSDKHFVIDPQTAPVVKKIFDLYAEGATISEITGQLNEQGIRTIRKQLFTKNSLTKLLKNEKYIGVYTYKDIVRVEGGVPAIVDKSTFDRVQELLKINRRAPSHTWTKVEYLLTDKLFCGHCGSPMVGESGFSHTGAKYSYYGCIKRRREKACDKKPVRQDWIEALVLDETVKLLHDDELMEYIIDRTWEYYQVTDKVQEEKAVLEAQLAEVDKAINNLVRAIEAGIFNAATKSRMDELDAQKAALTTSLADLELTSGIRITRDHIEYFLLRLRDLDVKDRECQKRLVQTFVNAVFVYDDGRVKITYNYSGQSSTITLNQIASAEKGKGFVCCLPCSTSSPRFPRGVAALFLFWGKNGCESATNFSCIVL

SEQ ID NO: 2431 - protein, 544 aa, Unknown
  Description of Unknown: Integrase B2432 sequence
  SM00857,G3DSA:1.10.10.2600,IPR036162,PF13408,IPR025827, G3DSA:3.40.50.1390,PS51737,IPR006119,IPR038109,PF07508, SSF53041,IPR011109,PTHR30461,Coil,cd00338, PF00239
MAYRKITDIRDTIGMRAVFYARVSTAEEEQLNAIELQIEENRGCIKDHGWKLVGEYIDRSKSGTMVKGRDDYQRLYEDLYEDLFDIVVIKDQERLQRNTLDWYLFINRVVQTGKLLFMYMDGKFYSPDDALITGVRAIIAEEFSRNLSKKLHNYHDHRIEKARQGQEIALQGSGNVYGWDKKDGKYYINPEQAKVRRLMCEGIMARKGSTLIAKELNDAGYRNTVGKPWKPMDIPKFVYDCKNVGTMIINKERHDFESKQTIKLPKEEWVYVENALPPIVTQEEWDLICKIHEERVIATGSDRRGKKTSGYSFSGKLVCGICGAPYWRKQRVSKDEYWVCSTKQTKGRRTRKRDSTMGKAGEINPLGCDNENISYNSLMEIMGVVSERLQANTDTIKQDMINWLTKLRKQLLEANGGHTEADLQRELSRKSKLLDAYLDGILNKQEYQKKAEELDERIIQLKAETEKNKANSGDIAEIDKVLANIDEEVSRYVDGNEKLKVEYLLEHLEQVQIFPDKVIVIVPILSEGIVVEKTQYVSREKRSR

SEQ ID NO: 2432 - protein, 544 aa, Unknown
  Description of Unknown: Integrase B2433 sequence
  PTHR30461:SF3,IPR036162,PS51737,IPR011109,PTHR30461, PF00239,G3DSA:1.10.10.2600,IPR006119,PF14287,SSF53041, IPR025378,SM00857,IPR025827,cd03770,IPR038109, PS51736,PF13408,G3DSA:3.40.50.1390,PF07508,Coil
MTNGQTRYNTALYLRLSKDDGTDSESSSIQTQKEMLTRYCRENGFAISQIYIDDGWIGTNTNRPSFQRMLSDIEDGKINCVITKDLSRLGRNYLETGSFTEIYFPEHNVRYIAVTDGVDTAKGSTMDITPFKNLLNDMYAQDISKKIKSSLITRQKQGKFIGTKAPYGYVKDPADKNHLLIDERFAPTVRYIFKMAKDGIGITQIARQLRSEKIPRPVAAAAEELECYDRYLTTEESIYKWSMGSVREILRNPVYKGAVRGQKRPKISLKNEKRKPVQSAGTFVVEGMHEPIIDPEEWELVQRLITSRKKTRKVEKKYDNIFSGLVKCADCGFAMTFTKAHRNWNSENIYANYDYQCNNYRMEGKSVCTHHRITALNLYNAVLADIKRLACEALGDDKQMISAIAARLGKSEKENVRQAERELKRANKRLSELDRLFAKLYEEHVNGKVNERNYNSLSASYENEQTELECRISELNAAIKTERENDENAVNFVDLIKQYTDIDELSQALLNTLIDRIEVHEPEDVDGELIQKLDVYYKFVGRLD

SEQ ID NO: 2433 - protein, 544 aa, Unknown
  Description of Unknown: Integrase B2434 sequence
  SM00857,G3DSA:1.10.10.2600,IPR036162,PF13408,IPR025827, G3DSA:3.40.50.1390,PS51737,IPR006119,IPR038109,PF07508, IPR011109,SSF53041,PTHR30461,Coil,cd00338, PF00239
MAYRKITDIRDTIGMRAVFYARVSTAEEEQLNAIELQIEENRGCIKDHGWKLVGEYIDRSKSGTMVKGRDDYQRLYEDLYEDLFDIVVIKDQERLQRNTLDWYLFINRVVQTGKLLFMYMDGKFYSPDDALITGVRAIIAEEFSRNLSKKLHNYHDHRIEKARQGQEIALQGSGNVYGWDKKDGKYYINSEQAKIRRLMCEGIMARKGSTLIAKELNDAGYRNTVGKPWKPMDIPKFVYDCKNVGTMIINKERHDFESKQTIKLPKEEWVYVENALPPIVTQEEWDLICKIHEERVIATGSDRRGKKTSGYSFSGKLVCGICGAPYWRKQRVSKDEYWVCSTKQTKGRRTRKRDSTMGKAGEINPLGCDNENISYNSLMEIMGVVSERLQANTDTIKHDMINWLTKLRKQLLEANGGHTEADLQRELSRKSKLLDAYLDGILNKQEYQKKAEELDERIIQLKAETEKNKANSGDIEEIDKVLANIDEEVSRYVDGNEKLKVEYLLEHLEQVQIFPDKVIVIVPILSEGIVVEKTQYVSREKWCW

SEQ ID NO: 2434 - protein, 544 aa, Unknown
  Description of Unknown: Integrase B2435 sequence
  PTHR30461:SF3,SM00857,G3DSA:1.10.10.2600,IPR036162,PF13408, PS51737,IPR025827,G3DSA:3.40.50.1390,IPR006119,IPR038109, PF07508,IPR011109,SSF53041,PF00239,PTHR30461, PS51736,Coil,cd00338
MRVSVNLNAQKPDTTTNAVIYARYSSHGQTEQSIEGQLAKGHEYAAAQGYTVVHEYIDRAMTGRNDNREAFQKMLSDTGKHQFQVVIVWKVDRFGRNREEIAFNKHTCKKNGVRVEYVAESLPNSPEAVILESVLEGMAEYYSIQLSQNIRRGQLESAKKCQCVGGSVPLGYTLDSDKHFVIDPQTAPVVKKIFDLYAEGATISEITGQLNEQGIRTARKQLFTKNSLTKLLKNEKYIGVYTYKDIVRVEGGVPAIVDESTFDRVQELLKINRRAPSHTWTKVEYLLTDKLFCGHCGSPMVGESGFSHTGAKYSYYGCIKRRREKACDKKPVRQDWIEALVLDETVKLLHDDELMEYIIDRTWEYYQVTDKVQEEKAVFEAQLAEVDKAINNLVRAIEAGIFNAATKSRMDELDAQKAALTASLADLELTSGIRITRDHIEYFLLRLRDLDVKDRECQKRLVQTFVNAVFVYDDGRVKITYNYSGKSSTITLNQIDGAEKGKGFVCCLPCSTSSPRFPRGVAALFLFWGKIGCESTTNFSCFVL

SEQ ID NO: 2435 - protein, 544 aa, Unknown
  Description of Unknown: Integrase B2436 sequence
  PTHR30461:SF3,SM00857,G3DSA:1.10.10.2600,IPR036162,PF13408, IPR025827,PS51737,G3DSA:3.40.50.1390,IPR006119,IPR038109, PF07508,SSF53041,IPR011109,PTHR30461,Coil, PS51736,cd00338,PF00239
MSMENCANTKPKITIIPAKTRVERLDPLSIAMGQKPKIRVAAYARVSTDHEEQESSYEAQVDHFTKLIASHDDWTMVDIYADPGLSGKNTKRVQFKRMIKDCEDGKIDLIITKSVSRFARNTLDCVQTARKLKADGIGIIFEKENLDTLQERSEFVLTIMASLAEEESRSISNNIRWSVKKKFQEGKVILNTKHFLGYTRDKKGTVLKIVPEEAITVRRIYAEFLDGKSLKEIAEGLERDGIASPSGRETWHPSTVKSILQNEKYKGDCHLQKTYLPDFLSPRRIKNEGFAQSWYVEDSHAAIISKETFDMVQQEFQNRQSLRSTGETGCGKFSGKYPFSGMIVCGECGETYRRHQQYNKYKKYYIWVCKRHENTGAEYCKSRPIKEEALEKAFVRALNELIGDKERILEKLQSATVSEITDSCATAINEVNAEIEKLQEQMMELLMKRNNGEITDKEYEQQSQQVGMQIDQLLMRKEEILSEQGKVQLASYRIEEVTKLLQTGKILEEFDRVMFKSLVRKITVLSNKEIEIEFECGITVRETL

SEQ ID NO: 2436 - protein, 544 aa, Unknown
  Description of Unknown: Integrase B2437 sequence
  PTHR30461:SF3,SM00857,G3DSA:1.10.10.2600,IPR036162,PF13408, PS51737,G3DSA:3.40.50.1390,IPR025827,IPR006119,IPR038109, PF07508,IPR011109,SSF53041,PF00239,PTHR30461, PS51736,Coil,cd00338
MRVSVNLNAQKPDTTTNAVIYARYSSHGQTEQSIEGQLAKGHEYAAAQGYTVVHEYIDRAMTGRNDNREAFQKMLSDTGKHQFQVVIVWKVDRFGRNREEIAFNKHTCKKNGVRVEYVAESLPNSPEAVILESVLEGMAEYYSIQLSQNIRRGQLESAKKCQCVGGSVPLGYTLDSDKHFVIDPQTAPVVKKIFDLYAEGATISEITGQLNEQGIRTARKQLFTKNSLTKLLKNEKYIGVYTYKDIVRVEGGVPAIVDESTFDRVQELLKINRRAPSHTWTKVEYLLTDKLFCGHCGSPMVGESGFSHTGAKYSYYGCIKRRREKACDKKPVRQDWIEALVLDETVKLLHDDELMEYIIDRTWEYYQVTDKVQEEKAVLEAQLAEVDKAINNLVRAIEAGIFNAATKSRMDELDAQKAALTASLADLELTSGIRITRDHIEYFLLRLRDLDVKDRECQKRLVQTFVNAVFIYDDGRVKITYNYSGQSSTITLNQIASAEKGKGFVCCLPCSTSSPRFPRGVAALFLFWGKNGCELTTNFSCFVL

SEQ ID NO: 2437 - protein, 544 aa, Unknown
  Description of Unknown: Integrase B2438 sequence
  cd03768,PTHR30461:SF3,SM00857,IPR036162,PF13408, PS51737,IPR025827,G3DSA:3.40.50.1390,IPR006119,PF07508, IPR011109,SSF53041,PTHR30461,PS51736,Coil, PF00239
MKVAIYSRKSKFTGKGDSIENQIEMCKNYIMTHFGADCEVIVYEDEGFSGGTIDRPQFKLMLQDAKRKRFDSLICYRLDRVSRNIADFSSLIEDLQTYNIGFISIKEQFDTTTPMGRAMMYISGVFAQLERETIAERIRDNMLQLAKTGRWLGGITPIGYESQEVITVDQNGKSRKSFKLSPLPDEINLVKLIFEKFLQLKSLTKVETYLIQNEIKTRNNVYFSRFALRTILNNPVYAIADELVYNYFIANGYEVYADKSSFDGLMGVMAYNKTLQKKNQSNKLRDANEWIIAIGAHEGIIAGIKWVQVQELIQENKSKTFRYVRGRDALLSGLLKCAHCGSYMRPKMGRVDKQGNQLFYYMCEMKEKSKRTKCSCKNAHGPQIDNAVEAYLKQLATSESDIRHKLKDGKLNVSSQNEFLANEIEIIKQKIKENTDQINNLVSTLSISQNTSAGKYIIDQINKLDDETSTLKESLLNLSKQMDLSEMKNNELQLIDDMINSFANTVDTLELEEKRKLLRAFISQVVWDGNNIDIILFGSKPIDK

SEQ ID NO: 2438 - protein, 544 aa, Unknown
  Description of Unknown: Integrase B2439 sequence
  SM00857,G3DSA:1.10.10.2600,IPR036162,PF13408,IPR025827, PS51737,G3DSA:3.40.50.1390,IPR006119,IPR038109,PF07508, SSF53041,IPR011109,PTHR30461,Coil,cd00338, PF00239
MAYRKITDIRDTIGMRAAFYARVSTAEEEQLNAIELQIEENRGCIKDHGWKLVGEYIDRSKSGTMVKGRDDYQRLYEDLYEDLFDIVVIKDQERLQRNTLDWYLFINRVVQTGKLLFMYMDGKFYSPDDALITGVRAIIAEEFSRNLSKKLHNYHDHRIEKARQGQEIALQGSGNVYGWDKKDGKYYINPEQAKVRRLMCEGIMARKGSTLIAKELNDAGYRNTVGKPWKPMDIPKFVYDCKNVGTMIINKERHDFESKQTIKLPKEEWVYVENALPPIVTQEEWDLICKIHEERVIATGSDRRGKKTSGYSFSGKLVCGICGAPYWRKQRVSKDEYWVCSTKQTKGRRTRKRDSTMGKAGEINPLGCDNENISYNSLMEIMGVVSERLQANTDTIKQDMINWLTKLRKQLLEANGGHTEVDLQRELSRKSKLLDAYLDGILNKQEYQKKAEELDERIIQLKAETEKNKANSGDIAEIDKVLANIDEEVSRYIDGNEKLKVEYLLEHLEQVQIFPDKVIVIVPILSEGIVVDKTQYVSREKWCR

SEQ ID NO: 2439 - protein, 544 aa, Unknown
  Description of Unknown: Integrase B2440 sequence
  PTHR30461:SF3,SM00857,G3DSA:1.10.10.2600,IPR036162,PF13408, PS51737,G3DSA:3.40.50.1390,IPR025827,IPR006119,IPR038109, PF07508,IPR011109,SSF53041,PF00239,PTHR30461, PS51736,Coil,cd00338
MRVSVNLNAQKPDTTTNAVIYARYSSHGQTEQSIEGQLAKGHEYAAAQGYTVVHEYIDRAMTGRNDNREAFQKMLSDTGKHQFQVVIVWKVDRFGRNREEIAFNKHTCKKNGVRVEYVAESLPNSPEAVILESVLEGMAEYYSIQLSQNIRRGQLESAKKCQCVGGSVPLGYTLDSDKHFVIDPQTAPVVKKIFDLYAEGATISEITGQLNEQGIRTARKQLFTKNSLTKLLKNEKYIGVYTYKDIVRVEGGVPAIVDESTFDRVQELLKINRRAPSHTWTKVEYLLTDKLFCGHCGSPMVGESGFSHTGAKYSYYGCIKRRREKACDKKPVRQDWIEALVLDETVKLLHDDELMEYIIDRTWEYYQVTDKVQEEKAVLEAQLAEVDKAINNLVRAIEAGIFNAATKSRMDELDAQKAALTASLADLELTSGIRITRDHIEYFLLRLRDLDVKDRECQKRLVQTFVNAVFIYDDGRVKITYNYSGQSSTITLNQIASAEKGKGFVCCLPCSTSSPRFPRGVAALFLFWGKNGCESTTNFSCIVL

SEQ ID NO: 2440 - protein, 544 aa, Unknown
  Description of Unknown: Integrase B2441 sequence
  PTHR30461:SF3,SM00857,G3DSA:1.10.10.2600,IPR036162,PF13408, IPR025827,PS51737,G3DSA:3.40.50.1390,IPR006119,IPR038109, PF07508,SSF53041,IPR011109,PF00239,PTHR30461, PS51736,Coil,cd00338
METAVTAPRQKTVTKIEANPALASRKNSNRPLNVAAYCRVSTDAEDQINSYRAQVSYYTEHINQNPKWRFVNVYADEGITGTMVKKRDGFLKMIRDCEKGKIDMILTKSVSRFARNIVDSISYVRKLKAMGIGIYFEEQNIDSLKEDSETYIGIYSVMAQSESENISANISWGIRKRMQNGTYACRFNMLGYRKEKGETEPRIIPEEAEVVRNIFKMYDEGHSLDQIKAYLESKSIKTPTGKPVWSKENIRKMLTNEKYVGDVIYQKTYRTDCISKHTKINRGERTKYLVSNNHPAIVDRDLFNAVQAELVRRSSKRKTSDKTLTSLGKYSGKYALSELLICAECGSPYKRKTWTQGDEKRIYWRCLSRIEHGKKYCPYSKGLEENKLHSAICRALKAAMNENAEALALIKANLAYAVTGDEANLDLGAIEKRIKEATKEMENYMASYRNTGGDKTRYLECIQKVADEIKSLRDQEATAKAKLEKSTEVNSEIKRLCDWLDSHDTSFSEYDDMVIRRVVECIKVFKDGTIKVITKFGTEATETV

SEQ ID NO: 2441 - protein, 544 aa, Unknown
  Description of Unknown: Integrase B2442 sequence
  PTHR30461:SF3,SM00857,G3DSA:1.10.10.2600,IPR036162,PF13408, IPR025827,G3DSA:3.40.50.1390,PS51737,IPR006119,IPR038109, PF07508,IPR011109,SSF53041,PF00239,PTHR30461, PS51736,Coil,cd00338
MPAEINFNLPGNKKSEHNSRDKIAVVYARYSSHSQTEQSIEGQLAAAQAYAAAHDYTIVHEYIDRAKSGRTDSREQFQAMLHDTAKKQFGVILVWKVDRFGRNREELTINKLKCKKNGVRVEYIAEKIPDSPEGVILESVLEGFAEYYSLQLSQNVRRGRAESAEKCQVLGGTNLLGYSTGPDKKYVIDPNTAPTVKMIFEMYASGSTTPEIVRHLNSLGLRSSRGTPFTKNSLCGILKNEKYTGVYTYKDKRIPGGIPRIIDDETFQKVQALLKVNKRAPSHKWSRAEYILTDKLFCGKCGSPMAGESGTSHTGAKHNYYLCTKHKRQGKSACDKKAIRQEQIEDAVLNAAIELVSNDELIDFITDCTWEYYQKQDFTKAEVEALQKELSRVEAAIKNLLHAIELGIFNEATKARMDELTAQQKELTASIAEKELASGFRLTRDHIKYFLGQFKNKNYKDRECQKQLINTFVNSVFLYDDHIDLNFNYSGGSRTLSLTESEEKGGSEGFVCCLPCSTITRTYEPNIVWFGHVFKIRIRLPESY

SEQ ID NO: 2442 - protein, 544 aa, Unknown
  Description of Unknown: Integrase B2443 sequence
  SM00857,G3DSA:1.10.10.2600,IPR036162,PF13408,PS51737, IPR025827,G3DSA:3.40.50.1390,IPR006119,IPR038109,PF07508, IPR011109,SSF53041,PTHR30461,Coil,cd00338, PF00239
MAYRKITDIRDTIGMRAVFYARVSTAEEEQLNAIELQIEENRGCIKDHGWKLVGEYIDRSKSGTMVKGRDDYQRLYEDLYEDLFDIVVIKDQERLQRNTLDWYLFINRVVQTGKLLFMYMDGKFYSPDDALITGVRAIIAEEFSRNLSKKLHNYHDHRIEKARQGQEIALQGSGNVYGWDKKDGKYYINQEQAKVRRLMCEGIMARKGSTLIAKELNEAGYRNTVGKPWKPMDIPKFVYDCKNVGTMIINKERHDFESKQTIKLPKEEWVYVENALPPIVTQEEWDLICKIHEERVIATGSDRRGKKTSGYSFSGKLVCGICGAPYWRKQRVSKDEYWVCSTKQTKGRRTRKRDSTMGKAGEINPLGCDNENISYNSLMEIMGVVSERLQANTDTIKQDMINWLTKLRKQLLEANGGHTGADLQRELSRKSKLLDAYLDGILNKQEYQIKAEELDERIIQLKAETEKNKANSGDIAEIDKVLANIDEEVSRYVDGNEKLKVEYLLEHLEQVQIFPDKVIVIVPILSEGIVVEKTQYVSREKWSR

SEQ ID NO: 2443 - protein, 544 aa, Unknown
  Description of Unknown: Integrase B2444 sequence
  SM00857,G3DSA:1.10.10.2600,IPR036162,PF13408,IPR025827, G3DSA:3.40.50.1390,PS51737,IPR006119,IPR038109,PF07508, SSF53041,IPR011109,PTHR30461,Coil,cd00338, PF00239
MAYRKITDIKDTIGMRAVFYARVSTAEEEQLNAIELQIEENRGCIKDHGWKLVGEYIDRSKSGTMVKGRDDYQRLYEDLYEDLFDIVVIKDQERLQRNTLDWYLFINRVVQTGKLLFMYMDGKFYSPDDALITGVRAIIAEEFSRNLSKKLHNYHDHRIEKARQGQEIALQGSGNVYGWDKKDGKYYINPEQAKVRRLMCEGIMARKGSTLIAKELNDAGYRNTVGKPWKPMDIPKFVYDCKNVGTMIINKERHDFESKQTIKLPKEEWVYVENALPPIVTQEEWDLICKIHEERVIATGSDRRGKKTSGYSFSGKLVCGICGAPYWRKQRVSKDEYWVCSTKQTKGRRTRKRDSTMGKAGEINPLGCDNENISYNSLMEIMGVVSERLQANTDTIKHDMINWLTKLRKQLLEANGGHTEADLQRELSRKSKLLDAYLDGILNKQEYQKKAEELDERIIQLKAETEKNKANSGDIAEIDKVLANIDEEVSRYVDGNEKLKVEYLLEHLEQVQIFPDKVIVIVPILSEGIVVEKTQYVSREKWGR

SEQ ID NO: 2444 - protein, 544 aa, Unknown
  Description of Unknown: Integrase B2445 sequence
  SM00857,G3DSA:1.10.10.2600,IPR036162,PF13408,IPR025827, G3DSA:3.40.50.1390,PS51737,IPR006119,IPR038109,PF07508, SSF53041,IPR011109,PTHR30461,Coil,cd00338, PF00239
MAYRKITDIRDTIGMRAVFYARVSTAEEEQLNAIELQIEENRGCIKDHGWKLVGEYIDRSKSGTMVKGRDDYQRLYEDLYEDLFDIVVIKDQERLQRNTLDWYLFINRVVQTGKLLFMYMDGKFYSPDDALITGVRAIIAEEFSRNLSKKLHNYHDHRIEKARQGQEIALQGSGNVYGWDKKDGKYYINPEQAKVRRLMCEGIMARKGSTLIAKELNDAGYRNTVGKPWKPMDIPKFVYDCKNVGTMIINKERHDFESKQTIKLPKEEWVYVENALPPIVTQEEWDLICKIHEERVIATGSDRRGKKTSGYSFSGKLVCGICGAPYWRKQRVSKDEYWVCSTKQTKGRRTRKRDSTMGKAGEINPLGCDNENISYNSLMEIMGVVSERLQANTDTIKQDMINWLTKLRKQLLEANGGHTEADLQRELSRKSKLLDAYLDGILNKQEYQTKAEELDERIIQLKAETEKNKANSGDIAEIDKVLANIDEEVSRYVDGNEKLKVEYLLEHLEQVQIFPDKVIVIVPILSEGIVVEKAQYVSREKWIR

SEQ ID NO: 2445 - protein, 544 aa, Unknown
  Description of Unknown: Integrase B2446 sequence
  PTHR30461:SF3,SM00857,G3DSA:1.10.10.2600,IPR036162,PF13408, IPR025827,G3DSA:3.40.50.1390,PS51737,IPR006119,IPR038109, PF07508,SSF53041,IPR011109,PF00239,PTHR30461, PS51736,Coil,cd00338
MSATIPSLMQAPRAFGYCRKSTNEQREESLEAQQRAIVTFAATAGYELVQVYKDHGNSGRRGERPEFQRMLADAAAAGVQYIIVHKLDRFFRNADQQTVVEMQLRRQGIQVISAAEHFDATPQGQFMRNVTKAINQWYSANLAQEVAKGLRENALTARTTGGPPPLGYTVDKSTGQYAIVPREAEAVQLIFKLYQQGAGYTEIIDALNAGGYVTRRGQPFGKNSLYDILRNEKYTGLYIWNRLAPADVDGRTSRRRLKPRDEWVCVENGMPQIIPTEQWQAVQDEMDKRKHRNAQYKAKAFYLLSGLVYCGGCGGVMSGEMHRYNSHGKAVEYRYYRCTAQHRQHDGGAHAHRVNADRLENAVIDYIQHIVLDPVNMDALCVAVLEALQPDGRNAERAKELKQEAGIIQQKVDRLYQAIENGLDAAGAIERINALQKQRMTLLAQANDLDISAESAAASVDELRRVWSGINLRELQPEKMRVIVRDLIYKIVVFDDGPRGSRLRIILNPARLNPSAIPKAIETMPFSELQNFSHTGGSGLPLPR

SEQ ID NO: 2446 - protein, 544 aa, Unknown
  Description of Unknown: Integrase B2447 sequence
  SM00857,G3DSA:1.10.10.2600,IPR036162,PF13408,IPR025827, G3DSA:3.40.50.1390,PS51737,IPR006119,IPR038109,PF07508, SSF53041,IPR011109,PTHR30461,Coil,cd00338, PF00239
MAYRKITDIKDTIGMRAVFYARVSTAEEEQLNAIELQIEENRGCIKDHGWKLVGEYIDRSKSGTMVKGRDDYQRLYEDLYEDLFDIVVIKDQERLQRNTLDWYLFINRVVQTGKLLFMYMDGKFYSPDDALITGVRAIIAEEFSRNLSKKLHNYHDHRIEKARQGQEIALQGSGNVYGWDKKDGKYYINPEQAKVRRLMCEGIMARKGSTLIAKELNDAGYRNTVGKPWKPMDIPKFVYDCKNVGTMIINKERHDFESKQTIKLPKEEWVYVENALPPIVTQEEWDLICKIHEERVIATGSDRRGKKTSGYSFSGKLVCGICGAPYWRKQRVSKDEYWVCSTKQTKGRRTRKRDSTMGKAGEINPLGCDNENISYNSLMEIMGVVSERLQANTDTIKHDMINWLTKLRKQLLEANGGHTEADLQRELSRKSKLLDAYLDGILNKQEYQKKAEELDERIIQLKAETEKNKANSGDIEEIDKVLANIDEEVSRYVDGNEKLKVEYLLEHLEQVQIFPDKVIVIVPILSEGIVVEKTQYVSREKWIW

SEQ ID NO: 2447 - protein, 544 aa, Unknown
  Description of Unknown: Integrase B2448 sequence
  SM00857,G3DSA:1.10.10.2600,IPR036162,PF13408,PS51737, G3DSA:3.40.50.1390,IPR025827,IPR006119,IPR038109,PF07508, SSF53041,IPR011109,PTHR30461,Coil,cd00338, PF00239
MAYRKITDIKDTIGMRAVFYARVSTAEEEQLNAIELQIEENRGCIKDHGWKLVGEYIDRSKSGTMVKGRDDYQRLYEDLYEDLFDIVVIKDQERLQRNTLDWYLFINRVVQTGKLLFMYMDGKFYSPDDALITGVRAIIAEEFSRNLSKKLHNYHDHRIEKARQGQEIALQGSGNVYGWDKKDGKYYINPEQAKVRRLMCEGIMARKGSTLIAKELNDAGYRNTVGKPWKPMDIPKFVYDCKNVGTMIINKERHDFESKQTIKLPKEKWVYVENALPPIVTQEEWDLICKIHEERVIATGSDKRGKKTSGYSFSGKLVCGICGAPYWRKQRVSKDEYWVCSTKQTKGRKTRKRDSTMGKAGEINPLGCDNENISYNSLMEIMGVVSERLQANTDTIKQDMINWLTKLRKQLLEANGGHTEADLQRELSRKSKLLDAYLDGILNKQEYQKKAEELDERIIQLKAETEKNKANSGDIAEIDKVLANIDEEVARYVDGNEKLKVEYLLEHLEQVQIFPDKVIVIVPILSEGIVVEKTQYVSREKRSR

SEQ ID NO: 2448 - protein, 544 aa, Unknown
  Description of Unknown: Integrase B2449 sequence
  PTHR30461:SF3,SM00857,G3DSA:1.10.10.2600,IPR036162,PF13408, IPR025827,PS51737,G3DSA:3.40.50.1390,IPR006119,IPR038109, PF07508,SSF53041,IPR011109,PTHR30461,Coil, PS51736,cd00338,PF00239
MSMENCANTKPKITIIPAKTRVERLDPLSIAMGQKPKIRVAAYARVSTDHEEQESSYEAQVDHFTKLIASHDDWTMVDIYADPGLSGKNTKRVQFKRMIKDCEDGKIDLIITKSVSRFARNTLDCVQTARKLKADGIGIIFEKENLDTLQERSEFVLTIMASLAEEESRSISNNIRWSVKKKFQEGKVILNTKHFLGYTRDKKGTVLKIVPEEAITVRRIYAEFLDGKSLKEIAEGLERDGIASPSGRETWHPSTVKSILQNEKYKGDCHLQKTYLPDFLSPRRIKNEGFAQSWYVEDSHAAIISKETFDMVQQEFQNRQSLRSTGETGCGKFSGKYPFSGMIVCGECGETYRRHQQYNKYKKYYIWVCKRHENTGAEYCKSRPIKEEALEKAFVRALNELIGDKEQILEKLQSATVSEITDSCATAINEVNAEMEKLQEQMMELLMKRNNGEITDKEYEQQSQQVGMKIDQLLMRKEEILSEQGKVQLASYRIEEVTKLLQTGKILEEFDRVMFKSLVRKITVLSNKEIEIEFECGITVRETL

SEQ ID NO: 2449 - protein, 544 aa, Unknown
  Description of Unknown: Integrase B2450 sequence
  SM00857,G3DSA:1.10.10.2600,IPR036162,PF13408,PS51737, G3DSA:3.40.50.1390,IPR025827,IPR006119,IPR038109,PF07508, SSF53041,IPR011109,PTHR30461,Coil,cd00338, PF00239
MAYRKITDIRDTIGMRAVFYARVSTAEEEQLNAIELQIEENRGCIKDHGWKLVGEYIDRSKSGTMVKGRDDYQRLYEDLYEDLFDIVVIKDQERLQRNTLDWYLFINRVVQTGKLLFMYMDGKFYSPDDALITGVRAIIAEEFSRNLSKKLHNYHDHRIEKARQGQEIALQGSGNVYGWDKKDGKYYINPEQAKVRRLMCEGIMARKGSTLIAKELNDAGYRNTVGKPWKPMDIPKFVYDCKNVGTMIINKERHDFESKQTIKLPKEEWVYVENALPPIVTQEEWDLICKIHEERVIATGSDRRGKKTSGCSFSGKLVCGICGAPYWRKQRVSKDEYWVCSTKQTKGRRTRKRDSTMGKAGEINPLGCDNENISYNFLMEIMGVVSERLQANTDTIKHDMINWLTKLRKQLLEANGGHTEADLQRELSRKSKLLDAYLDGILNKQEYQKKAEELDERIIQLKAETEKNKANSGDIAEIDKVLANIDEEVSRYVDGNEKLKVEYLLEHLEQVQIFPDKVIVIVPILSEGIVVEKTQYVSREKWRW

SEQ ID NO: 2450 - protein, 544 aa, Unknown
  Description of Unknown: Integrase B2451 sequence
  SM00857,G3DSA:1.10.10.2600,IPR036162,PF13408,PS51737, IPR025827,G3DSA:3.40.50.1390,IPR006119,IPR038109,PF07508, SSF53041,IPR011109,PTHR30461,Coil,cd00338, PF00239
MAYRKITDIRDTIGMRAVFYARVSTAEEEQLNAIELQIEENRGCIKDHGWKLVGEYIDRSKSGTMVKGRDDYQRLYEDLYEDLFDIVVIKDQERLQRNTLDWYLFINRVVQTGKLLFMYMDGKFYSPDDALITGVRAIIAEEFSRNLSKKLHNYHDHRIEKARQGQEIALQGSGNVYGWDKKDGKYYINPEQAKVRRLMCEGIMARKGSTLIAKELNEAGYRNTVGKLWKPMDIPKFVYDCKNVGTMIINKERHDFESKQTIKLPKEEWVYVENALPPIVTQEEWDLICKIHEERVIATGSDRRGKKTSGYSFSGKLVCGICGAPYWRKQRVSKDEYWVCSTKQTKGRRTRKRDSTMGKAGEINPLGCDNENISYNSLMEIMGVVSERLQANTDTIKHDMINWLTKLRKQLLEANGGHTEADLQRELSRKSKLLDAYLDGILNKQEYQKKAEELDERIIQLKAETEKNKANSGDIAEIDKVLANIDEEVSRYVDGNEKLKVEYLLEHLEQVQIFPDKVIVIVPILSEGIVVEKAQYVSREKRGR

SEQ ID NO: 2451 - protein, 544 aa, Unknown
  Description of Unknown: Integrase B2452 sequence
  PTHR30461:SF3,SM00857,G3DSA:1.10.10.2600,IPR036162,PF13408, PS51737,G3DSA:3.40.50.1390,IPR025827,IPR006119,IPR038109, PF07508,IPR011109,SSF53041,PF00239,PTHR30461, PS51736,Coil,cd00338
MRVSVNLNAQKPDTTTNAVIYARYSSHGQTEQSIEGQLAKGHEYAAAQGYTVVHEYIDRAMTGRNDNREAFQKMLSDTGKHQFQVVIVWKVDRFGRNREEIAFNKHTCKKNGVRVEYVAESLPNSPEAVILESVLEGMAEYYSIQLSQNIRRGQLESAKKCQCVGGSVPLGYTLDSDKHFVIDPQTAPVVKKIFDLYAEGATISEITGQLNEQGIRTARKQLFTKNSLTKLLKNEKYIGVYTYKDIVRVEGGVPAIVDESTFDRVQELLKINRRAPSHTWTKVEYLLTDKLFCGHCGSPMVGESGFSHTGAKYSYYGCIKRRREKACDKKPVRQDWIEALVLDETVKLLHDDELMEYIIDRTWEYYQVTDKVQEEKAVLEAQLAEVDKAINNLVRAIEAGIFNAATKSRMDELDAQKAALTASLADLELTSGIRITRDHIEYFLLRLRDLDVKDRECQKRLVQTFVNAVFIYDDGRVKITYNYSGQSSTITLNQIASAEKGKGFVCCLPCSTSSPRFPRGVAALFLFWGKNGCESTTNFSCIVQ

SEQ ID NO: 2452 - protein, 544 aa, Unknown
  Description of Unknown: Integrase B2453 sequence
  SM00857,G3DSA:1.10.10.2600,IPR036162,PF13408,PS51737, G3DSA:3.40.50.1390,IPR025827,IPR006119,IPR038109,PF07508, SSF53041,IPR011109,PTHR30461,Coil,cd00338, PF00239
MAYRKITDIRDTIGMRAVFYARVSTAEEEQLNAIELQIEENRGCIKDHGWKLVGEYIDRSKSGTMVKGRDDYQRLYEDLYEDLFDIVVIKDQERLQRNTLDWYLFINRVVQTGKLLFMYMDGKFYSPDDALITGVRAIIAEEFSRNLSKKLHNYHDHRIEKARQGQEIALQGSGNVYGWDKKDGKYYINPEQAKVRRLMCEGIMARKGSTLIAKELNDAGYRNTVGKPWKPMDIPKFVYDCKNVGTMIINKERHDFESKQTIKLPKEEWVYVENALPPIVTQEEWDLICKIHEERVIATGSDRRGKKTSGYSFSGKLVCGICGAPYWRKQRVSKDEYWVCSTKQTKGRKTRKRDSTMGKAGEINPLGCDNENISYNSLMEIMGVVSERLQANTDTIKQDMINWLTKLRKQLLEANGGHTEADLQRELSRKSKLLDAYLDGILNKQEYQKKAEELDERIIQLKTETEKNKANSGDIAEIDKVLANIDEEVARYVDGNEKLKVEYLLEHLEQVQIFPDKVIVIVPILSEGIVVEKTQYVSREKRSR

SEQ ID NO: 2453 - protein, 544 aa, Unknown
  Description of Unknown: Integrase B2454 sequence
  SM00857,G3DSA:1.10.10.2600,IPR036162,PF13408,IPR025827, PS51737,G3DSA:3.40.50.1390,IPR006119,IPR038109,PF07508, IPR011109,SSF53041,PF00239,PTHR30461,Coil, cd00338
MAYRRITDIRDTIGMRAVFYARVSTAEEEQLNAIELQIEENRGCIKDHGWKLVGEYIDRSKSGTMVKGRDDYQRLYEDLYEDLFDIVVIKDQERLQRNTLDWYLFINRVVQTGKLLFMYMDGKFYSPDDALITGVRAIIAEEFSRNLSKKLHNYHDHRIEKARQGQEIALQGSGNVYGWDKKDGKYYINPEQAKVRRLMCEGIMARKGSTLIAKELNDAGYRNTVGKPWKPMDIPKFVYDCKNVGTMIINKERHDFESKQTIKLPKEEWVYVENALPPIVTQEEWDLICKIHEERVIATGSDRRGKKTSGYSFSGKLVCGICGAPYWRKQKVSKDEYWVCSTKQTKGRRTRKRDSTMGKAGEINPLGCDNENISYNSLMEIMGVVSERLQANTDTIKRDMINWLTKLRKQLLEANGGHTEADLQREFSRKSKLLDAYLDGILNKQEYQKKAEELDERIIQLKAETEKNKANSGDIAEIDKVLANIDEEVSRYVDGNEKLKVEYLLEHLEQVQIFPDKVIVIVPILSEGIVVEKTQYVSREKWRW

SEQ ID NO: 2454 - protein, 544 aa, Unknown
  Description of Unknown: Integrase B2455 sequence
  PTHR30461:SF3,SM00857,G3DSA:1.10.10.2600,IPR036162,PF13408, PS51737,G3DSA:3.40.50.1390,IPR025827,IPR006119,IPR038109, PF07508,IPR011109,SSF53041,PF00239,PTHR30461, PS51736,Coil,cd00338
MRVSVNLNAQKPDTTTNAVIYARYSSHGQTEQSIEGQLAKGHEYAAAQGYTVVHEYIDRAMTGRNDNREAFQKMLSDTGKHQFQVIIVWKVDRFGRNREEIAFNKHTCKKNGVRVEYVAESLPNSPEAVILESVLEGMAEYYSIQLSQNIRRGQLESAKKCQCVGGSVPLGYTLDSDKHFVIDPQTAPVVKKIFDLYAEGATISEITGQLNEQGIRTIRKQLFTKNSLTKLLKNEKYIGVYTYKDIVRVEGGVPAIVDKSTFDRVQELLKINRRAPSHTWTKVEYLLTDKLFCGHCGSPMVGESGFSHTGAKYSYYGCIKRRREKACDKKPVRQDWIEALVLDETVKLLHDDELMEYIIDRTWEYYQVTDKVQEEKAVLEAQLAEVDKAINNLVRAIEAGIFNAATKSRMDELDAQKAALTASLADLELTSGIRITRDHIEYFLLRLRDLDVKDRECQKRLVQTFVNAVFIYDDGRVKITYNYSGQSSTITLNQIASAEKGKGFVCCLPCSTFSPRFPRGVAALFLFWGKNGCESATNFSCIVL

SEQ ID NO: 2455 - protein, 544 aa, Unknown
  Description of Unknown: Integrase B2456 sequence
  PTHR30461:SF3,cd00338,SM00857,G3DSA:1.10.10.2600,IPR036162, PF13408,PS51737,IPR025827,G3DSA:3.40.50.1390,IPR006119, IPR038109,PF07508,IPR011109,SSF53041,PTHR30461, PS51736,Coil,PF00239
MSMENCANTKPKITIIPAKTRVERLDPLSIAMGQKPKIRVAAYARVSTDHEEQESSYEAQVDHFTKLIASHDDWTMVDIYADPGLSGKNTKRVQFKRMIKDCEDGKIDLIITKSVSRFARNTLDCVQTARKLKADGIGIIFEKENLDTLQERSEFVLTIMASLAEEESRSISNNIRWSVKKKFQEGKVILNTKHFLGYTRDKKGTVLKIVPEEAITVRRIYAEFLDGKSLKEIAEGLERDGIASPSGRETWHPSTVKSILQNEKYKGDCHLQKTYLPDFLSPRRIKNEGFAQSWYVEDSHAAIISKETFDMVQQEFQNRQSLRSTGETGCGKFSGKYPFSGMIVCGECGETYRRHQQYNKYKKYYIWVCKRHENTGAEYCKSRPIKEEALEKAFVRALNELIGDKERILEKLQSATVSEITDSCASAINEVNAEIEKLQEQMMELLMKRNNGEVTDKEYEQQSQQVGMKIDQLLMRKEEILSEQGKVQLASYRIEEVTKLLQTGKILEEFDRVMFKSLVRKITVLSNKEIEIEFECGITVRETL

SEQ ID NO: 2456 - protein, 544 aa, Unknown
  Description of Unknown: Integrase B2457 sequence
  SM00857,G3DSA:1.10.10.2600,IPR036162,PF13408,IPR025827, PS51737,G3DSA:3.40.50.1390,IPR006119,IPR038109,PF07508, SSF53041,IPR011109,PTHR30461,Coil,cd00338, PF00239
MAYRKITDIRDTIGMRAVFYARVSTAEEEQLNAIELQIEENRGCIKEHGWKLVGEYIDRSKSGTMVKGRDDYQRLYEDLYEDLFDIVVIKDQERLQRNTLDWYLFINRVVQTGKLLFMYMDGKFYSPDDALITGVRAIIAEEFSRNLSKKLHNYHDHRIEKARQGHEIALQGSGNVYGWDKKDGKYYINPEQAKVRRLMCEGIMARKGSTLIAKELNNAGYRNTVGKPWKPMDIPKFVYDCKNVGTMIINKERHDFESKQTIKLPKEEWVYVENALPPIVTQEEWDLICKIHEERVIATGSDRRGKKTSGYSFSGKLVCGICGAPYWRKQRVSKDEYWVCSTKQTKGRRTRKRDSTMGKAGEINPLGCDNENISYNSLMEIMGVVSERLQANTDTIKHDMINWLTKLRKQLLEANGGHTEADLQRELSRKSKLLDAYLDGILNKQEYQKKAEELDERIIQLKSETEKNKANSGDIAEIDKVLANIDEEVSRYVDGNEKLKVEYLLEHLEQVQIFPDKVIVIVPILSEGIVVEKAQYVSREKWRW

SEQ ID NO: 2457 - protein, 544 aa, Unknown
  Description of Unknown: Integrase B2458 sequence
  PTHR30461:SF3,SM00857,G3DSA:1.10.10.2600,IPR036162,PF13408, PS51737,G3DSA:3.40.50.1390,IPR025827,IPR006119,IPR038109, PF07508,SSF53041,IPR011109,PTHR30461,Coil, PS51736,cd00338,PF00239
MSMENCANTKPKITIIPAKTRVERLDPMSVAMGQKPKIRVAAYARVSTDHEEQESSYEAQVDHFTKLIASHDDWTMVDIYADPGLSGKNTKRVQFKRMIKDCEDGKIDLIITKSVSRFARNTLDCVQTARKLKADGIGIIFEKENLDTLQERSEFVLTIMASLAEEESRSISNNIRWSVKKKFQEGKVILNTKHFLGYTRDKKGTVLKIVPEEAITVRRIYAEFLDGKSLKEIAEGLERDGIASPSGRETWHPSTVKSILQNEKYKGDCHLQKTYLPDFLSPRRIKNEGFAQSWYVEDSHAAIISKETFDMVQQEFQNRQSLRSTGETGCGKFSGKYPFSGMIVCGECGETYRRHQQYNKYKKYYIWVCKRHENNGAEYCKSRPIKEEALEKAFVRALNELIGDKERILEKLQSATVSEITDSCATAINEVNAEIEKLQEQMMELLMKRNNGEITDKEYEQQSQQVGMKIDQLLMRKEEILSEQGKVQLASYRIEEVTKLLQTGKILEEFDRVMFKSLVRKITVLSNKEIEIEFECGITVRETL

SEQ ID NO: 2458 - protein, 544 aa, Unknown
  Description of Unknown: Integrase B2459 sequence
  PTHR30461:SF3,SM00857,G3DSA:1.10.10.2600,IPR036162,PF13408, PS51737,G3DSA:3.40.50.1390,IPR025827,IPR006119,IPR038109, PF07508,SSF53041,IPR011109,PTHR30461,Coil, PS51736,cd00338,PF00239
MSMENCANTKPKITIIPAKTRVERLDPMSIAMGQKPKIRVAAYARVSTDHEEQESSYEAQVDHFTKLIASHDDWTMVDIYADPGLSGKNTKRVQFKRMIKDCEDGKIDLIITKSVSRFARNTLDCVQTARKLKADGIGIIFEKENLDTLQERSEFVLTIMASLAEEESRSISNNIRWSVKKKFQEGKVILNTKHFLGYTRDKKGTVLKIVPEEAITVRRIYAEFLDGKSLKEIAEGLERDGIASPSGRETWHPSTVKSILQNEKYKGDCHLQKTYLPDFLSPRRIKNEGFAQSWYVEDSHAAIISKETFDMVQQEFQNRQSLRSTGETGCGKFSGKYPFSGMIVCGECGETYRRHQQYNKYKKYYIWVCKRHENNGAEYCKSRPIKEEALEKAFVRALNELIGDKERILEKLQSATVSEITDSCATAINEVNAEMEKLQEQMMELLMKRNNGEITDKEYEQQSQQVGMQIDQLLMRKEEILSEQGKVQLASYRIEEVTKLLQTGKILEEFDRVMFKSLVRKITVLSNKEIEIEFECGITVRETL

SEQ ID NO: 2459 - protein, 544 aa, Unknown
  Description of Unknown: Integrase B2460 sequence
  PTHR30461:SF3,SM00857,G3DSA:1.10.10.2600,IPR036162,PF13408, PS51737,G3DSA:3.40.50.1390,IPR025827,IPR006119,IPR038109, PF07508,IPR011109,SSF53041,PF00239,PTHR30461, PS51736,Coil,cd00338
MRVSVNLNAQKPDTTTNAVIYARYSSHGQTEQSIEGQLAKGHEYAAAQGYTVVHEYIDRAMTGRNDNREAFQKMLSDTGKHQFQVVIVWKVDRFGRNREEIAFNKHTCKKNGVRVEYVAESLPNSPEAVILESVLEGMAEYYSIQLSQNIRRGQLESAKKCQCVGGSVPLGYTLDSDKHFVIDPQTAPVVKKIFDLYAEGATISEITGQLNEQGIRTARKQLFTKNSLTKLLKNEKYIGVYTYKDIVRVEGGVPAIVDESTFDRVQELLKINRRAPSHTWTKVEYLLTDKLFCGHCGSPMVGESGFSHTGAKYSYYGCIKRRREKACDKKPVRQDWIEALVLDETVKLLHDDELMEYIIDRTWEYYQVTDKVQEEKAVLEAQLAEVDKAINNLVRAIEAGIFNAATKSRMDELDAQKAALTASLADLELTSGIRITRDHIEYFLLRLRDLDVKDRECQKRLVQTFVNAVFIYDDGRVKITYNYSGQSSTITLNQIASAEKGKGFVCCLPCSTSSPRFPRGVAALFLFLGKNGCESTTNFSCIVQ

SEQ ID NO: 2460 - protein, 544 aa, Unknown
  Description of Unknown: Integrase B2461 sequence
  PTHR30461:SF3,SM00857,G3DSA:1.10.10.2600,IPR036162,PF13408, PS51737,G3DSA:3.40.50.1390,IPR025827,IPR006119,IPR038109, PF07508,IPR011109,SSF53041,PF00239,PTHR30461, PS51736,Coil,cd00338
MRVSVNLNAQKPDTTTNAVIYARYSSHGQTEQSIEGQLAKGHEYAAAQGYTVVHEYIDRAMTGRNDNREAFQKMLSDTGKHQFQVVIVWKVDRFGRNREEIAFNKHTCKKNGVRVEYVAESLPNSPEAVILESVLEGMAEYYSIQLSQNIRRGQLESAKKCQCVGGSVPLGYTLDSDKHFVIDPQTAPVVKKIFDLYAEGATISEITGQLNEQGIRTARKQLFTKNSLTKLLKNEKYIGVYTYKDIVRVEGGVPAIVDESTFDRVQELLKINRRAPSHTWTKVEYLLTDKLFCGHCGSPMVGESGFSHTGAKYSYYGCIKRRREKACDKKPVRQDWIEALVLDETVKLLHDDELMEYIIDRTWEYYQVTDKVQEEKAVLEAQLAEVDKAINNLVRAIEAGIFNAATKSRMDELDAQKAALTASLADLELTSGIRITRDHIEYFLLRLRDLDVKDRECQKRLVQTFVNAVFIYDDGRVKITYNYSGQSSTITLNQIASAEKGKGFVCCLPCSTSSPRFPRGVAALFLFLGKNGCESTTNFSCFVL

SEQ ID NO: 2461 - protein, 544 aa, Unknown
  Description of Unknown: Integrase B2462 sequence
  SM00857,G3DSA:1.10.10.2600,IPR036162,PF13408,PS51737, IPR025827,G3DSA:3.40.50.1390,IPR006119,IPR038109,PF07508, IPR011109,SSF53041,PTHR30461,Coil,cd00338, PF00239
MAYRKITDIKDTIGMRAVFYARVSTAEEEQLNAIELQIEENRGCIKDHGWKLVGEYIDRSKSGTMVKGRDDYQRLYEDLYEDLFDIVVIKDQERLQRNTLDWYLFINRVVQTGKLLFMYMDGKFYSPDDALITGVRAIIAEEFSRNLSKKLHNYHDHRIEKARQGQEIALQGSGNVYGWDKKDGKYYINPEQAKVRRLMCEGIMARKGSTLIAKELNDAGYRNTVGKPWKPMDIPKFVYDCKNVGTMIINKERHDFESKQTIKLPKEEWVYVENALPPIVTQEEWDLICKIHEERVIATGSDRRGKKTSGYSFSGKLVCGICGAPYWRKQRVSKDEYWVCSTKQTKGRRTRKRDSTMGKAGEINPLGCDNENISYNSLMEIMEVVSERLQANTDTIKQDMINWLTKLRKQLLEANGGHTEADLQRELSRKSKLLDAYLDGILNKQEYQTKAEELDERIIQLKAETEKNKANSGDIAEIDKVLANINEEVSRYVDGNEKLKVEYLLEHLEQVQIFPDKVIVIVPILSEGIVVEKTQYVSREKWRW

SEQ ID NO: 2462 - protein, 544 aa, Unknown
  Description of Unknown: Integrase B2463 sequence
  SM00857,G3DSA:1.10.10.2600,IPR036162,PF13408,IPR025827, G3DSA:3.40.50.1390,PS51737,IPR006119,IPR038109,PF07508, SSF53041,IPR011109,PTHR30461,Coil,cd00338, PF00239
MAYRKITDIKDTIGMRAVFYARVSTAEEEQLNAIELQIEENRGCIKDHGWKLVGEYIDRSKSGTMVKGRDDYQRLYEDLYEDLFDIVVIKDQERLQRNTLDWYLFINRVVQTGKLLFMYMDGKFYSPDDALITGVRAIIAEEFSRNLSKKLHNYHDHRIEKARQGQEIALQGSGNVYGWDKKDGKYYINPEQAKVRRLMCEGIMARKGSTLIAKELNDAGYRNTVGKPWKPMDIPKFVYDCKNVGTMIINKERHDFESKQTIKLPKEEWVYVENALPPIVTQEEWDLICKIHEERVIATGSDRRGKKTSGYSFSGKLVCGICGAPYWRKQRVSKDEYWVCSTKQTKGRRTRKRDSTMGKAGEINPLGCDNENISYNSLMEIMGVVSERLQANTDTIKQDMINWLTKLRKQLLEANGGHTEADLQRELSRKSKLLDAYLDGILNKQEYQKKAEELDERIIQLKTETEKNKANSGDIAEIDKVLANIDEEVARYVDGNEKLKVEYLLEHLEQVQIFPDKVIVIVPILSEGIVVEKTQYVSREKWCR

SEQ ID NO: 2463 - protein, 544 aa, Unknown
  Description of Unknown: Integrase B2464 sequence
  PTHR30461:SF3,SM00857,G3DSA:1.10.10.2600,IPR036162,PF13408, PS51737,G3DSA:3.40.50.1390,IPR025827,IPR006119,IPR038109, PF07508,IPR011109,SSF53041,PTHR30461,PS51736, cd00338,PF00239
MGTTAKKVSVIPAKVQFDTSIKLSDKMLKVAAYCRVSTDEEEQDSSYEAQVEYYTNKIQDNPNWKFAGIYADDGKSGTNTKKRADFKTMVKDALNGKIDMILTKSVSRFARNTVDSLVTIRELKAKNIAIVFEKEGVNTLEGTGEILITILSSLAQEESRNISENVRWGIARKFEKGKVLVNCAKFMGYTKNENGDLIIVPKEAEIVRLIYRLYLEGYSSVKIKKYLEDREIKTATGQERWHTTVIDNMLCNEKYMGDALLQKTYTVDFMTKKRVVNNGIVPQYYVENDHEAIIPKEIYYRVQEERMRRANLCKAAVTRKKNQKSKYSSLYALTGIVICGKCGHEYRRVTWSRNGQKKIVWRCSNRLTNGVKKCPNSETIKEEALNRAVMEAIHKITCDDREFIETFRQNVISVINTKEALREEEDYDTLLKNKQEEMLALIMENAKAGEYTQEFDARYHAIAEEIQSIKKNQTETRKREETLRECNQRMYEIDDFLRTTTCRIPEFDNDLVRRLISTVKIISEEKLMIQFKSGIVVEQEIRYD

SEQ ID NO: 2464 - protein, 544 aa, Unknown
  Description of Unknown: Integrase B2465 sequence
  SM00857,G3DSA:1.10.10.2600,IPR036162,PF13408,PS51737, IPR025827,G3DSA:3.40.50.1390,IPR006119,IPR038109,PF07508, SSF53041,IPR011109,PTHR30461,Coil,cd00338, PF00239
MAYRKITDIRDTIGMRAVFYARVSTAEEEQLNAIELQIEENRGCIKEHGWKLVGEYIDRSKSGTMVKGRDDYQRLYEDLYEDLFDIVVIKDQERLQRNTLDWYLFINRVVQTGKLLFMYMDGKFYSPDDALITGVRAIIAEEFSRNLSKKLHNYHDHRIEKARQGQEIALQGSGNVYGWDKKDGKYYINPEQAKVRRLMCEGIMARKGSTLIAKELNEAGYRNTVGKLWKPMDIPKFVYDCKNVGTMIINKERHDFESKQTIKLPKEEWVYVENALPPIVTQEEWDLICKIHEERVIATGSDRRGKKTSGYSFSGKLVCGICGAPYWRKQRVSKDEYWVCSTKQTKGRRTRKRDSTMGKAGEINPLGCDNENISYNSLMEIMGVVSERLQANTDTIKQDMINWLTKLRKQLLEANGGHTEADLQRELSRKSKLLDAYLDGILNKQEYQKKAEELDERIIQLKAETEKNKANSGDIAEIDKVLANIDEEVSRYVDGNEKLKVEYLLEHLEQVQIFPDKVIVIVPILSEGIVVEKTQYVSREKWSR

SEQ ID NO: 2465 - protein, 544 aa, Unknown
  Description of Unknown: Integrase B2466 sequence
  SM00857,G3DSA:1.10.10.2600,IPR036162,PF13408,IPR025827, PS51737,G3DSA:3.40.50.1390,IPR006119,IPR038109,PF07508, SSF53041,IPR011109,PTHR30461,Coil,cd00338, PF00239
MAYRKITDIKDTIGMRAVFYARVSTAEEEQLNAIELQIEENRGCIKDHGWKLVGEYIDRSKSGTMVKGRDDYQRLYEDLYEDLFDIVVIKDQERLQRNTLDWYLFINRVVQTGKLLFMYMDGKFYSPDDALITGVRAIIAEEFSRNLSKKLHNYHDHRIEKARQGQEIALQGSGNVYGWDKKDGKYYINPEQAKVRRLMCEGIMARKGSTLIAKELNDAGYRNTVGKPWKPMDIPKFVYDCKNVGTMIINKERHDFESKQTIKLPKEEWVYVENALPPIVTQEEWDLICKIHEERVIATGSDRRGKKTSGYSFSGKLVCGICGAPYWRKQRVSKDEYWVCSTKQTKGRRTRKRDSTMGKAGEINPLGCDNENISYNSLMEIMGVVSERLQANTDTIKHDMINWLTKLRKQLLEANGGYTEADLQRELSRKSKLLDAYLDGILNKQEYQKKAEELDERIIQLKAETEKNKANSGDIAEIDKVLANIDEEVSRYVDGNEKLKVEYLLEHLEQVQIFPDKVIVIVPILSEGIVVEKTQYVSREKRSR

SEQ ID NO: 2466 - protein, 544 aa, Unknown
  Description of Unknown: Integrase B2467 sequence
  PTHR30461:SF3,SM00857,G3DSA:1.10.10.2600,IPR036162,PF13408, PS51737,G3DSA:3.40.50.1390,IPR025827,IPR006119,IPR038109, PF07508,IPR011109,SSF53041,PTHR30461,Coil, PS51736,cd00338,PF00239
MPAALAYCMASVNLVFAWADLRIYYTTISLVLERRTDYIMTKNAVIYARFSSDKQREESIDGQIRECQAFAEANEINIINTYIDRAMSARTDQRPSFLQMVKDSAKHLFDYVIVYQLDRFSRSRYDSAIYKHRLKKNGVKVLSAKENIKDDPSGILLESVIEGMAEYYSAELSQKVKRGMTENLLEGKWIGGIVPFGYELTSENKLAISPATGHLVPEIYDKYLSGIKTTDILSKLNSLGIKTQRGCNFTRNSLNRILKNQIYTGTFTWAGTSYPDYAPALITQEQYTAMQNLFESRKRKSNTARRVSPQYALTGKIYCGTCGLPMTGYCGKSHTGTTYYYYQCSSKNNKSEKAARSQIACDAKNISRDKLEKLVLDTTISILKNKDAVKCIADQCMAIQKAELEHKPAEQLRLESQIKEIEKRLKNSVKAVENGLISQTITNNIETYEKQLTELNAQLDGLKLETHIIPITEEAVIYYLNQLTERANKKDGYSLDTFDDFIRRVVVTGKRVDIYYNYTAVPNILENPAVKMLRGSSENHLVTR

SEQ ID NO: 2467 - protein, 544 aa, Unknown
  Description of Unknown: Integrase B2468 sequence
  SM00857,G3DSA:1.10.10.2600,IPR036162,PF13408,IPR025827, G3DSA:3.40.50.1390,PS51737,IPR006119,IPR038109,PF07508, SSF53041,IPR011109,PTHR30461,Coil,cd00338, PF00239
MAYRKITDIRDTIGMRAVFYARVSTAEEEQLNAIELQIEENRGCIKDHGWKLVGEYIDRSKSGTMVKGRDDYQRLYEDLYEDLFDIVVIKDQERLQRNTLDWYLFINRVVQTGKLLFMYMDGKFYSPDDALITGVRAIIAEEFSRNLSKKLHNYHDHRIEKARQGQEIALQGSGNVYGWDKKDGKYYINPEQAKVRRLMCEGIMARKGSTLIAKELNDAGYRNTVGKPWKPMDIPKFVYDCKNVGTMIINKERHDFESKQTIKLPKEEWVYVENALPPIVTQEEWDLICKIHEERVIATGSDRRGKKTSGYSFSGKLVCGICGAPYWRKQRVSKDEYWVCSTKQTKGRRTRKRDSTMGKSGEINPLGCDNENISYNSLMEIMGVVSERLQANTDTIKHDMINWLTKLRKQLLEANGGHTEADLQRELSRKSKLLDAYLDGILNKQEYQKKAEELDERIIQLKAETEKNKANSGDIAEIDKVLANIDEEVSRYVDGNEKLKVEYLLEHLEQVQIFPDKVIVIVPILSEGIVVEKTQYVSREKWCR

SEQ ID NO: 2468 - protein, 544 aa, Unknown
  Description of Unknown: Integrase B2469 sequence
  SM00857,G3DSA:1.10.10.2600,IPR036162,PF13408,PS51737, IPR025827,G3DSA:3.40.50.1390,IPR006119,IPR038109,PF07508, SSF53041,IPR011109,PTHR30461,Coil,PS51736, cd00338,PF00239
MDDIRRTVTVIPAKPQMDQRTVMRQLRVAAYCRVSTEEEEQQSSYEAQCTYYTDKIMTNPEWTMAGIFADEGISGTSTKNRDDFNRMIRRCRQKKIDLILTKSISRFARNTLDSLKYIRALKGMGIGIIFEKENINTLETDTELIITFMSAFAQSESESISANVRWGKRQAMKEGKASVNFKKLYGYYLDDEGNPQVNSDQAEAIRSIYDQYLQGASLRMIKLSLEGKAVPNPAGGAKWDISQIRSILGNEKYCGDVLMQKTFTQDCINKKVIKNTGQLPMYLIQNNHPAIVSREIYQAVQAEKTRRSASASPSKKMSSTGRSCYASKFALSERLVCGECGTLYRRCTWKRNGKTRIVWRCVSRLDYGAKYCHQSPTMDEEPLQWAIMTAINSVMDSKETICRQITEAAVEETGILPDSTMTLGEINRRLEELEAEFNILLQQPDSAVKNAARFGSIANEMASLKEQREKVAARLRKDQTVQLHVHTMKAALDGMSHHMQQWDEEMVRQLVHTVKVISADHIKVFLYDGTEIDQTVGHGNSIID

SEQ ID NO: 2469 - protein, 544 aa, Unknown
  Description of Unknown: Integrase B2470 sequence
  SM00857,G3DSA:1.10.10.2600,IPR036162,PF13408,IPR025827, G3DSA:3.40.50.1390,PS51737,IPR006119,IPR038109,PF07508, SSF53041,IPR011109,PTHR30461,Coil,cd00338, PF00239
MAYRKITDIRDTIGMRAVFYARVSTAEEEQLNAIELQIEENRGCIKDHGWKLVGEYIDRSKSGTMVKGRDDYQRLYEDLYEDLFDIVVIKDQERLQRNTLDWYLFINRVVQTGKLLFMYMDGKFYSPDDALITGVRAIIAEEFSRNLSKKLHNYHDHRIEKARQGQEIALQGSGNVYGWDKKDGKYYINPEQAKVRRLMCEGIMARKGSTLIAKELNDAGYRNTVGKPWKPMDIPKFVYDCKNVGTMIINKERHDFESKQTIKLPKEEWVYVENALPPIVTQEEWDLICKIHEERVIATGSDRRGKKTSGYSFSGKLVCGICGAPYWRKQRVSKDEYWVCSTKQTKGRRTRKRDSTMGKAGEINPLGCDNENISYNSLMEIMGVVSERLQANTDTIKQDMINWLTKLRKQLIEANGGHTEADLQRELSRKSKLLDAYLDGILNKQEYQTKAEELDERIIQLKAETEKNKANSGDIAEIDKVLANIDEEVSRYVDGNEKLKVEYLLEHLEQVQIFPDKVIVIVPILSEGIVVEKAQYVSREKRSR

SEQ ID NO: 2470 - protein, 544 aa, Unknown
  Description of Unknown: Integrase B2471 sequence
  cd00338,SM00857,G3DSA:1.10.10.2600,IPR036162,PF13408, IPR025827,G3DSA:3.40.50.1390,PS51737,IPR006119,IPR038109, PF07508,SSF53041,IPR011109,PTHR30461,Coil, PF00239
MAYRKITDIKDTIGMRAVFYARVSTAEEEQLNAIELQIEENRGCIKDHGWKLVGEYIDRSKSGTMVKGRDDYQRLYEDLYEDLFDIVVIKDQERLQRNTLDWYLFINRVVQTGKLLFMYMDGKFYSPDDALITGVRAIIAEEFSRNLSKKLHNYHDHRIEKARQGQEIALQGSGNVYGWDKKDGKYYINPEQAKVRRLMCEGIMARKGSTLIAKELNDAGYRNTVGKPWKPMDIPKFVYDCKNVGTMIINKERHDFESKQTIKLPKEEWVYVENALPPIVTQEEWDLICKIHEERVIATGSDRRGKKTSGYSFSGKLVCGICGAPYWRKQRVSKDEYWVCSTKQTKGRRTRKRDSTMGKAGEINPLGCDNENISYNSLMEIMGVVSERLQANTDTIKQDMINWLTKLRKQLLEANGGHTEADLQREISRKSKLLDAYLDGILNKQEYQKKAEELDERIIQLKAETEKNKANSGDIAEIDKVLANIDEEVARYIDGNEKLKVEYLLEHLEQVQIFPDKVIVIVPILSEGIVVEKTQYVSREKWIW

SEQ ID NO: 2471 - protein, 544 aa, Unknown
  Description of Unknown: Integrase B2472 sequence
  SM00857,G3DSA:1.10.10.2600,IPR036162,PF13408,IPR025827, G3DSA:3.40.50.1390,PS51737,IPR006119,IPR038109,PF07508, SSF53041,IPR011109,PTHR30461,Coil,cd00338, PF00239
MAYRKITDIRDTIGMRAVFYARVSTAEEEQLNAIELQIEENRGCIKEHGWKLVGEYIDRSKSGTMVKGRDDYQRLYEDLYEDLFDIVVIKDQERLQRNTLDWYLFINRVVQTGKLLFMYMDGKFYSPDDALITGVRAIIAEEFSRNLSKKLHNYHDHRIEKARQGQEIALQGSGNVYGWDKKDGKYYINPEQAKVRRLMCEGIMARKGSTLIAKELNDAGYRNTVGKPWKPMDIPKFVYDCKNVGTMIINKERHDFESKQTIKLPKEEWVYVENALPPIVTQEEWDLICKIHEERVIATGSDRRGKKTSGYSFSGKLVCGICGAPYWRKQRVSKDEYWVCSTKQTKGRRTRKRDSTMGKAGEINPLGCDNENISYNSLMEIMGVVSERLQANTDTIKHDMINWLTKLRKQLLEANGGHTEADLQRELSRKSKLLDAYLDGILNKQEYQKKAEELDERIIQLKAETEKNKANSGDIAEIDKILANIDEEVSRYVDGNEKLKVEYLLEHLEQVQIFPDKVIVIVPILSEGIVVEKAQYVSREKRSR

SEQ ID NO: 2472 - protein, 544 aa, Unknown
  Description of Unknown: Integrase B2473 sequence
  PTHR30461:SF3,SM00857,G3DSA:1.10.10.2600,IPR036162,PF13408, IPR025827,G3DSA:3.40.50.1390,PS51737,IPR006119,IPR038109, PF07508,IPR011109,SSF53041,PTHR30461,Coil, PS51736,cd00338,PF00239
MAETAKKISMIPAKVQYDRNVKLSEKKMKVAAYCRVSTELEEQDSSYEAQVEYYTSKISENENWKNAGIYADDGKSGTNTKKRADFNAMIQDALAGKIDMILTKSVSRFARNTVDSLVTIRKLKEKNVAVVFEKEGINTLEGTGEILITILSSLAQEESRNISENIRWGVVRKFEKGKVIVNCTKFMGYTKNEDGDLVIVPEEAEIVKLIFRLYLEGYSTGKIAKHLEEQGIKTATGQDKWHSTVIDKMLRNEKYMGDALLQKTYTVDFMTKKKVKNTGIVPQYYVEDDHEAIIPKELFYRVQEEMMRRASLCKAAVTRKKNQKSRYSSTYALTGMLICGKCGQEYRRVTWARNGKKKVVWRCSNRLTNGVKKCGESETLEENALNRAVMEAIHRITSDDMEFMEHFRQNIIHVIGSYGTAKESGEYEEKIKEKQEEMVALIAENAKTGSYTPEFDERYRIIAEEINALKEAQKTARNEKRMADSYEQRIQDIDHYLSTSTCQIPEFDNDLVRRLISTIKVESSEKLLIQFQSGIVMEQEIRYE

SEQ ID NO: 2473 - protein, 544 aa, Unknown
  Description of Unknown: Integrase B2474 sequence
  SM00857,G3DSA:1.10.10.2600,IPR036162,PF13408,IPR025827, G3DSA:3.40.50.1390,PS51737,IPR006119,IPR038109,PF07508, SSF53041,IPR011109,PTHR30461,Coil,cd00338, PF00239
MAYRKITDIRDTIGMRAVFYARVSTAEEEQLNAIELQIEENRGCIKDHGWKLVGEYIDRSKSGTMVKGRDDYQRLYEDLYEDLFDIVVIKDQERLQRNTLDWYLFINRVVQTGKLLFMYMDGKFYSPDDALITGVRAIIAEEFSRNLSKKLHNYHDHRIEKARQGQEIALQGSGNVYGWDKKDGKYYINPEQAKVRRLMCEGIMARKGSTLIAKELNDAGYRNTVGKPWKPMDIPKFVYDCKNVGTMIINKERHDFESKQTIKLPKEEWVYVENALPPIVTQEEWDLICKIHEERVIATGSDRRGKKTSGYSFSGKLVCGICGAPYWRKQRVSKDEYWVCSTKQTKGRRTRKRDSTMGKAGEINPLGCDNENISYNSLMEIMGVVSERLQANTDTIKHDMINWLTKLRKQLLEANGGHTEADLQRELSRKSKLLDAYLDGILNKQEYQKKAEELDERIIQLKAETEKNKANSGDIAEIDKVLANIDEEVSRYVDGNEKLKVEYLLEHLEQVQIFPDKVIVIVPILSEGIVVEKAQYVSREKRSR

SEQ ID NO: 2474 - protein, 544 aa, Unknown
  Description of Unknown: Integrase B2475 sequence
  PTHR30461:SF3,SM00857,G3DSA:1.10.10.2600,IPR036162,PF13408, PS51737,IPR025827,G3DSA:3.40.50.1390,IPR006119,IPR038109, PF07508,SSF53041,IPR011109,PTHR30461,Coil, PS51736,cd00338,PF00239
MNTVIYARYSAGPRQTDQSIEGQLRVCTDFCKQRGLTVIDTYCDRHISGRTDERPEFQRLIADAKRKKFEAVVVYKTDRFARNKYDSAVYKRELKRNGIQIFYAAEAIPDGPEGIILESLMEGLAEYYSAELAQKIKRGMHESALKCQSTGSGRPLGYRVDEQKHFQIDPESAQTVQTIFEQYIKGESNAAICELLNSRGLRTAQGKPFNKNSINRIIKNRKYIGEYRYHDIVVESGIPAIISKDTFNLAQAEMERRRTRKAPKSPKAEYLLAGRLFCGHCKGPMQGVSGTGKSGNKWYYYYCGNTRGKNKTCDKKQVSRDRLERAVVDFTVRYILQEEVLEELARKVHAAQERQNDTASEIAFYEKKLADNKKSIANVLRAIESGAATQTLPARLQELENEQAVILGEISFLKGKRLAFTEDQILFALMKHLEPYPGESEQDYRRRIISDFVSEVYLYDDRLLIYFNISSEDGKLKSADLSNIEGGEFDEGLVSSTMKADLFRQVCFSYASMQTFVLSFAPPLHAACNCWNCSKETLNSTSSV

SEQ ID NO: 2475 - protein, 544 aa, Unknown
  Description of Unknown: Integrase B2476 sequence
  PTHR30461:SF3,SM00857,G3DSA:1.10.10.2600,IPR036162,PF13408, PS51737,G3DSA:3.40.50.1390,IPR025827,IPR006119,IPR038109, PF07508,IPR011109,SSF53041,PF00239,PTHR30461, PS51736,Coil,cd00338
MRVSVNLNAQKPDTTTNAVIYARYSSHGQTEQSIEGQLAKGHEYAAAQGYTVVHEYIDRAMTGRNDNREAFQKMLSDTGKHQFQVVIVWKVDRFGRNREEIAFNKHTCKKNGVRVEYVAESLPNSPEAVILESVLEGMAEYYSIQLSQNIRRGQLESAKKCQCVGGSVPLGYTLDSDKHFVIDPQTAPVVKKIFDLYAEGATISEITGQLNEQGIRTARKQLFTKNSLTKLLKNEKYIGVYTYKDIVRVEGGVPAIVDESTFDRVQELLKINRRAPSHTWTKVEYLLTDKLFCGHCGSPMVGESGFSHTGAKYSYYGCIKRRREKACDKKPVRQDWIEALVLDETVKLLHDDELMEYIIDRTWEYYQVTDKVQEEKAVLEAQLAEVDKAINNLVRAIEAGIFNAATKSRMDELDAQKAALTASLADLELTSGIRITRDHIEYFLLRLRDLDVKDRECQKRLVQTFVNAVFIYDDGRVKITYNYSGQSSTITLNQIASAEKGKGFVCCLPCSTFSPRFPRGVAALFLFWGKNGCESTTNFSCIVL

SEQ ID NO: 2476 - protein, 544 aa, Unknown
  Description of Unknown: Integrase B2477 sequence
  SM00857,G3DSA:1.10.10.2600,IPR036162,PF13408,PS51737, G3DSA:3.40.50.1390,IPR025827,IPR006119,IPR038109,PF07508, SSF53041,IPR011109,PTHR30461,Coil,cd00338, PF00239
MAYRKITDIKDTIGMRAVFYARVSTAEEEQLNAIELQIEENRGCIKDHGWKLVGEYIDRSKSGTMVKGRDDYQRLYEDLYEDLFDIVVIKDQERLQRNTLDWYLFINRVVQTGKLLFMYMDGKFYSPDDALITGVRAIIAEEFSRNLSKKLHNYHDHRIEKARQGQEIALQGSGNVYGWDKKDGKYYINPEQAKVRRLMCEGIMARKGSTLIAKELNDAGYRNTVGKPWKPMDIPKFVYDCKNVGTMIINKERHDFESKQTIKLPKEEWVYVENALPPIVTQEEWDLICKIHEERVIATGSDKRGKKTSGYSFSGKLVCGICGAPYWRKQRVSKDEYWVCSTKQTKGRKTRKRDSTMGKAGEINPLGCDNENISYNSLMEIMGVVSERLQANTDTIKHDMINWLTKLRKQLLEANGRHTEADLQRELSRKSKLLDAYLDGILNKQEYQKKAEELDERIIQLKAETEKNKANAGDIAEIDKVLANIDEEVARYVDGNEKLKVEYLLEHLEQVQIFPDKVIVIVPILSEGIVVEKTQYVSREKWIW

SEQ ID NO: 2477 - protein, 544 aa, Unknown
  Description of Unknown: Integrase B2478 sequence
  PTHR30461:SF3,SM00857,G3DSA:1.10.10.2600,IPR036162,PF13408, IPR025827,PS51737,G3DSA:3.40.50.1390,IPR006119,IPR038109, PF07508,SSF53041,IPR011109,PTHR30461,Coil, PS51736,cd00338,PF00239
MSMENCANTKPKITIIPAKTRVERLDPMSVAMGQKPKIRVAAYARVSTDHEEQESSYEAQVDHFTKLIASHDDWTMVDIYADPGLSGKNTKRVQFKRMIKDCEDGKIDLIITKSVSRFARNTLDCVQTARKLKADGIGIIFEKENLDTLQERSEFVLTIMASLAEEESRSISNNIRWSVKKKFQEGKVILNTKHFLGYTRDKKGTVLKIVPEEAITVRRIYAEFLDGKSLKEIAEGLERDGIASPSGRETWHPSTVKSILQNEKYKGDCHLQKTYLPDFLSPRRIKNEGFAQSWYVEDSHAAIISKETFDMVQQEFQNRQSLRSTGETGCGKFSGKYPFSGMIVCGECGETYRRHQQYNKYKKYYIWVCKRHENTGAEYCKSRPIKEEALEKAFVRALNELIGDKERILEKLQSATVSEITDSCATAINEVNAEIEKLQEQMMELLMKRNNGEITDKEYEQQSQQVGMKIDQLLMRKEEILSEQGKVQLASYRIEEVTKLLQTGKILEEFDRVMFKSLVRKITVLSNKEIEIEFECGITVRKTL

SEQ ID NO: 2478 - protein, 544 aa, Unknown
  Description of Unknown: Integrase B2479 sequence
  PTHR30461:SF3,SM00857,G3DSA:1.10.10.2600,IPR036162,PF13408, IPR025827,G3DSA:3.40.50.1390,PS51737,IPR006119,IPR038109, PF07508,SSF53041,IPR011109,PF00239,PTHR30461, PS51736,Coil,cd00338
MSATIPSLMQAPRAFGYCRKSTNEQREESLEAQQRAIVTFAATAGYELVQVYKDHGNSGRRGERPEFQRMLADAAAAGVQYIIVHKLDRFFRNADQQTVVEMQLRRQGIQVISAAEHFDATPQGQFMRNVTKAINQWYSANLAQEVAKGLRENALTARTTGGPPPLGYTVDKSTGQYAIVPREAEAVQLIFKLYQQGAGYTEIIDALNAGGYVTRRGQPFGKNSLYDILRNEKYTGLYIWNRLAPADVDGRTSRRRLKPRDEWVCVENGMPQIIPTEQWQAVQDEMDKRKHRNAQYKAKSFYLLSGLVYCGGCGGTMAGEMHRYNSHGKAVEYRYYRCAAQHRQHDGGVHAHRVNADRLENAVIDYIQHIVLDPVNMDALCVAVLEALQPDGRNAERAKELKQEAGIIQQKVDRLYQAIENGLDAAGAIERINALQKQRMTLLAQANDLDISAESAAASVDELRRVWSGINLRELQPEKMRVIVRDLIYKIVVFDDGPRGSRLRIILNPARLNPSAIPKAIETMPFSELQDFSHTGGSGLPLPR

SEQ ID NO: 2479 - protein, 544 aa, Unknown
  Description of Unknown: Integrase B2480 sequence
  SM00857,G3DSA:1.10.10.2600,IPR036162,PF13408,PS51737, G3DSA:3.40.50.1390,IPR025827,IPR006119,IPR038109,PF07508, SSF53041,IPR011109,PTHR30461,Coil,cd00338, PF00239
MAYRKITDIRDTIGMRAVFYARVSTAEEEQLNAIELQIEENRGCIKDHGWKLVGEYIDRSKSGTMVKGRDDYQRLYEDLYEDLFDIVVIKDQERLQRNTLDWYLFINRVVQTGKLLFMYMDGKFYSPDDALITGVRAIIAEEFSRNLSKKLHNYHDHRIEKARQGQEIALQGSGNVYGWDKKDGKYYINPEQAKVRRLMCEGIMARKGSTLIAKELNDAGYRNTVGKPWKPMDIPKFVYDCKNVGTMIINKERHDFESKQTIKLPKEEWVYVENALPPIVTQEEWDLICKIHEERVIATGSDRRGKKTSGYSFSGKLVCGICGAPYWRKQRVSKDEYWVCSTKQTKGRKTRKRDSTMGKAGEINPLGCDNENISYNSLMEIMGVVSERLQANTDTIKQDMINWLTKLRKQLLEANGGHTEADLQRELSRKSKLLDAYLDGILNKQEYQKKAEELDERIIQLKTETEKNKANSGDIAEIDKVLANIDEEVARYVDGNEKLKVEYLLEHLEQVQIFPDKVIVIVPILSEGIVVEKTQYVSREKWRW

SEQ ID NO: 2480 - protein, 544 aa, Unknown
  Description of Unknown: Integrase B2481 sequence
  PTHR30461:SF3,SM00857,G3DSA:1.10.10.2600,IPR036162,PF13408, IPR025827,G3DSA:3.40.50.1390,PS51737,IPR006119,IPR038109, PF07508,IPR011109,SSF53041,PTHR30461,Coil, PS51736,cd00338,PF00239
MPAALAYCMASVNLVFAWADLRIYYTIISLVLERRTDYIMTKNAVIYARFSSDKQREESIDGQIRECRAFAEANEINIINTYIDRAMSARTDQRPSFLQMVKDSAKHLFDYVIVYQLDRFSRSRYDSAIYKHRLKKNGVKVLSAKENIKDDPSGILLESVIEGMAEYYSAELSQKVKRGMTENLLEGKWIGGIVPFGYELTSENKLVISPTTGHLVSEIYDKYLSGVKTTDILSKLNSLGIKTQRGCNFTRNSLNRILKNQIYTGTFTWAGTSYPDYAPALITQEQYTAMQNLFESRKRKNNTARRVSPQYALTGKIYCGTCGLPMTGYCGKSHTGTTYYYYQCSSKNNKSEKAARSQIACDAKNISRDKLEKLVLDTTISILKNKDAVKCIADQCMTIQKAELEHKPAEELRLESQIKEIEKRLKNSVKAVENGLISQTITNNIETYEKQLTELNAQLDGVKLDTHIIPITEEAVIYYLNQLTERANKKDGYSLDTFDDFIRRVVVTGKRVDIFYNYTAVPNILENPAVKMLRGSSEDCLVTR

SEQ ID NO: 2481 - protein, 544 aa, Unknown
  Description of Unknown: Integrase B2482 sequence
  PTHR30461:SF3,SM00857,G3DSA:1.10.10.2600,IPR036162,PF13408, IPR025827,G3DSA:3.40.50.1390,PS51737,IPR006119,IPR038109, PF07508,IPR011109,SSF53041,PF00239,PTHR30461, PS51736,Coil,cd00338
MAETAKKISMIPAKVQYDRNVKLSEKKMKVAAYCRVSTELEEQDSSYEAQVEYYTSKISENENWKNAGIYADDGKSGTNTKKRADFNAMIQDALAGKIDMILTKSVSRFARNTVDSLVTIRKLKEKNVAVVFEKEGINTLEGTGEILITILSSLAQEESRNISENIRWGVVRKFEKGKVIVNCTKFMGYTKNEDGDLVIVPEEAEIVKLIFRLYLEGYSTGKIAKHLEEQGIKTATEQDKWHSTVIDKMLRNEKYMGDALLQKTYTVDFMTKKKVKNTGIVPQYYVEDDHEAIIPKELFYRVQEEMMRRASLCKAAVTRKKNQRSRYSSTYALTGMLICGKCGQEYRRVTWARNGKKKVVWRCSNRLTNGVKKCGESETLEENALNRAVMETIHRITSDDMEFMENFRQNIIHVIGNYSTAKESEEYEEKIKEKQEEMVALIAENAKTGSYTPEFDERYRTIAEEINALKEAQKTARNEKRMADSYEQRIQDIDHYLSTSTCQIPEFDNDLVRRLISTIKVESSEKLLIQFQSGIVMEQEIRYE

SEQ ID NO: 2482 - protein, 544 aa, Unknown
  Description of Unknown: Integrase B2483 sequence
  PTHR30461:SF3,cd00338,SM00857,G3DSA:1.10.10.2600,IPR036162, PF13408,PS51737,IPR025827,G3DSA:3.40.50.1390,IPR006119, IPR038109,PF07508,IPR011109,SSF53041,PTHR30461, mobidb-lite,Coil,PF00239
MPRKPAKHPAKPKRGKKLEIEEPGVLYGRYSSHNQKDISVEQQFEKGYELAAEYGIRIIDTYADRAVSGRTDKRRDFQRMMTDAAKGKFRYVIAWKSNRMGRNMLEALINEARLQDLGVRVLYVEEDFDDTAAGRFAARSMMNVNQFYSENMAEDIKRGLYDNAANCMVANGHLPYGYKADETLHYAIDEPKAAVIREIFARVSCGEAFVDIMASLNARGIKTSYGRPWGRSSFQKILSNERYRGIYIYGDVRKEGGIPRIISDELYFKVQEVITTKKNPQGRHRVNGDYLLTGKLFCGHCKSPMTGVSGTGRSGNLHYYYVCQKRRTEKTCDKKNVRRDEIELQVAQAIKDYALKDDVIEWIADSTVAYNERKEAESKVGILEDQLAGTEHGIKNIMSAIEQGIITETTKSRLVELESERAAIKANIAAARADIVTVSRDDIISGLEMFRDGDVHDKKYQARLFDTFLVAVYAYDDDLRLVFSFSGNKNTIQIPIESAVNAVENNEAECSFKLCSAPPNSANPNSFFFVKHCVGFVFIVEDVG

SEQ ID NO: 2483 - protein, 544 aa, Unknown
  Description of Unknown: Integrase B2484 sequence
  PTHR30461:SF3,SM00857,G3DSA:1.10.10.2600,IPR036162,PF13408, IPR025827,G3DSA:3.40.50.1390,PS51737,IPR006119,IPR038109, PF07508,IPR011109,SSF53041,PF00239,PTHR30461, PS51736,Coil,cd00338
MRVVLYMRYSSDRQTEQSIEGQNRVCTAFCEQQGYEIVDRYIDRATSAFKDTDKRTEFQRMIRDSEKQLWEGIVVYKLDRFARNRYDSATYKARLKKNGVRVISATENISDNPEGVILEAVLEGMAEFYSKELSQKITRGMFESANKCHSIGGHIPLGYKIENKKLVIDEAGAAIVREAFDLYANGATVAEICETFNTKGYRTAKNAEFNKNSFRSMFKNERYIGIYKYKDLRIEGGVPAIVDKDIFTIVQKKLSKNAEAPSRGKAKIDYLLSQKLFCGHCGSLMTGESGTGKGGTTYFYYTCGKRKREHTCDKKPLKKDFIERAVVEDALTLLTPETINELADIAVKESVREMEENSIIPALKNQLHETERSINNLVKMVEKGVESDTIADRLKELEKEKRAIEKRLVVAQDDYVILEKDHIVWWLSEFCNGDIEDEDFRRHIIDLLVNSVTVWDEPDGWYKITSVYNLTSNKTKTFRCSDLSGQAPPKEIRRNTVSAVFLYNRPTVFVPVPHRQRRHHEKETDRKRVHLCCKHAVWLVLRRR

SEQ ID NO: 2484 - protein, 544 aa, Unknown
  Description of Unknown: Integrase B2485 sequence
  PTHR30461:SF3,SM00857,G3DSA:1.10.10.2600,IPR036162,PF13408, PS51737,G3DSA:3.40.50.1390,IPR025827,IPR006119,IPR038109, PF07508,IPR011109,SSF53041,PF00239,PTHR30461, PS51736,Coil,cd00338
MRVSVNLNAQKPDTTTNAVIYARYSSHGQTEQSIEGQLAKGHEYAAAQGYTVVHEYIDRAMTGRNDNREAFQKMLSDTGKHQFQVIIVWKVDRFGRNREEIAFNKHTCKKNGVRVEYVAESLPNSPEAVILESVLEGMAEYYSIQLSQNIRRGQLESAKKCQCVGGSVPLGYTLDSDKHFVIDPQTAPVVKKIFDLYAEGATISEITGQLNEQGIRTIRKQLFTKNSLTKLLKNEKYIGVYTYKDIVRVEGGVPAIVDKSTFDRVQELLKINRRAPSHTWTKVEYLLTDKLFCGHCGSPMVGESGFSHTGAKYSYYGCIKRRREKACDKKPVRQDWIEALVLDETVKLLHDDELMEYIIDRTWEYYQVTDKVQEEKAVLEAQLAEVDKAINNLVRAIEAGIFNAATKSRMDELDAQKAALTASLADLELTSGIRITRDHIEYFLLRLRDLDIKDRECQKRLVQTFVNAVFVYDDGRVKITYNYSGKSSTITLNQIDGAEKGKGFVCCLPCSTFSPRFPRGVAALFLFWGKNGCESATNFSCIVL

SEQ ID NO: 2485 - protein, 544 aa, Unknown
  Description of Unknown: Integrase B2486 sequence
  SM00857,G3DSA:1.10.10.2600,IPR036162,PF13408,IPR025827, G3DSA:3.40.50.1390,PS51737,IPR006119,IPR038109,PF07508, SSF53041,IPR011109,PTHR30461,Coil,cd00338, PF00239
MAYRKITDIKDTIGMRAVFYARVSTAEEEQLNAIELQIEENRGCIKDHGWKLVGEYIDRSKSGTMVKGRDDYQRLYEDLYEDLFDIVVIKDQERLQRNTLDWYLFINRVVQTGKLLFMYMDGKFYSPDDALITGVRAIIAEEFSRNLSKKLHNYHDHRIEKARQGQEIALQGSGNVYGWDKKDGKYYINPEQAKVRRLMCEGIMARKGSTLIAKELNDAGYRNTVGKPWKPMDIPKFVYDCKNVGTMIINKERHDFESKQTIKLPKEEWVYVENALPPIVTQEEWDLICKIHEERVIATGSDRRGKKTSGYSFSGKLVCGICGAPYWRKQRVSKDEYWVCSTKQTKGRRTRKRDSTMGKAGEINPLGCDNENISYNSLMEIMGVVSERLQANTDTIKQDMINWLTKLRKQLLEANGGHTEADLQRELSRKSKLLDAYLDGILNKQEYQKKAEELDERIIQLKAETEKNKANSGDIAEIDKVLANIDEEVSRYVDGNEKLKVEYLLEHLEQVQIFPDKVIVIVPILSEGIVVEKAQYVSREKWIW

SEQ ID NO: 2486 - protein, 544 aa, Unknown
  Description of Unknown: Integrase B2487 sequence
  SM00857,G3DSA:1.10.10.2600,IPR036162,PF13408,IPR025827, G3DSA:3.40.50.1390,PS51737,IPR006119,IPR038109,PF07508, SSF53041,IPR011109,PTHR30461,Coil,cd00338, PF00239
MAYRKITDIRDTIGMRAVFYARVSTAEEEQLNAIELQIEENRGCIKDHGWKLVGEYIDRSKSGTMVKGRDDYQRLYEDLYEDLFDIVVIKDQERLQRNTLDWYLFINRVVQTGKLLFMYMDGKFYSPDDALITGVRAIIAEEFSRNLSKKLHNYHDHRIEKARQGQEIALQGSGNVYGWDKKDGKYYINPEQAKVRRLMCEGIMARKGSTLIAKELNDAGYRNTVGKPWKPMDIPKFVYDCKNVGTMIINKERHDFESKQTIKLPKEEWVYVENALPPIVTQEEWDLICKIHEERVIATGSDRRGKKTSGYSFSGKLVCGICGAPYWRKQRVSKDEYWVCSTKQTKGRRTRKRDSTMGKAGEINPLGCDNENISYNSLMEIMEVVSERLQANTDTIKHDMINWLTKLRKQLLEANGGHTEADLQRELSRKSKLLDAYLDGILNKQEYQKKAEELDERIIQLKAETEKNKANSGDIAEIDKVLANIDEEVSRYVDGNEKLKVEYLLEHLEQVQIFPDKVIVIVPILSEGIVVEKTQYVSREKWRW

SEQ ID NO: 2487 - protein, 544 aa, Unknown
  Description of Unknown: Integrase B2488 sequence
  cd03768,PTHR30461:SF3,SM00857,G3DSA:1.10.10.2600,IPR036162, PF13408,PS51737,G3DSA:3.40.50.1390,IPR025827,IPR006119, IPR038109,PF07508,SSF53041,IPR011109,PTHR30461, PS51736,Coil,PF00239
MKIAIYSRKSKYTGVGDSIENQVQMCKDYANAKYMGQDLEFATYEDEGFSGRNLIRPEFQKLINNINSYDILMCYKLDRISRNVADFSSTLEVLQDAKCDFVSIKENFDTSTPMGRAMIHIASVFAQLERETIAERVKDNMLELAKNGRWSGGRTPLGYKSEPVQYIDEEGNERKAVKLVQDQEELELVKLIYDTYLKQGSLHKTEVWFTQHKIKSNSAVLLEKTSLKIILQNPVYVRSAPEVINYLKDNNWNVYGEADGVHGLLTYNKTESVAGSNGKVTKRVQNKENWIAAVSNVKGIIDADTWIRVQEQFKKNKNTFPNLGKTHTAILTGKLRCSKCKNYMLVQHGRTSVKTGDKIYYYICSMKRKSKGELCNCKNIKANEIEPAVLNLIEELATNKEEFKNKLREKNTASKLDNDIKLKKSALEKQIADKEKQITGLVDKLSLDDSIADILINRIKNYKAEIETLKADLLNISAEIEQNNNYKLAESFLDGFFEQCKDISSQPKEKQRQLINSYVNYINFDSDTEEAELKLYEPGEIKKN

SEQ ID NO: 2488 - protein, 544 aa, Unknown
  Description of Unknown: Integrase B2489 sequence
  PTHR30461:SF3,SM00857,G3DSA:1.10.10.2600,IPR036162,PF13408, IPR025827,PS51737,G3DSA:3.40.50.1390,IPR006119,IPR038109, PF07508,IPR011109,SSF53041,PTHR30461,Coil, PS51736,cd00338,PF00239
MRVSVNLNAQKPDTTTNAVIYARYSSHGQTEQSIEGQLAKGHEYAAAQGYTVVHEYIDRAMTGRNDNREAFQKMLSDTGKHQFQVVIVWKVDRFGRNREEIAFNKHTCKKNGVRVEYVAESLPNSPEAVILESVLEGMAEYYSIQLSQNIRRGQLESAKKCQCVGGTVPLGYTLDSDKHFVIDPQTAPIVKKIFDLYAEGATISEITGQLNEQGIRTARKQLYTKNSLTKLLKNEKYIGIYAYKDVVRVEGGVPAIVDKSTFDRVQELLKINRRAPSHTWTKVEYLLTDKLFCGHCGSPMVGESGFSHTGAKYSYYGCIKRRREKACDKKPVRQDWIEALVLDETVKLLHDDELMEYIIDRTWEYYQVTDKVQEEKAVFEAQLAEIDKAINNLVRAIEAGIFNAATKSRMDELDAQKAALTASLADLELTSGIRITREHIEYFLLRLRDLDVKDRECQKRLVQTFVNAVFVYDDGRVKITYNYSGKSNTVTLDQIDGAEKEKGFVCCLPCSTSSPRFPRGVAALFLFLGKNGCESTTNFSCIVQ

SEQ ID NO: 2489 - protein, 544 aa, Unknown
  Description of Unknown: Integrase B2490 sequence
  PTHR30461:SF3,cd00338,SM00857,G3DSA:1.10.10.2600,IPR036162, PF13408,IPR025827,G3DSA:3.40.50.1390,PS51737,IPR006119, IPR038109,PF07508,IPR011109,SSF53041,PTHR30461, PS51736,Coil,PF00239
MARSTKKTECLPLERIGVIYARYSSHNQKEESIEQQVEECMTFALLNGIKVVHVYADKALSGRTDKRPQFQRLMRDAEKRSFSVVVAYKSNRIARDMLNALKYEDRLGKYGIETLYAKEEFGNTAAGRFALRTMMNVNQFYSENMAEDIKRGMLDNAENCKVNGALPLGYVSGPDGRYAIEPKEAEIVRGIYDKVLEGVSFADIASDLNVRGVRTKHGSLWNKCSFHRILTNDVYIGVYRHSGVVKEGGVPPILEREVFIAMQKYLETKKNPRGRHRENGDYLLTGKLRCGYCESFMVGVSGTSKTGDKHYYYNCNGRRSGSGCKKENVRRDSIEYAVAALTQQIVFKEDIIDWIATAAVKLAKESSGQSEIDAMEAELAEDRKATKNIMTAIEQGIFTATTKNRLLELEADIATLEQSIRDAKAISEGELLEKERVVYFLTSLREGNLHSKTYQKRLIDTFVRAVYLWDDYIGIDYYYAGKDSVVKYSLSEIESEIGENIREVLKDSLTGHHTRVIRTQDGQEITIVLTVNGFVLLSPLSVCG

SEQ ID NO: 2490 - protein, 544 aa, Unknown
  Description of Unknown: Integrase B2491 sequence
  PTHR30461:SF3,SM00857,G3DSA:1.10.10.2600,IPR036162,PF13408, PS51737,G3DSA:3.40.50.1390,IPR025827,IPR006119,IPR038109, PF07508,IPR011109,SSF53041,PF00239,PTHR30461, PS51736,Coil,cd00338
MRVSVNLNAQKPDTTTNAVIYARYSSHGQTEQSIEGQLAKGHEYAAAQGYTVVHEYIDRAMTGRNDNREAFQKMLSDTGKHQFQVVIVWKVDRFGRNREEIAFNKHTCKKNGVRVEYVAESLPNSPEAVILESVLEGMAEYYSIQLSQNIRRGQLESAKKCQCVGGSVPLGYTLDSDKHFVIDPQTAPVVKKIFDLYAEGATISEITGQLNEQGIRTIRKQLFTKNSLTKLLKNEKYIGVYTYKDIVRVEGGVPAIVDKSTFDRVQELLKINRRAPSHTWTKVEYLLTDKLFCGHCGSPMVGESGFSHTGAKYSYYGCIKRRREKACDKKPVRQDWIEALVLDETVKLLHDDELMEYIIDRTWEYYQVTDKVQEEKAVLEAQLAEVDKAINNLVRAIEAGIFNAATKSRMDELDAQKAALTTSLADLELTSGIRITRDHIEYFLLRLRDLDVKDRECQKRLVQTFVNAVFVYDDGRVKITYNYSGQSSTITLNQIASAEKGKGFVCCLPCSTSSPRFPRGVAALFLFLGKNGCESTTNFSCIVQ

SEQ ID NO: 2491 - protein, 544 aa, Unknown
  Description of Unknown: Integrase B2492 sequence
  SM00857,G3DSA:1.10.10.2600,IPR036162,PF13408,PS51737, G3DSA:3.40.50.1390,IPR025827,IPR006119,IPR038109,PF07508, SSF53041,IPR011109,PTHR30461,Coil,cd00338, PF00239
MAYRKITDIRDTIGMRAVFYARVSTAEEEQLNAIELQIEENRGCIKDHGWKLVGEYIDRSKSGTMVKGRDDYQRLYEDLYEDLFDIVVIKDQERLQRNTLDWYLFINRVVQTGKLLFMYMDGKFYSPDDALITGVRAIIAEEFSRNLSKKLHNYHDHRIEKARQGQEIALQGSGNVYGWDKKDGKYYINPEQAKVRRLMCEGIMARKGSTLIAKELNDAGYRNTVGKPWKPMDIPKFVYDCKNVGTMIINKERHDFESKQTIKLPKEEWVYVENALPPIVTQEEWDLICKIHEERVIATGSDRRGKKTSGCSFSGKLVCGICGAPYWRKQRVSKDEYWVCSTKQTKGRRTRKRDSTMGKAGEINPLGCDNENISYNFLMEIMGVVSERLQANTDTIKHDMINWLTKLRKQLLEANGGHTEADLQRELSRKSKLLDAYLDGILNKQEYQKKAEELDERIIQLKAETEKNKANSGDIAEIDKVLANIDEEVSRYVDGNEKLKVEYLLEHLEQVQIFPDKVIVIVPILSEGIVVEKTQYVSREKRSR

SEQ ID NO: 2492 - protein, 544 aa, Unknown
  Description of Unknown: Integrase B2493 sequence
  SM00857,G3DSA:1.10.10.2600,IPR036162,PF13408,IPR025827, G3DSA:3.40.50.1390,PS51737,IPR006119,IPR038109,PF07508, SSF53041,IPR011109,PTHR30461,Coil,cd00338, PF00239
MAYRKITDIRDTIGMRAVFYARVSTAEEEQLNAIELQIEENRGCIKDHGWKLVGEYIDRSKSGTMVKGRDDYQRLYEDLYEDLFDIVVIKDQERLQRNTLDWYLFINRVVQTGKLLFMYMDGKFYSPDDALITGVRAIIAEEFSRNLSKKLHNYHDHRIEKARQGQEIALQGSGNVYGWDKKDGKYYINPEQAKVRRLMCEGIMARKGSTLIAKELNDAGYRNTVGKPWKPMDIPKFVYDCKNVGTMIINKERHDFESKQTIKLPKEEWVYVENALPPIVTQEEWDLICKIHEERVIATGSDRRGKKTSGYSFSGKLVCGICGAPYWRKQRVSKDEYWVCSTKQTKGRRTRKRDSTMGKSGEINPLGCDNENISYNSLMEIMGVVSERLQANTDTIKHDMINWLTKLRKQILEANGGHTEADLQRELSRKSKLLDAYLDGILNKQEYQKKAEELDERIIKLKAETEKNKANSGDIAEIDKVLANIDEEVSRYVDGNEKLKVEYLLEHLEQVQIFPDKVIVIVPILSEGIVVEKTQYVSREKRCG

SEQ ID NO: 2493 - protein, 543 aa, Unknown
  Description of Unknown: Integrase B2494 sequence
  PTHR30461:SF3,IPR036162,PS51737,IPR011109,PTHR30461, PS00397,PF00239,G3DSA:1.10.10.2600,IPR006119,SSF53041, cd00338,SM00857,IPR025827,IPR038109,PS51736, IPR006118,PF13408,G3DSA:3.40.50.1390,PF07508,Coil
MPVAVYCRVSSEEQAERGAIEIQKEFAAKYVDLYQLEVFDYYCDDGISGTIPVEARPEGSHLFRDAREKKFDTILFYKIDRLGRKVRVILNAVHDLEELGVSIRSMTEPLETETPTGRFMLTSLAGISELERDTILSRMWAGSQRAARLGNWLGGIVPFGYHVVDKQLRISDDIMPGCNLSEADVIQLIFDLSGNQKMSAIKISDYLNALNIPTRYDLNGINGKRKKNASSIWYPSRILSIIKSTTYKGTHKYGKRATNKNSKIILRPVPAIVSNELWEKANEALKINQITAMRNAVREYLLRGIIKCGNCGRTYMGTAYSGSGRKKIPYYVCNAKNSYLAHNTEKCISKNVRADWLEHLVLEDCIKILKSPNKILNMDSEKEQESPTNEVKKEHDQIKASLKKLSEERASIIELYRKKIISETDLSCQLEKLSTEEATLQERLKMKIDSKKSAATKQNKEKTISLLKEFADRCQNLDPEKLSFETRRAIIELIVEKITVTTESAPEKYYPEISVDIEYRFATTPNHIAYVEDCTVTGSALCT

SEQ ID NO: 2494 - protein, 543 aa, Unknown
  Description of Unknown: Integrase B2495 sequence
  PTHR30461:SF3,SM00857,G3DSA:1.10.10.2600,IPR036162,PF13408, IPR025827,PS51737,G3DSA:3.40.50.1390,IPR006119,IPR038109, PF07508,IPR011109,SSF53041,PTHR30461,PS51736, cd00338,PF00239
MKKLKVAAYARVSTDKDDQANSLENQKQYFQSYILNHEDWDFVDVYFDEGISGTQTKKRLGFNKMIDDAENGDIDLIITKEVSRFARNTVDTLSYTRRLKDSGIGVIFTLDNIDTRQSDGEFRLTIMASIAQEESRKTSERVKWGQKRQMEKGVVFGRDLLGYTVKNGVLYINEEEVPVVRAIFHKYTNEGKGSHTIARELLEEGMKPKRISLWSNTIILKVLRNEKYVGDLLQKKTYTPNYLTHSKKYNHGQEEMIYLKDHHEAIIDRDLWNRTQEELRRRSPSAQQKAKHSNRYWCSGKIYCAECGSLFVGRTKRWKDGKQYKSWKCNASVNYMRAKQDEYGNPIKCHNNSINQKTLNFCMNYCISLMQTEQDSLKKEIITEISKVKEQSSYESKTKHIEEKIKQVETKKRRLIDLALDNVISGQDLKTQTAWYNEEIESLQLQLNESLTEDKKHQAQIRDMESYVNELDKIMSINSADSELVYKEIVKHIDVHNDKILDVWLKPLPFGIQLKVKTTGRRDNYMTEILEYSYIKPEIKGTI

SEQ ID NO: 2495 - protein, 543 aa, Unknown
  Description of Unknown: Integrase B2496 sequence
  PTHR30461:SF3,SM00857,G3DSA:1.10.10.2600,IPR036162,PF13408, IPR025827,G3DSA:3.40.50.1390,PS51737,IPR006119,IPR038109, PF07508,SSF53041,IPR011109,PTHR30461,Coil, PS51736,cd00338,PF00239
MKRVICLYRVSTKGQVDKDDIPMQRIECRKFIETQGWTLVGEYAEKGVSGFKVSAEKRDAIMSIRKEAERGAFDVLLVFMFDRLGRRDDETPFLVEWFISKGIEVWSTREGQQKMESRADKLINYIRYWQAGGESEKTSERVRTKHRQMVEAGLWRGGARPFGYKLIHTGRIGKKNRQLFDLAIDEKESVIIRDIFDGYIRRGMGMHRLANYLNSHYPSPDKIWAPQSIKTILTNPVYIGVSRCGDVRSPVNEALRIVSDEDFQFARHVMDMRVTRKTQTRGDIDEDNLDEAKRTKTSIYGASLLSGLLYCAHCGHKLVGTYHTKQRVNGEYYYRPVYRCYNGATKAKGCDGQRTYSAARIEKAVLEIVHQYFSHFGESMDAVWKEQQRLQIKQGSGARLKQAELSLSRLQAQHKKLREELVKVLMGESVFDEETIKSMLDEKQDAIEKAEAYLKEVRASAEDTEQKLQQLIFQYRSIKNWSSVFDQANDDEKKMILARIIEKITVDKNYNISIYFFLTLEDFRKEMEDNAEKIEIFEASQCI

SEQ ID NO: 2496 - protein, 543 aa, Unknown
  Description of Unknown: Integrase B2497 sequence
  PTHR30461:SF3,SM00857,G3DSA:1.10.10.2600,IPR036162,PF13408, PS51737,G3DSA:3.40.50.1390,IPR025827,IPR006119,IPR038109, PF07508,IPR011109,SSF53041,PTHR30461,Coil, PS51736,cd00338,PF00239
MEVKKIPKKTVTLIEPKRSILVDKEKYHQKRVAAYCRVSTDSEEQLTSYVNQKKFYTDMIARNTEWEFAGLYADEGISGTRADKRPEFNNMIKACLAGKIDYIITKSVSRFARNTVDCLDYVRLLRARGIGIFFEEQNIDTLKSDSELYLVIYAGFAQSESESISKNITWSYRKNFEDGKPIFMFKKLLGYKKGEDGEPVIVPEEAEIVERIYTMYLSGMTVDVISRQLQSEHIVIPDKKFSFGKNMVMNILKNEKYCGDCILQKTVTVDCISKTRKKNEGEAPMYIVENSHPAIISREMFNRAQEELSKRKARSPQSQKTAITASGKYSKYALTDVLICAECGSRYKRVTWTSLGQKRIVWRCVNRLDNGKKYCQHSPTLSEPALQEAIVRALNKFNDEDTSTYLTLMKATIGEAIGANGGSDEIDLLERRIDALNSRMLKMVSDSVERGADMEENEDEFKTISEQIEQLNRRIEAIRKSEGSDEDRQERLSLIQATIDQREAHRDTYDDAIVRQMIECVKVHEGGKLTIIFGGGYEIEEQI

SEQ ID NO: 2497 - protein, 543 aa, Unknown
  Description of Unknown: Integrase B2498 sequence
  PTHR30461:SF3,IPR036162,PS51737,IPR011109,PTHR30461, PS00397,PF00239,G3DSA:1.10.10.2600,IPR006119,SSF53041, cd00338,SM00857,IPR025827,IPR038109,PS51736, IPR006118,PF13408,G3DSA:3.40.50.1390,PF07508,Coil
MPVAVYCRVSSEEQAERGTIEIQKEFAAKYVDLYQLEVFDYYCDDGISGTIPVEARPEGSRLFRDAREKKFDTILFYKIDRLGRKVRVILNAVHDLEELGVSIRSMTEPLETETPTGRFMLTSLAGISELERDTILSRMWAGSQRAARLGNWLGGIVPFGYHVVDKQLQISDDIMPGCNLSEADVIQLIFDLSGNQKMSAIKISDYLNALNIPTRYDLNGINGKRKKNASSIWYPSRVLSIIKSTTYKGTHKYGKRATNKNSKIILRPVPAIVSDELWEKANEALKTNQITAMRNAVRKYLLRGIIKCGNCGRTYMGTAYSGSGREKIPYYVCNAKNSYLAHNTEKCISKNVRADWLEHLVLEDCIKILKSPNKILNMDPEKEQQSLADEVKKEHDQIKASLKKLSEERASIIELYRKKIISETDLSCQLEKLSTEEATLQERLKMKIDSRKSAATKQNKEKAISLLKKFTDKCQNLDPEKLSFETKRAIIELIVEKITVTTESAPEKYYPEISVDIEYRFATTPNHIAYVEDCTVTGSALCT

SEQ ID NO: 2498 - protein, 543 aa, Unknown
  Description of Unknown: Integrase B2499 sequence
  PTHR30461:SF3,IPR036162,PS51737,IPR011109,PTHR30461, PS00397,PF00239,G3DSA:1.10.10.2600,IPR006119,SSF53041, cd00338,SM00857,IPR025827,IPR038109,PS51736, IPR006118,PF13408,G3DSA:3.40.50.1390,PF07508,Coil
MPVAVYCRVSSEEQAERGTIEIQKEFAAKYVDLYQLEVFDYYCDDGISGTIPVEARPEGSRLFRDAKEKKFDTILFYKIDRLGRKVRVILNAVHDLEELGVSIRSMTEPLETETPTGRFMLTSLAGISELERDTILSRMWAGSQRAARLGNWLGGIVPFGYHVVDKQLQISDDIMPGCNLSEADVIQLIFDLSGNQKMSAIKISDYLNALNIPTRYDLNGINGKRKKNASSIWYPSRVLSIIKSTTYKGTHKYGKRATNKNSKIILRPVPAIVSDELWEKANEALKTNQITAMRNAVREYLLRGIIKCGNCGRTYMGTAYSGSGREKIPYYVCNAKNSYLAHNTEKCISKNVRADWLEHLVLEDCIKILKSPNKILNMDPEKEQQSLADEVKKEHDQIKASLKKLSEERASIIELYRKKIISETDLSCQLEKLSTEEATLQERLKMKIDSRKSAATKQNKEKAISLLKKFTDKCQNLDPEKLSFETKRAIIELIVEKITVTTESAPEKYYPEISVDIEYRFATTPNHIAYVEDCTVTGSALCT

SEQ ID NO: 2499 - protein, 543 aa, Unknown
  Description of Unknown: Integrase B2500 sequence
  PTHR30461:SF3,cd00338,SM00857,G3DSA:1.10.10.2600,IPR036162, PF13408,PS51737,IPR025827,G3DSA:3.40.50.1390,IPR006119, IPR038109,PF07508,IPR011109,SSF53041,PTHR30461, PS51736,Coil,PF00239
MARKKNIAAGQNAVIYARYSSHNQREVSIEQQIAECTKYAAALGLRIVGTYEDRAISGKTDNRPRFQQMMRDAEKGKFQAVVAWKSNRIGRNMLQAMVNEAKLDDYGVKVFYAEEDFDDTAAGRFALRNMMNVNQFYSENMAEDITRGLYDNASKCMANGRQPLGYKRGEDGRVVLDEANAAVVREIFTRVAAGDLFVDIARDLNAQGIKTSKGANWNKGSFQSICQNERYRGIYIYGDIRVADGIPRIVSDDLWYRVQEAMRMKKNPVGTRHRVGAEDYLLTGKLRCGHCGSYMTGVSGTSRNGELHYYYTCQKRRTEHACDKKNIRRDVIEPAVAQAIKMYCLTDDVIAWIADRTVEYWEKHDNDLQIEALEQQLEENKKATSNMLKAIEMGIITEATRTRMVELETEQSRLSVQLNAAKEDVVKIDREQIISYLELLQQGDIHDRDFQMELFKNFLVAVYVYDDNRMKLVFSCMGDQNSVEIPLETGEDPPDGGLSPDAKMFVLTPDSSTNQEQNEHRTTIQMVGNVFVLFCEIPNVTLT

SEQ ID NO: 2500 - protein, 543 aa, Unknown
  Description of Unknown: Integrase B2501 sequence
  PTHR30461:SF3,cd00338,SM00857,G3DSA:1.10.10.2600,IPR036162, PF13408,IPR025827,G3DSA:3.40.50.1390,PS51737,IPR006119, IPR038109,PF07508,SSF53041,IPR011109,PTHR30461, PS51736,Coil,PF00239
MSFSPPRKAALYARFSTEHQCSIEIQFAKMQEFCLAQGFSVSPLHAYSDEALSGMRTARRSGFQDLMVAAERHEFDVVVLYDLTRGSREVVDWFTFRRKMQSLGIQVLSMHDRLGNLDDPADFLPELISVGMGQVHVLTSRLKSMDKVDFLAQQGKFLGGYAPLGYEIKDGEYFICEREAAYVRTIYAMYADGKSYNEILAALPSALRGKRGRPIGKNSLYTILRNDRYIGRYSWCKRQVKYFSEWAGGGQSDRAVIIEDAIPAIIDKATWERVQTRMQENRINKTNHSSAHREYLLSGVLFCGSCGASFFGATTINKKGFEYKFYKCGNKNRTGTCHSKNISANDIEPLIVNLLRNALLNGSLIEKTADAILSVGAGNSSTDLKTLNAQLAQLDLKISNLVDALSNGLSSDAVREKLGLLESERAALKLKQDSLEPCHETLDRDFIISELQRDCEILQNSPSAMKQLIKKYIPHIDVFDDHIEIHCVADLAATSGIPLKTKKDGVSNISAENTITNGCGSAQHGVLVFTIPRSILALLNFSA

SEQ ID NO: 2501 - protein, 543 aa, Unknown
  Description of Unknown: Integrase B2502 sequence
  PTHR30461:SF3,cd00338,SM00857,G3DSA:1.10.10.2600,IPR036162, PF13408,PS51737,IPR025827,G3DSA:3.40.50.1390,IPR006119, IPR038109,PF07508,IPR011109,SSF53041,PTHR30461, PS51736,Coil,PF00239
MARKKNIAAGLDAVIYARYSSHNQREVSIEQQVRECMKHAAELGLHVVGTYEDRAISGKTDKRPNFQRMMRDAEKGKFQAVVAWKSNRIGRNMLQAMVNEAKLEDCGVKVFYAEEDFDDTAAGRFALRNMMNVNQFYSENMAEDITRGLYDNASKCMANGRQPLGYKRGEDGRVVLDEANAAVVREIFTRVAAGDLFVDIARDLNAQGIKTSKGANWNKGSFQSICQNERYRGIYIYGDVRVADGIPRIVSDDLWYRVQEAMRMKKNPVGTRHRVGAEDYLLTGKLRCGHCGSYMTGVSGTSRNGELHYYYTCQKRRTEHACDKKNIRRDVIEPAVAQAIKMYCLTDDVIAWIADRTVEYWEKHDNDLQIEALEQQLEENKKATSNMLKAIEMGIITEATRTRMVELETEQSRLSVQLNAAKEDVVKIDREQIISYLELLQQGDIHDRDFQMELFKNFLVAVYVYDDNRMKLVFSCMGDQNSVEIPLETGEDPPDGGLSPDAKMFVLTPDSSTNQEQNEHRTTIQMVGNVFVLFCEIPNVTLT

SEQ ID NO: 2502 - protein, 543 aa, Unknown
  Description of Unknown: Integrase B2503 sequence
  PTHR30461:SF3,IPR036162,PS51737,IPR011109,PTHR30461, PS00397,PF00239,G3DSA:1.10.10.2600,IPR006119,SSF53041, cd00338,SM00857,IPR025827,IPR038109,PS51736, IPR006118,PF13408,G3DSA:3.40.50.1390,PF07508,Coil
MPVAVYCRVSSEEQAERGTIEIQKEFAAKYVDLYQLEVFDYYCDDGISGTIPVEARPEGSRLFRDAREKKFDTILFYKIDRLGRKVRVILNAVHDLEELGVSIRSMTEPLETETPTGRFMLTSLAGISELERDTILSRMWAGSQRAARLGNWLGGIVPFGYHVVDKQLQISDDIMPGCNLSEADVIQLIFDLSGNQKMSAIKISDYLNALNIPTRYDLNGINGKRKKNASSIWYPSRVLSIIKSTTYKGTHKYGKRATNKNSKIILRPVPAIVSDELWEKANEALKTNQITAMRNAVREYLLRGIIKCGNCGRTYMGTAYSGSGREKIPYYVCNAKNSYLAHNTEKCISKNVRADWLEHLVLEDCIKILKSPNKILNMDPEKEQQSLADEVKKEHDQIKASLKKLSEERASIIELYRKKIISETDLSCQLEKLSTEEATLQERLKMKIDSRKSAATKQNKKKAISLLKKFTDKCQNLDPEKLSFETKRAIIELIVEKITVTTESAPEKYYPEISVDIEYRFATTPNHIAYVEDCTVTGSALCT

SEQ ID NO: 2503 - protein, 543 aa, Unknown
  Description of Unknown: Integrase B2504 sequence
  PTHR30461:SF3,IPR036162,PS51737,IPR011109,PTHR30461, PS00397,PF00239,G3DSA:1.10.10.2600,IPR006119,SSF53041, cd00338,SM00857,IPR025827,IPR038109,PS51736, IPR006118,PF13408,G3DSA:3.40.50.1390,PF07508,Coil
MPVAVYCRVSSEEQAERGTIEIQKEFAAKYVDLYQLEVFDYYCDDGISGTIPVEARPEGSRLFRDAREKKFDTILFYKIDRLGRKVRVILNAVHDLEELGVSIRSMTEPLETETPTGRFMLTSLAGISELERDTILSRMWAGSQRAARLGNWLGGIVPFGYHVVDKQLQISDDIMPGCNLSEADVIQLIFDLSGNQKMSAIKISDYLNALNIPTRYDLNGINGKRKKNASSIWYPSRVLSIIKSTTYKGTHKYGKRATNKNSKIILRPVPAIVSDELWEKANEALKTNQITAMRNAVREYLLRGIIKCGNCGRTYMGTAYSGSGREKIPYYVCNAKNSYLAHNTEKCISKNVRADWLEHLVLEDCIKILKSPNKILNMDPEKEQQSLADEVKKEHDQIKASLKKLSEERASIIELYRKKIISETDLSCQLEKLSTEEATLQERLKMKIDSRKSAATKQNKEKAISLLKKFTDKCQNLDPEKLSFETKRAIIELIVEKITVTTESAPEKYYPEISVDIEYRFATTPNHIAYVEDCTVTGSALCT

SEQ ID NO: 2504 - protein, 543 aa, Unknown
  Description of Unknown: Integrase B2505 sequence
  cd03768,SM00857,G3DSA:1.10.10.2600,IPR036162,PS51737, SSF109709,G3DSA:3.40.50.1390,IPR006119,IPR038109,PF07508, IPR011109,SSF53041,PTHR30461,PS51736,PF00239
MAKVNCAIYVRKSTEKGLELEFNSLHNQEDACRSYIMSQAFNNWEYFKTYTDGGISGGTMERPALKQMLEDIRRGLIQTVVVYKVDRLSRSIMDFHNMMKEFDKYGCSFVSITQAFDTSTSMGKLTLNMLLSFAQFEREVSSERVRDKIRASKAKGLWTGGIPKLGYDIKDKKLVINPIEAEQVRSIFEGYLQCGSLAELEKFAEIKGFKHKGWITNKGEQKGGKPFKISALHRLLHEKLYLGMIENKRTGQAFKGQHEAIISKELWEKVQAKLKDNDNSSSHTRNRNNNLLTGKLFDANGTIFTNQANSKKKATKRHYYSIKGLFLPTEQIDKLAKDAIIEILNGNLNGLNKDSAMALKLINFNDMDYFAQRNFIRNFINKIIYQKDHLTFFFNTDPTILSAYTGDSLNKSNDPLEFIADNANNQVIYEKQVVINRGLSSNIYNAGKVGLMSINDNNRLIVRTFAYAWKFKKLYEKGIRMEDIMKQEKMTKRTIYKYLNLAYLSPKIVNQLLSGTLTVNLQTLFDIASKNLSFEEQEKKVFN

SEQ ID NO: 2505 - protein, 543 aa, Unknown
  Description of Unknown: Integrase B2506 sequence
  PTHR30461:SF3,cd00338,SM00857,G3DSA:1.10.10.2600,IPR036162, PF13408,PS51737,IPR025827,G3DSA:3.40.50.1390,IPR006119, IPR038109,PF07508,IPR011109,SSF53041, PTHR30461,PS51736,Coil,PF00239
MAKKKKPAGGIAVIYARYSSHNQRDVSIEQQIEACRKHAAELGLTIIATYEDRAISGRTDNRPAFQRLMHDAEKGKFSYVLAWKSNRMGRNMMQAMVNESRLMDCGIKVYYAEEDFDDSAAGRFALRSMMNVNQFYSDNLAEDVRRGLMDNANKCMVNGRQPLGYKRGKDGKVVVDEPAAAIVREVYTRVASGELFTDIARDLNRRGIKTADKGEWNKNSFHRLCSNEKYRGIYIYGDVRIEGGIPTIIDDTLWYKVQEALRVKKLKRNGRHRPGDEDYLLTGKLRCGKCGGYMIGMSGRSKTGDIHYYYACQNRRVGRTCDKKNIRRDVIEPAVAQAIKEYCLTDDAIEWIADKTVEYWEKADRNLQLDSIEGDLAAVQSSISNVMKAIEMGVVTETTRDRLIELEKQRTDLKSKLALAKEEVVHVDRKKLISSLLLFRNGDIHDRQYQEDLFKTFLISVYVYDDDDNGHLKIVFNAFGDNNTVDLPIDFGETDNQSAFSDGAEKFDYSLHRSTKRELGEHSTIEMVGSVFVLFCSLPKIRK

SEQ ID NO: 2506 - protein, 543 aa, Unknown
  Description of Unknown: Integrase B2507 sequence
  PTHR30461:SF3,IPR036162,PS51737,IPR011109,PTHR30461, PS00397,PF00239,G3DSA:1.10.10.2600,IPR006119,SSF53041, cd00338,SM00857,IPR025827,IPR038109,PS51736, IPR006118,PF13408,G3DSA:3.40.50.1390,PF07508,Coil
MPVAVYCRVSSEEQAERGTIEIQKEFAAKYVDLYQLEVFDYYCDDGISGTIPVEARPEGSRLFRDAREKKFDTILFYKIDRLGRKVRVILNAVHDLEELGVSIRSMTEPLETETPTGRFMLTSLAGISELERDTILSRMWAGSQRAARLGNWLGGIVPFGYHVVDKQLQISDEIMPGCNLSEADVIQLIFDLSGNQKMSAIKISDYLNALNIPTRYDLNGINGKRKKNASSIWYPSRVLSIIKSTTYKGTHKYGKRATNKNSKIILRPVPAIVSDELWEKANEALKTNQITAMRNAVREYLLRGIIKCGNCGRTYMGTAYSGSGREKIPYYVCNAKNSYLAHNTEKCISKNVRADWLEHLVLEDCIKILKSPNKILNMDPEKEQQSLADEVKKEHDQIKASLKKLLEERTSIIELYRKKIISETDLSYQLEKLSTEEATLQERLKMKIDSRKSAATKQNKEKAISLFKKFTDKCQNLDSEKLSFETKRAIIELIVEKITVTTESAPEKYYPEISVDIEYRFATTPNHIAYVEDCTVTGSALCT

SEQ ID NO: 2507 - protein, 543 aa, Unknown
  Description of Unknown: Integrase B2508 sequence
  PTHR30461:SF3,cd00338,SM00857,G3DSA:1.10.10.2600,IPR036162, PF13408,PS51737,G3DSA:3.40.50.1390,IPR025827,IPR006119, IPR038109,PF07508,IPR011109,SSF53041,PTHR30461, PS51736,Coil,PF00239
MKKFPIDLSCLTEEEISQFQEDPYTLYNGDQNVAIYLRYSSTGQSDQSIEGQLRDCRTFCKANHYRIVAIYVDRATTARKDVEKRLHLMEMISDSAKQNWEYVIVWKLDRFARNRNDSAIMKMRLRKNGVKVLSATEHLTDSPESIILESVLEGMAEFFSAELSQKVTRGMRESALKCHSVGGHIPLGYKVENHKLVIDPDTAHIVQEAFSLYANGESVAAICRKFNSAGYKTAKNTEFNRSSFKAMFRNTRYIGTYTYKDIVIENGIPAIIDKELFETVQRRLSKTATAPARGKAKVDYLLSGKLFCGHCGASMNGESGAGRHGKVYHYYSCYTKKRKLGCDKRPLKKDYIEGIVARDALNLLTDQLIDEIADMAIRQSEQDLINDTHIPQLTAQLSEVEKSITNITAAIEKGIASETLMNRLVQLEHEKKTLNKEIKAEEKFVYRIDRDQIVFWLSQFKYGNIEDEDFRRRLIDLLVNSVTVWDEPDGYKITTAYNLTSCKTKTFRVEKNPAAEEATGFDFGESECTKSEQALYRLLRLIL

SEQ ID NO: 2508 - protein, 543 aa, Unknown
  Description of Unknown: Integrase B2509 sequence
  PTHR30461:SF3,SM00857,G3DSA:1.10.10.2600,IPR036162,PF13408, IPR025827,PS51737,G3DSA:3.40.50.1390,IPR006119,IPR038109, PF07508,IPR011109,SSF53041,PF00239,PTHR30461, PS51736,Coil,cd00338
MEVAKIPKKIVTVIEPKRSMTVDKEKYRQKKVAAYCRVSTDSEEQLVSYANQKKVYTEMIASRKDWCFAGLFADEGKSGTRADKRPEFNKMINDCLAGKIDYIITKSVSRFARNTVDCLDYVRMLKSKGIGVYFEEQQIDTLKTDSELYLVIYAGFAQSESESISKNITWSVRKKFEEGTPVFIYKRFLGYKKGADGEPEIVPSEAAIVERIFNLYLAGETVDNISKMMQAENYDIPGKTISFSKGMIMNMLSNERYCGDAILQKSVTVDCIEKKRKKNTGEAPMYYVQNNHPAIIDRVTFNKVQEELARRKTKTPGSAKSSITSTGKYSRYALTDVLICGNCGTRYRRVTWSRNGTKRIVWRCISRLDYGKKYCSDSPTIMEDKLQEAIVRAVNKFNKQDNATYKALMRATISEALGLNGDPEEVDMLERKIEALNNKMLALVNESVSSGDGIEAHESEFMTLSQEAELLKQRIAAIQESTAKDNGEQNRLEQIQAIIAERESKCMEYDDSIVRQMVECIKVYPGGKLEIIFGGGYLVEESV

SEQ ID NO: 2509 - protein, 543 aa, Unknown
  Description of Unknown: Integrase B2510 sequence
  PTHR30461:SF3,SM00857,G3DSA:1.10.10.2600,IPR036162,PF13408, PS51737,G3DSA:3.40.50.1390,IPR025827,IPR006119,IPR038109, PF07508,IPR011109,SSF53041,PF00239,PTHR30461, PS51736,Coil,cd00338
MARKKNIAAGQNAVIYARYSSHNQREVSIEQQIAECTKYAAALGLRIVGTYEDRAISGKTDNRPRFQQMMRDAGKGKFQAVVAWKSNRIGRNMLQAMVNEAKLDDYGVKVFYAEEDFDDTAAGRFALRNMMNVNQFYSENMAEDITRGLYDNASKCMANGRQPLGYKRGEDGRVVLDEANAAVVREIFTRVAAGDLFVDIARDLNAQGIKTSKGANWNKGSFQSICQNERYRGIYIYGDVRVADGIPRIVSDDLWYRVQEAMRMKKNPVGTRHRVGAEDYLLTGKLRCGHCGSYMTGVSGTSRNGELHYYYTCQKRRTEHACDKKNIRRDVIEPAVARAIKMYCLTDDVIAWIADRTVEYWEKHDNDLQIEALEQQLEENKKATSNMLKAIEMGIITEATRTRMVELETEQSRLSVQLNAAKEDVVKIDREQIISYLELLQQGDIHDRDFQMELFKNFLVAVYVYDDNRMKLVFSCMGDQNSVEIPLETGEDPPDGGLSPDAKMFVLTPDSSTNQEQNEHRTTIQMVGNVFVLFCEIPNVTLT

SEQ ID NO: 2510 - protein, 543 aa, Unknown
  Description of Unknown: Integrase B2511 sequence
  PTHR30461:SF3,IPR036162,PS51737,IPR011109,PTHR30461, PF00239,G3DSA:1.10.10.2600,IPR006119,SSF53041,cd00338, SM00857,IPR025827,IPR038109,PS51736,mobidb-lite, PF13408,G3DSA:3.40.50.1390,PF07508,Coil
MSLASRTVTVPDENRLNAVIYARFSSERQTENSIEFQLRADKAYCEQKGFRVIGEYIDRAMTGTNDNRPEFQRMIADAKKRQFAFIVVYRFDRFARNRYDSAIYKKQLERSGVRVLSTEESVGTGDEGIILESIYEAMAESYSRKLSRIVTEGMKQRALAGFSTGGNLPYAYKIVDRRLAIDEEKAPAVRLAFEMYVDGKTKSEIARELTARGYRTQKGNNISVWFVSGLLSNPTFKGESSFCGVKRDNPAIISPELFDKVQDLLEKNKRHYGKKTEGMYFALTGKVFCGHCGAAMVGDSGNGVGGRYYYYSCINKKNRRACKKKSERQDWLEKYVCEQTANFVLAPKNISYIAKRVAEASAADLGCDRIAELERELARIDRQFDALTESLVKTTNPTFLKKINEKAEALTAQKEAAEKEHAALCLRRELCVTPSDVEMYLRSFAHGDPSDPDYRRRLINTLVNAVYVWDDKILIYYNYNVENNAEMEFADVCKDADKPLPPSRQDASDHMPPSSSPSPATAPTPPKCSDSLTIGSPTIKGRL

SEQ ID NO: 2511 - protein, 543 aa, Unknown
  Description of Unknown: Integrase B2512 sequence
  PTHR30461:SF3,SM00857,G3DSA:1.10.10.2600,IPR036162,PF13408, IPR025827,PS51737,G3DSA:3.40.50.1390,IPR006119,IPR038109, PF07508,SSF53041,IPR011109,PTHR30461,Coil, PS51736,cd00338,PF00239
MARKKNIAAGLDAVIYARYSSHNQREVSIEQQIAECTKHAAALGLRIVGTYEDRAISGKTDNRPRFQQMMRDAEKGKFQAVVAWKSNRIGRNMLQAMVNEAKLDDYGVKVFYAEEDFDDTAAGRFALRNMMNVNQFYSENMAEDITRGLYDNASKCMANGRQPLGYKRGEDGRVVLDEANAAVVREIFTRVAAGDLFVDIARDLNAQGIKTSKGANWNKGSFQSICQNERYRGIYIYGDVRVADGIPRIVSDDLWYRVQEAMRMKKNPVGTRHRVGAEDYLLTGKLRCGHCGSYMTGVSGTSRNGELHYYYTCQKRRTEHACDKKNIRRDVIEPAVAQAIKMYCLTDDVIEWMADRTVEYWEKHDNDLQIEALEQQLEENKKATSNMLKAIEMGIITEATRTRMVELETEQSRLSVQLNAAKEDVVKIDREQIISYLELLQQGDIHDRDFQMELFKNFLVAVYVYDDNRMKLVFSCMGDQNSVEIPLETGEDPPDGGLSPDAKMFVLTPDSSTNQEQNEHRTTIQMVGNVFVLFCEIPNVTLT

SEQ ID NO: 2512 - protein, 543 aa, Unknown
  Description of Unknown: Integrase B2513 sequence
  PTHR30461:SF3,cd00338,SM00857,G3DSA:1.10.10.2600,IPR036162, PF13408,PS51737,G3DSA:3.40.50.1390,IPR025827,IPR006119, IPR038109,PF07508,IPR011109,SSF53041,PTHR30461, PS51736,Coil,PF00239
MARKKNIAAGQDAVIYARYSSHNQREVSIEQQVSECMKHAAELGLHVVGTYEDRAISGKTDKRPNFQRMMRDAEKGKFQAVVAWKSNRIGRNMLQAMVNEAKLEDCGVKVFYAEEDFDDTAAGRFALRNMMNVNQFYSENMAEDITRGLYDNASKCMANGRQPLGYKRGEDGRVVLDEANAAVVREIFTRVAAGDLFVDIARDLNAQGIKTSKGANWNKGSFQSICQNERYRGIYIYGDVRVADGIPRIVSDDLWYRVQEAMRMKKNPVGTRHRVGAEDYLLTGKLRCGHCGSYMTGVSGTSRNGELHYYYTCQKRRTEHACDKKNIRRDVIEPAVAQAIKMYCLTDDVIAWIADRTVEYWEKHDNDLQIEALEQQLEENKKATSNMLKAIEMGIITEATRTRMVELETEQSRLSVQLNAAKEDVVKIDREQIISYLELLQQGDIHDRDFQMELFKNFLVAVYVYDDNRMKLVFSCMGDQNSVEIPLETGEDPPDGGLSPDAKMFVLTPDSSTNQEQNEHRTTIQMVGNVFVLFCEIPNVTLT

SEQ ID NO: 2513 - protein, 543 aa, Unknown
  Description of Unknown: Integrase B2514 sequence
  PTHR30461:SF3,SM00857,G3DSA:1.10.10.2600,IPR036162,PF13408, PS51737,IPR025827,G3DSA:3.40.50.1390,IPR006119,IPR038109, PF07508,IPR011109,SSF53041,PTHR30461,Coil, cd00338,PF00239
MENTFMDFTEMIRVDCLYRVSTDKQVDYNDKSQADIPMQRRECHRFCEKMGWTIVHEEQEDGVSGHKVRAENRDKLQIIKERAKQGKFDILLVFMFDRIGRIADETPFVVEWFVKNGIRVWSTQEGEQRFDNHTDKLTNYIRFWQADGESEKTSIRTKTALGQLVEDGGFKGGFAPYGYDLVKSGRFNKRKHEVFELAVNADEASVVRIIYDKYVQEGFGAQRIATYLNNLGYRARTGKMWHHATVRGILCNLTYTGVLRSGESRSEILPHLQIIEPELFDVAQRIRTARVNAIEQENHVPLNTRGQYLLAGNVFCGHCGSRLSLTTNGKAYPCKDDPSRVVKRVRYICYGKTRKQTECDGQTGYTAHILNDIIDKVVRQIFERMKAVPKSEVVGVRYREKMEERKALLRSVKADYTKAAAELEALKSEVVKAIKGESSFSKELLASLISDTERKCQELQAALEQAQSEYDAGEATLQSLNSQYDDMISWAEMYDSASVESKKMIVSCLIRRVDVYRGYRVHIDFNIDFKQFSLGLDIAEIAA

SEQ ID NO: 2514 - protein, 543 aa, Unknown
  Description of Unknown: Integrase B2515 sequence
  PTHR30461:SF3,SM00857,G3DSA:1.10.10.2600,IPR036162,PF13408, IPR025827,PS51737,G3DSA:3.40.50.1390,IPR006119,IPR038109, PF07508,IPR011109,SSF53041,PF00239,PTHR30461, PS51736,Coil,cd00338
MEVTKVPKKIVTVIEPKRSMTVDKEKYRQKKVAAYCRVSTDSEEQLVSYANQKKVYTEMIASRKDWCFAGLFADEGKSGTRADKRPEFNKMINDCLAGKIDYIITKSVSRFARNTVDCLDYVRMLKSKGIGVYFEEQQIDTLKTDSELYLVIYAGFAQSESESISKNITWSVRKKFEEGTPVFIYKRFLGYKKGADGEPEIVPSEAAIVERIFNLYLAGETVDNISKMMQAENYDIPGKTISFSKGMIMNMLSNERYCGDAILQKSVTVDCIEKKRKKNTGEAPMYYVQNNHPAIIDRVTFNKVQEELARRKTKTPGSAKSSITSTGKYSRYALTDVLICGNCGTRYRRVTWSRNGTKRIVWRCISRLDYGKKYCSDSPTIMEDKLQEAIVRAVNKFNEQDNATYKALMRATISEALGLNGDPEEVDMLERKIEALNNKMLALVNESVSSGDGIEAHESEFMTLSQEAELLKQRIAAIQESTAKDNGEQNRLEQIQAIIAERESKCMEYDDSIVRQMVECIKVYPGGKLEIIFGGGYLVEESV

SEQ ID NO: 2515 - protein, 543 aa, Unknown
  Description of Unknown: Integrase B2516 sequence
  PTHR30461:SF3,cd00338,SM00857,G3DSA:1.10.10.2600,IPR036162, PF13408,PS51737,G3DSA:3.40.50.1390,IPR025827,IPR006119, IPR038109,PF07508,IPR011109,SSF53041,PTHR30461, PS51736,Coil,PF00239
MARKKNIAAGQNAVIYARYSSHNQREVSIEQQVRECMKHAAELGLHVVGTYEDRAISGKTDKRPNFQRMMRDAEKGKFQAVVAWKSNRIGRNMLQAMVNEAKLEDCGVKVFYAEEDFDDTAAGRFALRNMMNVNQFYSENMAEDITRGLYDNASKCMANGRQPLGYKRGEDGRVVLDEANAAVVREIFTRVAAGDLFVDIARDLNAQGIKTSKGANWNKGSFQSICQNERYRGIYIYGDVRVADGIPRIVSDDLWYRVQEAMRMKKNPVGTRHRVGAEDYLLTGKLRCGHCGSYMTGVSGTSRNGELHYYYTCQKRRTEHACDKKNIRRDVIEPAVAQAIKMYCLTDDVIAWIADRTVEYWEKHDNDLQIEALEQQLEENKKATSNMLKAIEMGIITEATRTRMVELETEQSRLSVQLNVAKEDVVKIDREQIISYLELLQQGDIHDRDFQMELFKNFLVAVYVYDDNRMKLVFSCMGDQNSVEIPLETGEDPPDGGLSPDAKMFVLTPDSSTNQEQNEHRTTIQMVGNVFVLFCEIPNVTLT

SEQ ID NO: 2516 - protein, 543 aa, Unknown
  Description of Unknown: Integrase B2517 sequence
  cd00338,SM00857,G3DSA:1.10.10.2600,IPR036162,PF13408, IPR025827,PS51737,G3DSA:3.40.50.1390,IPR006119,IPR038109, PF07508,IPR011109,SSF53041,PTHR30461,PS51736, Coil,PF00239
MKKKQPNTRHGRAAIYARYSSHNQREASIEQQVKACRELAVRLGLDVVETYEDKAISGKSDRRPSFQHLLRDAEKGYFDCVLAWKSNRMGRNMLQAMTNEARLKDWGVRTFYAEEDFDDTAAGRFALRNMMNVNQFYSENMAEDITRGMMDNASKCLSNGALPLGYKAGENGRVVLDKAQAAVVQEIYTRVACREPFVDIAADLNRRGIKTKRGGPWTKSSFYTICRNERYRGIYIYDDVRVEGGVPRIVSDGLFYRVQEVLKVKKTPQSARHHTGAEDYLLTGKLFCGKCGRPMTGVSGTSRSGEMHYYYTCQKRRREHACDKKNVIREQIEKSVAQAIKQYMLTDEMIQHMADATMAYNARQEKDLHLQDLQGQLAAVKTSAANLLKAIEMGVITETTKARMVELEQEQGRLNAQIENARAELVPITRDNFVSLLHIYRDGDINDSKYLASLFETFLVRVDLYDDHFLIWFNPLGQKTPADIPITSIENGDADEFFDECRSKNVFDWGGKWSTINHQDEHTTFITMIGNVFVLFCPFPGLK

SEQ ID NO: 2517 - protein, 543 aa, Unknown
  Description of Unknown: Integrase B2518 sequence
  PTHR30461:SF3,SM00857,G3DSA:1.10.10.2600,IPR036162,PF13408, PS51737,IPR025827,G3DSA:3.40.50.1390,IPR006119,IPR038109, PF07508,IPR011109,SSF53041,PF00239,PTHR30461, PS51736,Coil,cd00338
MEVTKVPKKIVTVIEPKRSMTVDKEKYRQKRVAAYCRVSTDSEEQLVSYANQKKVYTEMIASRKDWCFAGLFADEGKSGTRADKRPEFNKMINDCLAGKIDYIITKSVSRFARNTVDCLDYVRMLKSKGIGVYFEEQQIDTLKTDSELYLVIYAGFAQSESESISKNITWSVRKKFEEGTPVFMYKRFLGYRKGADGEPEIVPSEATIVERIFNLYLAGETVDKISKMMQAENYDIPGKTISFSKGMIMNMLSNERYCGDAILQKSVTIDCIEKKRKKNTGEAPMYYVQNNHPAIIDRVTFNKVQEELARRKTKTPGSAKSSITSTGKYSRYALTDVLICGNCGTRYRRVTWSRNGVKRIVWRCISRLDYGKKFCSDSPTIMEDKLQEAIVRAVNKFNEQDNATYKALMRATISEALGLNGDPEEVDMLERKVEALNNKMLALVNESVSSGDGIEAHESEFMTLSQETELLKQRIAAIQESTAKDNGEQSRLEQIQAIISERESKCMEYDDSIVRQMVECIKVYPGGKLEIIFGGGYLVEESV

SEQ ID NO: 2518 - protein, 543 aa, Unknown
  Description of Unknown: Integrase B2519 sequence
  PTHR30461:SF3,cd00338,SM00857,G3DSA:1.10.10.2600,IPR036162, PF13408,PS51737,G3DSA:3.40.50.1390,IPR025827,IPR006119, IPR038109,PF07508,IPR011109,SSF53041,PTHR30461, PS51736,Coil,PF00239
MARKKNIAAGLDAVIYARYSSHNQREVSIEQQIAECTKHAAALGLRIVGTYEDRAISGKTDNRPRFQQMMRDAEKGKFQAVVAWKSNRIGRNMLQAMVNEAKLDDYGVKVFYAEEDFDDTAAGRFALRNMMNVNQFYSENMAEDITRGLYDNASKCMANGRQPLGYKRGEDGRVVLDEANAAVVREIFTRVAAGDLFVDIARDLNAQGIKTSKGANWNKGSFQSICQNERYRGIYIYGDVRVADGIPRIVSDDLWYRVQEAMRMKKNPVGTRHRVGAEDYLLTGKLRCGHCGSYMTGVSGTSRNGELHYYYTCQKRRTEHACDKKNIRRDVIEPAVAQAIKMYCLTDDVIAWIADRTVEYWEKHDNDLQIEALEQQLEENKKATSNMLKAIEMGIITEATRTRMVELETEQSRLSVQLNVAKEDVVKIDREQIISYLELLQQGDIHDRDFQMELFKNFLVAVYVYDDNRMKLVFSCMGDQNSVEIPLETGEDPPDGGLSPDAKMFVLTPDSSTNQEQNEHRTTIQMVGNVFVLFCEIPNVTLT

SEQ ID NO: 2519 - protein, 543 aa, Unknown
  Description of Unknown: Integrase B2520 sequence
  PTHR30461:SF3,IPR036162,PS51737,IPR011109,PTHR30461, PS00397,PF00239,G3DSA:1.10.10.2600,IPR006119,SSF53041, cd00338,SM00857,IPR025827,IPR038109,PS51736, IPR006118,PF13408,G3DSA:3.40.50.1390,PF07508,Coil
MSVAVYCRVSSEEQAERGTIEIQKEFAAKYVDLYQLEVFDYYCDDGISGTIPVEARPEGSRLFRDAREKKFDTILFYKIDRLGRKVRVILNAVHDLEELGVSIRSMTEPLETETPTGRFMLTSLAGISELERDTILSRMWAGSQRAARLGNWLGGIVPFGYHVVDKQLRISDDIMPGCNLSEADVIQLIFDLSGNQKMSAIKISDYLNALNIPTRYDLNGINGKRKKNASSIWYPSRILSIIKSTTYKGTHKYGKRATNKNSKIILRPVPAIVSNELWEKANEALKINQITAMRNAVREYLLRGIIKCGNCGRTYMGTAYSGSGRKKIPYYVCNAKNSYLAHNTEKCISKNVRADWLEHLVLEDCIKILKSPNKILNMDSEKEQETPTNEVKKEHDQIKASLKKLSEERASIIELYRKKIISETDLSCQLEKLSTEEATLQERLKMKIDSKKSAATKQNKEKTISLLKEFADRCQNLDPEKLSFETRRAIIELIVEKITVTTESAPEKYYPEISVDIEYRFATTPNHIAYVEDCTVTGSALCT

SEQ ID NO: 2520 - protein, 543 aa, Unknown
  Description of Unknown: Integrase B2521 sequence
  PTHR30461:SF3,SM00857,G3DSA:1.10.10.2600,IPR036162,PF13408, IPR025827,G3DSA:3.40.50.1390,PS51737,IPR006119,IPR038109, PF07508,SSF53041,IPR011109,PF00239,PTHR30461, PS51736,Coil,cd00338
MEVTKVPKKIVTVIEPKRSMTVDKEKYRQKRVAAYCRVSTDSEEQLVSYANQKKVYTEMIASRKDWCFAGLFADEGKSGTRADKRPEFNKMINDCLAGKIDYIITKSVSRFARNTVDCLDYVRMLKSKGIGVYFEEQQIDTLKTDSELYLVIYAGFAQSESESISKNITWSVRKKFEEGTPVFMYKRFLGYRKGADGEPEIVPSEAVIVERIFNLYLAGETVDKISKMMQAENYDVPGKTISFSKGMIMNMLSNERYCGDAILQKSVTIDCIEKKRKKNTGEAPMYYVQNNHPAIIDRVTFNKVQEELARRKTKTPGSAKSSITSTGKYSRYALTDVLICGNCGTRYRRVTWSRNGVKRIVWRCISRLDYGKKYCSDSPTIMEDKLQEAIVRAVNKFNEQDNATYKALMRATISEALGLNGDPEEVDMLERKVEALNNKMLALVNESVSSGAGIEAHESEFMTLSQETELLKQRIAAIQESTAKDNGEQSRLEQIQAIISERENKCMEYDDSIVRQMVECIKVYPGGKLEIIFGGGYLVEESV

SEQ ID NO: 2521 - protein, 543 aa, Unknown
  Description of Unknown: Integrase B2522 sequence
  PTHR30461:SF3,SM00857,G3DSA:1.10.10.2600,IPR036162,PF13408, IPR025827,PS51737,G3DSA:3.40.50.1390,IPR006119,IPR038109, PF07508,IPR011109,SSF53041,PF00239,PTHR30461, PS51736,Coil,cd00338
MAKKKKPAGGNAIIYARYSSHNQRDVSIEQQIEACRKHAAELGLTITDTYEDRAISGRTDNRPAFQRMMHDAENGKFSYVLAWKSNRMGRNMMQAMVNESRLMDCGIKVYYAEEDFDDSAAGRFALRSMMNVNQFYSDNLAEDVRRGLMDNASKCMANGKQPLGYKRGEDGKVVVDEPAAAIVREVYTRVASGELFTDIARDLNRRGIKTADKGEWNKNSFHRLCSNEKYRGIYIYGDVRIEGGIPTIIDDTLWYKVQEALRVKKLKRNGRHRPGDEDYLLTGKLRCGKCGGYMIGMSGRSKTGEIHYYYTCQNRRVGRTCDKKNIRRDVIEPAVAQAIKDYCLTDDAIEWIADKTVEYWEKADRNLQLDSIEGDLAAVQSSISNVMKAIEMGVVTETTRDRLIELEKQRTDLKSKLALAKEEVVHVDRKKLISSLLLFRNGNIHDRQYQEDLFKTFLISVYVYDDDDNGHLKIVFNAFGDNNTVDLPIDFGETDNQSGFSDGAEKFDYALHRSTKRELGEHGTIEMVGSVFVLFYSLPKIRK

SEQ ID NO: 2522 - protein, 543 aa, Unknown
  Description of Unknown: Integrase B2523 sequence
  PTHR30461:SF3,cd00338,SM00857,G3DSA:1.10.10.2600,IPR036162, PF13408,PS51737,G3DSA:3.40.50.1390,IPR025827,IPR006119, IPR038109,PF07508,IPR011109,SSF53041,PTHR30461, PS51736,Coil,PF00239
MARKKNIAAGQNAVIYARYSSHNQREVSIEQQVRECMKHAAELGLHVVGTYEDRAISGKTDKRPNFQRMMRDAEKGKFQAVVAWKSNRIGRNMLQAMVNEAKLEDCGVKVFYAEEDFDDTAAGRFALRNMMNVNQFYSENMAEDITRGLYDNASKCMANGRQPLGYKRGEDGRVVLDEANAAVVREIFTRVAAGDLFVDIARDLNAQGIKTSKGANWNKGSFQSICQNERYRGIYIYGDVRVADGIPRIVSDDLWYRVQEAMRMKKNPVGTRHRVGAEDYLLTGKLRCGHCGSYMTGVSGTSRNGELHYYYTCQKRRTEHACDKKNIRRDVIEPAVAQAIKMYCLTDDVIAWIADRTVEYWEKHDNDLQIEALEQQLEENKKATSNMLKAIEMGIITEATRTRMVELETEQSRLSVQLNAAKEDVVKIDREQIISYLELLQQGDIHDRDFQMELFKNFLVAVYVYDDNRMKLVFSCMGDQNSVEIPLETGEDPPDGGLSPDAKMFVLTPDSSTNQEQNEHRTTIQMVGNVFVLFCEIPNVTLT

SEQ ID NO: 2523 - protein, 543 aa, Unknown
  Description of Unknown: Integrase B2524 sequence
  PTHR30461:SF3,SM00857,G3DSA:1.10.10.2600,IPR036162,PF13408, IPR025827,PS51737,G3DSA:3.40.50.1390,IPR006119,IPR038109, PF07508,IPR011109,SSF53041,PF00239,PTHR30461, PS51736,Coil,cd00338
MEVTKVPKKIVTVIEPKRSMTVDKEKYRQKKVAAYCRVSTDSEEQLVSYANQKKVYTEMIASRKDWCFAGLFADEGKSGTRADKRPEFNKMINDCLAGKIDYIITKSVSRFARNTVDCLDYVRMLKSKGIGVYFEEQQIDTLKTDSELYLVIYAGFAQSESESISKNITWSVRKKFEEGTPVFIYKRFLGYKKGADGEPEIVPSEAAIVERIFNLYLAGETVDNISKMMQAENYDIPGKTISFSKGMIMNMLSNERYCGDAILQKSVTVDCIEKKRKKNTGEAPMYYVQNNHPAIIDRVTFNKVQEELARRKTKTPGSAKSSITSTGKYSRYALTDVLICGNCGTRYRRVTWSRNGTKRIVWRCISRLDYGKKYCSDSPTIMEDKLQEAIVRAVNKFNKQDNATYKALMRATISEALGLNGDPEEVDMLERKIEALNNKMLALVNESVSSGDGIEAHESEFMTLSQEAELLKQRIAAIQESTAKDNGEQNRLEQIQAIIAERESKCMEYDDSIVRQMVECIKVYPGGKLEIIFGGGYLVEESV

SEQ ID NO: 2524 - protein, 543 aa, Unknown
  Description of Unknown: Integrase B2525 sequence
  PTHR30461:SF3,IPR036162,PS51737,IPR011109,PTHR30461, PS00397,PF00239,G3DSA:1.10.10.2600,IPR006119,SSF53041, cd00338,SM00857,IPR025827,IPR038109,PS51736, IPR006118,PF13408,G3DSA:3.40.50.1390,PF07508,Coil
MPVAVYCRVSSEEQAERGTIEIQKEFAAKYVDLYQLEVFDYYCDDGISGTIPVEARPEGSRLFRDAKEKKFDTILFYKIDRLGRKVRVILNAVHDLEELGVSIRSMTEPLETETPTGRFMLTSLAGISELERDTILSRMWAGSQRAARLGNWLGGIVPFGYHVVDKQLQISDDIMPGCNLSEADVIQLIFDLSGNQKMSAIKISDYLNALNIPTRYDLNGINGKRKKNASSIWYPSRVLSIIKSTTYKGTHKYGKRATNKNSKIILRPVPAIVSDELWEKANEALKINQITAMRNAVREYLLRGIIKCGNCGRTYMGTAYSGSGREKIPYYVCNAKNSYLAHNTEKCISKNVRADWLEHLVLEDCIKILKSPNKILNMDPEKEQQSLADEVKKEHDQIKASLKKLSEERASIIELYRKKIIFETDLSCQLEKLSTEEATLQERLKMKIDSRKSAATKQNKEKAISLLKKFTDKCQNLDPEKLSFETKRAIIELIVEKITVTTESAPEKYYPEISVDIEYRFATTPNHIAYVEDCTVTGSALCT

SEQ ID NO: 2525 - protein, 543 aa, Unknown
  Description of Unknown: Integrase B2526 sequence
  PTHR30461:SF3,IPR036162,PS51737,IPR011109,PTHR30461, PS00397,PF00239,G3DSA:1.10.10.2600,IPR006119,SSF53041, cd00338,SM00857,IPR025827,IPR038109,PS51736, IPR006118,PF13408,G3DSA:3.40.50.1390,PF07508,Coil
MLKYLKNDNEIVAVYCRVSSDEQADKGTIENQKEYAEKYVRLNMLNVYDYYLDDGVTGTLPLQKRPEGKRLLEDAKAGKFNLVLFFKLDRLGRSVRVILNAVYDLMELNVDVRSMTEAFDTTTPSGRFTLNTFAGIAELERDTILTRMRMGTIRHAKLGKWLGGPVPYGYTLENGYLEISRTKIPGLTYSEADIVKLIFEKTVYEKMSAEAIADYLNNLCVPTKYKILNRKLITSGYWYPSRILSMLHNTVYYGVHIFGQMSKHQKPEIIKQTNPAIVDIDLWDAAQKQLTSNKLLAARCRKNDYLLSGLIKCGLCGRTYIGTGYAGSKKEKVLYYVCNDKNRYHPDKNQKICQSQNLRADWIENIVWNDCLSYIMQPDKLYLENKAQNLTDPKDELNALEQTAVKLERERSSILDLFRKKIITENDLKNQLDKIAKEQDKLNRAINDKKALISKIDKINSNMIKMVDLLKSFQKYISDNITFADKRKIVEALVENIIVYTDYDNGQRDIPIVTIAINYVFKNEKNPLKRNYQPSSKQNIHGF

SEQ ID NO: 2526 - protein, 543 aa, Unknown
  Description of Unknown: Integrase B2527 sequence
  PTHR30461:SF3,SM00857,G3DSA:1.10.10.2600,IPR036162,PF13408, PS51737,G3DSA:3.40.50.1390,IPR025827,IPR006119,IPR038109, PF07508,SSF53041,IPR011109,PF00239,PTHR30461, PS51736,Coil,cd00338
MEVTKIPKKIVTVIEPKRSMSVDKEKYRQKRVAAYCRVSTDSEEQLVSYANQKKVYTEMIGSRKDWCFAGLFADEGKSGTRADKRPEFNKMINACLAGKIDYIITKSVSRFARNTVDCLDYVRMLKSKGIGVYFEEQQIDTLKTDSELYLVIYAGFAQSESESISKNIIWTVRNKFEEGIPVFMYKRFLGYRKGANGEPEIVPSEAAIVERIFNLYLAGETVDSISKMMQAEHYQIPGKNISFSKGMIMSMLANERYCGDAILQKSVTVDCIEKKRKKNTGEAPMYYVQNSHPAIIDRVTFNKVQEELARRRAKTPASTKTTITSTGKYSRYALTDVLICGECGTRYRRVTWSRNGVKRIVWRCISRLDYGKKYCKDSPTIFEDKLKEAIVRAVNKFNDQDNATYKALMRATIGEALGLNSDPEEVDLLERKIEALNNKMLALVNESVISGEGIEAHESEFMSLSQEVELLKQRIAAMQESAATDSGEQERLEQIQAIIAEREDNRTEYDDSIVRQMIECIKVYPGGKLEIIFGGGYLVEETV

SEQ ID NO: 2527 - protein, 543 aa, Unknown
  Description of Unknown: Integrase B2528 sequence
  PTHR30461:SF3,SM00857,G3DSA:1.10.10.2600,IPR036162,PF13408, PS51737,G3DSA:3.40.50.1390,IPR025827,IPR006119,IPR038109, PF07508,IPR011109,SSF53041,PTHR30461,Coil, PS51736,cd00338,PF00239
MRKCAYVRVSTDKDEQAESLENQILHYAEIGITEDNIFADKGLTGTSLDRTSFRKMLRLCGLDIDNVRGRLVIFQSNRESKYDYIYCKSITRFSRNISEGVELVRALKKKKVYCKFEMENIDTKDTSSEFLMNMLLVMSQNESQQTSDRVRWGNVQTAKKGNLRSFFNYGYKRVDDHLEIVESEAEVVKKIYKYKLEGLGNRRIAGQLNKEGYLTKKGKNWTESSVHNIVRNPIYTGVIARNRYECNSLFGNNSVKLKDESEWILTESDKVPAIISKEIFEEAQNMIKKHTMSNVKRGVNIGTSEFAKKILCGKCKSYYSRNINSTTKKVYYNCSNKKKNGVSACNSKNIYLDDLDKTINMFIGNGCKEIGLRFLNKTAFKKIDEKISNLKKDINKDNTKEIETNNQQISNLKEQLGRLVKLYISNTIPEDVLNIEKASLEEEIKVLENKNSELQEGIDGITEKIKYFENIKNAALKQINNIPDNLTREEFIRDYLLYFTVKENGQIGIMTKVHALFMAINNIAKEAELKEIVKWLALIDLHK

SEQ ID NO: 2528 - protein, 543 aa, Unknown
  Description of Unknown: Integrase B2529 sequence
  PTHR30461:SF3,IPR036162,PS51737,IPR011109,PTHR30461, PF00239,G3DSA:1.10.10.2600,IPR006119,SSF53041,cd00338, SM00857,IPR025827,IPR038109,PS51736,PF13408, cd17916,G3DSA:3.40.50.1390,PF07508,Coil
MPAALAYCMASVNLVFAWADLRIYYTIISLVLERTDYIMTKNAVIYARFSSDKQREESIDGQIRECRAFAEANEINIINTYIDRAMSARTDQRPSFLQMVKDSAKHLFDYVIVYQLDRFSRSRYDSAIYKHRLKKNGVKVLSAKENIKDDPSGILLESVIEGMAEYYSAELSQKVKRGMTENLLEGKWIGGIVPFGYELTSENKLAISPATGHLVPEIYDKYLSGIKTTDILSKLNSLGIKTQRGCNFTRNSLNRILKNQIYTGTFTWAGTSYPDYAPALITQEQYTAMQNLFESRKRKSNTARRVSPQYALTGKIYCGTCGLPMTGYCGKSHTGTTYYYYQCSSKNNKSEKAARSQITCDAKNINRDKLEKLVLDTTISILENKDAVKCIADQCMAIQKAELEHKPAEQLRLESQIKEIEKRLKNSVKAVENGLISQTITNNIETYEKQLTELNAQLDGVKLDTHIIPITEEAVIYYLNQLTERANKKDGYSLDTFDDFIRRVVVTGKRVDIFYNYTAVPNILENPAVKMLRGSSKDCLVTR

SEQ ID NO: 2529 - protein, 543 aa, Unknown
  Description of Unknown: Integrase B2530 sequence
  PTHR30461:SF3,cd00338,SM00857,G3DSA:1.10.10.2600,IPR036162, PF13408,IPR025827,PS51737,G3DSA:3.40.50.1390,IPR006119, IPR038109,PF07508,IPR011109,SSF53041,PTHR30461, PS51736,Coil,PF00239
MCAKKKPAMLEPDMQDAVIYTRYSSHNQRDCSIEQQVADCEIFARQNNLRVVKVYADRHLSGTTDNRPQFQQMLKDASHGHWAYVICWKIDRFARNRYDSATYKFRLKKAGVRVLYAKESIPDGPEGILLESVLEGSAEYYSAALAQNIRRGMKFNAEQCKVNSGSIPFGYCKGPDGRFAIHEANAEVVREIFRKAAAGMPFVDIANDLNSRGLKTSRGGRWNKGSFRLLMNEAYIGVYHFSDTRIEGGMPALIDHGTFWAANERLKANSSVRGRHQDGGDYLLTGKLKCAHCGSYMIGFSGTGKSGELHYYYGCQKRRRERACKKANVPREWIERVVVKAALDYVLRPDVMEWIADAVMEYQEREAASAQLAALTAELEENQKATDNVMKAIEAGIITSTTKQRLLDLEAKAQDLKRAIELEKLSHVRLERDQVLFWLDRFRGGSLQSQEFRRKVIDAFVSVVYLSDDHLRIAFNYSGGSNAEADFDLVMDAEAAAGELSKKFAQGHVTSTNRNAVEPAESGVKSLGSAGFLFVEKGAEGYS

SEQ ID NO: 2530 - protein, 543 aa, Unknown
  Description of Unknown: Integrase B2531 sequence
  PTHR30461:SF3,cd00338,SM00857,G3DSA:1.10.10.2600,IPR036162, PF13408,PS51737,G3DSA:3.40.50.1390,IPR025827,IPR006119, IPR038109,PF07508,IPR011109,SSF53041,PTHR30461, PS51736,Coil,PF00239
MARKKNIAAGQNAVIYARYSSHNQREVSIEQQVRECMKHAAELGLHVVGTYEDRAISGKTDKRPNFQRMMRDAEKGKFQAVVAWKSNRIGRNMLQAMVNEAKLEDCGVKVFYAEEDFDDTAAGRFALRNMMNVNQFYSENMAEDITRGLYDNASKCMANGRQPLGYKRGEDGRVVLDEANAAVVREIFTRVAAGDLFVDIARDLNAQGIKTSKGANWNKGSFQSICQNERYRGIYIYGDVRVADGIPRIVSDDLWYRVQEAMRMKKNPVGTRHRVGAEDYLLTGKLRCGHCGSYMTGVSGTSRNGELHYYYTCQKRRTEHACDKKNIRRDVIEPAVAQAIKMYCLTDDVIAWIADRTVEYWEKHDNDLQIEALEQQLEENKKATSNMLKAIEMGIITEATRTRMVELETEQSRLSVQLNAAKEDVVKIDREQIISYLELLQQGDIHDRDFQMELFKNFLVAVYVYDDNRMKLVFSCMGDQNSVEIPLETGEDPPDGGLSPDAKMFVLTPDSSTKKALYFVGSTVLFFLLKLVFGAASLRLHRF

SEQ ID NO: 2531 - protein, 543 aa, Unknown
  Description of Unknown: Integrase B2532 sequence
  PTHR30461:SF3,IPR036162,PS51737,IPR011109,PTHR30461, PS00397,PF00239,G3DSA:1.10.10.2600,IPR006119,SSF53041, cd00338,SM00857,IPR025827,IPR038109,PS51736, IPR006118,PF13408,G3DSA:3.40.50.1390,PF07508,Coil
MPVAVYCRVSSEEQAERGTIEIQKEFAAKYVDLYQLEVFDYYCDDGISGTIPVEARPEGSRLFRDAREKKFDTILFYKIDRLGRKVRVILNAVHDLEELGVSIRSMTEPLETETPTGRFMLTSLAGISELERDTILSRMWAGSQRAARLGNWLGGIVPFGYNVVDKQLQISDDIMPGCNLSEADVIQLIFDLSGNQKMSAIKISDYLNALNIPTRYDLNGINGKRKKKASSIWYPSRVLSIIKSTTYKGTHKYGKRATNKNSKIILRPVPAIVSDELWEKANEALKTNQITAMRNAVREYLLRGIIKCGNCGRTYMGTAYSGSGREKISYYVCNAKNSYLAHNTEKCISKNVRADWLEHLVLEDCIKILKSPNKILNMDPEKEQQSLADEVKKEHDQIKASLKKLSEERASIIELYRKKIISETDLSCQLEKLSTEEATLQERLKMKIDSRKSATTKQNKEKAISLLKKFTDKCQNLDPEKLSFETKRAIIELIVEKITVTTESAPEKYYPEISVDIEYRFATTPNHIAYVEDCTVTGSALCT

SEQ ID NO: 2532 - protein, 543 aa, Unknown
  Description of Unknown: Integrase B2533 sequence
  PTHR30461:SF3,SM00857,G3DSA:1.10.10.2600,IPR036162,PF13408, PS51737,IPR025827,G3DSA:3.40.50.1390,IPR006119,IPR038109, PF07508,IPR011109,SSF53041,PF00239,PTHR30461, PS51736,Coil,cd00338
MRYSSHAQDDGFSIEAQEKAIKKYADEHGYDLQYYYCDKAKTGTNSKRPEFQKMIADSKKKLFQVCIVHKTDRFARSRYDSIFFKSILKKSGVELLSVTENFGNDPEGKVMEGIAEVFAEYYSNNLAREVKKGLDVIASQGLHTGGLPPLGYDVSEKRLVINESEAEIVRLIFDRYSNGYTYNDIAKELNAKGYKTKIGREFTSASLNSILNQRKYIGEYVYNRRSSKNINGSYNSHKNKPEEEIIRIPDAVPKIIDEKIFEKVQQRLEMNKRKAGHYKSKSNYLLSGLIVCGECGFHYQGNTRAAGRGSQSMYSSYRCGKKQNHKIGCGNSEIEKNRLETFVLEQMQKYLFSDNAIKTIVKQVNEYNISVSKSKNSDLALYEKQLNEINKQIKNITLAIAKGVNQELMIEQIKSIDSSKKDLEKRIEESKITAFPPIVEEDVRKALSKFKEFMKENNYIECKNFINQYIDKIIVYRDKVEVTFKVASAIFNASFPDDKSGMLKIIIEISRTELKTLPKQRRKVPANGQFGESYLKQYQITTK

SEQ ID NO: 2533 - protein, 543 aa, Unknown
  Description of Unknown: Integrase B2534 sequence
  PTHR30461:SF3,cd00338,SM00857,G3DSA:1.10.10.2600,IPR036162, PF13408,PS51737,G3DSA:3.40.50.1390,IPR025827,IPR006119, IPR038109,PF07508,SSF53041,IPR011109,PTHR30461, PS51736,Coil,PF00239
MYEDIKTACLYVRFSSHNQTEQSIEGQTRVCRDFCKRHNIRIVEIYADRATSASKDIEKRVQFLKMIKDSEKGLFDAVIVYKLDRFARSRYDSATYKYRLKRNGVQLISATENISNDPEGIILESVLEGMAEFYSAELSQKINRGMRESAYKHNSIGGAVPLGYKIEDKKLVIDPKTAPIVKEAFEKYADGETVAEICRQFNARGYKTSKGTAFGKSSFTKIFRNERYIGVYSFHDYRAEDAIPAIIDKDLWDRVQLRVGKIKNAPARNKAKVVYLLSGKIFCGHCGSKMNGNCNAGNYYYYQCYGKKNGNVDCKKKNIRKEFIERLVAQDALSLLTDEYIEQIATIACEKNQHEIELDSALPTIRDRIHQVDLSLNNLLKAIESGSAPDMLVKRMGELEKEKKDLQVQAKKESEDIVELDKAQVIYWLEQFRGGSIEDEEFCRMLIDLFVNSVTVWDEDDNTYKVTVAYNLTSLPTKTYRLNKGGTLSDFTSNAPGAAADRAAGRIGGQLEDGIIQLLMGDVGRLVNVNGIGQIEAAAGRLR

SEQ ID NO: 2534 - protein, 543 aa, Unknown
  Description of Unknown: Integrase B2535 sequence
  PTHR30461:SF3,cd00338,SM00857,G3DSA:1.10.10.2600,IPR036162, PF13408,IPR025827,G3DSA:3.40.50.1390,PS51737,IPR006119, IPR038109,PF07508,IPR011109,SSF53041,PTHR30461, PS51736,Coil,PF00239
MKKKQPNARHGRAAVYARYSSHNQREASIEQQVKACRELAVRLGLDVVETYEDKAISGKSDRRPSFQRLLRDAERGCFDCVLAWKSNRMGRNMLQAMTNEARLKDWGVRTFYAEEDFDDTAAGRFALRNMMNVNQFYSENMAEDITRGMMDNASKCLSNGALPLGYKAGENGRIVLDKAQAAVVQEIYTRVACREPFVDIAADLNRRGIKTKRGGPWTKSSFYTICRNERYRGIYIYDDVRVEGGVPRIVSDGLFYRVQEVLKVKKTPQSSRHHTGAEDYLLTGKLFCGKCGRPMTGVSGTSRSGEMHYYYTCQKRRREHACDKKNVIREQIEKSVAQAIKQYMLTDEMIQHMADATMAYNARQEKDLHLQDLQGQLAAVKTSAANLLKAIEMGVITETTKARMVELEQEQGRLNAQIENARAELVPITRDNFVSLLHIYRDGDINDSKYLASLFDTFLVRVDLYDDHFLIWFNPLGQKTPADIPITSIENGGMDEFFDECRSENVFDWGGEWSTINHQDEHTTFITMIGNVFVLFCPFPNLK

SEQ ID NO: 2535 - protein, 543 aa, Unknown
  Description of Unknown: Integrase B2536 sequence
  PTHR30461:SF3,SM00857,G3DSA:1.10.10.2600,IPR036162,PF13408, IPR025827,G3DSA:3.40.50.1390,PS51737,IPR006119,IPR038109, PF07508,SSF53041,IPR011109,PF00239,PTHR30461, PS51736,Coil,cd00338
MAKKKKPAGGIAVIYARYSSHNQRDVSIEQQIEACRKHAAELGLTIIATYEDRAISGRTDNRPAFQRLMHDAEKGKFSYVLAWKSNRMGRNMMQAMVNESRLMDCGIKVYYAEEDFDDSAAGRFALRSMMNVNQFYSDNLAEDVRRGLMDNANKCMVNGRQPLGYKRGKDGKVVVDEPAAAIVREVYARVASGELFTDIARDLNRRGIKTADKGEWNKNSFHRLCSNEKYRGIYIYGDVRIAGGIPTIIDDTLWYKVQEALRVKKLKRNGRHRPGDEDYLLTGKLRCGKCGGYMIGMSGRSKTGDIHYYYACQNRRVGRTCDKKNIRRDVIEPAVAQAIKEYCLTDDAIEWIADKTVEYWEKADRNLQLDSIEGDLAAVQSSISNVMKAIEMGVVTETTRDRLIELEKQRTDLKSKLALAKEEVVHVDRKKLISSLLLFRNGDIHDRQYQEDLFKTFLISVYVYDDDDNGHLRIVFNAFGDNNTVDLPIDFGETDNQSAFSNGAEKFDYSLHRSTKRELGEHSTIEMVGSVFVLFCSLPKIRK

SEQ ID NO: 2536 - protein, 543 aa, Unknown
  Description of Unknown: Integrase B2537 sequence
  cd00338,SM00857,G3DSA:1.10.10.2600,IPR036162,PF13408, PS51737,IPR025827,G3DSA:3.40.50.1390,IPR006119,IPR038109, PF07508,IPR011109,SSF53041,PTHR30461,PS51736, Coil,PF00239
MSVDIKWQVPKAQPEASELAVVYARYSSHSQGEQSIEGQLSNARDYAAAHGYTIVHEYVDRAKSGRTDNRAEFQQMLKDTAKRQFSVIILWKVDRFGRNREEIAINKMKCRKNGVRVEYVAETIPDSPEGVILESVLEGFAEYYSLQLSQNIRRGRAESAEKCQSLGGNRPLGYKTGPDKKFVIDENTAPTVKMIFTMYADGKTVTEIVDKLNEMGLRTLRGGPFTKNSLHSILKNKKYIGIYEYQGREIKDGVPRIIEDDVFNKVQEMLKINKRAPAKTWSRADYILTDKLFCGKCGALMFGESGTSKTGAKHNYYICSNKKRFRSCDKKAVRQADIEDTVLNATHELLQDDELLDYIVDRTWEYYLAQDNSQEELRNLQRQLAQTDTAISNLIRAIEAGILTEETKKRMDELTQQKADLKASIADREIARGFHLKKSHIAYYLRSLRDADWSDKEAQKRLIQTFVNAVFVYDDHITLTYNFSGDKSTVTLRDMQRFEDGEEFGCRASRSTNTIESEPFADWPWVRIYCFVRRPGIIFPAAA

SEQ ID NO: 2537 - protein, 543 aa, Unknown
  Description of Unknown: Integrase B2538 sequence
  PTHR30461:SF3,SM00857,G3DSA:1.10.10.2600,IPR036162,PF13408, PS51737,IPR025827,G3DSA:3.40.50.1390,IPR006119,IPR038109, PF07508,IPR011109,SSF53041,PF00239,PTHR30461, PS51736,Coil,cd00338
MARKKNIAAGQDAVIYARYSSHNQREVSIEQQIAECTKYAAALGLRIVGTYEDRAISGKTDNRPRFQQMMRDAGKGKFQAVVAWKSNRIGRNMLQAMVNEAKLDDYGVKVFYAEEDFDDTAAGRFALRNMMNVNQFYSENMAEDITRGLYDNASKCMANGRQPLGYKRGEDGRVVLDEANAAVVREIFTRVAAGDLFVDIARDLNAQGIKTSKGANWNKGSFQSICQNERYRGIYIYGDVRVADGIPRIVSDDLWYRVQEAMRMKKNPVGTRHRVGAEDYLLTGKLRCGHCGSYMTGVSGTSRNGELHYYYTCQKRRTEHACDKKNIRRDVIEPAVAQAIKMYCLTDDVIEWMADRTVEYWEKHDNDLQIEALEQQLAENKKATSNMLKAIEMGIITEATRTRMVELETEQSRLSVQLNAAKEDVVKIDREQIISYLELLQQGDIHDRDFQMELFKNFLVAVYVYDDNRMKLVFSCMGDQNSVEIPLETGEDPPDGGLSPDAKMFVLTPDSSTRRKSTARKRVVFFVVTDQRRNYELRDRIQQ

SEQ ID NO: 2538 - protein, 543 aa, Unknown
  Description of Unknown: Integrase B2539 sequence
  PTHR30461:SF3,cd00338,SM00857,G3DSA:1.10.10.2600,IPR036162, PF13408,PS51737,IPR025827,G3DSA:3.40.50.1390,IPR006119, IPR038109,PF07508,IPR011109,SSF53041,PTHR30461, PS51736,Coil,PF00239
MPRKKAPAAEAPRLVAYYRYSGGSRQTEQSIEGQRRDCEAYARAHGMTILREYVDRHISGKTDDRPAFQQLVADSAAHIFDAVICWKTDRLARNRYDSAVYKKKLRDNGVEILYAAESNISGAEGIIIEGLMEALAEYYSAELAEKARRGMRESALKGKALGSSRPLGLTVDADKHYIIEPTGAEAVRYIFEQYAAGLSSSSIVERLNAMGLRTSHGGPFNKSSINRIIQNEMYRGVYVSKKFDVRIEGAIPAIIDNDLWKRAQNMFERNRQSRTPHASRADYILSGKLYCGECGCLMKGVCGRSSGNGQMYHYYACPGRSIGRACTRKNIPQDELEAMVVNSVADLLLEPELLEQIADAIVELQQAEAARPDPEKQALEKSLSDVRNKIQNILSAIENGTSSAALSARLADLEQQESTLSYQLSSLTAKKPLTFTRDQILFLLQQFRVSPSERTKAYCRRLVDTFVDHIELTNTELILYFNLSDETVDKNKKAPRSNPSEESSTEKRLVHLAHQQANYSLYAASGYFSLVEHQFSARWWRTA

SEQ ID NO: 2539 - protein, 543 aa, Unknown
  Description of Unknown: Integrase B2540 sequence
  SM00857,G3DSA:1.10.10.2600,IPR036162,PF13408,PS51737, G3DSA:3.40.50.1390,IPR025827,IPR006119,IPR038109,PF07508, IPR011109,SSF53041,PF00239,PTHR30461,PS51736, Coil,cd00338
MVKNRAAIYARFSSHNQRSESIEIQVENSRAYCEREGLQVVREYCDYAQTGRNVNRAEFQRMMNDAKLGLFDFVVIYKVTRIMRNRDEMALARIMLRKAGVEILYAGEEIASGSSGVLQLGMLEVLAEWESAIDSERIRDGIQKNAARCLANGHSLYGWDIVDGRYSVNEREAALMRKMKNMLFSGHSVADIVRALEGEKTRNGKPFNQDKVTKLLRRVQNGGTYSYAGHVVEGGMPGLWPQVEQDMIESVLNDRHRPRRKVDSSKEFPLSGKLYCTKCGMPMAGMSGTSKTGKAYHYYRCRKCRRTVRRDLIEDAVVDMTLQAVARDDVRQRIAQGMALYQSEQEETKPKSYYLKKELRRIDAAFERIWQAIEDGIAPPGGKERTDELKCRKAEIEAQLRIAERDESMSFGVDELMLWLDEIATELTPLDILNKFVRFAEIDGKSNRIRVYFAFDKHGDGFSPNSADKGEHLYEERCSPNSTLVEARRIELRSILNCPQGATGLVSDRASERIGSQTNVAAPSRFRLSSGHTDYVPRGIPLK

SEQ ID NO: 2540 - protein, 543 aa, Unknown
  Description of Unknown: Integrase B2541 sequence
  PTHR30461:SF3,IPR036162,PS51737,IPR011109,PTHR30461, PS00397,PF00239,G3DSA:1.10.10.2600,IPR006119,SSF53041, cd00338,SM00857,IPR025827,IPR038109,PS51736, IPR006118,PF13408,G3DSA:3.40.50.1390,PF07508,Coil
MSVAVYCRVSSEEQAERGTIEIQKEFAAKYVDLYQLEVFDYYCDDGISGTIPVEARPEGSRLFRDAREKKFDTILFYKIDRLGRKVRVILNAVHDLEELGVSIRSMTEPLETETPTGRFMLTSLAGISELERDTILSRMWAGSQRAARLGNWLGGIVPFGYHVVDKQLQISDEIMPGCNLSEADVIQLIFDLSGNQKMSAIKISDYLNALNIPTRYDLNGINGKRKKNASSIWYPSRVLSIIKSTTYKGTHKYGKRATNKNSKIILRPVPAIVSDELWEKANEALKINQITAMRNAVREYLLRGIIKCGNCGRTYMGTAYSGSRREKIPYYVCNAKNSYLAHNTEKCISKNVRADWLEHLVLEDCIKILKSPNKILNMDPEKEQQSLADEVKKEHDQIKASLKKLLEERTSIIELYRKKIISETDLSCQLEKLSTEEATLQERLKMKIDSRKSAATKQNKKKAISLLKKFTDKCQNLDPEKLSFETKRAIIELIVEKITVTTESAPEKYYPEISVDIEYRFATTPNHIAYVEDCTVTGSALCT

SEQ ID NO: 2541 - protein, 543 aa, Unknown
  Description of Unknown: Integrase B2542 sequence
  PTHR30461:SF3,cd00338,SM00857,G3DSA:1.10.10.2600,IPR036162, PF13408,PS51737,G3DSA:3.40.50.1390,IPR025827,IPR006119, IPR038109,PF07508,SSF53041,IPR011109,PTHR30461, PS51736,Coil,PF00239
MYEDIKTACLYVRFSSHNQTEQSIEGQTRVCRDFCKRHNIRIVEIYADRATSASKDIEKRVQFLKMIKDSEKGLFDAVIVYKLDRFARSRYDSATYKYRLKRNGVQLISATENISNDPEGIILESVLEGMAEFYSAELSQKINRGMRESAYKHNSIGGAIPLGYKIEDKKLVIDPKTAPIVKEAFEKYADGETVAEICRQFNARGYKTSKGTAFGKSSFTKIFRNERYIGVYTFHDYRAEDAIPAIIDKDLWDRVQLRVGKIKNAPARNKAKVVYLLSGKIFCGHCGSKMNGNCNAGNYYYYQCYGKKNGNVDCKKKNIRKEFIERLVAQDALSLLTDEYIEQIATIACEKNQHEIELDSALPTIRDRIHQVDLSLNNLLKAIESGSAPDMLVKRMGELEKEKKDLQAQAKKESEDIVELDKAQVIYWLEQFRGGSIEDEEFCRMLIDLFVNSVTVWDEDDNTYKVTVAYNLTSLPTKTYRLNKGGTLSDFTSNAPDWELKCSQFPSCVDFTGFNCIQNCVYCYYLSFFSKIALKHRPHYFHI

SEQ ID NO: 2542 - protein, 543 aa, Unknown
  Description of Unknown: Integrase B2543 sequence
  PTHR30461:SF3,IPR036162,PS51737,IPR011109,PTHR30461, PF00239,G3DSA:1.10.10.2600,IPR006119,SSF53041,cd00338, SM00857,IPR025827,IPR038109,PS51736,mobidb-lite, PF13408,G3DSA:3.40.50.1390,PF07508,Coil
MAKKKKPAGGNAIIYARYSSHNQRDVSIEQQIEACRKHAAELGLTITDAYEDRAISGRTDNRPAFQRMMRDAEDGKFQYVLAWKSNRMGRNMMQAMVNESRLMDCGVKVFYAEEDFDDSAAGRFALRSMMNVNQFYSDNLAEDVRRGLMDNASKCMANGRQPLGYKRGEGGKVVVDEPAAAIVREIYTRIASGEMFMDIARDLNRRGIKTQSGSEWNKSSFKVLCRNERYRGIYIYGDTRIEGGIPPIVDDVLWYKVQEVLKVKKSKNRHHCPSDEDYLLTGKLRCGKCGGYMIGMSGRSKTGDVHHYYACQNRRVGHTCDKKNIRRDVVEPAVAQAIKQYCLTDDAIEWITDQTIAYWEDEDRKLQIDSIENDLSAVQSSISNVMKAIEMGVITETTRDRLIELERQQTDLKSKLALAKEEIVHVDRKDLISSLLAFRHGNVHDRAYQEKLFNAFLIAVYVYDDDHLKLVFNSFGKDDTVNIALDLGENDDNSGLSDVSKSSPILSNGQPEQSHLRKLRWLFCLYHSELQPQGRDSSKLEES

SEQ ID NO: 2543 - protein, 543 aa, Unknown
  Description of Unknown: Integrase B2544 sequence
  PTHR30461:SF3,cd00338,SM00857,G3DSA:1.10.10.2600,IPR036162, PF13408,IPR025827,G3DSA:3.40.50.1390,PS51737,IPR006119, IPR038109,PF07508,SSF53041,IPR011109,PTHR30461, PS51736,Coil,PF00239
MARKKNIAAGQNAVIYARYSSHNQREVSIEQQVRECMKHAAELGLHVVGTYEDRAISGKTDKRPNFQRMMRDAEKGKFQAVVAWKSNRIGRNMLQAMVNEAKLEDCGVKVFYAEEDFDDTAAGRFALRNMMNVNQFYSENMAEDITRGLYDNASKCMANGRQPLGYKRGEDGRVVLDDANAAVVREIFPRVAAGDLFVDIARDLNAQGIKTSKGANWNKGSFQSICQNERYRGIYIYGDVRVVDGIPRIVSDDLWYRVQEAMRMKKNPVGTRHRVGAEDYLLTGKLRCGHCGSYMTGVSGTSRNGELHYYYTCQKRRTEHACDKKNIRRDVIEPAVAQAIKMYCLTDDVIEWMADRTVEYWEKHDNDLQIEALEQQLEENKKATSNMLKAIEMGIITEATRTRMVELETEQSRLSVQLNTAKEDVVKIDREQIISYLELLQQGDIHDRDFQMELFKNFLVAVYVYDDNRMKLVFSCMGDQNSVEISLETGEDPPDGGLSPDAKMFVLTPDSSTNQEQNEHRTTIQMVGNVFVLFCEIPNVTLT

SEQ ID NO: 2544 - protein, 543 aa, Unknown
  Description of Unknown: Integrase B2545 sequence
  PTHR30461:SF3,cd00338,SM00857,G3DSA:1.10.10.2600,IPR036162, PF13408,IPR025827,PS51737,G3DSA:3.40.50.1390,IPR006119, IPR038109,PF07508,SSF53041,IPR011109,PTHR30461, PS51736,Coil,PF00239
MAKKKKPAGGIAVIYARYSSHNQRDVSIEQQIKACRKHAAELGLTIIATYEDRAISGRTDNRPAFQRLMHDAEKGKFSYVLAWKSNRMGRNMMQAMVNESRLMDCGIKVYYAEEDFDDSAAGRFALRSMMNVNQFYSDNLAEDVRRGLMDNANKCMVNGRQPLGYKRGKDGKVVVDEPAAAIVREVYARVASGELFTDIARDLNRRGIKTADKGEWNKNSFHRLCSNEKYRGIYIYGDVRIEGGIPTIIDDTLWYKVQEALRVKKLKRNGRHRPGDEDYLLTGKLRCGKCGGYMIGMSGRSKTGDIHYYYACQNRRVGRTCDKKNIRRDVIEPAVAQAIKEYCLTDDAIEWIADKTVEYWEKADRNLQLDSIEGDLAAVQSSISNVMKAIEMGVVTETTRDRLIELEKQRTDLKSKLALAKEEVVHVDRKKLISSLLLFRNGDIHDRQYQEDLFKTFLISVYVYDDDDNGHLKIVFNAFGDNNTVDLPIDFGETDNQSAFSDGAEKFDYSLHRSTKRELGEHSTIEMVGSVFVLFCSLPKIRK

SEQ ID NO: 2545 - protein, 543 aa, Unknown
  Description of Unknown: Integrase B2546 sequence
  PTHR30461:SF3,SM00857,G3DSA:1.10.10.2600,IPR036162,PF13408, PS51737,G3DSA:3.40.50.1390,IPR025827,IPR006119,IPR038109, PF07508,IPR011109,SSF53041,PF00239,PTHR30461, PS51736,Coil,cd00338
MEVTKIPKKIVTVIEPKRSMAVDKEKYRQKRVAAYCRVSTDSEEQLVSYANQKKVYTEMIGSRKDWCFAGLFADEGKSGTRADKRPEFNKMINACLAGKIDYIITKSVSRFARNTVDCLDYVRMLKSKGIGVYFEEQQIDTLKTDSELYLVIYAGFAQSESESISKNIIWTVRNKFEEGIPVFMYKRFLGYRKGADGQPEIVPSEAAIVERIFNLYLAGETVDNISKMMQAEHYQIPGKNISFSKGMIMSMLANERYCGDAILQKSVTVDCIEKKRKKNTGEAPMYYVQNSHPAIIDRVTFNKVQEELARRRAKSPASTKAAITSTGKYSRYALTDVLICGECGTRYRRVTWSRNGVKRIVWRCISRLDYGKKYCKDSPTVFEDKLKEAIVRAVNKFNDQDNATYKALMRATIGEALGLNADPEEVDMLERKIEALNSKMLALVNESVASGEGIEAHESEFMSLSQEAELLKQRIATIQESAAADSDEQDRLEQIQAIIAEREHNRTEYDDAIVRQMIECIKVYPGGKLEIIFGGGYLVEEAV

SEQ ID NO: 2546 - protein, 543 aa, Unknown
  Description of Unknown: Integrase B2547 sequence
  PTHR30461:SF3,SM00857,G3DSA:1.10.10.2600,IPR036162,PF13408, PS51737,G3DSA:3.40.50.1390,IPR025827,IPR006119,IPR038109, PF07508,IPR011109,SSF53041,PTHR30461,PS51736, cd00338,PF00239
MKKLKVAAYARVSTDKDDQINSLENQKQYFQSYILNHEDWDFVDVYFDEGISGTQTKKRLGFNKMIDDAENGDIDLIITKEVSRFARNTVDTLFYTRRLKDSGIGVIFTLDNIDTRQSDGEFRLTIMASIAQEESRKTSERVKWGQKRQMEKGVVFGRDLLGYTVKSGVLYINEEEVPVVRAIFHKYTNEGKGTHTIARELLEEGMKPKRISLWSNTIILKVLRNEKYVGDLLQKKTYTPNYLTHSKKYNHGQEEMIYLKDHHEAIIDRDLWNRTQEELRHRSPSAQQKAKHSNRYWCSGKIYCAECGSLFVGRTKRWKDGKQYKSWKCNASVNYMRSKQDEYGNPIKCHNNSINQKTLNFCMNYCISLMQTKQDSLKKEIITEISKVKEQSSYESKTKHIEEKIKQVETKKRRLIDLALDNLISGQDLKTQTAWYNEEIESLHLQLNESLAEDKKQQVQIKNMESYVNELDRIMSIDSIDSELIYKEIVDHIDVHNDKILDIWLKPLPFGIQLKVKTTGRRDNYMTEILEYSYIKSEIKGTI

SEQ ID NO: 2547 - protein, 543 aa, Unknown
  Description of Unknown: Integrase B2548 sequence
  PTHR30461:SF3,SM00857,G3DSA:1.10.10.2600,IPR036162,PF13408, PS51737,G3DSA:3.40.50.1390,IPR025827,IPR006119,IPR038109, PF07508,IPR011109,SSF53041,PTHR30461,Coil, PS51736,cd00338,PF00239
MKRVICLYRVSTKGQVDKDDIPMQRIECRKFIETQGWKLVGEYAEKGVSGFKVSAEKRDAIMSIRKEAERGAFDVLLVFMFDRLGRRDDETPFLVEWFISKGIEVWSTREGQQKMESRADKLINYIRYWQAGGESEKTSERVRTKHRQMVEAGLWRGGARPFGYKLIHTGRIGKKNRQLFDLAIDEKESVIIRDIFDGYIRRGMGMHRLANYLNSHYPSPDKIWAPQSIKTILTNPIYIGISRCGDVRSPVNEALRIVSDEDFQFARHVMDMRVTRKTQTCGDIDEDNLDEAKRTKTSIYGASLLSGLLYCAHCGHKLVGTYHTKQRANGAYYYRPVYRCYNGATKAKGCDGQRTYSAARIEKAVLEIVHQYFSHFGESMDAVWKEQQRLQIKQGSGARLKQAELSLSRLQAQHKKLREELVKVLMGESVFDEETIKSMLDEKQDAIEKAEAYLKEIRASAEDTEQKLQQLIFQYRSIKNWSSVFDQANDDEKKMILARIIEKITVDKNYNISIYFFLTLEDFRKEVEDNAEKIEILEASQCI

SEQ ID NO: 2548 - protein, 543 aa, Unknown
  Description of Unknown: Integrase B2549 sequence
  SM00857,G3DSA:1.10.10.2600,IPR036162,PF13408,IPR025827, G3DSA:3.40.50.1390,PS51737,IPR006119,IPR038109,PF07508, IPR011109,SSF53041,PTHR30461,Coil,PS51736, cd00338,PF00239
MSKHKLAVVYARYSSHRQGEQSIEGQLAAARDYATANGLTIIREYVDRAATGRNDNRTAFQEMLKDTSKNQFGTIILWKIDRFGRNREEIAFNKYRCKKNGVKVVYVAESIPDSPEGVILESVLEGMAEYYSLQLSQNILRGQRASAEKCQSTGGNRPLGYLTGADKKFIIDPDTAPTVRLIFDMYAKGNTCTEITKFLNEKGLRTLRGGKFNKNSLRSILKNEKYIGVYKYKNEIRIENGVPAIVDKDTFYKVQDMLKINKRAPAHKWSKSDYILTDKIFCGKCGSKMVGESGTSKTGKKHNYYVCTKKKRQQTCNKKAVKQRYIEDLVISHVHMILQDDELLSFIADSVYAYYIEQNKENNYLESLNKKLSQVNQAISNVMKAIESGIINDITKQRLDELDTQRTEISTEIADLEHAKSLQLTRDQILFFLCCFRNEDIEDRECCKRLIDTFVNAIFVYDDKIIGTFNYSGDKNTVTLAEINDAETLGKVFVHCAQCSTTRLSLDASRIPDSFFCLFTRVCSGYFLQHKSTTKKFEFVSDW

SEQ ID NO: 2549 - protein, 543 aa, Unknown
  Description of Unknown: Integrase B2550 sequence
  PTHR30461:SF3,SM00857,G3DSA:1.10.10.2600,IPR036162,PF13408, IPR025827,G3DSA:3.40.50.1390,PS51737,IPR006119,IPR038109, PF07508,IPR011109,SSF53041,PTHR30461,PS51736, cd00338,PF00239
MMKFPIDLSMLTEEEIDQFREDPSTLFEGDTDVSLYLRFSSERQREQSIEGQLRDCRAFCKMNRYRIVAIYVDRATTARKDVEKRTHFQEMIRDSDKQPWEAVVVWKLDRFARNRTDSALFKFRLRKNGVRVISATEAISEKPEGIILEAVLEGMAEFYSADLSQKITRGMRESALKCHSIGGHVPLGYKIENHKLVIDPNTAHIVQEAFQLYANGETVADICRLFNFKGYRTAKGVEFNRNSFKSMFRNKRYIGIYTYKDIEIEGGVPAIIDKELFETVHHRLSVNAEAPARGKAKVDYLLAGKLFCGHCGGSMNGESGTSKTGAIHNYYTCYTRKRQHSCDKKPLKKDWIEYIVAQDAMALMTDEVIEELADMAMAQTEQDLKENTRIPELSDRLKEIESSISNITRAIEKGIASDTLMERLVELEKDKKKVLRLLADEEKYICRIDREQIIFWLNKFKGGSIKDEGFRRVMIDLIVNSVTVWDEPDGFRITTAYNLTSCKNKTYRVSPSSGKEFGFEGPESTIKITTPKGVVIFMDALRN

SEQ ID NO: 2550 - protein, 543 aa, Unknown
  Description of Unknown: Integrase B2551 sequence
  PTHR30461:SF3,SM00857,G3DSA:1.10.10.2600,IPR036162,PF13408, IPR025827,G3DSA:3.40.50.1390,PS51737,IPR006119,IPR038109, PF07508,IPR011109,SSF53041,PF00239,PTHR30461, PS51736,Coil,cd00338
MKNERTMLPAVAYYRYSPGGGQTEQSIEGQRRDCLAYARSHGYVIVKEYIDRHMTGRNDKRPNFQLMMHDAELHRFDTLIAWKNDRISRNRRDALNYKDQLRRCGVQIRYAEMDIPRGPEGILMESVMDGLAEYYSAELAQKIRRGMTESAHKCYALGSTPPFGLMVQDHKYVPDPATAPYVRWIFEQYASGTLITEICSTLNAKGVRTARGHEFSKNSLRVLLRNEKYIGVYEAKGIRTEDAIPPIIPRDLFYAVQQRIPQNAHSSHKLSGPRSFPLSGIAYCAICGAPLIGTCGTGKSGAVHTYYACTAHKHKRTCAKKNIRQASLEKQVYTATLDYVLQPSVIRPIAKQVEALSAADNANQEEMLAVQSQLKDTTRRINNILTAMEEGDFSKAVSARLSVLESEQTRLEGQLAALRRAKPKVMASRVEFMLEKMRQTLTDLTSDQLTALTKIFLSRVDLSDDELILTYTLIGTPSSPHPITLKDTPSATLVPFPLSSQDVLSAPPYCANPNSIFFVKHCFGFVFVLEDVDQSTSSFFGAS

SEQ ID NO: 2551 - protein, 543 aa, Unknown
  Description of Unknown: Integrase B2552 sequence
  PTHR30461:SF3,IPR036162,PS51737,IPR011109,PTHR30461, PS00397,PF00239,G3DSA:1.10.10.2600,IPR006119,SSF53041, cd00338,SM00857,IPR025827,IPR038109,PS51736, IPR006118,PF13408,G3DSA:3.40.50.1390,PF07508,Coil
MPVAVYCRVSSEEQAERGTIEIQKEFAAKYVDLYQLEVFDYYCDDGISGTIPVEARPEGSRLFRDAREKKFDTILFYKIDRLGRKVRVILNAVHDLEELGVSIRSMTEPLETETPTGRFMLTSLAGISELERDTILSRMWAGSQRAARLGNWLGGIVPFGYHVVDKQLRISDDIMPGCNLSEADVIQLIFDLSGNQKMSAIKISDYLNALNIPTRYDLNGINGKRKKNASSIWYPSRILSIIKSTTYKGTHKYGKRATNKNSKIILRPVPAIVSNELWEKANEALKINQITAMRNAVREYLLRGIIKCGNCGRTYMGTAYSGSGRKKIPYYVCNAKNSYLAHNTEKCISKNVRADWLEHLVLEDCIKILKSPNKILNMDSEKEQESPTNEVKKEHDQIKASLKKLSEERASIIELYRKKIISETDLSCQLEKLSTEEATLQERLKMKIDSKKSAATKQNKEKTISLLKEFADRCQNLDPEKLSFETRRAIIELIVEKITVTTESAPEKYYPEISVDIEYRFATTPNHIAYVEDCTVTGSALCT

SEQ ID NO: 2552 - protein, 543 aa, Unknown
  Description of Unknown: Integrase B2553 sequence
  PTHR30461:SF3,IPR036162,PS51737,IPR011109,PTHR30461, PS00397,PF00239,G3DSA:1.10.10.2600,IPR006119,SSF53041, cd00338,SM00857,IPR025827,IPR038109,PS51736, IPR006118,PF13408,G3DSA:3.40.50.1390,PF07508,Coil
MPVAVYCRVSSEEQAERGTIEIQKEFAAKYVDLYQLEVFDYYCDDGISGTIPVEARPEGSRLFRDAREKKFDTILFYKIDRLGRKVRVILNAVHDLEELGVSIRSMTEPLETETPTGRFMLTSLAGISELERDTILSRMWAGSQRAARLGNWLGGIVPFGYHVVDKQLQISDDIMPGCNLSEADVIQLIFDLSGNQKMSAIKISDYLNALNIPTRYDLNGINGKRKKNASSIWYPSRVLSIIKSTTYKGTHKYGKRATNKNSKIILRPVPAIVSDELWEKANEALKTNQITAMRNAVREYLLRGIIKCGNCGRTYMGTAYSGSGREKIPYYVCNAKNSYLAHNTEKCISKNVRADWLEHLVLEDCIKILKSPNKILNMDPEKEQQLLADEVKKEHDQIKASLKKLSEERASIIELYRKKIISETDLSCQLEKLSTEEATLQERLKMKIDSRKSAATKQNKEKAISLLKKFTDKCQNLDPEKLSFETKRAIIELIVEKITVTTESAPEKYYPEISVDIEYRFATTPNHIAYVEDCTVTGSALCT

SEQ ID NO: 2553 - protein, 543 aa, Unknown
  Description of Unknown: Integrase B2554 sequence
  PTHR30461:SF3,cd00338,SM00857,G3DSA:1.10.10.2600,IPR036162, PF13408,IPR025827,G3DSA:3.40.50.1390,PS51737,IPR006119, IPR038109,PF07508,SSF53041,IPR011109,PTHR30461, PS51736,Coil,PF00239
MARSKKTECLPLERIGVIYARYSSHNQKEESIEQQVEECTSFALLNGIKIVHVYADKALSGRTDKRPQFQRLMRDAEKRSFSVVVAYKSNRIARDMLNALKYEDRLGKYGIETLYAKEEFGNTAAGRFALRTMMNVNQFYSENMAEDIKRGMLDNAENCKVNGALPLGYVSGPDKRYAIEPKEAEIVRGIYDRVLEGVSFADIANDLNACGVRTKHGSLWNKCSFHRILTNDVYIGVYRHSGVVKEGGVPPILEREVFIAMQKYLETKKNPRGRHRENGDYLLTGKLRCGYCESFMVGVSGTSKTGDKHYYYTCNSRHAGSGCKKENVRRDTIEYTVAALTQQVVFKEDIIEWIATAAVKLAKEASGQNEIDAMEAELAEDRKATKNIMAAIEQGIFTATTKSRLLELEADIASLEQSIRDAKAISEGKLLEKERVVYFLTSLREGNLHSKTYQKRLIDTFVRAVYLWDDRIGIDYYYAGKDSMVKYSLSEIEADIGENIREVLKDSLTGHHTRVIRTQDGQEITIVLTVNGFVLLSPLSVCG

SEQ ID NO: 2554 - protein, 543 aa, Unknown
  Description of Unknown: Integrase B2555 sequence
  PTHR30461:SF3,IPR036162,PS51737,IPR011109,PTHR30461, PF00239,G3DSA:1.10.10.2600,IPR006119,PF14287,SSF53041, IPR025378,SM00857,IPR025827,cd03770,IPR038109, PS51736,PF13408,G3DSA:3.40.50.1390,PF07508,Coil
MAGQPKYNTALYLRLSKDDGTMSESSSIQTQKEMLTRYCRENGFAISQIYIDDGWSGTNTNRPSFQRMLSDIEDGKINCVVTKDLSRLGRNYLETGSFTEIYFPEHNVRYIAVTDGVDTAKGSTMDITPFKNLLNDMYAQDISKKIKSSLLTRQKQGKFIGTKAPYGYVKDPADKNHLLIDKRFAPTVRYIFKLAKDGIGITQIARQLRSEKVPRPVAAAAEELECYDRYLTTEESIYKWSMGSVREILRNPVYKGAVRGQKRPKISLKSEKRKPVQSAGTFVVEGMHEPIIDPEEWELVQRLITSRKKTRKVEKKYDNIFSGLVKCADCGFAMTFTKAHRNWNSENIYANYDYQCNNYRMEGKSVCTHHRITALNLYNAVLADIKRLACEALGDDKQMISAIAARLGKSEKENVRQAERELKRANKRLSELDRLFAKLYEEHVNGKVNERNYNSLSATYEAEQNELESRIAELNAAIKTERENDENAVNFVDLIKQYADIDELTQALLNTLIDRIEVHEPEDLDGELIQKLDVYYKFVGRLD

SEQ ID NO: 2555 - protein, 543 aa, Unknown
  Description of Unknown: Integrase B2556 sequence
  PTHR30461:SF3,IPR036162,PS51737,IPR011109,PTHR30461, PS00397,PF00239,G3DSA:1.10.10.2600,IPR006119,SSF53041, cd00338,SM00857,IPR025827,IPR038109,PS51736, IPR006118,PF13408,G3DSA:3.40.50.1390,PF07508,Coil
MSVAVYCRVSSEEQAERGTIEIQKEFAAKYVDLYQLEVFDYYCDDGISGTIPVEARPEGSRLFRDAREKKFDTILFYKIDRLGRKVRVILNAVHDLEELGVSIRSMTEPLETETPTGRFMLTSLAGISELERDTILSRMWAGSQRAARLGNWLGGIVPFGYHVVDKQLQISDEIMPGCNLSEADVIQLIFDLSGNQKMSAIKISDYLNALNIPTRYDLNGINGKRKKNASSIWYPSRVLSIIKSTTYKGTHKYGKRATNKNSKIILRPVPAIVSDELWEKANEALKINQITAMRNAVREYLLRGIIKCGNCGRTYMGTAYSGSRREKIPYYVCNAKNSYLAHNTEKCISKNVRADWLEHLVLEDCIKILKSPNKILNMDPEKEQQSLADEVKKEHDQIKASLKKLLEERTSIIELYRKKIISETDLSCQLEKLSTEEATLQERLKMKIDSRKSAATKQNKEKAISLLKKFTDKCQNLDPEKLSFETKRAIIELIVEKITVTTESAPEKYYPEISVDIEYRFATTPNHIAYVEDCTVTDSALCT

SEQ ID NO: 2556 - protein, 543 aa, Unknown
  Description of Unknown: Integrase B2557 sequence
  PTHR30461:SF3,cd00338,SM00857,G3DSA:1.10.10.2600,IPR036162, PF13408,PS51737,IPR025827,G3DSA:3.40.50.1390,IPR006119, IPR038109,PF07508,IPR011109,SSF53041,PTHR30461, Coil,PF00239
MYEEIKTACLYLRYSSSNQTEQSIEGQMHVCQDFCKRHNIRIVEMYIDRATSASKDIEKRVEFLKMIKDSEKGNFNAVIVYKLDRFARSRYDSATYKYRLKRNGVQLISATENITQDPEGIILESVLEGMAEFYSAELSQKINRGMRESAMKHNSIGGAIPLGYKTVDKKLVIDETTAPIVREAFQMYADGESVAEICRTFNNRGYKTSKGTRFGKSSFTKIFRNEKYIGVYKYHDYRAEDVIPPIIDKDLWDRVQVRVGKIKKAPARNKARHTYLLTGKLFCGHCGSAMNADGNSQGYLYYRCYGKKNLDKQCNKRNMEKNLIERLVAQDAMSFLTDEYIEKIATIACDRNKQEIESDSPIPVIRDRIRQVDVSLNNLLKAIETGSAPDMLVKRMGELETEKKDMEVQLKKEMAHQVYIDKEQVIFWLEKFREGDINDEEFCQTVIDLFVNSVTVWDEPDDKFKITIAYNLTSIPQKTYRLSKDGRLSDYASNTPDWKLKCSQFPSCVDFTGFNCIQNCVYCYYLSFFSKIALKHRPHYFHI

SEQ ID NO: 2557 - protein, 543 aa, Unknown
  Description of Unknown: Integrase B2558 sequence
  PTHR30461:SF3,cd00338,SM00857,G3DSA:1.10.10.2600,IPR036162, PF13408,PS51737,G3DSA:3.40.50.1390,IPR025827,IPR006119, IPR038109,PF07508,SSF53041,IPR011109,PTHR30461, PS51736,Coil,PF00239
MYEDIKTACLYVRFSSHNQTEQSIEGQTRVCRDFCKRHNIRIVEIYADRATSASKDIEKRVQFLKMIKDSEKGLFDAVIVYKLDRFARSRYDSATYKYRLKRNGVQLISATENISNDPEGIILESVLEGMAEFYSAELSQKINRGMRESAYKHNSIGGAIPLGYKIEDKKLVIDPKTAPIVKEAFEKYADGETVAEICRQFNARGYKTSKGTAFGKSSFTKIFRNERYIGVYTFHDYRAEDAIPAIIDKDLWDRVQLRVGKIKNAPARNKAKVVYLLSGKIFCGHCGSKMNGNCNAGNYYYYQCYGKKNGNVDCKKKNIRKEFIERLVAQDALSLLTDEYIEQIATIACEKNQHEIELDSALPTIRDRIHQVDLSLNNLLKAIESGSAPDMLVKRMGELEKEKKDLQVQAKKESEDIIELDKVQVIYWLEQFRGGNIEDEEFCRMLIDLFVNSVTVWDEDDNTYKVTVAYNLTSLPTKTYRLNKGGTLSDFASNAPDWELKCSQFPSCVDFTGFNCIQNCVYCYYLSFFSKIALKHRPHYFHI

SEQ ID NO: 2558 - protein, 542 aa, Unknown
  Description of Unknown: Integrase B2559 sequence
  PTHR30461:SF3,SM00857,G3DSA:1.10.10.2600,IPR036162,PF13408, IPR025827,PS51737,G3DSA:3.40.50.1390,IPR006119,IPR038109, PF07508,IPR011109,SSF53041,PTHR30461,Coil, PS51736,cd00338,PF00239
MKITAPARSARAVSLEAFVDNLNLANVVIYARYSSAGQNDQSIDGQLAKCREYAQQRGYRVVGEYCDRALSGRYAETRPEFQRMISDSAKHAFDFVLVWKLDRFSRDRYDSAIYKKKLRANGVRVLSVTEGVGDSSESVLLEAILEAMAEEYSRQLAQNVRRGMRQNAEKGLSLGGLAPLGYRVVNKQYEINEDEARIVRFIHEQYADGAGQKQIVADCARLGYRNQRGNPLTLASVKRILANERYVGRYDYLGEIVIEDAFPAIVSKDLKKRVRDRLKANSKAPGHAKAKVEYLLHGKLFCGECGAPMIGECGRGRHGATYYYYTCAARKKQHTCKKRNERKDELEACIVDYIGSCVLTDSWIDGAAERVVAEYQKSYDASGIKPLEKQIRDADKEIDQLVDALISATAEAARRRINERIETAEARKQALEADLASLRIASRVQIKKEDIVVWLSQFRTGDRSDLEYRKKVIDLFVNAIYLYDDSFKLFLNVADSAQVTYADALALAPPSVSDFGASGVPDMHLSEHIIFINGVIGMIVQR

SEQ ID NO: 2559 - protein, 542 aa, Unknown
  Description of Unknown: Integrase B2560 sequence
  PTHR30461:SF3,SM00857,G3DSA:1.10.10.2600,IPR036162,PF13408, PS51737,G3DSA:3.40.50.1390,IPR025827,IPR006119,IPR038109, PF07508,IPR011109,SSF53041,PTHR30461,Coil, PS51736,cd00338,PF00239
MRLTHGAYILARFSTDNQEVDSIDVQVQKCREWCAREHLSVLDVFADEATSGMKNTRPEYSRMMRQLAEGGADTVVIYDQSRMFRKLTAWFQFREQMACYGVRVVAVTQPIIGGDLRDPMTFLSEGSMALMNQMWVLQTRQKVIEKMRYMAEQGKHTGGKPPLGYDVNDERLVINEDEADTVREIFRQYADGKSYREIIKWLNDSGKRTKRGGCFGTNSLHDLLKNEKYIGNIVYGRSERRPDGTRNSHSFSIRTMRMENAVPPIINRETWERVQKKMEDNRRVQAGRPPKAREYPLKGKVFCRECKSAMTIVSSKKTYYYYACSGKKRTGQCDNPQIGAGELENIVADAIREILGNPGNIENIISIIREEKNEIINVATQRMQILLARRMEINRQLEAGTNAILAGLHSQTLKTKMQELEEELAEIDQQMTTLKHSADGTQIPEYRLRALLNAAGDDVNALLSLVMRVEVGKDKIVVWTLLDADPNGHFDFSEDGINIDLQPVDRGDENSGCPLTGTTNFHNFSIVGGLLRFSIPRKKRWG

SEQ ID NO: 2560 - protein, 542 aa, Unknown
  Description of Unknown: Integrase B2561 sequence
  PTHR30461:SF3,SM00857,G3DSA:1.10.10.2600,IPR036162,PF13408, IPR025827,G3DSA:3.40.50.1390,PS51737,IPR006119,IPR038109, PF07508,SSF53041,IPR011109,PTHR30461,Coil, PS51736,cd00338,PF00239
MKITAPARSAGAVSLEAFVDNLNLSNVVIYARYSSAGQNDQSIDGQLAKCREYAQHRGYRVVGEYCDRALSGRYAETRPEFQRMISDSAKHAFDFVLVWKLDRFSRDRYDSAIYKKKLRANGVRVLSVTEGVGDSSESVLLEAILEAMAEEYSRQLAQNVRRGMRQNAEKGLSLGGLPPLGYRVVNKQYEINEDEARIVRFIHEQYADGAGQKQIVADCARLGYRNQRGNPLTLAAVKRILANDRYIGRYDYLGEIVIEDAFPAIVSKELKKRVRDRLNANAKAPGHAKAKVEYLLHGKLFCGECGAPMIGECGRGRHGATYYYYTCAARKKQHTCKKRNERKDELEACIVDYIGSCVLTDSWIDGAAERVVAEYQKSYDASGIKPLEKQIRDADKEIDQLVDALISATAEAARRRINERIETAEARKQALEADLASLRIASRVQIKKEDIVVWLNQFRTGDRSDLEYRKKVIDLFVNSIYLYDDTFKLFLNVTDSTQITYSDSLALAPPSVSDFGASGVPDMHLSEHIIFVNGVIGMIVQR

SEQ ID NO: 2561 - protein, 542 aa, Unknown
  Description of Unknown: Integrase B2562 sequence
  PTHR30461:SF3,cd00338,SM00857,G3DSA:1.10.10.2600,IPR036162, PF13408,IPR025827,G3DSA:3.40.50.1390,PS51737,IPR006119, IPR038109,PF07508,IPR011109,SSF53041,PTHR30461, PS51736,Coil,PF00239
MKKKQPNARHGRAAIYARYSSHNQREASIEQQVKACRELAVRLGLDVVETYEDKAISGKSDRRPSFQRLLRDAEKGYFDCVLAWKSNRMGRNMLQAMTNEARLKDWGVRTFYAEEDFDDTAAGRFALRNMMNVNQFYSENMAEDITRGMMDNASKCLSNGALPLGYKAGENGRIVLDKAQAAVVQEIYTRVACREPFVDIAADLNRRGIKTKRGGPWTKSSFYTICRNERYRGIYIYDDVRVEGGVPRIVSDGLFYRVQEVLKVKKTPQSARHHTGAEDYLLTGKLFCGKCGRPMTGVSGTSRSGEMHYYYTCQKRRREHACDKKNVIREQIEKSVAQAIKQYMLTDEMIQHMADATMAYNARQEKDLHLQDLQGQLAAVKTSAANLLKAIEMGVITETTKARMVELEQEQGRLNAQIENARAELVPITRDNFVSLLHIYRDGDINDSKYLASLFETFLVRVDLYDDHFLIWFNPLGQKTPADIPITSIENGDVDEFFDECRSKNVFDWGGKWSTIVRTSEPLIAIVVSCSVFVFSVKMPEA

SEQ ID NO: 2562 - protein, 542 aa, Unknown
  Description of Unknown: Integrase B2563 sequence
  PTHR30461:SF3,SM00857,G3DSA:1.10.10.2600,IPR036162,PF13408, PS51737,G3DSA:3.40.50.1390,IPR025827,IPR006119,IPR038109, PF07508,IPR011109,SSF53041,PTHR30461,Coil, PS51736,cd00338,PF00239
MRLTHGAYILARFSTDNQEVDSIDVQVQKCREWCAREHLPVLDVFADEATSGMKNTRPEYARMMRQLAEGGADTVVIYDQSRMFRKLTAWFQFREQMACYGVRVVAVTQPIIGGDLRDPMTFLSEGSMALMNQMWVLQTRQKVIEKMRYMAEQGKHTGGKPPLGYDVEDERLVINEDEAETVREIFRQYAAGKSYREIIKWMNDSGKRTKRGGCFGTNSLHDLLKNEKYIGNIVYGRSERRPDGTRNSHSFSIRTMRIENAVPAIIDRETWERVQKKMEDNRRVQAGRPPKAREYPLKGRVFCRECKSAMTIVSSKKTYYYYACSGKKRTGQCDNPQIGAGELENIVADAIREILGNPGNIENIISIIREEKNEIINVATQRMQILLSRRMEINRQLEAGTNAILAGLHSQTLKTKMQELEEELAEIDQQMTTLKHSADGTQIPEDRLRTLLNAAGDDVNALLSLVMRVEVGKDRIVVWTLLDADPNGHFDFSEDGINIDLQPTDRGDENSGCPLTGTMNFHNFFIAGGLLKFSIPRKKRRG

SEQ ID NO: 2563 - protein, 542 aa, Unknown
  Description of Unknown: Integrase B2564 sequence
  PTHR30461:SF3,cd00338,SM00857,G3DSA:1.10.10.2600,IPR036162, PF13408,IPR025827,PS51737,G3DSA:3.40.50.1390,IPR006119, IPR038109,PF07508,IPR011109,SSF53041,PTHR30461, PS51736,Coil,PF00239
MRLKQQEPRRCDTGGALEYYCRRAKNKNMRAVIYARYSCDRQTEQSIEGQLHECKAFAESEGIAIVGEYIDRALSGTTDKRPEFQRMVSDSRSHAFDAVIVYKLDRFARNRYDSAVYKSKLKANGVKVLSAKERITDSPEGIILEGLLESMNEYYSAELAQKVKRGMRENILKGMTTGGVVALGYRVGADKRMEVDPGGAALVRRIFEMYDKGHTYAEICDQINAEGYVTQRRKRYRGNTISRILANERYTGVRHYDGVELEYPKIIEPELFARVQKRLEVSKTKHKRRKKAEQHEYLLTGKAVCGECGKNLHGRCGSGRSGRYYYYCCPDKHLGWIPAEELERAVFDAISKYITPEMCDEIAKRTYAMYLQSTGNHDELTAAQKQLQDVSKKLDNAVNAILSGVASDTLKAAMQQLEEQKASLEATIKRLQTESPKLELAHFEYFARRILTMQEEGAEKIVELLINQVIVYKDRITVLVNLTNNSNKPPLEQVTKILADGSHSVPLPPPVSKYRPRHCALDGIFLGKNPPKSCNFFGFMLQ

SEQ ID NO: 2564 - protein, 542 aa, Unknown
  Description of Unknown: Integrase B2565 sequence
  PTHR30461:SF3,SM00857,G3DSA:1.10.10.2600,IPR036162,PF13408, IPR025827,PS51737,G3DSA:3.40.50.1390,IPR006119,IPR038109, PF07508,IPR011109,SSF53041,PF00239,PTHR30461, PS51736,Coil,cd00338
MKKFPIDLSCLTEEEISQFQEDPSTLYNGDQNVAIYLRYSSTGQSDQSIEGQLRDCRTFCKANHYRIVAIYVDRATTARKDVEKRVHLMEMISDSAKQNWEYVIVWKLDRFARNRNDSAIMKMRLRKNGVKVLSATEHLTDSPESIILESVLEGMAEFFSAELSQKVTRGMRESALKCHSVGGHIPLGYKVENHKLAVDPDTAHIVQEAFSLYANGESVAAICRKFNSAGYKTAKNTEFNRSSFKAMFRNTRYIGTYTYKDIVIENGIPAIIDKELFETVQRRLSKTATAPARGKAKVDYLLSGKLFCGHCGASMNGESGAGRHGKVYHYYSCYTKKRKLGCDKRPLKKDYIEGIVARDALNLLTDQLIDEIADMAIRQSEQDLINDTHIPQLTAQLSEVEKSITNITAAIEKGIASETLMNRLVQLEHEKKTLNKEIKAEEKFVYRIDRDQIVFWLSQFKYGNIEDEDFRRRLIDLLVNSVTVWDEPDGYKITTAYNLTSCKTKTFRVEKNPAAEEATGFDFGESECTKKPHQFGYFKRNA

SEQ ID NO: 2565 - protein, 542 aa, Unknown
  Description of Unknown: Integrase B2566 sequence
  SM00857,G3DSA:1.10.10.2600,IPR036162,PF13408,PS51737, G3DSA:3.40.50.1390,IPR025827,IPR006119,IPR038109,PF07508, IPR011109,SSF53041,PTHR30461,PS51736,cd00338, PF00239
MAKPVRVIPAKPKAELERELKKGRLRVAAYCRVSTDDEEQLTSYQNQIEYYTEKINANPDWEMVGVYADEGISGTSTKHRDEFNKLMALCRRGRVDLILTKSVSRFARNTVDCLKYVRLLKEKGIGILFEKENINTLELSGELMLTFYGDFAQAESESISTNVAIGQRMAMKAGKVVFQYKWLYGYKRGENNMPEIVPEEAVIVRRIYDNMLSGYSAKRIADSLNNDHVPPPNFSEKWSSIIIQRILKNEIYAGDSLRQKTYVADCISKTVKKNTGELPQYYIMDNHSAIVPRDIYNRVQEEFARRNSRISPSTKSPTVNKGRFSSKYALTELLRCGACGAAYRRVTWPAKEKGGEKRIVWRCISRLEHGKKICKTAPTIPEPALHAALMEAIQLLKLDTFEAETDVREILPEVIQYPYGETVQDIEILIERRQDELIQYLAQNPTANEPESTGHADFTMLLNSIEVLRNRREALLRRAQADETVEQRMTGIIERLHNEKPDITGYDDILVRKLVECITVVSDKIKVVFKNGTEIWARWDCE

SEQ ID NO: 2566 - protein, 542 aa, Unknown
  Description of Unknown: Integrase B2567 sequence
  PTHR30461:SF3,SM00857,G3DSA:1.10.10.2600,IPR036162,PF13408, IPR025827,PS51737,G3DSA:3.40.50.1390,IPR006119,IPR038109, PF07508,IPR011109,SSF53041,PTHR30461,Coil, PS51736,cd00338,PF00239
MKITAPARSARAVSLEAFVDNLNLANVVIYARYSSAGQNDQSIDGQLAKCREYAQQRGYRVVGEYCDRALSGRYAETRPEFQRMISDSAKHAFDFVLVWKLDRFSRDRYDSAIYKKKLRANGVRVLSVTEGVGDSSESVLLEAILEAMAEEYSRQLAQNVRRGMRQNAEKGLSLGGLAPLGYRVVNKQYEINEDEARIVRFIHEQYADGAGQKQIVADCARLGYRNQRGNPLTLASVKRILANERYAGRYDYLGEIVIEDAFPAIVSKDLKKRVRDRLKANARAPGHAKAKVEYLLHGKLFCGECGAPMIGECGRGRHGATYYYYTCAARKKQHTCKKRNERKDELEASIVDYIGSCVLTDSWIDGAAERVVAEYQKSYDASGIKPLEKQIRDADKEIDQLVDALISATAEAARRRINERIETAEARKQALEADLASLRIASRVQIKKEDIVVWLNQFRTGDRSDLEYRKKVIDLFVNAIYLYDDSFKLFLNVADSAQVTYADALALAPPSVSDFGASGVPDMHLSEHIIFVNGVIGMIVQR

SEQ ID NO: 2567 - protein, 542 aa, Unknown
  Description of Unknown: Integrase B2568 sequence
  PTHR30461:SF3,SM00857,G3DSA:1.10.10.2600,IPR036162,PF13408, IPR025827,G3DSA:3.40.50.1390,PS51737,IPR006119,IPR038109, PF07508,SSF53041,IPR011109,PF00239,PTHR30461, PS51736,Coil,cd00338
MRLTHGAYILARFSTDNQEVDSIDVQVQKCREWCAREHLPVLDVFADEAASGMKNTRPEYARMMRQLAEGGADTVVIYDQSRMFRKLTAWFQFREQMARYGVRVVAVTQPIIGGDLRDPMTFLSEGSMALMNQMWVLQTRQKVIEKMRYMAEQGKHTGGKPPLGYDVKDERLVINEDEAETVREIFRQYAAGKSYREIIKWLNDSGTRTKRGGCFGTNSLHDLLKNEKYIGNIVYGRSERRPDGTRNSHSFSIRTMRMENAVPSIIDRETWERVQKKMEDNRRVQAGRPPKAREYPLKGKVFCRECKSAMTIVSSKKTYYYYACSGKKRTGQCDNPQIGAGELENIVADAIREILGNPGNIENIISIIREEKNEIINVATQRMQILLSRRMEINRQLEAGTNAILAGLHSQTLKTKMQELEEELAEIDQQMTTLKHSADGTQIPEDRLRALLNAAGDDVNALLSLVMRVEVGKDRIVVWTLLDADPNGHFDFSEDGINIDLQPIDRGDENSGCPLTGTMNFHNFFIAGGLLRFSIPRKKRRG

SEQ ID NO: 2568 - protein, 542 aa, Unknown
  Description of Unknown: Integrase B2569 sequence
  PTHR30461:SF3,SM00857,G3DSA:1.10.10.2600,IPR036162,PF13408, IPR025827,PS51737,G3DSA:3.40.50.1390,IPR006119,IPR038109, PF07508,IPR011109,SSF53041,PTHR30461,Coil, PS51736,cd00338,PF00239
MKITAPARSARAVSLEAFVDNLNLANVVIYARYSSAGQNDQSIDGQLSKCREYAQQRGYRVVGEYCDRALSGRYAETRPEFQRMISDSAKHAFDFVLVWKLDRFSRDRYDSAIYKKKLRANGVRVLSVTEGVGDSSESVLLEAILEAMAEEYSRQLAQNVRRGMRQNAEKGLSLGGLAPLGYRVVNKQYEINEDEARIVRFIHEQYADGAGQKQIVADCARLGYRNQRGNPLTLASVKRILANERYAGRYDYLGEIVIEDAFPAIVSKELKKRVRDRLKANSKAPGHAKAKVEYLLHGKLFCGECGAPMIGECGRGRHGATYYYYTCAARKKQHTCKKRNERKDELEAGIVDYIGSCVLTDSWIDGAAERVVAEYQKSYDASGIKPLEKQIRDADKEIDQLVDALISATAEAARRRINERIETAEARKQALEADLASLRIASRVQIKKEDIVVWLNQFRTGDRSDLEYRKKVIDLFVNAIYLYDDSFKLFLNVADSAQVTYADALALAPPSVSDFGASGVPDMHLSEHIIFVNGVIGMIVQR

SEQ ID NO: 2569 - protein, 542 aa, Unknown
  Description of Unknown: Integrase B2570 sequence
  PTHR30461:SF3,cd00338,SM00857,G3DSA:1.10.10.2600,IPR036162, PF13408,PS51737,G3DSA:3.40.50.1390,IPR025827,IPR006119, IPR038109,PF07508,IPR011109,SSF53041,PTHR30461, PS51736,Coil,PF00239
MAPALRRVVRTMPQIAVVQIDDTPQVKKTKVAAYARVSTEKEEQEDSFERQVEHYTHLIESNPEWTMVEVYKDPGITGTKAEKRPDFLRMIDDCRAGKIDKILVKSVSRFARNTVDALNYIRELRDMNISVQFESENIDTLTPGGEVLLTILAAMAEQESRTMSNNIKWAYQKKFEKGEVTINTGLMLGYTKNGKDEDGRAVYAIVEEEAEIIRRIYREYLNGSTVTQIIHGLEEDGVKTKRGTEKWYHTAVTSILTNEKYTGNAYLGKTYKPDVLSKKRYRNDGEKAPMYYAENSHPAIVTMEMFNMVKLEMERRKTEKEKAVGNTRYTSKYPFSGILICGTCGSRLRRHVRKTGSGKLVPSWGCSNRILNGREVCDSYHVNEDVLYATYHAAVQAMVEDAGSILSTLESATEKELQPSNKAALDEVEQKIIDLQEKVLALHRQKRAQAVNDAYYNAQVNDYSQQLAALEDRQQALQTADARYATVRMWLADFQQHMQEGDATDDRDGKMMKSLVESIIIWPDRMEIHFKCGVNIEQKYVK

SEQ ID NO: 2570 - protein, 542 aa, Unknown
  Description of Unknown: Integrase B2571 sequence
  PTHR30461:SF3,SM00857,G3DSA:1.10.10.2600,IPR036162,PF13408, IPR025827,PS51737,G3DSA:3.40.50.1390,IPR006119,IPR038109, PF07508,IPR011109,SSF53041,PTHR30461,Coil, PS51736,cd00338,PF00239
MRLTHGAYILARFSTDNQEVDSIDVQVQKCREWCAREHMPVLDVFADEATSGMKNTRPEYARMMRQLADGGADTVVIYDQSRMFRKLTAWFQFREQMACYGVRVVAVTQPIIGGDLRDPMTFLSEGSMALMNQMWVLQTRQKVIEKMRYMAEQGKHTGGKPPLGYDVEDERLVINDDEAETVREIFRQYAVGKSYREIIKWLNDSGKRTKRGGCFGTNSLHDLLKNEKYIGNIVYGRSERRPDGTRNSHSFSVRTMRMENAVPAIIDHETWERVQKKMEDNRRVQAGRPPRAREYPLKGKVFCRECKSAMTIVSSKKTYYYYACSGKKRTGQCDNPQIGAGELENIVADAIREILGNPGNIENIISIIREEKNEIINVATQRMQILLARRMEINRQLEAGTNAILAGLHSQTLKTKMQELEEELAEIDQQMTTLKHSADGTQIPEDRLRTLLNAAGDDVNALLSLVMRVEVGKDRIVVWTLLDADPNGHFDFSEDGINIDLQPVDRGDENSGCPLTGTTNFHNFSIVGGLLRFSIPRKKRWG

SEQ ID NO: 2571 - protein, 542 aa, Unknown
  Description of Unknown: Integrase B2572 sequence
  PTHR30461:SF3,IPR036162,PS51737,IPR011109,PTHR30461, PF00239,G3DSA:1.10.10.2600,IPR006119,PF14287,SSF53041, cd17289,IPR025378,SM00857,IPR025827,cd03770, IPR038109,PS51736,PF13408,G3DSA:3.40.50.1390,PF07508,Coil
MEKPISALNVVRAGLYMRLSRDDDQAGESGSIQNQRDILRQYAISNQMLIVKEYVDDGWSGTNFNRPGFQEMISDIEKGKINCVITKDLSRLGRNYIEVGKYTEYFFPQKGVRYIAIGDHVDTIQADNDVAPFLNIFNEFHAKQTSKKTRAVFETKFKNGMNCNSVLPYGYKKDADHKGKILIDDEHANVVRLIFDMADNGYGSGMILKKLFEMKIESPGYVLYKTTGLLKETYDDAPEYKKYAWNVQRIRSILKNEYYIGNTVHYRTRTRSFKDRTRIPSKKEDMLIIENTHEPIVSKETFFSVQRKLEMKKRPASEEFVQVFSGLVKCADCGRRMRLECQKYKGKRYRYFACPGRKPLPVKQCTMHYIRYDVLEKYVLDDIKGVLSQFRTDNDAIIRKMVESEQKRKANDSSSLKAKIEKNIKRKAELVKMFSKLYEDWAGGRISEQNFDSMVDKIQKEQSEVDATIEMLNREDIASDEEHNISRFESIVKNIKAPKKLTRELVNALIDRIEIHESEGEKGARNKTQKIEIYYKFVGVIN

SEQ ID NO: 2572 - protein, 542 aa, Unknown
  Description of Unknown: Integrase B2573 sequence
  PTHR30461:SF3,cd00338,SM00857,G3DSA:1.10.10.2600,IPR036162, PF13408,PS51737,G3DSA:3.40.50.1390,IPR025827,IPR006119, IPR038109,PF07508,IPR011109,SSF53041,PTHR30461, PS51736,Coil,PF00239
MKKFPIDLSCLTEEEISQFQEDPYTLYNGDQNVAIYLRYSSTGQSDQSIEGQLRDCRTFCKANHYRIVAIYVDRATTARKDVEKRVHLMEMISDSAKQNWEYVIVWKLDRFARNRNDSAIMKMRLRKNGVKVLSATEHLTDSPESIILESVLEGMAEFFSAELSQKVTRGMRESALKCHSVGGHIPLGYKVENHKLVVDPDTAHIVQEAFSLYANGESVAAICRKFNSAGYKTAKNTEFNRSSFKAMFRNTRYIGTYTYKDIVIENGIPAIIDKELFETVQRRLSKTATAPARGKAKVDYLLSGKLFCGHCGASMNGESGAGRHGKVYHYYSCYTKKRKLGCDKRPLKKDHIEGIVARDALNLLTDQLIDEIADMAIRQSEQDLINDTHIPQLTAQLSEVEKSITNITAAIEKGIASETLMNRLVQLEHEKKTLNKEIKAEEKFVYRIDRDQIVFWLSQFKYGNIEDENFRRRLIDLLVNSVTVWDEPDGYKITTAYNLTSCKTKTFRVEKNPAAEEATGFDFGESECTIRWQQFGYFKRNA

SEQ ID NO: 2573 - protein, 542 aa, Unknown
  Description of Unknown: Integrase B2574 sequence
  PTHR30461:SF3,SM00857,G3DSA:1.10.10.2600,IPR036162,PF13408, IPR025827,PS51737,G3DSA:3.40.50.1390,IPR006119,IPR038109, PF07508,IPR011109,SSF53041,PTHR30461,Coil, PS51736,cd00338,PF00239
MRLTHGAYILARFSTDNQEVDSIDVQVQKCREWCAREHLPVLDVFADEATSGMKNTRPEYARMMRQLADGGADTVVIYDQSRMFRKLTAWFQFREQMARYGVRVVAVTQPIIGGDLRDPMTFLSEGSMALMNQMWVLQTRQKVIEKMRYMAEQGKHTGGKPPLGYDVEDERLVINEDEAETVREIFRQYAAGKSYREIIKWLNDSGTRTKRGGCFGTNSLHDLLKNEKYIGNIVYGRSERRPDGTRNSHSFSIRTMRIENAVPAIIDRETWERVQKKMEDNRRVQAGRPPKAREYPLKGRVFCRECKSAMTIVSSKKTYYYYACSGKKRTGQCDNPQIGAGELENIVADAIREILGNPGNIENIISIIREEKNEIINVATQRMQILLARRMEINRQLEAGTNAILAGLHSHTLKTKMQELEEELAEIDRQMTTLKHSADGTQIPEDRLRTLLNAAGDDVNALLSLVMRVEVGKDRIVVWTLLDADPNGHFDFSEDGINIDLQPIDRGDENSGCPLTGTMNFHNFSIAGGLLRFSIPRKKRWG

SEQ ID NO: 2574 - protein, 542 aa, Unknown
  Description of Unknown: Integrase B2575 sequence
  PTHR30461:SF3,SM00857,G3DSA:1.10.10.2600,IPR036162,PF13408, IPR025827,PS51737,G3DSA:3.40.50.1390,IPR006119,IPR038109, PF07508,IPR011109,SSF53041,PTHR30461,Coil, PS51736,cd00338,PF00239
MKITAPARSARAVSLEAFVDNLNLANVVIYARYSSAGQNDQSIDGQLAKCREYAQQRGYRVVGEYCDRALSGRYAETRPEFQRMISDSAKHAFDFVLVWKLDRFSRDRYDSAIYKKKLRANGVRVLSVTEGVGDSSESVLLEAILEAMAEEYSRQLAQNVRRGMRQNAEKGLSLGGLAPLGYRVVNKQYEINEDEARIVRFIHEQYADGAGQKQIVADCARLGYRNQRGNPLTLASVKRILANERYAGRYDYLGEIVIEDAFPAIVSKDLKKRVRDRLKANAKAPGHAKAKVEYLLHGKLFCGECGAPMIGECGRGRHGATYYYYTCAARKKQHTCKKRNERKDELEASIVDYIGSCVLTDSWIDGAAERVVAEYQKSYDASGIKPLEKQIRDADKEIDQLVDALISATAEAARRRINERIETAEARKQALEADLASLRIASRVQIRKEDIVVWLNQFRTGDRSDLEYRKKVIDLFVNAIYLYDDSFKLFLNVTDSSQVTYADALALAPPSVSDFGASGVPDMHLSEHIIFVNGVIGMIVQR

SEQ ID NO: 2575 - protein, 542 aa, Unknown
  Description of Unknown: Integrase B2576 sequence
  SM00857,G3DSA:1.10.10.2600,IPR036162,PF13408,IPR025827, PS51737,G3DSA:3.40.50.1390,IPR006119,IPR038109,PF07508, IPR011109,SSF53041,PF00239,PTHR30461,PS51736, Coil,cd00338
MVQEKLRAVFYARVSTEEERQLNALEKQVAECKDAVLQKGWKLVDQYVDEGKSGTQIKRRDEYRRLFEDLENDKFDIVVIKSQDRLQRNTLDWYIWIDRLTTHGKRLYMYLEDTFYSPDNALISGIKAILAEEYSRELSKKINNSYKRRIEAAKNGEKISIVNNSRSLGYDKVNGELVINEKEAEVVRMIFNMYASGEGLRAISNTLYDMGYRNRSGNEIDPTTISRMLSSEKYKGVYVINQRHYDFDTKKTVLNPKSEWVHIPGAVPAIVEPELWDRVQEIKGSKVQSIKNEKRGRNCGKSIFSGKIYCAKCGAKYWRSLENGYVKFKCSSYSKYGKIPGKGCDNKSFSENALYSILQSLSEQIVEINTAEVRKSLLNWLESLRERLRASQGDDTIKEEIRKQTARKEKLTDAYMDGIISKEDYSKRYKELEKTLEDLKDKLLTLEVNEDLQSIEEVIQNIDKEMEEYLQTQSFNESRVEFLNQHLTKVTVNKDSFLLEFDLIGGAILTGKDFYLFVDNPRWYSIQTDKRNSVDVGIKIAA

SEQ ID NO: 2576 - protein, 542 aa, Unknown
  Description of Unknown: Integrase B2577 sequence
  SM00857,G3DSA:1.10.10.2600,IPR036162,PF13408,IPR025827, G3DSA:3.40.50.1390,PS51737,IPR006119,IPR038109,PF07508, IPR011109,SSF53041,PF00239,PTHR30461,PS51736, Coil,cd00338
MVQEKLRAVFYARVSTEEERQLNALEKQVAECKDAILQKGWKLVDQYVDEGKSGTQIKRRDEYRRLFEDLENDKFDIVVIKSQDRLQRNTLDWYIWIDRLTTHGKRLYMYLEDTFYSPDNALISGIKAILAEEYSRELSKKINNSYKRRIEAAKNGEKISIVNNSRSLGYDKVNGELVINEKEAEVVRMIFNMYVSGEGLRAISNTLYDMGYRNRSGNEIDPTTISRMLSSEKYKGVYVINQRHYDFDTKKTVLNPKSEWVHIPGAVPAIVEPELWDRVQEIKGSKVQSIKNEKRGRNCGKSIFSGKIYCAKCGAKYWRSLENGYVKFKCSSYSKYGKIPGKGCDNKSFSENALYSILQSLSEQIVEVNTAEVRKSLLNWLESLRERLRASQGDDTIKEEIRKQTARKEKLTDAYMDGIISKEDYSKRYKELEKTLEDLKDKLLTLEVNEDLQSIEEVIQNIDKEMEEYLQTQSFNESRVEFLNQHLTKVTVNKDYFLLEFDLIGGAILTGKDFYLFVDNPRWYSIQTDKRNSVDVGIKIAA

SEQ ID NO: 2577 - protein, 542 aa, Unknown
  Description of Unknown: Integrase B2578 sequence
  PTHR30461:SF3,SM00857,G3DSA:1.10.10.2600,IPR036162,PF13408, PS51737,IPR025827,G3DSA:3.40.50.1390,IPR006119,IPR038109, PF07508,IPR011109,SSF53041,PTHR30461,Coil, PS51736,cd00338,PF00239
MKITAPARSAGAVSLEAFVDNLNLANVVIYARYSSAGQNDQSIDGQLAKCREYAQQRGYRVVGEYCDRALSGRYAETRPEFQRLIADSAKRAFDFVLVWKLDRFSRDRYDSAIYKKKLRANGVRVLSVTEGVGDSSESVLLEAILEAMAEEYSRQLAQNVRRGMRQNAEKGLSLGGLAPLGYRVVNKQYEINEDEARIVRFIHEQYADGAGQKQIVADCARLGYRNQRGNPLTLASVKRILANERYVGRYDYLGEIVIEDAFPAIVSKELKKRVRDRLKANSKAPGHAKAKVEYLLHGKLFCGECGAPMIGECGRGRHGATYYYYTCAARKKQHTCKKRNERKDELEASIVDYIGSCVLTDSWIDGAAERVVAEYQKSYDASGIKPLEKQIRDADKEIDQLVDALISATAEAARRRINERIETAEARKQALEADLASLRIASRVQIRKEDIVVWLNQFRTGDRSDLEYRKKVIDLFVNAIYLYDDSFKLFLNVADSSQVTYADALALAPPSVSDFGASGVPDMHLSEHIIFVNGVIGMIVQR

SEQ ID NO: 2578 - protein, 542 aa, Unknown
  Description of Unknown: Integrase B2579 sequence
  PTHR30461:SF3,SM00857,G3DSA:1.10.10.2600,IPR036162,PF13408, IPR025827,PS51737,G3DSA:3.40.50.1390,IPR006119,IPR038109, PF07508,IPR011109,SSF53041,PTHR30461,Coil, PS51736,cd00338,PF00239
MKITAPARSARAVSLEAFVDNLNLANVVIYARYSSAGQNDQSIDGQLAKCREYAQQRGYRVVGEYCDRALSGRYAETRPEFQRMISDSAKHAFDFVLVWKLDRFSRDRYDSAIYKKKLRANGVRVLSVTEGVGDSSESVLLEAILEAMAEEYSRQLAQNVRRGMRQNAEKGLSLGGLAPLGYRVVNKQYEINEDEARIVRFIHEQYADGAGQKQIVADCARLGYRNQRGNPLTLASVKRILANERYAGRYDYLGEIVIEDAFPAIVSKDLKKRVRDRLKANARAPGHAKAKVEYLLHGKLFCGECGAPMIGECGRGRHGATYYYYTCAARKKQHTCKKRNERKDELEASIVDYIGSCVLTDSWIDGAAERVVAEYQKSYDASGIKPLEKQIRDADKEIDQLVDALISATAEAARRRINERIETAEARKQALEADLASLRIASRVQIKKEDIVVWLNQFRTGDRSDLEYRKKVIDLFVNAIYLYDDSFKLFLNVADSAQVTYADALALAPPSVSDFGASGVPDMHLSEHIIFINGVIGMIVQR

SEQ ID NO: 2579 - protein, 542 aa, Unknown
  Description of Unknown: Integrase B2580 sequence
  PTHR30461:SF3,SM00857,G3DSA:1.10.10.2600,IPR036162,PF13408, PS51737,IPR025827,G3DSA:3.40.50.1390,IPR006119,IPR038109, PF07508,IPR011109,SSF53041,PTHR30461,Coil, PS51736,cd00338,PF00239
MKITAPARSAGAVSLEAFVDNLNLANVVIYARYSSAGQNDQSIDGQLAKCREYAQQRGYRVVGEYCDRALSGRYAETRPEFQRLIADSAKRAFDFVLVWKLDRFSRDRYDSAIYKKKLRANGVRVLSVTEGVGDSSESVLLEAILEAMAEEYSRQLAQNVRRGMRQNAEKGLSLGGLAPLGYRVVNKQYEINEDEARIVRFIHEQYADGAGQKQIVADCARLGYRNQRGNPLTLASVKRILANERYVGRYDYLGEIVIEDAFPAIVSKELKKRVRDRLKANAKAPGHAKAKVEYLLHGKLFCGECGAPMIGECGRGRHGATYYYYTCAARKKQHTCKKRNERKDELEASIVDYIGSCVLTDSWIDGAAERVVAEYQKSYDASGIKPLEKQIRDADKEIDQLVDALISATAEAARRRINERIETAEARKQALEADLASLRIASRVQIRKEDIVVWLNQFRTGDRSDLEYRKKVIDLFVNAIYLYDDSFKLFLNVADSAQVTYADALALAPPSVSDFGASGVPDMHLSEHIIFVNGVIGMIVQR

SEQ ID NO: 2580 - protein, 542 aa, Unknown
  Description of Unknown: Integrase B2581 sequence
  PTHR30461:SF3,SM00857,G3DSA:1.10.10.2600,IPR036162,PF13408, PS51737,G3DSA:3.40.50.1390,IPR025827,IPR006119,IPR038109, PF07508,IPR011109,SSF53041,PTHR30461,Coil, PS51736,cd00338,PF00239
MRLTHGAYILARFSTDNQEVDSIDVQVQKCREWCAREHLPVLDVFADEATSGMKNTRPEYSRMMRQLADGGADTVVIYDQSRMFRKLTAWFQFREQMACYGVRVVAVTQPIIGGDLRDPMTFLSEGSMALMNQMWVLQTRQKVIEKMRYMAEQGKHTGGKPPLGYDVEDERLVINEDEAETVREIFRQYAAGKSYREIIKWLNDSGKRTKRGGCFGTNSLHDLLKNEKYIGNIVYGRSERRPDGTRNSHSFSIRTMRMENAVPAIIDRETWERVQKKMEDNRRVQAGRPPKAREYPLKGKVFCRECKSAMTIVSSKKTYYYYACSGKKRTGQCDNPQIGAGELENIVADAIREILGNPGNIENIISIIREEKNEIINVATQRMQILLARRMEINRQLEAGTNAILAGLHSQTLKTKMQELEEELAEIDQQMTTLKHSADGTQIPEDRLRALLNAAGDDINALLSLVMRVEVGKDKIVVWTLLDADPDGHFDFSEDGINIDLQPVDRGDENSGCPLTGTMNFHNFFIAGGLLRFSIPRKKRWG

SEQ ID NO: 2581 - protein, 542 aa, Unknown
  Description of Unknown: Integrase B2582 sequence
  PTHR30461:SF3,SM00857,G3DSA:1.10.10.2600,IPR036162,PF13408, PS51737,G3DSA:3.40.50.1390,IPR025827,IPR006119,IPR038109, PF07508,IPR011109,SSF53041,PTHR30461,Coil, PS51736,cd00338,PF00239
MKITAPARSARAVSLEAFVDNLNLANVVIYARYSSAGQNDQSIDGQLSKCREYAQQRGYRVVGEYCDRALSGRYAETRPEFQRLIADSAKRAFDFVLVWKLDRFSRDRYDSAIYKKKLRANGVRVLSVTEGVGDSSESVLLEAILEAMAEEYSRQLAQNVRRGMRQNAEKGLSLGGLAPLGYRVVNKQYEINEDEARIVRFIHEQYADGAGQKQIVADCARLGYRNQRGNPLTLASVKRILANERYAGRYDYLGEIVIEDAFPAIVSKELKKRVRDRLKANSKAPGHAKAKVEYLLHGKLFCGECGAPMIGECGRGRHGATYYYYTCAARKKQHTCKKRNERKDELEACIVDYIGSCVLTDSWIDGAAERVVAEYQKSYDASGIKPLEKQIRDADKEIDQLVDALISATAEAARRRINERIETAEARKQALEADLASLRIASRVQIKKEDIVVWLNQFRTVDRSDLEYRKKVIDLFVNSIYLYDDTFKLFLNVTDSTQITYSDSLALAPPSVSDFGASGVPDMHLSEHIIFVNGVIGMIVQR

SEQ ID NO: 2582 - protein, 542 aa, Unknown
  Description of Unknown: Integrase B2583 sequence
  PTHR30461:SF3,SM00857,G3DSA:1.10.10.2600,IPR036162,PF13408, IPR025827,G3DSA:3.40.50.1390,PS51737,IPR006119,IPR038109, PF07508,IPR011109,SSF53041,PTHR30461,Coil, PS51736,cd00338,PF00239
MRLTHGAYILARFSTDNQEVDSIDVQVQRCREWCEREHLPVLDVFADEATSGMKNTRPEYSRMMRQLAEGGADTVVIYDQSRMFRKLTAWFQFREQMACYGVRVVAVTQPIIGGDLRDPMTFLSEGSMALMNQMWVLQTRQKVIEKMRYMAEQGKHTGGKPPLGYDVKDERLVINEDEADTVREIFRKYADGKSYREIIKWLNDSGKRTKRGGCFGTNSLHDLLKNEKYIGNIVYGRSERRPDGTRNSHSFSIRTMRMENAVPPIIDRETWERVQKKMEDNRRVQAGRPPKAREYPLKGKVFCRECKSAMTIVSSKKTYYYYACSGKKRTGQCDNPQISAGELENIVADAIREILGNPENIENIVSIIREEKNEIINVATQRMQILLARRMEINRQLEAGTNAILAGLHSKTLKTKMQELEEELTEIDQQMTTLKHSADGTQIPEERLRALLNAAGDDVNALLSLVMRVEVGKDRIVVWTLLDADPNGHFDFSEDGINIDLQPVDRGDENSGCPLTGTMNFYNFSIAGGLLRFSIPRKKRWG

SEQ ID NO: 2583 - protein, 542 aa, Unknown
  Description of Unknown: Integrase B2584 sequence
  PTHR30461:SF3,SM00857,G3DSA:1.10.10.2600,IPR036162,PF13408, IPR025827,PS51737,G3DSA:3.40.50.1390,IPR006119,IPR038109, PF07508,IPR011109,SSF53041,PTHR30461,Coil, PS51736,cd00338,PF00239
MKITAPARSAGAVSLEAFVDNLNLANVVIYARYSSAGQNDQSIDGQLAKCREYAQQRGYRVVGEYCDRALSGRYAETRPEFQRMISDSAKHAFDFVLVWKLDRFSRDRYDSAIYKKKLRANGVRVLSVTEGVGDSSESVLLEAILEAMAEEYSRQLAQNVRRGMRQNAEKGLSLGGLAPLGYRVVNKQYEINEDEARIVRFIHEHYADGAGQKQIVADCARLGYRNQRGNPLTLASVKRILANERYAGRYDYLGEIVIEDAFPAIVSKELKKRVRDRLKANSKAPGHAKAKVEYLLHGKLFCGECGAPMIGECGRGRHGATYYYYTCAARKKQHTCKKRNERKDELEACIVDYIGSCVLTDSWIDGAAERVVAEYQKSYDASGIKPLEKQIRDADKEIDQLVDALISATAEAARRRINERIETAEARKQALEADLASLRIASRVQIKKEDIVVWLNQFRTGDRSDLEYRKKVIDLFVNSIYLYDDTFKLFLNVTDSTQITYSDSLALAPPSVSDFGASGVPDMHLSEHIIFVNGVIGMIVQR

SEQ ID NO: 2584 - protein, 542 aa, Unknown
  Description of Unknown: Integrase B2585 sequence
  PTHR30461:SF3,SM00857,G3DSA:1.10.10.2600,IPR036162,PF13408, PS51737,G3DSA:3.40.50.1390,IPR025827,IPR006119,IPR038109, PF07508,IPR011109,SSF53041,PTHR30461,Coil, PS51736,cd00338,PF00239
MKITAPARSARAVSLEAFVDNLNLANVVIYARYSSAGQNDQSIDGQLAKCREYAQQRGYRVVGEYCDRALSGRYAETRPEFQRLIADSAKRAFDFVLVWKLDRFSRDRYDSAIYKKKLRTNGVRVLSVTEGVGDSSESVLLEAILEAMAEEYSRQLAQNVRRGMRQNAEKGLSLGGLAPLGYRVVNKQYEINEDEARIVRFIHEQYADGAGQKQIVADCARLGYRNQRGNPLTLASVKRILANERYVGRYDYLGEIVIEDAFPAIVSKDLKKRVRDRLKANAKAPGHAKAKVEYLLHGKLFCGECGAPMIGECGRGRHGATYYYYTCAARKKQHTCKKRNERKDELEASIVDYIGSCVLTDSWIDGAAERVVAEYQKSYDASGIKPLEKQIRDADKEIDQLVDALISATAEAARRRINERIETAEARKQALEADLASLRIASRVQIRKEDIVVWLNQFRTGDRSDLEYRKKVIDLFVNAIYLYDDSFKLFLNVTDSSQVTYADALALAPPSVSDFGASGVPDMHLSEHIIFVNGVIGMIVQR

SEQ ID NO: 2585 - protein, 542 aa, Unknown
  Description of Unknown: Integrase B2586 sequence
  PTHR30461:SF3,SM00857,G3DSA:1.10.10.2600,IPR036162,PF13408, PS51737,G3DSA:3.40.50.1390,IPR025827,IPR006119,IPR038109, PF07508,SSF53041,IPR011109,PTHR30461,Coil, PS51736,cd00338,PF00239
MRLTHGAYILARFSTDNQEVDSIDVQVQKCREWCAREHLPVLDVFADEATSGMKNTRPEYSRMMRQLAEGGADTVVIYDQSRMFRKLTAWFQFREQVACYGVRVVAVTQPIIGGDLRDPMTFLSEGSMALMNQMWVLQTRQKVIEKMRYMAEQGKHTGGKPPLGYDVKDKRLVINEDEADTVREIFRQYADGKSYREIIKWLNDSGKRTKRGGCFGTNSLHDLLKNEKYIGNIVYGRSERRPDGTRNSHSFSIRTMRMENAVPSIIDRETWERVQKKMEDNRRVQAGRPPKAREYPLKGKVFCRECKSAMTIVSSKKTYYYYACSGKKRTGQCDNPQIGAGELENIVADAIREILGNPGNIENIISIIREEKNEIINVATQRMQILLARRMEINRQLEAGTNAILTGLHSQTLKTKMQELEEELSEIDQQMTTLKHSADGTQIPEERLRALLNAAGDDINALLSLVMRVEVGKDRIVVWTLLDADPNGHFDFSEDGINIDLQPVDRGDENSGCPLTGTMNFHNFSIAGGLLRFSIPRKKRWG

SEQ ID NO: 2586 - protein, 542 aa, Unknown
  Description of Unknown: Integrase B2587 sequence
  PTHR30461:SF3,SM00857,G3DSA:1.10.10.2600,IPR036162,PF13408, PS51737,G3DSA:3.40.50.1390,IPR025827,IPR006119,IPR038109, PF07508,IPR011109,SSF53041,PTHR30461,Coil, PS51736,cd00338,PF00239
MRLTHGAYILARFSTDNQEVDSIDVQVQKCREWCAREHLPVLDVFADEATSGMKNTRPEYSRMMRQLAEGGADTVVIYDQSRMFRKLTAWFQFREQVACYGVRVVAVTQPIIGGDLRDPMTFLSEGSMALMNQMWVLQTRQKVIEKMRYMAEQGKHTGGKPPLGYDVKDERLVINEDEADTVREIFRKYAAGKSYREIIKWLNDSGKRTKRGGCFGTNSLHDLLKNEKYIGNIVYGRSERRPDGTRNSHSFSIRTMRMENAVPSIIDRETWERVQKKMEDNRRVQAGRPPKAREYPLKGKVFCRECKSAMTIVSSKKTYYYYACSGKKRTGQCDNPQIGAGELENIVADAIREILGNPENIENIVSIIREEKNEIINVATQRMQILLARRMEINRQLEAGTNAILAGLHSQTLKTKMQELEEELTEIDQQMTTLKHSADGTQIPEERLRALLNAAGDDVNALLSLVMRVEVGKDRIVVWTLLDADPNGHFDFSEDGINIDLQPVDRGDENSGCHLTGTMNFHNFSIAGGLLRFSIPRKKRWG

SEQ ID NO: 2587 - protein, 542 aa, Unknown
  Description of Unknown: Integrase B2588 sequence
  PTHR30461:SF3,SM00857,G3DSA:1.10.10.2600,IPR036162,PF13408, PS51737,IPR025827,G3DSA:3.40.50.1390,IPR006119,IPR038109, PF07508,IPR011109,SSF53041,PTHR30461,Coil, PS51736,cd00338,PF00239
MKITAPARSARAVSLEAFVDNLNLANVVIYARYSSAGQNDQSIDGQLAKCREYAQQRGYRVVGEYCDRALSGRYAETRPEFQRMISDSAKRAFDFVLVWKLDRFSRDRYDSAIYKKKLRANGVRVLSVTEGVGDSSESVLLEAILEAMAEEYSRQLAQNVRRGMRQNAEKGLSLGGLAPLGYRVVNKQYEINEDEARIVRFIHEQYADGAGQKQIVADCARLGYRNQRGNPLTLASVKRILANERYVGRYDYLGEIVIEDAFPAIVSKELKKRVRDRLKANAKAPGHAKAKVEYLLHGKLFCGECGAPMIGECGRGRHGATYYYYTCAARKKQHTCKKRNERKDELEASIVDYIGSCVLTDSWIDGAAERVVAEYQKSYDASGIKPLEKQIRDADKEIDQLVDALISATAEAARRRINERIETAEARKQALEADLASLRIASRVQIKKEDIVVWLNQFRTGDRSDLEYRKKVIDLFVNAIYLYDDSFKLFLNVADSAQVTYADAVALAPPSVSDFGASGVPDMHLSEHIIFVNGVIGMIVQR

SEQ ID NO: 2588 - protein, 542 aa, Unknown
  Description of Unknown: Integrase B2589 sequence
  PTHR30461:SF3,SM00857,G3DSA:1.10.10.2600,IPR036162,PF13408, IPR025827,G3DSA:3.40.50.1390,PS51737,IPR006119,IPR038109, PF07508,SSF53041,IPR011109,PF00239,PTHR30461, PS51736,Coil,cd00338
MKKQPTGGNRLVAYYRYSGGSHQTEQSIEGQRRDCETYARIHGMVILHEYIDRHISGKTDDRPEFQQMIADAGKGMFDYVICWKTDRIARSRYDSIIYKKKLRDNGVELLYAAEANVEGSGGIIVEGLMEALAEYYSAELAEKVRRGMRESALKGKAIGSSRPLGLTVDKDKKYIIDPAGAAAVRYIFEQYAAGAASSAIVAHLNEQGLCTSRGNPFNKSSVVRIIQNEVYRGVYVSPKFDVRIEGAVPAIIDDDLWERAQKMFIRNRQSRSPRNDRADYILSGKLFCGECGTAMKGVSGHSSNGEVYFYYNCPCKDCHRRNIPKDELEGLVIRTVCNDVLQPDVMDRIADSVIEAQTAELNQPNPEKEALQHELADVQRKAKNLLSALENGTAGAMLTNRLAELEQRADTLSYQLSSLESEPKFPVFSKEEVLYLLEQFLIAPSEKTKAYRRRLIDTFVSKIEVSNTELTIYFNIADEDCGKMKKAPQSNQPEGCSTEKQMVHLLLPQSNFSIFILPTYFYIAIPIFQARKSISVESVTNL

SEQ ID NO: 2589 - protein, 542 aa, Unknown
  Description of Unknown: Integrase B2590 sequence
  PTHR30461:SF3,SM00857,G3DSA:1.10.10.2600,IPR036162,PF13408, IPR025827,PS51737,G3DSA:3.40.50.1390,IPR006119,IPR038109, PF07508,IPR011109,SSF53041,PTHR30461,Coil, PS51736,cd00338,PF00239
MRLTHGAYILARFSTDNQEVDSIDVQVQKCREWCAREHLSVLDVFADEATSGMKNTRPEYARMMRQLAEGGADTVVIYDQSRMFRKLTAWFQFREQMACYGVRVVAVTQPIIGGDLRDPMTFLSEGSMALMNQMWVLQTRQKVIEKMRYMAEQGKHTGGKPPLGYDVEDERLVINEDEAETVREIFRQYAAGKSYREIIKWLNDSGTRTKRGGCFGTNSLHDLLKNEKYIGNIVYGRSERRPDGTRNSHSFSVRTMRIENAVPAIIDHETWERVQKKMEDNRRVQAGRPPKAREYPLKGKVFCRECKSAMTIVSSKKTYYYYACSGKKRTGQCDNPQIGAGELENIVADAIREILGNPGNIENIISIIREEKNEIINVATRRMQILLARRMEINRQLEAGTNAILAGLHSQTLKTKMQELEEELAEIDRQMTTLKHSADGTQIPEDRLRALLNAAGDDVNALLSLVMRVEVGKDKIVVWTLLDTDPNGHFDFSEVGINIDLQPVDRGAENSGCPLTGTTNFHNFSIAGGLLKFSIPRKKRWG

SEQ ID NO: 2590 - protein, 542 aa, Unknown
  Description of Unknown: Integrase B2591 sequence
  PTHR30461:SF3,SM00857,G3DSA:1.10.10.2600,IPR036162,PF13408, IPR025827,PS51737,G3DSA:3.40.50.1390,IPR006119,IPR038109, PF07508,IPR011109,SSF53041,PTHR30461,Coil, PS51736,cd00338,PF00239
MKITAPARSAGAVSLEAFVDNLNLANVVIYARYSSAGQNDQSIDGQLAKCREYAQQRGYRVVGEYCDRALSGRYAETRPEFQRLIADSAKRAFDFVLVWKLDRFSRDRYDSAIYKKKLRANGVRVLSVTEGVGDSSESVLLEAILEAMAEEYSRQLAQNVRRGMRQNAEKGLSLGGLAPLGYRVVNKQYEINEDEARIVRFIHEHYADGAGQKQIVADCARLGYRNQRGNPLTLASVKRILANERYVGRYDYLGEIVIEDAFPAIVSKDLKKRVRDRLKANAKAPGHAKAKVEYLLHGKLFCGECGAPMIGECGRGRHGATYYYYTCAARKKQHTCKKRNERKDELEASIVDYIGSCVLTDSWIDGAAERVVAEYQKSYDVSGIKPLEKQIRDADKEIDQLVDALISATAEAARRRINERIETAEARKQALEADLASLRIASRVQIKKEDIVVWLNQFRNGARSDLEYRKKVIDLFVNSIYLYDDTFKLFLNVTDSTQITYSDSLALAPPSVSDFGASGVPDMHLSEHIIFINGVIGMIVQR

SEQ ID NO: 2591 - protein, 542 aa, Unknown
  Description of Unknown: Integrase B2592 sequence
  PTHR30461:SF3,SM00857,G3DSA:1.10.10.2600,IPR036162,PF13408, PS51737,IPR025827,G3DSA:3.40.50.1390,IPR006119,IPR038109, PF07508,IPR011109,SSF53041,PTHR30461,Coil, PS51736,cd00338,PF00239
MKITAPARSARAVSLEAFVDNLNLANVVIYARYSSAGQNDQSIDGQLAKCREYAQQRGYRVVGEYCDRALSGRYAETRPEFQRMISDSAKHAFDFVLVWKLDRFSRDRYDSAIYKKKLRANGVRVLSVTEGVGDSSESVLLEAILEAMAEEYSRQLAQNVRRGMRQNAEKGLSLGGLAPLGYRVVNKQYEINEDEARIVRFIHEQYADGAGQKQIVADCARLGYRNQRGNPLTLASVKRILANERYVGRYDYLGEIVIEDAFPAIVSKDLKKRVRDRLKANAKAPGHAKAKVEYLLHGKLFCGECGAPMIGECGRGRHGATYYYYTCAARKKQHTCKKRNERKDELEASIVDYIGSRILTDSWIDGAAERVVAEYQKSYDASGIKPLEKQIRDADKEIDQLVDALISATAEAARRRINERIETAEARKQALEADLASLRIASRVQIKKEDIVVWLNQFRTGDRSDLEYRKKVIDLFVNSIYLYDDTFKLFLNVTDSTQITYSDSLALAPPSVSDFGASGVPDMHLSEHIIFVNGVIGMIVQR

SEQ ID NO: 2592 - protein, 542 aa, Unknown
  Description of Unknown: Integrase B2593 sequence
  SM00857,G3DSA:1.10.10.2600,IPR036162,PF13408,PS51737, G3DSA:3.40.50.1390,IPR025827,IPR006119,IPR038109,PF07508, SSF53041,IPR011109,PTHR30461,Coil,cd00338, PF00239
MAYRKITDIKDTIGMRAVFYARVSTAEEEQLNAIELQIEENRGCIKDHGWKLVGEYIDRSKSGTMVKGRDDYQRLYEDLYEDLFDIVVIKDQERLQRNTLDWYLFINRVVQTGKLLFMYMDGKFYSPDDALITGVRAIIAEEFSRNLSKKLHNYHDHRIEKARQGQEIALQGSGNVYGWDKKDGKYYINPEQAKVRRLMCEGIMARKGSTLIAKELNEAGYRNTVGKPWKPMDIPKFVYDCKNVGTMIINKERHDFESKQTIKLPKEEWVYVENALPPIVTQEEWDLICKIHEERVIATGSDKRGKKTSGYSFSGKLVCGICGAPYWRKQRVSKDEYWVCSTKQTKGRKTRKRDSTMGKAGEINPLGCDNENISYNSLMEIMEVVSERLQANTDTIKQDMINWLTKLKKQLLEANGGHTEADLQRELSRKSKLLDAYLDGILNKQEYQKKAEELDERIIQLKAETEKNKANSGDIAEIDKVLANIDEEVARYVDGNEKLKVEYLLEHLEQVQIFPDKVIVIVPILSEGIVVEKTQYVSREKW

SEQ ID NO: 2593 - protein, 542 aa, Unknown
  Description of Unknown: Integrase B2594 sequence
  PTHR30461:SF3,cd00338,SM00857,G3DSA:1.10.10.2600,IPR036162, PF13408,IPR025827,PS51737,G3DSA:3.40.50.1390,IPR006119, IPR038109,PF07508,SSF53041,IPR011109,PTHR30461, Coil,PF00239
MMMENRMMTGNRVDCLYRVSTDKQVDYNDKSQADIPMQRRECHRFCEKMGWTIVHEEQEDGVSGHKVRAENRDKLQIIKERAKQGKFDILLVFMFDRIGRIADETPFVVEWFVKNGIRVWSTQEGEQRFDNHTDKLTNYIRFWQADGESEKTSIRTKTALGQLVEDGGFKGGLAPYGYDLVKSGRFNKRKHEVFELAVNEAEAAVVRIIFDKYVHEGFGAQRIATYLNNLGYRARTGKMWHHASIRGIICNLTYTGVLRSGESRSQTLPHLQIIEQELFEAAQHIRTSRANSAEQERRVPLNTRGQSLLAGNVFCGHCGSRLALTTNGKAYPCKEDAHRIVKRVRYICYGKTRKQTECDGQTGYTAHILDGIIDKVVRQIFERMKAIPKSEIVNIRYREKMEERKALLKSAKSDYAKAAAELDTLRAEVIKSLRGESAFSQDLLGSLISDCETKCLEVQHTMEAAQAAYDEGQAMLDALNAQYDDIISWADMYDSASTESKKMIVSCLIRRVEVYRDYRLHIDFNIDFEQFSAGLDISAIAA

SEQ ID NO: 2594 - protein, 542 aa, Unknown
  Description of Unknown: Integrase B2595 sequence
  PTHR30461:SF3,IPR036162,PS51737,IPR011109,PTHR30461, PS00397,PF00239,G3DSA:1.10.10.2600,IPR006119,SSF53041, cd00338,SM00857,IPR025827,IPR038109,PS51736, IPR006118,PF13408,G3DSA:3.40.50.1390,PF07508,Coil
MFNFKNNDEIIAVYCRVSSDEQSEKGTIENQKEYAEKYVRLNMLNVYDYYMDDGVTGTLPLQKRPEGKRLLEDAKAGKFNLVLFFKLDRLGRSVRVILNAVYDLMELNVDVRSMTEAFDTTTPSGRFTLNTFAGIAELERDTILTRMRMGTIRHAKLGKWLGGPVPYGYTLGNGYLEISHTKIPGLAYSEADIVKLIFEKTVYEKMSAEAIADYLNNLSVPTKYKILNRKLITSGYWYPSRILSMLHNTVYYGVHIFGQMSKHQKPEIIKQTNPAIVDIDLWDAAQKQLTSNKLLAARCRKNDYLLSGLIKCGLCGRTYIGTGYAGSKKEKVLYYVCNDKNRYHPDKNQKICQSQNLRADWIESIVWNDCLSYIMQPDKLYLENKTQSLTDPKDELHALEQAAVKLERERSSILDLFRKKIITENDLKNQLDKIAKEQDKLNRAISDKKALISKIDKINNNMIKMVDLLKSFQKYISDNITFTDKRKIVEALVENIIVYTDYDNGQRDIPIVTIAINYVFKNEKNPLKRNYQPSSKQNIHGF

SEQ ID NO: 2595 - protein, 542 aa, Unknown
  Description of Unknown: Integrase B2596 sequence
  PTHR30461:SF3,SM00857,G3DSA:1.10.10.2600,IPR036162,PF13408, IPR025827,G3DSA:3.40.50.1390,PS51737,IPR006119,IPR038109, PF07508,SSF53041,IPR011109,PF00239,PTHR30461, PS51736,Coil,cd00338
MKKQPTGGNRLVAYYRYSGGSHQTEQSIEGQRRDCETYARIHGMVILHEYIDRHISGKTDDRPEFQQMIADAGKGMFDYVICWKTDRIARSRYDSIIYKKKLRDNGVELLYAAEANVEGSGGIIVEGLMEALAEYYSAELAEKVRRGMRESALKGKAIGSSRPLGLTVDKDKKYIIDPAGAAAVRYIFEQYAAGAASSAIVAHLNEQGLCTSRGNPFNKSSVVRIIQNEVYRGVYVSPKFDVRIEGAVPAIIDDDLWERAQKMFIRNRQSRSPRNDRADYILSGKLFCGECGTAMKGVSGHSSNGEVYFYYNCPCKDCHRRNIPKDELEGLVIRTVCNDVLQPDVMDHIADSVIEAQTAELNQPNPEKEALQHELADVQRKAKNLLAALENGTAGAMLTNRLAELEQQSDTLSYQLSSLESEPKFPVFSKEEVLYLLEQFLIAPSEKTKAYRRRLIDTFVSKIEVSNTELTIYFNISEEDCGKMKKAPQSNQPEGCSTEKQMVHLLLPQSNFSIFILPTYFYIAIPIFQARKSISVESVTNL

SEQ ID NO: 2596 - protein, 542 aa, Unknown
  Description of Unknown: Integrase B2597 sequence
  PTHR30461:SF3,SM00857,G3DSA:1.10.10.2600,IPR036162,PF13408, PS51737,IPR025827,G3DSA:3.40.50.1390,IPR006119,IPR038109, PF07508,IPR011109,SSF53041,PF00239,PTHR30461, PS51736,Coil,cd00338
MKKFPIDLSCLTEEEISQFQEDPYTLYNGDQEVALYLRYSSTGQSDQSIEGQLRDCRAFCKANHYRIVAIYVDRATTARKDVEKRVHLMEMVADSAKQNWEYVIVWKLDRFARNRNDSAIMKMRLRKNGVKVLSATEHLTDSPESIILESVLEGMAEFFSAELSQKVTRGMRESALKCHSVGGHIPLGYKVENHKLVVDPDTAHIVQEAFSLYANGESVADICRKFNSAGYKTAKNTEFNRSSFKAMFRNTRYIGTYTYKDIVIENGIPAIIDKELFETVQRRLSKTATAPARGKAKVDYLLSGKLFCGHCGASMNGESGAGRHGKVYHYYSCYTKKRKLGCDKRPLKKDYIEGIVARDALNLLTDQLIDEIADMAIRQSEQDLINDTHIPQLTAQLSEVEKSITNITAAIEKGIASETLMNRLVQLEHEKKTLNKEIKAEEKFVYQIDRDQIVFWLSQFKYGNIEDEDFRRRLIDLLVNSVTVWDEPDGYKITTAYNLTSCKTKTFRVEKNPAAEEATGFDFGESECTKKPHQFGYFKRNA

SEQ ID NO: 2597 - protein, 542 aa, Unknown
  Description of Unknown: Integrase B2598 sequence
  PTHR30461:SF3,SM00857,G3DSA:1.10.10.2600,IPR036162,PF13408, PS51737,IPR025827,G3DSA:3.40.50.1390,IPR006119,IPR038109, PF07508,IPR011109,SSF53041,PTHR30461,Coil, PS51736,cd00338,PF00239
MPEALNAVIYARYSSDRQTEQSIEGQLRECYAFAKANDIAVIDTYIDRAISGKTDNRPAFQKMIEDSAKRQFQAVIVYRLDRFTRNRYDSAIYKARLKKNGVKVLSAMENLNGSPESIIMESLLEGMAEYYSVELSQKITRGMRENALKGKALGGQRVLGYKVNSDCYFEIDETTAPVVVDIFKLYSSGKTVKEICDILNARGVKTARGGAFNKNSLHTILTNKKYIGIYKTKYGEIVGGIPAIIDKELFEMVALRMEQNKKAPARAKAEINYLLSTKLFCGKCRSAMVGESGTSKTGKKYYYYACVKKKREKACDKSNVKKDWIEDLVIQRTVTDILKDDVIEKIADRLVELQKAEAAESGTMLYLQNSLAEIQVSIKNIMTAIEKGIITESTKTRLTELEDEKRNVEIEIAKESIARRIISREQIIYWISSFKDGDITSEKYRQQLIDTFVHAVFVYDDKIVITYNYSGENNTATISDLDLSSPPKEIRRNTVSAVFLYNRPTVFVPVPHRQRRHHEKETNRKRVRLCCQHAVWLVLRRR

SEQ ID NO: 2598 - protein, 542 aa, Unknown
  Description of Unknown: Integrase B2599 sequence
  PTHR30461:SF3,cd00338,SM00857,G3DSA:1.10.10.2600,IPR036162, PF13408,IPR025827,PS51737,G3DSA:3.40.50.1390,IPR006119, IPR038109,PF07508,SSF53041,IPR011109,PTHR30461, PS51736,Coil,PF00239
MYEDIKTACLYVRFSSHNQTEQSIEGQTRVCQEFCQRHNIKIVEIYADRATSASKNTEKRVSFLKMIKDSEKGLFDAVVVYKLDRFARSRYDSATYKYRLKKNGVQLISATENITNSPEGIILESVLEGMAEFYSAELSQKINRGMRESAYKHNSIGGALPLGYKTVDKKLVIDEKTAPIVREAFTMYAEGHSVAEICRIFNARGYKTSKGTEFGKNSFSKIFRNERYIGTYTYHDYRAEDAIPAIIDRDLWDRVQLRLKKVKNSPGRNKAKRVYLLSGKLFCGHCGESMNGNCNGNKYAFYECYGKKSKYNGCQKRNLRKEYIERLVAQDALSLLTDENIEHLATVACERNDYEIETGSPIPVIRDRIHQTEVSINNLTKAIETGATPDALVKRMVELEREKKDLSAQLKKEEELVVPLEKEQVIFWLEKFKDGDIEDEEFCRLLIDLFVNSVTVWDEDDDMLKVTIAYNLTSLPTKTYRLTKDGTLSDFTGNAPGSQGCAPGRLRLQGLCQAPGSPQSSGWCPRCRRCRHIPPSRWAPQQ

SEQ ID NO: 2599 - protein, 542 aa, Unknown
  Description of Unknown: Integrase B2600 sequence
  PTHR30461:SF3,SM00857,G3DSA:1.10.10.2600,IPR036162,PF13408, IPR025827,PS51737,G3DSA:3.40.50.1390,IPR006119,IPR038109, PF07508,IPR011109,SSF53041,PF00239,PTHR30461, PS51736,Coil,cd00338
MKKFPIDLSCLTEEEISQFQEDPYTLYNGDQDVALYLRYSSTGQSDQSIEGQLRDCRTFCKANHYRIVAIYVDRATTARKDVEKRVHLMEMVADSAKQNWEYVIVWKLDRFARNRNDSAIMKMRLRKNGVKVLSATEHLTDSPESIILESVLEGMAEFFSAELSQKVTRGMRESALKCHSVGGHIPLGYKVENHKLVVDPDTAHIVQEAFSLYANGESVADICRKFNSAGYKTAKNTEFNRSSFKAMFRNTRYIGTYTYKDIVIENGIPAIIDKELFETVQRRLSKTATAPARGKAKVDYLLSGKLFCGHCGASMNGESGAGRHGKVYHYYSCYTKKRKLGCDKRPLKKDYIEGIVARDALNLLTDQLIDEIADMAIRQSEQDLINDTHIPQLTAQLSEVEKSITNITAAIEKGIASETLMNRLVQLEHEKKTLNKEIKAEEKFVYRIDRDQIVFWLSQFKYGNIEDEDFRRRLIDLLVNSVTVWDEPDGYKITTAYNLTSCKTKTFRVEKNPAAEEATGFDFGESECTKKPHQSGYFKRNA

SEQ ID NO: 2600 - protein, 542 aa, Unknown
  Description of Unknown: Integrase B2601 sequence
  PTHR30461:SF3,SM00857,G3DSA:1.10.10.2600,IPR036162,PF13408, IPR025827,G3DSA:3.40.50.1390,PS51737,IPR006119,IPR038109, PF07508,IPR011109,SSF53041,PTHR30461,Coil, PS51736,cd00338,PF00239
MKITAPARSARAVSLEAFVDNLNLANVVIYARYSSAGQNDQSIDGQLAKCREYAQQRGYRVVGEYCDRALSGRYAETRPEFQRLISDSAKHAFDFVLVWKLDRFSRDRYDSAIYKKKLRANGVRVLSVTEGVGDSSESVLLEAILEAMAEEYSRQLAQNVRRGMRQNAEKGLSLGGLAPLGYRVVNKQYEINEDEARIVRFIHEQYADGAGQKQIVADCARLGYRNQRGNPLTLASVKRILANERYAGRYDYLGEIVIEDAFPAIVSKDLKKRVRDRLKANARAPGHAKAKVEYLLHGKLFCGECGAPMIGECGRGRHGATYYYYTCAARKKQHTCKKRNERKDELEASIVDYIGSCVLTDSWIDGAAERVVAEYQKSYDASGIKPLEKQIRDADKEIDQLVDALISATAEAARRRINERIETAEARKQALEADLASLRIASRVQIKKEDIVVWLNQFRTGDRSDLEYRKKVIDLFVNAIYLYDDSFKLFLNVADSAQVTYADALALAPPSVSDFGASGVPDMHLSEHIIFVNGVIGMIVQR

SEQ ID NO: 2601 - protein, 542 aa, Unknown
  Description of Unknown: Integrase B2602 sequence
  PTHR30461:SF3,SM00857,G3DSA:1.10.10.2600,IPR036162,PF13408, IPR025827,G3DSA:3.40.50.1390,PS51737,IPR006119,IPR038109, PF07508,SSF53041,IPR011109,PF00239,PTHR30461, Coil,cd00338
MMMENRMMTGNRVDCLYRVSTDKQVDYNDKSQADIPMQRRECHRFCEKMGWTIVHEEQEDGVSGHKVRAENRDKLQIIKERAKQGKFDILLVFMFDRIGRIADETPFVVEWFVKNGIRVWSTQEGEQRFDNHTDKLTNYIRFWQADGESEKTSIRTKTALGQLVEDGGFKGGLAPYGYDLVKSGRFNKRKHEVFELAINEAEAAVVRIIFDKYVHEGFGAQRIATYLNNLGYRARTGKMWHHASIRGIICNLTYTGVLRSGESRSQTLPHLQIITPELFEAAQHIRTSRANSAEQERRVPLNTRGQSLLAGNVFCGHCGSRLALTTNGKAYPCKENAHRIVKRVRYICYGKTRKQTECDGQTGYTAHILDGIIDKVVRQIFERMKAIPKSEIVNIRYREKMEERKTLLKSAKSDYAKAAAELDTLRAEVIKSLRGESAFSQDLLGSLISDCETKCLEVQHTMEAAQAAYDEGQAMLDALNAQYDDIISWADMYDSASTESKKMIVSCLIRRVEVYRDYRLHIDFNIDFEQFSAGLDISAIAA

SEQ ID NO: 2602 - protein, 542 aa, Unknown
  Description of Unknown: Integrase B2603 sequence
  PTHR30461:SF3,SM00857,G3DSA:1.10.10.2600,IPR036162,PF13408, PS51737,G3DSA:3.40.50.1390,IPR025827,IPR006119,IPR038109, PF07508,IPR011109,SSF53041,PTHR30461,Coil, PS51736,cd00338,PF00239
MKKFPIDLSCLTEEEISQFQEDPYTLYNGDQDVALYLRYSSTGQSDQSIEGQLRDCRTFCKANHYRIVAIYVDRATTARKDVEKRVHLMEMISDSAMQNWEYVIVWKLDRFARNRNDSAIMKMRLRKNGVKVLSATEHLTDSPESIILESVLEGMAEFFSAELSQKVTRGMRESALKCHSVGGHIPLGYKVENHKLVVDPDTAHIVQEAFSLYANGESVAAICRKFNSAGYKTAKNTEFNRSSFKAMFRNTRYIGTYTYKDIVIENGIPAIIDKELFETVQRRLSKTATAPARGKAKVDYLLSGKLFCGHCGASMNGESGAGRHGKVYHYYSCYTKKRKLGCDKRPLKKDYIEGIVARDALNLLTNQLIDEIADMAIRQSEQDLINDTHIPQLTAQLSEVEKSITNITAAIEKGIASETLMNRLVQLEHEKKTINKEIKAEEKFVYRIDRDQIVFWLSQFKYGNIEDENFRRRLIDLLVNSVTVWDEPDGYKITTAYNLTSCKTKTFRVEKNPAAEEATGFDFGESECTIKPHQSGYFKLNA

SEQ ID NO: 2603 - protein, 542 aa, Unknown
  Description of Unknown: Integrase B2604 sequence
  SM00857,G3DSA:1.10.10.2600,IPR036162,PF13408,PS51737, G3DSA:3.40.50.1390,IPR025827,IPR006119,IPR038109,PF07508, IPR011109,SSF53041,PF00239,PTHR30461,PS51736, Coil,cd00338
MVQEKLRAVFYARVSTEEERQLNALEKQVAECKDAVLQKGWKLVDQYVDEGKSGTQIKRRDEYRRLFEDLENDKFDIVVIKSQDRLQRNTLDWYIWIDRLTTHGKRLYMYLEDTFYSPDNALISGIKAILAEEYSRELSKKINNSYKRRIEAAKNGEKISIVNNSRSLGYDKVNGELVINEKEAEVVRMIFNMYASGEGLRAISNTLYDMGYRNRSGNEIDPSTISRMLSSEKYKGVYVINQRHYDFDTKKTVLNPKSEWVHIPGAVPAIVEPELWDRVQEIKGSKVQSIKNEKRGRNCGKSIFSGKIYCAKCGAKYWRSLENGYVKFKCSSYSKYGKIPGKGCDNKSFSENALYSILQSLSEQIVEVNTAEVRKSLLNWLESLRERLRASQGDDTIKEEIRKQTARKEKLTDAYMDGIISKEDYSKRYKELEKTLEDLKDKLLTLEVNEDLQSIEEVIQNIDKEMEEYLQTQSFNESRVEFLNQHLTKVTVNKDSFLLEFDLIGGAILTGKDFYLFVDNPRWYSIQTDKRNSVDVGIKIAA

SEQ ID NO: 2604 - protein, 542 aa, Unknown
  Description of Unknown: Integrase B2605 sequence
  PTHR30461:SF3,SM00857,G3DSA:1.10.10.2600,IPR036162,PF13408, IPR025827,PS51737,G3DSA:3.40.50.1390,IPR006119,IPR038109, PF07508,IPR011109,SSF53041,PTHR30461,Coil, PS51736,cd00338,PF00239
MKITAPARSAGAVSLEAFVDNLNLANVVIYARYSSAGQNDQSIDGQLAKCREYAQQRGYRVVGEYCDRALSGRYAETRPEFQRLISDSAKHAFDFVLVWKLDRFSRDRYDSAIYKKKLRANGVRVLSVTEGVGDSSESVLLEAILEAMAEEYSRQLAQNVRRGMRQNAEKGLSLGGLAPLGYRVVNKQYEINEDEARIVRFIHEQYADGAGQKQIVADCARLGYRNQRGNPLTLASVKRILANERYAGRYDYLGEIVIEDAFPAIVSKDLKKRVRDRLKANAKAPGHAKAKVEYLLHGKLFCGECGAPMIGECGRGRHGATYYYYTCAARKKQHTCKKRNERKDELEASIVDYIGSCVLTDSWIDSAAERVVSEYQKSYDASGIKPLEKQIRDADKEIDQLVDALISATAEAARRRINERIETAEARKQALEADLASLRIASRVQIRKEDIVVWLNQFRTGDRSDLEYRKKVIDLFVNAIYLYDDSFKLFLNVADSSQVTYADALALAPPSVSDFGASGVPDMHLSEHIIFINGVIGMIVQR

SEQ ID NO: 2605 - protein, 542 aa, Unknown
  Description of Unknown: Integrase B2606 sequence
  SM00857,G3DSA:1.10.10.2600,IPR036162,PF13408,IPR025827, PS51737,G3DSA:3.40.50.1390,IPR006119,IPR038109,PF07508, IPR011109,SSF53041,PF00239,PTHR30461,PS51736, Coil,cd00338
MVQEKLRAVFYARVSTEEERQLNALEKQVAECKDAVLQKGWKLVDQYVDEGKSGTQIKRRDEYRRLFEDLENDKFDIVVIKSQDRLQRNTLDWYIWIDRLTTHGKRLYMYLEDTFYSPDNALISGIKAILAEEYSRELSKKINNSYKRRIEAAKNGEKISIVNNSRSLGYDKVNGELVINEKEADVVRMIFNMYASGEGLRAISNTLYDMGYRNRSGNEIDPTTISRMLSSEKYKGVYVINQRHYDFDTKKTVLNPKSEWVHIPGAVPAIVEPELWDRVQEIKGSKVQSIKNEKRGRNCGKSIFSGKIYCAKCGAKYWRSLENGYVKFKCSSYSKYGKIPGKGCDNKSFSENALYSILQSLSEQIVEVNTAEVRKSLLNWLESLRERLRASQGDDTIKEEIRKQTARKEKLTDAYMDGIISKEDYSKRYKELEKTLEDLKDKLLTLEVNEDLQSIEEVIQNIDKEMEEYLQTQSFNESRVEFLNQHLTKVTVNKDSFLLEFDLIGGAILTGKDFYLFVDNPRWYSIQTDKRNSVDVGIKIAA

SEQ ID NO: 2606 - protein, 542 aa, Unknown
  Description of Unknown: Integrase B2607 sequence
  PTHR30461:SF3,SM00857,G3DSA:1.10.10.2600,IPR036162,PF13408, PS51737,IPR025827,G3DSA:3.40.50.1390,IPR006119,IPR038109, PF07508,IPR011109,SSF53041,PTHR30461,Coil, PS51736,cd00338,PF00239
MPEALNAVIYARYSSDRQTEQSIEGQLRECYAFAKANDIAVIDTYIDRAISGKTDNRPAFQKMIEDSAKRQFQAVIVYRLDRFTRNRYDSAIYKARLKKNGVKVLSAMENLNGSPESIIMESLLEGMAEYYSVELSQKITRGMRENALKGKALGGQRVLGYKVNSDCYFEIDETTAPVVVDIFKLYSSGKTVKEICDILNARGVKTARGGAFNKNSLHTILTNKKYIGIYKTKYGEIVGGIPAIIDKELFEMVALRMEQNKKAPARAKAEINYLLSTKLFCGKCRSAMVGESGTSKTGKKYYYYACVKKKREKACDKSNVKKDWIEDLVIQRTVTDILKDDVIEKIADRLVELQKAEAAESGTMLYLQNSLAEIQVSIKNIMTAIEKGIITESTKTRLTELEDEKRNVEIEIAKESIARRIISREQIIYWISSFKDGNITSEKYRQQLIDTFVHAVFVYDDKIVITYNYSGENNTATISDLDLSSPPITRILLLRCSCYFFRRGSNRTVLRSRISSVRWTVGKSACVSAHGSAPSDPLRLHQ

SEQ ID NO: 2607 - protein, 542 aa, Unknown
  Description of Unknown: Integrase B2608 sequence
  PTHR30461:SF3,IPR036162,PS51737,IPR011109,PTHR30461, PF00239,G3DSA:1.10.10.2600,IPR006119,SSF53041,cd00338, SM00857,IPR025827,IPR038109,PS51736,mobidb-lite, PF13408,G3DSA:3.40.50.1390,PF07508,Coil
MLAGVSIPHSLHMGNRPEGSVIMPRKKTTAADAPRLVAYYRYSGGSRQTKQSIEGQRRDCEAYARAHGMTILREYVDRHISGKTDDRPAFQQLVADSAAHIFDAVICWKTDRLARNRYDSAVYKKKLRDNGVEILYAAESNISGAEGIIIEGLMEALAEYYSAELAEKARRGMRESALKGKALGSSRPLGLTVDADKHYIIEPTGAEAVRYIFEQYAAGLSSSSIVERLNAMGLRTSHGGPFNKSSINRIIQNEMYRGVYVSKKFDVRIEGAIPAIIDNDLWERAQKMFERNRQSRTPHASRADYILSGKLYCGECGCLMKGVCGRSSGNGQMYHYYACPGRSIGRACTRKNIPQDELEAMVVNAVADLLLEPALLEQIADAIVELQQAEAARPDPEKQALEKSLSDVRNKIQNILSAIENGTSSAALSARLADLEQQESTLSYQLSSLDAKKPLTFTRDQILFLLQQFRVSPSERTKAYCRRLVDTFVDHIELTNTELILYFNLSDETVDKNKKAPRSNPSEESSTEKRLVRVARIELTAS

SEQ ID NO: 2608 - protein, 542 aa, Unknown
  Description of Unknown: Integrase B2609 sequence
  PTHR30461:SF3,SM00857,G3DSA:1.10.10.2600,IPR036162,PF13408, PS51737,G3DSA:3.40.50.1390,IPR025827,IPR006119,IPR038109, PF07508,SSF53041,IPR011109,PTHR30461,Coil, PS51736,cd00338,PF00239
MRLTHGAYILARFSTDNQEVDSIDVQVQKCREWCAREHLPVLDVFADEATSGMKNTRPEYSRMMRQLAEGGADTVVIYDQSRMFRKLTAWFQFREQVACYGVRVVAVTQPIIGGDLRDPMTFLSEGSMALMNQMWVLQTRQKVIEKMRYMAEQGKHTGGKPPLGYDVEDERLVINEDEADTVREIFRQYADGKSYREIIKWLNDSGKRTKRGGCFGTNSLHDLLKNEKYIGNIVYGRSERRPDGTRNSHSFSIRTMRMENAVPPIINRETWERVQKKMEDNRRVQAGRPPKAREYPLKGKVFCRECKSAMTIVSSKKTYYYYACSGKKRTGQCDNPQIGAGELENIVADAIREILGNPGNIENIISIIREEKNEIINVATQRMQILLARRMEINRQLEAGTNAILAGLHSQTLKTKMQELEEELAEIDQQMTTLKHSADGTQIPEDRLRALLNAAGDDVNALLSLVMRVEVGKDKIVVWTLLDADPNGHFDFSEDGINIDLQPVDRGDENSGCSLTGTMNFHNFFIAGGLLRFSIPRKKRWG

SEQ ID NO: 2609 - protein, 542 aa, Unknown
  Description of Unknown: Integrase B2610 sequence
  PTHR30461:SF3,SM00857,G3DSA:1.10.10.2600,IPR036162,PF13408, PS51737,G3DSA:3.40.50.1390,IPR025827,IPR006119,IPR038109, PF07508,IPR011109,SSF53041,PF00239,PTHR30461, PS51736,Coil,cd00338
MKKFPIDLSCLTEEEISQFQEDPYTLYNGDQNVAIYLRYSSTGQSDQSIEGQLRDCRTFCKANHYRIVAIYVDRATTARKDVEKRVHLMEMISDSAKQNWEYVIVWKLDRFARNRNDSAIMKMRLRKNGVKVLSATEHLTDSPESIILESVLEGMAEFFSAELSQKVTRGMRESALKCHSIGGHIPLGYKVENHKLVVDPDTAHIVQEAFSLYANGESVADICRKFNSAGYKTAKNTEFNRSSFKAMFRNTRYIGTYTYKDIVIENGIPAIIDKELFETVQRRLSKTATAPARGKAKVDYLLSGKLFCGHCGASMNGESGAGRHGKVYHYYSCYTKKRKLGCDKRPLKKNYIEGIVARDALNLLTDQLIDEIADMAIRQSEQDLINDTHIPQLTAQLTEVEKSITNITAAIEKGIASETLMNRLVQLEHEKKTLNKEIKAEEKFVYRIDRDQIVFWLSQFKYGNIEDEDFRRRLIDLLVNSVTVWDEPDGYKITTAYNLTSCKTKTFRVEKNPAAEEATGFDFGESECTKKPHQSGYFKRNA

SEQ ID NO: 2610 - protein, 542 aa, Unknown
  Description of Unknown: Integrase B2611 sequence
  SM00857,G3DSA:1.10.10.2600,IPR036162,PF13408,PS51737, IPR025827,G3DSA:3.40.50.1390,IPR006119,IPR038109,PF07508, IPR011109,SSF53041,PF00239,PTHR30461,PS51736, Coil,cd00338
MVQEKLRAVFYARVSTEEERQLNALEKQVAECKDAVLQKGWKLVDQYVDEGKSGTQIKRRDEYRRLFEDLENDKFDIVVIKSQDRLQRNTLDWYIWIDRLTTHGKRLYMYLEDTFYSPDNALISGIKAILAEEYSRELSKKINNSYKRRIEAAKNGEKISIVNNSRSLGYDKVNGELVINEKEADVVRMIFNMYASGEGLRAISNTLYDMGYRNRSGNEIDPTTISRMLSSEKYKGVYVINQRHYDFDTKKTVLNPKSEWVHIPGAVPAIVEPELWDRVQEIKGSKVQSIKNEKRGRNCGKSIFSGKIYCAKCGAKYWRSLENGYVKFKCSSYSKYGKIPGKGCDNKSFSENALYSILQSLSEQIVEVNTAEVRKSLLNWLESLRERLRASQGDDTIKEEIRKQTARKEKLTDAYMDGIISKEDYSKRYKELEKTLEDLKDKLLTLEVNEDLQSIEEVIQNIDKEMEEYLQTQSFNESRVEFLNQHLTKVTVNKDSFLLEFDLIGGAILTGKDFYLFVDNPRWKSNTRYVCPFRWGDAAELL

SEQ ID NO: 2611 - protein, 542 aa, Unknown
  Description of Unknown: Integrase B2612 sequence
  PTHR30461:SF3,cd00338,SM00857,G3DSA:1.10.10.2600,IPR036162, PF13408,IPR025827,PS51737,G3DSA:3.40.50.1390,IPR006119, IPR038109,PF07508,IPR011109,SSF53041,PTHR30461, PS51736,Coil,PF00239
MRLTHGAYILARFSTDNQEVDSIDVQVQKCREWCAREHLPVLDVFADEATSGMKNTRPEYSRMMRQLAEGGADTVVIYDQSRMFRKLTAWFQFREQVACYGVRVVAVTQPIIGGDLRDPMTFLSEGSMALMNQMWVLQTRQKVIEKMRYMAEQGKHTGGKPPLGYDVKDKRLVINEDEADTVREIFRQYADGKSYREIIKWLNDSGKRTKRGGCFGTNSLHDLLKNEKYIGNIVYGRSERRPDGTRNSHSFSIRTMRMENAVPSIIDRETWERVQKKMEDNRRVQAGRPPKAREYPLKGKVFCRECKSAMTIVSSKKTYYYYACSGKKRTGQCDNPQIGAGELENIVADAIREILGNPGNIENIISIIREEKNEIINVATQRMRILLARRMEINRQLEAGTNAILAGLHSQTLKTKMQELEEELSEIDQQMTTLKHSADGTQIPEERLRALLNAAGDDVNALLSLVMRVEVGKDRVVVWTLLDADPNGHFDFSEDGINIDLQPIDRGDENSGCPLTGTTNLHNFSIAGGLLKFSIPRKKRWG

SEQ ID NO: 2612 - protein, 542 aa, Unknown
  Description of Unknown: Integrase B2613 sequence
  PTHR30461:SF3,SM00857,G3DSA:1.10.10.2600,IPR036162,PF13408, IPR025827,G3DSA:3.40.50.1390,PS51737,IPR006119,IPR038109, PF07508,SSF53041,IPR011109,PTHR30461,Coil, PS51736,cd00338,PF00239
MRLTHGAYILARFSTDNQEVDSIDVQVQKCREWCAREHLPVLDVFADEATSGMKNTRPEYSRMMRQLAEGGADTVVIYDQSRMFRKLTAWFQFREQVACYGVRVVAVTQPIIGGDLRDPMTFLSEGSMALMNQMWVLQTRQKVIEKMRYMAEQGKHTGGKPPLGYDVKDERLVINEDEADTVREIFRQYADGKSYREIIKWLNDSGKRTKRGGCFGTNSLHDLLKNEKYIGNIVYGRSERRPDGTRNSHSFSIRTMRMENAVPSIVDRETWERVQKKMEDNRRVQAGRPPKAREYPLKGKVFCRECKSAMTIVSSKKTYYYYACSGKKRTGQCDNPQIGAGELENIVADAIREILGNPGNIENIISIIREEKNEIINVATQRMQIFLARRMEINRQLEAGTNAILAGLHSQTLKTKMQELEEELAEIDQQMTTLKHSADGTQIPEERLRALLNAAGDDVNALLSLVMRVEVGKDRIVVWTLLDADPNGHFDFSEDGINIDLQPIDRGDENSGCPLTGTTNFHNFSIVGGLLKFSIPRKKRWG

SEQ ID NO: 2613 - protein, 542 aa, Unknown
  Description of Unknown: Integrase B2614 sequence
  PTHR30461:SF3,cd00338,SM00857,G3DSA:1.10.10.2600,IPR036162, PF13408,PS51737,G3DSA:3.40.50.1390,IPR025827,IPR006119, IPR038109,PF07508,SSF53041,IPR011109,PTHR30461, PS51736,Coil,PF00239
MAERVYCLYRVSTSKQVDHDDQNQADIPMQRKACHDFADKMGWIIVGEEKETGVSGYKVSADDRDKLQLIKKYAEQGKFDILLVFMFDRLGRKSDETPFVVEWFAKKGVRVWSVKEGEQRFESHTDRLTNYIRFWQADGESQKTSMRTKTALGQMVEEGRFRGGNAPYGYRLEKSGILNKRKHEVYMLVIDEDEARVVRMMFDLCVSSGYGRWRLANFLNDHGIKNRKGQNWHDASVGGILHNPLYKGILRSGETYAGPFDELQIIAPDHFDLAQKLMLERTNERKEHRTVPLNTTGQSLLSGNIFCGHCGGRLVLTTNGKTVRRADGTAVYKKRIRYVCYNKTRRRQECTGQTGYTMHIVDGIVTEVLHQVFNKMQGASGDMIVGSAVQKQMAMIRSELQRARAENTKANKEYESLKAEVLKAIQGKSALPQDVLSEMLEDARQKVLSSSERITELTAELNDGNSKIEEMKAEFNQIVSWSKIFDDSPMEVKKMICGYIIKKVSVCKDYDIKIEFNINVEQFLNGIDGVSECDTSELSIAQ

SEQ ID NO: 2614 - protein, 542 aa, Unknown
  Description of Unknown: Integrase B2615 sequence
  PTHR30461:SF3,IPR036162,PS51737,IPR011109,PTHR30461, PF00239,G3DSA:1.10.10.2600,IPR006119,SSF53041,cd00338, SM00857,IPR025827,IPR038109,PS51736,mobidb-lite, PF13408,G3DSA:3.40.50.1390,PF07508,Coil
MRKKSNLNAATRAVIYARYSSANQRDCSIEQQVAKCRELAARLGLTVIDVYEDRAISGKTDRRPNFQRMMKDADLRQFDVVLAWKSNRMGRNMLQAMTNEERLRDNGIRTVYAEEDFDDTAAGRFALRNMMNVNQFYSENMAEDITRGLMDNAAKCLSNGSLPLGYKPGDDRHVVLDEAEAAIVQEIFTRVSCYEPFIDIARDLNRRGIKTKKGAEWGRSSFHTICRNERYRGIYIYRDVRVEGGMPRIISDELFYKVQEVLKVKKNPQGRRKRSGYEEYLLTGKLYCGHCGSPMTGIAGTSKTGAMHYYYTCQKRRTDHSCDKKAVRRDQIERAVGVAIQQQLLTDENIQMMADKLMEYNARTETKHRLQGLQDQLNANKTATANILKAIEMGIITDATKARLLELEKEQAQLLVKIDTAKAEMVPIGRNDFVKLLYIYKEGEPTDKKYLAALFDNFLVRVDLYDDHLKITFDPTGGRQPIDMPIGAEDSPESPGDSSESSDFEASSQDAEKFVLALHNCTKASVLAAFERLLRTLAFFIQ

SEQ ID NO: 2615 - protein, 542 aa, Unknown
  Description of Unknown: Integrase B2616 sequence
  PTHR30461:SF3,SM00857,G3DSA:1.10.10.2600,IPR036162,PF13408, PS51737,G3DSA:3.40.50.1390,IPR025827,IPR006119,IPR038109, PF07508,SSF53041,IPR011109,PTHR30461,Coil, PS51736,cd00338,PF00239
MPRAERIVEVIPATWNPADESVREIRKLRVAAYCRVSTELEQQQSSYDIQIEYYTRHIMQNPNWIFAGVFADDGRSATNTFRRDDFNQLMNQCMKGKVDMVITKSISRFARNTVDCISWVRKLREKNVAVYFEKENLNTLDDSTEMILTILSSQAQEESRAISTNVKWGYARKFEKGESTRQRSYGFRKAPTGEMCIVEEEAAVIRNMARWFLDGDSLERIKHRLEDAGIETTTGKRTWSTGTIYNILTNEKIMGDVLLQKTFTADYLTKRRVKNSGQQKQYYVKNHHEAIIPKTVYYKIQEEIARRSSLKKAGTRKGKTAQGVYSSKYALTGIMVCNECGAHYRRTTWAKNGKKVIVWRCINRLEHGTKRCHESPTLKEEVIQEAIMGKLHSLSIDQEEENFLNGVKEDILRAAKVVGGACTEEEIDKTIEELRDQLMDYVGMAAREHGGENWYSDRMRKLGLQISELKRRRESIREQEKIRDEYEYLDQEISRIIGETGGATGAEFDNIFIRQIVREIRVISKNKLQIQLRTGMVLDVNL

SEQ ID NO: 2616 - protein, 542 aa, Unknown
  Description of Unknown: Integrase B2617 sequence
  PTHR30461:SF3,SM00857,G3DSA:1.10.10.2600,IPR036162,PF13408, PS51737,G3DSA:3.40.50.1390,IPR025827,IPR006119,IPR038109, PF07508,SSF53041,IPR011109,PF00239,PTHR30461, PS51736,Coil,cd00338
MAERVYCLYRVSTNKQVDHDENNQADIPMQRKACHDFAAKMGWVIVGEEQETGVSGYKVSADDRDKLQLIKKYAEQGKFDILLVFMFDRLGRKSDETPFVVEWFTKKGVRVWSVQEGEQRFESHTDRLTNYIRFWQADGESQKTSMRTKTALGQMVEEGRFRGGNAPYGYRLEKSGILNKRKHEVYMLVIDEDEARVVRMMFDLCISSGYGRWRLANFLNDHGIKNRKGQNWHDASVGGILHNPLYKGILRSGETYAGPFEALQIIAPDQFDLAQKLMLERTNERKERRTVPLNTTGQSLLSGNIFCGHCGGRLVLTTNGTTTRLADGTPVHKKRIRYVCYNKTRRRQECTGQTGYTMHILDGIVTEVLHQVFDKMQGASNDMIVGSAVQKQMAMIRSELQRARAENTKANKEYESLKAEVLKAIQGKSALPQDVLTEMLEDTRQKVLSTSERITTLTEELNDGNSKIEEMKAEFNRIVSWSKIFDESPMEVKKMICGYIIKKVSVFRDYRVKIEFNINVEQFLNGIDSINECATYELPMAQ

SEQ ID NO: 2617 - protein, 542 aa, Unknown
  Description of Unknown: Integrase B2618 sequence
  cd00338,SM00857,G3DSA:1.10.10.2600,IPR036162,PF13408, IPR025827,G3DSA:3.40.50.1390,PS51737,IPR006119,IPR038109, PF07508,SSF53041,IPR011109,PTHR30461,PS51736, Coil,PF00239
MVQEKLRAVFYARVSTEEERQLNALEKQVAECKDAVLQKGWKLVDQYVDEGKSGTQIKRRDEYRRLFEDLENDKFDIVVIKSQDRLQRNTLDWYIWIDRLTTHGKKLYMYLEDTFYSPDNALISGIKAILAEEYSRELSKKINNSYKRRIEAAKNGEKISIVNNSRSLGYDKVNGELVINEKEAEVVRMIFNMYASGEGLRAISNTLYDMGYRNRSGNEIDPTTISRMLSSEKYKGVYVINQRHYDFDTKKTVLNPKSEWVHIPGAVPAIVEPELWDRVQEIKGSKVQSIKNEKRGRNCGKSIFSGKIYCAKCGAKYWRSLENGYVKFKCSSYSKYGKIPGKGCDNKSFSENALYSILQSLSEQIVEVNTAEVRKSLLNWLESLRERLRASQGDDTIKEEIRKQTARKEKLTDAYMDGIISKEDYSKRYKELEKTLEDLKDKLLTLEVNEDLQSIEEVIQNIDKEMEEYLQTQSFNESRVEFLNQHLTKVTVNKDSFLLEFDLIGGAILIGKDFYLFVNNPRWYSIQTDKRNGVDVGIKIAA

SEQ ID NO: 2618 - protein, 542 aa, Unknown
  Description of Unknown: Integrase B2619 sequence
  PTHR30461:SF3,SM00857,G3DSA:1.10.10.2600,IPR036162,PF13408, IPR025827,PS51737,G3DSA:3.40.50.1390,IPR006119,IPR038109, PF07508,IPR011109,SSF53041,PTHR30461,Coil, PS51736,cd00338,PF00239
MKITAPARSARAVSLEAFVDNLNLANVVIYARYSSAGQNDQSIDGQLAKCREYAQQRGYRVVGEYCDRALSGRYAETRPEFQRMISDSAKHAFDFVLVWKLDRFSRDRYDSAIYKKKLRANGVRVLSVTEGVGDSSESVLLEAILEAMAEEYSRQLAQNVRRGMRQNAEKGLSLGGLAPLGYRVVNKQYEINEDEARIVRFIHEQYADGAGQKQIVADCARLGYRNQRGNPLTLASVKRILANERYAGRYDYLGEIVIEDAFPAIVSKDLKKRVRDRLKANARAPGHAKAKVEYLLHGKLFCGECGAPMIGECGRGRHGATYYYYTCAARKKQHTCKKRNERKDELEASIVDYIGSCVLTDSWIDGAAERVVAEYQKSYDASGIKPLEKQIRDADKEIDQLVDALISATAEAARRRINERIETAEARKQALEADLASLRIASRVQIKKEDIVVWLNQFRTGDRSDLEYRKKVIDLFVNAIYLYDDSFKLFLNVADSAQVTYADALALAPPSVSDFGASGVPEKHLSEHIIFVNGVIGMIVQR

SEQ ID NO: 2619 - protein, 542 aa, Unknown
  Description of Unknown: Integrase B2620 sequence
  PTHR30461:SF3,SM00857,G3DSA:1.10.10.2600,IPR036162,PF13408, PS51737,G3DSA:3.40.50.1390,IPR025827,IPR006119,IPR038109, PF07508,SSF53041,IPR011109,PF00239,PTHR30461, PS51736,Coil,cd00338
MKKFPIDLSCLTEEEISQFQEDPYTLYNGDQDVALYLRYSSTGQSDQSIEGQLRDCRAFCKANHYRIVAIYVDRATTAHKDVEKRVHLMEMVADSAKQNWEYVIVWKLDRFARNRNDSAIMKMRLRKNGVKVLSATEHLTDSPESIILESVLEGMAEFFSAELSQKVTRGMRESALKCHSVGGHIPLGYKVENHKLVVDPDTAHIVQEAFSLYANGESVADICRKFNSAGYKTAKNTEFNRSSFKAMFRNTRYIGTYTYKDIVIENGIPAIIDKELFETVQRRLSKTATAPARGKAKVDYLLSGKLFCGHCGASMNGESGAGRHGKVYHYYSCYTKKRKLGCDKRPLKKDYIEGIVARDALNLLTDQLIDEIADMAIRQSEQDLINDTHIPQLTAQLSEVEKSITNITAAIEKGIASETLMNRLVQLEHEKKTLNKEIKAEEKFVYRIDRDQIVFWLSQFKYGNIEDEDFRRRLIDLLVNSVTVWDEPDGYKITTAYNLTSCKTKTFRVEKNPAAEEATGFDFGESECTKKPHQFGYFKRNA

SEQ ID NO: 2620 - protein, 542 aa, Unknown
  Description of Unknown: Integrase B2621 sequence
  PTHR30461:SF3,cd00338,SM00857,G3DSA:1.10.10.2600,IPR036162, PF13408,PS51737,G3DSA:3.40.50.1390,IPR025827,IPR006119, IPR038109,PF07508,IPR011109,SSF53041,PTHR30461, PS51736,Coil,PF00239
MKKFPIDLSCLTEEEISQFQEDPYTLYNGDQDVALYLRYSSTGQSDQSIEGQLRDCRTFCKANHYRIVAIYVDRATTARKDVEKRVHLMEMISDSAKQNWEYVIVWKLDRFARNRNDSAIMKMRLRKNGVKVLSATEHLTDSPESIILESVLEGMAEFFSAELSQKVTRGMRESALKCHSVGGHIPLGYKVENHKLVVDPDTAHIVQEAFSLYANGESVAAICRKFNSAGYKTAKNTEFNRSSFKAMFRNTRYIGTYTYKDIVIENGIPAIIDKELFETVQRRLSKTATAPARGKAKVDYLLSGKLFCGHCGSSMNGESGAGRHGKVYHYYSCYTKKRKLGCDKRPLKKDYIEGIVARDALNLLTDQLIDEIADMAIRQSEQDLINDTHIPQLTAQLSEVEKSITNITAAIEKGIASETLMNRLVQLEHEKKTINKEIKAEEKFVYRIDRDQIVFWLSQFKYGNIEDEDFRRRLIDLLVNSVTVWDEPDGYKITTAYNLTSCKIKTFRVEKNPAAEEATGFDFGESECTKKPHQSGYFKRNA

SEQ ID NO: 2621 - protein, 542 aa, Unknown
  Description of Unknown: Integrase B2622 sequence
  PTHR30461:SF3,SM00857,G3DSA:1.10.10.2600,IPR036162,PF13408, IPR025827,G3DSA:3.40.50.1390,PS51737,IPR006119,IPR038109, PF07508,IPR011109,SSF53041,PTHR30461,Coil, PS51736,cd00338,PF00239
MKITAPARSARAVSLEAFVDNLNLANVVIYARYSSAGQNDQSIDGQLAKCREYAQQRGYRVVGEYCDRALSGRYAETRPEFQRMISDSAKHAFDFVLVWKLDRFSRDRYDSAIYKKKLSANGVRVLSVTEGVGDSSESVLLEAILEAMAEEYSRQLAQNVRRGMRQNAEKGLSLGGLAPLGYRVVNKQYEINADEARIVRFIHEQYADGAGQKQIVADCARLGYRNQRGNPLTLASVKRILANERYAGRYDYLGEIVIEDAFPAIVSKELKKRVHDRLKANSKAPGHAKAKVEYLLHGKLFCGECGAPMIGECGRGRHGATYYYYTCAARKKQHTCKKRNERKDELEACIVDYIGSCVLTDSWIDGAAERVVAEYQKSYDASGIKPLEKQIRDADKEIDQLVDALISATAEAARRRINERIETAEARKQALEADLASLRIASRVQIKKEDIVVWLNQFRTGDRSDLEYRKKVIDLFVNAIYLYDDSFKLFLNVADSAQVTYADALALAPPPVSDFGASGVPDMHLSEHIIFVNGVIGMIVQR

SEQ ID NO: 2622 - protein, 542 aa, Unknown
  Description of Unknown: Integrase B2623 sequence
  PTHR30461:SF3,SM00857,G3DSA:1.10.10.2600,IPR036162,PF13408, PS51737,IPR025827,G3DSA:3.40.50.1390,IPR006119,IPR038109, PF07508,IPR011109,SSF53041,PTHR30461,Coil, PS51736,cd00338,PF00239
MKITAPARSAGAVSLEAFVDNLNLANVVIYARYSSAGQNDQSIDGQLAKCREYAQQRGYRVVGEYCDRALSGRYAETRPEFQRLIADSAKRAFDFVLVWKLDRFSRDRYDSAIYKKKLRANGVRVLSVTEGVGDSSESVLLEAILEAMAEEYSRQLAQNVRRGMRQNAEKGLSLGGLAPLGYRVVNKQYEINEDEARIVRFIHEQYADGAGQKQIVADCARLGYRNQRGNPLTLASVKRILANERYVGRYDYLGEIVIEDAFPAIVSKDLKKRVRDRLKANAKAPGHAKAKVEYLLHGKLFCGECGAPMIGECGRGRHGATYYYYTCAARKKQHTCKKRNERKDELEASIVDYIGSCVLTDSWIDGAAERVVAEYQKSYDASGIKPLEKQIRDADKEIDQLVDALISATAEAARRRINERIETAEARKQALEADLASLRIASRVQIKKEDIVVWLNQFRTGDRSDLEYRKKVIDLFVNAIYLYDDSFKLFLNVADSAQVTYADALALAPPSVSDFGASGVPDMHLSEHIIFINGVIGMIVQR

SEQ ID NO: 2623 - protein, 541 aa, Unknown
  Description of Unknown: Integrase B2624 sequence
  cd03768,PTHR30461:SF3,SM00857,G3DSA:1.10.10.2600,IPR036162, PF13408,IPR025827,G3DSA:3.40.50.1390,PS51737,IPR006119, IPR038109,PF07508,IPR011109,SSF53041,PTHR30461, PS51736,Coil,PF00239
MRIAIYSRKSKFTGKGESIGNQVEMCRDYIATNYNGEEHSIQVFEDEGFSGKNLDRPQFKKMMEIENVIPFDLIVVYRLDRISRNVGDFASLIEKLNKKNTSFVCVKEHFDTGNSMGRAMMNIAAVFAQLERETIAERIKDNMYLLAKEGHWLGGTTPLGYKSIEVTNGKRTHFELIIDESQIDLVNIIFSKYKQLGSINGVETYLFVNGYKTQKNNYWHKSNVKRILTNPIYCIADIDSLNYFTELGCNVCFTLDDCNGKKGIYPYNRFSGQKREMQSYDRWIITISEHQGILTGKEWVAIQQQLKANSKDGFGGKANERRSTSNTSLLSGVLFCSCGAYMRPKKYPSGNTFYICENKMDKKITECNNSNINADELDKIILNELFSFDIKDDVVDSQIQNLKEQIANIDNDLQKQIGRLKKQIETNKNTVNKFMNIVALSIENDTPEQVVEVYNQKINELLNQNKITQKRIDELQDTNIVQAKMNDKLNSLTDAMAYLKENVDKLTIVEKRGFVKKIVDRIVWDGNNINIFIKGISELSE

SEQ ID NO: 2624 - protein, 541 aa, Unknown
  Description of Unknown: Integrase B2625 sequence
  cd03768,PTHR30461:SF3,SM00857,G3DSA:1.10.10.2600,IPR036162, PF13408,PS51737,IPR025827,G3DSA:3.40.50.1390,IPR006119, IPR038109,PF07508,SSF53041,IPR011109,PTHR30461, PS51736,Coil,PF00239
MRIAIYSRKSKFTGKGESIGNQVEMCRDYIATNYNGEEHSIQVFEDEGFSGKNLDRPQFKKMIEIENVIPFDLIVVYRLDRISRNVGDFASLIEKLNKKNTSFVCVKEHFDTGNSMGRAMMNIAAVFAQLERETIAERIKDNMYLLAKEGHWLGGTTPLGYKSIEVTNGKRTHFELIIDESQIDLVNIIFSKYKQLGSINGVETYLFVNGYKTQKNNYWHKSNVKRILTNPIYCIADIDSLNYFTELGCNVCFTLDDCNGKKGIYPYNRFSGQKREMQSYDRWIITISEHQGILAGKEWVAIQQQLKANSKDGFGGKANERRSTSNTSLLSGVLFCSCGAYMRPKKYPSGNTFYICENKMDKKITECNNSNINADELDKIVLNELFSFDIKDGVVDSQIQNLKEQIINIDNDLQKQIGRLKKQIEANKNTVNKFMNIVALSIENDTPEQVVEVYNQKINELLNQNKITQKRIDELQDTNIVQAKMNDRLNSLTDAMAYLKENFDKLTIVEKRGFVKKIVDRIVWDGNNINIFIKGISELSE

SEQ ID NO: 2625 - protein, 541 aa, Unknown
  Description of Unknown: Integrase B2626 sequence
  PTHR30461:SF3,cd00338,SM00857,G3DSA:1.10.10.2600,IPR036162, PF13408,PS51737,G3DSA:3.40.50.1390,IPR025827,IPR006119, IPR038109,PF07508,IPR011109,SSF53041,PTHR30461, PS51736,Coil,PF00239
MQTAVIYARYSSDKQTEQSIEGQLYDCYNYAKQHDITVVREYIDRAMTGKNDDRPAFQQMLHESAMHKWDSVIVWKLDRFARNTIDSAVNRQILAKNGVKLLSVMESFGDDASGQMMTHIIEAINEYYSADLQEKTIRGMRQSAMKAQTTGHIPLGYKVVDKKLVIDDDTRIIPETVFRMYAEGERLTDIAEHLNSQGYRNRRGRPFTTNSFYNMLANEKYIGIYKYDDIVIEGGIPQMIPNEVFEAVREKLIINRKRAAKNTAKADYYLSGKLYCGHCGEPMSGLSGTGRNGVKHYYYRCNGVQKKSGCHKKLENKYLIEDEVCRAARSAFEQMDKAETAETICQMYLQTVRNEYAPDELEKELTECTKQAENVVNAIAQTGGNQLLYDKVRELEERKEQLSSALRLSQAMTDNVPSVEQITVFIDDILATDINTTEGKKSIADIMISKVYVYDDKLTVIFKDKDGKSVDIPLSAVSDSSSADCAPSALGSQAILNTNHRKGIESDICKTPARPMVSVVLCSFIFVFYVWKQGFRMLTFM

SEQ ID NO: 2626 - protein, 541 aa, Unknown
  Description of Unknown: Integrase B2627 sequence
  cd03768,PTHR30461:SF3,SM00857,G3DSA:1.10.10.2600,IPR036162, PF13408,IPR025827,G3DSA:3.40.50.1390,PS51737,IPR006119, IPR038109,PF07508,IPR011109,SSF53041,PTHR30461, PS51736,Coil,PF00239
MRIAIYSRKSKFTGKGESIGNQVEMCRDYIATNYNGEEHSIQVFEDEGFSGKNLDRPQFKKMMEIENVIPFDLIVVYRLDRISRNVGDFASLIEKLNKKNTSFVCVKEHFDTGNSMGRAMMNIAAVFAQLERETIAERIKDNMYLLAKEGHWLGGTTPLGYKSIEVTNGKRTHFELIIDESQIDLVNIIFSKYKQLGSINGVETYLFVNGYKTQKNNYWHKSNVKRILTNPIYCIADIDSLNYFTELGCNVCFTLDDCNGKKGIYPYNRFSGQKRKMQSYDRWIITISEHQGILAGKEWVAIQQQLKANSKDGFGGKANERRSTSNTSLLSGVLFCSCGAYMRPKKYPSGNTFYICENKMDKKITECNNSNINADELDKIILNELFSFDIKDGVVDSQIQNLKEQVANIDNDLQKQIGRLKKQIETNKNTVNKFMNIVALSIENDTPEQVVEVYNQKINELLNQNKITQKRIDELQDTNIVQAKMNDRLNSLTDAMAYLKENFDKLTIVEKRGFVKEIVDRIVWDGNNINIFIKGISELSE

SEQ ID NO: 2627 - protein, 541 aa, Unknown
  Description of Unknown: Integrase B2628 sequence
  PTHR30461:SF3,SM00857,G3DSA:1.10.10.2600,IPR036162,PF13408, IPR025827,G3DSA:3.40.50.1390,PS51737,IPR006119,IPR038109, PF07508,SSF53041,IPR011109,PTHR30461,Coil, PS51736,cd00338,PF00239
MEAAIDTVQQPRVVRVVRNVATAPLTAQKIREQMIDTRLPVAAYARVSTTNEEQEDSLERQKAHYTEYIGNRPEWRFVGVYDDPGVTGTRADQRKGFQKLLADCRAGKIKKILCKSISRFARNTVDALQYIRELKELGIGIYFETQNIDTMTAGGDILITILAAIAEQESRNMSENIKWAFQKKFKEGEVVLACSQFLGYDHDKDKNIVINEEQAKVVRRIYREFLSGYACSAIAKRLTEDGIPTPSGKKQWRTGVIKSILTNEKYYGSAYLGKTCKRDVLSKERVASEEVYYVENSHPAIIPKDTWDLVQLEMTRRQEYRTCSETGNGKYSSKYPFSKKLICGECGMIYRRHAQYKRGNYVRTWVCITHKRKGNDYCSQRYILEDDVVNAFQTVLKELVGDMSSIKEILEKNVVDTLGEKEDNGGEQVLLQIQSLQTEMIDINRKKRSGEIAYEAYVARVREIADQVEVLEKQQREIQVAEESRISETKRIKDILEAINGMHPIDEFDGEIFRRLIDNVIIKNKRLTFNFKVGISKTITI

SEQ ID NO: 2628 - protein, 541 aa, Unknown
  Description of Unknown: Integrase B2629 sequence
  SM00857,G3DSA:1.10.10.2600,IPR036162,PS51737,G3DSA:3.40.50.1390, IPR006119,IPR038109,PF07508,IPR011109,SSF53041, PTHR30461,Coil,PS51736,cd00338,PF00239
MPKAISYIRFSTKIQSVGDSTKRQSKYINDWLKRNPDYYLDESLRFQDLGISGFSGANAKSGAFGEFLAAVESGYIEAGSVLLVESLDRVSRQDIDTAGEQLRKILRSGVEVVTLVDNEWYTKESLKDSLSMIKAMLVMERAHEESAMKSTRLRSMWAAKRERAANGEIMSKRCAAWLRVSEDRSHFEFIHENVKAVQRVFQLRLEGLSHIKIAKKMNDEGFYTLNQHKSIKGGWSQSSVTELLSNRSVIGFKVPSKSMAVKGVSEIPNYYPSIITDEQFYAVQQLKQGSGRKPSSDLPLLTNLFKGVLRCSECGFIVVVAGVSAKRSGIYKCSMKSEGRCNSVGFSRLQTDRALVQGLLYNTNRLSLNRDNGSAIGSLQSELEQLQKQRERLIKLAMLADDTESMAKDLKALNSQIKDAENAVSEVHQREQSSQLETISHLDLTVKKDRIEAQIIIKRIVKEIRLNTAGKKCDVFLHNGLKLLNFPLDRVVDGAQWLEILPLIDGDEFDFEGFTTKPRHIALEEAPEWVKEMEEQPSQPL

SEQ ID NO: 2629 - protein, 541 aa, Unknown
  Description of Unknown: Integrase B2630 sequence
  PTHR30461:SF3,IPR036162,PS51737,IPR011109,PTHR30461, PF00239,G3DSA:1.10.10.2600,IPR006119,SSF53041,cd00338, SM00857,IPR025827,IPR038109,mobidb-lite, PS51736,PF13408,G3DSA:3.40.50.1390,PF07508,Coil
MALTYVVAYARFSSDNQREESIDAQLRAIRQYCQQHDYILLDTYVDEARSATTDDRPAFQQMIKDSASGDWSAVIVHKLDRFSRNRYDSAIYKKQLKDNGVHVESVLERLDDSPESVILESLLEGMSEYYSKNLAREVLKGKHETALQCKHNGGQPPYGLMVNKDGTYAINEYEAEAVRMIFRLTGEGYTMAEIKATLADRGFTTRSGRSFATTTINTMLHNEKYCGTYVYNRTKPQPKGGKRTNESRPDDEIIRIPHGIPAIIDNRTFEEVQVILKRRSNMGAKRARAAKEVYLLQGLIKCGNCGAAMVGSRRKDGRNKTLRITYECNGRKRKATNCKMRGINRDFVENIVINYIEQHILSDEAMERVKEKIVIELNRMAADSPSSLPSLNKELRDTEQKLDKLIEAITAGINALVIKDQIEALDKKKQQLEAQIEQLKARQQMTASFDDVALDDYIKQYRDIRSKTRPHQKEIINKFVDEVLVYDNDQDGDKIVIKTKIPESYVTIFSGDSICSLSAPLNGHYTNTYYFKGGFAVLVWL

SEQ ID NO: 2630 - protein, 541 aa, Unknown
  Description of Unknown: Integrase B2631 sequence
  PTHR30461:SF3,SM00857,G3DSA:1.10.10.2600,IPR036162,PF13408, PS51737,IPR025827,G3DSA:3.40.50.1390,IPR006119,IPR038109, PF07508,IPR011109,SSF53041,PTHR30461,Coil, PS51736,cd00338,PF00239
MKKEKAKTPENNRAAVYARYSSRKQGEQSIEGQLSEAYKYAETHGYNIIHEYIDRAKSGRTDNREAFQEMLRDTAKGTFSTIILWKLDRFGRNREEIAANKYRCKKNGVKVVYVAENVPDSPEGVILESVLEGMAEYYSLQLSQNVRRGMHANAEKCQSTGGTTPLGYAVDPATKKFVIDPNTAPTVRRIFDMYAGGTKISEIVRTLNDSGIRTARGSRFKVDSLYTVLRNVKYTGIYTYNGDVRIENGIPAIVDRATFEKVQEMLKVNKRKPSKLWDTFDYILTDKLFCGMCGSKMIGESGTSKNGTKHSYYTCVKKRRDHACKKKAVRQHYIETLVLDRIAAILDDDSLLAFIADNVYSYYVKLQNDDDMTDALKKRLREVEKAQINILRAIEAGVFNDMTKARMDELDEQKSELQAQIAEEEYAKTGLATRDTILAWLYSQREKDLNDRASQRQLIETFVNAIYVFDDRIEILFNYSRDRRSIKFEELSDLYEYGDVFVSSALSFTKKTPHCRCLFSMKSVAAKRVKQFRCEIFAPQI

SEQ ID NO: 2631 - protein, 541 aa, Unknown
  Description of Unknown: Integrase B2632 sequence
  PTHR30461:SF3,SM00857,G3DSA:1.10.10.2600,IPR036162,PF13408, PS51737,G3DSA:3.40.50.1390,IPR025827,IPR006119,IPR038109, PF07508,SSF53041,IPR011109,PTHR30461,Coil, PS51736,cd00338,PF00239
MNAVIYARFSSHSQREQSIEGQLRDCYEYAKRYDINIVGEYIDRAISGMTDDRPDFQRMIADAPKKQFERIIVWKLDRFARNRYDSALYKHKLKQYGIRVISAMENVGEGDESILLEALLEASAEYYSLDLKKKILRGQRETIAKGRWCGGPIPYGYKAVDGKLVADEKTAPIIRYVFEQYAQGVPMKEIIDELKRRGVRSSRGGELTYTTFSRALTNPVYIGNFMYKGELVPGVADALIDEDTYNKVQIIVKANAHAPAANKAKVEYLLQGKAFCGHCGSHMVGESGKSRNGDVYYYYSCAARKKAHKCRKKNEKKDFIEWYVVEQTLQYVLTPARMRDIAKAVVAEYDKEFAGSRVEEYEKAIKQYERELDKLVDALVDAPKVAHKRIYEKMETLETQKASMENELVKLRIASEIRFTEEEVRAWLRRFCTGDLFDPEFRRNIIDTFINCIYLYDDRIIIFYNIKGGKQVSFVDLAESLDNESESSGSDLNANAPASAGAHIRRWLRPPQFQETFPWHSCAPERWEPAYPTRYTPATGR

SEQ ID NO: 2632 - protein, 541 aa, Unknown
  Description of Unknown: Integrase B2633 sequence
  cd03768,SM00857,G3DSA:1.10.10.2600,IPR036162,PF13408, PS51737,G3DSA:3.40.50.1390,IPR025827,IPR006119,IPR038109, PF07508,IPR011109,SSF53041,PTHR30461,PS51736, PF00239
MEEIKCAIYTRKSTDEGLEKEFNTLEAQREAGENYVKSQKHQGWILVDEHYDDGGFSGGNMKRPALQRLFKDIELGKINMIVVYKIDRLTRSLVDFSKMVDIFDKYHCSFVSVTQNFNTSDSMGRLTLNMLLSFAQFEREIGSERVRDKTAASRKKGMWTGGTVPFGYRSVNKKLEIEPNEAEAVKFMFEMYIKYKSAMAVCKLLTEKGYRAFRRDAVLRMLKNPIYEGKIKYKHELYDGQHQAIIRQKTFEAVQYILLNKDKRERTCLFNRNEVGILRGLLICGCCHAPMTPASCQSHGVRRYYYTSTKAKYYGYHHCSNGAVPVALMDECMTKIVTPLISDINVLNGLINKICPDKSAEIYKVMRNPEKIIERMTERDKLQLMKLLIKKIIVNYDTIEINWSDLALSLLPAYLRARTQNQITIIDYPFKRNKGALTLSLPEEVAPNINYNAELITALCKAFKYQKIMNKEKQSIIELAANENIDSGYLGRLIRLTCLAPDIIKRILEGTQPTTIYLKRLLREDIPPIWQDQRIKYGFVK

SEQ ID NO: 2633 - protein, 541 aa, Unknown
  Description of Unknown: Integrase B2634 sequence
  PTHR30461:SF3,IPR036162,PS51737,IPR011109,PTHR30461, PF00239,G3DSA:1.10.10.2600,PF14287,IPR006119,SSF53041, IPR025378,SM00857,IPR025827,cd03770,IPR038109, PS51736,PF13408,G3DSA:3.40.50.1390,PF07508,Coil
MEKDKKVTALYCRLSKDDGSNSESLSIRTQKSMLMEYATRNGFGNCQYYVDDGYSGTNSDRPAFQELLDDIREGKVATVITKDQSRLGRNHIETGTYMEIFFPEHGVRYIAINDGYDSNEQSQMDIAPFRNIINEMYAKDTSRKIKSALRTRKKSGKYISSGAPFGYQKDPADHNHLVIDPNTAPVVEYIYSMAEEGLGLHRIAKRLHDEKVLKPCYYKKEMFGRFIDDEKMYDWDSAYISQVLHSPVYAGHIIYEAKPTVSMKSKKRRYIPFEERAIVPNTHEAIIPQDRWENVQRILYSRSSSFMCDKTDYDNIFKGIVRCADCGRTMLVKVEHRRKRNSVLDQTFYCCSTYRKYGAKACDSHNLEARVLHEAVFADIQAHAKAAVSNREALVKKIANQMHLRVSSDRAQHKRDLKQCKARIAEIEDLYAKLYEDVSKGLLPEKRFQMLADRYDKEQAELTEKIEQYEREGRAEHDQLDKIQDFIDEVSKYAGITELNYKILHQLIDKILVSKAEKVDGEYVQKIQIFYRFIGPLDAIE

SEQ ID NO: 2634 - protein, 541 aa, Unknown
  Description of Unknown: Integrase B2635 sequence
  PTHR30461:SF3,SM00857,G3DSA:1.10.10.2600,IPR036162,PF13408, IPR025827,G3DSA:3.40.50.1390,PS51737,IPR006119,IPR038109, PF07508,IPR011109,SSF53041,PF00239,PTHR30461, PS51736,Coil,cd00338
MAKRIPAAASDCDGMIGVIYARYSSHSQREESIEDQLRECHEFAARNNIKIIAEYTDSALTGRTDSRPDFQKMIRDSARGKFQVVVTYKVDRFARDRYDSAIYKAKLRKNGVRVLYAKETIPDGPEGIILESVLEGYAEYYSAALSQNILRGLEGNAMKCKTNGVQVLGYYTGEDGCYEIDPDYASVVLSIFQKYDAGIPQKEIIDDLNARGFRTTRGFAFNKNSVTRILRNRKYIGEYSWGDVTVPGGMPQIVPLPLFDSVQRKLDRGSRAPAHKWKVADYILTSKLFCGHCGELMVGRAGTGKSGKKYDYYACVNRTRRHGCDKKPVKKEWIEDIVVKYTKEVVLAENMIEQIADGVMDFLEREKKSNGELDALEASLKNVESSIRNMMQAIEQGIITKSTKQRLMELEEQQDQISAAIAREKMATPDIERDQIVYFLEKFKEGSLDDPDYRTKLVEAFVSSVYLWDDGRIVINYNYTGENNQLTLRQIEQELVDIDGAEGSPLDSSAPLNESEANTTRILYFRGVVSFVFNWKVFAEH

SEQ ID NO: 2635 - protein, 541 aa, Unknown
  Description of Unknown: Integrase B2636 sequence
  PTHR30461:SF3,SM00857,G3DSA:1.10.10.2600,IPR036162,PF13408, PS51737,G3DSA:3.40.50.1390,IPR025827,IPR006119,IPR038109, PF07508,IPR011109,SSF53041,PTHR30461,Coil, PS51736,cd00338,PF00239
MPFVKTGTVPPENALNAVLYCRYSSTQQTENSIDGQLRECRRFADYHGYKIIGEYIDRAKSGTSVEQRDDFLRMVGDAKKQQFAFVIVYRFDRFARNRYDSVVYKRQLAISGVRVISATEAVADGPDGAILEAMYEAMDESYSRRLSAITLRGIQEAARKGIWCSAIPFGYRTEDKRLIIDEKEAAAVREIYTQYADGKTKTEIANWLNSHGYRTHRGNPFTCNNFNTILSNPVYIGTGKCREIDVETPAILDKDLYDAVQKLLAKNAPARGRKTDKRYFALTGKLYCGLCGCAMTSDLGTSQNGTVHGYYSCSRRKTSHGVRGGKCPKKSERQDFLEWYIVRQTMAHVLTDARIAEISERLEKLSHEDQASTSIRAIEARQKEINCALDDLTNKLISTSNQLIISRINTRADELAVELAALDADLSHLRLQVDHSLTAAQIAAYLRTLRNGDPLDPDFRRRIIDSFIQRVYLFDDKILVYYNIKETAPITYDQAIDDLDGLSAQLSSGSADFGSPNKSLPEHILFVYSNNTFGAVIRIER

SEQ ID NO: 2636 - protein, 541 aa, Unknown
  Description of Unknown: Integrase B2637 sequence
  SM00857,G3DSA:1.10.10.2600,IPR036162,PF13408,IPR025827, G3DSA:3.40.50.1390,IPR006119,IPR038109,PF07508,IPR011109, SSF53041,PTHR30461,Coil,PS51736,cd00338, PF00239
MAYRKEQDTIGLRAAFYARVSTAEEEQLNAIELQIEENRNAIERHKWKKVDEYIDRSKSGTMVKGRDEYQRLFDDLYSDKFDVVVIKDQERLMRNTLDWYLFINRLVSTGKILYMYMEDRFYSPDDALITGIKAIIAEEFSRNLSKKLRNYHAGRVAKAREGKEIDLQGSGNVFGWDKKEGRYILNPEQAKIRRLMCEGIMARKGSTQIAKELNDAGYRNTVGKKWKPMDIPKFVYDCKNVGTMIINKERHDFESKKTIKLPESEWVYVKNALPPIVTEEEWALICKIHEERVIATGCNKRGKKTTGFSFSGKIYCGLCDAPYWRKQRVSKEEYWVCSTKQTKGRKTRARDAVGGKAGEFNAEGCDNENISYGALMAIMELVSERLKADTGVIKEFMIERLNGYKKRITEANRGATEADLQRELDRKDRLLDAYLDHILTKEEYQRKALALDEKIMELKREVTANRGNLEDLNEIDRVLANIDAEVAKYLDDNSQLKVEYLLEHLEKVVIYPDKAVVIIPILCEGFVVDKAQYVSREKRRR

SEQ ID NO: 2637 - protein, 541 aa, Unknown
  Description of Unknown: Integrase B2638 sequence
  SM00857,G3DSA:1.10.10.2600,IPR036162,PF13408,PS51737, G3DSA:3.40.50.1390,IPR025827,IPR006119,IPR038109,PF07508, IPR011109,SSF53041,PTHR30461,Coil,cd00338, PF00239
MAYRKITDIRDTIGMRAVFYARVSTAEEEQLNAIELQIEENRGCIKDHGWKLVGEYIDRSKSGTTVKGRDDYQRLYEDLYEDLFDIVVIKDQERLQRNTLDWYLFINRVVQTGKLLFMYMDGKFYSPDDALITGVRAIIAEEFSRNLSKKLHNYHDHRIEKARQGQEIALQGSGNVYGWDKKDGKYYINPEQAKVRRLMCEGIMARKGSTLIAKELNDAGYRNTVGKPWKPMDIPKFVYDCKNVGTMIINKERHDFESKQTIKLPKEEWVYVENALPQIVTQEEWDLICKIHEERVIATGSDRRGKKTSGYSFSGKLVCGICGAPYWRKQRVSKDEYWVCSTKQTKGRRTRKRDSTMGKAGEINPLGCDNENISYNSLMEIMGVVSERLQANTDTIKQDMINWLTKLRKQLLEANGGHTEADLQRELSRKSKLLDAYLDGILNKQEYQKKAEELDERIIQLKEETEKNKANSGDIAEIDKVLANIDEEVSRYVDGNEKLKVEYLLEHLEQVQIFPDKVIVIVPILSEGIVVEKTQYVSREK

SEQ ID NO: 2638 - protein, 541 aa, Unknown
  Description of Unknown: Integrase B2639 sequence
  cd03768,PTHR30461:SF3,SM00857,G3DSA:1.10.10.2600,IPR036162, PF13408,IPR025827,PS51737,G3DSA:3.40.50.1390,IPR006119, IPR038109,PF07508,SSF53041,IPR011109,PTHR30461, PS51736,Coil,PF00239
MRIAIYSRKSKFTGKGESIGNQVEMCRDYIATNYNGEEHSIQVFEDEGFSGKNLDRPQFKKMIEIENVIPFDLIVVYRLDRISRNVGDFASLIEKLNKKNTSFVCVKEHFDTGNSMGRAMMNIAAVFAQLERETIAERIKDNMYLLAKEGHWLGGTTPLGYKSIEVTNGKRTHFELIIDESQIDLVNIIFSKYKQLGSINGVETYLFVNGYKTQKNNYWHKSNVKRILTNPIYCIADIDSLNYFTELGCNVCFTLDDCNGKKGIYPYNRFSGQKREMQSYDRWIITISEHQGILAGKEWVAIQQQLKANSKDGFGGKANERRSTSNTSLLSGVLFCSCGAYMRPKKYPSGNTFYICENKMDKKITECNNSNINADELDKIILNELFSFDIKDGVVDSQIQNLKEQVANIDNDLQKQIGRLKKQIETNKNTVNKFMNIVALSIENDTPEQVVEVYNQKINELLNQNKITQKRIDELQDINIVQAKMNDKLNSLTDAMVYLKENFDKLTIVEKRGFVKKIVDRIVWDGKNINIFIKGISELSE

SEQ ID NO: 2639 - protein, 541 aa, Unknown
  Description of Unknown: Integrase B2640 sequence
  PTHR30461:SF3,SM00857,G3DSA:1.10.10.2600,IPR036162,PF13408, IPR025827,G3DSA:3.40.50.1390,PS51737,IPR006119,IPR038109, PF07508,IPR011109,SSF53041,PTHR30461,Coil, PS51736,cd00338,PF00239
MKLTHGAYILARFSTDNQEVDSIDVQVQKCREWCEREHLPVLDVFADEATSGMKDTRPEYSRMMRRLAEGGADTVVIYDQSRMFRKLTAWFQFREQVACYGVRVVAVTQPIIGGDLRDPMTFLSEGSMALMNQMWVLQTRQKVIAKMRYMAEQGKHTGGKPPLGYDVRDERLVVNEEEADTVRIIFGDYAAGSSYINIIRKLNGLGRLTKAGKPFGKNSLYEILKNEKYIGTLVYGKVEQRPDGQRNSHAVSDSVIRIENKIPAIIDRAIWDMVQKKMKANQKEKAGRPAKRDYPLKGKVFCRECKSAMSLEGSRGYYYYVCGKQRRTCDCDGSRIKVDLLEQLIADAMREIIGNPQNVEYIIQIVREERGKIIDTAAQQMQILFARSEEINKQLDAATNAVLAGMLSDTLMDKVHALEAERNEIDREMAKLKHSADCAAMPDGQLRTLLNSAAGDVTALLSLVMRVEVGKEEIVVWTLLDADPKGHFDFSEDGTKIDLKTDGGGAYENSGCTLASTMNFHNFFIAGGLLRFSIPRKKRRG

SEQ ID NO: 2640 - protein, 541 aa, Unknown
  Description of Unknown: Integrase B2641 sequence
  PTHR30461:SF3,SM00857,G3DSA:1.10.10.2600,IPR036162,PF13408, IPR025827,PS51737,G3DSA:3.40.50.1390,IPR006119,IPR038109, PF07508,SSF53041,IPR011109,PF00239,PTHR30461, PS51736,Coil,cd00338
MKKFPIDLSCLTEEEISQFQEDPYTLYNGDQDVALYLRYSSTGQSDQSIEGQLRDCRAFCKANHYRIVAIYVDRATTAHKDVEKRVHLMEMVADSAKQNWEYVIVWKLDRFARNRNDSAIMKMRLRKNGVKVLSATEHLTDSPESIILESVLEGMAEFFSAELSQKVTRGMRESALKCHSVGGHIPLGYKVENHKLVVDPDTAHIVQEAFSLYANGESVADICRKFNSAGYKTAKNTEFNRSSFKAMFRNTRYIGTYTYKDIVIENGIPAIIDKELFETVQRRLSKTATAPARGKAKVDYLLSGKLFCGHCGASMNGESGAGRHGKVYHYYSCYTKKRKLGCDKRPLKKDYIEGIVARDALNLLTDQLIDEIADMAIRQSEQDLINDTHIPQLTAQLSEVEKSIMNITAAIEKGIASETLMNRLVQLEHEKKTLNKEIKAEEKFVYRIDRDQIVFWLSQFKYGNIEDENFRRRLIDLLVNSVTVWDEPDGYKITTAYNLTSCKTKTFRVDKNPAAEEATGFDFGESECTMRKRQSIRLPLS

SEQ ID NO: 2641 - protein, 541 aa, Unknown
  Description of Unknown: Integrase B2642 sequence
  PTHR30461:SF3,cd00338,SM00857,G3DSA:1.10.10.2600,IPR036162, PF13408,PS51737,IPR025827,G3DSA:3.40.50.1390,IPR006119, IPR038109,PF07508,IPR011109,SSF53041,PTHR30461, mobidb-lite,Coil,PF00239
MPKKPTKHPAKPKRGKKLETEEPGVLYGRYSSHNQKDISVEQQFEKGYELAAEYGIKIIDTYADRAVSGRTDKRKDFQRMMSDAAKGKFRYVIAWKSNRMGRNMLEALINEARLQELGVRVLYVEEDFDDTAAGRFAARSMMNVNQFYSENMAEDIRRGLYDNASNCMVANGHLPYGYKRDDTLHYVIDEPKAAVIREIFTRVAAGEPFVDIMSSLNARGIKTSYNRPWGRSSFQKILSNERYRGIYIYGDVRKEDGIPRIISDELFFKVQEVITTKKNPQGRHRVNGDYLLTGKLFCGKCKSPMVGISGTGRSGKLHYYYVCQKHRTEKTCDKKNVRRDEIELQVAQAIKDYALKDDVIEWIADSTVAYNERKEAESKVGILEDQLAGTERGIKNIMSAIEQGIITETTKSRLVELESERATIKAKIAAARADIVTVSRDDIISGLEMFRDGDVHDKKYQARLFDTFLVAVYVYDDDLRLVFSFSGSKNTVQIPIESAVNAVENNEAKCSFKLCSAPPYPPQHICCGGFFCCQRSENMVS

SEQ ID NO: 2642 - protein, 541 aa, Unknown
  Description of Unknown: Integrase B2643 sequence
  cd03768,PTHR30461:SF3,SM00857,G3DSA:1.10.10.2600,IPR036162, PF13408,IPR025827,G3DSA:3.40.50.1390,PS51737,IPR006119, IPR038109,PF07508,SSF53041,IPR011109,PTHR30461, PS51736,Coil,PF00239
MRIAIYSRKSKFTGKGESIGNQVEMCRDYIATNYNGEEHSIQVFEDEGFSGKNLDRPQFKKMIEIENAIPFDLIVVYRLDRISRNVGDFASLIEKLNKKNTSFVCVKEHFDTGNSMGRAMMNIAAVFAQLERETIAERIKDNMYLLAKEGHWLGGTTPLGYKSIEVTNGKRTHFELIIDESQIDLVNIIFSKYKQLGSINGVETYLFVNGYKTQKNNYWHKSNVKRILTNPIYCIADIDSLNYFTELGCNVCFTLDDCNGKKGIYPYNRFSGQKREMQSYDRWIITISEHQGILTGKEWVAIQQQLKANSKDGFGGKANERRSTSNTSLLSGILFCSCGAYMRPKKYPSGNTFYICENKMDKKITECNNSNINADELDKIILNELFSFDIKDGVVDSQIQNLKEQVANIDNDLQKQIGRLKKQIETNKNTVNKFMNIVALSIENDTPEQVVEVYNQKINELLNQNKITQKRIDELQDTNIVQAKMNDRLNSLTDAMAYLKENFDKLTIVEKRGFVKEIVDRIVWDGNNINIFIKGISELSE

SEQ ID NO: 2643 - protein, 541 aa, Unknown
  Description of Unknown: Integrase B2644 sequence
  PTHR30461:SF3,SM00857,G3DSA:1.10.10.2600,IPR036162,PF13408, IPR025827,G3DSA:3.40.50.1390,PS51737,IPR006119,IPR038109, PF07508,SSF53041,IPR011109,PTHR30461,Coil, PS51736,cd00338,PF00239
MPFVKTGTVPPENALNAVLYCRYSSTQQTENSIDGQLRECRRFADYHGYKIIGEYIDRAKSGTSVEQRDDFLRMVGDAKKQQFAFVIVYRFDRFARNRYDSVVYKRQLAISGVRVISATEAVADGPDGAILEAMYEAMDESYSRRLSAITLRGIQEATRKGIWCSAIPYGYRTEDKRLIIDEKEAAAVREIYTQYADGKTKTEIANWLNSHGYRTHRGNPFTCNNFNTILSNPVYIGTGKCREIDVETPAILDKDLYDAVQKLLAKNAPARGRKTDKRYFALTGKLYCGLCGCAMTSDLGTSQNGTVHGYYSCSRRKTSHGVRGGKCPKKSERQDFLEWYIVRQTMAHVLTDARIAEISERLEKLSHEDQASTSIRAIEARQKEINCELDDLTDKLISTSNQLIISRINTRADELAVELAALDADLSRLRLQVDHSLTAAQIAAYLRTLRNGDPLDPDFRRRIIDSFIQRVYLFDDKILVYYNIKETAPITYDQAIDDLDGLSAQLSSGCADFGSPNESLPEHILFIYSNNAFGAVIRIDK

SEQ ID NO: 2644 - protein, 541 aa, Unknown
  Description of Unknown: Integrase B2645 sequence
  PTHR30461:SF3,SM00857,G3DSA:1.10.10.2600,IPR036162,PF13408, IPR025827,G3DSA:3.40.50.1390,PS51737,IPR006119,IPR038109, PF07508,SSF53041,IPR011109,PTHR30461,Coil, PS51736,cd00338,PF00239
MRLTHGAYILARFSTDNQEVDSIDVQVQKCREWCAREHLPVLDVFADEATSGMKNTRPEYSRMMRRLAEGGADTVVIYDQSRMFRKLTAWFQFREQVACYGVRVVAVTQPIIGGDLRDPMTFLSEGSMALMNQMWVLQTRQKVIAKMRYMAEQGKHTGGKPPLGYDVRDERLVVNEEEADTVRIIFGDYAAGSSYINIIRKLNGLGRLTKAGKPFGKNSLHEILKNEKYIGTLVYGKVEQRPDGQRNSHAVSDSVIRIENKIPAIIDRAIWDMVQKKMKANQKEKAGRPAKRDYPLKGKVFCRECKSAMSLEGSRGYYYYVCGKQRRTCDCDGSRIKVDLLEQLIADAMREIIGNPHNVEYIIQIVREERGKIIDTAAQQMQILFARSEEINKQLDAATNAVLAGMLSDTLMDKVHALEAERNEIDREMTKLKYSADCAAMPEGQLRTLLNSAVGDVSALLSLVMRVEVGKEEIVVWTLLDADPKGHFDFSEDGTKIDLKTDGGGAYENSWCTLASTMNFHNFFIAGGLLRFSIPRKKRRG

SEQ ID NO: 2645 - protein, 541 aa, Unknown
  Description of Unknown: Integrase B2646 sequence
  cd03768,PTHR30461:SF3,SM00857,G3DSA:1.10.10.2600,IPR036162, PF13408,IPR025827,G3DSA:3.40.50.1390,PS51737,IPR006119, IPR038109,PF07508,SSF53041,IPR011109,PTHR30461, PS51736,Coil,PF00239
MRIAIYSRKSKFTGKGESIGNQVEMCRDYIATNYNGEEHSIQVFEDEGFSGKNLDRPQFKKMIEIENAIPFDLIVVYRLDRISRNVGDFASLIEKLNKKNTSFVCVKEHFDTGNSMGRAMMNIAAVFAQLERETIAERIKDNMYLLAKEGHWLGGTTPLGYKSIEVTNGKRTHFELIIDESQIDLVNIIFSKYKQLGSINGVETYLFVNGYKTQKNNYWHKSNVKRILTNPIYCIADIDSLNYFTELGCNVCFTLDDCNGKKGIYPYNRFSGQKREMQSYDRWIITISEHQGILAGKEWVAIQQQLKANSKDGFGGKANERRSTSNTSLLSGVLFCSCGAYMRPKKYPSGNTFYICENKMDKKITECNNSNINADELDKIILNELFSFDIKDGVVDSQIQNLKEQVANIDNDLQKQIGRLKKQIETNKNTVNKFMNIVALSIENDTPEQVVEVYNQKINELLNQNKITQKRIDELQDTNIVQAKMNDRLNSLTDAMAYLKENFDKLTIVEKRGFVKEIVDRIVWDGNNINIFIKGISELSE

SEQ ID NO: 2646 - protein, 541 aa, Unknown
  Description of Unknown: Integrase B2647 sequence
  PTHR30461:SF3,cd00338,SM00857,G3DSA:1.10.10.2600,IPR036162, PF13408,PS51737,G3DSA:3.40.50.1390,IPR025827,IPR006119, IPR038109,PF07508,IPR011109,SSF53041,PTHR30461, PS51736,Coil,PF00239
MARKKNIAAGQNAVIYARYSSHNQREVSIEQQVRECMKHAAELGLHVVGTYEDRAISGKTDKRPNFQRMMRDAEKGKFQAVVAWKSNRIGRNMLQAMVNEAKLEDCGVKVFYAEEDFDDTAAGRFALRNMMNVNQFYSENMAEDITRGLYDNASKCMANGRQPLGYKRGEDGRVVLDEANAAVVREIFTRVAAGDLFVDIARDLNAQGIKTSKGANWNKGSFQSICQNERYRGIYIYGDVRVADGIPRIVSDDLWYRVQEAMRMKKNPVGTRHRVGAEDYLLTGKLRCGHCGSYMTGVSGTSRNGELHYYYTCQKRRTEHACDKKNIRRDVIEPAVAQAIKMYCLTDDVIAWIADRTVEYWEKHDNDLQIEALEQQLEENKKATSNMLKAIEMGIITEATRTRMVELETEQSRLSVQLNVAKEDVVKIDREQIISYLELLQQGDIHDRDFQMELFKNFLVAVYVYDDNRMKLVFSCMGDQNSVEIPLETGEDPPDGGLSPDAKMFVLTPDSSTKKALYFVGSMVLFFFIPAKRSGGAPLAM

SEQ ID NO: 2647 - protein, 541 aa, Unknown
  Description of Unknown: Integrase B2648 sequence
  cd03768,PTHR30461:SF3,SM00857,G3DSA:1.10.10.2600,IPR036162, PF13408,IPR025827,G3DSA:3.40.50.1390,PS51737,IPR006119, IPR038109,PF07508,IPR011109,SSF53041,PTHR30461, PS51736,Coil,PF00239
MRIAIYSRKSKFTGKGESIGNQIEMCRDYIATNYNGEEHFIQVFEDEGFSGKNLDRPQFKKMMEIENVIPFDLIVVYRLDRISRNVGDFASLIEKLNKKNTSFVCVKEHFDTGNSMGRAMMNIAAVFAQLERETIAERIKDNMYLLAKEGHWLGGTTPLGYKSIEVTNGKRTHFELIIDESQIDLVNIIFSKYKQLGSINGVETYLFVNGYKTQKNNYWHKSNVKRILTNPIYCIADIDSLNYFTELGCNVCFTLDDCNGKKGIYPYNRFSGQKREMQSYDRWIITISEHQGILAGKEWVAIQQQLKANSKDGFGGKANERRSTSNTSLLSGVLFCSCGAYMRPKKYPSGNTFYICENKMDKKITECNNSNINADELDKIVLNELFSFDIKDGVVDSQIQNLKEQIINIDNDLQKQIGRLKKQIEANKNTVNKFMNIVALSIENDTPEQVVEVYNQKINELLNQNKITQKRIDELQDTNIVQAKMNDRLNSLTDAMAYLKENFDKLTIVEKRGFVKKIVDRIVWDGNNINIFIKGISELSE

SEQ ID NO: 2648 - protein, 541 aa, Unknown
  Description of Unknown: Integrase B2649 sequence
  cd03768,PTHR30461:SF3,SM00857,G3DSA:1.10.10.2600,IPR036162, PF13408,PS51737,IPR025827,G3DSA:3.40.50.1390,IPR006119, IPR038109,PF07508,IPR011109,SSF53041,PTHR30461, PS51736,Coil,PF00239
MRIAIYSRKSKFTGKGESIGNQIEMCRDYIATNYNGEEHSIQVFEDEGFSGKNLDRPQFKKMMEIENVIPFDLIVVYRLDRISRNVGDFASLIEKLNKKNTSFVCVKEHFDTGNSMGRAMMNIAAVFAQLERETIAERIKDNMYLLAKEGHWLGGTTPLGYKSIEVTNGKRTHFELVIDESQIDLVNIIFSKYKQLGSINGVETYLFVNGYKTQKNNYWHKSNVKRILTNPIYCIADIDSLNYFTELGCNVCFTLDDCNGKKGIYPYNRFSGQKREMQSYDRWIVTISEHQGILAGKEWVAIQQQLKANSKDGFGGKANERRSTSNTSLLSGVLFCSCGAYMRPKKYPSGNTFYICENKMDKKITECNNSNINADELDKIILNELFSFDIKDGVVDSQIQNLKEQVANIDNDLQKQIGRLKKQIETNKNTVNKFMNIVALSIENDTPEQVVEVYNQKINELLNQNKTTQKRINELQDTNIVQAKMNDRLNSLTDAMAYLKENFDKLTIVEKRGFVKEIVDRIVWDGKNINIFIKGISELSE

SEQ ID NO: 2649 - protein, 541 aa, Unknown
  Description of Unknown: Integrase B2650 sequence
  cd03768,PTHR30461:SF3,SM00857,G3DSA:1.10.10.2600,IPR036162, PF13408,PS51737,G3DSA:3.40.50.1390,IPR025827,IPR006119, IPR038109,PF07508,IPR011109,SSF53041,PTHR30461, PS51736,Coil,PF00239
MRIAIYSRKSKFTGKGESIGNQVEMCRDYIATNYNGEEHSIQVFEDEGFSGKNLDRPQFKKMIEIENVIPFDLIVVYRLDRISRNVGDFASLIEKLNKKNTSFVCVKEHFDTGNSMGRAMMNIAAVFAQLERETIAERIKDNMYLLAKEGHWLGGTTPLGYKSIEVTNGKRTHFELIIDESQIDLVNIIFSKYKQLGSINGVETYLFVNGYKTQKNNYWHKSNVKRILTNPIYCIADIDSLNYFTELGCNVCFTLDDCNGKKGIYPYNRFSGQKREMQSYDRWIITISEHQGILAGKEWVAIQQQLKANSKDGFGGKANERRSTSNTSLLSGVLFCSCGAYMRPKKYPSGNTFYICENKMDKKITECNNSNINADELDKIVLNELFSFDIKDGVVDSQIQNLKEQIINIDNDLQKQIGRLKKQIEANKNTVNKFMNIVALSIENDTPEQVVEVYNQKINELLNQNKITQKRIDELQDTNIVQAKMNDRLNSLTDAMAYLKENFDKLTIVEKRGFVKEIVDRIVWDGNNINIFIKGISELSE

SEQ ID NO: 2650 - protein, 541 aa, Unknown
  Description of Unknown: Integrase B2651 sequence
  PTHR30461:SF3,SM00857,G3DSA:1.10.10.2600,IPR036162,PF13408, PS51737,G3DSA:3.40.50.1390,IPR025827,IPR006119,IPR038109, PF07508,IPR011109,SSF53041,PTHR30461,Coil, cd00338,PF00239
MPRKPAKHPAKPKRGKKLEIEEPGVLYGRYSSHNQKDISVEQQFEKGYELAVEYGIRIIDTYADRAVSGRTDKRRDFQRMMTDAAKGKFRYVIAWKSNRMGRNMLEALINEARLQDLGVRVLYVEEDFDDTAAGRFAARSMMNVNQFYSENMAEDIKRGLYDNAANCMVANGHLPYGYKADETLHYAIDEPKAAVIREIFTRVSCGEAFVDIMASLNARGIKTSYGRPWGRSSFQKILSNERYRGIYIYGDVRKEGGIPRIISDELYFKVQEVITTKKNPQGRHRVNGDYLLTGKLFCGHCKSPMTGVSGTGRSGNLHYYYVCQKRRTEKTCDKKNVRRDEIELQVAQAIKDYALKDDVIEWIADSTVAYNERKEAESKVGILEDQLAGTEHGIKNIMSAIEQGIITETTKSRLVELESERATIKANIAAARADIVTVSRDDIISGLEMFRDGDVHDKKYQARLFDTFLVAVYAYDDDLRLVFSFSGNKNTIQIPIESAVNAVENNEAECSFKLCSAPPKSKILLTNVNGIFNFVLFILHH

SEQ ID NO: 2651 - protein, 541 aa, Unknown
  Description of Unknown: Integrase B2652 sequence
  IPR036162,PS51737,PS01030,IPR011109,PTHR30461, PF00239,G3DSA:1.10.10.2600,IPR006119,PF14287,SSF53041, IPR025378,SM00857,IPR025827,cd03770,IPR038109, PS51736,IPR019761,PF13408,G3DSA:3.40.50.1390,PF07508,Coil
MLRQTTQQLITALYPRLSHEDELQGESNSISNQKRILETYAKQNGFSNLRWYTDDGYSGANFQRPGFQAMLADIEAGKVGTVIVKDMSRLGRNYLQVGMYTEMIFPQKGVRFIAINDGVDSAQGENDFAPLRNIFNEWLVRDTSKKIKAVKRSKGMSGKPITSKPVYGYLMDEDENFIIDEEAAPVVRQIYSLCLAGNGPTKIARMLTEQQIPTPGTLEYRRTGSTRRYHPGYECKWATNTVVHLLENREYTGCLVNFKTEKPSYKLKHSIENPPEKQAVFENHHEPIIDRETWERVQELRKQRKRPNRYDEVGLFSGILFCADCGSVMYQQRYQTDKRKQDCYICGSYKKRTADCTAHFIRTDLLTAGVLSNLRKVTSYAAKHEARFMKLLIEQNEDGDRRRNAAKKKELEAAEKRIAELSAIFKRLYEDSVTGRISDERFTELSADYEAEQKELKERAARLREELSKAQEATANAEKFMNVVRRHTTIEELTPTLLREFVEKIVVHESVALDGKRRGKLRRQEIEIYYSFVGKVELPDT

SEQ ID NO: 2652 - protein, 541 aa, Unknown
  Description of Unknown: Integrase B2653 sequence
  cd03768,PTHR30461:SF3,SM00857,G3DSA:1.10.10.2600,IPR036162, PF13408,PS51737,G3DSA:3.40.50.1390,IPR025827,IPR006119, IPR038109,PF07508,IPR011109,SSF53041,PTHR30461, PS51736,Coil,PF00239
MRIAIYSRKSKFTGKGESIGNQVEMCRDYITTNYNGEEHFIQIFEDEGFSGKNLDRPQFKKMMEIENLRPFDLIVVYRLDRISRNVGDFASLIEKLNKKNTSFVCVKEHFDTGNSMGRAMMNIAAVFAQLERETIAERIKDNMYLLAKEGHWLGGTTPLGYKSIEVTNGKRTHFELIVDESQIDLVNIIFSKYKQLGSINGVETYLFANGYKTQKNNYWHKSNVKRILTNPIYCIADIDSLNYFTELGCNVCFTLDDCNGKKGIYPYNRFSGQKREMQSYDKWIVTISEHQGILTGKEWVVIQQQLKANSKDGFGGKASERRSTSNTSLLSGILFCSCGAYMRPKKYSSGNTFYICENKMDKKITECNNSNINADELDKIVLNELFSFDIKDGVVDSQIQNLKGQIANIDNDLQKQIGRLKKQIETNKNTVNKFMNIVALSIENDTPEQVVEVYNQKINELLNQNKITQKRIDELQDTNIVQAKMNDRLNSLTDAIVYLKENFDKLTIVEKRGFIKNIVDRIVWDGKNVNIFIKGISELSE

SEQ ID NO: 2653 - protein, 541 aa, Unknown
  Description of Unknown: Integrase B2654 sequence
  cd03768,PTHR30461:SF3,SM00857,G3DSA:1.10.10.2600,IPR036162, PF13408,IPR025827,G3DSA:3.40.50.1390,PS51737,IPR006119, IPR038109,PF07508,IPR011109,SSF53041,PTHR30461, PS51736,Coil,PF00239
MRIAIYSRKSKFTGKGESIGNQVEMCRDYIATNYNGEEHSIQVFEDEGFSGKNLDRPQFKKMMEIENVIPFDLIVVYRLDRISRNVGDFASLIEKLNKKNTSFVCVKEHFDTGNSMGRAMMNIAAVFAQLERETIAERIKDNMYLLAKEGHWLGGTTPLGYKSIEVTNGKRTHFELIIDESQIDLVNIIFSKYKQLGSINGVETYLFVNGYKTQKNNYWHKSNVKRILTNPIYCIADIDSLNYFTELGCNVCFTLDDCNGKKGIYPYNRFSGQKREMQSYDRWIITISEHQGILTGKEWVAIQQQLKANSKDGFGGKANERRSTSNTSLLSGVLFCSCGAYMRPKKYPSGNTFYICENKMDKKITECNNSNINADELDKIILNELFSFDIKDGVVDSQIQNLKEQIANIDNDLQKQIGRLKKQIETNKNTVNKFMNIVALSIENDTPEQVVEVYNQKINELLNQNKITQKRIDELQDTNIVQAKMNDKLNSLTDAMVYLKENFDKLTIVEKRGFVKKIVDRIVWDGNNINIFIKGISELSE

SEQ ID NO: 2654 - protein, 541 aa, Unknown
  Description of Unknown: Integrase B2655 sequence
  cd00338,SM00857,G3DSA:1.10.10.2600,IPR036162,PF13408, IPR025827,G3DSA:3.40.50.1390,PS51737,IPR006119,IPR038109, PF07508,IPR011109,SSF53041,PTHR30461,PS51736, Coil,PF00239
MAYRRAQDTKGLRAVFYARVSTAEEEQLNAIELQIEENRNTITKHGWKKVDEYIDRSKSGTMVKGRDEYQRLYEDLLGDAFDVVVIKDQERLMRNTLDWYLFINRLVQTGKILYMYLEDKFYSPDDALITGIKAIIAEEFSRNLSKKLHNYHDGRIEKARKGLEIDLQGSGNVFGWDKVDGKYVINPEQAKVRRLMCEGIMARKGSTQIAKELNDAGYRNTVGKPWKPMDIPKFVYDCKNVGTMIINRERHDFESKQTVKLPESEWVYVKGALPPIVTEEEWALIEKIHEERVVATGCNRRGKKTSGYSFSGKLVCGVCGAPYWRKTKTSNEEYWVCSTKQQKGRKTRARDAVGGKAGEINPEGCDNENISYNALMEIMAIVSERLQADTGFIREFMLGRLDTYEKRITEANRGATEADLQREISRKDKLLDAYLDNLLTKEEYQRKALALDEHILELRREVEANKANLADLAEIQRVRENIDAEVAQYLDENEQLKVEFVLEHLSQVIIYPDKVLVIFDVFGEGVMVEKSQYVSREKRSG

SEQ ID NO: 2655 - protein, 541 aa, Unknown
  Description of Unknown: Integrase B2656 sequence
  cd03768,PTHR30461:SF3,SM00857,G3DSA:1.10.10.2600,IPR036162, PF13408,PS51737,G3DSA:3.40.50.1390,IPR025827,IPR006119, IPR038109,PF07508,IPR011109,SSF53041,PTHR30461, PS51736,Coil,PF00239
MRIAIYSRKSKFTGKGESIGNQIEMCRDYIATNYNGEEHFIQVFEDEGFSGKNLDRPQFKKMMEIENVIPFDLIVVYRLDRISRNVGDFASLIEKLNKKNTSFVCVKEHFDTGNSMGRAMMNIAAVFAQLERETIAERIKDNMYLLAKEGHWLGGTTPLGYKSIEVTNGKRTHFELIIDESQIDLVNIIFSKYKQLGSINGVETYLFANGYKTQKNNYWHKSNVKRILTNPIYCIADIDSLNYFTELGCNICFTLDDCNGKKGIYPYNRFSGQKREMQSYDRWIITISEHQGILTGKEWVAIQQQLKANSKDGFGGKANERRSTSNTSLLSGVLFCSCGAYMRPKKYPSGNTFYICENKMDKKITECNNSNINADELDKIILNELFSFDIKDGVVDSQIQNLKEQIANIDNDLQKQIGRLKKQIETNKNTVNKFMNIVALSIENDTPEQVVEVYNQKINELLNQNKITQKRIDELQDTNIVQAKMNDKLNSLTDAMAYLKENFDKLTIVEKRGFVKKIVDRIVWDGNNINIFIKGISELSE

SEQ ID NO: 2656 - protein, 541 aa, Unknown
  Description of Unknown: Integrase B2657 sequence
  cd03768,PTHR30461:SF3,SM00857,G3DSA:1.10.10.2600,IPR036162, PF13408,PS51737,G3DSA:3.40.50.1390,IPR025827,IPR006119, IPR038109,PF07508,IPR011109,SSF53041,PTHR30461, PS51736,Coil,PF00239
MEKVAIYSRKSVFTGKGESIENQIEMCKDYYNRTHNNNEVEFLIYEDEGFSGGNINRPRFKELISDAKNKKFTALVCYRLDRISRNVADFSSTLELLQDNDIDFISIKEQFDTSTPMGRAMIYIASVFAQLERETIAERVRDNMLQLARTGRWLGGQEPFGFTSEKSIYLDENFTERSLMILSPLSDELQVIKLIYDKYLEVNSITQVVNWLQDNRYKGKNGGEWGTTQVQRILSSPIYVKSNEETNNYLKNLGCNVYGDPNGNGYLSYNKTRKMIFDRDITEWIYAISKHKGIIPADKWLRVQTILEKNKCKKIKRLGTGTSNTALLTGVLKCAKCGSNMIVKQGHKSKKEAGKRYDYYVCSRKDNSKGKKCDNKNIRTDRLDNIVISQLSAYNKDTLSSDLYNLLTASKNNNTSNNKLESLRNDISIKENQISTLIKQLSSAPNESVSSYIMQEINTLSDEVKNLKLKLDNANEDKSLYKQDIKNLELIIEMLEHFDKSFELTDDIPQKRLMLQTILQKVTWNGETQEANLSILDSKKK

SEQ ID NO: 2657 - protein, 541 aa, Unknown
  Description of Unknown: Integrase B2658 sequence
  cd03768,PTHR30461:SF3,SM00857,G3DSA:1.10.10.2600,IPR036162, PF13408,IPR025827,PS51737,G3DSA:3.40.50.1390,IPR006119, IPR038109,PF07508,IPR011109,SSF53041,PTHR30461, PS51736,Coil,PF00239
MRIAIYSRKSKFTGKGESIGNQVEMCRDYIATNYNGEEHSIQVFEDEGFSGKNLDRPQFKKMIEIENVIPFDLIVVYRLDRISRNVGDFASLIEKLNKKNTSFVCVKEHFDTGNSMGRAMMNIAAVFAQLERETIAERIKDNMYLLAKEGHWLGGTTPLGYKSIEVTNGKRTHFELIIDESQIDLVNIIFSKYKQLGSINGVETYLFVNGYKTQKNNYWHKSNVKRILTNPIYCIADIDSLNYFTELGCNVCFTLDDCNGKKGIYPYNRFSGQKREMQSYDRWIITISEHQGILAGKEWVAIQQQLKANSKDGFGGKANERRSTSNTSLLSGVLFCSCGAYMRPKKYPSGNTFYICENKMDKKITECNNSNINADELDKIILNELFSFDIKDGVVDSQIQNLKEQVANIDNDLQKQIGRLKKQIETNKNTVNKFMNIVALSIENDTPEQVVEVYNQKINELLNQNKIAQKRIDELQDTNIVQAKMSDRLNSLTDAMAYLKENFDKLTIVEKRGFVKEIVDRIVWDGKNINIFIKGISELSE

SEQ ID NO: 2658 - protein, 541 aa, Unknown
  Description of Unknown: Integrase B2659 sequence
  PTHR30461:SF3,SM00857,G3DSA:1.10.10.2600,IPR036162,PF13408, IPR025827,PS51737,G3DSA:3.40.50.1390,IPR006119,IPR038109, PF07508,IPR011109,SSF53041,PF00239,PTHR30461, PS51736,Coil,cd00338
MKAKKEKKITRIEPVRTTQSLEKTQIKRVCAYCRVSTDSEDQRHSFDSQVAYYNRMIGERNNWIFSGIYADEDRSGTKMNGRDEFQKMMQNCRRRQHDYIITKSVTRFARNTVDSIQAIRELKALGIGVYFEKERVDTLSEKSEQLLTILSSIAQGESENTSTNVRWSVVRRFQNGTFIISEPAYGYCKDPDGNLIIEPKEAAVVRRIFEAYLGGMGSYAIARSLQEERIPTSRKSNGWQEGSVKEILKNPVYEGDLLLQKTCTTEGVPFRKKRNHGELPQYLIRDNHEPIISREEAEAVRKLCAYRKEQQCVENTEVYQNRYAFSSRIRCGVCGSTFRRQKIYIGKPYEKVQWCCHKHIQDRKVCGQKAIREDDIQCLFTRMWNRLAGNYEEILIPLLAGLKAVPRDPKQEKEIGELSHQIEELRKQSHMLRQVLVDGNIGSAVFIERRNQLDSELETAIHRRQLLEEDQFFEQEIMQTEYLLTVFRSRPARMEDYDEEAFLMIIDHVTVYPEKRVQFCLKNGLELEESLEEGDMADGRN

SEQ ID NO: 2659 - protein, 541 aa, Unknown
  Description of Unknown: Integrase B2660 sequence
  cd03768,PTHR30461:SF3,SM00857,G3DSA:1.10.10.2600,IPR036162, PF13408,PS51737,IPR025827,G3DSA:3.40.50.1390,IPR006119, IPR038109,PF07508,IPR011109,SSF53041,PTHR30461, PS51736,Coil,PF00239
MRIAIYSRKSKFTGKGESIGNQVEICRDYITTNYNDEEHFIQVFEDEGFSGKNLDRPQFKKMMEIENLRPFDLIVVYRLDRISRNVGDFASLIEKLNKKNTSFVCVKEHFDTGNSMGRAMMNIAAVFAQLERETIAERIKDNMYLLAKEGHWLGGTTPLGYKSIEVTNGKRTHFELIIDESQIDLVNIIFSKYKQLGSINGVETYLFANGYKTQKNNYWHKSNVKRILTNPIYCIADIDSLNYFTELGCNVCFTLDDCNGTKGIYPYNRFSGQKREMQSYDKWIVTISEHQGILTGKEWVAIQQQLKANSKDGFGGKASERRSTSNTSLLSGVLFCSCGAYMRPKKYPSGNTFYICENKMDKKITECNNSNINADELDKIVLNELFSFDIKDGVVDSQIQNLKEQIANIDNDLQKQIGRLKKQIETNKNTVNKFMNIVALSIENDTPEQVVEVYNQKINELLNQNKITQKRIDELQDTNIVQAKMNDRLNSLTDAILYLKENFDKLTIVEKRGFIKNIVDRIVWDGKNVNIFIKGISELSE

SEQ ID NO: 2660 - protein, 541 aa, Unknown
  Description of Unknown: Integrase B2661 sequence
  PTHR30461:SF3,IPR036162,PS51737,IPR011109,PTHR30461, PS00397,PF00239,G3DSA:1.10.10.2600,IPR006119,SSF53041, SM00857,IPR025827,IPR038109,PS51736,cd03768, IPR006118,PF13408,G3DSA:3.40.50.1390,PF07508,Coil
MGKIADKLKQIRVAIYVRVSTHYQIDKDSLPVQKEELIAYAKYVLNADSYEIFEDAGFSAKNTDRPGFQQMMSRIREGEFSHVLVWKLDRISRNLLDFAAMYDELKRLGVTFVSKNEQFDTSSAMGEAMLKIILVFAELERKMTAERVIAVMISRAGNGQWNGGRIPFGYNYDKNAETFSVNETEAAVVLKMFDLYEETHSLLQVAKALNASGSRHRSGKEWTPTTVSIILKSPFYTGAYRYNYYDMSKRNSRQDVKPEGEWVVVEDHHPAIIDPVRWKNVVELLERNRRGWQSAGKTYTRKNIHVFAGLLTCGVCGSIMSATSNARAHKDGYRPSNYACMSHRKNNGCTNKYITDTKIGPFVLNYISNLIRAKDSFGKTTSPETLQKKLLRGDMFKDIVRIKEPGLMELYNLYRSQLPGVKYASKVAERSGSSDTASEKDILLSERRRLERALSRLKSLYLYSEEDMSERDYVIEKNRLTESLDKVNERLDKLNDGLSSQFSISDEELLAKASYFIMSQKLLDRRFVDYRRLLKETDPES

SEQ ID NO: 2661 - protein, 541 aa, Unknown
  Description of Unknown: Integrase B2662 sequence
  cd03768,PTHR30461:SF3,SM00857,G3DSA:1.10.10.2600,IPR036162, PF13408,IPR025827,G3DSA:3.40.50.1390,PS51737,IPR006119, IPR038109,PF07508,SSF53041,IPR011109,PTHR30461, PS51736,Coil,PF00239
MRIAIYSRKSKFTGKGESIGNQIEMCRDYIATNYNGEEHSIQVFEDEGFSGKNLDRPQFKKMMEIENVIPFDLIVVYRLDRISRNVGDFASLIEKLNKKNTSFVCVKEHFDTGNSMGRAMMNIAAVFAQLERETIAERIKDNMYLLAKEGHWLGGTTPLGYKSIEVTNGKRTHFELIIDESQIDLVNIIFSKYKQLGSINGVETYLFANGYKTQKNNYWHKSNVKRILTNPIYCIADIDSLNYFTELGCNVCFTLDDCNGKKGIYPYNRFSGQKREMQSYNRWIITISEHQGILAGKEWVAIQQQLKANSKDGFGGKANERRSTSNTSLLSGVLFCSCGAYMRPKKYPSGNTFYICENKMDKKITECNNSNINADELDKIILNELFSFDIKDGVVDSQIQNLKEQVANIDNDLQKQIGRLKKQIEANKNTVNKFMNIVALSIENDTPEQVVEVYNQKINELLNQNKITQKRIDELQDTNIVQAKMNDRLNSLTDAMAYLKENFDKLTIVEKRGFVKEIVDRIVWDGNNINIFIKGISELSE

SEQ ID NO: 2662 - protein, 541 aa, Unknown
  Description of Unknown: Integrase B2663 sequence
  cd03768,PTHR30461:SF3,SM00857,G3DSA:1.10.10.2600,IPR036162, PF13408,PS51737,G3DSA:3.40.50.1390,IPR025827,IPR006119, IPR038109,PF07508,IPR011109,SSF53041,PTHR30461, PS51736,Coil,PF00239
MRIAIYSRKSKFTGKGESIGNQIEMCRDYIATNYNGEEHSIQVFEDEGFSGKNLDRPQFKKMMEIENVIPFDLIVVYRLDRISRNVGDFASLIEKLNKKNTSFVCVKEHFDTGNSMGRAMMNIAAVFAQLERETIAERIKDNMYLLAKEGHWLGGTTPLGYKSIEVTNGKRTHFELIIDESQIDLVNIIFSKYKQLGSINGVETYLFVNGYKTQKNNYWHKSNVKRILTNPIYCIADIDSLNYFTELGCNVCFTLDDCNGKKGIYPYNRFSGQKREMQSYDRWIITISEHQGILTGKEWVAIQQQLKANSKDGFGGKANERRSTSNTSLLSGILFCSCGAYMRPKKYPSGNTFYICENKMDKKITECNNSNINADELDKIVLNELFSFDIKDGVVDSQIQNLKEQITNIDNDLQKQIGRLKKQIETNKNMVNKFMNIVALSIENNTPEQVVEVYNQKINELLNQNKITQKRIDELQDTNIIQAKMNDRLNSLTDAMAYLKENFNKLTIVEKRGFVKEIVDRIVWDGNNINIFIKGISELSE

SEQ ID NO: 2663 - protein, 541 aa, Unknown
  Description of Unknown: Integrase B2664 sequence
  cd03768,PTHR30461:SF3,SM00857,G3DSA:1.10.10.2600,IPR036162, PF13408,IPR025827,PS51737,G3DSA:3.40.50.1390,IPR006119, IPR038109,PF07508,SSF53041,IPR011109,PTHR30461, PS51736,Coil,PF00239
MRIAIYSRKSKFTGKGESIGNQVEMCRDYIATNYNGEEHSIQVFEDEGFSGKNLDRPQFKKMIEIENVIPFDLIVVYRLDRISRNVGDFASLIEKLNKKNTSFVCVKEHFDTGNSMGRAMMNIAAVFAQLERETIAERIKDNMYLLAKEGHWLGGTTPLGYKSIEVTNGKRTHFELIIDESQIDLVNIIFSKYKQLGSINGVETYLFVNGYKTQKNNYWHKSNVKRILTNPIYCIADIDSLNYFTELGCNVCFTLDDCNGKKGIYPYNRFSGQKREMQSYDRWIITISEHQGILAGKEWVAIQQQLKANSKDGFGGKVNERRSTNNTSLLSGVLFCSCGAYMRPKKYPSGNTFYICENKMDKKITECNNSNINADELDKIILNELFSFDIKDGVVDSQIQNLKEQVANIDNDLQKQIGRLKKQIETNKNTVNKFMNIVALSIENDTPEQVVEVYNQKINELLNQNKITQKRIDELQDTNIVQAKMNDRLNSLTDAMAYLKENFDKLTIVEKRGFVKEIVDRIVWDGNNINIFIKGISELSE

SEQ ID NO: 2664 - protein, 541 aa, Unknown
  Description of Unknown: Integrase B2665 sequence
  PTHR30461:SF3,SM00857,G3DSA:1.10.10.2600,IPR036162,PF13408, IPR025827,G3DSA:3.40.50.1390,PS51737,IPR006119,IPR038109, PF07508,IPR011109,SSF53041,PF00239,PTHR30461, PS51736,Coil,cd00338
MNVYRTREILKTCSIFDLKLKVAFYARVSTESEDQQVSIHHQDEYYRNFIAQNRNWVFVGAYIDNGISGIRTEKRDEFQRMMADAKAGKIDMIVTKEITRFARNTLDSIKYTRELLMYGVCVWFQNDNINTIDEDSELRLTIMSGIAQDESRKLSNRIKFGHAQSIKNGVVLGSRIYGYIKKDGKLTIDPKTAPMIKEIFEKYSTGEWSTSAIEKYLYKKGYRNYKGGKLSRDNIKKIIKNPKYKGYYCGGKVKIVDMFTKKQEFLPEDEWTMYKDDGNHVPQIVDESVWDKANVIMQTRSDAIKSHRTSFKQNNLFTGYIFCGNDGAPYWMKQHTIRGREDARWVCSYRIKNGAQSCNSFGIRERELRVMLADLINKSGDIQTAIEKYISLVEKNIDFSNDGAEISRLKNMILQIEKKKDKLLDLNLDGIITNSEYIEKSEKFKDEIESINNKLSELESKEEASKDFHLKLKEIGMILNDLQGVGPEDITKTVLGEFLDKILINPKGPQECEILFFLKTGDVKKKSITERDKPGCSEYFF

SEQ ID NO: 2665 - protein, 541 aa, Unknown
  Description of Unknown: Integrase B2666 sequence
  cd03768,PTHR30461:SF3,SM00857,G3DSA:1.10.10.2600,IPR036162, PF13408,IPR025827,G3DSA:3.40.50.1390,PS51737,IPR006119, IPR038109,PF07508,SSF53041,IPR011109,PTHR30461, PS51736,Coil,PF00239
MRIAIYSRKSKFTGKGESIGNQIEMCRDYIATNYNGEEHSIQVFEDEGFSGKNLDRPQFKKMMEIENVIPFDLIVVYRLDRISRNVGDFASLIEKLNKKNTSFVCVKEHFDTGNSMGRAMMNIAAVFAQLERETIAERIKDNMYLLAKEGHWLGGTTPLGYKSIEVTNGKRTHFELIIDESQIDLVNIIFSKYKQLGSINGVETYLFANGYKTQKNNYWHKSNVKRILTNPIYCIADIDSLNYFTELGCNVCFTLDDCNGKKGIYPYNRFSGQKREMQSYNRWIITISEHQGILAGKEWVAIQQQLKANSKDGFGGKANERRSTSNTSLLSGVLFCSCGAYMRPKKYPSGNTFYICENKMDKKITECNNSNINADELDKIILNELFSFDIKDGVVDSQIQNLKEQVANIDNDLQKQIGRLKKQIEANKNTVNKFMNIVALSIKNDTPEQVVEVYNQKINELLNQNKITQKRIDELQDTNIVQAKMNDRLNSLTDAMAYLKENFDKLTIVEKRGFVKEIVDRIVWDGNNINIFIKGISELSE

SEQ ID NO: 2666 - protein, 541 aa, Unknown
  Description of Unknown: Integrase B2667 sequence
  cd00338,SM00857,G3DSA:1.10.10.2600,IPR036162,PF13408, PS51737,G3DSA:3.40.50.1390,IPR025827,IPR006119,IPR038109, PF07508,IPR011109,SSF53041,PTHR30461,PS51736, Coil,PF00239
MYNLLCKGENLGMKFTSTWRISDPLAQYIVYLRKSRKDMEAEALGQTDTLKRHRAALLSLSESRGLNVVEICEEVVTGDSIAVRPEVQKVLQLVETGSYAGVLVMEVERLARGDTIDQGIIAQTFKYSNTKIVTPNKVYDPNNEMDEEYFEFGLFMSRREYNTIKRRLSRGKEASLREGKWISGKTPFGWLREKLPNDKGYKLIPHPEQAPILRQIYDWYTGEGCTRIGSYAIASRLNALGVKTNSGNSWTTSAILELLRNPANAGWIKSGGRPETKRIVDGSVVVSRPRTRQEDLKLYKGLHDALISQAQYDKAVSLSYSVVAPRGKGAWKTVTSLAGLVRCDQCGRVMVRRASSGDRRPSFMCPTQGCPTVSSWYSEVEEALLDALRDWLRELEVGEADTNDDHSLLDALSASINADQKQLSKLEAQEARAYELVETGVYTPEVFLQRSQALAADKQVIVSRIEENQRAQDEITRAKQARARLAPAVRHVLEAYPLAATPQDKNDLLKTVLQKVLYHKRSKSYSKAGSDMCLTLYPLTD

SEQ ID NO: 2667 - protein, 541 aa, Unknown
  Description of Unknown: Integrase B2668 sequence
  PTHR30461:SF3,cd00338,SM00857,G3DSA:1.10.10.2600,IPR036162, PF13408,PS51737,G3DSA:3.40.50.1390,IPR025827,IPR006119, IPR038109,PF07508,IPR011109,SSF53041,PTHR30461, PS51736,Coil,PF00239
MAKRIPAAASDCDGMIGVIYARYSSHSQREESIEDQLRECHEFAARNNIKIIAEYTDSALTGRTDSRPDFQKMIRDSARGKFRVVVTYKVDRFARDRYDSAIYKAKLRKNGVRVLYAKETIPDGPEGIILESVLEGYAEYYSAALSQNILRGLEGNAMKCKTNGVQVLGYYTGEDGCYEIDPDYASVVLSIFQKYDAGVPQKEIIDDLNARGFRTTRGFAFNKNSVTRILRNRKYIGEYSWGDVTVPGGMPQIVPLPLFDSVQRKLDRGSRAPAHKWKVADYILTSKLFCGHCGELMVGRAGTGKSGKKYDYYACVNRTRRHGCDKKPVKKEWIEDIVVKYTKEVVLAEDMIEQIADGVMDFLEREKKSNGELDALEASLKNVESSIRNMMQAIEQGIITKSTKQRLMELEEQRDQISAAIAREKIATPDIERDQIVYFLEKFKEGSLDDPDYRTKLVEAFVSSVYLWDDGRIVINYNYTGENNQLTLRQIEQELVDMDGAEGSPLDSSAPLNESEANTTRILYFRGVVSFVFNWKVFAEH

SEQ ID NO: 2668 - protein, 541 aa, Unknown
  Description of Unknown: Integrase B2669 sequence
  PTHR30461:SF3,cd00338,SM00857,G3DSA:1.10.10.2600,IPR036162, PF13408,PS51737,G3DSA:3.40.50.1390,IPR025827,IPR006119, IPR038109,PF07508,SSF53041,IPR011109,PTHR30461, PS51736,Coil,PF00239
MEKVAIYSRKSIFTGKGDSIENQIEMCQDYYRKTHNNKDFEFIIYEDEGFSGGNINRPRFQDLLKDVKNKKFKALICYRLDRISRNVADFSSTLELLQDNDIDFISIKEQFDTSTPMGRAMIYIASVFAQLERETIAERVRDNMLQLAKTGRWLGGQEPFGFTSEKMVYLDENFTERSLMILSPLEEELDVIKKIYLKYLDLQSITQVVNWLQDNKYKGKNGGEWGTTQVQRILASPLYVKSSDKTHNYIKSLGINVFGEANGNGYLTYNKTRKMIFDRDINEWIYTTSKHSGIIDDDKWLMVQNILDKNKNKKIKRLGTGLNNTALLTGILKCSKCGSNMIVKQGHKSKTEEGKRYDYYVCSKKDNSRGKKCDNKNIRTDRLDKIVISQLSAYNKESLYLSLSKLLKESKDTNNINNKLISIKSEIQEKETQISNLIKQLSSAPNETVSTYIMQEVNKLSSDINKLKSDLKTIKEDKETYNYDLENLNLILNMLDEFDKNFEITENISQKRLMLQTLLNNITWDGENLEAKLTMFGDKKK

SEQ ID NO: 2669 - protein, 541 aa, Unknown
  Description of Unknown: Integrase B2670 sequence
  PTHR30461:SF3,SM00857,G3DSA:1.10.10.2600,IPR036162,PF13408, PS51737,G3DSA:3.40.50.1390,IPR025827,IPR006119,IPR038109, PF07508,IPR011109,SSF53041,PTHR30461,Coil, PS51736,cd00338,PF00239
MSESTLKKAVFYGRYSSHLQHETSIEAQRDIVTRYALNNGYEIIAEYIDRAKSGTTTARRDRFNQMILDSRNGEFQYVITSKIDRFARNVKDFYISENKLDENGVKYISATEYYDDSTMSGIIIKALGVAAADGYSKNLANELVKGKMVNAKRAKHNGGIAPLGYDVELSTGTLKINEEEAKAVRLIFDMYVSGNSYGDICHKLNELGYTTKKQRKFGKNSLYDILHNEKYMGVYVFNKRAGKKNSHARKPDNEIVRIENGVPAIISKAVFDKAAKLMEYNKRNSGANTAKHNYMLSGLVRCGHCGCMMSGCAKKNGKGIVTHVYRCGHKPGEKCENHEINSDKLDEFVITMVKKYLLCKDNIPVLLNILRELSAKRITGISDDISEYSRRLKDIKTKQENLLNALETGGQIESVIDRLKKLEQDKSTVESKISELEQKKSVSVTEEQLNKALNILPAFIMSGRTPECRLFIRNIVEQVIVSKDNAAVTLRVTAVSCMRNRKDRKHILSSGIDPKIYQEDKHHERKQKCRAVCKIQLRYAA

SEQ ID NO: 2670 - protein, 541 aa, Unknown
  Description of Unknown: Integrase B2671 sequence
  cd03768,PTHR30461:SF3,SM00857,G3DSA:1.10.10.2600,IPR036162, PF13408,IPR025827,G3DSA:3.40.50.1390,PS51737,IPR006119, IPR038109,PF07508,IPR011109,SSF53041,PTHR30461, PS51736,Coil,PF00239
MRIAIYSRKSKFTGKGESIGNQIEMCRDYIATNYNGEEHFIQVFEDEGFSGKNLDRPQFKKMMEIENVIPFDLIVVYRLDRISRNVGDFASLIEKLNKKNTSFVCVKEHFDTGNSMGRAMMNIAAVFAQLERETIAERIKDNMYLLAKEGHWLGGTTPLGYKSIEVTNGKRTHFELIIDESQIDLVNIIFSKYKQLGSINGVETYLFVNGYKTQKNNYWHKSNVKRILTNPIYCIADIDSLNYFTELGCNVCFTLDDCNGKKGIYPYNRFSGQKREMQSYDRWIITISEHQGILTGKEWVAIQQQLKANSKDGFGGKANERRSTSNTSLLSGILFCSCGAYMRPKKYPSGNTFYICENKMDKKITECNNSNINADELDKIVLNELFSFDIKDGVVDSQIQNLKEQITNIDNDLQKQIGRLKKQIETNKNTVNKFMNIVALSIENNTPEQVVEVYNQKINELLNQNKITQKRIDELQDTNIIQAKMNDRLNSLTDAMAYLKENFDKLTIVEKRGFVKEIVDRIVWDGNNINIFIKGISELSE

SEQ ID NO: 2671 - protein, 541 aa, Unknown
  Description of Unknown: Integrase B2672 sequence
  cd03768,PTHR30461:SF3,SM00857,G3DSA:1.10.10.2600,IPR036162, PF13408,IPR025827,G3DSA:3.40.50.1390,PS51737,IPR006119, IPR038109,PF07508,IPR011109,SSF53041,PTHR30461, PS51736,Coil,PF00239
MRIAIYSRKSKFTGKGESIGNQIEMCRDYIATNYNGEEHFIQVFEDEGFSGKNLDRPQFKKMMEIENVIPFDLIVVYRLDRISRNVGDFASLIEKLNKKNTSFVCVKEHFDTGNSMGRAMMNIAAVFAQLERETIAERIKDNMYLLAKEGHWLGGTTPLGYKSIEVTNGKRTHFELIIDESQIDLVNIIFSKYKQLGSINGVETYLFVNGYKTQKNNYWHKSNVKRILTNPIYCIADIDSLNYFTELGCNVCFTLDDCNGKKGIYPYNRFSGQKREMQSYDRWIITISEHQGILTGKEWVAIQQQLKANSKDGFGGKANERRSTSNTSLLSGILFCSCGAYMRPKKYPSGNTFYICENKMDKKITECNNSNINADELDKIVLNELFSFDIKDGVVDSQIQNLKEQITNIDNDLQKQIGRLKKQIETNKNMVNKFMNIVALSIENNTPEQVVEVYNQKINELLNQNKITQKRIDELQDTNIIQAKMNDRLNSLTDAMAYLKENFDKLTIVEKRGFVKEIVDRIVWDGNNINIFIKGISELSE

SEQ ID NO: 2672 - protein, 541 aa, Unknown
  Description of Unknown: Integrase B2673 sequence
  PTHR30461:SF3,cd00338,SM00857,G3DSA:1.10.10.2600,IPR036162, PF13408,PS51737,G3DSA:3.40.50.1390,IPR025827,IPR006119, IPR038109,PF07508,IPR011109,SSF53041,PTHR30461, Coil,PF00239
MMENRMMTGNRVDCLYRVSTDKQVDYNDKSQADIPMQRRECHRFCEKMGWTIVHEEQEDGVSGHKVRAENRDKLQIIKERAKQGKFDILLVFMFDRIGRIADETPFVVEWFVKNGIRVWSTQEGEQRFDNHTDKLTNYIRFWQADGESEKTSIRTKTALGQLVEDGGFKGGLAPYGYDLVKSGRFNKRKHEVFELAINEAEAAVVRIIFDKYVHEGFGAQRIATYLNNLGYRARTGKMWHHASIRGIICNLTYTGVLRSGESRSQTLPHLQIITPELFEAAQHIRTSRANSAEQERRVPLNTRGQSLLAGNVFCGHCGSRLALTTNGKAYPCKEDAHRIVKRVRYICYGKTRKQTECDGQTGYTAHILDGIIDKVVRQIFERMKAIPKSEIVNIRYREKMEERKALLKSAKSDYAKAAAELDTLRAEVIKSLRGESAFPQDLLSSLISDCETKCLEVQHTMEAAQAAYDEGQAMLDALNAQYDDIISWADMYDSASMESKKMIVSCLIRRVEVYRDYRLHIDFNIDFEQFSAGLDISAIAA

SEQ ID NO: 2673 - protein, 541 aa, Unknown
  Description of Unknown: Integrase B2674 sequence
  SM00857,IPR036162,PF13408,IPR025827,G3DSA:3.40.50.1390, IPR006119,SSF53041,PTHR30461,Coil,PS51736, cd00338,PF00239
MEKKRAAIYARFSSHNQRSESIEIQVENSTRYCQENGLDVVRIYTDYAKTGRNTDRAEFQRMMDDARLGLFDYVVIYKVTRIMRNRDEMALARIMLRKAGVEILYAGEEIASGSSGVLQLGMLEVLAEWESAIDSERIRDGIQKNAQRCMANGRTLYGWDIVEGRYRVNDREAAWLRKMKNKLFSGATMAEVVRSVDAMRTRQGKKVNQDTATKLLLREQNGGTYCYAGVRVEGGMPALWPKHEQDMIISMLKSRHKPHRRVDTAEEWPLSGKLWCACCDSTLTGTSGTSATGKTYAYYKCNKCGRTFRRDVLEDAIVDVVCEAVKRPEIRGNIAALMADWSKDNAEETPLESERIKGEIRRIDAAFENIWQAIESGIAPPGGKDRVQELTERKNELEAEYHMAKAHESLEPDYEEIRQWLDEIAQNLTPQEILKMFIRAAEIEGDVVKLFFAFDYYGNDFTPPKYRHELFSNENSSCNSPMVEARRIELRSILNCPQGATGLVSDRASERIGSQTNVAAPSRFGLSRGHTDYVPRGIPLK

SEQ ID NO: 2674 - protein, 541 aa, Unknown
  Description of Unknown: Integrase B2675 sequence
  SM00857,G3DSA:1.10.10.2600,IPR036162,PS51737, G3DSA:3.40.50.1390,IPR006119,IPR038109,PF07508, IPR011109,SSF53041,PTHR30461,Coil, PS51736,cd00338,PF00239
MPKAISYIRFSTKIQSVGDSTKRQSKYINDWLKRNPDYYLDESLRFQDLGISGFSGANAKSGAFGEFLAAVESGYIEAGSVLLVESLDRVSRQDIDTAGEQLRKILRSGVEVVTLVDNEWYTKESLKDSLSMIKAMLVMERAHEESAMKSTRLRSMWAAKRERAANGEIMSKRCAAWLKVSDDRSHFEFIPENVKAVQRVFQLRLEGLSHIKIAKQMNDEGFSTLNQFKSVTGGWSQSSVTELLSNRSVIGFKVPSKSMAVKGVSEIPNYYPSIITDEQFYAVQQLKQGSGRKPSSDLPLLTNLFKGVLRCSECGFIVVVAGVSAKRSGIYKCSMKSEGRCNSVGFSRLQTDRALVQGLLYNTNRLALNRDNGSAIGTLQSELEQLQKQRERLIKLAMLADDTESMAKDLKALNSQIKDAEKAVSEVHQREQSSQLETISHLDLTVKKDRIEAQIIIKRIVKEIRLNTAGKKCDVFLHNGLKLLNFPLDRVVDGAQWLEVLPLIDGDEFDFEGFTTKPRHLVLEEAPEWVKEIEAQPNQPL

SEQ ID NO: 2675 - protein, 541 aa, Unknown
  Description of Unknown: Integrase B2676 sequence
  PTHR30461:SF3,SM00857,G3DSA:1.10.10.2600,IPR036162,PF13408, IPR025827,G3DSA:3.40.50.1390,PS51737,IPR006119,IPR038109, PF07508,SSF53041,IPR011109,PF00239,PTHR30461, PS51736,Coil,cd00338
MKKQPTGGNRLVAYYRYSGGSHQTEQSIEGQRRDCETYARIHGMVILHEYIDRHISGKTDDRPEFQQMIADAGKGMFDYVICWKTDRIARSRYDSIIYKKKLRDNGVELLYAAEANVEGSGGIIVEGLMEALAEYYSAELAEKVRRGMRESALKGKAIGSSRPLGLTVDKDKKYIIDPAGAAAVRYIFEQYAAGAASSAIVAHLNEQGLCTSRGNPFNKSSVVRIIQNEVYRGVYVSPKFDVRIEGAVPAIIDDDLWERAQKMFIRNRQSRSPRNDRADYILSGKLFCGECGTAMKGVSGHSSNGEVYFYYNCPCKDCHRRNIPKDELEGLVIRTVCNDVLQPDVMDRIADSVIEAQTAELNQPNPEKEALQHELADVQRKAKNLLSALENGTAGAMLTNRLAELEQQADTLSYQLSSLESEPKYPVFSKEEVLYLLEQFLIAPSEKTKAYRRLIDTFVSKIEVSNTELTIYFNIAEEDCGKMKKAPQSNQPEGCSTEKQMVHLLLPQSNFSIFILPTYFYIAIPIFQARKSISVESVTDL

SEQ ID NO: 2676 - protein, 541 aa, Unknown
  Description of Unknown: Integrase B2677 sequence
  cd03768,PTHR30461:SF3,SM00857,G3DSA:1.10.10.2600,IPR036162, PF13408,PS51737,G3DSA:3.40.50.1390,IPR025827,IPR006119, IPR038109,PF07508,IPR011109,SSF53041,PTHR30461, PS51736,Coil,PF00239
MRIAIYSRKSKFTGKGESIGNQVEMCRDYIATNYNGEEHSIQVFEDEGFSGKNLDRPQLKKMIEIENVIPFDLIVVYRLDRISRNVGDFASLIEKLNKKNTSFVCVKEHFDTGNSMGRAMMNIAAVFAQLERETIAERIKDNMYLLAKEGHWLGGTTPLGYKSIEVTNGKMTHFELIIDESQIDLVNIIFSKYKQLGSINGVETYLFVNGYKTQKNNYWHKSNVKRILTNPIYCIADIDSLNYFTELGCNVCFTLDDCNGKKGIYPYNRFSGQKREMQSYDRWIITISEHQGILAGKEWVAIQQQLKANSKDGFGGKANERRSTSNTSLLSGVLFCSCGAYMRPKKYPSGNTFYICENKMDKKITECNNSNINADELDKIILNELFSFDIKDGVVDSQIQNLKEQVANIDNDLQKQIGRLKKQIETNKNTVNKFMNIVALSIENDTPEQVVEVYNQKINELLNQNKITQKRIDELQDINIVQAKMNDKLNSLTDAMVYLKENFDKLTIVEKRGFVKKIVDRIVWDGKNINIFIKGISELSE

SEQ ID NO: 2677 - protein, 541 aa, Unknown
  Description of Unknown: Integrase B2678 sequence
  PTHR30461:SF3,IPR036162,PS51737,IPR011109,PTHR30461, PF00239,G3DSA:1.10.10.2600,IPR006119,PF14287,SSF53041, IPR025378,SM00857,IPR025827,cd03770,IPR038109, PS51736,PF13408,G3DSA:3.40.50.1390,PF07508,Coil
MEKDKKVTALYCRLSKDDGSNSESLSIRTQKSMLMEYATRNGFGNCQYYVDDGYSGTNSDRPAFQELLDDIREGKVATVITKDQSRLGRNHIETGTYMEIFFPEHGVRYIAINDGYDSNEQSQMDIAPFRNIINEMYAKDTSRKIKSALRTRKKSGKYISSGAPFGYQKDPADHNHLVIDPNTAPVVEYIYSMAEEGLGLHRIAKRLHDEKVLKPCYYKKEMFGRFIDDEKMYDWDSAYISQVLHSPVYAGHIIYEAKPTVSMKSKKRRYIPFEERAIVPNTHEAIIPQDRWENVQRILYSRSSSFMCDKTDYDNIFKGIVRCADCGRTMLVKVEHRRKRNSVLDQTFYCCSTYRKYGAKACDSHNLEARVLHEAVFADIQAHAKAAVSNREALVKKIANQMHLRVSSDRAQHKRDLKQCKARIAEIEDLYAKLYEDVSKGLLPEKRFQMLADRYDKEQAELTEKIEQYEREGRAEHDQLDKIQDFIDEVSKYAGITELNYKILHQLIDKILVSRAEKVDGEYVQKIQIFYRFIGPLDAIE

SEQ ID NO: 2678 - protein, 541 aa, Unknown
  Description of Unknown: Integrase B2679 sequence
  cd03768,PTHR30461:SF3,SM00857,G3DSA:1.10.10.2600,IPR036162, PF13408,IPR025827,G3DSA:3.40.50.1390,PS51737,IPR006119, IPR038109,PF07508,IPR011109,SSF53041,PTHR30461, PS51736,Coil,PF00239
MRIAIYSRKSKFTGKGESIGNQIEMCRDYIATNYNGEEHFIQVFEDEGFSGKNLDRPQFKKMMEIENVIPFDLIVVYRLDRISRNVGDFASLIEKLNKKNTSFVCVKEHFDTGNSMGRAMMNIAAVFAQLERETIAERIKDNMYLLAKEGHWLGGTTPLGYKSIEVTNGKRTHFELIIDESQIDLVNIIFSKYKQLGSINGIETYLFVNGYKTQKNNYWHKSNVKRILTNPIYCIADIDSLNYFTELGCNVCFTLDDCNGKKGIYPYNRFSGQKREMQSYDRWIITISEHQGILTGKEWVAIQQQLKANSKDGFGGKANERRSTSNTSLLSGILFCSCGAYMRPKKYPSGNTFYICENKMDKKITECNNSNINADELDKIVLNELFSFDIKDGVVDSQIQNLKEQITNIDNDLQKQIGRLKKQIETNKNTVNKFMNIVALSIENNTPEQVVEVYNQKINELLNQNKITQKRIDELQDTNIIQAKMNDRLNSLTDAMAYLKENFDKLTIVEKRGFVKEIVDRIVWDGNNINIFIKGISELSE

SEQ ID NO: 2679 - protein, 541 aa, Unknown
  Description of Unknown: Integrase B2680 sequence
  PTHR30461:SF3,SM00857,G3DSA:1.10.10.2600,IPR036162,PF13408, PS51737,G3DSA:3.40.50.1390,IPR025827,IPR006119,IPR038109, PF07508,IPR011109,SSF53041,PF00239,PTHR30461, PS51736,Coil,cd00338
MTDEKPRVIIIPPKPELQQTAAVTKQLRVAAYCRVSTKEEEQASSYEAQCEYYTDKIMSNKEWTMAGIFADEGITGTSTKKRTEFLRMIRQCKQKKIDLILTKSIQRFARNTLDCINYTRILRQLGIGVLFEKENINSLPADSEFMITMYGAMAQSESESISGNIRRGRQMHAKVGTLKIPCHWLYGYKKDAGGKFCIIPEQAEVVREIYERYKNGASLRNLKDWLEENQIKTVLGTADWSISVIKGILTNEKYCGDVLLQKTFCTDVISKKIVKNVGQMAQYYMPDHHEAIVSREQYNAVKAEMARRSALRSPSKEAVTGRSCYTSKYALSDRLFCGECGTLYRRKTRNVKGNIYHEWRCISRLEYGKKYCHESPTLREIPLQNAILAAINSAMSVKTALVDQIKNVVSLELLPVQGQTMSLVDIERRLAQLDEQFQRLLAEAIDAENKEACNAQFAEILAEQTALKKQKETILQGSADADRVSTRMKQAEQAIENTAQTITEWNENAVRQIVERVTVLSADEILVRIKSGAEIKQRLER

SEQ ID NO: 2680 - protein, 541 aa, Unknown
  Description of Unknown: Integrase B2681 sequence
  cd03768,PTHR30461:SF3,SM00857,G3DSA:1.10.10.2600,IPR036162, PF13408,IPR025827,PS51737,G3DSA:3.40.50.1390,IPR006119, IPR038109,PF07508,IPR011109,SSF53041,PTHR30461, PS51736,Coil,PF00239
MRIAIYSRKSKFTGKGESIGNQVEMCRDYIATNYNGEEHSIQVFEDEGFSGKNLDRPQFKKMIEIENVIPFDLIVVYRLDRISRNVGDFASLIEKLNKKNTSFVCVKEHFDTGNSMGRAMMNIAAVFAQLERETIAERIKDNMYLLAKEGHWLGGTTPLGYKSIEVTNGKRTHFELIIDESQIDLVNIIFSKYKQLGSINGVETYLFVNGYKTQKNNYWHKSNVKRILTNPIYCIADIDSLNYFTELGCNVCFTLDDCNGKKGIYPYNRFSGQKREIQSYDRWIITISEHQGILAGKEWVAIQQQLKANSKDGFGGKANERRSTSNTSLLSGVLFCSCGAYMRPKKYPSGNTFYICENKMDKKITECNNSNINADELDKIILNELFSFDIKDGVVDSQIQNLKEQVANIDNDLQKQIGRLKKQIETNKNTVNKFMNIVALSIENDTPEQVVEVYNQKINELLNQNKITQKRIDELQDTNIVQAKMNDKLNSLTDAMVYLKENFDKLTIVEKRGFVKKIVDRIVWDGNNINIFIKGISELSE

SEQ ID NO: 2681 - protein, 541 aa, Unknown
  Description of Unknown: Integrase B2682 sequence
  PTHR30461:SF3,cd00338,SM00857,G3DSA:1.10.10.2600,IPR036162, PF13408,PS51737,IPR025827,G3DSA:3.40.50.1390,IPR006119, IPR038109,PF07508,IPR011109,SSF53041,PTHR30461, PS51736,Coil,PF00239
MPFVKTGTVPPENALNAVLYCRYSSTQQTENSIDGQLRECRRFADYHGYKIIGEYIDRAKSGTSVEQRDDFLRMVGDAKKQQFAFVIVYRFDRFARNRYDSVVYKRQLAISGVRVISATEAVADGPDGAILEAMYEAMDESYSRRLSAITLRGIQEATRKGIWCSAIPFGYRTEDKRLTIDEKEAAAVREIYTQYADGRTKTEIANWLNSHGYRTHRGNPFTCNNFNTVLSNPVYIGTGKCREIDVETPAILDKDLYDAVQKLLAKNAPARGRKTDKRYFALTGKLYCGLCGCAMTSDLGTSQNGTVHGYYSCSRRKTSHGVRGGKCPKKSERQDFLEWYIVRQTMSHVLTDARITEISERLEKLSHEDQASTSIRAIEARQKEINCELDDLTDKLISTSNQLIISRINTRADELAVELTALEADLSHLRLQVDHSLTAQQIAAYLRSLRTGDPLDPDFRRHIIDSFIQRVYLFDDKILVYYNIKETAPITYDQAIDDLDGLSAQLSSGCADFGSPNESLPEHILFIYSNNAFGAVIRIEK

SEQ ID NO: 2682 - protein, 541 aa, Unknown
  Description of Unknown: Integrase B2683 sequence
  SM00857,G3DSA:1.10.10.2600,IPR036162,PF13408,PS51737, G3DSA:3.40.50.1390,IPR025827,IPR006119,IPR038109,PF07508, IPR011109,SSF53041,PTHR30461,Coil,PS51736, cd00338,PF00239
MAKPEVSELAVVYARYSSHSQGEQSIEGQLSNARDYAAAHGYTIVHEYVDRAKSGRTDNRAEFQQMLKDTAKRQFSVIILWKVDRFGRNREEIAINKMKCRKNGVRVEYVAETIPDSPEGVILESVLEGFAEYYSLQLSQNIRRGRAESAEKCQSLGGNRPLGYKTGPDKKFVIDENTAPTVKMIFTMYADGKTVTEIVDKLNEMGLRTLRGGPFTKNSLHSILKNKKYIGVYEYQGREIKDGVPRIIEDDVFNKVQEMLKINKRAPAKTWSRADYILTDKLFCGKCGALMFGESGTSKTGAKHNYYICSNKKRFRSCDKKAVRQADIEDAVLNATHELLQDDELLDYIVDRTWEYYLAQDNSQEELRNLQRQLAQTDTAISNLIRAIEAGILTEETKKRMDELTQQKADLKASIADREIARGFHLQKSHIAFYLRSLRDADWSDKEAQKRLIQTFVNAVFVYDDHITLTYNFSGDKSTITLRDMQRFEDGEEFGCRASRSTMMWRQKMSPAKSPNISGFFAAQTAIFLCTKTQMQNRRFP

SEQ ID NO: 2683 - protein, 541 aa, Unknown
  Description of Unknown: Integrase B2684 sequence
  cd03768,PTHR30461:SF3,SM00857,G3DSA:1.10.10.2600,IPR036162, PF13408,IPR025827,PS51737,G3DSA:3.40.50.1390,IPR006119, IPR038109,PF07508,IPR011109,SSF53041,PTHR30461, PS51736,Coil,PF00239
MRIAIYSRKSKFTGKGESIGNQVEMCRDYIATNYNGEEHSIQVFEDEGFSGKNLDRPQFKKMIEIENVIPFDLIVVYRLDRISRNVGDFASLIEKLNKKNTSFVCVKEHFDTGNSMGRAMMNIAAVFAQLERETIAERIKDNMYLLAKEGHWLGGTTPLGYKSIEVTNGKRTHFELIIDESQIDLVNIIFSKYKQLGSINGVETYLFVNGYKTQKNNYWHKSNVKRILTNPIYCIADIDSLNYFTELGCNVCFTLDDCNGKKGIYPYNRFSGQKREMQSYDRWIITISEHQGILAGKEWVAIQQQLKANSKDGFGGKANERRSTSNTSLLSGVLFCSCGAYMRPKKYPSGNTFYICENKMDKKITECNNSNINADELDKIILNELFSFDIKDGVVDSQIQNLKEQVANIDNDLQKQIGRLKKQIETNKNTVNKFMNIVALSIENDTPEQVVEVYNQKINELLNQNKITQKRIDELQDINIVQAKMNDKLNSLTDAMVYLKENFDKLTIVEKRGFVKKIVDRIVWDGNNINIFIKGISELSE

SEQ ID NO: 2684 - protein, 541 aa, Unknown
  Description of Unknown: Integrase B2685 sequence
  PTHR30461:SF3,cd00338,SM00857,G3DSA:1.10.10.2600,IPR036162, PF13408,PS51737,G3DSA:3.40.50.1390,IPR025827,IPR006119, IPR038109,PF07508,SSF53041,IPR011109,PTHR30461, PS51736,Coil,PF00239
MKFPIDLSTLTKEEISQFEEDPFTLYNGDHNVTLYLRYSSSGQSDQSIEGQLRDCRAFCKANHYRIVAIYIDRATTARKDVEKRIHLMEMIADSAKQNWDYVVVWKLDRFSRNRNDSAIMKMRLRKNGVKVLSATEHLSDNPESILLESVLEGMAEFFSAELSQKVTRGMRESALKCHSVGGHVPLGYKIKDHKLVVDPDTAHIVQEAFALYANGVSVAEIARKFNAAGYKTAKNTEFNRSSFKVMFQNVRYIGTYTYKDIRIENGVPAIIDRELFDAVQRRLSKTATAPARGKAKVDYLLSGKLFCGHCGASMNGESGVGRSGKTYHYYSCYTKKRRLGCEKRPLRKDYIEEIVARSAFELLTDQLIDEIADMAIKQSEQDMVNETRIPQLTEQLSEIEKSIANITTAIEKGIASETLMNRLVQLEHEKKTINKEIKSEEKYVYRIDRDQIVFWLSQFKYGNIEDESFRRRLIDLLVNSVTVWDEPDGYKITTAYNLTSCKTKTFRVEKSPATENVTGFGFGESECTTKEASEPDASFLL

SEQ ID NO: 2685 - protein, 541 aa, Unknown
  Description of Unknown: Integrase B2686 sequence
  cd00338,SM00857,G3DSA:1.10.10.2600,IPR036162,PF13408, PS51737,IPR025827,G3DSA:3.40.50.1390,IPR006119,IPR038109, PF07508,IPR011109,SSF53041,PTHR30461,PS51736, Coil,PF00239
MYNLLCKGENLGMKFTSTWRISDPLAQYIVYLRKSRKDMEAEALGQTDTLKRHRAALLSLAESSGLNVVEICEEVVTGDSIAVRPEVQKVLQLVETGSYAGVLVMEVERLARGDTIDQGIIAQTFKYSNTKIVTPNKVYDPNNEMDEEYFEFGLFMSRREYNTIKRRLSRGKEASLREGKWISGKTPFGWLREKLPNDKGYKLIPHPEQAPILRQIYDWYTGEGCTRIGSYAIASRLNTLGIKTNSGNSWTTSAILELLRNPANAGWIKSGGRPETKRIVDGSVVVSRPRTRQEDLKLYKGLHDALISQAQYDKAVSLSYSVVAPRGKGAWKTVTSLAGLVRCDQCGRVMVRRASSGDRRPSFMCPTQGCPTVSSWYSEVEEALLDALRDWLRELEVGEADTNDDHSLLDALSASINADQKQLAKLEAQEARAYELVETGVYTPEVFLQRSQALAADKQVIVSRVEENQRAQDEITRAKQARARLAPAVRHVLEAYPLAATPQDKNDLLKTVLQKVLYHKRSKSYSKAGSDMCLTLYPLTD

SEQ ID NO: 2686 - protein, 541 aa, Unknown
  Description of Unknown: Integrase B2687 sequence
  cd03768,PTHR30461:SF3,SM00857,G3DSA:1.10.10.2600,IPR036162, PF13408,IPR025827,G3DSA:3.40.50.1390,PS51737,IPR006119, IPR038109,PF07508,IPR011109,SSF53041,PTHR30461, PS51736,Coil,PF00239
MRIAIYSRKSKFTGKGESIGNQIEMCRDYIATNYNGEEHFIQVFEDEGFSGKNLDRPQFKKMMEIENVIPFDLIVVYRLDRISRNVGDFASLIEKLNKKNTSFVCVKEHFDTGNSMGRAMMNIAAVFAQLERETIAERIKDNMYLLAKEGHWLGGTTPLGYKSIEVTNGKRTHFELIIDESQIDLVNIIFSKYKQLGSINGVETYLFVNGYKTQKNNYWHKSNVKRILTNPIYCIADIDSLNYFTELGCNVCFTLDDCNGKKGIYPYNRFSGQKREMQSYDRWIITISEHQGILAGKEWVAIQQQLKANSKDGFGGKANERRSTSNTSLLSGVLFCSCGAYMRPKKYPSGNTFYICENKMDKKITECNNSNINADELDKIILNELFSFDIKDGVVDSQIQNLKEQVANIDNDLQKQIGRLKKQIETNKNTVNKFMNIVALSIENDTPEQVVEVYNQKINELLNQNKITQKRIDELQDTNIVQAKMNDRLNSLTDAMAYLKENFDKLTIVEKRGFVKEIVDRIVWDGNNINIFIKGISELSE

SEQ ID NO: 2687 - protein, 541 aa, Unknown
  Description of Unknown: Integrase B2688 sequence
  PTHR30461:SF3,SM00857,G3DSA:1.10.10.2600,IPR036162,PF13408, IPR025827,PS51737,G3DSA:3.40.50.1390,IPR006119,IPR038109, PF07508,SSF53041,IPR011109,PTHR30461,Coil, PS51736,cd00338,PF00239
MSTENYVNKKPKITVIPAKPRQEIVGRQSVNGEKTKLRVAAYARVSTDHEEQESSYEAQVKHFTEYITQREDWQLAGIYADPGLSGKNIKRPQFQKLMRDCEQGKIDRIITKSVSRFARNTLDCVKCVRKLKEKGIGVYFEKENLDTLQEGSEFVLTIMASLAEEESRSISNNIRWSVKKKFENGKLLMSTAHFLGYEMENGVLKIIPEQAMIVRRIYAEFLDGYSLKEICEGLERDGILSPSGKTKWHATTVASILTNEKYKGDCHLQKTYLPDFLSPRRIKNEGQADSYYVEDSHAAIISKEMFDMVQQERMNRKNLRSGSATGKGKFSGKYAFSGMIICGECGETYRRHQQYSGDKKYYIWVCKTHENTGKGNCPAKPIKEKTLEEAFVRALNRLMENSQEILDEVRLAAETEITDSCEAAVEEVQKQIEEAQNALATLLQKRSVGLITPEEYEAQSKKLKNDIDMLNFRKEATLTEQSTMQLAEYRTAAVVDLLTNGTMLQEFDKVIFKSLVKRITVLNRQEIEIEFECGIKVKETL

SEQ ID NO: 2688 - protein, 541 aa, Unknown
  Description of Unknown: Integrase B2689 sequence
  PTHR30461:SF3,IPR036162,PS51737,IPR011109,PTHR30461, PS00397,PF00239,G3DSA:1.10.10.2600,IPR006119,SSF53041, cd00338,SM00857,IPR025827,IPR038109,PS51736, IPR006118,PF13408,G3DSA:3.40.50.1390,PF07508,Coil
MFVTNELKTYAAYLRVSTDDQKDRQTIESQIEFVNKYCDLHQINLFKIYKDDGITGTLPLYERPAGSQLMQDAKNGLFNTLLVYKLDRLGRATRVILNAIHDLESYGVKLKSMTEPFDTGDASGRFLLTILAGVADLERSNILERMWHGANRAARSGKWLGGIVPYGYIKNEDKELIINEAPLSGLDISEADVIRLIYKLTVDEKMTTIKIADHLNALGIPPSYVARSSPDTGRRKINTAGIWRPGRVLNMLKSTTYKGIHQYGKRTKKNREIIEREVPAIVSEEIWDQAQQIIKGNFLFCRKNAKHSYLLRGLIKCGNCGHTYHGSTYNDGLTFYCCNGRTSWKQKGKEKCIGKYINLNYLDDLVWNDCLNFINDPELALKEIAAQNNNRPDKSLTENERLLMNSKLNEKEQEKERILDLFRKNLINMQDVENQLDKIAIDIDTIKSRLNDLNKKDNLSNIFSEKESTLTLLSSFKEKITDDITFETKQEITKCLVRQVLVTTNPDNVKEADIKITYHFSFIPDIATRVVHRTDRDSSLQ

SEQ ID NO: 2689 - protein, 541 aa, Unknown
  Description of Unknown: Integrase B2690 sequence
  PTHR30461:SF3,IPR036162,PS51737,IPR011109,PTHR30461, PS00028,PS00397,PF00239,G3DSA:1.10.10.2600,IPR006119, SSF53041,IPR013087,cd00338,SM00857,IPR025827,IPR038109 ,PS51736,IPR006118,PF13408,G3DSA:3.40.50.1390,PF07508,Coil
MAKHAITIPQNPKAALYIRVSTDMQADKDSLPLQESDLRKLADLNGIKDIEVFCDAGFSGKNLNRPAFRSMMDRIRAREFSHLYVWKLDRISRNLLDFLELYDELKCYGVAFASKNESFDTQSPGGEAMLKILLIFAELERKTIAERVTAVMLGRANENKWNGGRVPFGYMPGPVTTDANGKKCKSWPVPDPIEAPIVRAIFELYLREKALKKVAAALNTAGYRSRKGTLWSDTTVRCILKNHFYKGEYVYNRQNPNAGRREDFYRSENDWVVVTGQHEAIVPEETWRRCNEMLSKNRSWLAPIGSLVSAQDKYIFGGLLQCAECGYTMNSKDRTRIHDHTHSSYYYCTGRWKAPAVCTGEHSGYASDRVLLPQILKLIARIIEACANAIKFASAEQLVSYLLNDNLIPGATGIEEAQRIYMIVRAHVKHIYGIEQANQYNPNALLVEQSQKEKEKQERALSRLKRAYLFDDGDMSEAEYFEQKAAIEGTIAKLEKQIKSLSGNDIGADEAYLAQLSKLIMIKKLQDTNDMYPVFWTPLKI

SEQ ID NO: 2690 - protein, 541 aa, Unknown
  Description of Unknown: Integrase B2691 sequence
  cd00338,SM00857,G3DSA:1.10.10.2600,IPR036162,PF13408, IPR025827,G3DSA:3.40.50.1390,PS51737,IPR006119,IPR038109, PF07508,IPR011109,SSF53041,PTHR30461,PS51736, Coil,PF00239
MYNLLCKGENLGMKFTSTWRISDPLAQYIVYLRKSRKDMEAEALGQTDTLKRHRAALLSLAESSGLNVVEICEEVVTGDSIAVRPEVQKVLQLVETGSYAGVLVMEVERLARGDTIDQGIIAQTFKYSNTKIVTPNKVYDPNNEMDEEYFEFGLFMSRREYNTIKRRLSRGKEASLREGKWISGKTPFGWLREKLPNDKGYKLIPHPEQAPILQQIYDWYTGEGCARIGSSAIATRLNNLGVKTNSGNAWTASAVLDTLRNPANAGWIKSGGRPETKRIVDGSVVVSRPRTPQEDLNLYKGLHDGLISQEQYDKAVALSYSSGSPRGKGAWQTMTSLAGLVRCDQCGRVMVRRPSSGGRRDAFMCPSPDCPTVSAWYEDVEDAVLDALRGWLHELEVGEAERSDKHSLLDALAASISADQKQLAKLEAQEARAYEFVETGVYTPEIFLQRSQALAADKQVIISRIEENQLAQDEITRAKQARTRLAPAVRHVLETYPLAATPQDKNDLLKTVLQKVLYHKQSKSYSKAGSDMRVTLYPLTD

SEQ ID NO: 2691 - protein, 541 aa, Unknown
  Description of Unknown: Integrase B2692 sequence
  cd03768,PTHR30461:SF3,SM00857,G3DSA:1.10.10.2600,IPR036162, PF13408,IPR025827,G3DSA:3.40.50.1390,PS51737,IPR006119, IPR038109,PF07508,IPR011109,SSF53041,PTHR30461, PS51736,Coil,PF00239
MRIAIYSRKSKFTGKGESIGNQVEMCRDYIATNYNGEEHSIQVFEDEGFSGKNLDRPQFKKMMEIENVIPFDLIVVYRLDRISRNVGDFASLIEKLNKKNTSFVCVKEHFDTGNSMGRAMMNIAAVFAQLERETIAERIKDNMYLLAKEGHWLGGTTPLGYKSIEVTNGKRTHFELIIDESQIDLVNIIFSKYKQLGSINGVETYLFVNGYKTQKNNYWHKSNVKRILTNPIYCIADIDSLNYFTELGCNVCFTLDDCNGKKGIYPYNRFSGQKREMQSYDRWIITISEHQGILAGKEWVAIQQQLKANSKDGFGGKANERRSTSNTSLLSGVLFCSCGAYMRPKKYPSGNTFYICENKMDKKITECNNSNINADELDKIILNELFSFDIKDGVVDSQIQNLKEQVANIDNDLQKQIGRLKKQIETNKNTVNKFMNIVALSIENDTPEQVVEVYNQKINELLNQNKITQKRIDELQDTNIVQVKMNDRLNSLTDAMAYLKENFDKLTIVEKRGFVKEIVDRIVWDGNNINIFIKGISELSE

SEQ ID NO: 2692 - protein, 541 aa, Unknown
  Description of Unknown: Integrase B2693 sequence
  cd03768,PTHR30461:SF3,SM00857,G3DSA:1.10.10.2600,IPR036162, PF13408,IPR025827,G3DSA:3.40.50.1390,PS51737,IPR006119, IPR038109,PF07508,IPR011109,SSF53041,PTHR30461, PS51736,Coil,PF00239
MRIAIYSRKSKFTGKGESIGNQIEMCRDYIATNYNGEEHFIQVFEDEGFSGKNLDRPQFKKMMEIENVIPFDLIVVYRLDRISRNVGDFASLIEKLNKKNTSFVCVKEHFDTGNSMGRAMMNIAAVFAQLERETIAERIKDNMYLLAKEGHWLGGTTPLGYKSIEVTNGKRTHFELIIDESQIDLVNIIFSKYKQLGSINGVETYLFVNGYKTQKNNYWHKSNVKRILTNPIYCIADIDSLNYFTELGCNVCFTLDDCNGKKGIYPYNRFSGQKREMQSYDRWIITISEHQGILAGKEWVAIQQQLKANSKDGFGGKANERRSTSNTSLLSGVLFCSCGAYMRPKKYPSGNTFYICENKMDKKITECNNSNINADELDKIILNELFSFDIKDGVVDSQIQNLKEQIANIDNDLQKQIGRLKKQIETNKNTVNKFMNIVALSIENDTPEQVVEVYNQKINELLNQNKITQKRIDELQDTNIVQAKMNDKLNSLTDAMAYLKENFDKLTIVEKRGFVKKIVDRIVWDGNNINIFIKGISELSE

SEQ ID NO: 2693 - protein, 541 aa, Unknown
  Description of Unknown: Integrase B2694 sequence
  PTHR30461:SF3,SM00857,G3DSA:1.10.10.2600,IPR036162,PF13408, PS51737,G3DSA:3.40.50.1390,IPR025827,IPR006119,IPR038109, PF07508,IPR011109,SSF53041,PTHR30461,Coil, PS51736,cd00338,PF00239
MEAAIDTVQQPRVVRVVRNVATAPLTAQKIREQMIDTRLPVAAYARVSTTNEEQEDSLERQKTHYTEYIGNRPEWRFVGVYDDPGITGTRADQRKGFQKLLADCRAGKIKKVLCKSISRFARNTVDALQYIRELKELGIGVYFETQNIDTMTAGGDILITILAAIAEQESRNMSENIKWAFQKKFKEGEVVLACSQFLGYDHDKDKNIVINEEQAKVVRRIYREFLSGYACSAIAKRLTEDGIPTPSGKKQWRTGVIKSILTNEKYYGSAYLGKTCKRDVLSKERVASEEVYYVENSHPAIIPKDTWDLVQLEVTRRQEYRTCSETGNGKYSSKYPFSKKLICGECGMMYRRHAQYKRGNYVRTWVCITHKRKGNDYCSQRYILEDDVANAFQTVLKELVGDMSSIKEILEKNVVDTLGEKEDNGGVQVLLQIQSLQTEMIDINRKKRSGEIAYEAYVARAREIADQVEVLEKQQREIQAAEESRISETKRVKDILEAINGMHQMDEFDGEIFRRLIDNVIIKDKRLTFNFKVGISKTITI

SEQ ID NO: 2694 - protein, 541 aa, Unknown
  Description of Unknown: Integrase B2695 sequence
  PTHR30461:SF3,SM00857,G3DSA:1.10.10.2600,IPR036162,PF13408, PS51737,G3DSA:3.40.50.1390,IPR025827,IPR006119,IPR038109, PF07508,IPR011109,SSF53041,PTHR30461,Coil, PS51736,cd00338,PF00239
MKLTHGAYILARFSTDNQEVDSIDVQVQKCREWCAREHLPVLDVFADEATSGMKDTRPEYSRMMRQLAEGGADTVVIYDQSRMFRKLTAWFQFREQVACYGVRVVAVTQPIIGGDLRDPMTFLSEGSMALMNQMWVLQTRQKVIAKMRYMAEQGKHTGGKPPLGYDVRDERLVVNEEEADTVRIIFGDYAAGASYINIIRKLNDLGRLTKTGKPFGKNSLHEILKNEKYIGTLVYGKVEQRPDGQRNSHAVSDSVIRIENKIPAIIDRVTWDEVQKKMKSNKKEKAGRPAKRDYPLKGKVFCRECKSAMSLEGSRGYYYYVCGKQRRTCDCDGSRIKVDLLEQLIADAMREIIGNPQNVEYIIQIVREERGKIINTAAQQMQILFARSEKINKQLDAATNAVLAGMHSETLMDKVHELEAEKNEIDREMAKLKHSADCAAMPEEQLRALLNDAGGDVSALLSLVMRVEVGKDEIVVWTLLDADPKGHFDFSEDGTKIDLKMDSGGTHGNSGCTLASTKNYYNFSIAGGLLRFSIPRKKRRG

SEQ ID NO: 2695 - protein, 541 aa, Unknown
  Description of Unknown: Integrase B2696 sequence
  PTHR30461:SF3,SM00857,G3DSA:1.10.10.2600,IPR036162,PF13408, PS51737,G3DSA:3.40.50.1390,IPR025827,IPR006119,IPR038109, PF07508,SSF53041,IPR011109,PTHR30461,Coil, PS51736,cd00338,PF00239
MSESTLKKAVFYGRYSSHLQHETSIEAQRDIVTRYALNNGYEIISEYIDRAKSGTTTARRDRFNQMILDSRNGEFQYVITSKIDRFARNVKDFYISENKLDENGVKYISATEHYDDSTMSGIIIKALGVAAADGYSKNLANELVKGKMVNAKRAKHNGGIAPLGYDVELSTGTLKINEEEAKAVRLIFDMYVSGNSYGDICYKLNELGYTTKKQRKFGKNSLYDILHNEKYMGVYVFNKRAGKKNSHARKPDNEIVRIENGVPAIISKEVFDKAAKLMEYNKRNSGANTAKHNYMLSGLVRCGHCGCMMSGCAKKNGKGIVTHVYRCGHKPGEKCENHEINSDKLDEFVITMVKKYLLCKDNIPVLLNILRELSAKRITGISDDISEYSRRLKDIKTKQENLLNALETGGQMESVIDRLKKLEQDKSTVESKISELEQKKSVSVTEEQLNKALNILPAFIMSGRTPECRLFIRNIVEQVIVSKDNAAVTLRVTAVFCMRNRKDRKHILSSGIDPKKYQEDKNHERKQECRTVCKIQLRYAA

SEQ ID NO: 2696 - protein, 541 aa, Unknown
  Description of Unknown: Integrase B2697 sequence
  PTHR30461:SF3,cd00338,SM00857,G3DSA:1.10.10.2600,IPR036162, PF13408,PS51737,G3DSA:3.40.50.1390,IPR025827,IPR006119, IPR038109,PF07508,IPR011109,SSF53041,PTHR30461, PS51736,Coil,PF00239
MAKKKKPAGGNAIIYARYSSHNQRDVSIEQQIEACRKHAAELGLTITDTYEDRAISGRTDNRPAFQRMMRDAEDGKFQYVLAWKSNRMGRNMMQAMVNESRLMDCGVKVFYAEEDFDDSAAGRFALRSMMNVNQFYSDNLAEDVRRGLMDNASKCMANGRQPLGYKRGEDGKVVVDEPAAAIVREIYTRIASGEMFMDIARDLNRRGIKTQSGSEWNKSSFKVLCRNERYRGIYIYGDTRIEGGIPPIVDDVLWYKVQEVLKVKKSKNRHHCPSDEDYLLTGKLRCGKCGGYMIGMSGRSKTGDVHHYYACQNRRVGHTCDKKNIRRDVVEPAVAQAIKQYCLTDDAIEWITDQTIAYWEDEDRKLQIDSIENDLSAVQSSISNVMKAIEMGVITETTRDRLIELERQQTDLKSKLALAKEEIVHVDRKDLISSLLAFRHGNVHDRAYQEKLFNAFLIAVYVYDDDHLKLVFNSFGKDDTVNIALDLGENDDNSGLSDVSKSSPILSNGQPKDIRTVRMSFFVHRESQKERYSKRCIALFG

SEQ ID NO: 2697 - protein, 541 aa, Unknown
  Description of Unknown: Integrase B2698 sequence
  PTHR30461:SF3,SM00857,G3DSA:1.10.10.2600,IPR036162,PF13408, IPR025827,G3DSA:3.40.50.1390,PS51737,IPR006119,IPR038109, PF07508,IPR011109,SSF53041,PF00239,PTHR30461, PS51736,Coil,cd00338
MKTMKFPIDLSMLTEEEIDQFRQDPSTLFEGDTDVSLYLRFSSERQREQSIEGQLRDCRTFCKLNSYRITAIYVDRATTARKDVEKRVHFQEMIRDSEKKPWEYVVVWKLDRFARNRTDSALFKFRLRKNGVKVISATENISEKPEGIILEAVLEGMAEFYSADLSQKITRGMRESALKCHSIGGHVPLGYKIEDHKLVINPATAHIVREAFELYANGETVADICRMFNTKGYRTAKGVEFNRNSFKSMFRNKRYIGVYTYKDIEMEGGVPAIIDKELFETVSRRLSKNAEAPARGKAKVDYLLAGKLFCGHCGGSMNGESGTSKTGAVHNYYTCYTRKRKHACEKKPLKKEWIEYIVAQDAMELLTDDTIQELADMAISQTEQDLRENTRIPELTERMKETESGIANITNAIEKGIASDALMNRLVELEKEKKNLLRLLAEEEKYVCKIERSQIVYWLTEFKGGRIEDERYRRIIIDLMVNSVTVWDEPDGFRITTAYNLTSCQSKTFRIDPSSEKGFGFEGSKSTTSEQALYRLLRLIL

SEQ ID NO: 2698 - protein, 541 aa, Unknown
  Description of Unknown: Integrase B2699 sequence
  PTHR30461:SF3,cd00338,SM00857,G3DSA:1.10.10.2600,IPR036162, PF13408,IPR025827,PS51737,G3DSA:3.40.50.1390,IPR006119, IPR038109,PF07508,IPR011109,SSF53041,PTHR30461, Coil,PF00239
MMENRMMTGNRVDCLYRVSTDKQVDYNDKSQADIPMQRRECHRFCEKMGWTIVHEEQEDGVSGHKVRAENRDKLQIIKERAKQGKFDILLVFMFDRIGRIADETPFVVEWFVKNGIRVWSTQEGEQRFDNHTDKLTNYIRFWQADGESEKTSIRTKTALGQLVEDGGFKGGLAPYGYDLVKSGRFNKRKHEVFELAVNEAEAAVVRIIFDKYVHEGFGAQRIATYLNNLGYRARTGKMWHHASIRGIICNLTYTGVLRSGESRSQTLPHLQIITPELFEAAQHIRTSRANSAEQERRVPLNTRGQSLLAGNVFCGHCGSRLALTTNGKAYPCKEDAHRIVKRVRYICYGKTRKQTECDGQTGYTAHILDGIIDKVVRQIFERMKAIPKSEIVNIRYREKMEERKALLKSAKSDYAKAAAELDTLRAEVIKSLRGESAFSQDLLGSLISDCETKCLEVQHTMEAAQAAYDEGQAMLDALNAQYDDIISWADMYDSASTESKKMIVSCLIRRVEVYRDYRLHIDFNIDFEQFSAGLDISAIAA

SEQ ID NO: 2699 - protein, 540 aa, Unknown
  Description of Unknown: Integrase B2700 sequence
  PTHR30461:SF3,SM00857,G3DSA:1.10.10.2600,IPR036162,PF13408, IPR025827,PS51737,G3DSA:3.40.50.1390,IPR006119,IPR038109, PF07508,IPR011109,SSF53041,PTHR30461,Coil, PS51736,cd00338,PF00239
MPRKKKLQEVGGLRLVAYYRYSGGSGQTEQSIEGQRRDCEAYAKLHGMTIQHEYIDRHISGKTDDRVSFQQMIRDSDKGAFDMVICWKTDRFARNRYDSAVYKKRLRDNGVEIIYAAESNISGAEGIIIEGLMESLAEYYSAELAEKMRRGMRESALKCQAINRCRPLGFTTDAGKKFIIDERTAPAVRFIFEHYAAGESAAYIVEQLNEKGYRTSQGNEFNKSSINRIIQNEMYRGVYISKAYDVRIEGGVPAIVDDELWRRAQAMAKLNKQKRAKYSSKADYFLSGKLYCGECGCLMKGISGHSSTNGEVYRYYACSNPKCKKHNVPKEELEGKVIQAIIDNLLQPEAMEALAEAMVAVQETDADKPNAEREAIQQELADVRRRSKNILDAIENGTANPHLTARLDELTERENTLRFQLSTLTDEKPLRFTKEEYLFLLEQFLIDPAERNEDYGRRVVHTFVTSMEVSDSKLLIYFNISEENADKNKNASPSELQKESSTVKRLVHLTHQQTNFRLYVSPMRFFIDGPFVLSKKLFTA

SEQ ID NO: 2700 - protein, 540 aa, Unknown
  Description of Unknown: Integrase B2701 sequence
  PTHR30461:SF3,IPR036162,PS51737,IPR011109,PTHR30461, PF00239,G3DSA:1.10.10.2600,IPR006119,PF14287,SSF53041, IPR025378,SM00857,IPR025827,cd03770,IPR038109, PS51736,PF13408,G3DSA:3.40.50.1390,PF07508,Coil
MKRPCTMTNNNAALYMRLSRDDESYGDSVSIETQRTLLRSYAKEHGLNVVDEYIDDGWSGTNFDRPSFQRMMRDVENGIVNCIVTKDLSRFGREHVMMGYYLDFLFPEKHVRYIAIAEGEDTEKGLSDFVPFKNLFNEWYAKDTSRKVKAAFRAKFAAGQCVSSCAPIGYKKDPTNKNRLIPDEDTRWIIEKIFDLATHGNGAFSIAKRLKEENVPTSGWLNYQKSGAFANIYANAPEEKRYMWTPGQVKKILTDEVYIGNSVHNRQSTVSFKNKKRILNPKEKWYRVENTHEAVIPKDVFFQAQEQIASRRRRQKTGDTQIFAGLIKCADCGCSLAYGSKPQGNERYGYYRCGKYAQGSHQCTMHYIRYDVLYAYVLSRLQYWSSLARCDEAKFATRISLAAEFGKNAKTKRQSEELNRLKKRNEELDILFAKLYEDRVCGRITERNFDMISAKYQAEQASLDEKIIHLQDAIRAKEQSASNAQNWFDLIKKYRSPTELTAELLNALIEKIVVHEAVKQNDGTREQEVEIFYRFIGKID

SEQ ID NO: 2701 - protein, 540 aa, Unknown
  Description of Unknown: Integrase B2702 sequence
  PTHR30461:SF3,cd00338,SM00857,G3DSA:1.10.10.2600,IPR036162, PF13408,IPR025827,G3DSA:3.40.50.1390,PS51737,IPR006119, IPR038109,PF07508,SSF53041,IPR011109,PTHR30461, PS51736,Coil,PF00239
MATATRRVVRTMPQMFIDVADNQSERLQVAAYARVSTEKEEQEDSFERQVEHYKQLIYSKPDWQFVDVYADPGISGTRAEKRPDFLRMIEDCRAGKIKKVLVKSISRFARNTVDALQYIRELKDLGISVYFESENIDTLTPGGEVLLTILAAMAEQESRTISSNIKWAWQRKFQKGDIILNTGLMLGYRKIGKDDEGHDVYEINEEEAEIVRRIYREFIAGYSITQIAKRLQAEGVKTKLGRESWRHNVIESILTNEKYTGNALLGKTFKPDVLTKYRQKNDGKKAPIYYVEGSHPAIIEKGLFDLAQQEMQRRRDANDNKVGGGRYSSRYPFSGMLVCGICGSKLRRQVRTMGSGKRTASWGCCNRINNGRAVCDSHHVNEDVLEAAYLTAMRRLVDSAEEVVEAVRDGAELALEPENKAAMDRIDEETIQLQEAALALHKAKQRMEIGSVEYASRVKEYSERMKELEAERNELQGTAAKYAEVRLWLDTFIEQTMQSDTLTTVDGTTMKMLVDRIHVRNDGVVVEFKCGVAIEQEYVK

SEQ ID NO: 2702 - protein, 540 aa, Unknown
  Description of Unknown: Integrase B2703 sequence
  PTHR30461:SF3,SM00857,G3DSA:1.10.10.2600,IPR036162,PF13408, PS51737,IPR025827,G3DSA:3.40.50.1390,IPR006119,IPR038109, PF07508,IPR011109,SSF53041,PF00239,PTHR30461, PS51736,Coil,cd00338
MRVVLYMRYSSDRQTEQSIEGQNRVCTAFCEQQGYEIVDRYIDRATSAFKDTDKRTEFQRMIRDSEKQLWEGIVVYKLDRFARNRYDSATYKARLKKNGVRVISATENISDNPEGVILEAVLEGMAEFYSKELSQKITRGMFESANKCHSIGGHIPLGYKIENKKLVIDEAGAAIVREAFDLYANGATVAEICETFNTKGYRTAKNAEFNKNSFRSMFKNERYIGIYKYKDLRIEGGVPAIVDKDTFAIVQKKLSKNAEAPSRGKAKIDYLLSQKLFCGHCGSLMTGESGTGKGGTTYFYYTCGKRKREHTCDKKPLKKDFIERAVVEDALTLLTPETIDELADIAVNESIREMEENSIIPALKDQLHDTERSINNLVKMVEKGVESDTIADRLKELEKEKRAIEKRLVVAQDDYVLLEKDHIVWWLSEFCNGDIEDEEFRRHIIDLLVNSVTVWDEPDGWYKITSVYNLTSNKTKTFRCSDLSGQAPPSSCTKKDAAAKSLEVSTVSPHRYTMCHGGTAGTGKSKTQTHAFEFASCFFT

SEQ ID NO: 2703 - protein, 540 aa, Unknown
  Description of Unknown: Integrase B2704 sequence
  PTHR30461:SF3,SM00857,G3DSA:1.10.10.2600,IPR036162,PF13408, IPR025827,PS51737,G3DSA:3.40.50.1390,IPR006119,IPR038109, PF07508,IPR011109,SSF53041,PF00239,PTHR30461, PS51736,Coil,cd00338
MARKKNIAAGLDAVIYARYSSHNQREVSIEQQIAECTKHAAALGLRIVGTYEDRAISGKTDNRPRFQQMMRDAEKGKFQAVVAWKSNRIGRNMLQAMVNEAKLDDYGVKVFYAEEDFDDTAAGRFALRNMMNVNQFYSENMAEDITRGLYDNANKCMANGRQPLGYKRGADGKVMLDEPAAAVVREIFTRVAAGDLFVDIARDLNAKGIKTSKGAAWNKGSFQSICQNERYKGIYIYGNVRIVDGIPRIVSDELWYKVQEAMRVKKNPVGTRHRVGAEDYLLTGKLRCGHCGSYMTGVSGTSRNGELHYYYTCQKRRTEHACNKKNVRRDVIEPAIAQAIKMYCLTDDVIEWMADQTVQYWKKHDNDLQIEALEQQLAENKKATSNMLKAIEMGIITEATRSRMVELETENSKLTAQLSAAKRDVVKINREDLIDELHVLRSKDVHDREVQAELFKDFLVAAYIYDDNRLKLVFSFMGKDNSVEIPLETEEDPPDGEDSPDAKMFVLTPDCSTNEEQNEHEVTIQMVGNVFVLFCEIPSV

SEQ ID NO: 2704 - protein, 540 aa, Unknown
  Description of Unknown: Integrase B2705 sequence
  PTHR30461:SF3,SM00857,G3DSA:1.10.10.2600,IPR036162,PF13408, IPR025827,G3DSA:3.40.50.1390,PS51737,IPR006119,IPR038109, PF07508,SSF53041,IPR011109,PF00239,PTHR30461, PS51736,Coil,cd00338
MQRQVVKREVQVIQPTLRTGLMHSTLAPAIKQRVAAYARVSTEHEEQQSSYEAQVDYYTRKIKERSDWSFVEVYTDKGITGTNTKKREGFNRMVKDALDGKIDLILTKSVSRFARNTVDTLTTIRKLKERGVAVYFEEQSINTLDGKGELLITIMSSIAQEESRSISDNVTWGQRKRFADGKVSVGYKQFLGFEKGEDGLPKVVEEEAKVVRFIYRSFMMGKTGTHIAKMLTEAGIPTPGGKKEWQSSTIMSILQNEKYKGAALLQKAFTVDFLEKRMKINEGEVPQYYIEHSHEAIIDPLEHDRVQMEISRRKALDRHYSSAHLFSSRVICGECSGFFGRKVWHSNDVYKTYIWQCNEKYRKGLKCKTPHFREDELKQRFVDAFNQRAEIKEETLAACQLGIETICALDELDSQIRSVKDEISVLVEMSRQLIDENAHSAQDQDDCQRRHSALVAKYEDADTRLKALESERSRRIDMRKSIEWFMESFRQQDGLLTEFDEGLFFSVTDVMTVYDDERVAVRFRDGVEIETFAHSQEHMA

SEQ ID NO: 2705 - protein, 540 aa, Unknown
  Description of Unknown: Integrase B2706 sequence
  SM00857,G3DSA:1.10.10.2600,IPR036162,PF13408,PS51737, IPR025827,G3DSA:3.40.50.1390,IPR006119,IPR038109,PF07508, IPR011109,SSF53041,PF00239,PTHR30461,PS51736, Coil,cd00338
MARKKKQASGDAVIYARYSSHNQRDVSIEQQIEACRKYAASLGLKITVTYEDRAISGRTDNRPAFQRMMNDAEDGKFCYVLAWKSNRMGRNMMQAMVNEARLVDCGVKVYYAEEDFDDSAAGRFALRSMMNVNQFYSDNLAEDVRRGLMDNASKCIANGKQPFGYKRGSDGKVVLDEPAAAVVREVFTRVASGETNTSIARDLNRRGIKTGSNGEWNKCSFHGLCTNERYRGIYIYGETRIEGGVPRIIDDRLWHKVQEAIRMRNRRKNGRHRPGEDDYLLTGKLRCGHCGGYMIGMSGTSKTGTIHHYYACQNRRVGRTCDKKNIRRDIIEPAVAQAIKQYCLTDDVIEWIADKTIEYWEDEDRKLQITSLENELADIKSSISNVMKAIEQGVITSTTRDRLIELEAQQSDLSAKLNSAKEDLVHVDRKNLISSLLLFRNGDVYDRQYQEDLFNTFLVAAYVYDDGNRLKLVFNCFGDSNTVDLDLCSDENNDNSSISNEANCGNLFAQALKQSTRLKPSEEVQVAFLFISFRTTAARP

SEQ ID NO: 2706 - protein, 540 aa, Unknown
  Description of Unknown: Integrase B2707 sequence
  PTHR30461:SF3,cd00338,SM00857,G3DSA:1.10.10.2600,IPR036162, PF13408,PS51737,IPR025827,G3DSA:3.40.50.1390,IPR006119, IPR038109,PF07508,IPR011109,SSF53041,PTHR30461, PS51736,Coil,PF00239
MKKAVAYARFSSDMQREESIDAQVRAIKYFASQYGYDLAHVYADRAQSGRSDARVEFKRMIADSSSGAFDTVIVHKLDRFSRSSSDAIYYERILNHNGVQLVSVIERLDSSPEGQLMKMVILGMNQMYSQNLAREVMKGLKENAYQCRHTGGIPPLGYDVVDGKYVINELEAQAVRMIFQMYAAGAGYGEIIQAMYENGFKTKRGNRFGKNSLYDLLRNEKYTGVYIFNKSASADIRGKYNRHAMKPADEIIRVENGIPQIVDKNLFWQVQKKMNDNKHKNARHKAKVSYLLSGKLFCGHCGRAMTGEMHRYREREYGYYVCSSQKNKKGCNKKSVRKEWIEQAVVDDINNILFKPERLQSIAENIYKASHSEKPDERLVELKKQVTEIDRKIGNLTRVLADGLDSDSVRAAVVELENERRTLSAKIYELDLVPDAQRMSVAEIKNSISKMADFSKMDDSGKKRFIELFVQRIYLYDSDDGFRIRTVLSVTNPVDSLDISDFPDFSNITGSVPSPPFISENNIRYFPLGIVCLDSKRPFH

SEQ ID NO: 2707 - protein, 540 aa, Unknown
  Description of Unknown: Integrase B2708 sequence
  PTHR30461:SF3,IPR036162,PS51737,IPR011109,PTHR30461, PF00239,G3DSA:1.10.10.2600,PF14287,IPR006119,SSF53041, IPR025378,SM00857,IPR025827,cd03770,IPR038109, PF13408,G3DSA:3.40.50.1390,PF07508,Coil
MKQPYNTTIYNTALYMRLSRDDENYGDSVSIETQRTILQQYAKEQGLHVVGEYVDDGWSGTNFERPDFQRMMDDVDAGKVNCIVTKDLSRFGREHVMMDYYLEFLFPEKRVRYIAVAENEDTEKGLSDFVPFKNLFNEWFAKDTSRKVKAAFKAKFATGQRIGAYAPIGYRKHPEIKNKLIIDEETRWIVEKIFDLAIHGRGAASITRILIMEKVPTPGFINFQRDGTFANIYAGAPEKKSYAWTIAQVKSIMKDETYIGHTIHYRETNISFKNKRRVRKPQSEWVRVENTQEPIISEQVFRQVQEQIANRRRKCKDGTTQIFSGLVKCADCGWSLSYGENRQNSKPYGHYHCSKYGQGTRQCSMHYIRYDVLYAYVLSRLQYWSGLVQHDEERLLKRLLNATDKGQAAARKKQAAELKKAEKRKAEVDTLFARMYEDWAAGRITEYNFSMLSGKYQSEQAELDEKIERLQSAIATESQNAADAEKWIALMKECVNPTELTAELLNTLIEKIVVHEAVKGEDGSREQEVEIFYRFIGKID

SEQ ID NO: 2708 - protein, 540 aa, Unknown
  Description of Unknown: Integrase B2709 sequence
  PTHR30461:SF3,IPR036162,PS51737,IPR011109,PTHR30461, PF00239,G3DSA:1.10.10.2600,IPR006119,PF14287,SSF53041, IPR025378,SM00857,IPR025827,cd03770,IPR038109, PS51736,PF13408,G3DSA:3.40.50.1390,PF07508,Coil
MKQPNNTMIYNTALYLRLSRDDELQGESGSIQTQRMMLRQYAEEHGLTVVGEYIDDGWSGTNFDRPGFQRMIDDIEEGKINCVVTKDLSRLGRNYILTGQYTEIYFPSKGVRYIAVNDNVDTLNGESELAPFLNILNEMHARQTSKKVKAAMRTRFANGAHYGAYAPLGYIKDPDKSGHLLVDPETKWIIEKIFDLAVHGHGAASITHILVDEKVPTPGWLNFQRYGTFANIYAGASEEKSYAWTVAQVKSILKEETYIGHSVHNKQSNISFKNKKKVRKPQEEWYRVENTHEAIISADVFRQVQEQIAHRRRKQKDGTTQIFSGLVKCADCGWSMAYGMNKQNKKPYGYYHCSKNGQGLHQCSMHYIRYDVLYTYILARVQYWSQQAQQDGDKLLQRLLNASDKERNTAKKKQTAELKKATKRKAEVDNLFAKMYEDWSVGRITEYNFNMLSEKYQAEQHELDEKIQELQAELDAAVQTAVDAEKWIELMKKYVNPTQLTAELLNALIEKILIHEAVKHEDGTREQEVEIFYRFIGKVE

SEQ ID NO: 2709 - protein, 540 aa, Unknown
  Description of Unknown: Integrase B2710 sequence
  cd00338,SM00857,G3DSA:1.10.10.2600,IPR036162,PS51737, G3DSA:3.40.50.1390,IPR006119,IPR038109,PF07508,IPR011109, SSF53041,PTHR30461,PS51736,Coil,PF00239
MQNYPPLSSAEEYCMYLRKSRVDIEAEAHGEGETLARHEKLLLEVARRDRLNVTQIYREVVSGETIASRPVIQHVLQEVEQGRWAGVLVVEVERLARGDTIDQGIMAQTFKYSGTKIVTPLKVYDPNNEYDEEYFEFGLFMSRREYKTINRRLQRGRLAAAKEGKWVSGVAPYGYEKIRVPNDKGWTLRPVEAEADIVRFIFRLYTSGEEGESGEVKKLGTYSLAVRLDRMGVTPPGGAPCWSSTTIQSILENPVYIGKIRWNVHKTKKRVIGSSVRVEHYTAPEEEQVFVEGLHPAIVDEAVFLAAQELISRKGPPPVQSANTVTNPLAGVLVCGKCGRSIVLRPNAYGGLLMCPNRACNNVGSKYDIVEERLLQALSQWLEDYRLEWSDRPPSEEQALMELKAKSIRKAQSEVETLQRQLERTHDLLEQGVYDTEMFLSRSRSITGRINAAQDSIASLTSELAEEEARSASRRNIIPKVEKLLEVYSVLPSAQAKNDMLKGVLEKVEYTKLHRSGRNGPFDNFELLLYPKLPPSGLRE

SEQ ID NO: 2710 - protein, 540 aa, Unknown
  Description of Unknown: Integrase B2711 sequence
  PTHR30461:SF3,IPR036162,PS51737,IPR011109,PTHR30461, PF00239,G3DSA:1.10.10.2600,IPR006119,SSF53041,cd00338, SM00857,IPR025827,IPR038109,mobidb-lite, PS51736,PF13408,G3DSA:3.40.50.1390,PF07508,Coil
MKKRINTNSAARAVIYARYSSANQRDCSIEQQVEKCRELAAREGVTVIEIYADRAISGKTDRRPNFQRMMKDADLRQFDVVLAWKSNRMGRNMLQAMMNGEQLRSNGIRTIYAEEDFDDTAAGRFALRNMMNVNQFYSENMAEDISRGLMDNASKCLSNGSLPLGYKTGKDQKVVLDEAEAAIVQEIFTRVSCYEPFIDIARDLNRRGIKTKKGAEWGRSSFHTICRNERYRGIYIYRDIRVEGGMPRIVSDELFYKVQEVLKVKKNPQGRRKRSGYEEYLLTGKLYCGHCGSPMTGIAGTSKTGAMHYYYTCQKRRTDHSCDKKAVRRDQIEKAVAIAIQQQLLTDENIQMMADETMAYNARTEIKYRLQSLQQQLYSNETSTANIMKAIEMGIITDTTKARLLALEQEHGQLLAKIDTAKAEMVPINREDFVSLLDIYRTGDVNNKKYLAALFDTFLVRVDLYDDHFKITFDPTGGKMPVDIPIGAEDSPESPGDSPESSDFEASPQDAEKFVLALHNRTKILEHLFGDFFVLVICLG

SEQ ID NO: 2711 - protein, 540 aa, Unknown
  Description of Unknown: Integrase B2712 sequence
  PTHR30461:SF3,SM00857,G3DSA:1.10.10.2600,IPR036162,PF13408, IPR025827,PS51737,G3DSA:3.40.50.1390,IPR006119,IPR038109, PF07508,IPR011109,SSF53041,PTHR30461,Coil, PS51736,cd00338,PF00239
MPRKKKLQEVGGLRLVAYYRYSGGSGQTEQSIEGQRRDCEAYAKLHGMTIQHEYIDRHISGKTDDRVSFQQMIRDSDKGAFDMVICWKTDRFARNRYDSAVYKKRLRDNGVEIIYAAESNISGAEGIIIEGLMESLAEYYSAELAEKMRRGMRESALKCQAINRCRPLGFTTDAGKKFIIDERTAPAVRFIFEHYAAGESAAYIVEQLNEKGYRTSQGNEFNKSSINRIIQNEMYRGVYISKAYDVRIEGGVPAIVDDELWRRAQAMAKLNKQKRAKYSAKADYFLSGKLYCGECGCLMKGISGHSSTNGEVYRYYACSNPKCKKHNVPKEELEGKVIQAIIDNLLQPEAMEALAEAMVAVQETDADKPNAEREAIQQELADVRRRSKNILDAIENGTANPHLTARLDELTERENTLRFQLSTLTDEKPLRFTKEEYLFLLEQFLIDPAERNEDYGRRVVHTFVTSMEVSDSKLLIYFNISEENADKNKNASPSELQKESSTVKRLVHLTHQQTNFRLYVSPMRFFIDGPFVLSKKLFTA

SEQ ID NO: 2712 - protein, 540 aa, Unknown
  Description of Unknown: Integrase B2713 sequence
  PTHR30461:SF3,IPR036162,PS51737,IPR011109,PTHR30461, PF00239,G3DSA:1.10.10.2600,IPR006119,PF14287,SSF53041, IPR025378,SM00857,IPR025827,cd03770,IPR038109, PF13408,G3DSA:3.40.50.1390,PF07508,Coil
MKQPYNTTIYNTALYMRLSRDDELQGESGSIQTQRMMLRQYAAEHSLNVIDEYIDDGWSGTNFDRPDFQRMIDDIEDGKINCVVTKDLSRLGRNYILTGQYTEIYFPSKGVRYIAVNDNVDTINGENELAPFLNILNEMHARQTSKKVKAAMRTRFANGAHYGAYAPLGYVKDPDKKGHLLIDPETRWIIEKIFDLAVHGRGAASITRILVEEKVPTPGWLNFQRYGTFANIYAGAPEEKAYAWTIAQVKSILKEETYIGHSVHNKQTNISFKNKKKVRKPKEEWYRVENTHEAIISEDVFRQVQEQICNRRRRQKNGTTQIFSGLVKCADCGWSLAYGMNSQNKNPYAHYHCSKYGQGLHQCSMHYIRYDVLYAYVLSRLQYWSVLAQQDGDKLLKRLLNASDKERNTARKRQTAELKKAEKRKAEVDTLFAKMYEDWSAGRITEYNFNMLSEKYQGEQRELDAKIERLHEAMEVAAQTAVDAEKWIGLMKQYVNPTELTAELLNTLIEKILVHEAVKSEDGSREQEVEIFYRFIGKIE

SEQ ID NO: 2713 - protein, 540 aa, Unknown
  Description of Unknown: Integrase B2714 sequence
  PTHR30461:SF3,SM00857,G3DSA:1.10.10.2600,IPR036162,PF13408, IPR025827,PS51737,G3DSA:3.40.50.1390,IPR006119,IPR038109, PF07508,IPR011109,SSF53041,PF00239,PTHR30461, PS51736,Coil,cd00338
MKKFPIDLSCLTEEEISQFQEDPYTLYNGDQDVALYLRYSSTGQSDQSIEGQLRDCRTFCKANHYRIVAIYVDRATTARKDVEKRVHLMEMVADSAKQNWEYVIVWKLDRFARNRNDSAIMKMRLRKNGVKVLSATEHLTDSPESIILESVLEGMAEFFSAELSQKVTRGMRESALKCHSVGGHIPLGYKVENHKLVVDPDTAHIVQEAFSLYANGESVADICRKFNSAGYKTAKNTEFNRSSFKAMFRNTRYIGTYTYKDIVIENGIPAIIDKELFETVQRRLSKTATAPARGKAKVDYLLSGKLFCGHCGASMNGESGAGRHGKVYHYYSCYTKKRKLGCDKRPLKKDYIEGIVARDALNLLTDQLIDEIADMAIRQSEQDLINDTHIPQLTAQLSEVEKSITNITTAIEKGIASETLMNRLVQLEHEKKTLNKEIKAEEKFVYRIDRDQIVFWLSQFKYGNIEDEDFRRRLIDLLVNSVTVWDEPDGYKITTAYNLTSCKTKTFRVEKNPAAEEATGFDFRESECTMTSVLIAFEKL

SEQ ID NO: 2714 - protein, 540 aa, Unknown
  Description of Unknown: Integrase B2715 sequence
  PTHR30461:SF3,IPR036162,PS51737,IPR011109,PTHR30461, PF00239,G3DSA:1.10.10.2600,IPR006119,SSF53041,cd00338, SM00857,IPR025827,IPR038109,PS51736,mobidb-lite, PF13408,G3DSA:3.40.50.1390,PF07508,Coil
MRKKANIAPEARAVIYARYSSANQRDCSIEQQVAKCRELAARLGLAVIEVYEDRAISGKTDRRPSFQRMMKDADRGIFDIVLAWKSNRMGRNMLQAMTNEERLRDNGIRTIYAEEDFDDTAAGRFALRNMMNVNQFYVENMAEDISRGLMDNASKCLSNGSLPLGYKPGEDHKVVLDEAEAAVVQEIFTRVACYEPFIDIARDLNRRGIKTKKGAEWGRSSFHTICRNERYRGIYIYRDVRVEGGIPRIISDELFYKVQEVLKVKKNPQGRRKRSGYEEYLLTGKLYCGHCGSPMTGIAGTSKTGAMHYYYTCQKRRTEHSCDKKAVRRDQIEKAVAVAIQQQLLDDETILWMVDQTMAYNAKTEIEYRLQGLQDQLNANKTATANLLKAIEMGIITDTTKARLLELEQEQGCLLAKIDAAKSEMVPIEREDLIAILTRYRKGSLDDKKYLAALFDTFLVRVDLYDDHLKITFDPTGGKTPVDIPIGVEDSPESPGDSPDSADFSAPSQDAEKVRFDSSQLHQNPRTFVRGFFVLVICLG

SEQ ID NO: 2715 - protein, 540 aa, Unknown
  Description of Unknown: Integrase B2716 sequence
  cd00338,SM00857,G3DSA:1.10.10.2600,IPR036162,PF13408, IPR025827,PS51737,G3DSA:3.40.50.1390,IPR006119,IPR038109, PF07508,IPR011109,SSF53041,PTHR30461,PS51736, Coil,PF00239
MNEEKPRVIIIPAKPELAQEAAVKRQLRVAAYCRVSTEEEEQASSYEAQCQYYTDKIMSNKEWTIAGIFADEGISGTSTKKRTEFLRMIRQCRQKKIDLILTKSIQRFARNTLDCINYTRILRQLGIGVLFEKENINSLPPDSEFMITMYGAMAQSESESISGNVKWGKKRAMEAGKVSIAYKNLYAYEKGADGKPAPIPAQAEIVRELYTRYLAGASLRELKDWLEHGKQPTVAGGTAWSITAVKGILTNEKYCGDVLLQKTFSTDVISKKVVKNTGQLPKYLIQNHHEGIVTREQFQAVQAELARRSALRSDSKQAATGRSCYTSKYALSDRLVCGECGKLYRRKTRNIKGNIYHEWRCISRLDYGKRYCHDSPTLREIPLQNAILAAINEAMSEKPVLLDHIKSAMSLELLPVQGQTMSLADIDRRLTQLDAQFQALLAEAIDAEDKESCNAKFAEILAEQTKLKTQKEAILQSSTDAERTCARLVQAEQALENAVPTVTEWSEGTARQLVERVTVLSANEVLVQLKGGKEIHKRLE

SEQ ID NO: 2716 - protein, 540 aa, Unknown
  Description of Unknown: Integrase B2717 sequence
  PTHR30461:SF3,SM00857,G3DSA:1.10.10.2600,IPR036162,PF13408, IPR025827,PS51737,G3DSA:3.40.50.1390,IPR006119,IPR038109, PF07508,IPR011109,SSF53041,PF00239,PTHR30461, PS51736,Coil,cd00338
MKKFPIDLSCLTEEEISQFQEDPYTLYNGDQDVALYLRYSSTGQSDQSIEGQLRDCRAFCKANHYRIVAIYVDRATTAHKDVEKRVHLMEMVADSAKQNWEYVIVWKLDRFARNRNDSAIMKMRLRKNGVKVLSATEHLTDSPESIILESVLEGMAEFFSAELSQKVTRGMRESALKCHSVGGHIPLGYKVENHKLVVNPDTAHIVQEAFSLYANGESVADICRKFNSAGYKTAKNTEFNRSSFKAMFRNTRYIGTYTYKDIVIENGIPAIIDKELFETVQRRLSKTATAPARGKAKVDYLLSGKLFCGHCGASMNGESGAGRHGKVYHYYSCYTKKRKLGCDKRPLKKDYIEGIVARDALNLLTDQLIDEIADMAIRQSEQDLINDTHIPQLTAQLSEVEKSIMNITAAIEKGIASETLMNRLVQLEHEKKTLNKEIKAEEKFVYRIDRDQIVFWLSQFKYGNIEDEDFRRRLIDLLVNSVTVWDEPDGYKITTAYNLTSCKTKTFRVEKNPAAEEATGFDFGESECTMTSVLIAFEKL

SEQ ID NO: 2717 - protein, 540 aa, Unknown
  Description of Unknown: Integrase B2718 sequence
  PTHR30461:SF3,SM00857,G3DSA:1.10.10.2600,IPR036162,PF13408, IPR025827,PS51737,G3DSA:3.40.50.1390,IPR006119,IPR038109, PF07508,IPR011109,SSF53041,PF00239,PTHR30461, PS51736,Coil,cd00338
MARKKNTAAGLDAVIYARYSSHNQREVSIEQQIAECTKHAAALGLRIVGTYEDRAISGKTDNRPRFQQMMRDAEKGKFQAVVAWKSNRIGRNMLQAMVNEAKLDDYGVKVFYAEEDFDDTAAGRFALRNMMNVNQFYSENMAEDITRGLYDNANKCMANGRQPLGYKRGVDGKVMLDEPAAAVVREIFTRVAAGDLFVDIARDLNEKGIKTSKGAVWNKGSFQSICQNERYKGIYIYGNVRIVDGIPRIVSDELWYKVQEAMRVKKNPVGTRHRVGAEDYLLTGKLRCGHCGSYMTGVSGTSRNGELHYYYTCQKRRTEHACNKKNVRRDVIEPAIAQAIKMYCLTDDVIEWMADQTVQYWEKHDNDLQIEALEQQLAENKKATSNMLKAIEMGIITEATRSRMVELETENSKLTAQLSAAKRDVVKINREDLIDELHILRGKDIHDREVQAELFKDFLVAAYIYDDNRLKLVFSFMGKDNSIEIPLETGEDPPDGEDSPDAKMFVLTPDCSTNEEQNEHEVTIQMVGNVFVLFCEIPSV

SEQ ID NO: 2718 - protein, 540 aa, Unknown
  Description of Unknown: Integrase B2719 sequence
  PTHR30461:SF3,SM00857,G3DSA:1.10.10.2600,IPR036162,PF13408, IPR025827,G3DSA:3.40.50.1390,PS51737,IPR006119,IPR038109, PF07508,SSF53041,IPR011109,PTHR30461,Coil, PS51736,cd00338,PF00239
MENSASVKPKIRLIPAKQRQELVGRATPNGELAKLRIAPYARVSTDHEEQESSYEAQVKHFKQLIESHTDWELVDIYADPGLSGKNIKRPNFQRLMNDCECGKVDMIITKSVSRFARNTLDCVKTVRKLKEMGIKVYFEKENLDTMQESSEFVLTIMASLAEEESRSISNNIRWSVKKRFENGEVILNTAHFLGYTKDENGTLKIVPEQAITVRRIYGEFLDGYSLKEIADGLMRDGILSPSGKSRWHPTTIKSILQNEKYMGDSHLQKTYLPDFLSPRRIKNEGQADSYYVEDSHAAIISKEMFDLVQQEFKGRNELRSSNRTGHGKYSGKYAFSGMIVCGECGETYRRHQQYNAYKKYYIWVCKRHENKGKDYCSAKPISESALERAFIRALNGLIENREKILDKLQKAVVGQISDSCEDDIAQIDKEIQGLQNGIVDLLMDKNKGRLTDKQYERETQLLKFQIDELNLKKEEILNEQGKIQLAEYRAEVVTDLLKTEKILDEFDKTIFKSLVHKIKVIGDKEIEIEFECGIKVTEKL

SEQ ID NO: 2719 - protein, 540 aa, Unknown
  Description of Unknown: Integrase B2720 sequence
  PTHR30461:SF3,cd00338,SM00857,G3DSA:1.10.10.2600,IPR036162, PF13408,IPR025827,G3DSA:3.40.50.1390,PS51737,IPR006119, IPR038109,PF07508,IPR011109,SSF53041,PTHR30461, PS51736,Coil,PF00239
MAKRLHGALICARYSTDIQNPDSIEVQVAKCTEWCHTHNIPVLGVYADEATSGMKDTRPRYAAMMRDLRDGVGDMVVIYDQSRMFRKMTSWFSFRDQLTQMGVDVVSVTQPMIGKDLRDPTNFLTEGSMALFNQIWALQSRQKVMEKMRFMAKNGQHTGGKPALGYEVVDGRLAICEAEAKIVRRIFEEYGSGKSYREIVAGLNADGIKTKRGSAFGANSLHDLLKNEKYIGTLVYGQRPYREDGTRNTHAAAADSIRIENAIPAIIDKELFAKVQDKMAANKRQQGGRPPTKRDYPLKGKVFCAECKSAMTISTSQKIYDYYKCSGKKRRHDCDGVNISVDVLERTVANAVRQVLGSPKNVERLITILRDQSGEIQAQAVDALRQLIAREREISRKLDNATDAILGGLSSPTLLARVKDLEQEKTEIDRQMRELKATVDASAIPETRLREIIDEISGDNPAGNAALLAIVCRVEVAKDAITIWTMLDTHPDGTFDWREEGVLITPGTTSGVPNRTNTNPTEVFFICGVFGICVPRFSRW

SEQ ID NO: 2720 - protein, 540 aa, Unknown
  Description of Unknown: Integrase B2721 sequence
  PTHR30461:SF3,cd00338,SM00857,G3DSA:1.10.10.2600,IPR036162, PF13408,IPR025827,PS51737,G3DSA:3.40.50.1390,IPR006119, IPR038109,PF07508,IPR011109,SSF53041,PTHR30461, PS51736,Coil,PF00239
MENFASTKPKIRVIPAKTRQELVSTSVGKRQEKLRVAAYARVSTEHEEQESSYEAQVKHFTKLIAERQDWEMVKIYADPGLSGKNIKRPEFLKLMKAREDGLVDKIITKSVSRFARNTIDCVESVRKLRNMGIGVYFEKENLDTLHENSEFVLTIMASLAEEESRSMSNNIRWSVRKKFEQGKVILNTARFLGYKREKNSNILEIVPEEAITVRRIYREFLAGASLKDIADALERDSIPSPSGQSKWHVSTIRSILTNEKYQGDCHLQKTYLPDFLSPRRVENVGQADSWYVEDSHAAIITREQFTLVQEEFKRRKSLRASTETGNGKFSGKYAFSGMIVCGECGETYRRHQQYNQYKVYPTWACKVHENTGAKHCTAKPIKEKALEDAVVRAINKLLDNKEQFLTELKATVLEVMLDDSNDPIVRIDTEIAELQNDITVALEHMQKAEITVEEYKTLVDGYKRKIDVLNLDKEEIIFENGEMQLLEYRIAEVEDLLGNGRILEEFDKNVFKGLVQRIIVLSQKEIQIDFKCGITVKETL

SEQ ID NO: 2721 - protein, 540 aa, Unknown
  Description of Unknown: Integrase B2722 sequence
  PTHR30461:SF3,SM00857,G3DSA:1.10.10.2600,IPR036162,PF13408, IPR025827,G3DSA:3.40.50.1390,PS51737,IPR006119,IPR038109, PF07508,IPR011109,SSF53041,PTHR30461,Coil, PS51736,cd00338,PF00239
MLIKRLGGGDSLSSVDKIAVVYARYSSHGQTEQSIEGQIAAAQKYAEQHGYTIIHVYADRAMTGRNDDREQFQKMLSDTAMHQFGVILLWKIDRFGRNREEIAFNRYRCKKNGVRVERVAEDVPDGPEGVILDSVLEGMAEYYSLQLAQNVRRGQRESAKKSMSIGGNKMLGYIVNPETKRYESDPKTALYVTEIFKRYANGETISEIVTWLNAQGIRTTRGSEFTVNSLHRLLKNEKYTGVYIFHDIRNEGGMPALTDRATFDKVQEMLKVNRRAPVRVWSKTEYLLTDKLFCGHCGAMMVGESGHGRNGTKHSYYTCLNRKKKKSCDKKPVRQDVIEPLVLRAIGKLLENPATLENIADQVWAAYERSDTSGDTIKALDKQIADVDRALSNVMKAIEMGIINEMTKTRMDELTNQKQALSQSRAEAGLTGGFKLTRDMILFFLQEMAALDMADRDSQKRLIKTFVNAIYLYDDHFDIAFNYTDNGKVVVRMQEINDAVRGEVFGCCAQSPTIVRASEPLITIVVGCSVFVFTVKMPEA

SEQ ID NO: 2722 - protein, 540 aa, Unknown
  Description of Unknown: Integrase B2723 sequence
  PTHR30461:SF3,IPR036162,PS51737,IPR011109,PTHR30461, PF00239,G3DSA:1.10.10.2600,IPR006119,SSF53041,cd00338, SM00857,IPR025827,IPR038109,mobidb-lite,PS51736, PF13408,G3DSA:3.40.50.1390,PF07508,Coil
MRKKSNLNAATRAVIYARYSSANQRDCSIEQQVAKCRELAARLGLTVIDVYEDRAISGKTDRRPNFQRMMKDADLRQFDVVLAWKSNRMGRNMLQAMTNEERLRDNGIRTVYAEEDFDDTAAGRFALRNMMNVNQFYSENMAEDITRGLMDNAAKCLSNGSLPLGYKPGDDRHVVLDEAEAAIVQEIFTRVSCYEPFIDIARDLNRRGIKTKKGSEWGRSSFHTICRNERYRGIYIYRDVRIEGGMPRIVSDELFYKVQEVLKVKKNPQGRRKRSGYEEYLLTGKLFCGHCGSPMTGIAGTSKTGAMHYYYTCQKRRTDHSCDKKAVRRDQIERAVGVAIQQQLLTDENIQMMADKLMEYNARTETKYRLQGLQDQLNANKTATANILKAIEMGIITDATKARLLELEKEQGQLLVKIDEAKAEMVPISRNDFVKLLYIYKEGEPTDKKYLAALFDNFLVRVDLYDDHLKITFDPTGGRQPIDMPIGAEESPESPGDSSESSDFEASSQDAEKFVLALHNCTKILERLFGDFFVLVICLG

SEQ ID NO: 2723 - protein, 540 aa, Unknown
  Description of Unknown: Integrase B2724 sequence
  PTHR30461:SF3,IPR036162,PS51737,IPR011109,PTHR30461, PF00239,G3DSA:1.10.10.2600,IPR006119,PF14287,SSF53041, IPR025378,SM00857,IPR025827,cd03770,IPR038109, PS51736,PF13408,G3DSA:3.40.50.1390,PF07508,Coil
MKQPYNTTVYNTALYLRLSRDDELQGESGSIQTQRMMLRQYAAEHGLTVVDEYIDDGWSGTNFDRPSFQRMIDDIEDGKINCVVTKDLSRLGRNYILTGQYTEIYFPSKGVRYIAINDNVDTLNGESELAPFLNILNEMHARQTSKKVKAAMRTRFANGAHYGAYAPLGYIKDPDKTGHLLVDTETRWIIEKIFDLAVHGRGAASITRILVEAKVPTPGWLNFQRYGTFANIYAGAPEEKAYAWTIAQVKSILKEETYIGHSVHNKQSNISFKNKKKVRKPKEEWYRVENTHEAIISEDVFRQVQEQIASRRRRQKDGTTQIFSGLVKCADCGWSLAYGENKQNKTPYGYYHCSKNGQGLRQCSMHYIRYDVLYAYVLSRLQYWSQQAQQDEDKLLKRLLNASDKERSSAREKQASELKKAEKRKAEVDGLFAKMYEDWAAGRITEYNFNMLSEKYQGEQKELDEKIQQLHEAMEAVAQTAVDAEKWVGLMRQYVNPTELTAELLNTLIEKIFVHEAVKGEDGSREQEVEIFYRFIGKID

SEQ ID NO: 2724 - protein, 540 aa, Unknown
  Description of Unknown: Integrase B2725 sequence
  PTHR30461:SF3,IPR036162,PS51737,IPR011109,PTHR30461, PF00239,G3DSA:1.10.10.2600,IPR006119,PF14287,SSF53041, IPR025378,SM00857,IPR025827,cd03770,IPR038109, PS51736,PF13408,G3DSA:3.40.50.1390,PF07508,Coil
MKQPYNTTIYNTALYLRLSRDDELQGESGSIQTQRMMLRQYAAEHGLTVVDEYIDDGWSGTNFERPSFQRMIDDIEDGKINCVVTKDLSRLGRNYILTGQYTEIYFPSKGVRYIAINDNVDTINGESELAPFLNILNEMHARQTSKKVKAAMHTRFANGAHYGAYAPLGYVKDPDKKGHLLIDPETRWIVEKIFDLAVHGRGAASITRILVEEKVPTPGWLNYERYGTFANIYAGAPAEKAYAWTIAQVKSILKEETYIGHSVHNKQSNISFKNKKKVRKPQEEWYRVENTHEAIISEEVFQKVQELIASRRRRQKNGTTQIFSGLVKCADCGWSLAYGVNSQNKNPYAHYHCSKYGQGLRQCSMHYIRYDVLYAYVLARLQYWSMMVQKDEDKLLKRLLNASDRERNSAKKKQAAELKKAEKRKAEVDGLFAKMYEDWSAGRITEYNFNMLSEKYQNEQKELETKIRQLHETMEAAVQTAADAEKWIALMKQYVNPVELTAELLNTLIEKITVHEAVKGEDGSREQEVEIYYRFIGKID

SEQ ID NO: 2725 - protein, 540 aa, Unknown
  Description of Unknown: Integrase B2726 sequence
  PTHR30461:SF3,IPR036162,PS51737,IPR011109,PTHR30461, PF00239,G3DSA:1.10.10.2600,IPR006119,SSF53041,cd00338, SM00857,IPR025827,IPR038109,mobidb-lite,PS51736, PF13408,G3DSA:3.40.50.1390,PF07508,Coil
MRKKSNLNAATRAVIYARYSSANQRDCSIEQQVAKCRELAARLGLTVIDVYEDRAISGKTDRRPNFQRMMKDADLRQFDVVLAWKSNRMGRNMLQAMTNEERLRDNGIRTVYAEEDFDDTAAGRFALRNMMNVNQFYSENMAEDITRGLMDNAAKCLSNGSLPLGYKPGDDRHVVLDETEASIVQEIFTRVSCYEPFIDIARDLNRRGIKTKKGSEWGRSSFHTICRNERYRGIYIYRDVRIEGGMPRIVSDELFYKVQEVLKVKKNPQGRRKRSGYEEYLLTGKLFCGHCGSPMTGIAGTSKTGAMHYYYTCQKRRTDHSCDKKAVRRDQIERAVGVAIQQQLLTDENIQMMADKLMEYNARTETKYRLQGLQDQLNANKTATANILKAIEMGIITDATKARLLELEKEQGQLLVKIDEAKAEMVPISRNDFVKLLYIYKEGEPTDKKYLAALFDNFLVRVDLYDDHLKITFDPTGGRQPIDMPIGAEESPESPGDSSESSDFEASSQDAEKFVLALHNCTKILERLFGDFFVLVICLG

SEQ ID NO: 2726 - protein, 540 aa, Unknown
  Description of Unknown: Integrase B2727 sequence
  PTHR30461:SF3,cd00338,SM00857,G3DSA:1.10.10.2600,IPR036162, PF13408,IPR025827,G3DSA:3.40.50.1390,PS51737,IPR006119, IPR038109,PF07508,IPR011109,SSF53041,PTHR30461, PS51736,Coil,PF00239
MKKAVAYARFSSDMQREESIDAQVRAIKYFANQYGYDLAHVYADRAQSGRSDARVEFKQMISDSASGAFDAVIVHKLDRFSRSSSDAIFYERILNHNGVQLVSVIERLDSSPEGQLMKMVILGMNQMYSQNLAREVMKGLKENAYQCRHTGGTPPLGYDVIDGKYVINEFEAQAVRMIFQMYAAGSGYGEIIRAMYENGFKTKRGNRFGKNSLYDLLRNEKYTGVYIFNKSASADIRGKYNRHALKPADEIIRVEDGIPQIVDKNLFWQVQKKMNDNKHKNARHKAKVSYLLSGKLYCGHCGHAMTGEMHRYRDREYGYYVCPSQKNKKGCNKKSVRKEWIEQAVVDDINNILFKPERLQSIAENIYNASHSGKPDERLVELKKQVTEIDRKIGNLTRVLADGLDSDSVRAAVVELENERRTLSAKIYELDLVPDAQRMSVAEIKNSISKMADFSKMDDSGKKRFIELFVQRIYLYDSDDGFRIRTVLSVTNPVDSLDISDFPDFSNKTGSVPSPPVVSENNIQYFPLGIVCLDSKRPFH

SEQ ID NO: 2727 - protein, 540 aa, Unknown
  Description of Unknown: Integrase B2728 sequence
  cd03768,SM00857,G3DSA:1.10.10.2600,IPR036162,PF13408, PS51737,G3DSA:3.40.50.1390,IPR025827,IPR006119,IPR038109, PF07508,IPR011109,SSF53041,PTHR30461,PS51736, PF00239
MEEVKCAIYTRKSTDEGLEKEFNTLEAQREAGENYIKSQKHQGWVLVEEHYDDGGFSGGNMKRPALQRLLDDIKCGKINMIVVYKIDRLTRSLVDFSKMVDIFDKYHCSFVSVTQNFNTSDSMGRLTLNMLLSFAQFEREIGSERVRDKTAASRKKGMWTGGVVPYGYRSINKKLEIEPQEADVVKFMFEMYLKYKSVMSVCKLLTENGYRDFRRDALLRMLKNPTYMGKIKYKDELYDGQHKAIISPKIFESVQYILKNKEKSERTCLFNKNEVGILRGLLTCGCCHSPMTPASCQSHGVRRFYYTSTKAKYYGYHHCSNGAVPVQLMDECILKIVTPLISDITVLNGLINKISTDKSAEIYKAMRHPEKIIEKMVERDKLQLMKLLIKGIVVNYDTIEITWSKVALSLLTSNLLAQTQDHTTIIDYPFKRNKGALILSLPEDIAQNVNYSTELIMALCKAFKYQKIISTGKQSILELAAQENIDSGYLGRLIRLTCLAPDIIKRILAGTQPAELYLQRLIREDIPPIWAEQRKLYGVI

SEQ ID NO: 2728 - protein, 540 aa, Unknown
  Description of Unknown: Integrase B2729 sequence
  SM00857,G3DSA:1.10.10.2600,IPR036162,PF13408,IPR025827, G3DSA:3.40.50.1390,PS51737,IPR006119,IPR038109,PF07508, IPR011109,SSF53041,PF00239,PTHR30461,PS51736, Coil,cd00338
MKKFPIDLSCLTEEEISQFQEDPYTLYNGDQDVALYLRYSSTGQSDQSIEGQLRDCRTFCKANHYRIVAIYVDRATTARKDVEKRVHLMEMVADSAKRNWEYVIVWKLDRFARNRNDSAIMKMRLRKNGVKVLSATEHLTDSPESIILESVLEGMAEFFSAELSQKVTRGMRESALKCHSVGGHIPLGYKVENHKLVVDPDTAHIVQEAFSLYANGESVADICRKFNSAGYKTAKNTEFNRSSFKAMFRNTRYIGTYTYKDIVIENGIPAIIDKELFETVQRRLSKTATAPARGKAKVDYLLSGKLFCGHCGASMNGESGAGRHGKVYHYYSCYTKKRKLGCDKRPLKKDYIEGIVARDALNLLTDQLIDEIADMAIRQSEQDLINDTHIPQLTTQLSEVEKSITNITAAIEKGIVSETLMNRLVQLEHEKKTLNKEIKAEEKFVYRIDRDQIVFWLSQFKYGNVEDEDFRRRLIDLLVNSVTVWDELDGYKITTAYNLTSCKAKTFRVEKNPAAEEATGFDFGESKCTMTSVLIAFEKL

SEQ ID NO: 2729 - protein, 540 aa, Unknown
  Description of Unknown: Integrase B2730 sequence
  cd00338,SM00857,G3DSA:1.10.10.2600,IPR036162,PS51737, G3DSA:3.40.50.1390,IPR006119,IPR038109,PF07508,SSF53041, IPR011109,PTHR30461,PS51736,Coil,PF00239
MRNYPPLSSAEEYCMYLRKSRVDIEAEAHGEGETLARHEKLLLEVARRDKLNVTQIYREVVSGETIASRPVMQHLLQEVEQGRWAGVLVVEVERLARGDTIDQGIMAQTFKYSGTKIVTPLKVYDPNNEYDEEYFEFGLFMSRREYKTINRRLQRGRLAAAKEGKWVSGVAPYGYEKIRVPNDKGWTLRPVEAEADIVRFIFRLYTSGEEGESGEVKKLGTYSLAVRLDRMGVTPPGGAPCWSSTTIQSILENPVYIGKIRWNVHKTKKRVIGSSVRVEHYTAPEEEQVFVEGLHPAIVDEAVFLAAQELISRKGPPPVQAANTVTNPLAGVLVCGKCGRSIVLRPNAYGGLLMCPNRACNNVGSKYDIVEERLLQALSQWLDDYRLEWSDRPPSEEQALMELKAKSIRKAQSEVETLQRQLERTHDLLEQGVYDTEMFLSRSRSITGRINAAQDSIASLTSELAEEEARSASRQNIVPKVEKLLEVYSALPSAQAKNDMLKGVLEKVEYTKLHRSGRNGPFDNFELLLYPKLPPSGLGE

SEQ ID NO: 2730 - protein, 540 aa, Unknown
  Description of Unknown: Integrase B2731 sequence
  PTHR30461:SF3,SM00857,G3DSA:1.10.10.2600,IPR036162,PF13408, PS51737,IPR025827,G3DSA:3.40.50.1390,IPR006119,IPR038109, PF07508,IPR011109,SSF53041,PF00239, PTHR30461,PS51736,Coil,cd00338
MKKFPIDLSCLTEEEISQFQEDPYTLYNGDQDVALYLRYSSTGQSDQSIEGQLRDCRAFCKANHYRIVAIYVDRATTAHKDVEKRVHLMEMVADSAKQNWEYVIVWKLDRFARNRNDSAIMKMRLRKNGVKVLSATEHLTDSPESIILESVLEGMAEFFSAELSQKVTRGMRESALKCHSVGGHIPLGYKVENHKLVVDPDTAHIVQEAFSLYANGESVADICRKFNSAGYKTAKNTEFNRSSFKAMFRNTRYIGTYTYKDIVIENGIPAIIDKELFETVQRRLSKTAAAPARGKAKVDYLLSGKLFCGHCGASMNGESGAGRHGKVYHYYSCYTKKRKLGCDKRPLKKDYIEGIVARDALNLLTDQLIDEIADMAIRQSEQDLINDTHIPQLTAQLSEVEKSIMNITAAIEKGIASETLMNRLVQLEHEKKTLNKEIKAEEKFVYRIDRDQIVFWLSQFKYGNIEDENFRRRLIDLLVNSVTVWDEPDGYKITTAYNLTSCKTKTFRVDKNPAAEEATGFDFGESECTMTSVLIAFEKL

SEQ ID NO: 2731 - protein, 540 aa, Unknown
  Description of Unknown: Integrase B2732 sequence
  SM00857,G3DSA:1.10.10.2600,IPR036162,PF13408,PS51737, G3DSA:3.40.50.1390,IPR025827,IPR006119,IPR038109,PF07508, IPR011109,SSF53041,PTHR30461,Coil,PS51736, cd00338,PF00239
MVKNRAAIYARFSSHNQRSESIEIQVENSRAFCEREGLQVVHEYFDYAQTGRNIDRAEFQRMMNDARHGLFDYVVIYKVTRIMRNRDEMSLARIMLRKAGVEILYAGEDISSGSSGVLQLGMLEVLAEYESALDSERIRDGIQKNAQRCMANGRTLYGWDIVEGRYVINEREASVLRRMKNMLFAGSSVADIVRAVSAERSKRGAKFNQDTVTKLLKRVQNAGVYKYAGHEVPDGMPAIWSQVEQDMIDNILGDRHKPRRKINSTLEFPLSGKLYCAKCGAPMAGTSGTSCTGATYHYYKCRKCRRTVRRDLVEDVVCDMTLQAVAREDVRRRIASGMVAFQAEQPKEQSRSYAIKKELKRIDRTFERIWQAIEDGIAPPGGRERTEELKQRKSELEAELRIAEREEAFNIGVDELMLWLDDAAENLTPEVILGTFVRFAEIDGKTLNVYFAFDHYGDDFRPKQKKAEPCPEGHSSTNSLLVEARRIELRSILNCPQGATGLVSDRASERIGSQTNVAAPSRFGLSRGHTDYVPRGIPLK

SEQ ID NO: 2732 - protein, 540 aa, Unknown
  Description of Unknown: Integrase B2733 sequence
  PTHR30461:SF3,SM00857,G3DSA:1.10.10.2600,IPR036162,PF13408, IPR025827,G3DSA:3.40.50.1390,PS51737,IPR006119,IPR038109, PF07508,IPR011109,SSF53041,PTHR30461,Coil, PS51736,cd00338,PF00239
MNIYYVREKLRNCSIYDIELNVAYYARVSTEKVEQQASIKHQEEHFEELIHSNNRWKFAGSYIDDGISGMHADKREEFQRMLRDAKLGKIDMIITKEISRFARNTLDSIQYTRELLSYGVCVWFQNDGINTIDDDSEFRLTIMAGVAQDEIRKLSSRVKFGHAQSIKNGVVLGHRMYGYSNNQGKLELIPEEADMVRMIFEDYASGISTPRIEKKLWDMGYRSLKGGKINRDVIKNIIRNPKYKGYYCGGKVKVVDMFTKKQEFLPQSEWIMFKDDGSRVPQIIDETTWEKANAYLRERGEAIKSRRTSFKNENIFTGKLFCANDGAPYWMKQHYIRGKEDVRWVCSYKIKNGAASCDSFGLAESELKEVIADLINESSENIDNILKEYFEILQSTIKNIPDNKSEISRLEKQIETLKQKREKILEYNLDGKISDDEFISRNKEYVKQIKQTESHIRELQNIKSPEPVEIQLSAIKEQLEKFKGVTPKDINRQIVNELFEKITVEPLAATCATLTFQLRSGSLEKWGFPLRCSDDMILTI

SEQ ID NO: 2733 - protein, 540 aa, Unknown
  Description of Unknown: Integrase B2734 sequence
  PTHR30461:SF3,SM00857,G3DSA:1.10.10.2600,IPR036162,PF13408, PS51737,IPR025827,G3DSA:3.40.50.1390,IPR006119,IPR038109, PF07508,IPR011109,SSF53041,PF00239,PTHR30461, PS51736,Coil,cd00338
MRVVLYMRYSSDRQTEQSIEGQNRVCTAFCEQQGYEIVDRYIDRATSAFKDTDKRTEFQRMIRDSEKQLWEGIVVYKLDRFARNRYDSATYKARLKKNGVRVISATENISDNPEGVILEAVLEGMAEFYSKELSQKITRGMFESANKCHSIGGHIPLGYKIENKKLVIDEAGAAIVREAFDLYANGATVAEICETFNTKGYRTAKNAEFNKNSFRSMFKNERYIGIYKYKDLRIEGGVPAIVDKDTFAIVQKKLSKNAEAPSRGKAKIDYLLSQKLFCGHCGSLMTGESGTGKGGTTYFYYTCGKRKREHTCDKKPLKKDFIERAVVEDALTLLTPETIDELADIAVNESIREMEENSIIPALKDQLHDTERSINNLVKMVEKGVESDTIADRLKELEKEKRAIEKRLVVAQDDYVLLEKDHIVWWLSEFCNGDIEDEEFRRHIIDLLVNSVTVWDEPDGWYKITSVYNLTSNKTKTFRCSDLSGQAPPSSCTKKDAAAKSLEVSTVSPHRYTMCHGGTAGTGKSKTQAHAFEFASCFFT

SEQ ID NO: 2734 - protein, 540 aa, Unknown
  Description of Unknown: Integrase B2735 sequence
  PTHR30461:SF3,SM00857,G3DSA:1.10.10.2600,IPR036162,PF13408, IPR025827,G3DSA:3.40.50.1390,PS51737,IPR006119,IPR038109, PF07508,IPR011109,SSF53041,PF00239,PTHR30461, PS51736,Coil,cd00338
MARKKNIAAGLDAVIYARYSSHNQREVSIEQQIAECTKHAAALGLRIVGTYEDRAISGKTDNRPRFQQMMRDAEKGKFQAVVAWKSNRIGRNMLQAMVNEAKLDDYGVKVFYAEEDFDDTAAGRFALRNMMNVNQFYSENMAEDITRGLYDNANKCMANGRKPLGYKRGADGKVMLDEPAAAVVREIFNRVAAGDLFVDIARDLNAKGIKTSKGATWNKGSFQSICQNERYKGIYIYGNVRIVDGIPRIVSDELWYKVQEAMRMKKNPVGTRHRVGAEDYLLTGKLRCGHCGSYMTGVSGTSRNGELHYYYTCQKRRTEHACNKKNVRRDVIEPAIAQAIKMYCLTDDVIEWVANRTVEYWEKHDNDLHIEALEQQLEENKKATSNMLKAIEMGIITDATRSRMIELETEQSKLAVQLNAAKADVVKIDRDDLIDELQIFRDMDVNNRSVQAELFKDFLVAAYIYDDNRLKLVFSFMGKDNSVEIPLETGEDPPDGGDSPDAKMFVLTPDCSTNEEQNEHEVTIQMVGNVFVLFCEIPSV

SEQ ID NO: 2735 - protein, 540 aa, Unknown
  Description of Unknown: Integrase B2736 sequence
  PTHR30461:SF3,SM00857,G3DSA:1.10.10.2600,IPR036162,PF13408, IPR025827,G3DSA:3.40.50.1390,PS51737,IPR006119,IPR038109, PF07508,SSF53041,IPR011109,PTHR30461,Coil, PS51736,cd00338,PF00239
MLFSLNKGGDSLSSVDKIAVVYARYSSHGQTEQSIEGQIAAAQKYAEQHGYTIIHIYADRAMTGRNDDREQFQKMLSDTAMHQFGVILLWKIDRFGRNREEIAFNRYRCKKNGVRVERVAEDVPDGPEGVILDSVLEGMAEYYSLQLAQNVRRGQRESAKKSMSIGGNKMLGYIVNPETKRYESDPKTAPYVTEIFKRYANGETISEIVAWLNAQGVRTTRGSEFTVNSLHRLLKNEKYTGVYIFHDIRNEGGMPALTDRATFDKVQEMLKVNRRAPARVWSKTEYLLTDKLFCGHCGAMMVGESGHGRNGIKHSYYTCLNRKKKKSCDKKPVRQDVIEPLVLRAIGKLLENPATLENIADQVWAAYERSDTSGDAIKALDKQIADVDRALSNVMKAIEMGIINEMTKTRMDELTNQKQALSQSRAEAGLTGGFKLTRDMILFFLQEMAALDVADCDSQKRLIKTFVNAIYLYDDHFDIAFNYTDNGNVVVRMQEINDAASGELFGCCAQSPTNVQASEPLITIVVSCSVFVFSVKMPEA

SEQ ID NO: 2736 - protein, 540 aa, Unknown
  Description of Unknown: Integrase B2737 sequence
  PTHR30461:SF3,SM00857,G3DSA:1.10.10.2600,IPR036162,PF13408, PS51737,IPR025827,G3DSA:3.40.50.1390,IPR006119,IPR038109, PF07508,IPR011109,SSF53041,PF00239,PTHR30461, PS51736,Coil,cd00338
MDNVVIYARYSSDKQTEQSIEGQLRYCYQYAEQHDYRVVGEYIDRAISGTSDRRPQFQQMISDAEKKQFKYVLVWKLDRFARNRYDSAIYKTKLKKSGVKVLSVTEGIGDGDESIILEAVLEAMAETYSRQLSQNVKRGMHESALKGLSTGGTVPYGYKLRDGRLVIDEPAAKNVKFIFEQYAAGVGKKAIADALNAKGCKTATGRDFSVVSLAHIFKNKKYIGIYHYNDEIEIEGGCPAIVDKALFDRCTLRAEQNRRAPAKGKGEVDYLLTGKLFCGLCGSPMVGDSGKGKTGAVYYYYTCANRKKNGGVKACPKKREDKGFIEWYVVEQTLKYVLDPERIALIAERVVAAYNKDFSADAVADLERQLAAAGREMDKLADSLINAASPRLVESINKKAEQLDAQIAELENELSKLRICAAARLTVEQVTAWLKSFCNGDPLDLEFRRRIIDVLVNAVYLYDDKVFIFFNVKNGKQISYIDFCADFADDPPEGESSTFNACGSPKAAFRGCFFLCVFIAEVLFTAAILCKFRQITVYIY

SEQ ID NO: 2737 - protein, 540 aa, Unknown
  Description of Unknown: Integrase B2738 sequence
  PTHR30461:SF3,cd00338,SM00857,G3DSA:1.10.10.2600,IPR036162, PF13408,PS51737,G3DSA:3.40.50.1390,IPR025827,IPR006119, IPR038109,PF07508,IPR011109,SSF53041,PTHR30461, PS51736,Coil,PF00239
MSVDIKWNVPQKGKEGDLAAVYARYSSHSQGEQSIEGQLAEAQKYAAAHGYTIVHEYVDRAKSGRTDNREEFQRMLKDTAKKQFNVIILWKVDRFGRNREEIAINKMKCRKNGVRVEYVAETIPNTPEGVILESVLEGFAEYYSLQLSQNIRRGIAESAEKCQVTGGNRPLGYKTGPDKKFEIDEDTAPTVRLIFKMYADGATVTEIVAKLNELGLRTLRGGKFTHNSLHTILKNEKYIGIYNNHGKHIEGGVPRLIDDELFYKVQEMLKVNKRAPAKTWARADYLLADKAFCGKCGAPMFGESGTSKTGARHNYYICSHKKRFKTCDKKAVRQADVEDLVIKATCDLLADTELLDFIIENTWQYYLAQDNSQEELRNLTRQLEQTDLAIKNLIRAIEAGILTDETKSRMDELTTQKAELKAAIADRELARGFHLQREHIAFYLYDLRNADRTDREVQKRLIQTFVNSVFVFDDCVKLTFNFSGNKSVVTLKMLQAAEAGEVFGRYASCSTKSDRVLDTIPVKNPIVLSCLCFSLCLLAF

SEQ ID NO: 2738 - protein, 540 aa, Unknown
  Description of Unknown: Integrase B2739 sequence
  PTHR30461:SF3,SM00857,G3DSA:1.10.10.2600,IPR036162,PF13408, PS51737,G3DSA:3.40.50.1390,IPR025827,IPR006119,IPR038109, PF07508,IPR011109,SSF53041,PF00239,PTHR30461, PS51736,Coil,cd00338
MARKKNIAAGLDAVIYARYSSHNQREVSIEQQIAECTKHAAALGLRIVGTYEDRAISGKTDNRPRFQQMMRDAEKGKFQAVVAWKSNRIGRNMLQAMVNEAKLDDYGVKVFYAEEDFDDTAAGRFALRNMMNVNQFYSENMAEDITRGLYDNANKCMANGRQPLGYKRGADGKVMLDEPAAAVVREIFTRVAAGDLFVDIARDLNAKGIKTSKGAAWNKGSFQSICQNERYKGIYIYGNVRIVDGIPRIVSDELWYKVQEAMRMKKNPVGTRHRVGAEDYLLTGKLRCGHCGSYMTGVSGTSRNGELHYYYTCQKRRTEHACSKKNVRRDVIEPAIAQAIKMYCLTDDVIEWMADQTVQYWEKHDNDLQIEALEQQLAENKKATSNMLKAIEMGIITEATRSRMVELETENSKLTAQLSAAKRDVVKINREDLIDELHILRSKDIHDREVQAELFKDFLVAAYIYDDNRLKLVFSFMGKDNSVEIPLETGEDPPDGGDSPDAKMFVLTPDCSTNEEQNEHEVTIQMVGNVFVLFCEIPSV

SEQ ID NO: 2739 - protein, 540 aa, Unknown
  Description of Unknown: Integrase B2740 sequence
  PTHR30461:SF3,IPR036162,PS51737,IPR011109,PTHR30461, PF00239,G3DSA:1.10.10.2600,PF14287,IPR006119,SSF53041, IPR025378,SM00857,IPR025827,cd03770,IPR038109, PS51736,PF13408,G3DSA:3.40.50.1390,PF07508,Coil
MKQPYNTTTYLTALYLRLSRDDELQGESGSIQTQRMMLRQYAAEHGLTVMDEYIDDGWSGTNFDRPGFQRMIDDIEDGKINCVVTKDLSRLGRNYILTGQYTEIYFPSKGVRYIAINDNVDTLNGESELAPFLNILNEMHARQTSKKVKAAMHTRFANGAHYGAYAPLGYIKDPDKTGHLIVDEENRWIIEKIFDMAAHGIGAGKITRLLIEEKVPTAGWINFQRDGTFAHIYAGAPEEKAYAWTIAQVKSILKEESYIGHSIHNKQSTISFKNKKKIRKPKDEWFRVENTHEAIISEELFRQVQEQIASRRRPTKDGKTQLFAGLVKCADCGWSLAYGVNKQNSVPYAFYHCSKNGQGLHQCSMHYIRYDVLYAYVLSRLQYWSQLAQKSEEKLLKHVLNASDKQRNSAKKKQTSELSKAEKRKAEVNGLFAKMYEDWSSGRITEYNFNMLSEKYQKEQEKLDKRIQELRTEIDAAARTEADAEKWVALVKQYVNITELDAGLLNSLIEKILVHEAVKKEDGTREQLVEIHYRFIGKID

SEQ ID NO: 2740 - protein, 540 aa, Unknown
  Description of Unknown: Integrase B2741 sequence
  cd00338,SM00857,G3DSA:1.10.10.2600,IPR036162,PF13408, IPR025827,G3DSA:3.40.50.1390,PS51737,IPR006119,IPR038109, PF07508,SSF53041,IPR011109,PTHR30461,PS51736, Coil,PF00239
MVKNRAAIYARFSSHNQRSESIEIQVENSRAYCEREGLQVVREYCDYAQTGRNIDRAEFQRMMSDARHGLFDYVVIYKVTRIMRNRDEMSLARIMLRKAGVEILYAGEDISSGSSGVLQLGMLEVLAEYESALDSERIRDGIQKNAERCMANGRTLYGWDIVEGRYVINEREASVLRRMKNMLFAGSSVADIVRAVSAERSKRGAKFNQDTVTKLLKRVQNAGVYKYAGHEVPDGMPAIWSQVEQDMIDNILGDRHKPRRKINSTLEFPLSGKLYCAKCGAPMAGTSGTSCTGATYHYYKCRKCRRTVRRDLVEDVVCDMTLQAVAREDVRQRIASGMVAFQAEQPKEQSRSYAIKKELKRIDRTFERIWQAIEDGIAPPGGRERTEELKQRKSELEAELRIAEREEAFNIGVDELMLWLDDAAENLTPEVILGTFVRFVEIDGKTLNVYFAFDHYGDDFRPKQKKAEPCTEGHSSTNSPMVEARRIELRSILYYPSGSTSLSHYRNSEPVGQRANVRVPSRFDLYRSHTVHVLRCSPLK

SEQ ID NO: 2741 - protein, 539 aa, Unknown
  Description of Unknown: Integrase B2742 sequence
  PTHR30461:SF3,cd00338,SM00857,G3DSA:1.10.10.2600,IPR036162, PF13408,IPR025827,PS51737,G3DSA:3.40.50.1390,IPR006119, IPR038109,PF07508,IPR011109,SSF53041,PTHR30461, PS51736,Coil,PF00239
MSIPQRIVQERPVIYRPTNTASGIHKENVTYYARVSTQNDEQEDSYERQKAHFEEKIHSNPNWNYVEGYADWGISGTKAESRKEFMRMIDDCRAGKINRVLVKSISRFGRNTVDTLTYIRELRELGISVFFETQNIDTMTAGGDVLITILAAMAEQESRTMSTNIKWAFQKRFKDGRVLINFKQSLGYDKVVNVDENGHKEEEYVIVESEAEIVRMIYREYLSGKTIRQIADQLNELGIRTKRGYEWKPSGIEGILTNYKYTGNAILGMTYKPDVLSKSRLKNEGQSPSYHVENSHPAIITKEMFDMVQAEIQRRKNIRSTVNTGKGKYSSKYVLSGLLVCGDCGAKFRRFGRSLKSGEFIPTWVCVTHQKNPNDCKMKPIKEQDILDAFKRAVQRLVGDFSEIVQVVKETAEEELKSQQTSNLTAIEDELVEQRKAVLELFKKKRAGEISPTEYDRKYAEYSARIIELESAADTAKSEELQKQLTQSRLERVYELLDNIGTDYTDEGVMRTLIDCIKVEGKHDIEFQFKCGVDIHETI

SEQ ID NO: 2742 - protein, 539 aa, Unknown
  Description of Unknown: Integrase B2743 sequence
  PTHR30461:SF3,SM00857,G3DSA:1.10.10.2600,IPR036162,PF13408, PS51737,G3DSA:3.40.50.1390,IPR025827,IPR006119,IPR038109, PF07508,IPR011109,SSF53041,PF00239,PTHR30461, PS51736,Coil,cd00338
MQKRRTKYANSQGDNAVIYARYSSHNQKDTSIEQQIEVCTKYARDNGYRITNIYADRAISGKTDARPQFRLMMQDAREHKFDVVISWKSSRLGRDMLDAMTNDIILRNLGIKCFYTEENFDDTAAGRFALRNMMNVNQFYIENMAEDILRGMRDNAKKCRVNNGSPPLGYRRGADGKYEIVPDEAETVREIFTKVLAGMAFVDIANELNARGIKTKKGAPWGRSSFSRLLSNERYIGTYKWSDIVIENGMPAIIDREVFEMAQKKIKGERPLRRRHNENGDYLLTGKLFCGKCDSPMTGMSGTSKSGAKHHYYACYSARKDGSCDKKAVKRDWVEKTVALFIKEHVLRDEVIEWMVDQYMVYQKATFESQRIMEMRNQLKDVQSQLDNLVDAIARGIYTDSTKDKLLKLEADKKEIEQDIRLATYNLKEYDREHVRCYFLSFKEGSVESKDYLKRLFDQFVTKIYLYDDEIRIAFSGTKDDSPVSFKIIDEAEELAVSSVRLSSASSHQCKIIRTLDQSVRGSDFLFLSRILKLSFGIE

SEQ ID NO: 2743 - protein, 539 aa, Unknown
  Description of Unknown: Integrase B2744 sequence
  PTHR30461:SF3,cd00338,SM00857,G3DSA:1.10.10.2600,IPR036162, PF13408,IPR025827,G3DSA:3.40.50.1390,PS51737,IPR006119, IPR038109,PF07508,SSF53041,IPR011109,PTHR30461,PS5173 6,Coil,PF00239
MKKKQTGARHGRAAIYARYSSHNQREASIEQQVKACRELAVRLGLDVVETYEDKAISGKSDRRPSFQRLLRDAEKGYFDCVLAWKSNRMGRNMLQAMTNEARLKDWGVRTFYAEEDFDDTAAGRFALRNMMNVNQFYSENMAEDITRGMMDNASKCLSNGALPLGYKAGENGRIVLDKAQAAVVQEIYTRVACREPFVDIAADLNRRGIKTKRGGPWTKSSFYTICRNERYRGIYIYDDVRVEGGVPRIVSDGLFYRVQEVLKVKKTPQSARHHTGAEDYLLTGKLFCGKCGRPMTGVSGTSRSGEMHYYYTCQKRRREHACDKKNVIREQIEKSVAQAIKQYMLTDEMIQHMADATMAYNARQEKDLHLQDLQGQLAAVKTSAANLLKAIEMGVITETTKARMVELEQEQGRLNAQIENARAELVPITRDNFVSLLHIYRDGDINDSKYLASLFETFLVRVDLYDDHFLIWFNPLGQKPPADIPITSIENGDVDEFFDECRRKNVFDWGGKWSTKQEKSEPVSDWRRVRIFRFLRVRQ

SEQ ID NO: 2744 - protein, 539 aa, Unknown
  Description of Unknown: Integrase B2745 sequence
  PTHR30461:SF3,SM00857,G3DSA:1.10.10.2600,IPR036162,PF13408, IPR025827,G3DSA:3.40.50.1390,PS51737,IPR006119,IPR038109, PF07508,SSF53041,IPR011109,PTHR30461,cd00338, PF00239
MPTSKNTARKYAAGGSSDNSCGVEPLRAVIYARYSSSGQREESIEGQLRDCYEFAKKHGIIVIGEYIDKAMTGRVDRRPDFQRMMKDSEKGRFNCVLLWKMDRFARNRYDSAMYKYKLKKNGIRIFYAKETIPDGPEGIILESVMEGYAEYYSENLAQNVKRGNYDSALELKTLGKTCLGLKTGPDGRYMIDQAEAAIVRRIFEEYAEGERAKDIYERLNSEGYRTSRGGKFNKNSLRRILSNKKYIGVYEYEDIYVENGIPAIITDRDLFEKVQKMLKINHDAPARGKAQNFLLTTKLFCGLCGSPMIGDGGTSHTGKAYAYYSCTKRKRGRSCKKESVPKDWIEDLVVGELVKIVHNDELIEQIADRVMEYQKREKDQSGLHALEIRQKENEKAISNMLAAIEAGIITPSTKTRLMELEADRADIEKGIAHELLAEPEFERDQIIYFLERFRSGDINDEAYRIMLVDTFLNSVYLYDDDHLVLVMNYSGENCKVDLKLVEGAVSGDGCKGSAFAPSSALEALTGMVSAFCVSAYYIR

SEQ ID NO: 2745 - protein, 539 aa, Unknown
  Description of Unknown: Integrase B2746 sequence
  PTHR30461:SF3,cd00338,SM00857,G3DSA:1.10.10.2600,IPR036162, PS51737,G3DSA:3.40.50.1390,IPR006119,IPR038109,PF07508, SSF53041,IPR011109,PTHR30461,mobidb-lite,Coil, PF00239
MKKAVILTRVSTKEQEEGHSLAAQNTRLIEYCKRKNLEVIKSFEIIESSTRGGRKKFREAIDFCLSQNETVALIADAVDRVQRSFKDSVLLDDLVRKEKIELHFYRENMVIGAGASASDIMRWDFSVMGAKSYVLQLSENVKRSLDYKLRNGERAGVAPVGYVNYRNEDGKNSIRPDEIDAPKVQRIFNLFALGGTSAHELTRYADKIGLRSRMGRKLQVTGILSILRNPFYYGEMLAKGKLHVHVYQPLISKETFDACQRVLERSRSKPFKHGEKPFTYRGLIHCANTDKICPIDIKKQQFPYVVCWAADGQRRVYIPLKDIDEQICYILNSIEIPAGIIEQIRVHLAASKKQEVAFRNAETGRLKQELTRIENRIDALFNMRLDGEIDKETYNDKNDRLQLERHRVEEKINAHKKADNSFNDTVLNLMEIARSSATIFKLSDNVEKKRLLLSFLFDRLELNEGRIGYKLRYPFNEFQNTAELCEPAENQGVAGENGRVLPFPENEAIEPKKDNKNKGLPEKTSLCSGWLGNLDSNQD

SEQ ID NO: 2746 - protein, 539 aa, Unknown
  Description of Unknown: Integrase B2747 sequence
  SM00857,G3DSA:1.10.10.2600,IPR036162,PS51737,G3DSA:3.40.50.1390, IPR006119,IPR038109,PF07508,IPR011109,SSF53041, PF00239,PTHR30461,PS51736,Coil,cd00338
MPTLSLGKHIIDIGSDSMTTFDMNNVTSKALDMDVYAIYLRKSRADLEAEKLGEGETLARHRKMLEELAARKGFYIGEIYTELESGESIAGRPKIQKLLEDCYKGKYKGILIVEVTRLSRGNQGDAQTIMDCLKYSNMNNGVLVVTPTKTYDVAHSQEDEEYMEFELFMSRREYKMIHKRMDRGRRQAVVEGNYMGAYRPYGYNIVKTKTKRTLVPNEIEAPYIKKIFEWSVKDGLSTHDIAKRLTAMGAPTYRGDTEWTKDSVKTYLTNPVYMGKVRWNNRMRIKTMVNGELKITRPRYHSDQYMLYDGKHMKDALVDEETFREAQKKFYKDRTRSGLRLKNPLAGLVYCKKCGKSMHLQPYDKTRSDRIVHKSNTSGCRVKSAIASDVVAAVTHALRTYVDDFEVKIENSPDIDENDIQKQIDALVKEMRKIEKKKSKLFDSWENDDITNNEFVERKAIHNQRLETLEKQIEDLEYTIPEKEEYEEKLILVSEALMTIQDDRLDAATKNESLKQIISRIEFSRENDVEFILDIDLHQ

SEQ ID NO: 2747 - protein, 539 aa, Unknown
  Description of Unknown: Integrase B2748 sequence
  PTHR30461:SF3,SM00857,G3DSA:1.10.10.2600,IPR036162,PF13408, IPR025827,G3DSA:3.40.50.1390,PS51737,IPR006119,IPR038109, PF07508,SSF53041,IPR011109,PTHR30461, PS51736,cd00338,PF00239
MARAAKQDSNSEIINGVIYARYSEGPNQTEASIEGQVRECKEYAKRNGIRIINVYSDSKHTGTNDNRAEFQKMLRDSRRGGFSVVVVWKIDRFGRNRAEMAQNKALLKLQGVKVVSAKEYIPDSPEGIILESVLEGMAEYYSANLSQNIKRGMKENALHCKSNGSGKSLGYIVDKDGYFEIEPNEATIVKTIFQKYDEGMKIADIWREIVASGAKTKRGKDFTQYGISRVLSNRAYIGEYRYGDIVTPGGMPRIIDDDLFNRVQERRALSKKTPASRRSNSDVDFLLTGKVFCGHCKGTMRGMSGTSKTGRKFYYYACHDKIFKHNKCTKKNVKKEWLETEVTRITRDDILNKETIEFIADRVVEIQRQEQEDKSMLRYYEQQLRDTQSAINNIMKAIEAGIITSSTKSRLFELEEQKSIIEGEIEREKIITPVIEKEQVIFSLERFFGGDINNKEYQRNIIDMFVNKVILYDNKIIITYNISSQNEISVDVVEQAAFAALDECSSKLSLAPPAGACPCTQFRFTLCKAVFLLPLINFI

SEQ ID NO: 2748 - protein, 539 aa, Unknown
  Description of Unknown: Integrase B2749 sequence
  PTHR30461:SF3,cd00338,SM00857,G3DSA:1.10.10.2600,IPR036162, PF13408,IPR025827,G3DSA:3.40.50.1390,PS51737,IPR006119, IPR038109,PF07508,IPR011109,SSF53041,PTHR30461, PS51736,Coil,PF00239
MSIPQRIVQERPVIYRPTNTASGIHKENVTYYARVSTQNDEQEDSYERQKAHFEEKIHSNPNWNYVEGYADWGISGTKAESRKEFMRMIEDCRAGKINRVLVKSISRFGRNTVDTLTYIRELRELGISVFFETQNIDTMTAGGDVLITILAAMAEQESRTMSTNIKWAFKKRFKDGRVLINFKQSLGYDKVVNVDENGHKEEEYVIVESEAEIVRMIYREYLSGKTIRQIADQLNELGIRTKRGYEWKPNSIEGVLTNYKYTGNAILGMTYKPDVLSKSRLKNEGQSPSFHVENSHPAIITKEMYDMVQAEIQRRKNIRSTVNTGKGKYSSKYVLSGLLVCGDCGAKFRRFGRSLKSGEFIPTWVCVTHQKNPNECKMKPIKEQDILDAFKRAVQRLVGDFSEIVQVVRETAEEELKSQQASNLTAIEDELVEQRKAVLELFKKKRAGEISPTEYDRKYAEYSARIIELESAADTAKSEELQKQLTQSRLERVYELLDNIGTDYTDEGVMRALIDCIKVEGKHDIEFQFKCGVDIHETI

SEQ ID NO: 2749 - protein, 539 aa, Unknown
  Description of Unknown: Integrase B2750 sequence
  SM00857,G3DSA:1.10.10.2600,IPR036162,PS51737,G3DSA:3.40.50.1390, IPR006119,IPR038109,PF07508,IPR011109,SSF53041, PF00239,PTHR30461,PS51736,Coil,cd00338
MPTLSLGKYIIDIGSDSMTTFDMNNVASKALDMDVYAIYLRKSRADLEAEKLGEGETLARHRKMLEELAARKGFYIGEIYTELESGESIAGRPKIQKLLEDCYKGKYKGILIVEVTRLSRGNQGDAQTIMDCLKYSNMNNGVLVVTPTKTYDVAHSQEDEEYMEFELFMSRREYKMIHKRMDRGRRQAVVEGNYMGAYRPYGYNIVKTKTKRTLVPNEIEAPYIKKIFEWSVKDGLSTHDIAKRLTAMGAPTYRGDTEWTKDSVKTYLTNPVYMGKVRWNNRMRIKTMVNGELKITRPRYHSDQYMLYDGKHMKDALVDEETFREAQKKFYKDRTRSGLQLKNPLAGLVYCKKCGKSMHLQPYDKTRSDRIVHKSNASGCRVKSAIASDVVAAVTHALRTYVDDFEVKIENSPDVDENDIQKQIDALVKEMRKIEKKKSKLFDSWENDDITNNEFVERKTIHNQRLETLEKQIEDLEYTIPEKEEYEEKLILVSEALMTIQDDQLDAATKNESLKQIISRIEFSRENDVEFILDIDLHQ

SEQ ID NO: 2750 - protein, 539 aa, Unknown
  Description of Unknown: Integrase B2751 sequence
  PTHR30461:SF3,IPR036162,PS51737,IPR011109,PTHR30461, PF00239,G3DSA:1.10.10.2600,IPR006119,SSF53041,cd00338, SM00857,IPR025827,IPR038109,PS51736, mobidb-lite,PF13408,G3DSA:3.40.50.1390,PF07508,Coil
MARKNKSAGSDQRLVAYYRYSGGSGQTEQSIEGQRRDCMAWAKAHGLTICHEYIDRHISGKTDNRAQFQRMMQDSDKGAFDSLICWKTDRLARNRYDSAIYKSRLRKNGVKIYYAAESSVDGPEGIILEGLMESLAEYYSAELSQKLRRGIRESALKCKCLGGYRALGLTSDKDHNYVIDESQAPAVRYIFEQYAAGRTAAEIVADLNAKGVRTATGGAFNKNSILRIVTNEQYIGTYISRAHNVRVENAIPAIIDRELWDKAQAMVQRNKAGRGVKSKAANYMLSGKLYCQMCGGTMKGICGTGKHGDKHYYYACSNHTTHSCAKRNVEKSFLEDLIVSATAEHILAPGKLEQIADRVVQVQEAEQHIENPEKEMLEAELLECTKKQDNILRAIEDGTGSARLSSRLRELEEQEAALRYRIESIEEPPAAPIYSRDQLLFMLEQFRRTADEQDETYKQRLVNTFVHDIYLSDDSAFVQFNISAQENEKSTTLESVVLSLNGGGPDGENPDKSRLPAGFDRVSLGGADGSRTRVRKEIG

SEQ ID NO: 2751 - protein, 539 aa, Unknown
  Description of Unknown: Integrase B2752 sequence
  cd03768,PTHR30461:SF3,SM00857,G3DSA:1.10.10.2600,IPR036162, PF13408,PS51737,G3DSA:3.40.50.1390,IPR025827,IPR006119, IPR038109,PF07508,IPR011109,SSF53041,PTHR30461, PS51736,Coil,PF00239
MNIAIYSRKSKFTGKGESIGNQIEMCQDYIKLHYPNEQHIISVFEDEGFSGKNLNRPQFKKMISIEKSNPFDLIIVYRLDRISRNVGDFANLIEELNNFNTAFICIKEQFDTSTPMGRAMMNIAAVFAQLERETIAERIKDNMYMLAKEGHWTGGTTPLGYKSVKNDYISGSKSKSYYTLEIDENQIDMVYTIFKKYKEIGSINGLETYLFENNIKTQKNNYWDKSNVKRVLQNPTYCIADSDSYEYFNKLGANVLFTPDECNGKDGILTYNRYAGAKKRALLDVNKWVITKSSHQGILTGKEWVEIQNLLESNSTNCFGGKPVTRRTVNSNSILSGLLFCSKCGAYMRPKIYHSGNMFYRCENKDKGKCSNANVNGNKLEKAVIEEVFKFNVDNSLINTKFKQIQTNIDKNSDNITIKTAELEKRKNQTQIAIQNLIKSMSMGVSATVIPIINNQIEELTKQINEYDKQISDIQNNVLKQNDIERKFKETEDAIIFLKNNFNTLTVIEKRNYLKKCISKITWNGENENIDIYIDFDNE

SEQ ID NO: 2752 - protein, 539 aa, Unknown
  Description of Unknown: Integrase B2753 sequence
  PTHR30461:SF3,SM00857,G3DSA:1.10.10.2600,IPR036162,PF13408, PS51737,G3DSA:3.40.50.1390,IPR025827,IPR006119,IPR038109, PF07508,SSF53041,IPR011109,PF00239,PTHR30461, PS51736,Coil,cd00338
MKKTKNSVQRAVIYARYSCSNQTEQSIEGQLADCEKFAEKYNYYIVDTYIDRAMSATTDRRPQFQQMIADSATGGFDVIIVWKLDRFARNRYDSAVNKQKLNSNGVKVVSVMEHIEDTPEGALMESVLEGFAEYFSKDLSQKVSRGMRETALKFKATGLIPYGYKKTSDNICVPDEHTAPVVKKIFEMYAGGMINKDICDWLNSHGYRTSNGNLFKNQYLRKILNRRRYTGSYTYGDLELHDENQRIISDELFDRVQIQLQAKKRTGRIAREQYILVGKLFCGYCRNPIRGESGRNHQNRIYTYYKCSVNKTGGKCPKTTVQRDIIENSTIKFILNNFLNDEIINSVVDTIQASETAENNSAELITLRTQIEDTDRKINNLLTAIENGVFTPSTKQRLNDLENVKEKLKYELIVKQSEKNNFNATAFKRFLKNIDVDDFKTTEQRQKLINLVLYREYLWNDKVLYIFNLTPSKPNDSVDIDSYVDALLASTGSTGSTSPTDGVPQVAISELLFGYFFVMGFFPFHKHFALSCFALYIYR

SEQ ID NO: 2753 - protein, 539 aa, Unknown
  Description of Unknown: Integrase B2754 sequence
  SM00857,G3DSA:1.10.10.2600,IPR036162,PS51737,G3DSA:3.40.50.1390, IPR006119,IPR038109,PF07508,IPR011109,SSF53041, PF00239,PTHR30461,PS51736,Coil,cd00338
MPTLFLGKYIIDIGSDSMTTFDMNNVTSKALDMDVYAIYLRKSRADLEAEKLGEGETLARHRKMLEELAARKGFYIGEIYTELESGESIAGRPKIQKLLEDCYKGKYKGILIVEVTRLSRGNQGDAQTIMDCLKYSNMNNGVLVVTPTKTYDVAHSQEDEEYMEFELFMSRREYKMIHKRMDRGRRQAVVEGNYMGAYRPYGYNIVKTKTKRTLVPNEIEAPYIKKIFEWSVKDGLSTHDIAKRLTAMGAPTYRGDTEWTKDSVKTYLTNPVYMGKVRWNNRMRIKTMVNGELKITRPRYHSDQYMLYDGKHMKDALVDEETFREAQKKFYKDRTRSGLRLKNPLAGLVYCKKCGKSMHLQPYDKTRSDRIVHKSNASGCRVKSAIASDVVAAVTHALRTYVDDFEVKIENSPDIDENDIQKQIDALVKEMHKIEKKKSKLFDSWENDDITNNEFVERKAIPNQRLETLEKQIEDLEYTIPEKEEYEEKLILVSEALMTIQDDRLDAATKNESLKQIISRIEFSRENDVEFILDIDLHQ

SEQ ID NO: 2754 - protein, 539 aa, Unknown
  Description of Unknown: Integrase B2755 sequence
  PTHR30461:SF3,SM00857,G3DSA:1.10.10.2600,IPR036162,PF13408, IPR025827,G3DSA:3.40.50.1390,PS51737,IPR006119,IPR038109, PF07508,IPR011109,SSF53041,PF00239, PTHR30461,PS51736,Coil,cd00338
MKKTKNPVQRAVIYARYSCSNQTEQSIEGQLADCEKFAEKYNYYIVDTYIDRAMSATTDRRPQFQQMIADSATGGFDVIIVWKLDRFARNRYDSAVNKQKLNANGVKVISVMEHIEDTPEGALMESVLEGFAEYFSKDLSQKVSRGMRETALKFKATGLIPYGYKKTSDNICVPDEHTAPVVKKIFEMYAGGMINKDICDWLNSHGYRTSNGNLFRNQYLRKILNRRRYTGSYTYGDLELHDENQRIISDELFDRVQIQLQAKKRTGRIAREQYILVGKLFCGYCRNPIRGESGRNHQNRIYTYYKCSVNKTGGKCPKTTVQRDIIENNTIKFILNNFLNDEIINSVVDTIQASETAENNSAELITLRTQIEDTDRKINNLLTAIENGVFTPSTKQRLNDLENVKEKLKYELIVKQSEKNNFNATAFKRFLKNIDVDDFKTTEQRQKLINLVLYREYLWNDKVLYIFNLTPSKPNDSVDIDSYVDALLTSTGSTGSTSPTDGVPQVAISELLFGYFFVMGFFPFHKHFALSCFALYIYR

SEQ ID NO: 2755 - protein, 539 aa, Unknown
  Description of Unknown: Integrase B2756 sequence
  SM00857,G3DSA:1.10.10.2600,IPR036162,PS51737,G3DSA:3.40.50.1390, IPR006119,IPR038109,PF07508,SSF53041,IPR011109, PF00239,PTHR30461,PS51736,Coil,cd00338
MRNYPPLSSAEEYCIYLRKSRVDIEAEAHGEGETLARHEKLLLEVARRDKLNVTQIYREVVSGETIAARPVIQHVLQEVEQGRWAGVLVVEVERLARGDTIDQGIMAQTFKYSGTKIVTPLKVYDPNNEYDEEYFEFGLFMSRREYKTINRRLQRGRLASAKEGKWVSGIAPYGYEKVRVPNDKGWTLRPVEAEADIVRFIFRLYTSGEEGESGEVKKVGTYSLALRLDKMGVTPPGGAPCWSSTTIQSILENPVYIGKIRWNVHKTKKRIINNAIRVEHYTAPAEEQVFVDGLHPAIVDEAVFLAAQDIISQKGPPPVQAANTVSNPLAGLLVCGKCGRSIVLRPSAYGGMLMCPNRACDNVGSKYAIVEERLLQALSQWLDDYRLEWSDRPPSEEQSLIDLKGKSIRKAQAEVETLQKQLERTHDLLEQGVYDTETFLSRSRSITERINAANENIATLSAELVEDEARAASRKNIIPKVEKLLEVYSALPSAQAKNEMLKEVIEKAEYTKLQRSGRNGPFDNFDLLLYPKLPPSIVE

SEQ ID NO: 2756 - protein, 539 aa, Unknown
  Description of Unknown: Integrase B2757 sequence
  PTHR30461:SF3,cd00338,SM00857,G3DSA:1.10.10.2600,IPR036162, PF13408,PS51737,G3DSA:3.40.50.1390,IPR025827,IPR006119, IPR038109,PF07508,IPR011109,SSF53041, PTHR30461,PS51736,Coil,PF00239
MCAKKKPAMLEPDMQDAVIYTRYSSHNQRDCSIEQQVADCEIFARQNNLRVVKVYADRHLSGTTDNRPQFQQMLKDAAHGHWAYVICWKIDRFARNRYDSATYKFRLKKAGVRVLYAKESIPDGPEGILLESVLEGSAEYYSAALAQNIRRGMKYNAEQCKVNSGSIPFGYCKGPDGRFAIHEANAEVVREIFRKAAAGMPFVDIANDLNSRGLKTSRGGRWNKGSFRLLMNEAYIGVYHFSDTRIEGGMPALIDQGTFWAANERLKTNSSVRGRHQDGGDYLLTGKLKCAHCGSYMIGFSGTGKSGELHYYYGCQKRRRERACKKANVPREWIERVVVKAALDYVLRPDVMEWIADAVMEYQEREAASTQLAALTAELEENQKVTDNVMKAIEAGIITSTTKQRLLDLEAKAQDLKRAIELEKLSHVRLERDQVLFWLDRFRGGSLQSQEFRRKVIDAFVSVVYLSDDHLRIAFNYSGGGSNAEADFDLVMDAEAAAGELSKKFAQGHVTSTKCESGEPPTIYFVGAFFVLTMPLPER

SEQ ID NO: 2757 - protein, 539 aa, Unknown
  Description of Unknown: Integrase B2758 sequence
  PTHR30461:SF3,SM00857,G3DSA:1.10.10.2600,IPR036162,PF13408, IPR025827,PS51737,G3DSA:3.40.50.1390,IPR006119,IPR038109, PF07508,IPR011109,SSF53041,PTHR30461,PS51736, cd00338,PF00239
MARAAKQASNSEIIDGVIYARYSEGPNQTEASIEGQVRECKEYAKRNGIRIINVYSDSKHTGTNDNRAEFQKMLRDSRRGGFSVVVVWKIDRFGRNRAEMAQNKALLKLQGVKVVSAKEYIPDSPEGIILESVLEGMAEYYSANLSQNIKRGMKENALHCKSNGSGKSLGYIVDKDGYFEIEPNEATIVKTIYQKYDEGMKIADIWREIVASGAKTKRGKDFTQYGISRVLSNRAYIGEYRYGDIVTPGGMPRIIDDDLFNRVQERRALSKKAPASRRSNSDVDFLLTGKVFCGHCKGTMRGMSGTSKTGRKFYYYACHDKIFKHNKCTKKNVKKEWLETEVTRITRDDILNKETIEFIADRVVEIQRQEQEDKSMLRYYEQQLRDTQSAINNIMKAIEAGIITSSTKSRLFELEEQKSIIEGEIEREKIITPVIEKEQVIFSLERFFGGDINNKEYQRNIIDMFVNKVILYDNKIIITYNISSQNEISVDVVEQAAFAALDECSSKLSLAPPAGACPCTQFRFTLCKAVFLLPLINFI

SEQ ID NO: 2758 - protein, 539 aa, Unknown
  Description of Unknown: Integrase B2759 sequence
  PTHR30461:SF3,IPR036162,PS51737,IPR011109,PTHR30461, PF00239,G3DSA:1.10.10.2600,IPR006119,PF14287,SSF53041, IPR025378,SM00857,IPR025827,cd03770,IPR038109, PF13408,G3DSA:3.40.50.1390,PF07508,Coil
MYQSNNHSTYAALYTRFSRDEPDGESNSIANQKKLLLNYAHSRGIVNTKFFVDDGFTGTNFNRPDFKAMIAECESKKISTIIVKDMSRLGRNYLMVGYYTEIYFPENNIHFIAINDDVDSVKGDNEFTPFRNIMNEWYVKDTSKKVKSVIHNKGMSGERICNNVIYGYKHNPDNPKEWIVDEEAAQNVRTIFQLFLNGKGTSQIAKYLHSEKILVPSVYAREHGKISARATPADPCLWDSKTIREMLKRQEYVGDTVNFKTKKVSYKSKKKIYLDKSEYVIFPDTQEPIIDRDTYERVQKIMESRKKVPIVREPDPLGGYIFCADCGSRMYITRSTVFPKKNCYHCGRYKRSSELCSSHYIRECVINQLILNELQKVFSIVKNDRERFLNVAIQSYANRTSYDVKKLRKDKQLCEQRIQELDILIKKIFEQSVLGTLSKERLATLAAGYESEQSEIKNKLSAISKEIEITDSKQLNADRFIAIVDKYTNIDSLTPEIMSEFIDKVLVHKPIYDGNNKRHQTIEIYFNGIGAFDYDSCNS

SEQ ID NO: 2759 - protein, 539 aa, Unknown
  Description of Unknown: Integrase B2760 sequence
  PTHR30461:SF3,SM00857,G3DSA:1.10.10.2600,IPR036162,PS51737, G3DSA:3.40.50.1390,IPR006119,IPR038109,PF07508,IPR011109, SSF53041,PTHR30461,Coil,cd00338,PF00239
MENVKRVYCLYRVSTVGQVEKDDIPMQKQFCREFVNCHSGWHIENEFYEKGISGYKVSAKDRDAVQEIQRDAVQGKFDVLLVYMFDRLGRRDDETPFVVEWFVRNGIEVWSAVEGQQRFDNHVDKLLNYIRYWQASGESIKTSVRVKTRMEQLTQDGLFTGGSIPYGYRLEKRGRINKRNREVCDLTVDDDAAKIVQLIFYKYVHEGYGAQRLCRYLTELGIRKADGRNFPNTTINRIIKNPIYVGQLHNGDATSERIPELQIIDQDTFDAAQQLMAARATHHADTPLNMKGQSLLVGNIFCGHCGNRLTLATSGRKAIQKDGTVRREIRCRYQCHYNLRHPGECDGQSGYGVTKLDGIVEKIIRHQFAQIKMASQDDVIAQQHEKAVELARARCNMAEMQLSEKRRELEDYQKEIIKVIRGESRLNVDLLNELIDKTQTDVEALPQTAEAARQELESRTADMETEQQEYDKLKTWADLYDNCNFAAKKMIVSQFIKSIHVYRDYTLEVEFNVSFEQFQQLQAACSGGANERTNVCIKA

SEQ ID NO: 2760 - protein, 539 aa, Unknown
  Description of Unknown: Integrase B2761 sequence
  PTHR30461:SF3,cd00338,SM00857,G3DSA:1.10.10.2600,IPR036162, PF13408,IPR025827,G3DSA:3.40.50.1390,PS51737,IPR006119, IPR038109,PF07508,IPR011109,SSF53041, PTHR30461,PS51736,Coil,PF00239
MKKKQTGARHGRAAIYARYSSHNQREASIEQQVKACRELAVRLGLDVVETYEDKAISGKSDRRPSFQRLLRDAEKGYFDCMLAWKSNRMGRNMLQAMTNEARLKDWGVRTFYAEEDFDDTAAGRFALRNMMNVNQFYSENMAEDITRGMMDNASKCLSNGALPLGYKAGENGRIVLDKAQAAVVQEIYTRVACREPFVDIAADLNRRGIKTKRGGPWTKSSFYTICRNERYRGIYIYDDVRVEGGVPRIVSDGLFYRVQEVLKVKKTPQSARHHTGAEDYLLTGKLFCGKCGRPMTGVSGTSRSGEMHYYYTCQKRRREHACDKKNVIREQIEKSVAQAIKQYMLTDEMIQHMADATMAYNARQEKDLHLQDLQGQLAAVKTSAANLLKAIEMGVITETTKARMVELEQEQGRLNAQIENARAELVPITRDNFVSLLHIYRDGDINDSKYLASLFETFLVRVDLYDDHFLIWFNPLGQKPPADIPITSIENGDVDEFFDECRRKNVFDWGGKWSTKQEKSEPVSDWRRVRIFRFLRVRQ

SEQ ID NO: 2761 - protein, 539 aa, Unknown
  Description of Unknown: Integrase B2762 sequence
  PTHR30461:SF3,IPR036162,PS51737,IPR011109,PTHR30461, PF00239,G3DSA:1.10.10.2600,IPR006119,SSF53041,cd00338, SM00857,IPR025827,IPR038109,mobidb-lite,PS51736, PF13408,G3DSA:3.40.50.1390,PF07508,Coil
MAKKKKPAGGNAIIYARYSSHNQRDVSIEQQIEACRKHAAELGLTITDTYEDRAISGRTDNRPAFQRMMRDAEDGKFQYVLAWKSNRMGRNMMQAMVNESRLMDCGVKVFYAEEDFDDSAAGRFALRSMMNVNQFYSDNLAEDVRRGLMDNASKCMANGRQPLGYKRGEGGKVVVDEPAAAIVREIYTRIASGEMFMDIARDLNRRGIKTQSGSEWNKSSFKVLCRNERYRGIYIYGDTRIEGGIPPIVDDVLWYKVQEVLKVKKSKNRHHCPSDEDYLLTGKLRCGKCGGYMIGMSGRSKTGDVHHYYACQNRRVGHTCDKKNIRRDVVEPAVAQAIKQYCLTDDAIEWITDQTIAYWEDEDRKLQIDSIENDLSAVQSSISNVMKAIEMGVITETTRDRLIELERQQTDLKSKLALAKEEIVHVDRKDLISSLLAFRHGNVHDRAYQEKLFNAFLIAVYVYDDDHLKLVFNSFGKDDTVNIALDLGENDDNSGLSDVSKSSPILSNGQPKENEANTVSIKMVGSVFVLFCPLPKIRK

SEQ ID NO: 2762 - protein, 539 aa, Unknown
  Description of Unknown: Integrase B2763 sequence
  PTHR30461:SF3,SM00857,G3DSA:1.10.10.2600,IPR036162,PF13408, IPR025827,G3DSA:3.40.50.1390,PS51737,IPR006119,IPR038109, PF07508,IPR011109,SSF53041,PTHR30461,PS51736, cd00338,PF00239
MARAAKQDNNSEIIDGVIYARYSEGPNQTEASIEGQVRECKEYAKRNGIRIINVYSDSKHTGTNDNRAEFQKMLRDSRRGGFSVVVVWKIDRFGRNRAEMAQNKALLKLQGVKVVSAKEYIPDSPEGIILESVLEGMAEYYSANLSQNIKRGMKENALHCKSNGSGKSLGYIVDKDGYFEIEPNEATIVKTIFQKYDEGMKIADIWREIVASGAKTKRGKDFTQYGISRVLNNRAYIGEYRYGDIVTPGGMPRIIDDDLFNRVQERRALRKKAPASRRSNSDVDFLLTGKVFCGHCKGTMRGMSGTSKTGRKFYYYACHDKIFKHNKCTKKNVKKEWLETEVTRITRDDILNKETIEFIADRVVEIQRQEQEDKSMLHYYEQQLRDTQSAINNIMKAIEAGIITSSTKSRLFELEEQKSIIEGEIEREKIITPVIEKEQVIFSLERFFGGDINNKEYQRNIIDMFVNKVILYDNKIIITYNISSQNEISVDVVEQAAFAALDECSSKLSLPPPAGACPCTQFRFTLCKAVFLLPLINFI

SEQ ID NO: 2763 - protein, 539 aa, Unknown
  Description of Unknown: Integrase B2764 sequence
  cd03768,PTHR30461:SF3,SM00857,G3DSA:1.10.10.2600,IPR036162, PF13408,IPR025827,G3DSA:3.40.50.1390,PS51737,IPR006119, IPR038109,PF07508,SSF53041,IPR011109,PTHR30461, PS51736,Coil,PF00239
MKAAIYSRKSMFTGKGDSVENQVQMCKDYGNRLNIDEYIIYEDEGYSGGNINRPKFQELLQDVKEKKFDVLICYRLDRISRNVADFSSTLELLQDNNISFVSIKEQFDTSTPMGKAMVYIASVFAQLERETIAERVRDNMLELAKSGRWLGGQTPLGFESEKISYFDAEMKERTMYKLSPEPKELELVKLIYNKYLETGSIHLTLKYLLSSNIKGKNGGEFASMSVNDILRNPAYVKSNEMVLDYLENKGMNVCGTANGNGILIYNKRNSKYKKKDISEWIAAVSKHKGIISANTWLEVQKTLDKNSKKDTPRQGTSKKALLSGVLKCSRCGAPMRVAYGRKRKDGTSIYYYTCTMKAHSGKTRCNNPNVRGDYLEKNIITELKNLNSEVVIKELEKCKKQLAATTENSIIKNVSKEIEEKKKEMDSLLSQLSKVESPVASEFIISKVDSLGTEIKDLEISLTKTTDKKKENSNIELNIEIVLQALNEFNDFFNSVESLKNDELTIQRKRYLLERAVDEITIDGETKKIGIDLWGSKKK

SEQ ID NO: 2764 - protein, 539 aa, Unknown
  Description of Unknown: Integrase B2765 sequence
  PTHR30461:SF3,cd00338,SM00857,G3DSA:1.10.10.2600,IPR036162, PF13408,PS51737,G3DSA:3.40.50.1390,IPR025827,IPR006119, IPR038109,PF07508,IPR011109,SSF53041,PTHR30461, PS51736,Coil,PF00239
METIINNQPKVVRVVRKVSSTQITAQTIREQLTDTRLPVAAYARVSTTNEEQEDSLERQRAHYTEYIGNRPEWRFVGVYDDPGVTGTRVDQRKGFQRLLNDCRAGKIKKILCKSISRFARNTVDALKYIRELKELGIGIYFETQNIDTMTAGGDILITILAAIAEQESRNMSENIKWAFQKKFKEGELMLVCSQFLGYDRDKDKNIVINEEQAKIVRRIYREFLSGYSCATIAKNLTEDGIQTVTGKKQWRASGIRNILTNEKYFGGAYLGKTCKKDVLSKERVVSDEVYYVENSHPAIIPKDTWDLVQLELERRKDYRSCTETGNGRYSSKYPFSKKLICGECGMVFRRHAQYKKGEYVRTWVCITHKIKGNEYCSQRYILEDDIERCFQRVINEFVGDMSQIKEILKENVTSTLSEKDDNRGEQILLRMQALQAEMIDINRKKRAGEIAYELYIAKAQEIADEVEKLEREQKEIQSTENDRLAETKRLKDILEVINEMHPTDEFDGEMFRRLIDNVIVKGNQLTFNFKVGIVKTATI

SEQ ID NO: 2765 - protein, 539 aa, Unknown
  Description of Unknown: Integrase B2766 sequence
  PTHR30461:SF3,IPR036162,PS51737,IPR011109,PTHR30461, PS00397,PF00239,G3DSA:1.10.10.2600,IPR006119,SSF53041, cd00338,SM00857,IPR025827,IPR038109,PS51736, IPR006118,PF13408,G3DSA:3.40.50.1390,PF07508,Coil
MAVAVYCRVSSEDQAERGTIEIQKDFAAKYVNLYNLDVFDYYCDDGVTGTLPLEMRPEGKRLLEDAANHKFNTVIFHKLDRLGRKVRVILNAVHDLDEFGVSIKSMTEPFETETPTGKFLLTTLAGIAELDRDTILARMWSGAQLAAKQGRWLGGVVPYGYQIVGKRLVISDEPIPGFRISEEDVIEIIYRMAGKEKASCPEIADYLNSLKIPTKYQVDKLNNNSTTASAMLWHPSRIAHIIRSTTYKGVHQYGKKTTHKGSKLITRSVPAIVSEELWEKANNVLTSNRLFSRRNSQIEYLLRGMIRCGNCGYAYVGRPNKRDNTKFYICVGKSKWNYKYYQKERCIGKSLHADWLDDIVWEKCLEFLKNPEMIYKEKTPLHDDSQPVSNVSYELQQIKIRLKGMSGEREKLLDLYRKEIITEADLKKQIDKLYKEETNLNKKLSTLNDNLPKQELKRSKDSVVALLQDFAKTIQNVDVKELPFELKRSVVKMLIDKVIIYTEKAPDKSYPEVKIDINWRFDAPPFKIDYIENYTVKLL

SEQ ID NO: 2766 - protein, 539 aa, Unknown
  Description of Unknown: Integrase B2767 sequence
  PTHR30461:SF3,cd00338,SM00857,G3DSA:1.10.10.2600,IPR036162, PF13408,IPR025827,G3DSA:3.40.50.1390,PS51737,IPR006119, IPR038109,PF07508,SSF53041,IPR011109,PTHR30461, PS51736,Coil,PF00239
MSIPQRIVQERPVIYRPTNTASSIHKENVTYYARVSTQNDEQEDSYERQKAHFEEKIHSNPNWNYVEGYADWGISGTKAESRKEFMRMIEDCRAGKINRVLVKSISRFGRNTVDTLTYIRELRELGISVFFETQNIDTMTAGGDVLITILAAMAEQESRTMSTNIKWAFQKRFKDGRVLINFKQSLGYDKVVNVDENGYKEEEYVIVESEAETVRMIYREYLSGKTIRQIADQLNELGIKTKRGYEWKPNSIEGVLTNYKYTGNAILGMTYKPDVLSKSRLKNEGQSPSFHVENSHPAIITKEMYDMVQAEIQRRKNIRSTVNTGKGKYSSKYVLSGLLVCGDCGAKFRRFGRSLKSGEFIPTWVCVTHQKNPNDCKMKPIKEQDILDAFKRAVQRLVGDFSEIVKVVRETAEEELKRQQTSNLTAIEDELVEQRKAVLELFKKKRAGEISPTEYDRKYAEYSARIIELESAADTAKSEELQKQLTQSRLERVYELLDNIGTDYTDEGVMRALIDCIKVEGKHDIEFQFKCGVDIHETI

SEQ ID NO: 2767 - protein, 539 aa, Unknown
  Description of Unknown: Integrase B2768 sequence
  PTHR30461:SF3,SM00857,G3DSA:1.10.10.2600,IPR036162,PF13408, IPR025827,G3DSA:3.40.50.1390,PS51737,IPR006119,IPR038109, PF07508,IPR011109,SSF53041,PF00239,PTHR30461, PS51736,Coil,cd00338
MTAVIYARYSSDNQREESIEGQIRECTAYAEKNDITIVKHYIDRAISAKTDNRPQFQQMIKDSDKKLFDIVLVWKLDRFARNRYDSARYKTQLKKNGVKLMSATEIISEGPEGIILESVLEGYAEYYSADLAEKVVRGQTENILKGRCNGGRGTFGYTLDSERKFHIDPLASPFVLESFTKYRDGLTMKEIRDWLNENGIKNPVGGEFTYNSVEHMLKNRRYIGELKFRDVVVPDAIPPIVPLELFDDVQEKIAKNKKAPARRKAEDDYLLTTKLHCGCCGALMFGESGTSRTGEVHRYYKCATAKKKKGCKKKTVRKQWLEDLVVNQTMQLVRDDAAMESIIAKVMELQDRENTNLPLYEKQLRDAESGIQNMLNAIQAGILTSSTKERLEQLEETKRELEARIAEEKLAKPKIKEEFIRFWLMRFRKLDMSLKDQRQALVDTFINSIYLYDDKVLITFNYKEGTQTITFEEAAQAASKENGSDLDCFTAPDIERQIVRFGVLSLCRKAAAHFLHTVCTFARIGGFSAQGLHSLLSFA

SEQ ID NO: 2768 - protein, 539 aa, Unknown
  Description of Unknown: Integrase B2769 sequence
  PTHR30461:SF3,SM00857,G3DSA:1.10.10.2600,IPR036162,PS51737, G3DSA:3.40.50.1390,IPR006119,IPR038109,PF07508,IPR011109, SSF53041,PF00239,PTHR30461,Coil,cd00338
MENVKRVYCLYRVSTVGQVEKDDIPMQKQFCREFVNCHPGWHIENEFYEKGISGYKVSAKDRDAVQEIQRDAVQGKFDVLLVYMFDRLGRRDDETPFVVEWFVRNGIEVWSAVEGQQRFDNHVDKLLNYIRYWQASGESIKTSVRVKTRMEQLTQDGLFTGGSIPYGYRLEKRGRINKRNREVCDLTVDDDAAKIVQLIFYKYVHEGYGAQRLCRYLTELGIRKADGRNFPNTTINRIIKNPIYVGQLHNGDATSERIPELQIIDQDTFDAAQQLMAARATHHADTPLNMKGQSLLVGNIFCGHCGNRLTLTTSGRKAIQKDGTVRREIRCRYQCHYNLRHPGECDGQSGYGVTKLDGIVEKIIRHQFAQIKMASQDDVIAQQHEKAVELARARCNMAEMQLSEKRRELEDYQKEIIKVIRGESRLNVDLLNELIDKAQTDVEALSQTAEAARQELESRTADMETEQQEYDKLKTWADLYDNCSFAAKKVIVSQFIKSVRVYRDYTLEVEFNVSFEQFQQLQAACSGGANERTNVCIEA

SEQ ID NO: 2769 - protein, 539 aa, Unknown
  Description of Unknown: Integrase B2770 sequence
  PTHR30461:SF3,SM00857,G3DSA:1.10.10.2600,IPR036162,PF13408, IPR025827,G3DSA:3.40.50.1390,PS51737,IPR006119,IPR038109, PF07508,SSF53041,IPR011109,PF00239, PTHR30461,PS51736,Coil,cd00338
MKKTKNSVQRAVIYARYSCSNQTEQSIEGQLADCEKFAEKYNYYIVDTYIDRAMSATTDRRPQFQQMIADSATGGFDVIIVWKLDRFARNRYDSAVNKQKLNSNGVKVVSVMEHIEDTPEGALMESVLEGFAEYFSKDLSQKVSRGMRETALKFKATGLIPYGYKKTSDNICVPDEHTAPVVKKIFEMYSGGMINKDICDWLNSHGYRTSNGNLFKNQYLRKILNRRRYTGSYTYGDLELHDENQRIISDELFDRVQIQLQAKKRTGRIAREQYVLVGKLFCGYCRNPIRGESGRNHQNRIYTYYKCSVNKTGGKCPKTTVQRDIIENNTIKFILKNFLNDEIINSIVDTIQASETAENNSAELIALRTQIEDTDRKINNLLSAIENGIFTPSTKQRLNDLENAKEKLKYELIVKQSEKNNFNATAFKRFLKNIDVDDFKTTEQRQKLINLVLYREYLWNDKVLYIFNLTPSKPNDSVDIDSYVDALLASTGSTGSTSPTDGVPQVAISELLFGYFFVMGFFPFHKHFALSFFALYIYR

SEQ ID NO: 2770 - protein, 539 aa, Unknown
  Description of Unknown: Integrase B2771 sequence
  PTHR30461:SF3,cd00338,SM00857,G3DSA:1.10.10.2600,IPR036162, PF13408,PS51737,IPR025827,G3DSA:3.40.50.1390,IPR006119, IPR038109,PF07508,IPR011109,SSF53041,PTHR30461, PS51736,Coil,PF00239
METIINNQPKVVRVVRKVSSTQITAQTIREQLTDTRLPVAAYARVSTTNEEQEDSLERQRAHYTEYIGNRPEWRFVGVYDDPGVTGTRVDQRKGFQRLLNDCRAGKIKKILCKSISRFARNTVDALKYIRELKELGIGIYFETQNIDTMTAGGDILITILAAIAEQESRNMSENIKWAFQKKFKEGELMLVCSQFLGYDRDKDKNIVINEEQAKIVRRIYREFLSGYSCATIAKNLTEDGIQTVTGKKQWRASGIRNILTNEKYFGGAYLGKTCKKDVLSKERVASDEVYYVENSHPAIIPKDTWDLVQLELERRKDYRSCTETGNGRYSSKYPFSKKLICGECGMVFRRHAQYKKGEYVRTWVCITHKIKGNEYCSQHYILEDDIERCFQRVINEFVGDMSQIKEILKENVTSTLSEKDDNRGEQILLRMQALQAEMININRKKRAGEIAYELYIAKAQEIADEVEKLEREQKEIQSTENDRLAETKRLKDILEVINEMHPTDEFDGEMYRRLIDNVIVKGNQLTFNFKVGIVKTATI

SEQ ID NO: 2771 - protein, 539 aa, Unknown
  Description of Unknown: Integrase B2772 sequence
  PTHR30461:SF3,SM00857,G3DSA:1.10.10.2600,IPR036162,PF13408, IPR025827,PS51737,G3DSA:3.40.50.1390,IPR006119,IPR038109, PF07508,IPR011109,SSF53041,PTHR30461,PS51736, cd00338,PF00239
MARAAKQDGNSEIIDGVIYARYSEGPNQTEASIEGQVRECKEYAKRNGIRIINVYSDSKHTGTNDNRAEFQKMLRDSRRGGFSVVVVWKIDRFGRNRAEMAQNKALLKLQGVKVVSAKEYIPDSPEGIILESVLEGMAEYYSANLSQNIKRGMKENALHCKSNGSGKSLGYIVDKDGYFEIEPNEATIVKTIFQKYDEGMKIADIWREIVASGAKTKRGKDFTQYGISRVLSNRAYIGEYRYGDIVTPGGMPRIIDDDLFNRVQERRALSKKAPASRRSNSDVDFLLTGKVFCGHCKGTMRGMSGTSKTGRKFYYYACHDKIFKHNKCTKKNVKKEWLETEVTRITRDDILNKETIEFIADRVVEIQRQEQEDKSMLHYYEQQLRDTQSAINNIMKAIEAGIITSSTKSRLFELEEQKSIIEGEIEREKIITPVIEKEQVIFSLERFFGGDINNKEYQRNIIDMFVNKVILYDDKIIITYNISSQNEISVDVVEQAAFAALDECSSKLSLAPPAGACPCTQFRFTLCKAVFLLPLINFI

SEQ ID NO: 2772 - protein, 539 aa, Unknown
  Description of Unknown: Integrase B2773 sequence
  PTHR30461:SF3,SM00857,G3DSA:1.10.10.2600,IPR036162,PF13408, PS51737,IPR025827,G3DSA:3.40.50.1390,IPR006119,IPR038109, PF07508,IPR011109,SSF53041,PTHR30461,cd00338, PF00239
MPTGKNTARKYAAGGSSDNSCGVEPLRAVIYARYSSSGQREESIEGQLRDCYEFAKKHGIIVIGEYIDKAMTGRVDRRPDFQRMMKDSEKGRFNCVLLWKMDRFARNRYDSAMYKYKLKKNGIRIFYAKETIPDGPEGIILESVMEGYAEYYSENLAQNVKRGNYDSALELKTLGKTCLGLKTGPDGRYMIDQAEATIVRRIFEEYAEGERAKDIYERLNSEGYRTSRGGKFNKNSLRRILSNKKYIGVYEYEDIYVENGIPAIITDRDLFERVQKMLKINHDAPARGKAQNFLLTTKLFCGLCGSPMIGDGGTSHTGKAYAYYSCTKRKRGRSCKKESVPKDWIEDLVVGELVKIVHNDELIEQIADRVMEYQKREKDQSGLHALEIRQKENEKAISNMLAAIEAGIITPSTKTRLMELEADRADIEKGIAHELLAEPEFERDQIIYFLERFRSGDINDEAYRIMLVDTFLNSVYLYDDDHLVLVMNYSGENCKVDLKLVEGAVSGDGCKGSAFAPSSALIEEKEVLALRLLFFCIQV

SEQ ID NO: 2773 - protein, 539 aa, Unknown
  Description of Unknown: Integrase B2774 sequence
  PTHR30461:SF3,IPR036162,PS51737,IPR011109,PTHR30461, PF00239,G3DSA:1.10.10.2600,IPR006119,SSF53041,cd00338, SM00857,IPR025827,IPR038109,PS51736,mobidb-lite, PF13408,G3DSA:3.40.50.1390,PF07508,Coil
MPKKATKHPAKPKRGKKLEVEEPGILYGRYSSHNQKDISVEQQFEKGYELAAEYGIRIVDTYADRAVSGRTDKRRDFQRMMSDAAKGKFRYVIAWKSNRMGRNMLEALINEAKLQEMGVRVLYVEEDFDDTAAGRFAARSMMNVNQFYSENMAEDIKRGLYDNAANCMVANGHLPYGYKADDTLHYVIDEPKAAVIREIFTRVSCGEPFVDIMNSLNARGIKTSYGRDWGRSSFQKILSNERYRGIYIYGDVRKEGGIPRIISDELYFKVQEVITTKKNPQGRHRVNGDYLLTGKLFCGHCKSPMTGISGTSHSGNLHYYYVCQKRRAEKACEKKNLRRDDIELQVAKAIKRRTLDDDTINWIADSVVEYSQHQESASGIGLLEDQLKDTQRSIKNLMAAIEQGIITPTTKARLMELEKEQSDIDLKITMAKADVIPVNRDQLVGWLKKLQAGDVHDKKYQAELFDTFLIAVYVYDNPDGQDYMKVVFSYAGSKNTVEIPLDPSVIDNVENIETGAVRLSSAQVHQERVDESQLVLFVL

SEQ ID NO: 2774 - protein, 539 aa, Unknown
  Description of Unknown: Integrase B2775 sequence
  PTHR30461:SF3,SM00857,G3DSA:1.10.10.2600,IPR036162,PF13408, PS51737,IPR025827,G3DSA:3.40.50.1390,IPR006119,IPR038109, PF07508,IPR011109,SSF53041,PF00239,PTHR30461, PS51736,Coil,cd00338
MKKFPIDLSCLTEEEISQFQEDPYTLYNGDQDVALYLRYSSTGQSDQSIEGQLRDCRTFCKANHYRIVAIYVDRATTARKDVEKRVHLMEMVADSAKRNWEYVIVWKLDRFARNRNDSAIMKMRLRKNGVKVLSATEHLTDSPESIILESVLEGMAEFFSAELSQKVTRGMRESALKCHSVGGHIPLGYKVENHKLVVDPDTAHIVQEAFSLYANGESVADICRKFNSAGYKTAKNTEFNRSSFKAMFRNTRYIGTYTYKDIVIENGIPAIIDKELFETVQRRLSKTATAPARGKAKVDYLLSGKLFCGHCGASMNGESGAGRHGKVYHYYSCYTKKRKLGCDKRPLKKDYIEGIVARDALNLLTDQLIDEIADMAIRQSEQDLINDTHIPQLTAQLSEVEKSITNITTAIEKGIASETLMNRLVQLEHEKKTLNKEIKAEEKFVYRIDRDQIVFWLSQFKYGNIEDEDFRRRLIDLLVNSVTVWDEPDGYKITTAYNLTSCKAKTFRVEKNPAAEEATGFDFGESECPWRDSNPRPFA

SEQ ID NO: 2775 - protein, 539 aa, Unknown
  Description of Unknown: Integrase B2776 sequence
  PTHR30461:SF3,SM00857,G3DSA:1.10.10.2600,IPR036162,PF13408, PS51737,IPR025827,G3DSA:3.40.50.1390,IPR006119,IPR038109, PF07508,IPR011109,SSF53041,PTHR30461,PS51736, cd00338,PF00239
MAKYKQVVQEQIGVIYARYSSSGQRDESIEGQLRDCHAFAERYNIRIIEEYCDRAMTGTSDRRPEFQRMIRDSSKGQFNVVITWKNDRFARSRYDSAVYKAKLKQNGVRLLYAKESIPDGPEGIVLESVMEGFAEYYSANLSQNVRRGNYDSALKRQTLGQTVFGLRKGADKRFEIDPATGPVVQRIFKEYAAGQSAVSIYTALNEEGFRTLRGNPFNKNSIRKILQNEKYVGVYEYADIRDEHGIPAIVSRETFDRVQIMLEKHHRSPAAKKDAGGFLLTAKLFCGECGEPMTGDCGTGKSGTVYSYYICNGRRAKKCKKERVSKEWIEDVVVAALAEVVNNDEMINAFADHFIAWQATQQTGSAVADLEQRIKQIDTAIRNTMSVIDSGLITESLKTHLLELEAEKTALADALAKKRLDTVELDRETVIWFLERFRTADQSDPGWRIYIVETFLQAVYLYDDGRLLLRLNYGGKNNKVSLKAVEETVAEGEQLSSMFEFRVPRRTKLRETEHCTAFLQLYFCDGVFAALLIAKRDKV

SEQ ID NO: 2776 - protein, 539 aa, Unknown
  Description of Unknown: Integrase B2777 sequence
  PTHR30461:SF3,SM00857,G3DSA:1.10.10.2600,IPR036162,PF13408, IPR025827,G3DSA:3.40.50.1390,PS51737,IPR006119,IPR038109, PF07508,IPR011109,SSF53041,PF00239,PTHR30461, PS51736,Coil,cd00338
MAKNKKPAGGNAIIYARYSSHNQRDVSIEQQIEACRKHAAELGLTIIATYEDRAISGRTDNRPAFQRMMHDAENGKFSYVLAWKSNRMGRNMMQAMVNESRLMDCGIKVYYAEEDFDDSAAGRFALRSMMNVNQFYSDNLAEDVRRGLMDNASKCMANGKQPLGYKRGEDGKVAVDEPAAAIVREVYTRVASGELFTGIARDLNRRGIKTADKGEWNKNSFHRLCSNEKYRGIYIYGDVRIEGGIPTIIDDTLWYKVQEALRVKKLKRNGRHRPGDEDYLLTGKLRCGKCGGYMIGMSGRSKTGEIHYYYTCQNRRVGRTCDKKNIRRDVIEPAVAQAIKDYCLTDDAIEWIADKTVEYWEKADRNLQLDSIEGDLAAVQSSISNVMKAIEMGVVTETTRDRLIELEKQRTDLKSKLALAKEEVVHVDRKKLISSLLLFRNGNIHDRQYQEDLFKTFLISVYVYDDDDNGHLKIVFNAFGDNNTVDLPIDFGETDNQSGFSDGVEKFDYALHRSTRLKPSEETQVAFLFISFRTTAARP

SEQ ID NO: 2777 - protein, 539 aa, Unknown
  Description of Unknown: Integrase B2778 sequence
  PTHR30461:SF3,SM00857,G3DSA:1.10.10.2600,IPR036162,PF13408, PS51737,G3DSA:3.40.50.1390,IPR025827,IPR006119,IPR038109, PF07508,IPR011109,SSF53041,PF00239,PTHR30461, PS51736,Coil,cd00338
MQKRRTKYANSQGDNAVIYARYSSHNQKDTSIEQQIEVCTKYARDNGYRITNIYADRAISGKTDARPQFRLMMQDAREHKFDVVISWKSSRLGRDMLDAMTNDIILRNLGIKCFYTEENFDDTAAGRFALRNMMNVNQFYIENMAEDILRGMRDNAKKCRVNNGSPPLGYRRGADGKYEIVPDEAETVREIFTKVLAGMAFVDIANELNARGIKTKKGAPWGRSSFSRLLSNERYIGTYKWSDIVIENGMPAIIDREVFEMAQKKIKGERPLRRRHNENGDYLLTGKLFCGKCDSPMTGMSGTSKSGAKHHYYACYSARKDGSCDKKAVKRDWVEKTVALFIKEHVLRDEVIEWMVDQYMVYQKATFESQRIMEMRNQLKDVQSQLDNLVDAIARGIYTDSTKDKLLKLEADKKEIEQDIRLATYNLKEYDREHVRCYFLSFKEGSVESKDYLKRLFDQFVTKIYLYDDEIRIAFSGTKDDSPVSFKIIDEAEELAVSSVRLSSASSHQCKIIRTLDQSVRGSDFLFLSRTLKFSFGIE

SEQ ID NO: 2778 - protein, 539 aa, Unknown
  Description of Unknown: Integrase B2779 sequence
  PTHR30461:SF3,IPR036162,PS51737,IPR011109,PTHR30461, PS00397,PF00239,G3DSA:1.10.10.2600,IPR006119,SSF53041, cd00338,SM00857,IPR025827,IPR038109,PS51736, IPR006118,PF13408,G3DSA:3.40.50.1390,PF07508,Coil
MFNNNTNTKIAIYCRVSSDEQAERGTIDNQVTFGQHYADLHRLDIYDVYKDDGVTGTIPLQDRPEGHRLLQDAADERFTLVIFYKMDRLGRSTRVILNAVEALSQYGVGVQSMSEPFDTSTPSGRFMLTMFAGVAELDRANILDRMYQGTLRHARLGKWCGGPAPFGYKLQDGYLVVNEAPMPGHTMSEADVIRLLYDKTIEGWSTFRLAEYLNGLNIPNKYTLRGNVAAGSGKWHQSKILYILHNTLYYGERSFGKLSKHANKTIIHQQLPAIVSRETWDAAQVAIDGHNVMPKFVKRRQYLLRSLIKCGICGHTYVGTHYKRKAGDSIYYVCNSKNTRGTGNERCKAQTLRGEWIEGLVWDDCLNYIMQPDVIAVDDDCRYQQSSADIKKEIDAIAAQLRQLDQERQTVIGLCRQGIITATDLDTQLSDIAEKQNTLQQALEGMNSKNIVTKEEAEKRFKEIADILDGFRQLIQSNAELTFADKQTIIRTLVKQITVYTELPAGDTRDIPSVRVQIDYNFTLIPSKTGMLDPYRQGF

SEQ ID NO: 2779 - protein, 539 aa, Unknown
  Description of Unknown: Integrase B2780 sequence
  PTHR30461:SF3,cd00338,SM00857,G3DSA:1.10.10.2600,IPR036162, PF13408,IPR025827,G3DSA:3.40.50.1390,PS51737,IPR006119, IPR038109,PF07508,SSF53041,IPR011109,PTHR30461, PS51736,Coil,PF00239
MAKAKQKAATNDISKLAVIYARYSSHNQTEQSIEGQLAAGHRYADLKGYTVVHEYIDRAMTGRNDNRDDFQKMLSDTSKKQFGAIIVWKVDRFGRNREEITFNKYRCKKNGVRVEYVAENLPDSPEGVILESVLEGMAEYYSLQLSQNVQRGLLESAKKHQVIGGNVPLGLMMDAHKKYVPDPKTAPTVKLIFDMYAEGSTTSEIINHLNSIGMRTKAGKPFTKSSLTTVLKNEKYIGVYKYKDIIRDEGVIPPIVDKEIFYRVQELLKVNRRMPSHKWNYSDYILTDKLFCGKCGTAMVGESGFGKMGVKYSYYICAKRRKDKTCDKKPVRQEWIEEIVLQRVQGILQNEELLEFIAENTWQYYLAQDESMEKLKGLQTELDKVEKSAANLMKAIEAGIFNDMTKARMDELDDQRAVIKKAMAEIEIEKGFKLTKDHILYFLEQFKKLDYKDRDCQRRLIDVFVNSIFVYDDKLRIAFNFGGSDSTITLNEVDKADRGEGFVCCASCPAKTKSPQYTVLRAFYFCKLLITIKPLRTKS

SEQ ID NO: 2780 - protein, 539 aa, Unknown
  Description of Unknown: Integrase B2781 sequence
  PTHR30461:SF3,cd00338,SM00857,G3DSA:1.10.10.2600,IPR036162, PF13408,IPR025827,G3DSA:3.40.50.1390,PS51737,IPR006119, IPR038109,PF07508,IPR011109,SSF53041,PTHR30461, PS51736,Coil,PF00239
MSIPQRIVQERPVIYRPTNTASSIHKENVTYYARVSTQNDEQEDSYERQKAHFEEKIHSNPNWNYVEGYADWGISGTKAESRKEFMRMIEDCRAGKINRVLVKSISRFGRNTVDTLTYIRELRELGISVFFETQNIDTMTAGGDVLITILAAMAEQESRTMSTNIKWAFQKRFKDGRVLINFKQSLGYDKVVNVDENGYKEEEYVIVESEAETVRMIYREYLSGKTIRQIADQLNELGIKTKRGYEWKPNSIEGVLTNYKYTGNAILGMTYKPDVLSKSRLKNEGQSPSFHVENSHPAIITKEMYDMVQAEIQRRKNIRSTVNTGKGKYSSKYVLSGLLVCGDCGAKFRRFGRSLKSGEFIPTWVCVTHQKNPNDCKMKPIKEQDILDAFKRAVQRLVGDFSEIVKVVRETAEEELKSQQTSNLTAIEDELVEQRKAVLELFKKKRAGEISPTEYDRKYAEYSARIIELESAADTAKSEELQKQLTQSRLERVYELLDNIGTDYTDEGVMRALIDCIKVEGKHDIEFQFKCGVDIHETI

SEQ ID NO: 2781 - protein, 539 aa, Unknown
  Description of Unknown: Integrase B2782 sequence
  PTHR30461:SF3,SM00857,G3DSA:1.10.10.2600,IPR036162,PF13408, IPR025827,G3DSA:3.40.50.1390,PS51737,IPR006119,IPR038109, PF07508,IPR011109,SSF53041,PTHR30461,PS51736, cd00338,PF00239
MARAAKQDSNSEIIDGVIYARYSEGPNQTEASIEGQVRECKEYAKRNGIRIINVYSDSKHTGTNDNRAEFQKMLRDSRRGGFSVVVVWKIDRFGRNRAEMAQNKALLKLQGVKVVSAKEYIPDSPEGIILESVLEGMAEYYSANLSQNIKRGMKENALHCKSNGSGKSLGYIVDKDGYFEIEPNEATIVKTIFQKYDEGMKIADIWREIVASGAKTKRGKDFTQYGISRVLSNRAYIGEYRYGDIVTPGGMPRIIDDDLFNRVQERRALSKKAPASRRSNSDVDFLLTGKVFCGHCKGTMRGMSGTSKTGRKFYYYACHDKIFKHNKCTKKNVKKEWLETEVTRITRDDILNKETIEFIADRVVEIQRQEQEDKSMLHYYEQQLRDTQSAINNIMKAIEAGIITSSTKSRLFELEEQKSIIEGEIEKEKIITPVIEKEQVIFSLERFFGGDINNKEYQRNIIDMFVNKVILYDDKIIITYNISSQNEISVDVVEQAAFAALDECSSKLSLAPPAGACPCTQFRFTLCKAVFLLPLINFI

SEQ ID NO: 2782 - protein, 539 aa, Unknown
  Description of Unknown: Integrase B2783 sequence
  PTHR30461:SF3,cd00338,SM00857,G3DSA:1.10.10.2600,IPR036162, PF13408,IPR025827,PS51737,G3DSA:3.40.50.1390,IPR006119, IPR038109,PF07508,IPR011109,SSF53041,PTHR30461, PS51736,Coil,PF00239
MENERTMLPAVAYYRYSPGGGQTEQSIEGQRRDCLAYARSHGYVIVKEYIDRHMTGRNDKRPNFQLMMHDAELHRFDTVIAWKNDRISRNRRDALNYKEQLRRCGVQIRYAEMDIPRGPEGILMESVMDGLAEYYSAELAQKIRRGMTESAHKCYALGSTPPFGLMVQDRKYVPDPATAPYVRWIFEQYASGTLITEICSTLNAKGVRTARGHEFNKNSLRVLLRNEKYIGVYEAKGIRTEDAIPPIIPRDLFYAVQQRIPQNAHSGHKLTGPRSFPLSGIAYCAICGAPLIGICGTGKSGAVHTYYACTAHKHKRTCAKKNIRQASLEKQVYTATLDYVLQPSVIRPIAKQVEALSAADNANQEEMLAVQSQLKDTTRRINNILTAMEEGDFSKAVSARLSVLESEQTRLEGQLAALRRAKPKVTASRVEFMLEKMRQTLTDLTSDQLTALTKIFLSRVDLSDDELILTYTLIGTPSSPHPITLKDTPSATLVPFPLCSQDVLSAPPERAPGEHPEKPIPMRIVASAYGFSVYFKLAG

SEQ ID NO: 2783 - protein, 539 aa, Unknown
  Description of Unknown: Integrase B2784 sequence
  SM00857,G3DSA:1.10.10.2600,IPR036162,PF13408,IPR025827, G3DSA:3.40.50.1390,PS51737,IPR006119,IPR038109,PF07508, IPR011109,SSF53041,PF00239,PTHR30461,PS51736, Coil,cd00338
MKKIKNQVQRAVIYARYSCSNQTEQSIEGQLADCEKFAEKYNYYIVDTYIDRAMSATTDRRPQFQQMIADSATGGFDVIIVWKLDRFARNRYDSAVNKQKLNSNGVKVVSVMEHIEDTPEGALMESVLEGFAEYFSKDLSQKVSRGMRETALKFKATGLIPYGYKKTSDNICVPDEHTAPVVKKIFEMYAGGMINKDICDWLNSHGYRTSNGNLFKNQYLRKILNRRRYTGSYTYGDLELYDENQRIISDELFDRVQIQLQAKKRTGRIAREQYILVGKLFCGYCRNPIRGESGRNHQNRIYTYYKCSVNKTGGKCPKTTVQRDIIENSTIKFILNNFLNDEIINSVVDTIQASETAENNSAELITLRTQIEDTDRKINNLLTAIENGVFTPSTKQRLNDLENVKEKLKYELIVKQSEKNNFNATAFKRFLKNIDVDDFKTTEQRQKLINLVLYREYLWNDKVLYIFNLTPSKPNDSVDIDSYVDALLASTGSTGSTSPTDGVPQVAISELLFGYFFVMGFFPFHKHFALSFFALYIYR

SEQ ID NO: 2784 - protein, 539 aa, Unknown
  Description of Unknown: Integrase B2785 sequence
  cd03768,PTHR30461:SF3,SM00857,G3DSA:1.10.10.2600,IPR036162, PF13408,PS51737,G3DSA:3.40.50.1390,IPR025827,IPR006119, IPR038109,PF07508,IPR011109,SSF53041,PTHR30461, PS51736,Coil,PF00239
MNIAIYSRKSKFTGKGESIGNQIEMCQDYIKLHYPNEQHIISVFEDEGFSGKNLNRPQFQKMISIEKSNPFDLIIVYRLDRISRNVGDFANLIEELNNFNTAFICIKEQFDTSTPMGRAMMNIAAVFAQLERETIAERIKDNMYMLAKEGHWTGGTTPLGYKSVKNDYISGSKSKSYYTLEIDKSQIDMVYTIFKKYKEIGSINGLETYLFENNIKTQKNNYWDKSNVKRVLQNPTYCIADSDSYEYFNKLGANVLFTPDECNGKDGILTYNRYAGAKKRTLLDVSKWVITKSSHQGILTGKEWVDIQELLESNSTNCFGGKPVTRRTVNSNSILSGLLFCSKCGAYMRPKIYHSGNMFYRCENKDKGKCSNANVNGNKLEKAVIEEVFKFNVDNSLINTKFKQLQTNIDKNSDNITIKTAELEKRKNQTQSAIQNLIKSMSMGVSATVIPIINNQIEELTKQINEYDKQISDIQNNVLKQNDIERKFKETEDAIIFLKNNFNTLSVIEKRNYLKKCISKITWNGENENIDIYLDFDNE

SEQ ID NO: 2785 - protein, 539 aa, Unknown
  Description of Unknown: Integrase B2786 sequence
  PTHR30461:SF3,SM00857,G3DSA:1.10.10.2600,IPR036162,PF13408, IPR025827,PS51737,G3DSA:3.40.50.1390,IPR006119,IPR038109, PF07508,IPR011109,SSF53041,PF00239,PTHR30461, PS51736,Coil,cd00338
MNIIYKGVIKIRAAIYVRKSRLSEKGESINNQIELCKKYFSNLHLEDNIEFIIYQDEGFSGGNINRPEFQKLIKDVKKRRFNYLVCYKLDRISRNVADFTSTLKILEENNVNFISITEQFDTTSVMGRAMINISATFAQMERETIAERIRDNMLELSKTGRWLGGTCPLGFKSIPVVYESNGHKKKMYSLEVIDEEIEIVKLIYNMYIEKHSCSPIARYLCTNSIKGKNGGDFSRNTVLQILTNPVYCTADKKAFEYFKSKGSTIEGNANSSNGIMAYNKRKNGRKDNPMDQWIISTGGHLGVIPSDKWIQCQQILDAVRKKSNNKSGTGNKFLLSGLLKCEHCGSSMCSWSRNNPKNNKYERYYRCELKNRASKRCTCKMLNSDKAEAFVIDLLKNFNIKMLDNFKSKSNSINAASIEKEKNLLNKSLNENNKIISGLIKKIALLDDIDILKAIQSEIKNLKSDNEVIEKNINDLSIKSFIVEDETENKKAFIESLNLFKNTIDFIDDVEIKRNMIKNLVEYFTYNSDTKQIKFKIRL

SEQ ID NO: 2786 - protein, 538 aa, Unknown
  Description of Unknown: Integrase B2787 sequence
  PTHR30461:SF3,SM00857,G3DSA:1.10.10.2600,IPR036162,PF13408, PS51737,G3DSA:3.40.50.1390,IPR025827,IPR006119,IPR038109, PF07508,IPR011109,SSF53041,PTHR30461,Coil, PS51736,cd00338,PF00239
MQRNMRDTKTGNELQATRGVIYARYSSSGQREESIEGQIRECREYAKRHNIVIVGEYCDHAISGTSDKRPEFQRLIKDSAKGQFAFVITWKGDRFARNRYDSAVYKYRLQQNGVRILYAKESIPDGPEGIILESVMEGFAEYYSANLSQNVKRGMYDSALKLQTLGQYCYGLQKGADGKWEQNPTQAPIVKRIFEEYVAGRPATDIYRDLNNEGFRTWTGGLFNKNSLRRMLKNEKYCGVYQYADIRVENGIPAIVDRETFDKAQKMLKAHHEKPASKKIDGGFLLTGKLFCGHCGELMTGDGGTSKTGRVYQYYTCNNRRLKKCDKERAPKQWIEDIVVQKLVEIANDDNVIEAFADRYMEWQEKQKKSSPSSGMEERLKKIETAIKNTMSLIDSGFITDSLKSHLVELESERVSVEQGIAKEQANSPSLKRSEVVYFLKKFRDGDIDDVSWRIYLVETFLQAAYLFDDGRLLLHLNYSGDNNEITAQVAEQVVKEGADLCSDFAPPSPPSGANLNSIKVFFFEGLLVALTYAQRKS

SEQ ID NO: 2787 - protein, 538 aa, Unknown
  Description of Unknown: Integrase B2788 sequence
  PTHR30461:SF3,IPR036162,PS51737,IPR011109,PTHR30461, PF00239,G3DSA:1.10.10.2600,IPR006119,PF14287,SSF53041, IPR025378,SM00857,IPR025827,cd03770,IPR038109, PF13408,G3DSA:3.40.50.1390,PF07508,Coil
MIQSSQKITALYCRLSQEDMRQGDSDSIVNQKMILEKYAKENGFENTQVFADDGYSGVNFERPAFRRMLHLIEDRKIGIIITKDLSGLGRNYIEVGSYTEIYFPKNNVRYIAVNDNFDSMYTDGNELAPLKNLFNEWFARDTSKKIRAVKRAKAEKGERIGSRPPYGYVKDPNNKNHIIVDEETAPVVQKIFSMCVAGLGPTMIANRLKEMQILTPVMYEYRKSGTAVTALDTERPYDWNAKTVADILSREDYIGNTVNCRFTVPSYKDKRKMKRDPSEHVRFEHTHEPIIDMQTWETVQKLRQGKRRPTSIGETSKYSGLLFCADCGSKLYFNHKRADDPKSYSFNCSHYRNNAKEKCTPHRIREVVLDEILLEELRRITYTARTRERQFAEFINKKSSSENRRELNAKQREYERLSKRTTELNALFKRLYEDNVLGRINNEQFRMLSCGYTDEQKSIDAKLPELEKQIQNLQQAASDVDKFIGLAKKYTRITELTPEILHTFVSKIVIHERRERFKQNTEQQIDIYFRYIGNTAGL

SEQ ID NO: 2788 - protein, 538 aa, Unknown
  Description of Unknown: Integrase B2789 sequence
  SM00857,G3DSA:1.10.10.2600,IPR036162,PF13408,PS51737, IPR025827,G3DSA:3.40.50.1390,IPR006119,IPR038109,PF07508, IPR011109,SSF53041,PF00239,PTHR30461,PS51736, Coil,cd00338
MVKNIDEYYVYLRKSRKDRDAEMRGEGETLARHEKLLLEFASKHRLNVTRIYKEVVSGETISSRPEVKRLLHDIEDGHCAGVLVMEIERLARGDTKDQGIIAESFKYSNTKIITPMKTYDPNDEFDEEYFEFGLFMSRREYKTINRRIQRGRIASVQEGRFISSTAPYGYNKVKAPDGKGYTLEIDIARANVVRMIYEWYTTGLPDESGMRRPLGATAICRKLDSLHIKPMVNETWSKASITDILKNPTYTGRIRWSYRKEVKKIVDGSIIKTRPDNHDDYILVDGMHEAIITDETFQAAQLMFSQNRKTPLKLSTRLQNPLSGLVRCGVCGCTMTRLAPTSRTPYAALKCSNRYCSNVSSPLYLVEKKLLSFLDEWLKDYSLDWRKCSALIPSDTDLKIKEQAISSLNETLASLKEQLNKTYTFVEKGIYTTDVFLERNKALTAQITAAENDLSLLHDEYNNDLSVQQSQNEFIPKVRGIIDTYWEIDDIQTRNEMLKEIIEKVEYRKDVPNTRGKRENANFILDVYPKIPRKSPLS

SEQ ID NO: 2789 - protein, 538 aa, Unknown
  Description of Unknown: Integrase B2790 sequence
  PTHR30461:SF3,SM00857,G3DSA:1.10.10.2600,IPR036162,PF13408, IPR025827,G3DSA:3.40.50.1390,PS51737,IPR006119,IPR038109, PF07508,IPR011109,SSF53041,PTHR30461,Coil, PS51736,cd00338,PF00239
MPRKKKLQEVGGLRLVAYYRYSGGSGQTEQSIEGQRRDCEAYAKLHGMTIQHEYIDRHISGKTDDRVSFQQMIRDSDKGAFDMVICWKTDRFARNRYDSAVYKKRLRDNGVEIIYAAESNISGAEGIIIEGLMESLAEYYSAELAEKMRRGMRESALKCQAINRCRPLGFTTDAGKKFIIDERTAPAVRFIFEHYAAGESAAYIVEQLNEKGYRTSQGNEFNKSSINRIIQNEMYRGVYISKAYDVRIEGGVPAIVDDELWRRAQAMAKLNKQKRAKYSSKADYFLSGKLYCGECGCLMKGISGHSSTNGEVYRYYACSNPKCKKHNVPKEELEGKVIQAIIDNLLQPEAMEALAEAMVAVQETDADKPNAEREAIQQELADVRRRSKNILDAIENGTANPHLTARLDELTERENTLRFQLSTLTDEKPLRFTKEEYLFLLEQFLIDPAERNEDYGRRVVHTFVTSMEVSDSKLLIYFNISEENADKNKNASPSELQKESSTVKRLVQQSWTNPNFFLLSHQPSKRPQIGRLGCHPCS

SEQ ID NO: 2790 - protein, 538 aa, Unknown
  Description of Unknown: Integrase B2791 sequence
  PTHR30461:SF3,cd00338,SM00857,G3DSA:1.10.10.2600,IPR036162, PF13408,PS51737,IPR025827,G3DSA:3.40.50.1390,IPR006119, IPR038109,PF07508,IPR011109,SSF53041,PTHR30461, PS51736,Coil,PF00239
MCAKKKPAMLEPDMQDAVIYTRYSSHNQRDCSIEQQVADCEIFARQNNLRVVKVYADRHLSGTTDNRPQFQQMLKDASHGHWAYVICWKIDRFARNRYDSATYKFRLKKAGVRVLYAKESIPDGPEGILLESVLEGSAEYYSAALAQNIRRGMKYNAEQCKVNSGSIPFGYCKGPDGRFAIHEANAEVVREIFRKAAAGMPFVDIANDLNSRGLKTSRGGRWNKGSFRLLMNEAYIGVYHFSDTRIEGGMPALIDQGTFWAANERLKANSSVRGRHQDGGDYLLTGKLKCAHCGSYMIGFSGTGKNGELHYYYGCQKRRRERACKKANVPREWIERVVVKAALDYVLRPDVMEWIADAVMEYQEREAASAQLAALTAELEENQKATDNVMKAIEAGIITSTTKQRLLDLEAKAQDLKRAIELEKLSHVRLERDQVLFWLDRFRGGSLQSQEFRRKVIDAFVSVVYLSDDHLRIAFNYSGGSNAEADFDLVMDAEAAAGELSKKFAQGHVASTKCESGEPPTIYFVGAFFVLTMPLPER

SEQ ID NO: 2791 - protein, 538 aa, Unknown
  Description of Unknown: Integrase B2792 sequence
  PTHR30461:SF3,cd00338,SM00857,G3DSA:1.10.10.2600,IPR036162, PS51737,G3DSA:3.40.50.1390,IPR006119,IPR038109,PF07508, IPR011109,SSF53041,PTHR30461,PS51736,Coil, PF00239
MKENILRVAAYARVSTDKEDQTNSLLSQRSYFADYITHHEGWKLSEVYYDEGISGTQIKKRSGFKKMIQDALNGEVDLIITKEVARFARNTVDTLSYTRKLKSAGVGVIFTIDNIDTRDADGELRLTIMASIAQEESRKTSERVKWGQKRQMEKGVVFGRDLLGYTVQNGQLHINEEEVPIVQAIFHKYTNEGKGTWTIANELLVEGMRPKRIALWSNVVILRVLRNEKYVGDLCQKKTYTPDYLTHSKKYNRGEEEMVYLKEHHEPIIDRDLWNRTQEELKRRSPSEEQKSKHSNRYWCSGKIHCAECGCRYVSRTKKLMSGDVYKAWRCYAAANHGTKKQDADGNEIGCNNSSINDRSLKTCMNYCITLVQGERDSLKKEILKEISQLQKTTAKKLDSKKIKKKIDNLEMKKRKAIDLMLDGLISKEDLQSQTEWYNEELEKLNIQLSDALQKDKSDSRQVNHMEKYIKALDEIMELDGDSEDVYKEVLDHMEIHKGNIVDVWLKSIPIGIRLKVKATGKGEYFKTEILETSFIEK

SEQ ID NO: 2792 - protein, 538 aa, Unknown
  Description of Unknown: Integrase B2793 sequence
  PTHR30461:SF3,SM00857,G3DSA:1.10.10.2600,IPR036162,PF13408, PS51737,G3DSA:3.40.50.1390,IPR025827,IPR006119,IPR038109, PF07508,IPR011109,SSF53041,PTHR30461,PS51736, cd00338,PF00239
MNGVIYARYSSENQREESIDGQLRECTAFAQHNDIQIVGEYIDRAFSAKTDNRPSFQKMIKDSAKGEFDVIIVWKLDRFARNRYDSAHYKNILKKNGVKVVSATEAISSGAEGIILESVLEGMAEYYSAELAEKVSRGMKENALKCKYNGGSVPLGYYIDESKHFQIDSSVAPFVVECFEHYADGMTMKQLRDELNMKGVKNSRGGKLSIDVISRMLTNRKYLGEYTFQDITIKDGIPAIVSTSLFEKVQDRLTKTKKAPSSHKADDDYILTTKLFCGKCKSFMVGESGTNAQGKKYRYYKCVNHKKHQGCDMKSIRKDLIENMTIKYIREFLNDEDLINTLIDLAYDAQHKENEQLPLLRKQLAQTEKGIKNIVDAIEQGISTKSTRERLLDLEQRKNDIEMSISKESIENPMLTKKQFKFWFDQLKKLDISKSEQRQKLVDLFVNSIIIYDDHIKFFFNYKEHTETITFDELNNCSDLPDSPRPNNKRHPLGCLFIFYIILTGLEPVAELSKFGDCKEQQIWEKQSGGLFRRIPVS

SEQ ID NO: 2793 - protein, 538 aa, Unknown
  Description of Unknown: Integrase B2794 sequence
  PTHR30461:SF3,SM00857,G3DSA:1.10.10.2600,IPR036162,PS51737, G3DSA:3.40.50.1390,IPR006119,IPR038109,PF07508,SSF53041, IPR011109,PTHR30461,Coil,PS51736,cd00338, PF00239
MKENILRVAAYARVSTDKEDQTNSLLSQRSYFADYITHHEGWQLSEVYYDEGISGTQIKKRSGFKKMIQDALNGDVDLIITKEVARFARNTVDTLSYTRKLKSAGVGVIFTIDNIDTRDADGELRLTIMASIAQEESRKTSERVKWGQKRQMEKGVVFGRDLLGYTVQNGQLHINEEEVPIVQAIFHKYTNEGKGTWTIANELLAEGMRPKRIALWSNVVILRVLRNEKYVGDLCQKKTYTPDYLTHSKKYNRGEEEMVYLKEHHEPIIDRDLWNRTQEELKRRSPSEEQKSKHSNRYWCSGKIHCAECGCRYVSRTKKLMSGDVYKAWRCYAAANHGTKKQDADGNEIGCNNSSINDRSLKTCMNYCITLVQGERDSLKKEILKEISQLQKTTAKKLDSKKIKKKIDNLEMKKRKAIDLMLDGLISKEDLQSQTEWYNEELEKLNIQLSDALQKDKSDSRQVNHMEKYIKALDEIMELDSDSEDVYKEVLDHMEIHKGNIVDVWLKSIPIGIRLKVKATGKGEYFKTEILETSFIEK

SEQ ID NO: 2794 - protein, 538 aa, Unknown
  Description of Unknown: Integrase B2795 sequence
  PTHR30461:SF3,SM00857,G3DSA:1.10.10.2600,IPR036162,PF13408, PS51737,IPR025827,G3DSA:3.40.50.1390,IPR006119,IPR038109, PF07508,IPR011109,SSF53041,PF00239,PTHR30461, PS51736,Coil,cd00338
MKAVIYARYSSDSQREESIEGQLRECAAFAEKNGITVLRHYIDRAYSAKTDNRPEFQNMIKDSGKRLFDIVIVWKLDRFARNRYDSARYKATLKKNGVKVVSATEIISEGAEGIILESVLEGYAEYYSADLSEKVVRGMTDNALKCKFNGGMMPIGYVIDAEQHFQIDPLTAPFVLEAFKRYDGGETISSIMNWLNEQGLTNTRGQKMTFNSVGHILHNRRYIGEFRYRDVIVPDGIPAIVPQDLFDRVQEKLAKNKKAPARHKAEDDYLLTTKLFCGYCGAYLCGESGTSRTGKVHHYYKCVSVKKKRTECHKKPVRKEWIEDLVVGETMKMVMDDKAIEAIVFMLMDLQERESTSLPLYEQQLQETKTGIQNLLNAIQQGVLTKSTKSRLEELEATQEDLKLKIANEQLIRPKVSAEFMTFWLHRFRKLDVRQQSHRKMLIDAFINAIFLYDDKMVITFNYKEGTTTITFDDLKTALADQKTGSDLDCSTAPLRNDLWMSDDRASATISTAKVFLRFRIANTSLVCNSVLVSRPLH

SEQ ID NO: 2795 - protein, 538 aa, Unknown
  Description of Unknown: Integrase B2796 sequence
  PTHR30461:SF3,cd00338,SM00857,G3DSA:1.10.10.2600,IPR036162, PF13408,IPR025827,PS51737,G3DSA:3.40.50.1390,IPR006119, IPR038109,PF07508,IPR011109,SSF53041,PTHR30461, PS51736,Coil,PF00239
MCAKKKPAMLEPDMQDAVIYTRYSSHNQRDCSIEQQVADCEIFARQNNLRVVKVYADRHLSGTTDNRPQFQQMLKDASHGHWAYVICWKIDRFARNRYDSATYKFRLKKAGVRVLYAKESIPDGPEGILLESVLEGSAEYYSAALAQNIRRGMKYNAEQCKVNSGSIPFGYCKGPDGRFAIHEANAEVVREIFRKAAAGMPFVDIANDLNSRGLKTSRGGRWNKGSFRLLMNEAYIGVYHFSDTRIEGGMPALIDQGTFWAANERLKANSSVRGRHQDGGDYLLTGKLKCAHCGSYMIGFSGTGKSGELHYYYGCQKRRRERACKKANVPREWIERVVVKAALDYVLRPDVMEWIADAVMEYQEREAASAQLAALTAELEENQKATDNVMKAIEAGIITSTTKQRLLDLEAKAQDLKRAIELEKLSHVRLERDQVLFWLDRFRGGSLQSQEFRRKVIDAFVSVVYLSDDHLRIAFNYSGGSNAEADFDLVMDAEAAAGELSKKFAQGHVASTKREPDEPCVFAQGRLCSTSKKSHLKT

SEQ ID NO: 2796 - protein, 538 aa, Unknown
  Description of Unknown: Integrase B2797 sequence
  PTHR30461:SF3,cd00338,SM00857,G3DSA:1.10.10.2600,IPR036162, PF13408,PS51737,G3DSA:3.40.50.1390,IPR025827,IPR006119, IPR038109,PF07508,IPR011109,SSF53041,PTHR30461, PS51736,Coil,PF00239
MCAKKKPAMLEPDMQDAVIYTRYSSHNQRDCSIEQQVADCEIFARQNNLRVVKVYADRHLSGTTDNRPQFQQMLKDASHGHWAYVICWKIDRFARNRYDSATYKFRLKKAGVRVLYAKESIPDGPEGILLESVLEGSAEYYSAALAQNIRRGMKYNAEQCKVNSGSIPFGYCKGPDGRFAIHEANAEVVREIFRKAAAGMPFVDIANDLNSRGLKTSRGGRWNKGSFRLLMNEAYIGVYHFSDTRIEGGMPALIDQGTFWAANERLKANSSVRGRHQDGGDYLLTGKLKCAHCGSYMIGFSGTGKNGELHYYYGCQKRRRERACKKANVPREWIERVVVKAALDYVLRPDVMEWIADAVMEYQEREAASAQLAALTAELEENQKATDNVMNAIEAGIITSTTKQRLLDLEAKAQDLKRAIELEKLSHVHLERDQVLFWLDRFRGGSLQSQEFRRKVIDAFVSVVYLSDDHLRIAFNYSGGSNAEAGFDLVMDAEAAAGELSKKFAQGHVASTKCESGEPPTIYFVGAFFVLTMPLPER

SEQ ID NO: 2797 - protein, 538 aa, Unknown
  Description of Unknown: Integrase B2798 sequence
  IPR036162,PS51737,IPR011109,PTHR30461,PF00239, G3DSA:1.10.10.2600,PF14287,IPR006119,SSF53041,IPR025378, SM00857,IPR025827,cd03770,IPR038109,PS51736, PF13408,G3DSA:3.40.50.1390,PF07508,Coil
MLRQATQNLITALYPRLSHEDELQGESNSISNQKRILETYAKQNGFTNLRWYTDDGFSGANFQRPGFQAMLADIEAGKVGTVIVKDMSRLGRNYLQVGFYTEMLFPQKGVRFIAVNDNVDSASEGMDNDFTPLRNLFNEWLVRDTSKKIKAVKKSKGMSGKPVTSKPVYGYVMDEDENFIIDEEAAPVVQQIYQLCLAGNGPTKIARMLTEQQIPTPGTLEYQRTGSTRRYHPGYECKWATNTVVHILENREYTGCLVNFKTEKPSYKVKHSIENPVEKQAIFENHHEPIIDKETWERVQELRKQRKRPNRYDEVGLFSGILFCADCGHVLYQQRYQNKDRKQDCYICGSYKKRTRNCTAHFIRTDLLTAGVLANLRQVTEYAAKHESRFVKLLVQQNEIGGKRKTAAAIKQLEQAQERISEISRIIKRLYEDNVNGKISDERFMELSADYEAEQAELKKRAAALQAELDKSQAATVNAEKFMGIVRKHLAFEELTPTLLREMIEKIVVHECSYDENGTRRQDIEIYYSFVGKIDLPE

SEQ ID NO: 2798 - protein, 538 aa, Unknown
  Description of Unknown: Integrase B2799 sequence
  PTHR30461:SF3,SM00857,G3DSA:1.10.10.2600,IPR036162,PF13408, IPR025827,G3DSA:3.40.50.1390,PS51737,IPR006119,IPR038109, PF07508,IPR011109,SSF53041,PF00239,PTHR30461, PS51736,Coil,cd00338
MRAALYARYSSDNQRYESITAQLRCSKEYCAQKHYDVVKIYTDEAISGTSVAGRTGFQQMILESGDGIFDVVIFHKIDRNARNEIDYYTNIDRLKKNGVRYEYSAEGIDVSTANGKLTEGIKVAVAAWYSRNLAQEVKKGQKENALKAVFNGGRPPLGYKIINQQYYIEPKEAEAVRLIFEMYIAGNGYTKISEELNRRGYLTRNGQPFAKNSLYEIIGNERYTGTYIFNRILTDEFGKRNNHKVNPDAIKIENAIPAIIDKATFHAAAEMRAKNRHSNSRCRTTENYLLTGKIFCGICGRAMNGHRMRTRSGVYTYYCCNKTRLPADVKCQQKLVKKEYIERNVCEGVLEIVMSDVYREKTISEMIEYHKNLNSTVKGQRKTLQASLKNAETKLSNLYSLIENGTLDEFDAQRISSVKTEIRELRNSLQSLPNTASIEQLNPAKLNALFAKMYEKLKEQVREGNIEVMQMIINSFIEKVVICGDKVEATIKIAPGDFVSAGTVEPHLHHSYGYTLIKCRIPRIILCKTLHLNDVVIL

SEQ ID NO: 2799 - protein, 538 aa, Unknown
  Description of Unknown: Integrase B2800 sequence
  PTHR30461:SF3,cd00338,SM00857,G3DSA:1.10.10.2600,IPR036162, PF13408,PS51737,G3DSA:3.40.50.1390,IPR025827,IPR006119, IPR038109,PF07508,IPR011109,SSF53041,PTHR30461, PS51736,Coil,PF00239
MRAKKKPAMLEPDMQDAVIYTRYSSHNQRDCSIEQQVADCEIFARQNNLRVVKVYADRHLSGTTDNRPQFQQMLKDAAHGHWAYVICWKIDRFARNRYDSATYKFRLKKAGVRVLYAKESIPDGPEGILLESVLEGSAEYYSAALAQNIRRGMKYNAEQCKVNSGSIPFGYCKGPDGRFAIHEANAEVVREIFRKAAAGMPFVDIANDLNSRGLKTSRGGRWNKGSFRLLMNEAYIGVYHFSDTRIEGGMPALIDQGTFWAANERLKANSSVRGRHQDGGDYLLTGKLKCAHCGSYMIGFSGTGKSGELHYYYGCQKRRRERACKKANVPREWIERVVVKAALDYVLRPDVMEWIADAVMEYQEREAASAQLAALTAELEENQKATDNVMKAIEAGIITSTTKQRLLDLEAKAQDLKRAIELEKLSHVRLERDQVLFWLDRFRGGSLQSQEFRRKVIDAFVSVVYLSDDHLRIAFNYSGGSNAEADFDLVMDAEAAAGELSKKFAQGHVASTKCESGEPPTIYFVGAFFVLTMPLPER

SEQ ID NO: 2800 - protein, 538 aa, Unknown
  Description of Unknown: Integrase B2801 sequence
  PTHR30461:SF3,SM00857,G3DSA:1.10.10.2600,IPR036162,PF13408, IPR025827,G3DSA:3.40.50.1390,PS51737,IPR006119,IPR038109, PF07508,IPR011109,SSF53041,PTHR30461,Coil, PS51736,cd00338,PF00239
MKKFPIDLSCLTEEEISQFQEDPYTLYNGDQDVALYLRYSSTGQSDQSIEGQLRDCRAFCKANHYRIVAIYVDRATTARKDVEKRVHLMEMVADSAKQNWEYVIVWKLDRFARNRNDSAIMKMRLRKNGVKVLSATEHLTDSPESIILESVLEGMAEFFSAELSQKVTRGMRESALKCHSVGGHIPLGYKVENHKLVVDPDTAHIVQEAFSLYANGESVADICRKFNSAGYKTAKNTEFNRSSFKAMFRNTRYIGTYTYKDIVIENGIPAIIDKELFETVQRRLSKTATAPARGKAKVDYLLSGKLFCGHCGASMNGESGAGRHGKVYHYYSCYTKKRKLGCDKRPLKKDYIEGIVARDALNLLTDQLIDEIADMAIRQSEQDLINDTHIPQLTAQLSEVEKSITNITAAIEKGIASETLMNRLVQLEHEKKTLNKEIKAEEKFVYRIDRDQIVFWLSQFKYGNIEDEDFRRRLIDLLVNSVTVWDEPDGYKITTAYNLTSCKTKTFRVEKNPAAEEATGFDFGESECTIRNHRPDRR

SEQ ID NO: 2801 - protein, 538 aa, Unknown
  Description of Unknown: Integrase B2802 sequence
  PTHR30461:SF3,SM00857,G3DSA:1.10.10.2600,IPR036162,PF13408, PS51737,IPR025827,G3DSA:3.40.50.1390,IPR006119,IPR038109, PF07508,SSF53041,IPR011109,PTHR30461,Coil, PS51736,cd00338,PF00239
MKENILRVAAYARVSTDKEDQTNSLLSQRSYFADYITHHEGWKLSEVYYDEGISGTQIKKRSGFKQMIQDALNGEVDLIITKEVARFARNTVDTLSYTRKLKSAGVGVIFTIDNIDTRDADGELRLTIMASIAQEESRKTSERVKWGQKRQMEKGVVFGRDLLGYTVQNGQLHINEEEVPIVQAIFHKYTNEGKGTWTIAKELLAEGMRPKRIALWSNVVILRVLRNEKYVGDLCQKKTYTPDYLTHSKKYNRGEEEMVYLKEHHEPIIDRDLWNRTQEELKRRSPSEEQKSKHSNRYWCSGKIRCAECGCRYVSRTKKLMSGDVYKAWRCYAAANHGTKKQDADGNEIGCNNSSINDRSLKTCMNYCITLVQGERDSLKKEILKEISQLQKATAKKVDSKKIKKKIDNLEMKKRKAIDLMLDGLISKEDLQNQTEWYNEELEKLNIQLSDALQKDKSDSRQVNNMEKYVKALDEIMEMDGSSEDVYKEVLDHIEIHKGNIVDVWLKSIPIGIRLKVKATGKGEYFKTEILETSFIEK

SEQ ID NO: 2802 - protein, 538 aa, Unknown
  Description of Unknown: Integrase B2803 sequence
  SM00857,G3DSA:1.10.10.2600,IPR036162,PF13408,PS51737, IPR025827,G3DSA:3.40.50.1390,IPR006119,IPR038109,PF07508, IPR011109,SSF53041,PF00239,PTHR30461,PS51736, Coil,cd00338
MARKKKQASGDAVIYARYSSHNQRDVSIEQQIEACRKYAASLGLKITVTYEDRAISGRTDNRPAFQRMMNDAEDGKFCYVLAWKSNRMGRNMMQAMVNEARLVDCGVKVYYAEEDFDDSAAGRFALRSMMNVNQFYSDNLAEDVRRGLMDNASKCIANGKQPFGYKRGSDGKVVLDEPAAAVVREVFTRVASGETNTSIARDLNRRGIKTGSNGEWNKCSFHGLCTNERYRGIYIYGETRIEGGVPRIIDDRLWHKVQEAIRMRNRRKNGRHRPGEDDYLLTGKLRCGHCGGYMIGMSGTSKTGTIHHYYACQNRRVGRTCDKKNIRRDIIEPAVAQAIKQYCLTDDVIEWIADKTIEYWEDEDRKLQITSLENELADIKSSISNVMKAIEQGVITSTTRDRLIELEAQQSDLSAKLNSAKEDLVHVDRKNLISSLLLFRNGDVYDRQYQEDLFNTFLVAAYVYDDGNRLKLVFNCFGDSNTVDLDLCSDENNDNSSISNEANCGNLFAQALKQSTRTKPSDEQSGGFSVLFSADFTQ

SEQ ID NO: 2803 - protein, 538 aa, Unknown
  Description of Unknown: Integrase B2804 sequence
  PTHR30461:SF3,IPR036162,PS51737,IPR011109,PTHR30461, PF00239,G3DSA:1.10.10.2600,IPR006119,PF14287,SSF53041, IPR025378,SM00857,IPR025827,cd03770,IPR038109, PS51736,PF13408,G3DSA:3.40.50.1390,PF07508,Coil
MQENYIVGIYARLSRDDERAGESVSIENQKEMLSRYVREQGWTLYDYYCDDGVSGTTFDRPGLNRLVQDATDHKINLVLCKDLSRLGRDYIEAGKYTDFVFPSLGCRFIALNDGVDTLRKNNEMLVILKNVMNDLYARDTSSKIKAVKLSTFKSGKYVGCYAPLGYRKSEADKHVLEIDPVTAPVVRHIFDLRLQGYGFRKIALQLNAEKVPAPRSFYYMAEGRENLRGETPFWNDVTVKTILRNEVYIGHMVQNKTGTVSYKNHKQVSKPESEWIKVENTHEPLIPQETWDAVQRMDNHPARGRSGKNGTIALFGGLLRCMDCGSSMRYMRDYRKKVSEKEPEYKAYVCNRYASGGKNACSSHYINQKVLTQIVMTDIRCKAMWAQNSRETLRTQLLAREQNASVERTRTLQAELNAIGKRLPELDKLIQSAYEDKVLGRIPESVCVNLLNQYEAERREKQERRKELTEQLAARLETESSVDAWLDMMQDYAQLEELDRPTLVRLIQKIEISERYPVDDHEERDIHIYYNFVGYIEA

SEQ ID NO: 2804 - protein, 538 aa, Unknown
  Description of Unknown: Integrase B2805 sequence
  PTHR30461:SF3,SM00857,G3DSA:1.10.10.2600,IPR036162,PF13408, IPR025827,PS51737,G3DSA:3.40.50.1390,IPR006119,IPR038109, PF07508,IPR011109,SSF53041,PF00239,PTHR30461, PS51736,Coil,cd00338
MKKFPIDLSCLTEEEISQFQEDPYTLYNGDQNVAIYLRYSSTGQSDQSIEGQLRDCRTFCKANHYRIVAIYVDRATTARKDVEKRVHLMEMISDSAKQNWEYVIVWKLDRFARNRNDSAIMKMRLRKNGVKVLSATEHLTDSPESIILESVLEGMAEFFSAELSQKVTRGMRESALKCHSVGGHIPLGYKVENHKLVVDPDTAHIVQEAFSLYANGESVAAICRKFNSAGYKTAKNTEFNRSSFKAMFRNTRYIGTYTYKDIVIENGIPAIIDKELFETVQRRLSKTATAPARGKAKVDYLLSGKLFCGHCGASMNGESGAGRHGKVYHYYSCYTKKRKLGCDKRPLKKDYIEGIVARDALNLLTDQLIDEIADMAIRQSEQDLINDTHIPQLTAQLSEVEKSITNITAAIEKGIASETLMNRLVQLEHEKKTLNKEIKAEEKFVYRIDRDQIVFWLSQFKYGNIEDENFRRRLIDLLVNSVTVWDEPDGYKITTAYNLTSCKTKTFRVEKNPAAEEATGFDFEESECAACCKRRQRN

SEQ ID NO: 2805 - protein, 538 aa, Unknown
  Description of Unknown: Integrase B2806 sequence
  PTHR30461:SF3,SM00857,G3DSA:1.10.10.2600,IPR036162,PF13408, IPR025827,G3DSA:3.40.50.1390,PS51737,IPR006119,IPR038109, PF07508,IPR011109,SSF53041,PTHR30461,Coil, PS51736,cd00338,PF00239
MKENILRVAAYARVSTDKEDQTNSLLSQRSYFADYITHHEGWKLSEVYYDEGISGTQIKKRSGFKKMIQDALNGEVDLIITKEVARFARNTVDTLSYTRKLKSAGVGVIFTIDNIDTRDADGELRLTIMASIAQEESRKTSERVKWGQKRQMEKGVVFGRDLLGYTVQNGQLHINEEEVPIVQAIFHKYTNEGKGTWTIAKELLTEGMRPKRIALWSNVVILRVLRNEKYVGDLCQKKTYTPDYLTHSKKYNRGEEKMVYLKEHHEPIIDRDLWNRTQEELKRRSPSEEQKSKHSNRYWCSGKIRCAECGCRYVSRTKKLMSGDVYKAWRCYAAANHGTKKQDADGNEIGCNNSSINDRSLKTCMNYCITLVQGERDSLKKEILKEISQLQKVTVKKVDSKKIKMKIDNLEMKKRKAIDLMLDGLISKEDLQNQTEWYNEELEKLNIHLSDALQKDKSDSRQVNNMEKYIKALDEIMELDGNSEDVYKEVLDHMEIHKGNIVDVWLKSIPIGIRLKVKATGKGEYFKTEILETSFIEK

SEQ ID NO: 2806 - protein, 538 aa, Unknown
  Description of Unknown: Integrase B2807 sequence
  PTHR30461:SF3,cd00338,SM00857,G3DSA:1.10.10.2600,IPR036162, PF13408,PS51737,IPR025827,G3DSA:3.40.50.1390,IPR006119, IPR038109,PF07508,IPR011109,SSF53041,PTHR30461, PS51736,Coil,PF00239
MKTAVTYARFSSARQHETSIEAQRDAMAKWCAQRSVRIVQEYADRAASGTKTEGRDDFLQMLADLKQRRVDYVLVHKYDRFARNENDQYFYMAMIEQRGAKLVAVAQEFGDGPEARFMVGVITAYNAFYSANLSAESKKGKNIIKQHGKHTGGPYPIGYDPDGQGNYVVNEVEAYFVRELYNAVITHRRLDDVVAEMRDAGLRGRYGGELKTANLARIVRNPVYMGVYQRTLSDGTLVRIENHHAAIVDQKTYEEANRIMDARANAGRNDRKIYPLSGIAYCACCGAKLLAQTTRKDANHEYTSYYCSKCHDLRRIPAQELDGAAVDYLNALFAPERRAELAKAVEDYSKRLISSATSRQPSASREIKKLQREIDSLAANLAAGVLSPDMLTMIDQQITTRRERIKILQETSATPAPVTAADIDSFFADAATLSLGMDPRYLRQVMRKYIKRVTVHTTEIEIVSTFDDWIGEKFRSGRESSDDGGADRQSVRIASNPCVFDVILTLSFVHRVPLPERYRLFHKELYNLHRNKIRRKKK

SEQ ID NO: 2807 - protein, 538 aa, Unknown
  Description of Unknown: Integrase B2808 sequence
  PTHR30461:SF3,SM00857,G3DSA:1.10.10.2600,IPR036162,PF13408, IPR025827,G3DSA:3.40.50.1390,PS51737,IPR006119,IPR038109, PF07508,SSF53041,IPR011109,PTHR30461,Coil, PS51736,cd00338,PF00239
MSTAPNVTVIPAKVQTAENRDKHHQLRVAAYCRVSTEQEEQQNSFAVQVAYYTDLINKKKEWTLAGIFADEGISGTQTKKRTEFNRMIRMCKKKKIDLIITKSISRFSRNTVDCLQYIRQLKELGIGVIFEKENINTLTMTSEFMIALYGSFAQAESESISKNVSWGKEKAYREGKVQFQYKYLLGYKKGEDGKPEIVPEEAETVRLIYTLFLDGYSMSRIKKLLENKGILTSQGKKVWNESLIRSILKNEKYAGDALLQKTFTSDCITHKIVKNHGERPMYLVTDHHEPIIDRDTYNRVQQELARRSSKRKVSDKTTTEQGKYSSKYALTELLICGKCGTPYRRTTWTSRGKKQIVWRCISRLEHGRRYCSDSPTIKEEQFHKAIIRAINNYYSCGNDVEKILKANIGNVLECHGQEEITAIKKRLKEIDKARSDLISLIATGGCDEDKLDSEFEKLYEEEQSLSERLAMLKSKNQTSAETQAKLDKIIDMIEHEKFELETFDNVLVRKLIECVKVLSKTEILVIFKGGYEVRTEIE

SEQ ID NO: 2808 - protein, 538 aa, Unknown
  Description of Unknown: Integrase B2809 sequence
  PTHR30461:SF3,SM00857,G3DSA:1.10.10.2600,IPR036162,PF13408, IPR025827,G3DSA:3.40.50.1390,PS51737,IPR006119,IPR038109, PF07508,IPR011109,SSF53041,PTHR30461,Coil, PS51736,cd00338,PF00239
MSTASNVTIIPAKVQTEINRDKYHQLRVAAYCRVSTEQEEQQNSYQVQIAYYTDLINRKKEWTLAGIFADEGISDTQTKKRTEFNRMIRMCRNKKIDLVITKSISRFARNTVDCLEYVRQLKDLGIGVIFEKENINTMTMTSEFMIALYGSFAQAESESISKNVSWGKEKAYREGKVQFQYKYLLGYKKGADGKPEIVPEEAETVKLIFNMYLDGYTLLNIADTLMAQGRRTATGKNIWSKGEVQRILKNEKYVGDALLQKSFTVDCITHKVVKNNGERPMYLVTDHHTPIVDRDTFNRVQQELARRTSKRKISDKTKTEQGKYSGKYALSELLICGHCGTPYRRRIWSKNGKKQIVWRCISRLEHGKKYCPDSPTIKEEQLHKAIIRAINNYYSCRNDIVRILKANIGSVLECQGQEEILSAEKRLREIDQARNDLVDLIASGGCDENKLDSEFAKLYSEEQQLNERLAMMKSQNKTSEETQAKLDEIMDMIEHEKFELETFDNVLIRKLIECVKVMSKTEILVIFKGGYEVKAEIE

SEQ ID NO: 2809 - protein, 538 aa, Unknown
  Description of Unknown: Integrase B2810 sequence
  PTHR30461:SF3,cd00338,SM00857,G3DSA:1.10.10.2600,IPR036162, PF13408,IPR025827,PS51737,G3DSA:3.40.50.1390,IPR006119, IPR038109,PF07508,IPR011109,SSF53041,PTHR30461, PS51736,Coil,PF00239
MCAKKKPAMLEPDMQDAVIYTRYSSHNQRDCSIEQQVADCEIFARQNNLRVVKVYADRHLSGTTDNRPQFQQMLKDASHGHWAYVICWKIDRFARNRYDSATYKFRLKKAGVRVLYAKESIPDGPEGILLESVLEGSAEYYSAALAQNIRRGMKYNAEQCKVNSGSIPFGYCKGPDGRFAIHEANAEVVREIFRKAAAGMPFVDIANDLNSRGLKTSRGGRWNKGSFRLLMNEAYIGVYHFSDTRIEGGMPALIDQGTFWAANERLKANSSVRGRHQDGGDYLLTGKLKCAHCGSYMIGFSGTGKSGELHYYYGCQKRRRERACKKANVPREWIERVVVKAALDYVLRPDVMEWIADAVMEYQEREAASAQLAALTAELEENQKATDNVMKAIEAGIITSTTKQRLLDLEAKAQDLKRAIELEKLSHVRLERDQVLFWLDRFRGGSLQSQELRRKVIDAFVSVVYLSDDHLRIAFNYSGGSNAEADFDLVMDAEAAAGELSKKFAQGYVASTKCESGEPPTIYFVGAFFVLTMPLPER

SEQ ID NO: 2810 - protein, 538 aa, Unknown
  Description of Unknown: Integrase B2811 sequence
  PTHR30461:SF3,SM00857,G3DSA:1.10.10.2600,IPR036162,PF13408, IPR025827,PS51737,G3DSA:3.40.50.1390,IPR006119,IPR038109, PF07508,IPR011109,SSF53041,PTHR30461,Coil, PS51736,cd00338,PF00239
MKAAIYSRKSKFTGKGESIENQIEMCKKYATDNNYTEISIYEDEGFSGKNTNRPEFKKMMKDAKAHKFDAIICYRLDRISRNVSDFSTLVDELKKLNIDFISIREQFDTSSPMGTAMMFISSVFAQLERETIAERIRDNMYELAKTGRWLGGTPPYGFISEPDYYLDANGKQKKMVKLSPVKSETNLVKSFFESYLKLGSLSKLQKHLIINSINTKRNVAWDVKALQLLLRNPVYVKSSELVISYLESKGATVFGEPNGNGILSYNKKDSKDKYKDISDWILSISKHEGIIDDLLWLKVQKQLDRNKDLAPRLVSNNSSGLLNNILYCKKCGGRMIQKQGHISKKTGEVLRYYVCLTKTNSSGVLCDCKNVRADKLENDIVDELLKETTDESDLIYTIENYKESLKSDIYSKKDLDSIKKQISQKQIQIDNLLEKISLNPNLYDLFEKKLEELNSELKSLKFKKFELESSNENTKLAIKEITASTEMILNFSKLWKSADFPMKKLLLNTYIDKIIYDSDTKSGRMKLFNSKKKRRSLM

SEQ ID NO: 2811 - protein, 538 aa, Unknown
  Description of Unknown: Integrase B2812 sequence
  PTHR30461:SF3,SM00857,G3DSA:1.10.10.2600,IPR036162,PF13408, PS51737,G3DSA:3.40.50.1390,IPR025827,IPR006119,IPR038109, PF07508,SSF53041,IPR011109,PTHR30461,PS51736, cd00338,PF00239
MARAAKQDNNSEIIDGVIYARYSEGPNQTEASIEGQVRECKEYAKRNGIRIINVYSDSKHTGTNDNRAEFQKMLRDSRRGGFSVVVVWKIDRFGRNRAEMAQNKALLKLQGVKVVSAKEYIPDSPEGIILESVLEGMAEYYSANLSQNIKRGMKENALHCKSNGSGKSLGYIVDKDGYFEIEPNEATIVKTIFQKYDEGMKIADIWREIVASGAKTKRGKDFTQYGISRVLSNRAYIGEYRYGDIVTPGGMPRIIDDDLFNRVQERRALSKKAPASRRSNSDVDFLLTGKVFCGHCKGTMRGMSGTSKTGRKFYYYACHDKIFKHNKCTKKNVKKEWLETEVTRITRDDILNKETIEFIADRVVEIQRQEQEDKSMLRYYEQQLRDTQSAINNIMKAIEAGIITSSTKSRLFELEEQKSIIEGEIEREKIITPVIEKEQVIFSLERFFGGDINNKEYQRNIIDMFVNKVILYDNKIIITYNISSQNEISVDVVEQAAFAALDECSSKLSLPPPNVEKTNTTNIFFVSGLFGIITTPHD

SEQ ID NO: 2812 - protein, 538 aa, Unknown
  Description of Unknown: Integrase B2813 sequence
  PTHR30461:SF3,cd00338,SM00857,G3DSA:1.10.10.2600,IPR036162, PF13408,IPR025827,G3DSA:3.40.50.1390,PS51737,IPR006119, IPR038109,PF07508,SSF53041,IPR011109,PTHR30461, PS51736,Coil,PF00239
MCAKKKPAMLEPDMQDAVIYTRYSSHNQRDCSIEQQVADCEIFARQNNLRVVKVYADRHLSGTTDNRPQFQQMLKDAAHGHWAYVICWKIDRFARNRYDSATYKFRLKKAGVRVLYAKESIPDGPEGILLESVLEGSAEYYSAALAQNIRRGMKYNAEQCKVNSGSIPFGYCKGPDGRFAIHEANAEVVREIFRKAAAGMSFVDIANDLNSRGLKTSRGGRWNKGSFRLLMNEAYIGVYHFSDTRIEGGMPALIDQGTFWAANERLKANSSVRGRHQDGGDYLLTGKLKCAHCGSYMIGFSGTGKSGELHYYYGCQKRRRERACKKANVPREWIERVVVKAALDYVLRPDVMEWIADAVMEYQEREAASAQLAALTAELEENQKATDNVMKAIEAGIITSTTKQRLLDLEAKAQDLKRAIELEKLSHVRLERDQVLFWLDCFRGGSLQSQEFRRKVIDTFVSVVYLSDDHLRIAFNYSGGSNAEADFDLVMDAEAAAGELSKKFVQGHVASTKCESGEPPTIYFVGAFFVLTMPLPER

SEQ ID NO: 2813 - protein, 538 aa, Unknown
  Description of Unknown: Integrase B2814 sequence
  PTHR30461:SF3,IPR036162,PS51737,IPR011109,PTHR30461, PF00239,G3DSA:1.10.10.2600,IPR006119,PF14287,SSF53041, IPR025378,SM00857,IPR025827,cd03770,IPR038109, PS51736,PF13408,G3DSA:3.40.50.1390,PF07508,Coil
MQENYIVGIYARLSRDDERAGESVSIENQKEMLSRYVREQGWTLYDYYCDDGVSGTTFDRPGLNRLVQDATDHKINLVLCKDLSRLGRDYIEAGKYTDFVFPSLGCRFIALNDGVDTLRKNNEMLVILKNVMNDLYARDTSSKIKAVKLSTFKSGKYVGCYAPLGYKKSEADKHVLEIDPVTASVVRHIFDLRLQGYGFRKIALQLNAEKVPAPRSFYYMAKGRESLRGETPFWNDVTVKTILRNEVYIGHMVQNKTGTVSYKNHKQVSKPESEWIKVENTHEPLISQETWDAVQRMDNHPARGRSGKSGTIALFGGLLRCMDCGSSMRYMRDYRKKVSEKEPEYKAYVCNRYASGGKNACSSHYINQKVLTQIVMTDIRCKAMWAQNSRETLRTQLLAREQNASAERTRTLQAELNAIGKRLPELDKLIQSAYEDKVLGRIPESVCVNLLNQYEAERREKQERCKELTEQLAASRETESSVDAWLDMMQDYAQLEELDRPTLVRLIQKIEISERYTVDDHEERDIHIYYNFVGYIEA

SEQ ID NO: 2814 - protein, 538 aa, Unknown
  Description of Unknown: Integrase B2815 sequence
  PTHR30461:SF3,IPR036162,PS51737,IPR011109,PTHR30461, PS00397,PF00239,G3DSA:1.10.10.2600,IPR006119,SSF53041, cd00338,SM00857,IPR025827,IPR038109,PS51736, IPR006118,PF13408,G3DSA:3.40.50.1390,PF07508,Coil
MAKKVTVIKAAKAQKHTQEERRLKVCGYARVSTGSQAQATSYTAQVEYYTEKIESNPLWEFAGVYADEGISGTNVKHRDEFQMMISDCEDGNIDLILTKSITRFARNTVECIQTIRKLKEIGVGIYFEKENINTLSEKSELFITILASVAQGESENISSNNRWAIQKRFQDGTYIISTPAYGYGKDEDGNLVIIESEAETVRWIYESYLNGMGVYVIAKALNQKGIPTIRGAEKWQDGVIQDILKNPIYEGDMLQQRTYTETRFPFVRRVNNGQRNQYLIKDSHPPIVTHEEAEAVRNLMAYRVDVLHMNKSDYTKRYLFSGRIICGECGRTFRRQKIYIGKPYEKIIWTCSGHVEDKERCCLKAIREDVLHRAFTDMWNKLYTNQGTILEPLLKELTELVAARQDSEEIRQLDKEIKDISGQSQILNQVMRKGYMDSALFMESSSKLGWQLTECRRKKTLLTRKLRRTKEIVRTEQLIQLIAEQDGLMEEFDEQLFKMTAEKIVVSKEHDITFCLYNGLKLTERGGGQDAVAHANRL

SEQ ID NO: 2815 - protein, 538 aa, Unknown
  Description of Unknown: Integrase B2816 sequence
  cd03768,PTHR30461:SF3,SM00857,G3DSA:1.10.10.2600,IPR036162, PF13408,PS51737,G3DSA:3.40.50.1390,IPR025827,IPR006119, IPR038109,PF07508,IPR011109,SSF53041,PTHR30461, PS51736,Coil,PF00239
MNIAIYSRKSKFTGKGESIENQIEMCKEYIDLHYPNEKHFISVFEDEGFSGKNLNRPQFQEMMSIENQKPFDLIVVYRLDRISRNVGDFATLVDKLNQKNTSFICIKEQFDTSTPMGRAMMNIASVFAQLERETIAERVKDNMYMLAKSGKWTGGTTPLGYKSVKVNNGDKSYFVLDFDENQIDLVKLIFNKYSEINSVNGVETYLRENGYKTQKGNEWNGSNLKRILINPIYCIADKDSIEYFTKLGSVVCFDLSDCNGENGILPYNRFAGQKRTIQSPEKWVITVSKHKGILTGKEWIRIQELIKQNSSNCFGGKPSTRRTINPKSILSGLLYCSCGAYMRPKIYPSGNMYYLCERKANTKKQECQVKNVNGDDLDKLILDEIFAYDVKERSVYNQLQALKGRINSINNELDVVISRLENKKAENAKRIKNLTYVISQSIEMGTAQEVINIYNEQINELIAENKNISIRINELLNSDFLRSEMTNNLNNISEAINYLRNNFDKLSIQNKREFMKKIIDKVIWDGNEAHIFIKGISD

SEQ ID NO: 2816 - protein, 538 aa, Unknown
  Description of Unknown: Integrase B2817 sequence
  PTHR30461:SF3,SM00857,G3DSA:1.10.10.2600,IPR036162,PF13408, PS51737,G3DSA:3.40.50.1390,IPR025827,IPR006119,IPR038109, PF07508,IPR011109,SSF53041,PF00239,PTHR30461, PS51736,Coil,cd00338
MTAVIYARYSSDNQREESIEGQIRECTAYAEKNGITIVKHYIDRAISAKTDNRPEFQQMIKDSDKKLFDIVLVWKLDRFARNRYDSARYKTQLKKNGVKLMSATEIISEGPEGIILESVLEGYAEYYSADLAEKVVRGQTENILKGRCNGGRGTFGYTLDSERKFHIDPLTSPFVLESFRKYNEGSTMKEIRDWLNENGIKNPVGGAFTYNSVEHMLKNRRYIGELKFRDVVVPDAIPPIVPLELFDDVQEKIAKNKKAPARRKAEDDYLLTTKLFCGYCGVLMFGESGTSRTGEVHRYYKCATAKKHKGCKKKTVRKQWLEDLVVNQTMQLVKDDAAMESIIAKVMELQNKENTNIPLYEKQLRDAESGIQNMLNAIQAGILTSSTKERLEQLEETKRELEARIAEEKLAKPKVTEEFIRFWLLRFRKLDMSLKDQRQALVDTFINAIYLYDDKVLITFNYKEGTQTVTFGEATEVASEGNGSDLDCFTAPENIHEMSMKNRCFVDFLLSAFIGYCAILSAFAGYFVVRIVVRKSRP

SEQ ID NO: 2817 - protein, 538 aa, Unknown
  Description of Unknown: Integrase B2818 sequence
  PTHR30461:SF3,cd00338,SM00857,G3DSA:1.10.10.2600,IPR036162, PF13408,PS51737,G3DSA:3.40.50.1390,IPR025827,IPR006119, IPR038109,PF07508,IPR011109,SSF53041,PTHR30461, PS51736,Coil,PF00239
MARKKNIAAGLDAVIYARYSSHNQREVSIEQQIAECTKHAAALGLRIVGTYEDRAISGKTDNRPRFQQMMRDAEKGKFQAVVAWKSNRIGRNMLQAMVNEAKLDDYGVKVFYAEEDFDDTAAGRFALRNMMNVNQFYSENMAEDITRGLYDNANKCMANGRQPLGYKRGADGKVMLDEPAAAVVREIFTRVATGDLFVDIARDLNAKGIKTSKGAAWNKGSFQSICQNERYKGIYIYGNVRIVDGIPRIVSDELWYRVQEAMRMKKNPVGTRHRVGAEDYLLTGKLRCGHCGSYMTGVSGTSRNGELHYYYTCQKRRTEHACNKKNVRRDVIEPAIAQAIKMYCLTDDVIEWVADRTVEYWEKHDNDLHIEALEQQLEENKKATSNMLKAIEMGIITDATRSRMIELETEQSKLAVQLNAAKADVVKIDRDDLIDELQIFRDMDVNNRSVQAELFKDFLVAAYLYDDNRLKLVFSFMGKEKNVEIPLETGEDPPDGGDSPDTKMFVFAPDCSTRNEKHYTEMCGAFLFYLPFTLRSLS

SEQ ID NO: 2818 - protein, 538 aa, Unknown
  Description of Unknown: Integrase B2819 sequence
  PTHR30461:SF3,SM00857,G3DSA:1.10.10.2600,IPR036162,PS51737, G3DSA:3.40.50.1390,IPR006119,IPR038109,PF07508,IPR011109, SSF53041,PF00239,PTHR30461,PS51736,Coil, cd00338
MSIIVCVFIYNYSTLYTERKGAVMKNDIIKDFIEWLKKENLELINNNATSIVAVYIRVSTDKQEELSPMSQLKEVYKYATSHNMQIDLDSIFLEEEGISGRKAEKREAFKEMISIAKSNSKKFNAILVWKYSRFARNQEESIVYKSMLKKNNVDVISISEPLIDGPFGSLIERIIEWMDEYYSINLSGEVIRGMTEKASKGEPQTAPPFGYDIKDNLFIPNSIEAPIVQFIYEKYGSGAMEMINIAKYLNQHHFVTKRGKRFENRTIWYILTNPVYIGKLRWTPNGKLTREEIYDNTKSIIVKGKHQPLVSEEMFNQVRERLSQQRKFSVKRQRVTSAPHHWLKGLIRCGSCGCTFVRSNSRLRCNGSCKGACECSTTLKIEDVEKLVLERLKIESKSCVKINIMKKEKKTNSEKSEIKILEKQLDLSNEKKKRIKIAFESGIDSIDEYKENKIRINNEIEELNKKIESLKNKNYNDSTIKNKIQENMNNVYNILTNADIDMKKKYDISHFLINKIVYDEENNNLTLYYNELVDALKI

SEQ ID NO: 2819 - protein, 538 aa, Unknown
  Description of Unknown: Integrase B2820 sequence
  cd00338,SM00857,G3DSA:1.10.10.2600,IPR036162,PF13408, IPR025827,G3DSA:3.40.50.1390,PS51737,IPR006119,IPR038109, PF07508,SSF53041,IPR011109,PTHR30461,PS51736, Coil,PF00239
MLASNVKVIQPRKLFNIEESARQLLRVAGYARVSTGRPEQKTSFESQQKHYKELVAKHSDWIDVGLYADEGITATSMRKRKQFLKMIQDAKEGKIDRIIVKSVSRFARNTVDCLATVEELTALGVDVFFELQNLSSLQDSKTTRMQLTMYASMAQEESETLSESVAYGIREGIKNGRYRAPKAYGYRLDENKRLVIDPEQAEVIMFIYNTFLQGYTVGQICAMLNAREIPAPRGGVWYDSTVDGILKNEKYIGDLRLEKTVSTDLKTRRRVPNINGQQFYVTNNHEGILAERMFKRVQAEIEYRQNLRGYSGSGKSAYTTKYPFSNKLFCGRCGSKYRRHSYDLKRKDENGNPKIEKVYTWVCINHKLNKKTACPQTQVKESSLEKAFIAALNTIIEDQDGFVKTVIANISEVLNTRLSEAALEGNRGRYEAKQKELQNVLANSLKSPTAENARLYERLVQELESLKLKIETEEGERSKTLMSKTRAVELEQFINSSKLFHEFDEMVFRKLVERVIVNEDSVTFKFTDFLEREVPLIE

SEQ ID NO: 2820 - protein, 538 aa, Unknown
  Description of Unknown: Integrase B2821 sequence
  PTHR30461:SF3,SM00857,G3DSA:1.10.10.2600,IPR036162,PS51737, G3DSA:3.40.50.1390,IPR006119,IPR038109,PF07508,IPR011109, SSF53041,PTHR30461,Coil,PS51736,cd00338, PF00239
MKENILRVAAYARVSTDKEDQTNSLLSQRSYFADYITHHEGWQLSEVYYDEGISGTQIKKRSGFKKMIQDALNGEVDLIITKEVARFARNTVDTLSYTRKLKSAGVGVIFTIDNIDTRDADGELRLTIMASIAQEESRKTSERVKWGQKRQMEKGVVFGRDLLGYTVQNGQLHINEEEVPIVQAIFHKYTNEGKGTWTIANELLAEGMRPKRIALWSNVVILRVLRNEKYVGDLCQKKTYTPDYLTHSKKYNRGEEEMVYLKEHHEPIIDRDLWNRTQEELKRRSPSEEQKSKHSNRYWCSGKIHCAECGCRYVSRTKKLMSGDVYKAWRCYAAANHGTKKQDADGNEIGCNNSSINDRSLKTCMNYCITLVQGERDSLKKEILKEISQLQKTTAKKLDSKKIKKKIDNLEMKKRKAIDLMLDGLISKEDLQSQTEWYNEELEKLNIQLSDALQKDKSDSRQVNHMEKYIKALDEIMELDSDSEDVYKEVLDHMEIHKGNIVDVWLKSIPIGIRLKVKATGKGEYFKTEILETSFIEK

SEQ ID NO: 2821 - protein, 538 aa, Unknown
  Description of Unknown: Integrase B2822 sequence
  PTHR30461:SF3,SM00857,G3DSA:1.10.10.2600,IPR036162,PF13408, PS51737,G3DSA:3.40.50.1390,IPR025827,IPR006119,IPR038109, PF07508,SSF53041,IPR011109,PTHR30461,Coil, PS51736,cd00338,PF00239
MSTAPNVTIIPAKIQTAENRDKYHQLKVAAYCRVSTEQEEQQNSYQVQIAYYTDLINRKKEWTLAGIFADEGISGTQTKKRTEFNRMIRMCKNKKIDLVITKSISRFARNTVDCLEYVRQLKDLGIGVIFEKENINTLTMTSEFMIALYGSFAQAESESISKNVSWGKEKAYREGKVQFQYKYLLGYKKGEDGKPEIVPEEAETVRLIYTLFLDGYSMNRIKKLLENKGILTSQGKKVWNESLIRSILKNEKYVGDALLQKTFTSDCITHKVVKNHGERPMYLVTDHHEPIIDRDTYNRVQQELARRSSKRKVSDKTVTEQGKYSSKYALTELLICGHCGTPYRRTTWAARGKKQIVWRCISRLEHGKKYCPDSPTIKEEQLHKAIIYAINNYYSCRNDIARILKTNIGSVLECQGQEEIIAVENRLKEIDQARNDLVGLIASGGCDEDKLDSEFAKLYQEEQQLSERLETLKSQNKTSQQTQDKLDKIIDMIEHENFELETFDNVLIRKLIECVKVLSKTEILVIFKGGYEVKAEIE

SEQ ID NO: 2822 - protein, 538 aa, Unknown
  Description of Unknown: Integrase B2823 sequence
  PTHR30461:SF3,cd00338,SM00857,G3DSA:1.10.10.2600,IPR036162, PF13408,PS51737,IPR025827,G3DSA:3.40.50.1390,IPR006119, IPR038109,PF07508,IPR011109,SSF53041,PTHR30461, PS51736,Coil,PF00239
MARKKNIAAGLDAVIYARYSSHNQREVSIEQQIAECTKHAAALGLRIVGTYEDRAISGKTDNRPRFQQMMRDAEKGRFQAVVAWKSNRIGRNMLQAMVNEAKLDDYGVKVFYAEEDFDDTAAGRFALRNMMNVNQFYSENMAEDITRGLYDNANKCMANGRQPLGYKRGADGKVMLDEPAAAVVREIFTRVAAGDLFVDIARDLNAKGIKTSKGAAWNKGSFQSICQNERYKGIYIYGNVRIVDGIPRIVSDELWYKVQEAMRMKKNPVGTRHRVGAEDYLLTGKLRCGHCGSYMTGISGTSRNGELHYYYTCQKRRTEHACNKKNVRRDVIEPAIAQAIKMYCLTDDVIEWMADQTVQYWEKHDNDLQIEALEQQLAENKKATSNMLKAIEMGIITEATRSRMVELETENSKLTAQLSAARRDVVKINREDLIDELHILRSKDIHDREVQAELFKDFLVAAYIYDDNRLKLVFSFMGKDNSVEIPLETGEDPPDGEDSPDAKMFVLTPDCSTRNEKHYTEMCGAFLFYLPFTLRSLS

SEQ ID NO: 2823 - protein, 538 aa, Unknown
  Description of Unknown: Integrase B2824 sequence
  PTHR30461:SF3,cd00338,SM00857,G3DSA:1.10.10.2600,IPR036162, PF13408,PS51737,G3DSA:3.40.50.1390,IPR025827,IPR006119, IPR038109,PF07508,IPR011109,SSF53041,PTHR30461, PS51736,Coil,PF00239
MCAKKKPAMLEPDMQDAVIYTRYSSHNQRDCSIEQQVADCEIFARQNNLRVVKVYADRHLSGTTDNRPQFQQMLKDASHGHWAYVICWKIDRFARNRYDSATYKFRLKKAGVRVLYAKESIPDGPEGILLESVLEGSAEYYSAALAQNIRRGMKYNAEQCKVNSGSIPFGYCKGPDGRFAIHEANAEVVREIFRKAAAGMPFVDIANDLNSRGLKTSRGGRWNKGSFRLLMNEAYIGVYHFSDTRIEGGMPALIDQGTFWAANERLKANSSVRGRHQDGGDYLLTGKLKCAHCGSYMIGFSGTGKSGELHYYYGCQKRRRERACKKANVPREWIERVVVKAALDYVLRPDVMEWIADAVMEYQEREAASAQLAALTAELEENQKATDNVMKAIEAGIITSTTKQRLLDLEAKAQDLKRAIELEKLSHVRLERDQVLFWLDRFRGGSLQSQEFRRKVIDAFVSVVYLSDDHLRIAFNYSGGSNAEADFDLVMDAEAAAGELSKKFAQGHVASTKCEPGEPPTIYFVGAFFVLTMPLPER

SEQ ID NO: 2824 - protein, 538 aa, Unknown
  Description of Unknown: Integrase B2825 sequence
  SM00857,G3DSA:1.10.10.2600,IPR036162,PF13408,IPR025827, G3DSA:3.40.50.1390,PS51737,IPR006119,IPR038109,PF07508, IPR011109,SSF53041,PTHR30461,PS51736,cd00338, PF00239
MAKYKQVVQEQIGVIYARYSSSGQRDESIEGQLRDCHAFAERYNIRIIEEYCDRAMTGTSDRRPEFQRMIRDSSKGQFNVVITWKNDRFARSRYDSAVYKAKLKQNGVRLLYAKESIPDGPEGIVLESVMEGFAEYYSANLSQNVKRGNYDSALKRQTLGQTVFGLRKGVDKRFEIDPATGPVVQRIFKEYAAGQSAVSIYTALNEEGFRTLRGNPFNKNSIRKILQNEKYVGVYEYADIRDEHGIPALVSRETFDRVQIMLEKHHRSPAAKKDAGGFLLTTKLFCGLCGEPMTGDCGTGKSGTVYSYYICNGRRAKKCKKERVSKEWIEDVVVAALAEVVNNDEMINAFADHFIAWQATQQKGSAVADLEQRIKQIDTAIRNTMSVIDSGLITESLKTHLLELESEKTALADALAKKRLDTIELDRETVIWFLERFRTADQSDPGWRIYIVETFLQAVYLYDDGRLLLRLNYGGKNNEVSLKAVEETVAEGEQLSSMFEFRVPRRTKNNLCRKAKVIFYVCGKKQHCFVENGPTLPI

SEQ ID NO: 2825 - protein, 538 aa, Unknown
  Description of Unknown: Integrase B2826 sequence
  PTHR30461:SF3,SM00857,G3DSA:1.10.10.2600,IPR036162,PF13408, PS51737,IPR025827,G3DSA:3.40.50.1390,IPR006119,IPR038109, PF07508,IPR011109,SSF53041,PTHR30461,PS51736, cd00338,PF00239
MSTAPNVTVIPAKVQTAESRDKYHQLRVAAYCRVSTELEEQQNSYQVQIAYYTDLINKKKEWTLAGIFADEGISGTQTKKRTEFNRMIRMCRNKKIDLVITKSISRFARNTVDCLEYVRQLKDLGIGVIFEKENINTLTMTSEFMIALYGSFAQAESESISKNVSWGKEKAYREGKVQFQYKHLLGYKKGADGKPEIIPEEAETVKLIYTMFLDGHSMKNIALILHVKGIHTKTGSTEWRTNTITRILQNEKYVGDALLQKTFTSDCITHKVVKNHGERPMYLVTNHHDPIIDRDTYNRVQQELARRNSKRKISDKTVTEQGKYSSKYALSELLICGHCGTPYRRTTWAARGKKQIVWRCLSRLEHGKKYCPDSPTIKEEQLHRGILRAINNYYSCRNDIVRILKANIGSVLECQGQEEILSVEKRLKEIDQARTDLVNLIASGGCDEDKLDSEFAKLYAEEQGLSERLTMLKSQNKTSEETQAKLDKIMDMIEHEKFELETFDNVLIRKLIECVKILSKTEILVIFKGGYEVRTEIE

SEQ ID NO: 2826 - protein, 538 aa, Unknown
  Description of Unknown: Integrase B2827 sequence
  PTHR30461:SF3,SM00857,G3DSA:1.10.10.2600,IPR036162,PS51737, G3DSA:3.40.50.1390,IPR006119,IPR038109,PF07508,IPR011109, SSF53041,PTHR30461,Coil,PS51736,cd00338, PF00239
MKENILRVAAYARVSTDKEDQTNSLLSQRSYFADYITHHEGWKLSEVYYDEGISGTQIKKRSGFKKMIQDALNGEVDLIITKEVARFARNTVDTLSYTRKLKSAGVGVIFTIDNIDTRDADGELRLTIMASIAQEESRKTSERVKWGQKRQMEKGVVFGRDLLGYTVQNGQLHINEEEVSIVQAIFHKYTNEGKGTWTIAKELLAEGMRPKRIALWSNVVILRVLRNEKYVGDLCQKKTYTPDYLTHSKKYNRGEEEMVYLKEHHEPIIDRDLWNRTQEELKRRSPSEEQKSKHSNRYWCSGKIHCAECGCRYVSRTKKLMSGDVYKAWRCYAAANHGTKKQDADGNEIGCNNSSINDRSLKTCMNYCITLVQGERDSLKKEILKEISQLQKATAKKVDSKKIKKKIDNLEMKKRKAIDLMLDGVISKEDLQNQTEWYNEELEKLNIQLSDALQKDKSDSRQVNNMEQYVKALDEIIELDGNSEDVYKEVLDHMEIHKGNIVDVWLKSIPIGIRLKVKATGKGEYFKTEILETSFIEK

SEQ ID NO: 2827 - protein, 538 aa, Unknown
  Description of Unknown: Integrase B2828 sequence
  PTHR30461:SF3,cd00338,SM00857,G3DSA:1.10.10.2600,IPR036162, PF13408,PS51737,G3DSA:3.40.50.1390,IPR025827,IPR006119, IPR038109,PF07508,IPR011109,SSF53041,PTHR30461, PS51736,Coil,PF00239
MCAKKKPAMLEPDMQDAVIYTRYSSHNQRDCSIEQQVADCEIFARQNNLRVVKVYADRHLSGTTDNRPQFQQMLKDAAHGHWAYVICWKIDRFARNRYDSATYKFRLKKAGVRVLYAKESIPDGPEGILLESVLEGSAEYYSAALAQNIRRGMKYNAEQCKVNSGSIPFGYCKGVDGRFAIHEANAEVVREIFRKAAAGMPFVDIANDLNSRGLKTSRGGRWNKGSFRLLMNEAYIGVYHFSDTRIEGGMPALIDQGTFWAANERLKANSSVRGRHQDGGDYLLTGKLKCAHCGSYMIGFSGTGKNGELHYYYGCQKRRRERACKKANVPREWIERVVVKAALDYVLRPDVMEWIADAVMEYQEREAASAQLAAMTAELEENQKATDNVMKAIEAGIITSTTKQRLLDLEAKAQDLKRAIELEKLSHVRLERDQVLFWLDRFRGGSLQSQEFRRKVIDAFVSVVYLSDDHLRIAFNYSGGSNAEADFDLVMDAEAAAGELSKKFAQGHVASTKCESGEPPTIYFVGAFFVLTMPLPER

SEQ ID NO: 2828 - protein, 537 aa, Unknown
  Description of Unknown: Integrase B2829 sequence
  PTHR30461:SF3,IPR036162,PS51737,IPR011109,PTHR30461, PF00239,G3DSA:1.10.10.2600,PF14287,IPR006119,SSF53041, IPR025378,SM00857,IPR025827,cd03770,IPR038109, PS51736,PF13408,G3DSA:3.40.50.1390,PF07508,Coil
MLRQTTQNLITALYPRLSHEDELQGESNSISNQKRILETYAKQNGFTNLCWYTDDGYSGANFQRPGFQAMLADIEAGKVGTVIVKDMSRLGRNYLQVGMYTEMLFPQKGVRFIAINDGVDSAMGDNDFTPLRNLFNEWMVRDTSKKIKAVKKAKGLSGKPVTSKPVYGYLMDDDENFIIDEEAAPVVKQIYQLCLAGNGPTKIARMLTEQQIPTPGTLEYQRTGSTRRYHPGYECKWATNTVVHLLENREYTGCLVNFKTEKPSYKMKHSIDNPIEKQAIFENHHEPIIDLQTWERVQELRKQRKRPNRYDDVGLFSGLLFCADCGHVMYQQRYQTDKRKQDCYICGSYKKRTADCTAHFIRTDLLTAGVLDNLRKVTAYAQKHEARFVKLLIQQNEMGGKRKLAAAAKQLEQVQSRIAELSRYIKRLYEDNVNGKISDERFMEMSADYEAEQRELKDRAAALQGELDKAQEATVNAEKFMSVVRKYLSIEELTHTLLREMVEKIVVYECEYDENEVRRQRIDIYYSFVGKIDLPEE

SEQ ID NO: 2829 - protein, 537 aa, Unknown
  Description of Unknown: Integrase B2830 sequence
  PTHR30461:SF3,SM00857,G3DSA:1.10.10.2600,IPR036162,PF13408, IPR025827,G3DSA:3.40.50.1390,PS51737,IPR006119,IPR038109, PF07508,IPR011109,SSF53041,PF00239,PTHR30461, PS51736,Coil,cd00338
MAKKKKPAGGIAVIYARYSSHNQRDVSIEQQIEACRKHAAELGLTIIATYEDRAISGRTDNRPAFQRLMHDAEKGKFSYVLAWKSNRMGRNMMQAMVNESRLMDCGIKVYYAEEDFDDSAAGRFALRSMMNVNQFYSDNLAEDVRRGLMDNANKCMVNGRQPLGYKRGKDGKVVVDEPAAAIVREVYARVASGELFTDIARDLNRRGIKTADKGEWNKNSFHRLCSNEKYRGIYIYGDVRIEGGIPTIIDDTLWYKVQEALRVKKLKRNGRHRPGDEDYLLTGKLRCGKCGGYMIGMSGRSKTGDIHYYYACQNRRVGRTCDKKNIRRDVIEPAVAQAIKEYCLTDDAIEWIADKTVEYWEKADRNLQLDSIEGDLAAVQSSISNVMKAIEMGVVTETTRDRLIELEKQRTDLKSKLALAKEEVVHVDRKKLISSLLLFRNGDIHDRQYQEDLFKTFLISVYVYDDDDNGHLKIVFNAFGDNNTVDLPIDFGETDNQSAFSDGAEKFDYSLHRSTRTKPSDEQSGGFSVLFSADFTQ

SEQ ID NO: 2830 - protein, 537 aa, Unknown
  Description of Unknown: Integrase B2831 sequence
  PTHR30461:SF3,cd00338,SM00857,G3DSA:1.10.10.2600,IPR036162, PF13408,PS51737,G3DSA:3.40.50.1390,IPR025827,IPR006119, IPR038109,PF07508,IPR011109,SSF53041,PTHR30461, PS51736,Coil,PF00239
MAKRKFNKGGEVRLVAYYRYSGGSGQTEQSIEGQRRDCETYARLHNMTIQKEYVDRHISGKTDDRAAFQQMITDSDKGAFDMVICWKTDRFARNRYDSAVYKKRLRDNGVEIVYAAESNIAGAEGIIIEGVMEALAEYYSAELAEKMRRGMRESALKGQAISRCRALGLKTDEHKRFVIDEKTAPTVRFIFEHYAAGESATSIVDKLNAKGLRTSQGNPFNKSSIPRIIQNEAYRGVYVSKSYDVRIEGAIPAIIDDELWERAQTMLKLNRQLKAKNEPKADYILSGKLYCSCGSLMRGMSGHSATGEVYRYYTCPNKNCHLRNIPKDDLEGKVMQSISDHLLQPEAMEALAEAMVEVQKADAEKPNAERVAIEQSLADVRRRSKNILDAIENGTANAQLCARLDDLSEQERTLNFQLSALEKEKPVVFTKEQYLFLLEQFLVEPSERTPEYGRRLVNTFVTSMVVSDRELVINFNVSDETVNKNKKTSQTNLQKESSSGMRLVHLAHQQANYSLYAASGYFSLVEHQFSARLWRTA

SEQ ID NO: 2831 - protein, 537 aa, Unknown
  Description of Unknown: Integrase B2832 sequence
  PTHR30461:SF3,cd00338,SM00857,G3DSA:1.10.10.2600,IPR036162, PF13408,IPR025827,G3DSA:3.40.50.1390,PS51737,IPR006119, IPR038109,PF07508,SSF53041,IPR011109,PTHR30461, PS51736,Coil,PF00239
MNVVLYMRYSSDRQTEQSIEGQKRVCMDFCERQGYNVVGEYIDRATSAYKETAKRTNFCRMIRDSSNGLWQGVVVYKLDRFARNRYDSATYKVRLKKNGVKVISATENISDSPEGVILESVLEGMAEFYSKELSQKVSRGLNESAHKCNSTGGAIPLGYKTVDKKLTVDEPSAQIVKEAFDLYAGGATISEICEKFNSQGYRTKKGTEFNKNSFKSMFRNEKYIGTYTYKDIRIEGGIPAIIDKKTFETVQKKLSANAQAPARGKARVNYLLSQKLFCGHCGANMIGESGRSKTGETYYYYSCSTRKRFHSCKKRTIRKDLIERIVAKNAMRLITPEMINTIADMAIKCNREDIESDAIIPALTADLKEINTSIKNLLKMVERGVESETLDSRLKELEKRKKDTESRLDAAKSEYLTLDKTVIVGWLSQFLSGDIEDEDFRRHLIDTLINSVTVWDEPDGGYKITTVYNLKGNTQTYRVNADGSSDMKRNSPPKKRQFSCEDCRFFLFCMFSFRFSFFDLKDNGQEKNYAETGFCHR

SEQ ID NO: 2832 - protein, 537 aa, Unknown
  Description of Unknown: Integrase B2833 sequence
  PTHR30461:SF3,cd00338,SM00857,G3DSA:1.10.10.2600,IPR036162, PF13408,PS51737,IPR025827,G3DSA:3.40.50.1390,IPR006119, IPR038109,PF07508,SSF53041,IPR011109,PTHR30461, PS51736,Coil,PF00239
MAKRKFNKGGEVRLVAYYRYSGGSGQTEQSIEGQRRDCEAYARLHNMTIQKEYVDRHISGKTDDRAAFQQMIADSDKGAFDMVICWKTDRFARNRYDSAVYKKRLRDNGVEIVYAAESNISGAEGIIIEGVMEALAEYYSAELAEKMRRGMRESALKGQAISRCRALGLKTDEHKRFVIDEKTAPTVRFIFEHYAAGESAMSIVEQLNAKGLRTSQGNPFNKSSIPRIIQNEAYRGVYISKSYDVRIEGAIPAIIDDELWERAQTMLKLNRQLKAKNEPKADYILSGKLYCSCGSLMRGMSGHSATGEVYRYYTCPNKDCHLRNIPKDDLEGKVMQSIVDHLLQPESMEALAEAMVEVQKADVEKPNAERVAIEQSLSDVRRRSKNILDAIENGTANAQLCARLDDLTEQEQTLSFQLSSLEKEKPVVFTKEQYLFLLEQFLMEPSERTPEYGRRLVNTFVTSMVVSGRELVINFNVSDETVNKNKKTSQTNLQKESSSGMRLVHLAHQQANYSLYAASGYFSLVEHQFSARLWRTA

SEQ ID NO: 2833 - protein, 537 aa, Unknown
  Description of Unknown: Integrase B2834 sequence
  PTHR30461:SF3,cd00338,SM00857,G3DSA:1.10.10.2600,IPR036162, PF13408,IPR025827,PS51737,G3DSA:3.40.50.1390,IPR006119, IPR038109,PF07508,SSF53041,IPR011109,PTHR30461, PS51736,Coil,PF00239
MAKKKKPAGGIAIIYARYSSHNQRDVSIEQQIEACRKHATELGLTIIATYEDRAISGRTDNRPAFQRLMHDAEKGKFSYVVAWKSNRMGRNMMQAMVNESRLMDCGIKVYYAEEDFDDSAAGRFALRSMMNVNQFYSDNLAEDVRRGLMDNANKCMVNGRQPLGYKRGKDGKVVVDEPAAAIVREVYARVASGELFTDIARDLNRRGIKTADKGEWNKNSFHRLCSNEKYRGIYIYGDVRIEGGIPTIIDDTLWYKVQEALRVKKLKRNGRHRPGDEDYLLTGKLRCGKCGGYMIGMSGRSKTGDIHYYYACQNRRVGRTCDKKNIRRDVIEPAVAQAIKEYCLTDDAIEWIADKTVEYWEKADRNLQLDSIEGDLAAVQSSISNVMKAIEMGVVTETTRDRLIELEKQRTDLKSKLALAKEEVVHVDRKKLISSLLLFRNGDIHDRQYQEDLFKTFLISVYVYDDDDNGHLKIVFNAFGDNNTVDLPIDFGETDNQSAFSDGAEKFDYSLHRSTRTKPSDEQSGGFSVLFSADFTQ

SEQ ID NO: 2834 - protein, 537 aa, Unknown
  Description of Unknown: Integrase B2835 sequence
  PTHR30461:SF3,SM00857,G3DSA:1.10.10.2600,IPR036162,PF13408, PS51737,G3DSA:3.40.50.1390,IPR025827,IPR006119,IPR038109, PF07508,IPR011109,SSF53041,PTHR30461,Coil, PS51736,cd00338,PF00239
MPKVTMIPATINPLTHLPKETTQKRRVAGYARVSTDSDEQFTSYEAQVDYYTKFIQSKPEWDFVKVYTDEGISGCNTKHRDGFKEMISDALAGKIDLIVTKSVSRFARKTVDSLVTIRKLKENGVECYFEKEGIYTFDGKGELLITIMSSLAQEESRSISENITWGQRKSFADGKIHLAYKHFLGYEKGEDGRPTVVEKEAVVVRLIYRLFLDGKTQAGICRHLESLGIPSPSGKEKWSKTTVTSILTNEKYKGDALLQKSFTVDFLEKKTKPNEGEVPQYYVEGSHPAIIDPDEWDHVQAEFNRRKALGNAYSGKSIFSAKLVCEDCGAFFGSKVWHSTDQYRRTIWQCNNKFKNKERCQTPTVDTETVQRLFIKAYNQMMCDRQQIVNDCEAMRRTLTDFKSLDDDVERQLEETQVIAELVKAIVKENATTAQSQETYIKKYEALTKRYDTAAAELKRLQELRASRSQKDKSMALYIRTLKKQPTVLHEWNDTIWTVMVEKAIVHRNGEITFVFYNGTKIRVGELNNRAAGLLIF

SEQ ID NO: 2835 - protein, 537 aa, Unknown
  Description of Unknown: Integrase B2836 sequence
  PTHR30461:SF3,cd00338,SM00857,G3DSA:1.10.10.2600,IPR036162, PF13408,IPR025827,G3DSA:3.40.50.1390,PS51737,IPR006119, IPR038109,PF07508,IPR011109,SSF53041,PTHR30461, PS51736,Coil,PF00239
MYEDIKTACLYVRFSSHNQTEQSIEGQTRVCRDFCKRHNIRIVEIYADRATSASKDIEKRVQFLKMIKDSERGLFDAVIVYKLDRFARSRYDSATYKYRLKRNGVQLISATENISNDPEGIILESVLEGMAEFYSAELSQKINRGMRESAYKHNSIGGAIPLGYKIEDKKLVIDPKTAPIVKEAFEKYADGETVAEICRQFNARGYKTSKGTAFGKSSFTKIFRNERYIGVYTFHDYRAEDAIPAIIDKDLWDRVQLRVGKIKNAPARNKAKVVYLLSGKIFCGHCGSKMNGNCNAGNYCYYQCYGKKNGNVDCKKKNIRKEFIERLVAQDALSLLTDEYVEQIATIACEKNQHEIELDSALPTIRDRIHQVDLSLNNLLKAIESGSAPDMLVKRMGELEKEKKDLQAQAKKESEDIIELDKAQVIYWLEQFRGGSIEDEEFCRMLIDLFVNSVTVWDEDDNTYKVTVAYNLTSLPTKTYRLNKGGTLSDFASNAPDRKSQDNGIIFFNMSICICDLWTDLLIAHLHAASGFLIHPV

SEQ ID NO: 2836 - protein, 537 aa, Unknown
  Description of Unknown: Integrase B2837 sequence
  PTHR30461:SF3,SM00857,G3DSA:1.10.10.2600,IPR036162,PF13408, PS51737,IPR025827,G3DSA:3.40.50.1390,IPR006119,IPR038109, PF07508,IPR011109,SSF53041,PF00239,PTHR30461, Coil,cd00338
MTENKNRVCCLYRVSTDKQVDFNSNHEADLPMQRKACHKFAEAKGWVIVHEEQEEGVSGHKVRAEARDKLQIIKEYARKGKFDILLVFMFDRIGRIADETPFVVEWFVRNGIRVWSTQEGEQRFDNHTDKLLNYIRFWQADGESEKTSVRTRTSLRQLVEEGHFKGGSAPYGYDLVKSGRINKRKHELYELHINEQEAEIVRLIFDKYVYEGYGAQRIATYLNNAGYRARSGKCWHPGSLRGMVGNLTYMGVLRCGDARSELMPELQIIPQEEFEAAQRIREDRSAHAAEEAEHHVPLRTRGQALLSNNVYCGHCGARLALTTSRKWRKLSDGTLDDTLRIRYTCYGKLRKQTDCTGQTGYTMHILDEIIDKMVRQIFSRLRGIPKEQLITSRYAKETAERKNHLQALQAERDKAEKDLLALKTEILAVIKGESAFPKDTLAEMIAAQEKKHTELETLCEEASAELERNAELMANVSQLYEELISYADLYDSASFEAKKMIVSQLIRRVEVYRGYQIHVDFNFDLAQYLENSDELAC

SEQ ID NO: 2837 - protein, 537 aa, Unknown
  Description of Unknown: Integrase B2838 sequence
  IPR036162,PS51737,IPR011109,PTHR30461,PF00239, G3DSA:1.10.10.2600,IPR006119,PF14287,SSF53041,IPR025378, SM00857,IPR025827,cd03770,IPR038109,PS51736, PF13408,G3DSA:3.40.50.1390,PF07508,Coil
MSDTNKITALYCRLSHEDELAGESNSISNQKDILQKYADDNGFYNTEFYIDDGYTGVDFERPAFKRMIDDVDNGRIGTIITKDLSRLGRNHLHVGLFTEEYFPRNNVRYIAINNNIDSDNPDSSAIDMAAFYNIFNEFHVKDTSRKIKASCLIKSERGQRVASRPPYGYMKEPNDHSKIIPNPETVPIVRHIFQLCAEGLGPAQIAHRLEEEQIYTPAMYEYSKSGTVISNFDTSYPYRWNPTVVANVLEDVSYIGHTCNFRFGRASYKDHRKLKLPESEHRLIENTHEPIIDINTWEIVQRLRQSKRRFTRSGEKSIFAGIIFCADCKQKLYFHRHVREKPENWKFVCSSYRKNSREQCTMHGIKESHLKEIVLHEIRNVTAFARERTDEFAEYISLKSNSAVKKELSDANKKLKKSEKRLAEVGIIFRKLYEDHVLGTIDNDQFRMLSQGYTDEQNQLKAEISDLNKAIQELKSQTANTAKFTAMAKKYTDITELTQEILHTFVSRIEVHEKRKDDNGSVTQEIDIYFTHIGIVK

SEQ ID NO: 2838 - protein, 537 aa, Unknown
  Description of Unknown: Integrase B2839 sequence
  PTHR30461:SF3,IPR036162,PS51737,IPR011109,PTHR30461, PF00239,G3DSA:1.10.10.2600,IPR006119,SSF53041,cd00338, SM00857,IPR025827,IPR038109,PS51736,mobidb-lite, PF13408,G3DSA:3.40.50.1390,PF07508,Coil
MMQQALNAVIYARYSSHNQTEQSIEGQLRDCYAFAEREGLQVIGEYIDRAITGRTDERPDFQRMIADARKQEFQRVIVWKFDRFSRDRYDSAIYKHKLKQCGVRVLSAMENVGEGDVSIILEALLEASAEQYSLDLSKKVLRGQRESRLKGTFLGGLTPIGYKLENRKLVADERTAPIVRYIFEQYTKGTSKQDIINELATRGILNRHGKPLSHSTLQTILKNKKYIGVYTHGGQDVAGGCEALIDEKTFLKVQEQLSKRKHAPAASKAVIEYLLQGKLYCGYCGFNMFGDSGRGRNGSTYRYYACRRRKKERDCKKKNEKKDFIEWYVVEQTVEYVLTPERIEYIASELVAQYKKDCGIDRIKTYEKQLDRIKAEISRLVDTLAVCPAAARQPIFDKMEQLDAEKQEVELDLSKLRISAKIQISKEHIADWLKQFCNGDALDVDFQKRIIDTFINSVYLYDDKVIIYYNIEGGKQVSYIDMIDSTEEPPFSDDAPGSSGGSDLKRPALPEYNRTKLFLPHLRLQAPRLQSPLFYLQ

SEQ ID NO: 2839 - protein, 537 aa, Unknown
  Description of Unknown: Integrase B2840 sequence
  PTHR30461:SF3,SM00857,G3DSA:1.10.10.2600,IPR036162,PF13408, PS51737,G3DSA:3.40.50.1390,IPR025827,IPR006119,IPR038109, PF07508,IPR011109,SSF53041,PF00239,PTHR30461, PS51736,Coil,cd00338
MAKRKFNKGGEVRLVAYYRYSGGSGQTEQSIEGQRRDCETYARLHNMTIQKEYVDRHISGKTDDRAAFQQMIADSDKGAFDMVICWKTDRFARNRYDSAVYKKRLRDNGVEIVYAAESNIAGAEGIIIEGVMEALAEYYSAELAEKMRRGMRESALKGQAISRCRALGLKTDEHKRFVIDEKTAPTVRFIFEHYAAGESATSIVDKLNAKGLRTSQGNPFNKSSIPRIIQNEAYRGVYVSKSYDVRIEGAIPAIIDDELWERAQTMLKLNRQLKAKNELKADYILSGKLYCSCGSLMRGMSGHSATGEVYRYYTCPNKNCHLRNIPKDDLEGKVMQSISDHLLQPEAMEALAEAMVEVQKADAEKPNAERVAIEQSLADVRRRSKNILDAIENGTANAQLCARLDDLSEQERTLNFQLSALEKEKPVVFTKEQYLFLLEQFLVEPSERTPEYGRRLVNTFVTSMVVSDRELVINFNVSDETVNKNKKTSQTNLQKESSSGMRLVHLAHQQANYSLYAASGYFSLVEHQFSARLWRTA

SEQ ID NO: 2840 - protein, 537 aa, Unknown
  Description of Unknown: Integrase B2841 sequence
  cd00338,SM00857,G3DSA:1.10.10.2600,IPR036162,PF13408, IPR025827,PS51737,G3DSA:3.40.50.1390,IPR006119,IPR038109, PF07508,IPR011109,SSF53041,PTHR30461,PS51736, Coil,PF00239
MPNAVIYARYSSHAQRDASIDQQLSVCRAFAQRGGIDVVDVYTDRALTGTNDNRPGFRRMLADAAKGGWNYVIVYALDRFSRDRYDAATSKHKLKQAGVKLLSATEPIAETPAGILMESMLEGYAEYYSRELAAKVRRGQMDNAKKCMVNGSLPLGYCKGPDGRYAVEPTEAAVVQEIFRRVGAGEPLANIIDDLNDRGLRSKKGQPWNKSSFNRMLANERYTGIYIYQDIRIPGGIPAIVTQAEFDAVQRAAISKKNPRRAVMPDAPMSRRRQDGVYLLTGKLFCGDCGSPLIGVSGTARNQSLHHYYACKGRISKTSPGCGLKNIRREDIEYEIAAAIKQTMLTPETIQAIAQATYDYQCEAYANPDLTLLEDQLQETNRALKNLMSAIEQGLFTPTTRDRLLELELQKDNLTARLAVAKSRAADLPTREEIIAALDYYANGDLTDPLYQEALIDTFLVRAYVHSDHYDIYFSPDAKTKTEFPIGFTDATKPVFALLNGSHRLPEGPPTNVIRTSPTEVVCIAGLYRFTVSRPSR

SEQ ID NO: 2841 - protein, 537 aa, Unknown
  Description of Unknown: Integrase B2842 sequence
  PTHR30461:SF3,cd00338,SM00857,G3DSA:1.10.10.2600,IPR036162, PF13408,PS51737,G3DSA:3.40.50.1390,IPR025827,IPR006119, IPR038109,PF07508,SSF53041,IPR011109,PTHR30461, PS51736,Coil,PF00239
MAKRKFNKGGEVRLVAYYRYSGGSGQTEQSIEGQRRDCEAYARLHNMTIQKEYVDRHISGKTDDRAAFQQMIADSDKGAFDMVICWKTDRFARNRYDSAVYKKRLRDNGVEIVYAAESNISGAEGIIIEGVMEALAEYYSAELAEKMRRGMRESALKGQAISRCRALGLKTDEHKRFVIDEKTAPTVRFIFEHYAAGESAMSIVEQLNAKGLRTSQGNPFNKSSIPRIIQNEAYRGVYISKSYDVRIEGAIPAIIDDELWERAQTMLKLNRQLKAKNEPKADYILSGKLYCSCGSLMRGMSGHSATGEVYRYYTCPNKDCHLRNIPKDDLEGKVMQSIVDHLLQPESMEALAEAMVEVQKADAEKPNAERVAIEQSLADVRRRSKNILDAIENGTANAQLCARLNDLTEQEQTLSFQLSSLEKEKPVAFTKEQYLFLLEQFLVEPSERTPEYGRRLVNTFVTSMVVSDRELVINFNVSDETVNKNKKASQTNLQKESSSGMRLVHLAHQQANYSLYAASGYFSLVEHQFSARLWRTA

SEQ ID NO: 2842 - protein, 537 aa, Unknown
  Description of Unknown: Integrase B2843 sequence
  PTHR30461:SF3,SM00857,G3DSA:1.10.10.2600,IPR036162,PF13408, PS51737,G3DSA:3.40.50.1390,IPR025827,IPR006119,IPR038109, PF07508,IPR011109,SSF53041,PTHR30461,Coil, PS51736,cd00338,PF00239
MARKKKVSPGNRLVAYYRYSGGSQQTEQSIEGQRRDCEAYARQHGLTIVHEYIDRHISGRGVESRLAFQQMIADSSKHLFDLVICWKTDRFARNRYDSAVYKKKLRDNGVRILYAAESSVEGPEGIILEGLMESLAEYYSAELAQKMRRGMRESALKGRAINPSRPLGLTTDEHKRFIIDEKNAPTIRFIFEHYAAGESSASIVEQLNAAGLRTSKGNAFNKCSIPRIIQNEAYHGVYICKAYDVRIDGAIPAIIDDDLWKRAQKMLTLNKQHRAPHSSHADYLLSGKLFCGCCHSLMRGISGHNCRNDVYYYYACGNKADGGTCKKKNIPKDVAENLVVNAICENILRPDTLEDLADAIAAAQQADVNQPDPERAMLEQNLADVHRKINNIIESIENGTASSRLSARLADLEQQESTLNYQLESLKEVHPPVLDRERILFLLEQFLISPNERTEDYNRRIIDTFVNRIDITDTEMLIYFNLSEASASEKQKNSQPNSCSTGNHLVHLTHPHSNNFTLYATTNSFYMLLSNLTFSRT

SEQ ID NO: 2843 - protein, 537 aa, Unknown
  Description of Unknown: Integrase B2844 sequence
  PTHR30461:SF3,IPR036162,PS51737,IPR011109,PTHR30461, PF00239,G3DSA:1.10.10.2600,IPR006119,PF14287,SSF53041, IPR025378,SM00857,IPR025827,cd03770,IPR038109, PS51736,PF13408,G3DSA:3.40.50.1390,PF07508,Coil
MSDTNKITALYCRLSHEDELAGESNSISNQKDILQKYADEHGFYNTAFYIDDGYTGVDFERPAFKRMIDDVDNGRIGTIITKDLSRLGRNHLHVGLYTEEYFPRRNVRYIAINNNIDSDNPDSSAVDMAAFYNIFNEFHVKDTSRKIKASCVIKSERGQRVASRPPYGYMKSQEDHNKILPNPETALVVKYIFQLCADGLGPAQIAHRLEEEQIYTPAMYEYSQTGNVISNFDTSYPYRWNPTAVANILEDVSYLGHTCNFRFGRASYKDHRKLKLPKSEHKLIENTHEPIIDINIWEIVQRLRQSKRRFTRSGEKSIFAGIVFCADCKQKLYFHRHAREKSENWKFICSSYRKNSREQCTMHGIKESHLKEIVLHEIRNVTAFARERTDDFAEYISRESNTAAKKELSEANKKLKKSEKRLAEVGIIFRKLYEDHVLGTIDDDQFRMLSQGYTDEQNQLKAEISDLKHTMQELQSQTANTARFAALAKKYTDITKLTQEILHTFVSRIEVHEKLKDDNGSITQEIDIYFTHIGIVK

SEQ ID NO: 2844 - protein, 537 aa, Unknown
  Description of Unknown: Integrase B2845 sequence
  cd03768,PTHR30461:SF3,SM00857,G3DSA:1.10.10.2600,IPR036162, PF13408,IPR025827,PS51737,G3DSA:3.40.50.1390,IPR006119, IPR038109,PF07508,IPR011109,SSF53041,PTHR30461, PS51736,Coil,PF00239
MKVAIYTRVSTHHQIDKDSLPLQREELINYSKYILNTNNYEVFEDAGYSGKNTDRPAFQDMIKRIKAGEFSHLLVWKIDRISRNLLDFCDMYEELKRCNCIFVSKNEQFDTSSAMGEAMLKIILVFAELERKLTGERVKSVMLDRASKGMWNGSPIPLGYKWDSKIKFPIINKEEKNTIELIFNTYLTEESTSIVRNILNANNIKTKRNGRWTTKTITDIIRNPFYIGTYRYNYRESARGKKKSEDEWVVLEDNHPPIISKEIFNKCNDIMDRNSLRSNSKFRANGKTHIFAGLIKCGSCMGNYYAKQDKPHLDGFRPSLYVCSNRYNKNNCEEKTVSEKIIYNFITSLLRNISSINSKNRIDYLEFIDLLSRNLGVKEIKCEDLFDIMINKKHGFYSFNNKNYNKSSNLDLKIKELEKYKRALKRLEELYLFDEDSMSSKDYVLKKKEIQDNINKINEEMKLENKDSEEIKLDTILLNTVLNEIILKNVDNKTAIKLLKRESLKEFFNSFIKEIYILDKKITSITFKNGLNIGFSY

SEQ ID NO: 2845 - protein, 537 aa, Unknown
  Description of Unknown: Integrase B2846 sequence
  PTHR30461:SF3,IPR036162,PS51737,IPR011109,PTHR30461, PF00239,G3DSA:1.10.10.2600,IPR006119,SSF53041,cd00338, SM00857,IPR025827,IPR038109,PS51736,mobidb-lite, PF13408,G3DSA:3.40.50.1390,PF07508,Coil
MRKKNKFPIDLSMLTDLEIQQFVDDPSTLYDGDIDVCLYLRFSSERQGEQSIEGQLRDCREYCKRNSFRIVAIYVDRAKTARQKVEKRVFFQQMVQDSAKRAWKMVVVWKLDRFSRNRTDSAIYKSRLRKNGVRVMSATESITDSPEGIILESVLEGMAEFYSAELSQKITRGMRESALKHQNVGGHVPLGYRIENKKLVINPVTAPIVLEAFTRYADGESVADICARFNDLGYKTAKGAEFNKNSFHAMFRNERYIGTYTYKDIREEGVIPAIVPQEVWERVQDRLKENSLAPARGKALVDYMLVGKLFCGHCDSMMVGESGTGKSGKKYNYYTCAGRKRKKNCRKRPLKKDWFETLVAEDTKALLTDELINELADMAIQQSEKDLQNNTIIPELEAKLSETSSGISNIISMVEKGVASETLARRLTELEKEKRDLERRLVKEKKNIVVLEKPHIVHWLKQFQSGNIDDPDFRRKLIDLLVNSVTVWDGPDDDELTITYVYNLTEGNRKTVRVKNGGNPSDARTCGGSDMALISPP

SEQ ID NO: 2846 - protein, 537 aa, Unknown
  Description of Unknown: Integrase B2847 sequence
  PTHR30461:SF3,IPR036162,PS51737,IPR011109,PTHR30461, PF00239,G3DSA:1.10.10.2600,IPR006119,PF14287,SSF53041, IPR025378,SM00857,IPR025827,cd03770,IPR038109, PS51736,PF13408,G3DSA:3.40.50.1390,PF07508,Coil
MLRQTTRNLITALYPRLSHEDELQGESNSISNQKRILETYAKQNGFSNLQWYTDDGYSGANFQRPGFQAMLADIEAGKVGTVIVKDMSRLGRNYLQVGMYTEMIFPQKGVRFIAINDGVDSAMGDNDFTPLRNLFNEWMVRDTSKKIKAVKKAKGLSGKPVTSKPVYGYLMDDDENFIIDEEAAPVVKQIYQLCLAGNGPTKIARMLTEQQIPTPGTLEYQRTGSTRRYHPGYECKWATNTVVHLLENREYTGCLVNFKTEKPSYKMKHSIDNPIEKQAIFENHHEPIIDLQTWERVQELRKQRKRPNRYDDVGLFSGLLFCADCGHVMYQQRYQTDKRKQDCYICGSYKKRTADCTAHFIRTDLLTAGVLDNLRKVTAYAQKHEARFVKLLIQQNEMGSKRKLAAAAKQLEQVQSRIAELSRYIKRLYEDNVNGKISDERFMEMSADYEAEQRELKDRAAALQGELDKAQEATVNAEKFMSVVRKYLSIEELTHTLLREMVEKIVVYECEYDENEVRRQRIDIYYSFVGKIDLPEE

SEQ ID NO: 2847 - protein, 537 aa, Unknown
  Description of Unknown: Integrase B2848 sequence
  PTHR30461:SF3,SM00857,G3DSA:1.10.10.2600,IPR036162,PF13408, IPR025827,G3DSA:3.40.50.1390,PS51737,IPR006119,IPR038109, PF07508,IPR011109,SSF53041,PF00239,PTHR30461, Coil,cd00338
MNEMNNRVCCLYRVSTDKQVDFNSNHEADLPMQRKACHKFAEAKGWVIVHEEQEEGVSGHKVRAEARDKLQIIKDYARKGKFDILLVFMFDRIGRIADETPFVVEWFVRNGIRVWSTQEGEQRFDNHTDKLLNYIRFWQADGESEKTSVRTRTSLRQLVEEGHFKGGSAPYGYDLVKSGRINKRKHELYELHINEREAAVVRIIFDKYVHEGYGPQHIATYLNGNGYRARSGKCWHPASIRGMVRNLTYTGVLRCGDAHSELLQELQIIPEQQFEAAQRIRENRSNRAAQESEYRVPLNIHGQSLLSGNAYCGHCGAKLTLTSSRKWRKLSDGTLDDTLRVRYTCYGKLRKQTGCTGQTGYTVHILDEIIDKSVRQIFSKMRGIPKEQIITRRYEREVVERKNHLQTIQVERDKAQKDLISLKAEILACIKGESVFPKETLAEMITAQEEKLRELDALYESSYAETEKTAELMDNVSKLYEELISFSDLYDSASFEAKKMIVNQLIRRVDVYRGYQLNITFNFDLTPYIEGDDTTAC

SEQ ID NO: 2848 - protein, 537 aa, Unknown
  Description of Unknown: Integrase B2849 sequence
  PTHR30461:SF3,IPR036162,PS51737,IPR011109,PTHR30461, PF00239,G3DSA:1.10.10.2600,PF14287,IPR006119,SSF53041, IPR025378,SM00857,IPR025827,cd03770,IPR038109, PS51736,PF13408,G3DSA:3.40.50.1390,PF07508,Coil
MSDTNKITALYCRLSHEDELAGESNSISNQKDILQKYADEHGFYNTAFYIDDGYTGVDFERPAFKRMIDDVDNGRIGTIITKDLSRLGRNHLHVGLYTEEYFPRRNVRYIAINNNIDSDNPDSSAVDMAAFYNIFNEFHVKDTSRKIKASCVIKSERGQRVASRPPYGYMKSQEDHNKILPNPETALVVKYIFQLCADGLGPAQIAHRLEEEQIYTPAMYEYSQTGNVISNFDTSYPYRWNPTAVANILEDVSYLGHTCNFRFGRASYKDHRKLKLPKSEHKLIENTHEPIIDINIWEIVQRLRQSKRRFTRSGEKSIFAGIVFCADCKQKLYFHRHAREKSENWKFICSSYRKNSREQCTMHGIKESHLKEIVLHEIRNVTAFARERTDDFAEYISRESNTAAKKELSEANKKLKKSEKRLAEVGIIFRKLYEDHVLGTIDDDQFRMLSQGYTDEQNQLKAEISDLKHTMQELQSQTANTARFAALAKKYTDITELTQEILHTFVSRIEVHEKLKDDNGSITQEIDIYFTHIGIVK

SEQ ID NO: 2849 - protein, 537 aa, Unknown
  Description of Unknown: Integrase B2850 sequence
  PTHR30461:SF3,SM00857,G3DSA:1.10.10.2600,IPR036162,PS51737, G3DSA:3.40.50.1390,IPR006119,IPR038109,PF07508,IPR011109, SSF53041,PTHR30461,Coil,PS51736,cd00338, PF00239
MRVVAYCRYSSEAQRDGYSIEAQTKAITEWCERQGHTILHFYIDEAESATSDDRTEFQRMVKDAASGSFEAVIVHKLDRFARNRYDSAIYKHKLKQNGVRVISMLEPLDDSPESVIMESVLEGMAEYFSKNLARETRKGKREAAGKAQFVGGKPPLGYGVDDKHRFFIIPEEAEIVKEIFKRYASGEGSASIARDLTSRGIRGRKGSPLTCTSMRFIISNPLYYGHYVWFKNTPAQEPIVVDGVVPAIISQSLFDAANARIEKRGPQRRYEDFILTGYLFPAFGSGHYVGSSSFTNYKLKDGTVKRSASEVYIIRGPIKDCPRSMKKSKTEDFIVGSVEAVLFSGATLDWVISELKARLEARAKETAPVDALNTRLRKLQEQKNKLLDLYLSGSVDKAVYSVKFGELGKAEELVKAELKRATAAVPRIQDVEELKSALLSFVHSAAADSLEYKKRLLSTFVEKVTVSNTEIVIYFKFPIPGNGDTFKCDLRNFADKVQNVLKPYNTKTPRRRYSPSLLLTLTKSMLRKNRMRFRLCL

SEQ ID NO: 2850 - protein, 537 aa, Unknown
  Description of Unknown: Integrase B2851 sequence
  PTHR30461:SF3,cd00338,SM00857,G3DSA:1.10.10.2600,IPR036162, PF13408,PS51737,IPR025827,G3DSA:3.40.50.1390,IPR006119, IPR038109,PF07508,SSF53041,IPR011109,PTHR30461, PS51736,Coil,PF00239
MAKRKFNKGGEVRLVAYYRYSGGSGQTEQSIEGQRRDCEAYARLHNMTIQKEYVDRHISGKTDDRAAFQQMIADSDKGAFDMVICWKTDRFARNRYDSAVYKKRLRDNGVEIVYAAESNISGAEGIIIEGVMEALAEYYSAELAEKMRRGMRESALKGQAISRCRALGLKTDEHKRFVIDEKTAPTVRFIFEHYAAGESAMSIVEQLNAKGLRTSQGNPFNKSSIPRIIQNEAYRGVYISKSYDVRIEGAIPAIIDDELWERAQTMLKLNRQLKAKNEPKADYILSGKLYCSCGSLMRGMSGHSATGEVYRYYTCPNKDCHLRNIPKDDLEGKVMQSIVDHLLQPESMEALAEAMVEVQKADVEKPNAERVAIEQSLSDVRRRSKNILDAIENGTANAQLCARLDDLTEQEQTLSFQLSSLEKEKPVVFTKEQYLFLLEQFLMEPSERTPEYGRRLVNTFVTSMVVSGRELVINFNVSDETVNKNKKTSQTNLQKESSSGMRLVHLAHQQANYSLYAASGYFSLVEHQFSARWWRTA

SEQ ID NO: 2851 - protein, 537 aa, Unknown
  Description of Unknown: Integrase B2852 sequence
  PTHR30461:SF3,SM00857,G3DSA:1.10.10.2600,IPR036162,PF13408, IPR025827,PS51737,G3DSA:3.40.50.1390,IPR006119,IPR038109, PF07508,IPR011109,SSF53041,PTHR30461,Coil, PS51736,cd00338,PF00239
MARKKKVSPGNRLVAYYRYSGGSQQTEQSIEGQRRDCEAYARQHGLTIVHEYIDRHISGRGVESRLAFQQMIADSSKHLFDLVICWKTDRFARNRYDSAVYKKKLRDNGVRILYAAESSVEGPEGIILEGLMESLAEYYSAELAQKMRRGMRESALKGRAINPSRPLGLTTDEHKRFIIDEKNAPTIRFIFEHYAAGESSASIVEQLNAAGLRTSKGNAFNKCSIPRIIQNEAYHGVYICKAYDVRIDGAIPAIIDDDLWKRAQKMLTLNKQHRAPHSSHADYLLSGKLFCGCCHSLMRGISGHNCRNDVYYYYACGNKADGGTCKKKNIQKDVAENLVVNAICENILRPDTLEDLADAIAAAQQADVNQPDPERAMLEQNLADVHRKINNIIESIENGTASSRLSARLADLEQQESTLNYQLESLKEVHPPVLDRERILFLLEQFLISPNERTEDYNRRIIDTFVNRIEITDTEMLIYFNLSEASASEKQKNSQPNSCSTGNHLVHLTHSHSNNFSLYATPNSFYILLSNLTFSRT

SEQ ID NO: 2852 - protein, 537 aa, Unknown
  Description of Unknown: Integrase B2853 sequence
  PTHR30461:SF3,SM00857,G3DSA:1.10.10.2600,IPR036162,PF13408, IPR025827,G3DSA:3.40.50.1390,PS51737,IPR006119,IPR038109, PF07508,IPR011109,SSF53041,PF00239,PTHR30461, PS51736,Coil,cd00338
MAKRKFNKGGEVRLVAYYRYSGGSGQTEQSIEGQRRDCETYARLHNMTIQKEYVDRHISGKTDDRAAFQQMIADSDKGAFDMVICWKTDRFARNRYDSAVYKKRLRDNGVEIVYAAESNIAGAEGIIIEGVMEALAEYYSAELAEKMRRGMRESALKGQAISRCRALGLKTDEHKRFVIDEKTAPTVRFIFEHYAAGESAMSIVEQLNAKGLRTSQGNPFNKSSIPRIIQNEAYRGVYVSKSYDVRIEGAIPAIIDNELWERAQTMLKLNRQLKAKNEPKADYILSGKLYCSCGSLMRGMSGHSATGEVYRYYTCPNKDCHLRNIPKDDLEGKVMQSIVDHLLQPESMEALAEAMVEVQKADAEKPNAERVAIEQSLADVRRRSKNILDAIENGTANAQLCARLNDLTEQEQTLSFQLSSLEKEKPVAFTKEQYLFLLEQFLVEPSERTPEYGRRLVNAFVTSMVVSDRELVINFNVSDETVNKNKKASQTNLQKESSSGMRLVHLAHQQANYSLYAASGYFSLVEHQFSARWWRTA

SEQ ID NO: 2853 - protein, 537 aa, Unknown
  Description of Unknown: Integrase B2854 sequence
  SM00857,G3DSA:1.10.10.2600,IPR036162,PS51737,G3DSA:3.40.50.1390, IPR006119,IPR038109,PF07508,SSF53041,IPR011109, PTHR30461,Coil,PS51736,cd00338,PF00239
MRNNPLSSADEYCMYLRKSRVDLEAEAHGDGETLARHEKLLLEVARRDHLNVTQIYREVVSGETIAARPVMQHLIQEVELGRWAGVLVVEVERLARGDTIDQGIVAQTFKYSGTKIITPLKVYDPNNEYDEEYFEFGLFMSRREYKTINRRLQRGRLASAKEGKWVSGVAPYGYEKIRVPNDKGWTLRPLEDEADIVRFIFRLYTAGEEAEDGSVKKVGSYSLAVRLDKMGVKPPSGSPCWNSNTIQSILQNPVYIGKIRWNVHKTRKRVINNVVRVERYLAPPDEQILVDGLHPAIVDEAVFLAAQDLMAQKGPVPVQAANTVSNPLAGILVCGKCGRHIVLRPNAYGGVLMCPNRACDNVGSKYGIVEERLLQALSQWLSDYRLEWSDRLPAEEQALIDLKGKSIRKAQQEIDTLQKQLERTHDLLEQGVYDTDTFLARSRSITERINSANESIASLSAELIEDEARAASRKLVVPKVEKLLEVYAELPSAQAKNEMLKEVIEKVEYTKLQRSGRNGPFDNFDLLLYPKLPPSLG

SEQ ID NO: 2854 - protein, 537 aa, Unknown
  Description of Unknown: Integrase B2855 sequence
  PTHR30461:SF3,cd00338,SM00857,G3DSA:1.10.10.2600,IPR036162, PF13408,PS51737,G3DSA:3.40.50.1390,IPR025827,IPR006119, IPR038109,PF07508,IPR011109,SSF53041, PTHR30461,Coil,PF00239
MTENKNRVCCLYRVSTDKQVDFNSNHEADLPMQRKACHKFAEAKGWVIVHEEQEEGVSGHKVRAEARDKLQIIKEYARKGKFDILLVFMFDRIGRIADETPFVVEWFVRNGIRVWSTQEGEQRFDNHTDKLLNYIRFWQADGESEKTSVRTRTSLRQLVEEGHFKGGSAPYGYDLVKSGRINKRKHELYELHINEQEAEIVRLIFDKYVYEGYGAQRIATYLNNAGYRARSGKCWHPGSLRGMVGNLTYMGVLRCGDARSELMPELQIIPQEEFEAAQRIREDRSAHAAEEAEHHVPLRTRGQALLSNNVYCGHCGARLALTTSRKWRKLSDGTLDDTLRIRYTCYGKLRKQTDCTGQTGYTMHILDEIIDKMVRQIFSRLRGIPKEQLITSRYAKETAERKNHLQALQAERDKAEKDLLALKTEILAVIKGESAFPKDTLAEMIAAQEKKHTELDTLCEEASAELERNAELMANVSQLYEELISYADLYDSASFEAKKMIVSQLIRRVEVYRGYQIHVDFNFDLAQYLENSDELAC

SEQ ID NO: 2855 - protein, 537 aa, Unknown
  Description of Unknown: Integrase B2856 sequence
  cd00338,SM00857,G3DSA:1.10.10.2600,IPR036162,PF13408, PS51737,G3DSA:3.40.50.1390,IPR025827,IPR006119,IPR038109, PF07508,SSF53041,IPR011109,PTHR30461,PS51736, Coil,PF00239
MPNAVIYARYSSHAQRDASIDQQLSVCRAFAQRGGIDVVDIYTDRALTGTNDNRPGFRRMLADAAKGGWNYVIVYALDRFSRDRYDAATSKHKLKQAGVKLLSATEPIAETPAGILMESMLEGYAEYYSRELAAKVRRGQMDNAKKCMVNGSLPLGYCKGPDGRYAVEPTEAAVVQEIFRRVGAGEPLANILDDLNDRGLRSKKGKPWNKSSFNRMLTNERYTGIYIYQDIRIPGGIPAIITQAEFDAVQRAAISKKNPRRAVMPDAPMSRRRQDGVYLLTGKLFCGDCGSPLIGVSGTARNQSLHHYYACKGRISKTAPGCGLKNIRREDIEYEIAAAIKQTMLTPETIRAIAQATYDYQCEAYANPDLTLLEDQLQETNRALKNLMSAIEQGLFTPTTRDRLLELELQKDNLNARLAVAKSRAADLPTRDEIVAALDYYANGDLSDPLYQEALIDTFLVRAYVHSDHYDIYFSPDAKTKTEFPIGFTDATKPTFALLNGSHSLPEGPPTNVIRTSPTEVVCIAGLYRFTVSRPSR

SEQ ID NO: 2856 - protein, 537 aa, Unknown
  Description of Unknown: Integrase B2857 sequence
  PTHR30461:SF3,SM00857,G3DSA:1.10.10.2600,IPR036162,PF13408, PS51737,IPR025827,G3DSA:3.40.50.1390,IPR006119,IPR038109, PF07508,IPR011109,SSF53041,PF00239,PTHR30461, Coil,cd00338
MTENKNRVCCLYRVSTDKQVDFNSNHEADLPMQRKACHKFAEAKGWVIVHEEQEEGVSGHKVRAEARDKLQIIKEYARKGKFDILLVFMFDRIGRIADETPFVVEWFVRNGIRVWSTQEGEQRFDNHTDKLLNYIRFWQADGESEKTSVRTRTSLRQLVEEGHFKGGSAPYGYDLVKSGRINKRKHELYELHINEQEAEIVRLIFDKYVYEGYGAQRIATYLNNAGYRARSGKCWHPGSLRGMVGNLTYMGVLRCGDARSELMPELQIIPQEEFEAAQRIREDRSAHAAEEAEHHVPLRTRGQALLSNDVYCGHCGARLALTTSRKWRKLPDGTLDDTLRIRYTCYGKLRKQTECTGQTGYTMHILDEIIDKMVREIFSRLRGIPKEQLIISRYAKETAERKNHLQALQAERDKAEKDLLALKAEILAVIKGESAFPKDTLAEMIAAQEKKHTELVSLCEEASAELDKNAELMANVSQLYEELISYADLYDSASFESKKMIVSQLVRRIDVYRGYQIHVDFNFDLAQYLENSDELAC

SEQ ID NO: 2857 - protein, 537 aa, Unknown
  Description of Unknown: Integrase B2858 sequence
  PTHR30461:SF3,cd00338,SM00857,G3DSA:1.10.10.2600,IPR036162, PF13408,PS51737,G3DSA:3.40.50.1390,IPR025827,IPR006119, IPR038109,PF07508,IPR011109,SSF53041,PTHR30461, PS51736,Coil,PF00239
MAKRKFNKGGEVRLVAYYRYSGGSGQTEQSIEGQRRDCETYARLHNMTIQKEYVDRHISGKTDDRAAFQQMITDSDKGAFDMVICWKTDRFARNRYDSAVYKKRLRDNGVEIVYAAESNIAGAEGIIIEGVMEALAEYYSAELAEKMRRGMRESALKGQAISRCRALGLKTDEHKRFVIDEKTAPTVRFIFEHYAAGESATSIVDKLNAKGLRTSQGNPFNKSSIPRIIQNEAYRGVYVSKSYDVRIEGAIPAIIDDELWERAQTMLKLNRQLKAKNEPKADYILSGKLYCSCGSLMRGMSGHSATGEVYRYYTCPNKNCHLRNIPKDDLEGKVMQSISDHLLQPEAMEALAEAMVEVQKADAEKPNAERVAIEQSLADVRRRSKNILDAIENGTANAQLCARLDDLSEQERTLNFQLSALEKEKPVVFTKEQYLFLLEQFLVEPSERTPEYGRRLVNTFVTSMVVSDRELVINFNVSDETVNKNKKTSQTNLQKESSSRMRLVHLAHQQANYSLYAASGYFSLVEHQFSARLWRTA

SEQ ID NO: 2858 - protein, 537 aa, Unknown
  Description of Unknown: Integrase B2859 sequence
  PTHR30461:SF3,cd00338,SM00857,G3DSA:1.10.10.2600,IPR036162, PF13408,PS51737,IPR025827,G3DSA:3.40.50.1390,IPR006119, IPR038109,PF07508,IPR011109,SSF53041,PTHR30461, PS51736,Coil,PF00239
MAKKKKPAGGNAIIYARYSSHNQRDVSIEQQIEACRKHAAELGLTITDTYEDRAISGRTDNRPAFQRMMRDAEDGKFQYVLAWKSNRMGRNMMQAMVNESRLMDCGVKVFYAEEDFDDSAAGRFALRSMMNVNQFYSDNLAEDVRRGLMDNASKCMANGRQPLGYKRGEGGKVVVDEPAAAIVREIYTRIASGEMFMDIARDLNRRGIKTQSGSEWNKSSFNVLCRNERYRGIYIYGDTRIEGGIPPIVDDVLWYKVQEVLKVKKSKNRHHCPSDEDYLLTGKLRCGKCGGYMIGMSGRSKTGDVHHYYACQNRRVGHTCDKKNIRRDVVEPAVAQAIKQYCLTDDAIEWITDQTIAYWEDEDRKLQIDSIENDLSAVQSSISNVMKAIEMGVITETTRDRLIELERQQTDLKSKLALAKEEIVHVDRKDLISSLLAFRHGNVHDRAYQEKLFNAFLIAVYVYDDDHLKLVFNSFGKDDTVNIALDLGENDDNSGLSDVSKSSPILSNGQPESHLIRSDGFFVLSLGAFLGRCDTKL

SEQ ID NO: 2859 - protein, 537 aa, Unknown
  Description of Unknown: Integrase B2860 sequence
  PTHR30461:SF3,IPR036162,PS51737,IPR011109,PTHR30461, PF00239,G3DSA:1.10.10.2600,IPR006119,SSF53041,cd00338, SM00857,IPR025827,IPR038109,PS51736,mobidb-lite, PF13408,G3DSA:3.40.50.1390,PF07508,Coil
MARKKKVSPGNRLVAYYRYSGGSQQTEQSIEGQRRDCEAYARQHGLTIVHEYIDRHISGRGVESRLAFQQMIADSSKHLFDLVICWKTDRFARNRYDSAVYKKKLRDNGVRILYAAESSVEGPEGIILEGLMESLAEYYSAELAQKMRRGMRESALKGRAINPSRPLGLTTDEHKRFIIDEKNAPTIRFIFEHYAAGESSASIVEQLNAAGLRTSKGNAFNKCSIPRIIQNEAYHGVYICKAYDVRIDGAIPAIIDDDLWKRAQKMLTLNKQHRAPHSSHADYLLSGKLFCGCCHNLMRGISGHNCRNDVYYYYACGNKADGGTCKKKNIPKDVAENLVVNAICENILRPDTLEDLADAIAAAQQADVNQPDPERAMLEQNLADVHRKINNIIESIENGTASSRLSARLADLEQQESTLNYQLESLKEVHPPVLDRERILFLLEQFLISPNERTEDYNRRIIDTFVNRIEITDTEMLIYFNLSEASASEKQKNSQPNSCSTGNHLVQQSWTNPNFFPPLSRRSKYPQNGRFGRHLCS

SEQ ID NO: 2860 - protein, 537 aa, Unknown
  Description of Unknown: Integrase B2861 sequence
  PTHR30461:SF3,SM00857,G3DSA:1.10.10.2600,IPR036162,PF13408, IPR025827,PS51737,G3DSA:3.40.50.1390,IPR006119,IPR038109, PF07508,IPR011109,SSF53041,PF00239,PTHR30461, PS51736,Coil,cd00338
MRVSVNLNAQKPDTTTNAVIYARYSSHGQTEQSIEGQLAKGHEYAAAQGYTVVHEYIDRAMTGRNDNREAFQKMLSDTGKHQFQVIIVWKVDRFGRNREEIAFNKHTCKKNGVRVEYVAESLPNSPEAVILESVLEGMAEYYSIQLSQNIRRGQLESAKKCQCVGGSVPLGYTLDSDKHFVIDPQTAPVVKKIFDLYAEGATISEITGQLNEQGIRTIRKQLFTKNSLTKLLKNEKYIGVYTYKDIVRVEGGVPAIVDKSTFDRVQELLKINRRAPSHTWTKVEYLLTDKLFCGHCGSPMVGESGFSHTGAKYSYYGCIKRRREKACDKKPVRQDWIEALVLDETVKLLHDDELMEYIIDRTWEYYQVTDKVQEEKAVLEAQLAEVDKAINNLVRAIEAGIFNAATKSRMDELDAQKAALTASLADLELTSGIRITRDHIEYFLLRLRDLDVKDRECQKRLVQTFVNAVFIYDDGRVKITYNYSGQSSTITLNQIASAEKGKGFVCCLPCSTSSPRFPRGVAALFCFWGKSGVNNVY

SEQ ID NO: 2861 - protein, 537 aa, Unknown
  Description of Unknown: Integrase B2862 sequence
  PTHR30461:SF3,IPR036162,PS51737,IPR011109,PTHR30461, PF00239,G3DSA:1.10.10.2600,IPR006119,PF14287,SSF53041, IPR025378,SM00857,IPR025827,cd03770,IPR038109, PF13408,G3DSA:3.40.50.1390,PF07508,Coil
MKQQIYNTALYLRLSRDDELQGESSSITTQRSMLRLYAKEHHLNVIDEYIDDGWSGTNFERPSFQRMIEDIEAGKINCVVTKDLSRLGRNYIMTGQYTELYFPSHNVRYIAIDDGVDSEKGESEIAPFKNIINEWVARDTSRKVKSAFRTKFAEGAHYGAYAPLGYKKHPDIKGKLLVDEETKWIVEKIFSLAYQGYGSAKITKILREEKVPTASWLNFTRYGTFAHIFEGKPESKRYEWTIAHVKAILKSEVYIGNSVHNMQSTVSFKSKKKVRKPENEWLRVENTHEPIIDKEVFYRVQEQIKSRRRQTKQKETPIFAGLVKCADCGWSMRFATNKANRTPYSYYSCSYYGQFGKGNCSMHYIRYDVLYQAVLERLQYWAKVVQQDEEKVLNKIQKAGNAERIREKKKKASALKKAENRQNEIDQLFAKMYEDRACEKITERNFVMLSSKYQQEQIELEQQIASLREELNKMEQDMIGAEKWIELIKEYSVPKELTAPLLNAMIEKILVHEATTNEDNERIQEIEIYYRFIGKID

SEQ ID NO: 2862 - protein, 537 aa, Unknown
  Description of Unknown: Integrase B2863 sequence
  PTHR30461:SF3,cd00338,SM00857,G3DSA:1.10.10.2600,IPR036162, PF13408,PS51737,G3DSA:3.40.50.1390,IPR025827,IPR006119, IPR038109,PF07508,IPR011109,SSF53041,PTHR30461, Coil,PF00239
MNEMNNRVCCLYRVSTDKQVDFNSNHEADLPMQRKACHKFAEAKGWVIVHEEQEEGVSGHKVRAEARDKLQIIKDYARKGKFDILLVFMFDRIGRIADETPFVVEWFVRNGIRVWSTQEGEQRFDNHTDKLLNYIRFWQADGESEKTSVRTRTSLRQLVEEGHFKGGSAPYGYDLVKSGRINKRKHELYELHINEREAAVVRIIFDKYVHEGYGPQHIATYLNGNGYRARSGKCWHPASIRGMVRNLTYTGVLRCGDAHSELLQELQIIPAQQFEAAQRIRENRSNRAAQESEYRVPLNIHGQSLLSGNAYCGHCGAKLTLTSSRKWRKLSDGTLDDTLRVRYTCYGKLRKQTGCTGQTGYTVHILDEIIDKSVRQIFSKMRGIPKEQIITRRYEREVVERKNHLQTIQVERDKAQKDLISLKAEILACIKGESVFPKETLAEMITAQEEKLRELNALYESSYAETEKTAELMDNVSKLYEELISFSDLYDSASFEAKKMIVNQLIRRVDVYRGYQLNITFNFDLTPYIEGDDAAAC

SEQ ID NO: 2863 - protein, 537 aa, Unknown
  Description of Unknown: Integrase B2864 sequence
  PTHR30461:SF3,SM00857,G3DSA:1.10.10.2600,IPR036162,PF13408, PS51737,G3DSA:3.40.50.1390,IPR025827,IPR006119,IPR038109, PF07508,IPR011109,SSF53041,PF00239,PTHR30461, PS51736,Coil,cd00338
MSVSVTLNTQKPDTTTNAVIYARYSSHGQTEQSIEGQLAKGHEYAAARGYTIVHEYIDRAITGRNDNREAFQKMLSDTGKHQFQVIIVWKVDRFGRNREEIAFNKHTCKKNGVRVEYVAESLPNSPEAVILESVLEGMAEYYSIQLSQNIRRGQLESAKKCQCVGGSVPLGYTLDSDKHFVIDPQTAPVVKKIFDLYAEGATISEITGQLNEQGIRTIRKQLFTKNSLTKLLKNEKYIGVYTYKDIVRVEGGVPAIVDKSTFDRVQELLKINRRAPSHTWTKVEYLLTDKLFCGHCGSPMVGESGFSHTGAKYSYYGCIKRRREKACDKKPVRQDWIEALVLDETVKLLHDDELMEYIIDRTWEYYQVTDKVQEEKAVLEAQLAEVDKAINNLVRAIEAGIFNAATKSRMDELDAQKAALTTSLADLELTSGIRITRDHIEYFLLRLRDLDVKDRECQKRLVQTFVNAVFVYDDGRVKITYNYSGQSSTITLNQIASAEKGKGFVCCLPCSTIAHRYEPEMLIFGDVFVLTYKTAEV

SEQ ID NO: 2864 - protein, 537 aa, Unknown
  Description of Unknown: Integrase B2865 sequence
  PTHR30461:SF3,SM00857,G3DSA:1.10.10.2600,IPR036162,PF13408, IPR025827,G3DSA:3.40.50.1390,PS51737,IPR006119,IPR038109, PF07508,SSF53041,IPR011109,PF00239,PTHR30461, PS51736,Coil,cd00338
MMERDLSLDRCQGDCVIYARYSSHNQRDVSIEQQVADCEAYARSLGLRVVKVYADRALSGMTDKRPQFQTMLRDAAHRRWAYLIVWKIDRFARNRYDSATYKFRLKRCGVRVLYAKESIPDGPEGILLESVLEGSAEYYSANLSQNIRRGMRYNAMNCKVNSGSIPFGYRKGEDGRFAVDPGEAEVVREIFRKVADGIPFVEISNDLNGRGIRTKRGGLWGRNSFHRLLTNETYVGVYRFGDVRVEDGVPPVIDRALFLAVDERLKNKKNPQGRHRENGEYMLTGKLFCGLCGAPMVGVSGTARSGALHHYYVCQKRRTERSCSKANVGRDWLERVVVQATLDYVLKPEVIEWMADAVMAYQEREANSAVLLGLRDQLSENQRATANLMKAIEAGIITLTTKGRLVELEAEASRLRDAITLEEAAQTHIERDFMVYWFEKFRGGDLEDAAFRRRVIDSFVNAVYLWDDRLRVAFNYSGKGSAVDMELVMDAEALAGPEGRFVLAPPASTNGEPGEPGTAIYFVGPVFILALPLPRRR

SEQ ID NO: 2865 - protein, 537 aa, Unknown
  Description of Unknown: Integrase B2866 sequence
  PTHR30461:SF3,SM00857,G3DSA:1.10.10.2600,IPR036162,PF13408, PS51737,G3DSA:3.40.50.1390,IPR025827,IPR006119,IPR038109, PF07508,IPR011109,SSF53041,PTHR30461,PS51736, cd00338,PF00239
MASQTRKVKRNGAQIKRAIAYARFSSNNQREESIDAQLRAIREYCEKNGIVLVDVFTDEAISGKTDNRDDFQKMVKGVLKGRYDVDAILVHKFNRFARNKYDSALYKKRLREIGVRVVSVTQKIDDTPEGELLEGFLEVIDQYYSSNLSVEVRKGLKENALKGKHAGGQVLFGFSLDSEGYYIPNENAPIVKRIFEEFAAGVPKSEICERLNKEGCRNQRNKPFNTRTLYDLLRNEKYIGVYEYTIDRTETIRLENVIKDPIIDKRLWNTVQQLNHEGSTKGRYRKQKRYYHLTGKAFCSCCGSPISGAGSKRSRNGTLNYYYKCVGKVKHKNGCDNPSLNKDWFEPRVLKSVVNAVMTGEQIKHIAKLTYQELEEMREKPLVDVNTLNKELDSIAKKQEMLTDLLLEGQIDKDMLNTKNASLNQRKFEIQEELEKRKMIVDSDNVTEEMIVQYIQEYVEYLKTTYTAEEEFMRAVLNEFVEKVEVDKENITVYILCEFSHMDGGDNEWFSGASHHLPPAKMKRRFSRKRNIRNKNS

SEQ ID NO: 2866 - protein, 537 aa, Unknown
  Description of Unknown: Integrase B2867 sequence
  PTHR30461:SF3,IPR036162,PS51737,IPR011109,PTHR30461, PF00239,G3DSA:1.10.10.2600,PF14287,IPR006119,SSF53041, IPR025378,SM00857,IPR025827,cd03770,IPR038109, PS51736,PF13408,G3DSA:3.40.50.1390,PF07508,Coil
MLRQTTQNLITALYPRLSHEDELQGESNSISNQKRILETYAKQNGFTNLCWYTDDGYSGANFQRPGFQAMLADIEAGKVGTVIVKDMSRLGRNYLQVGMYTEMLFPQKGVRFIAINDGVDSAMGDNDFTPLRNLFNEWMVRDTSKKIKAVKKAKGLSGKPVTSKPVYGYLMDDDENFIIDEEAAPVVKQIYQLCLAGNGPTKIARMLTEQQIPTPGTLEYQRTGSTRRYHPGYECKWATNTVVHLLENREYTGCLVNFKTEKPSYKMKHSVDNPIEKQAIFENHHEPIIDLQTWERVQELRKQRKRPNRYDNVGLFSGMLFCADCGHVMYQQRYQTDKRKQDCYICGSYKKRTADCTAHFIRTDLLTAGVLDNLRKVTAYAQKHEARFVKLLIQQNEMGGKRKQAAATKQLEQAQSRIAELSRYIKRLYEDNVNGKISDERFMEMSADYEAEQRELKEKAAALQGELDKAQEATVNAEKFMNVVRKYLSIEELTHTLLREMVEKIVVYECEYDENEVRRQRIDIYYSFVGKIDLPEE

SEQ ID NO: 2867 - protein, 537 aa, Unknown
  Description of Unknown: Integrase B2868 sequence
  PTHR30461:SF3,SM00857,G3DSA:1.10.10.2600,IPR036162,PF13408, IPR025827,G3DSA:3.40.50.1390,PS51737,IPR006119,IPR038109, PF07508,IPR011109,SSF53041,PF00239,PTHR30461, Coil,cd00338
MNEMNNRVCCLYRVSTDKQVDFNSNHEADLPMQRKACHKFAEAKGWVIVHEEQEEGVSGHKVRAEARDKLQIIKDYARKGKFDILLVFMFDRIGRIADETPFVVEWFVRNGIRVWSTQEGEQRFDNHTDKLLNYIRFWQADGESEKTSVRTRTSLRQLVEEGHFKGGSAPYGYDLVKSGRINKRKHELYELHINEREAAVVRIIFDKYVHEGYGPQHIATYLNGNGYRARSGKCWHPASIRGMVRNLTYTGVLRCGDAHSELLQELQIIPAQQFEAAQRIRENRSNRAAQESEYRVPLNIHGQSLLSGNAYCGHCGAKLTLTSSRKWRKLSDGTLDDTLRVRYTCYGKLRKQTGCTGQTGYTVHILDEIIDKSVRQIFSKMRGIPKEQIITRRYEREVVERKNHLQTIQVERDKAQKDLISLKAEILACIKGESVFPKETLAEMITAQEEKLRELDALYESSYAETEKTAELMDNVSKLYEELISFSDLYDSASFEAKKMIVNQLIRRVDVYRGYQLNITFNFDLTPYIEGDDAAAC

SEQ ID NO: 2868 - protein, 537 aa, Unknown
  Description of Unknown: Integrase B2869 sequence
  PTHR30461:SF3,SM00857,G3DSA:1.10.10.2600,IPR036162,PF13408, IPR025827,PS51737,G3DSA:3.40.50.1390,IPR006119,IPR038109, PF07508,IPR011109,SSF53041,PF00239,PTHR30461, PS51736,Coil,cd00338
MKKFPIDLSCLTEEEISQFQEDPYTLYNGDQDVALYLRYSSTGQSDQSIEGQLRDCRTFCKANHYRIVAIYVDRATTARKDVEKRVHLMEMVADSAKQNWEYVIVWKLDRFARNRNDSAIMKMRLRKNGVKVLSATEHLTDSPESIILESVLEGMAEFFSAELSQKVTRGMRESALKCHSVGGHIPLGYKVENHKLVVDPDTAHIVQEAFSLYANGESVADICRKFNSAGYKTAKNTEFNRSSFKAMFRNTRYIGTYTYKDIVIENGIPAIIDKELFETVQRRLSKTATAPARGKAKVDYLLSGKLFCGHCGASMNGESGAGRHGKVYHYYSCYTKKRKLGCDKRPLKKDYIEGIVARDALNLLTDQLIDEIADMAIRQSEQDLINDTHIPQLTAQLSEVEKSITNITAAIEKGIASETLMNRLVQLEHEKKTLNKEIKAEEKFVYRIDRDQIVFWLSQFKYGNIEDEDFRRRLIDLLVNSVTVWDEPDGYKITTAYNLTSCKTKTFRVEKNPAAEEATGFDFGESECTKGKVLNSL

SEQ ID NO: 2869 - protein, 537 aa, Unknown
  Description of Unknown: Integrase B2870 sequence
  IPR036162,PS51737,PS01030,IPR011109,PTHR30461, PF00239,G3DSA:1.10.10.2600,PF14287,IPR006119,SSF53041, IPR025378,SM00857,IPR025827,cd03770,IPR038109, IPR019761,PF13408,G3DSA:3.40.50.1390,PF07508,Coil
MLRQATQKTPITALYARLSKDDEQQGESLSIENQKRILETFARDNGFLNCRFFVDDGWSGANFQRPGFMEMMDCVESGEVKCVITKDLSRMGRNYLQVGMFTEITFPKKGVRFIAINDGVDSAQGENDLTPLKNLFNEWMVRDTSRKIKAVFRSKGMSGKPITSQPVYGYLKGEDGCFIIDEEAAPVVRQIYSLCLAGNGPTKIARVLTEQEIPTPGTLEYRRTGSTRRYYPDYPYKWATNTIVHILERKEYLGHTVNFKTEKISYKVKSSVENPEEKQAVFENTHEPIIDPATWERVQELRKQRKRPNRYDEVGLFSGILFCADCGSVLYQQRYENKTRKQDCYICGNYKRRVKSCTAHFIRTDLLTAGVTANLQKITAYAAKHEKQFMKLLIEQNEDGGKRRNAARKKELDAAEKRIAELSAVFKRLYEDSVTGRISDERFAELSADYEAEQRQLKERAAELQGELSKAQEATVNAGKFMNIVRKYTSFEELTPTLLREFIEKIVVHECSYDENKNRRQEIEIYYSFVGKVDLPE

SEQ ID NO: 2870 - protein, 537 aa, Unknown
  Description of Unknown: Integrase B2871 sequence
  cd00338,SM00857,G3DSA:1.10.10.2600,IPR036162,PF13408, IPR025827,G3DSA:3.40.50.1390,PS51737,IPR006119,IPR038109, PF07508,IPR011109,SSF53041,PTHR30461,PS51736, Coil,PF00239
MPNAVIYARYSSHAQRDASIDQQLSVCRAFAQRGGIDVVDVYTDRALTGTNDNRPGFRRMLADAAKGGWNYVIVYALDRFSRDRYDAATSKHKLKQAGVKLLSATEPIAETPAGILMESMLEGYAEYYSRELAAKVRRGQMDNAKKCMVNGSLPLGYCKGPDGRYAVEPTEAAVVQEIFRRVGAGEPLANIIDDLNDRGLRSKKGQLWNKSSFNRMLTNERYTGIYIYQDIRIPGGIPAIVTQAEFDAVQRAAISKKNPRRAVMPDAPMSRRRQDGVYLLTGKLFCGDCGSPLIGVSGTARNQSLHHYYACKGRISKDSPGCGLKNIRREDIEYEIAAAIKQTMLTPETIQAIAQATYDYQCEAYANPDLTLLEDQLQETNRALKNLMSAIEQGLFTPTTRDRLLELELQKDNLNSRLAVAKSRAADLPTRDEIVAALDYYANGDLTDPLYQEALIDTFLVRAYVHSDHYDIYFSPDAKTKTEFPIGFTDATKPVFALLNGSHSLPEGPPTNVIRTSPTEVVCIAGLYRFTVSRPSR

SEQ ID NO: 2871 - protein, 537 aa, Unknown
  Description of Unknown: Integrase B2872 sequence
  PTHR30461:SF3,SM00857,G3DSA:1.10.10.2600,IPR036162,PF13408, PS51737,G3DSA:3.40.50.1390,IPR025827,IPR006119,IPR038109, PF07508,SSF53041,IPR011109,PTHR30461,Coil, PS51736,cd00338,PF00239
MARRKKVSPGNRLVAYYRYSGGSQQTEQSIEGQRRDCEAYARQHGLTIVHEYIDRHISGRGVESRLAFQQMIADSSKHLFDLVICWKTDRFARNRYDSAVYKKKLRDNGVRILYAAESSVEGPEGIILEGLMESLAEYYSAELAQKMRRGMRESALKGKAINPNRPLGLTTDEHKRFIIDEKNAPTIRFIFEHYAAGESSASIVDQLNAAGLRTSKGNSFNKCSIPRIIQNEAYHGVYICKAYDIRIDGAIPAIIDDDLWKRAQKMLTLNKQHRAPHSSHADYLLSGKLFCGCCHSLMRGISGHNCRNDVYYYYACGNKVDGGTCKKKNIPKDVAENLVVNAICENILRPDTLEDLADAIAAALQADVNQPDPERAMLEQNLADVRRKINNIIESIENGTASSRLSARLADLEQQESTLNYQLESLKEVHPPVLDRERILFLLEQFLISPNERTEDYNRRIIDTFVNRIEITDTEMLIYFNLSEASASEKQKNSQPNSCSTGNHLVHLTHSHSNNFSLYATPNSFYILLSNLTFSRT

SEQ ID NO: 2872 - protein, 537 aa, Unknown
  Description of Unknown: Integrase B2873 sequence
  PTHR30461:SF3,SM00857,G3DSA:1.10.10.2600,IPR036162,PF13408, IPR025827,G3DSA:3.40.50.1390,PS51737,IPR006119,IPR038109, PF07508,SSF53041,IPR011109,PF00239,PTHR30461, PS51736,Coil,cd00338
MAKRKFNKGGEVRLVAYYRYSGGSGQTEQSIEGQRRDCETYARLHNMTIQKEYVDRHISGKTDDRAAFQQMIADSDKGAFDMVICWKTDRFARNRYDSAVYKKRLRDNGVEIVYAAESNIAGAEGIIIEGVMEALAEYYSAELAEKMRRGMRESALKGQAISRCRALGLKTDERKRFVIDEKTAPTVRFIFEHYAAGESAMSIVEQLNAKGLRTSQGNPFNKSSIPRIIQNEAYRGVYVSKSYDVRIEGAIPAIIDNELWERAQTMLKLNRQLKAKNEPKADYILSGKLYCSCGSLMRGMSGHSATGEVYRYYTCPNKDCHLRNIPKDDLEGKVIQSIVDHLLQPESMEALAEAMVEVQKADAEKPNAERVAIEQSLADVRRRSKNILDAIENGTANAQLCARLNDLTEQEQTLSFQLSSLEKEKPVAFTKEQYLFLLEQFLVEPSERTPEYGRRLVNAFVTSMVVSDRELVINFNVSDETVNKNKKASQTNLQKESSSGMRLVHLAHQQANYSLYAASGYFSLVEHQFSARLWRTA

SEQ ID NO: 2873 - protein, 537 aa, Unknown
  Description of Unknown: Integrase B2874 sequence
  PTHR30461:SF3,SM00857,G3DSA:1.10.10.2600,IPR036162,PF13408, PS51737,IPR025827,G3DSA:3.40.50.1390,IPR006119,IPR038109, PF07508,SSF53041,IPR011109,PF00239,PTHR30461, PS51736,Coil,cd00338
MAKRIPAAASDCDGMIGVIYARYSSHSQREESIEDQLRECHEFAARNNIKIIAEYTDSALTGRTDSRPDFQKMIRDSARGKFQVVVTYKVDRFARDRYDSAIYKAKLRKNGVRVLYAKETIPDGPEGIILESVLEGYAEYYSAALSQNILRGLEGNAMKCKTNGVQVLGYYTGEDGCYEIDPDYASVVLSIFQKYDAGVPQKEIIDDLNARGFRTTRGFAFNKNSVTRILRNRKYIGEYSWGDVTVPGGMPQIVPLPLFDSVQRKLDRGSRAPAHKWKVADYILTSKLFCGHCGELMVGRAGTGKSGKKYDYYACVNRTRRHGCDKKPVKKEWIEDIVVKYTKEVVLAEDMIEQIADGVMDFLEREKKSNGELDALEASLKNVESSIRNMMQAIEQGIITKSTKQRLMELEEQRDQISAAIAREKIATPDIERDQIVYFLEKFKEGSLDDPDYRTKLVEAFVSSVYLWDDGRIVINYNYTGENNQLTLRQIEQELVDMDGAEGSPLDSSAPLKLNKSNSPFDIIVYRNIFCLVYRWK

SEQ ID NO: 2874 - protein, 537 aa, Unknown
  Description of Unknown: Integrase B2875 sequence
  PTHR30461:SF3,SM00857,G3DSA:1.10.10.2600,IPR036162,PF13408, IPR025827,G3DSA:3.40.50.1390,PS51737,IPR006119,IPR038109, PF07508,IPR011109,SSF53041,PF00239,PTHR30461, Coil,cd00338
MNEMNNRVCCLYRVSTDKQVDFNSNHEADLPMQRKACHKFAEAKGWVIVHEEQEEGVSGHKVRAEARDKLQIIKDYARKGKFDILLVFMFDRIGRIADETPFVVEWFVRNGIRVWSTQEGEQRFDNHTDKLLNYIRFWQADGESEKTSVRTRTSLRQLVEEGHFKGGSAPYGYDLVKSGRINKRKHELYELHINEREAAVVRIIFDKYVHEGYGPQHIATYLNDNGYRARSGKCWHPASIRGMVRNLTYTGVLRCGDAHSELLQELQIIPAQQFEAAQRIRENRSNRAAQESEYRVPLNIHGQSLLSGNAYCGHCGAKLTLTSSRKWRKLSDGTLDDTLRVRYTCYGKLRKQTGCTGQTGYTVHILDEIIDKSVRQIFSKMRGIPKEQIITRRYEREVVERKNHLQTIQVERDKAQKDLISLKDEILACIKGESVFPKETLAEMITAQEEKLRELDALYESSYAETEKTAELMDNVSKLYEELISFSDLYDSASFEAKKMIVNQLIRRVDVYRGYQLNITFNFDLTPYIEGDDAAAC

SEQ ID NO: 2875 - protein, 537 aa, Unknown
  Description of Unknown: Integrase B2876 sequence
  PTHR30461:SF3,cd00338,SM00857,G3DSA:1.10.10.2600,IPR036162, PF13408,PS51737,G3DSA:3.40.50.1390,IPR025827,IPR006119, IPR038109,PF07508,SSF53041,IPR011109,PTHR30461, PS51736,Coil,PF00239
MAKKKKPAGGNAIIYARYSSHNQRDVSIEQQIEACRKHAAELGLTITDTYEDRAISGRTDNRPAFQRMMRDAEDGKFQYVLAWKSNRMGRNMMQAMVNESRLMDCGVKVFYAEEDFDDSAAGRFALRSMMNVNQFYSDNLAEDVRRGLMDNASKCMANGRQPLGYKRGEGGKVVVDEPAAAIVREIYTRIASGEMFMDIARDLNRRGIKTQSGSEWNKSSFKVLCRNERYRGIYIYGDTRIEGGIPPIVDDVLWYKVQEVLKVKKSKNRHHCPSDEDYLLTGKLRCGKCGGYMIGMSGRSKTGDVHHYYACQNRRVGHTCDKKNIRRDVVEPAVAQAIKQYCLTDDAIEWITDQTIAYWEDEDRKLQIDSIENDLSAVQSSISNVMKAIEMGVITETTRDRLIELERQQTDLKSKLALAKEEIVHVDRKDLISSLLAFRHGNVHDRAYQEKLFNAFLIAVYVYDDDHLKLVFNSFGKDDTVNIALDLGENDDNSGLSDVSKSSPIFSNGQPESHLIRSDGFFVLSLGAFLGRCDTKL

SEQ ID NO: 2876 - protein, 537 aa, Unknown
  Description of Unknown: Integrase B2877 sequence
  SM00857,IPR006118,G3DSA:1.10.10.2600,IPR036162,PF13408, IPR025827,G3DSA:3.40.50.1390,PS51737,IPR006119,IPR038109, PF07508,IPR011109,SSF53041,PTHR30461,PS00397, PS51736,cd00338,PF00239
MQNKQAVIYARVSSREQEREGFSIPAQLKLLKEYALKNGFQIVNEYSDAETAKKAGRTNYNAMLAFLKENPEIKTVLVEKTDRLYRNFKDYVTLEDYDLEVHLVKEGSIISKNSKSHDKFIHGIKVLMAKNYIDNLSEEISKGLHEGLEQGYWPFQPPYGYLRGAKKNLIIDKSRILFIRRAFELFATGKFSLRKLCEELFVEGYYYKAERPKITQCVLESMLKNVIYVGQMNCNGIIYQGKHPAIISREIFDKAQLAFHKVDKSKVRKNFDFLYPGIVKCGVCGYSFCGERQKKHNIYYRCSHFDRSCPNTCYISEKHLTQSFRMHLKRIGLDEDLYELVKYSLKECLGDEQEYHKTEITRITSEIEQCKEILKKMYLDQVNNVLDYNMWINLKNEYEVKLNRLSAEYQKHLYANTNFLDTGLKILDLCRKASLPATELSAEEVANIIRETYLSATAKDKRVKVVFKEPFATIENLVKLAKKEISEVGFAEFKSAIISSKDKCIKSIKKEPVGSDFNCSSCFKWWRLGDSVLLVRI

SEQ ID NO: 2877 - protein, 537 aa, Unknown
  Description of Unknown: Integrase B2878 sequence
  PTHR30461:SF3,cd00338,SM00857,G3DSA:1.10.10.2600,IPR036162, PF13408,PS51737,IPR025827,G3DSA:3.40.50.1390,IPR006119, IPR038109,PF07508,SSF53041,IPR011109,PTHR30461, PS51736,Coil,PF00239
MAKRKFNKGGEVRLVAYYRYSGGSGQTEQSIEGQRRDCEAYARLHNMTIQKEYVDRHISGKTDDRAAFQQMIADSDKGAFDMVICWKTDRFARNRYDSAVYKKRLRDNGVEIVYAAESNISGAEGIIIEGVMEALAEYYSAELAEKMRRGMRESALKGQAISRCRALGLKTDEHKRFVIDEKTAPTVRFIFEHYAAGESAMSIVEQLNAKGLRTSQGNPFNKSSIPRIIQNEAYRGVYISKSYDVRIEGAIPAIIDDELWERAQTMLKLNRQLKAKNEPKADYILSGKLYCSCGSLMRGMSGHSATGEVYRYYTCPNKDCHLRNIPKDDLEGKVMQSIVDHLLQPESMEALAEAMVEVQKADVEKPNAERVAIEQSLSDVRRRSKNILDAIENGTANAQLCARLDDLTEQEQTLSFQLSSLEKEKPVVFTKEQYLFLLEQFLMEPSERTPEYGRRLVNTFVTSMVVSGRELVINFNVSDEAVNKNKKTSQTNLQKESSSGMRLVHLAHQQANYSLYAASGYFSLVEHQFSARLWRTA

SEQ ID NO: 2878 - protein, 537 aa, Unknown
  Description of Unknown: Integrase B2879 sequence
  PTHR30461:SF3,SM00857,G3DSA:1.10.10.2600,IPR036162,PF13408, PS51737,G3DSA:3.40.50.1390,IPR025827,IPR006119,IPR038109, PF07508,SSF53041,IPR011109,PF00239,PTHR30461, PS51736,Coil,cd00338
MARKKKVSPGNRLVAYYRYSGGSQQTEQSIEGQRRDCEAYARQHGLTIVHEYIDRHISGRGVESRLAFQQMIADSSKHLFDLVICWKTDRFARNRYDSAVYKKKLRDNGVRILYAAESSVEGPEGIILEGLMESLAEYYSAELAQKMRRGMRESALKGKAINPNRPLGLTTDEHKRFIIDEKNAPTIRFIFEHYAAGESSASIVDQLNAAGLRTSKGNSFNKCSIPRIIQNEAYHGVYICKAYDVRIDGAVPAIIDDDLWKRAQKMLTLNKQHRAPHSSHADYLLSGKLFCGCCHSLMRGISGHNCRNDVYYYYACGNKADGGTCKKKNIPKDVAENLVVNAICENILRPDTLEDLADAIAAAQQADVNQPDPERAMLEQNLADVRRKINNIIESIENGTASSRLSARLADLEQQESTLNYQLESLKEVHPPVLDRERILFLLEQFLISPNERTEDYNRRIIDTFVNRIEITDTEMLIYFNLSEASASEKQKNSQPNSCSTGNHLVHLTHSHSNNFSLYATPNSFYILLSNLTFSRT

SEQ ID NO: 2879 - protein, 537 aa, Unknown
  Description of Unknown: Integrase B2880 sequence
  PTHR30461:SF3,SM00857,G3DSA:1.10.10.2600,IPR036162,PF13408, PS51737,G3DSA:3.40.50.1390,IPR025827,IPR006119,IPR038109, PF07508,IPR011109,SSF53041,PF00239,PTHR30461, Coil,cd00338
MTENKNRVCCLYRVSTDKQVDFNSNHEADLPMQRKACHKFAEAKGWVIVHEEQEEGVSGHKVRAEARDKLQIIKEYARKGKFDILLVFMFDRIGRIADETPFVVEWFVRNGIRVWSTQEGEQRFDNHTDKLLNYIRFWQADGESEKTSVRTRTSLRQLVEEGHFKGGSAPYGYDLVKSGRINKRKHELYELHINEQEAEIVRLIFDKYVYEGYGAQRIATYLNNAGYRARSGKCWHPGSLRGMVGNLTYMGVLRCGDARSELIPELHIIPQEEFEAAQRIREDRSAHAAEEAEHHVPLRTRGQALLSNNVYCGHCGARLALTTSRKWRKLSDGTLDDTLRIRYTCYGKLRKQTDCTGQTGYTMHILDEIIDKMVRQIFSRLRGIPKEQLITSRYAKETAERKNHLQALQAERDKAEKDLLALKTEILAVIKGESAFPKDTLAEMIAAQEKKHTELDTLCEEASAELERNAELMANVSQLYEELISYADLYDSASFEAKKMIVSQLIRRVEVYRGYQIHVDFNFDLAQYLENSDELAC

SEQ ID NO: 2880 - protein, 537 aa, Unknown
  Description of Unknown: Integrase B2881 sequence
  PTHR30461:SF3,IPR036162,PS51737,IPR011109,PTHR30461, PF00239,G3DSA:1.10.10.2600,IPR006119,PF14287,SSF53041, IPR025378,SM00857,IPR025827,cd03770,IPR038109, PF13408,G3DSA:3.40.50.1390,PF07508,Coil
MKQQIYNTALYLRLSRDDELQGESSSITTQRSMLRLYAKEHHLNVIDEYIDDGWSGTNFDRPSFQRMIEDIEAGKINCVVTKDLSRLGRNYIMTGQYTELYFPSHNVRYIAIDDGVDSEKGESEIAPFKNIINEWVARDTSRKVKSAFKTKFAEGAHYSAYAPLGYKKHPDIKGKLLIDDETKWIIEKIFSLAYQGYGSAKITKQLRAEKVPTASWLNFTRYGTFAHIFEGKPESKRYEWTIAHVKAILKSEVYIGNSVHNMQSTVSFKSKKKVRKPESEWFRVENTHEPIIDKEVFYRVQEQIKSRRRQTKEKATPIFAGLVKCADCGWSMRFGTNKANKTPYSYYACSYYGQFGKGNCSMHYIRYDVLYQAVLERLQYWAKAVQQDEEKVLNKIQKVGNAERIREKKKKASTLKKAENRQNEIDRLFAKMYEDRACEKITERNFVMLSSKYQKEQIELEQQITSLREELSKMEQDMIGAEKWIELIKEYSVPKELTAPLLNAMIEKILIHEATTNEDNERIQEIEIYYRFIGKVE

SEQ ID NO: 2881 - protein, 537 aa, Unknown
  Description of Unknown: Integrase B2882 sequence
  PTHR30461:SF3,SM00857,G3DSA:1.10.10.2600,IPR036162,PF13408, IPR025827,G3DSA:3.40.50.1390,PS51737,IPR006119,IPR038109, PF07508,IPR011109,SSF53041,PF00239,PTHR30461, Coil,cd00338
MNEMNNRVCCLYRVSTDKQVDFNSNHEADLPMQRKACHKFAEAKGWVIVHEEQEEGVSGHKVRAEARDKLQIIKDYARKGKFDILLVFMFDRIGRIADETPFVVEWFVRNGIRVWSTQEGEQRFDNHTDKLLNYIRFWQADGESEKTSVRTRTSLRQLVEEGHFKGGSAPYGYDLVKSGRINKRKHELYELHINEREAAVVRIIFDKYVHEGYGPQHIATYLNDNGYRARSGKCWHPASIRGMVRNLTYTGVLRCGDAHSELLQELQIIPAQQFEAAQRIRENRSNRAAQESEYRVPLNIHGQSLLSGNAYCGHCGAKLTLTSSRKWRKLSDGTLDDTLRVRYTCYGKLRKQTGCTGQTGYTVHILDEIIDKSVRQIFSKMRGIPKEQIITRRYEREVVERKNHLQTIQVERDKAQKDLISLKAEILACIKGESVFPKETLAEMITAQEEKLRELDALYESSYAETEKTAELMDNVSKLYEELISFSDLYDSASFEAKKMIVNQLIRRVDVYRGYQLNITFNFDLTPYIEGDDTTAC

SEQ ID NO: 2882 - protein, 537 aa, Unknown
  Description of Unknown: Integrase B2883 sequence
  PTHR30461:SF3,SM00857,G3DSA:1.10.10.2600,IPR036162,PF13408, IPR025827,PS51737,G3DSA:3.40.50.1390,IPR006119,IPR038109, PF07508,IPR011109,SSF53041,PTHR30461,Coil, PS51736,cd00338,PF00239
MPAVTATRVTIIPAKKDRLPINVLSSEARKLRVAAYARVSTNNEEQLTSYEAQVDYYTRYIQSKDEWQFVEVYTDEGISATNTKKRDGFNRMVADALAGKIDLIITKSISRFARNTVDTLTTVRKLKEKGIEVFFEKENIRTLDGKGELLITIMSSLAQEESRSISENVTWGQRKRFADGKVSLPYRRFLGYEKGPDGLPVIVESEAVIIRLIYRLFLYGKSPSAIATYLTDEGIPTPGGKKVWRAKVVESILTNEKYKGDALLQKKFTVDFLTKKQKVNEGEVPQYYVTNSHPAIIEPELFDLVQYELKTRKTDGRFTSCLHPFSGRIICGECGGIYGSKVWHSNTENRSLVWQCNEKYRGQHCSTPHLTEGEIKAAFLAAFNIVLGSRDEIIEAYEEVIAALTDTADLDAEQETLENESEVVLGLIQKIISENAQTAMDQEEYNRRYDAYSERFEAARKRLAEIAELRQERNAKKTRIRLFMENMNSHQELVQSFDEELWYSTVDYVTVYEDKRLVFTFRDGRQVEITAELWRAA

SEQ ID NO: 2883 - protein, 537 aa, Unknown
  Description of Unknown: Integrase B2884 sequence
  PTHR30461:SF3,SM00857,G3DSA:1.10.10.2600,IPR036162,PF13408, PS51737,IPR025827,G3DSA:3.40.50.1390,IPR006119,IPR038109, PF07508,IPR011109,SSF53041,PF00239,PTHR30461, PS51736,Coil,cd00338
MKKFPIDLSCLTEEEISQFQEDPYTLYNGDQNVAIYLRYSSTGQSDQSIEGQLRDCRTFCKANHYRIVAIYVDRATTARKDMEKRVHLMEMISDSAKQNWEYVIVWKLDRFARNRNDSAIMKMRLRKNGVKVLSATEHLTDSPESIILESVLEGMAEFFSAELSQKVTRGMRESALKCYSVGGHIPLGYKVENHKLVVDPDTAHIVQEAFSLYANGESVAAICRKFNSAGYKTAKNTEFNRSSFKAMFRNTRYIGTYTYKDIVIENGIPAIIDKELFETVQRRLSKTATAPARGKAKVDYLLSGKLFCGHCGASMNGESGAGRHGKVYHYYSCYTKKRKLGCDKRPLKKDYIEGIVARDALNLLTDQLIDEIADMAIRQSEQDLINDTHIPQLTAQLSEVEKSITNITAAIEKGIASETLMNRLVQLEHEKKTLNKEIKAEEKFVYRIDRDQIVFWLSQFKYGNIEDEDFRRRLIDLLVNSVTVWDEPDGYKITTAYNLTSCKTKTFRVEKNPAAEKVTGFDFGESECTKNRLKHIA

SEQ ID NO: 2884 - protein, 536 aa, Unknown
  Description of Unknown: Integrase B2885 sequence
  PTHR30461:SF3,IPR036162,PS51737,IPR011109,PTHR30461, PF00239,G3DSA:1.10.10.2600,IPR006119,PF14287,SSF53041, IPR025378,SM00857,IPR025827,cd03770,IPR038109, PF13408,G3DSA:3.40.50.1390,PF07508,Coil
MKQLIYRVALYMRLSRDDEDYGESVSIETQRKIITQFANEQHFIIVDEYIDDGWSGTNFDRPAFQRMMEDVESGKVNCIITKDLSRLGREHIMMDYYLEFYFPEKRIRYIAVTENEDTEKGLSDFVPFKNLFNEWFAKDTSRKVKAAFKAKFAAGDRICAYVKIGYKRHPEIKNRIVPDEETRWIPEKIFDLAYHGAGAAKITRTLIAEKVPTPSWINYQRFGTFAHVYQNASEEKRYAWTVAQVKYILKDETYIGNTVHYKQTNISFKNKKRIRKPEDEWWRIENTHEGLIPKEMFDSVQAQIATRRRMQKDHTTQIFSGLVKCADCGWSMRFGTNRQNKNPYSHYTCSKYGQVGIHCSAHYIRYDVLYAYVLSRIQYWAAQAVQDEDALLERLLQTGNAKQNAERKKIADDLKRSEKRQKELDNLFAKLYEDRIAERITERNFIMLSAKYQEEQNALDGKIDLLNGQISENSERYSNIETWVKLIKQYASPTELDSILLNALVEKITVHKAVKHEDGSREQEVEIFYKFIGKID

SEQ ID NO: 2885 - protein, 536 aa, Unknown
  Description of Unknown: Integrase B2886 sequence
  SM00857,G3DSA:1.10.10.2600,IPR036162,PF13408,PS51737, G3DSA:3.40.50.1390,IPR025827,IPR006119,IPR038109,PF07508, IPR011109,SSF53041,PF00239,PTHR30461,PS51736, Coil,cd00338
MKRVYTLYRVSTKQQVDKAKNDIPMQRIECREFAQKQGWEIVKELEEKGVSGFKVSAADRDAIQDLKEAAEKKKFDVLLVYMFDRIGRIDDETPFVVEWFCKHGIEVWSVEEGEQRFDSHVDKLTNYIRFWQASGESGKTSMRIKTRIHQLRIEGAYTGGPVPYGYCLEQKGRLNRKGQPIPDFAIEPHEAEIVREIFRKTLCDGYGSHRMAQYLNNRGLRTHGGARFHSIAIIRILRQKFYCGYIDDETSEGLQNLKIIDLDVFNQVQSILDQRAEKDTEKRQIALRTQGEAMLSGNIFCAHCGGRLNVIRYKDHYTRKDGSEYSVNQIKYACYHKSRKLCDCEGQTTYLAERVDEIVSQVIRQLFATMKGAPQQERLEATLKHQIASNRAQQKKINHELEKRRSRLGKLQEEIANALSGESIYSPEDVAQAISKIKEGISALEQQLYDLENDAFKQRRAMQMITPSYNQFKSWAEEFEQASIEQKKMIACQLFKKIEVGREYNVTFELNMTYQQFCSEWDGLATIFEQQDLIAQ

SEQ ID NO: 2886 - protein, 536 aa, Unknown
  Description of Unknown: Integrase B2887 sequence
  PTHR30461:SF3,SM00857,G3DSA:1.10.10.2600,IPR036162,PF13408, PS51737,IPR025827,G3DSA:3.40.50.1390,IPR006119,IPR038109, PF07508,SSF53041,IPR011109,PF00239,PTHR30461, PS51736,Coil,cd00338
MQRQHGAYIYARYSTENQDADSIDVQVGKCTQYCSQRGLPILGVFADEAVSGMKESRPRFDAMMAQLGMGLADTVVCYDQSRLFRKMTAWFDLREKLSVMGVAVISVTQPMVGGDLRDPTIFLTEGGMALFNQVWVFQSRQKVMEKMQHMARNGQHTGGKPPLGYQVVELGGVKKLAILPPEAETVKRIFSEYDSGRSYHDIIAGLNRDGIKTKRGNPFGTNSLHDLLKNEKYVGTLVYGASPYRADGTRNTHAKDGENVIRVEDAIPAIIDKDQFARVQARMAENKRVQGGRPATRREYPLRGKVFCGYCKSAMSVSISRKSYTYYKCGAKKRQHSCDAGNVSVDALEQTVAENVRLVLGQKGSIDKLIAVLRQQRTVIQDNALAQLKALISRREELRRKLDNAADLVLDGRGSKTLIARMTDMEREQEQLDAKMAALKRAVDASAVPEQTLRRYAQMMADGSVDNLAPYLAIVCRVEVYGDKVVIWTILDDDPTAPKDFNAPGVQITLGIPSGVPMVFVTADLLRIVATKQSTS

SEQ ID NO: 2887 - protein, 536 aa, Unknown
  Description of Unknown: Integrase B2888 sequence
  SM00857,G3DSA:1.10.10.2600,IPR036162,PF13408,PS51737, IPR025827,G3DSA:3.40.50.1390,IPR006119,IPR038109,PF07508, SSF53041,IPR011109,PTHR30461,PS51736,cd00338, PF00239
MKLTHGAYILARFSTDRQEADSIEVQVSKCREWCDRQRLPVLDVFADEAVSGMKETRPQFDRMMRLLSEGGADTVVIYDQSRMFRKMTAWFTLRERLERLGVRVVSVTQPMIGGDLRDPATFMSEGGMALMNQMWVLQTRQKVCEKMRWMAEQGKYTGGVPPLGYVVIDGRIEVCEPEAETVRIIFGDYAAGRSYREIIQRLNAEGRRTKSGGTFGSNSLHDLLKNEKYIGVLTYGRTQKRPDGSRNSHAVASTVMRMEDMIPAIVDRETWDIVQEKLMANKRKQAGRPVRVREYPLKGKVFCGECKASMSVTCSQGGYYYYACSEKKRKKTCDNMPIKVDDLERMIAEAIKNMLGNPENVDGLICILREERGKIQEQTAMRMKALFDRQAEIKKQLDAAMSAVLAGMHSQSLIDTVHALEAEQAQNDREMTTLHNQAQGTTIPEDRLRELLKVAANDIPALLSVVVRVEVGKDRIRVWTLLDAKPDGTFDFNTDWDDPEIGLIIIPGVAPPVPRIIINGGLLCFSLPRQKKNRAE

SEQ ID NO: 2888 - protein, 536 aa, Unknown
  Description of Unknown: Integrase B2889 sequence
  SM00857,G3DSA:1.10.10.2600,IPR036162,PF13408,PS51737, G3DSA:3.40.50.1390,IPR025827,IPR006119,IPR038109,PF07508, SSF53041,IPR011109,PTHR30461,PS51736,cd00338, PF00239
MKLTHGAYILARFSTDRQEADSIEVQVSKCREWCERQRLPVLDVFADEAVSGMKETRPQFDRMMRLLSEGGADTVVIYDQSRMFRKMTAWFTLRERLERLGVRVVSVTQPMIGGDLRDPATFMSEGGMALMNQMWVLQTRQKVCEKMRWMAEQGKYTGGVPPLGYVVIDGRIEVCEPEAETVRIIFGDYAAGRSYREIIQRLNAEGRRTKSGGTFGSNSLHDLLKNEKYIGVLTYGRTQKRPDGSRNSHAVASTVMRMEDMIPAIVDRETWDIVQEKLMANKRKQAGRPVRVREYPLKGKVFCGECKASMSVTCSQGGYYYYACSEKKRKKTCDNMPIKVDDLERMIAEAIKNMLGNPENVDGLICILREERGKIQEQTAIRMKALFDRQAEIKKQLDAAMSAVLAGMHSQSLIDTVHALEAEQAQNDREMTTLHNQAQGTTIPEDRLRELLKVAANDIPALLSVVVRVEVGKDRIRVWTLLDAKPDGTFDFNTDWDDPEIGLIIIPGVAPPVPRIIINGGLLCFSLPRQKKSRAE

SEQ ID NO: 2889 - protein, 536 aa, Unknown
  Description of Unknown: Integrase B2890 sequence
  PTHR30461:SF3,IPR036162,PS51737,IPR011109,PTHR30461, PF00239,G3DSA:1.10.10.2600,IPR006119,SSF53041,cd00338, SM00857,IPR025827,IPR038109,mobidb-lite,PS51736, PF13408,G3DSA:3.40.50.1390,PF07508,Coil
MPRKKKLQEVGGLRLVAYYRYSNGGQQTEQSIEGQRRDCEAYAKAHGYKIVHEYIDRHISGKSDSRPAFQQMISDSDSHLFDAVICWKTDRLARSRYDSIIYKTRLRRNGVKILYAAETVVDGPEGIIIEGLMESLAEYYSAELAQKLRRGQRESALKCIALGGNRSFGYDIGPDKHYCINEKQAPAVRYIFEQYAAGATAADIVRELTARGYRTSRGNPFNKNSICRIITNEMYLGVYKYADIRIEGGVPAMIDRELFNRCQTQLAFNRAHGGGKGAPRADYVLVGKLDCGLCGHAMKGASATGHTGSKHYYYTCTQHVEKKCPKTSIEKNYLEQVIVDGVAKYVLTPEKISQIVDCMMELQAKEQEPKGNPEKDALEAELAECRRKQNNILEAIEEGGSARLAARLRALEEQEAQLTFALGEINNAPAPPQFSREALTFMFEQFRREEDEVDEEYRRRILDTFVSSILLYEDRAEVKFNITDQKTGDFERVILPISANKKPPEDDDTTSNSEGSTALRLVEAMGVEPMSEKSSV

SEQ ID NO: 2890 - protein, 536 aa, Unknown
  Description of Unknown: Integrase B2891 sequence
  PTHR30461:SF3,IPR036162,PS51737,IPR011109,PTHR30461, PF00239,G3DSA:1.10.10.2600,IPR006119,SSF53041,cd00338, SM00857,IPR025827,IPR038109,PS51736,mobidb-lite, PF13408,G3DSA:3.40.50.1390,PF07508,Coil
MPRKKKLQEVGGLRLVAYYRYSNGGQQTEQSIEGQRRDCEAYAKAHGYKIVHEYIDRHISGKSDSRPAFQQMISDSDSHLFDAVICWKTDRLARSRYDSIIYKTRLRKNGVKILYAAETVVDGPEGIIIEGLMESLAEYYSAELAQKLRRGQRESALKCIALGGNRSFGYDIGPDKHYCINEKQAPAVRYIFEQYAAGATAADIVRELTARGYRTSRGNPFNKNSICRIITNEMYLGVYKYADIRIEGGVPAMIDRELFNRCQTQLAFNRAHGGGKGAPRADYVLVGKLDCGLCGHAMKGASATGHTGSKHYYYTCTQHVEKKCPKTSIEKNFLEQIIVDGVAKYVLTPEKISQIVDCMMELQAKEQEPKDNLEKDALEAELAECRRKQNNILEAIEEGGSARLAARLRALEEQEAQLTFALGEINNAPAPPQFSREALTFMFEQFRREEDEVDEEYRRRILDTFVSSILLYEDRAEVKFNITDQKTGDFERVILPISANKKPPEDDDITSNSEGSTALRLVEAMGVEPMSEKSSA

SEQ ID NO: 2891 - protein, 536 aa, Unknown
  Description of Unknown: Integrase B2892 sequence
  PTHR30461:SF3,IPR036162,PS51737,IPR011109,PTHR30461, PS00397,PF00239,G3DSA:1.10.10.2600,IPR006119,SSF53041, cd00338,SM00857,IPR025827,IPR038109,PS51736, IPR006118,PF13408,G3DSA:3.40.50.1390,PF07508,Coil
MLKNTKIAVYCRVSSDEQAERGTIDNQVTFAQQYADLHRLDIYDIYKDDGVTGTIPLQDRPEGHRLLQDAADERFTLVIFYKMDRLGRSTRVILNAVEALSQYGVGVQSMSEPFDTATPSGRFMLTMFAGVAELDRANILDRMYQGTLRHARLGKWCGGPAPFGYRLQDGYLVISEEPMPGQQLSEADVIRMLYNKTIEGWSALRLAQHLNALSIPNKYTLRGNVAAGSGKWHQSKILYILHNTLYYGERNFGKLSNNNNKNIIPQQVPAIVSRETWDAAQAAVEQHSIMPKFIKRRSYLLRGLIRCGICGHTYVGTCYKRKAGYSIYYVCNAKNTRGVTPEPCKGQTLRGEWIEDLVWQDCLKYIQQPDVIAVDADCHPQQSADDIKKEIAAITAQLKQLDQERQTVIGLCRQGIITAADLDGQLSDITAKQNTLQQTLEGLNSQNIVTKEDAEKRVKEIADILDGFRQQLQSGGELSFDAKQGIIRTLVKQITVHTELQAGTERDIPSVRVQIDYNFTLLPSKAGMLDPYRHGF

SEQ ID NO: 2892 - protein, 536 aa, Unknown
  Description of Unknown: Integrase B2893 sequence
  PTHR30461:SF3,IPR036162,PS51737,IPR011109,PTHR30461, PF00239,G3DSA:1.10.10.2600,IPR006119,SSF53041,cd00338, SM00857,IPR025827,IPR038109,PS51736,mobidb-lite, PF13408,G3DSA:3.40.50.1390,PF07508,Coil
MPRKKKLQEVGGLRLVAYYRYSNGGQQTEQSIEGQRRDCEAYAKAHGYKIVHEYIDRHISGKSDSRPAFQQMISDSDSHLFDAVICWKTDRLARSRYDSIIYKTRLRRNGVKILYAAETVVDGPEGIIIEGLMESLAEYYSAELAQKLRRGQRESALKCIALGGNRSFGYDIGPDKHYCINEKQAPAVRYIFEQYAAGATAADIVRELTARGYRTSRGNPFNKNSICRIITNEMYLGVYKYADIRIEGGVPAMIDRELFNRCQTQLAFNRAHGGGKGAPRADYVLVGKLDCGLCGHAMKGASATGHTGSKHYYYTCTQHVEKKCPKTSIEKNYLEQVIVDGVAKYVLTPEKISQIVDCMMELQAKEQEPKGNPEKDALEAELAECRRKQNNILEAIEEGGSARLAARLRALEEQEAQLTFALGEINNAPAPPQFSREALTFMFEQFRREEDEVDEEYRRRILDTFVSSILLYEDRAEVKFNITDQKTGDFERVILPISANKKPPEDDDIPSNSEGSTALRLVEAMGVEPMSEKSSA

SEQ ID NO: 2893 - protein, 536 aa, Unknown
  Description of Unknown: Integrase B2894 sequence
  PTHR30461:SF3,IPR036162,PS51737,IPR011109,PTHR30461, PF00239,G3DSA:1.10.10.2600,IPR006119,SSF53041,cd00338, SM00857,IPR025827,IPR038109,PS51736,mobidb-lite, PF13408,G3DSA:3.40.50.1390,PF07508,Coil
MPRKKKLQEVGGLRLVAYYRYSNGGQQTEQSIEGQRRDCEAYAKAHGYKIVHEYIDRHISGKSDSRPAFQQMISDSDSHLFDAVICWKTDRLARSRYDSIIYKTRLRRNGVKILYAAETVVDGPEGIIIEGLMESLAEYYSAELAQKLRRGQRESALKCIALGGNRSFGYDIGPDKHYCINEKQAPAVRYIFEQYAAGATAADIVRELTARGYRTSRGNPFNKNSICRIITNEMYLGVYKYADIRIEGGVPAMIDRELFNRCQTQLAFNRAHGGGKGAPRADYVLVGKLDCGLCGHAMKGASATGHTGSKHYYYTCTQHVEKKCPKTSIEKNYLEQVIVDGVAKYVLTPEKISQIVDCMMELQAKEQEPKGNPEKDALEAELAECRRKQNNILEAIEEGGSARLAARLRTLEEQEAQLTFALGEINNAPTPPQFSREALTFMFEQFRREEDEVDEEYRRRILDTFVSSILLYEDRAEVKFNITDQKTGDFERVILPISANKKPPEDDDIPSNSEGSTALRLVEAMGVEPMSEKSSA

SEQ ID NO: 2894 - protein, 536 aa, Unknown
  Description of Unknown: Integrase B2895 sequence
  PTHR30461:SF3,IPR036162,PS51737,IPR011109,PTHR30461, PF00239,G3DSA:1.10.10.2600,IPR006119,SSF53041,cd00338, SM00857,IPR025827,IPR038109,PS51736,mobidb-lite, PF13408,G3DSA:3.40.50.1390,PF07508,Coil
MPRKKKLQEVGGLRLVAYYRYSNGGQQTEQSIEGQRRDCEAYAKAHGYKIVHEYIDRHISGKSDSRPAFQQMISDSDSHLFDAVICWKTDRLARSRYDSIIYKTRLRKNGVKILYAAETVVDGPEGIIIEGLMESLAEYYSAELAQKLRRGQRESALKCIALGGNRSFGYDIGPDKHYCINEKQAPAVRYIFEQYAAGATAADIVRELTARGYRTSRGNPFNKNSICRIITNEMYLGVYKYADIRIEGGVPAMIDRELFNRCQTQLSFNRAHGGGKGAPRADYVLVGKLDCGLCGHAMKGASATGHTGSKHYYYTCTQHVEKKCPKTSIEKNYLEQIIVDGVAKYVLTPEKISQIVDCMMELQAKEQEPKGNPEKDALEAELAECRRKQNNILEAIEEGGSARLAARLRTLEEQEAQLTFALGEINNAPTPPQFSREALTFMFEQFRREEDEVDEEYRRRILDTFVSSILLYEDRAEVKFNITDQKTGDFERVILPISANKKPPEDDDITSNSEGSTALRLVEAMGVEPMSEKSSA

SEQ ID NO: 2895 - protein, 536 aa, Unknown
  Description of Unknown: Integrase B2896 sequence
  PTHR30461:SF3,SM00857,G3DSA:1.10.10.2600,IPR036162,PF13408, PS51737,G3DSA:3.40.50.1390,IPR025827,IPR006119,IPR038109, PF07508,IPR011109,SSF53041,PTHR30461,Coil, PS51736,cd00338,PF00239
MSTAVVYARYSSHSQRDASIDQQLATCRAFAQRGGIDIVDVYTDRALTGTNDNRPGFKKMIADAAKGRWNYVLVYALDRFSRDRYDSAVNKKRLRDCGVKVISATEPITEDPVGSLMESMLEGYAEYYSRELSAKVRRGHADNAKKGIVNGPLPLGYRRGTDGRPEIDPDRAEIVREIYRRAGRGEPLVRIAEDLNARGIRTKTGGPWGKSSFNTLLSNERYTGLYIYQDTRIPGGIPAIISPEDFAAVQHRLGGKKNPRRPVLPDAPPSRRRGADIYLLTGKLFCAGCGAPLVGVSGKARDGSLRHYYACRGRIREGRQCNLKNIRREDIEADIAAAIKQQILNEPTIQAISEAAYTYQLSLCESADLTILRQQLADTTKALKNIMAAIEQGIFTASTKTRLQELEADQQSLTARITAAEAAVENIPTKSEIAATLKYYATGDLADPLYREALIDTFLVRAYVHPDHYDIYFSTDAKSAVSFPLDLKTATLSESELLNGSYRVPGLGPDQTIRTVTQHIILICGMFRITFNRPSH

SEQ ID NO: 2896 - protein, 536 aa, Unknown
  Description of Unknown: Integrase B2897 sequence
  PTHR30461:SF3,IPR036162,PS51737,IPR011109,PTHR30461, PS00397,PF00239,G3DSA:1.10.10.2600,IPR006119,SSF53041, cd00338,SM00857,IPR025827,IPR038109,PS51736, IPR006118,PF13408,G3DSA:3.40.50.1390,PF07508,Coil
MFKNTKIAVYCRVSSDEQAERGTIDNQITFAQQYADLHHLDIYDVYKDDGITGTIPLQDRPEGHRLLQDAADERFTLVVFYKMDRLGRSTRVILNAVEALSQYGVGVQSMSEPFDTATPSGRFMLTMFAGVAELDRANILDRMYQGTLRHARLGKWCGGPAPFGYRLQDGYLVISEEPMPGQQLSEADIIRMLYSKTIEGWSALRLAQHLNALGVPNKYTLRGNVAAGSGKWHQSKILYILHNTLYYGERSFGKLSKNNNKNIIPQQVPAIVSKETWDAAQAAVEQHSIMPKFVKRRRYLLRGLIRCGICGHTYVGTYYKRKAGNSIYYVCNAKNTRGVTPEPCKGQTLRGEWIESLVWEDCLRYIKQPDVIAVDEDCRYLQSAGDIKKEIDAATAQLKQLDQERQTVIGLCRQGIITAADLDGQLSEITAKQNTLQQTLEGLNSQSIVTKEDAEKRIKEIADILDGFRQQLQSGGELSFDAKQGIIRTLVKQIIVHTELQPGAERDIPTVRVCIDYNFTLLSAKTAMLDPYRQGF

SEQ ID NO: 2897 - protein, 536 aa, Unknown
  Description of Unknown: Integrase B2898 sequence
  SM00857,G3DSA:1.10.10.2600,IPR036162,PF13408,PS51737, G3DSA:3.40.50.1390,IPR025827,IPR006119,IPR038109,PF07508, SSF53041,IPR011109,PTHR30461,PS51736,cd00338, PF00239
MKLTHGAYILARFSTDRQEADSIEVQVSKCREWCERQRLPVLDVFADEAVSGMKETRPQFDRMMRLLSEGGADTVVIYDQSRMFRKMTAWFTLRERLERLGVRVVSVTQPMIGGDLRDPATFMSEGGMALMNQMWVLQTRQKVCEKMRWMAEQGKYTGGVPPLGYVVIDGRIEVCEPEAETVRIIFGDYAAGRSYREIIQRLNAEGRRTKSGGTFGSNSLHDLLKNEKYIGVLTYGRTQKRPDGSRNSHAVASTVMRMEDMIPAIVDRETWDTVQEKLMANKRKQAGRPVRVREYPLKGKVFCGECKASMSVTCSQGGYYYYACSEKKRKKTCDNMPIKVDDLERMIAEAIKNMLGNPENVDGLICILREERGKIQEQTAIRMKALFDRQAEIKKQLDAAMSAVLAGMHSQSLIDTVHALEAEQAQNDREMTTLHNQAQGTTIPEDRLRELLKVAANDIPALLSVVVRVEVGKDRIRVWTLLDAKPDGTFDFNTDWDDPEIGLIIIPGVAPPVPRIIINGGLLCFSLPRQKKNRAE

SEQ ID NO: 2898 - protein, 536 aa, Unknown
  Description of Unknown: Integrase B2899 sequence
  PTHR30461:SF3,IPR036162,PS51737,IPR011109,PTHR30461, PF00239,G3DSA:1.10.10.2600,PF14287,IPR006119,SSF53041, IPR025378,SM00857,IPR025827,cd03770,IPR038109, PF13408,G3DSA:3.40.50.1390,PF07508,Coil
MKQLIYRVALYMRLSRDDEDYGESVSIETQRKIITQFANEQHFIIVDEYIDDGWSGTNFDRPAFQRMMEDVESGKVNCIITKDLSRLGREHIMMDYYLEFYFPEKRIRYIAVTENEDTEKGLSDFVPFKNLFNEWFAKDTSRKVKAAFKAKFAAGDRICAYVKIGYKRHPEIKNRIVPDEETRWIPEKIFDLAYHGAGAAKITRTLIAEKVPTPSWINYQRFGTFAHVYQNASEEKRYAWTVAQVKYILKDETYIGNTVHYKQTNISFKNKKRIRKPEDEWWRIENTHEGLIPKEMFDSVQAQIATRRRMQKDHTTQIFSGLVKCADCGWSMRFGTNRQNKNPYSHYTCSKYGQVGIHCSAHYIRYDVLYAYVLSRIQYWAAQAVQDEDALLERLLQTGNAKQNAERKKIADDLRRAEKRQKELDNLFAKLYEDRIAERITERNFIMLSAKYQEEQNALDGKIDLLNGQISENSERYSNIETWVKLIKQYASPTELDSILLNALVEKITVHEAVKHEDGSREQEVEIFYKFIGKID

SEQ ID NO: 2899 - protein, 536 aa, Unknown
  Description of Unknown: Integrase B2900 sequence
  PTHR30461:SF3,SM00857,G3DSA:1.10.10.2600,IPR036162,PF13408, IPR025827,PS51737,G3DSA:3.40.50.1390,IPR006119,IPR038109, PF07508,SSF53041,IPR011109,PF00239,PTHR30461, PS51736,Coil,cd00338
MQRQHGAYIYARYSTENQDADSIDVQVGKCTQYCSQRGLPILGVFADEAVSGMKESRPRFDAMMAQLGMGLADTVVCYDQSRLFRKMTAWFDLREKLSVMGVAVISVTQPMVGGDLRDPTIFLTEGGMALFNQVWVFQSRQKVMEKMQHMARNGQHTGGKPPLGYQVVELGGVKKLAILPPEAETVKRIFAEYDSGRSYHDIIAGLNRDGIKTKRGNQFGTNSLHDLLKNEKYIGTLVYGASPYRADGTRNTHAKDGENVIRVEDAIPAIIDKDQFARVQARMAENKRVQGGRPATRREYPLKGKVFCGYCKSAMSVSISRKSYTYYKCGAKKRQHSCDAGNVSVDALEQTVAENVRLVLGQKGSIDKLIAVLRQQRTVIQDNALAQLKTLISRREELRRKLDNAADLVLDGRGSKTLIARMTDMEREQEQLDAKMTALKRAVDASAVPEQTLRRYAQMMADGSVDNLAPYLAIVCRVEVYGDKVVIWTILDDDPTAPKDFNAPGVQITLGIPSGVPMVFVTADLLRIVATKQSTS

SEQ ID NO: 2900 - protein, 536 aa, Unknown
  Description of Unknown: Integrase B2901 sequence
  PTHR30461:SF3,cd00338,SM00857,G3DSA:1.10.10.2600,IPR036162, PF13408,PS51737,G3DSA:3.40.50.1390,IPR025827,IPR006119, IPR038109,PF07508,IPR011109,SSF53041,PTHR30461, PS51736,Coil,PF00239
MQKLKVAAYARVSTDKDDQTNSLDNQRNYFTNYIINHENWKLVDVYFDEGISGTQTEKRVGFNRMIEDAKNKEIDLIITKEVSRFARNTVDTLSYTRKLKEYGVGVVFTLDNIDTRETDGEFRLTIMASIAQEESRKTSERVRWGQRRQMEKGVVFGRDLLGYTVRHGVLAINQEEVPVVKAIFHKYTNEGKGTHVIARELIEEGMRPKRIALWSNTIILKVLRNEKYVGDLLQKKTYTPDFLTHAKKYNHGEEEMVYLQNHHEPIIDRDLWNRTQEELKRRSGSIEQRSKHSNRYWCSGKLRCAECGSRFVSRTKKLKDGTQYKAWRCHAAAIYGSIKKDADGKLVGCSNSAINERSLRTCMNYCISLVQSEKNSIKKEILSEIKELQKSAEKKTDTKKIQKKVDQLEAKKRKAIDLMLDGLISETDLKSQTEWYNEEIKQLNQQLLDSEQENKVKSRQANAMNEYISALDEIMDMDSDNELVYKEVLDHIDVHKGYILDIWLKCIPFAIRLKIKSSGKGEYFKTEIIETSFIEK

SEQ ID NO: 2901 - protein, 536 aa, Unknown
  Description of Unknown: Integrase B2902 sequence
  PTHR30461:SF3,IPR036162,PS51737,IPR011109,PTHR30461, PF00239,G3DSA:1.10.10.2600,PF14287,IPR006119,SSF53041, IPR025378,SM00857,IPR025827,cd03770,IPR038109, PF13408,G3DSA:3.40.50.1390,PF07508,Coil
MKQLIYRVALYMRLSRDDEDYGESVSIETQRKIITQFANEQHFIIVDEYIDDGWSGTNFDRPAFQRMMEDVESGKVNCIITKDLSRLGREHIMMDYYLEFYFPEKRIRYIAVTENEDTEKGLSDFVPFKNLFNEWFAKDTSRKVKAAFKAKFAAGDRICAYVKIGYKRHPEIKNRIVPDEETRWIPEKIFDLAYHGAGAAKITRTLIAEKVPTPSWINYQRFGTFAHVYQNASEEKRYAWTVAQVKYILKDETYIGNTVHYKQTNISFKNKKRIRKPEDEWWRIENTHEGLIPKEMFDSVQAQIATRRRMQKDHTTQIFSGLVKCADCGWSMRFGTNRQNKNPYSHYTCSKYGQVGIHCSAHYIRYDVLYAYVLSRIQYWAAQAVQDEDALLERLLQTGNAKQNAERKKIADDLKRAEKRQKELDNLFAKLYEDRIAERITERNFIMLSAKYQEEQNALDGKIDLLNGQISENSERYSNIETWVKLIKQYASPTKLDSILLNALVEKITVHEAVKHEDGSREQEVEIFYKFVGKID

SEQ ID NO: 2902 - protein, 536 aa, Unknown
  Description of Unknown: Integrase B2903 sequence
  PTHR30461:SF3,cd00338,SM00857,G3DSA:1.10.10.2600,IPR036162, PF13408,PS51737,G3DSA:3.40.50.1390,IPR025827,IPR006119, IPR038109,PF07508,SSF53041,IPR011109,PTHR30461, PS51736,Coil,PF00239
MNVVIYARFSSHSQTEQSIEGQLKVCYEYAKDNDYIVVGEYIDRAQTGKNDNRVEFQKMLSDSDKHTFEGVLVYQLDRFARNRYDSAINKSKLKKNGVRVISAKENIADDPSGILVEGVLESMAEYYSAELSQKIHRGMEINAEKCLSNGSNPGLGFKVDSDRRFYVDNDEAAIVREIYERYAAGETKAEIIRDLQRRKIKTSLGKEFSNNSLSRLLCNKRYIGVYLYKDQETPGGMPRILDDDLFYRVQALMNKNKSAPARTHGEGEYLLTTKLFCGYCKEMMVGYGGTGKLGRQYHYYNCKNARKKKCKKKIVSKQLIEDRVVAECLKLLTDENIAFIAKMVAEECNKSPDNISVKELRKAIQETDTAIENLWRGIELGQSVEMLTERINQRKAEKAELEEQLAIEQNKKICLTELQIHAFLDYVCDMPADDVNKRRAIINIFVHSIYLYDDNFTLIINASKKPLSIDNIPLDDIEAAFGGDTYTSAECSSMKTSAPPKRKIRICGFFFLPIIFPLFTFTRFHTFFVIHERISR

SEQ ID NO: 2903 - protein, 536 aa, Unknown
  Description of Unknown: Integrase B2904 sequence
  PTHR30461:SF3,IPR036162,PS51737,IPR011109,PTHR30461, PS00397,PF00239,G3DSA:1.10.10.2600,IPR006119,SSF53041, cd00338,SM00857,IPR025827,IPR038109,PS51736, IPR006118,PF13408,G3DSA:3.40.50.1390,PF07508,Coil
MLKNTKIAVYCRVSSDEQAERGTIDNQVTFARQYADLHHLAIYDVYKDDGVTGTIPLQDRPEGHRLLQDAADERFTLVVFYKMDRLGRSTRVILNAVEALSQYGVGVQSMSEPFDTATPSGRFMLTMFAGVAELDRANILDRMYQGTLRHARLGKWCGGPAPFGYKLEDGYLVISEEPMPGQQLSEADVIRILYSKTIEGWSALRLAQHLNALGIPNKYKLRGNVAAGSGKWHQSKILYILHNTLYYGERSFGKMSKSSNKNIIPQQVPAIVSRETWDAAQAAVEQHSIMPKFIKRRSYLLRGLIRCGLCGHTYVGTYYKRKAGNSIYYVCNAKNTRGVTPEPCKGQTLRGEWIESLVWEDCLRYIKQPDVIAVDEDCRYLQSADDIKKEIDAATAQLKQLDQERQTVIGLCRQGIITAADLDGQLSEITAKQNTLQQTLEGLNSQSIVTKEDAEKRIKEIADILDGFRQQLQSGGELSFDAKQGIIRTLVKQITVHTELQPGAERDIPTVRVCIDYNFTLLSAKTAMLDPYRHGF

SEQ ID NO: 2904 - protein, 536 aa, Unknown
  Description of Unknown: Integrase B2905 sequence
  PTHR30461:SF3,IPR036162,PS51737,IPR011109,PTHR30461, PF00239,G3DSA:1.10.10.2600,IPR006119,SSF53041,cd00338, SM00857,IPR025827,IPR038109,PS51736,mobidb-lite, PF13408,G3DSA:3.40.50.1390,PF07508,Coil
MPRKKKLQEVGGLRLVAYYRYSNGGQQTEQSIEGQRRDCEAYAKAHGYKIVHEYIDRHISGKSDSRPAFQQMISDSDSHLFDAVICWKTDRLARSRYDSIIYKTRLRKNGVKILYAAETVVDGPEGIIIEGLMESLAEYYSAELAQKLRRGQRESALKCIALGGNRSFGYDIGPDKHYCINEKQAPAVRYIFEQYAAGATAADIVRELTARGYRTSRGNPFNKNSICRIITNEMYLGVYKYADIRIEGGVPAMIDRELFNRCQTQLAFNRAHGGGKGAPRADYVLVGKLDCGLCGHAMKGASATGHTGSKHYYYTCTQHVEKKCPKTSIEKNYLEQIIVDGVAKYVLTPEKISQIVDCMMELQAKEQEPKGNPEKNALEAELAECRRKQNNILEAIEEGGSARLAARLRALEEQEAQLTFALGEINNAPAPPQFSREALTFMFEQFRREEDEVDEEYRRRILDTFVSSILLYEDRAEVKFNITDQKTGDFERVILPISANKKPPEDDDITSNSEGSTALRLVEAMGVEPMSEKSSV

SEQ ID NO: 2905 - protein, 536 aa, Unknown
  Description of Unknown: Integrase B2906 sequence
  PTHR30461:SF3,IPR036162,PS51737,IPR011109,PTHR30461, PF00239,G3DSA:1.10.10.2600,IPR006119,PF14287,SSF53041, IPR025378,SM00857,IPR025827,cd03770,IPR038109, PF13408,G3DSA:3.40.50.1390,PF07508,Coil
MKQLIYRVALYMRLSRDDEDYGESVSIETQRKIITQFANEQHFIIVDEYIDDGWTGTNFDRPAFQRMMEDVESGKVNCIITKDLSRLGREHIMMDYYLEFYFPEKRIRYIAVTENEDTEKGLSDFVPFKNLFNEWFAKDTSRKVKAAFKAKFAAGDRICAYVKIGYKRHPEIKNRIVPDEETRWIPEKIFDLAYHGAGAAKITRTLIAEKVPTPSWINYQRFGTFAHVYQNASEEKRYAWTVAQVKYILKDETYIGNTVHYKQTNISFKNKKRIRKPEDEWWRIENTHDGLIPKEMFASVQEQIATRRRMQKDHTTQIFSGLVKCADCGWSMRFGTNRQNKNPYSHYTCSKYGQVGIHCSAHYIRYDVLYAYVLSRIQYWAAQAVQGEDALLERLLQTGNAKQNAERKKIADDLKRAEKRQKELDNLFAKLYEDRIAERITERNFIMLSAKYQEEQNALDGKIDLLNGQISENSERYSNIETWVKLIKQYASPTELDSILLNALVEKIAVHEAIKHEDGSREQEVEIFYKFVGKID

SEQ ID NO: 2906 - protein, 536 aa, Unknown
  Description of Unknown: Integrase B2907 sequence
  PTHR30461:SF3,IPR036162,PS51737,IPR011109,PTHR30461, PF00239,G3DSA:1.10.10.2600,IPR006119,SSF53041,cd00338, SM00857,IPR025827,IPR038109,PS51736,mobidb-lite, PF13408,G3DSA:3.40.50.1390,PF07508,Coil
MPRKKKLQEVGGLRLVAYYRYSNGGQQTEQSIEGQRRDCEAYAKAHGYKIVHEYIDRHISGKSDSRPAFQQMISDSDSHLFDAVICWKTDRLARSRYDSIIYKTRLRRNGVKILYAAETVVDGPEGIIIEGLMESLAEYYSAELAQKLRRGQRESALKCIALGGNRSFGYDIGPDKHYCINEKQAPAVRYIFEQYAAGATAADIVRELTARGYRTSRGNPFNKNSICRIITNEMYLGVYKYADIRIEGGVPAMIDRELFNRCQTQLAFNRAHGGGKGAPRADYVLVGKLDCGLCGHAMKGASATGHTGSKHYYYTCTQHVEKKCPKTSIEKNYLEQIIVDGVAKYVLTPEKISQIVDCMMELQAKEQEPKGNPERDALEAELAECRRKQNNILEAIEEGGSARLAARLRALEEQEAQLTFALGEINNAPTPPQFSREALTFMFEQFRREEDEVDEEYRRRILDTFVSSILLYEDRAEVKFNITDQKTGDFERVILPISANKKPPEDDDTTSNSEGSTALRLVEAMGVEPMSEKSSV

SEQ ID NO: 2907 - protein, 536 aa, Unknown
  Description of Unknown: Integrase B2908 sequence
  PTHR30461:SF3,IPR036162,PS51737,IPR011109,PTHR30461, PF00239,G3DSA:1.10.10.2600,IPR006119,SSF53041,cd00338, SM00857,IPR025827,IPR038109,mobidb-lite,PS51736, PF13408,G3DSA:3.40.50.1390,PF07508,Coil
MPRKKKLQEVGGLRLVAYYRYSNGGQQTEQSIEGQRRDCEAYAKAHGYKIVHEYIDRHISGKSDSRPAFQQMISDSDSHLFDAVICWKTDRLARSRYDSIIYKTRLRRNGVKILYAAETVVDGPEGIIIEGLMESLAEYYSAELAQKLRRGQRESALKCIALGGNRSFGYDIGPDKHYCINEKQAPAVRYIFEQYAAGATAADIVRELTARGYRTSRGNPFNKNSICRIITNEMYLGVYKYADIRIEGGVPAMIDRELFNRCQTQLAFNRAHGGGKGAPRADYVLVGKLDCGLCGHAMKGASATGHTGSKHYYYTCTQHVEKKCPKTSIEKNYLEQVIVDGVAKYILTPEKISQIVDCMMELQAKEQEPKGNPEKDALEAELAECRRKQNNILEAIEEGGSARLAARLRALEEQEAQLTFALGEINNAPAPPQFSREALTFMFEQFRREEDEVDEEYRRRILDTFVSSILLYEDRAEVKFNITDQKTGDFERVILPISANKKPPEDDDTTSNSEGSTALRLVEAMGVEPMSEKSSA

SEQ ID NO: 2908 - protein, 536 aa, Unknown
  Description of Unknown: Integrase B2909 sequence
  PTHR30461:SF3,IPR036162,PS51737,IPR011109,PTHR30461, PF00239,G3DSA:1.10.10.2600,IPR006119,SSF53041,cd00338, SM00857,IPR025827,IPR038109,mobidb-lite,PS51736, PF13408,G3DSA:3.40.50.1390,PF07508,Coil
MPRKKKLQEVGGLRLVAYYRYSNGGQQTEQSIEGQRRDCEAYAKAHGYKIVHEYIDRHISGKSDSRPAFQQMISDSDSHLFDAVICWKTDRLARSRYDSIIYKTRLRKNGVKILYAAETVVDGPEGIIIEGLMESLAEYYSAELAQKLRRGQRESALKCIALGGNRSFGYDIGPDKHYCINEKQAPAVRYIFEQYAAGATAADIVRELTARGYRTSRGNPFNKNSICRIITNEMYLGVYKYADIRIEGGVPAMIDRELFNRCQTQLAFNRAHGGGKGAPRADYVLVGKLDCGLCGHAMKGASATGHTGSKHYYYTCTQHVEKKCPKTSIEKNYLEQIIVDGVAKYVLTPEKISQIVDCMMELQAKEQEPKGNPEKDALEAELAECRRKQNNILEAIEEGGSARLAARLRALEEQEAQLTFALGEINNAPAPPQFSREALTFMFEQFRREEDEVDEEYRRRILDTFVSSILLYEDRAEVKFNITDQKTGDFERVILPISANKKPPEDDDTTSNSEGSTALRLVEAMGVEPMSEKSSV

SEQ ID NO: 2909 - protein, 536 aa, Unknown
  Description of Unknown: Integrase B2910 sequence
  PTHR30461:SF3,cd00338,SM00857,G3DSA:1.10.10.2600,IPR036162, PF13408,PS51737,G3DSA:3.40.50.1390,IPR025827,IPR006119, IPR038109,PF07508,IPR011109,SSF53041,PTHR30461, PS51736,Coil,PF00239
MNAVIYARYSSDRQTEQSIEGQIRFCTQYAQQHGYNVIKHYVDRAISGTTDHRPQFQQMIADSAKRQFQFVIVWKLDRFARNRYDSAIYKSKLKKNGVKVLSATEGIGEGDESIILEAVLEAMAETYSRQLSQNVRRGMRESALKGNSTGGAIPLGYKLEGKKLSVDEETAPIVRYIFERYAAGASKTEIAAYLNDRGHRTKSGTKFTVNSFRTILSNPKYIGVYHYDEVSVEDGCPALIEKELFDDVQKKTAATKRAPAHKKAKVEYLLNGKLFCGYCASPMVGDCGTSKTGERYYYYSCAARKKKPKSCKKKREKKDFIEWYVVEQTVDYVLTPSRIDYIAERVVEEYNKGCSDDEIKRLEKEITKHDAEIGQCAEALIGAKTSGIIDKINEKAMQIEARKQEAEESLINLRLAGKYQLKKEEVAAWLTSFCKGDLFDMEFRKRIIDVFINAIYLYDDKVVIYFNVRGGKQVSYMEMIDDTTDFFDNITESSNFAHSGPPKRNDSFRKEIVISFYTLLFSLKIVISSEKIKEKR

SEQ ID NO: 2910 - protein, 536 aa, Unknown
  Description of Unknown: Integrase B2911 sequence
  PTHR30461:SF3,SM00857,G3DSA:1.10.10.2600,IPR036162,PF13408, PS51737,G3DSA:3.40.50.1390,IPR025827,IPR006119,IPR038109, PF07508,IPR011109,SSF53041,PF00239,PTHR30461, PS51736,Coil,cd00338
MKKQPTGGNRLVAYYRYSGGSHQTEQSIEGQRRDCETYARIHGMVILHEYIDRHISGKTDDRPEFQQMIADAGKGMFDYVICWKTDRIARSRYDSIVYKKKLRDNGVELLYAAEANVEGSGGIIVEGLMEALAEYYSAELAEKVRRGMRESALKGKAIGSSRPLGLTVDKDKKYIIDPAGAAAVRYIFEQYAAGAASSAIVAHLNEQGLCTSRGNPFNKSSVVRIIQNEVYRGVYVSPKFDVRIEGAVPAIIDDDLWERAQKMFIRNRQSRSPRNDRADYILSGKLFCGECGTAMKGVSGHSSNGEVYFYYNCPCKDCHRRNIPKDELEGLVIRTVCNDVLQPDVMDRIADSVIAAQTAELNQPNPEKEALQHELADVQRKAKNLLSALENGTAGAMLTNRLAELEQQADTLSYQLSSLESEPKYPVFSKEEVLYLLEQFLIAPSEKTKAYRRRLIDTFVSKIEVSNTELTIYFNIAEEDCGKMKKAPQSNQPEGCSTEKQMVHLAHQQANYSLYAASGYFSLVEHQFSARLWRTA

SEQ ID NO: 2911 - protein, 536 aa, Unknown
  Description of Unknown: Integrase B2912 sequence
  PTHR30461:SF3,cd00338,SM00857,G3DSA:1.10.10.2600,IPR036162, PF13408,IPR025827,G3DSA:3.40.50.1390,PS51737,IPR006119, IPR038109,PF07508,SSF53041,IPR011109,PTHR30461, PS51736,Coil,PF00239
MKKKFSSVPDPDIQDAVIYARYSSHSQRDCSIEQQVADCELFAQQNGLRVVKIYADRHLSGTTDNRPEFQQMLKDAAHGHWPFVICWKIDRFARNRYDSATYKYKLKKAGVRVLYAKESIPDGPEGILLESVLEGSAEYYSASLAQNIRRGMRFNAENCKVNSGSIPFGYCKGPDGRFAIHETNAEIVREIFRKAAAGVPFVDIATELNNKGLKTSRGGRWNKNSFVLLKNESYIGVYHFSDIRIEGGMPAIIDPGTFLAANERMNANRRVRGRHHDGGDYLLTGKLKCAHCGSYMVGFSGTAKNGESHYYYGCQKRRRERACKKANVPREWIEKVVVKAALDYVLQPDVMEWITDAVMEYQEREAASSQLAALTAELEENQKATDNVMKAIEAGIITATTKQRLLDLETKAKDLKRAIELEKLSRVRLEREQILYWLEQFQGGSLQNQEFRRKVIDTFVSVVYLSDDHLRIAFNYSGQNRSEADFNLIMDAETASADYPINSFSLPLSPPHKNQANPTIYFVGAFFVLIMPLPER

SEQ ID NO: 2912 - protein, 536 aa, Unknown
  Description of Unknown: Integrase B2913 sequence
  PTHR30461:SF3,IPR036162,PS51737,IPR011109,PTHR30461, PF00239,G3DSA:1.10.10.2600,IPR006119,SSF53041,cd00338, SM00857,IPR025827,IPR038109,mobidb-lite,PS51736, PF13408,G3DSA:3.40.50.1390,PF07508,Coil
MPRKKKLQEVGGLRLVAYYRYSNGGQQTEQSIEGQRRDCEAYAKAHGYKIVHEYIDRHISGKSDSRPAFQQMISDSDSHLFDAVICWKTDRLARSRYDSIIYKTRLRRNGVKILYAAETVVDGPEGIIIEGLMESLAEYYSAELAQKLRRGQRESALKCIALGGNRSFGYDIGPDKHYCINEKQAPAVRYIFEQYAAGATAADIVRELTARGYRTSRGNPFNKNSICRIITNEMYLGVYKYADIRIEGGVPAMIDRELFNRCQTQLAFNRAHGGGKGAPRADYVLVGKLDCGLCGHAMKGASATGHTGSKHYYYTCTQHVEKKCPKTSIEKNYLEQIIVDGVAKYVLTPEKISQIVDCMMELQAKEQEPKGNPERDALEAELAECRRKQNNILEAIEEGGSARLAARLRALEEQEAQLTFALGEINNAPTPPQFSREALTFMFEQFRREEDEVDEEYRRRILDTFVSSILLYEDRAEVKFNITDQKTGDFERVILPISANKKPPEDDDTTSNSEGSTALRLVEAMGVEPMSEKSSA

SEQ ID NO: 2913 - protein, 536 aa, Unknown
  Description of Unknown: Integrase B2914 sequence
  PTHR30461:SF3,IPR036162,PS51737,IPR011109,PTHR30461, PF00239,G3DSA:1.10.10.2600,IPR006119,PF14287,SSF53041, IPR025378,SM00857,IPR025827,cd03770,IPR038109, cd16858,PS51736,PF13408,G3DSA:3.40.50.1390,PF07508,Coil
MQTGKITALYVRFSYDDGIDAESGSIEHQKSLLRSYAESNGFTNLSYYADDGYTGTNFNRPDFQRMLGDIQKGLVSTVIVKDMSRLGRNYLMVGQYVEMEFPKHNVRFIAISDNVDSAKGMNDLLPIHNLMNEWYSHDISKKVRAMIRQKGNSGQAIASKLPYGYYNTPEDKQTWLIDESAANVVRKIFDLYLNQSFGMYQIAKILKAEGVPKPTYHRRLAKGIKVEADDLCVWSASVVRGILQHREYIGDTVNFRTEITSYKNKKVIHNSDDKWRIFPNTHPAIIDRETFQKVQDKIAKEIRHTRNVHSYLFADYLYCMDCHSRMHGRQCYLKGKRSLPAYECSTYRKSKGCCFHGVPEMYLQAEVLARIQKVLAFAKSNPAEFRQNIRKALEEQSDGSKAVIQEELDKAQTRTAEIDKYIQGLFEAKVRGEIDGSLFASLKKTYDEEKEQLNRLIIELITKLSRENEANEKVQLLYAAIRKYDAVWELTPEVLTDFIEKIEVGQVSAENKKISFELRDNQISVFFWGVGIIDFI

SEQ ID NO: 2914 - protein, 536 aa, Unknown
  Description of Unknown: Integrase B2915 sequence
  PTHR30461:SF3,IPR036162,PS51737,IPR011109,PTHR30461, PF00239,G3DSA:1.10.10.2600,IPR006119,SSF53041,cd00338, SM00857,IPR025827,IPR038109,PS51736,mobidb-lite, PF13408,G3DSA:3.40.50.1390,PF07508,Coil
MPRKKKLQEVGGLRLVAYYRYSNGGQQTEQSIEGQRRDCEAYAKAHGYKIVHEYIDRHISGKSDSRPAFQQMISDSDSHLFDAVICWKTDRLARSRYDSIIYKTRLRRNGVKILYAAETVVDGPEGIIIEGLMESLAEYYSAELAQKLRRGQRESALKCIALGGNRSFGYDIGPDKHYCINEKQAPAVRYIFEQYAAGATAADIVRELTARGYRTSRGNPFNKNSICRIITNEMYLGVYKYADIRIEGGVPAMIDRELFNRCQTQLAFNRAHGGGKGAPRADYVLVGKLDCGLCGHAMKGASATGHTGSKHYYYTCTQHVEKKCPKTSIEKNFLEQIIVDGVAKYVLTPEKISQIVDCMMELQAKEQEPKDNPEKDALEAELAECRRKQNNILEAIEEGGSARLAARLRALEEQEAQLTFALGEINNAPAPPQFSREALTFMFEQFRREEDEVDEEYRRRILDTFVSSILLYEDRAEVKFNITDQKTGDFERVILPISANKNPPEDDDITSNSEGSTALRLVEAMGVEPMSEKSSA

SEQ ID NO: 2915 - protein, 536 aa, Unknown
  Description of Unknown: Integrase B2916 sequence
  PTHR30461:SF3,IPR036162,PS51737,IPR011109,PTHR30461, PF00239,G3DSA:1.10.10.2600,IPR006119,SSF53041,cd00338, SM00857,IPR025827,IPR038109,PS51736,mobidb-lite, PF13408,G3DSA:3.40.50.1390,PF07508,Coil
MPRKKKLQEVGGLRLVAYYRYSNGGQQTEQSIEGQRRDCEAYAKAHGYKIVHEYIDRHISGKSDSRPAFQQMISDSDSHLFDAVICWKTDRLARSRYDSIIYKTRLRRNGVKILYAAETVVDGPEGIIIEGLMESLAEYYSAELAQKLRRGQRESALKCIALGGNRSFGYDIGPDKHYCINEKQAPAVRYIFEQYAAGATAADIVRELTARGYRTSRGNPFNKNSICRIITNEMYLGVYKYGDIRIEGGVPAMIDRELFNRCQTQLAFNRVHGGGKGAPRADYVLVGKLDCGLCGHAMKGASATGHTGSKHYYYTCNQHVEKKCPKTSIEKNYLEQVIVDGVAKYVLTPEKISQIVDCMMELQAKEQEPKGNPEKDALEAELAECRRKQNNILEAIEEGGSARLAARLRALEEQEAQLTFALGEINNAPAPPQFSREALTFMFEQFRREEDEVDEEYRRRILDTFVSSILLYEDRAEVKFNITDQKTGDFERVILPISANKKPPEDDDITSNSEGSTALRLVEAMGVEPMSEKSSV

SEQ ID NO: 2916 - protein, 536 aa, Unknown
  Description of Unknown: Integrase B2917 sequence
  PTHR30461:SF3,IPR036162,PS51737,IPR011109,PTHR30461, PF00239,G3DSA:1.10.10.2600,IPR006119,PF14287,SSF53041, IPR025378,SM00857,IPR025827,cd03770,IPR038109, PF13408,G3DSA:3.40.50.1390,PF07508,Coil
MKQLIYRVALYMRLSRDDEDYGESVSIETQRKIITQFANEQHFIIVDEYIDDGWTGTNFDRPAFQRMMEDVESGKVNCIITKDLSRLGREHIMMDYYLEFYFPEKRIRYIAVTENEDTEKGLSDFVPFKNLFNEWFAKDTSRKVKAAFKAKFAAGDRICAYVKIGYKRHPEIKNRIVPDEETRWIPEKIFDLAYHGAGAAKITRTLIAEKVPTPSWINYQRFGTFAHVYQNASEEKRYAWTVAQVKYILKDETYIGNTVHYKQTNISFKNKKRIRKPEDEWWRIENTHEGLIPKEMFASVQEQIATRRRIQKDHTTQIFSGLVKCADCGWSMRFGTNRQNKNPYSHYTCSKYGQVGIHCSAHYIRYDVLYTYVLSRIQYWAAQAVQDEDALLERLLQTGNAKQNAERKKIADDLKRAEKRQKELDNLFAKLYEDRIAERITERNFIMLSAKYQEEQNALDGKIDLLNGQISENSERYSNIETWVKLIKQYASPTELDSILLNALVEKIAVHEAIKHEDGSREQEVEIFYKFVGKID

SEQ ID NO: 2917 - protein, 536 aa, Unknown
  Description of Unknown: Integrase B2918 sequence
  PTHR30461:SF3,IPR036162,PS51737,IPR011109,PTHR30461, PF00239,G3DSA:1.10.10.2600,IPR006119,SSF53041,cd00338, SM00857,IPR025827,IPR038109,PS51736,mobidb-lite, PF13408,G3DSA:3.40.50.1390,PF07508,Coil
MPRKKKLQEVGGLRLVAYYRYSNGGQQTEQSIEGQRRDCEAYAKAHGYKIVHEYIDRHISGKSDSRPAFQQMISDSDSHLFDAVICWKTDRLARSRYDSIIYKTRLRRNGVKILYAAETVVDGPEGIIIEGLMESLAEYYSAELAQKLRRGQRESALKCIALGGNRSFGYDIGPDKHYCINEKQAPAVRYIFEQYAAGATAADIVRELTARGYRTSRGNPFNKNSICRIITNEMYLGVYKYADIRIEGGVPAMIDRELFNRCQTQLAFNRAHGGGKGAPRADYVLVGKLDCGLCGHAMKGASATGHTGSKHYYYTCTQHVEKKCPKTSIEKNYLEQIIVDGVAKYVLTPEKISQIVDCMMELQAKEQEPKGNPEKDALEAELAECRRKQNNILEAIEEGGSARLAARLRALEEQEAQLTFALGEINNAPSPPQFSREALTFMFEQFRREEDEVDEEYRRRILDTFVSSILLYEDRAEVKFNITDQKTGDFERVILPISVNKKPPEDDDTTSNSEGSTALRLVEAMGVEPMSEKSSV

SEQ ID NO: 2918 - protein, 536 aa, Unknown
  Description of Unknown: Integrase B2919 sequence
  cd03768,SM00857,G3DSA:1.10.10.2600,IPR036162,PS51737, G3DSA:3.40.50.1390,IPR006119,IPR038109,PF07508,SSF53041, IPR011109,PTHR30461,PS51736,PF00239
MAEEHKILRCAIYTRKSTEEGLELQFNSLQAQREACEAYIKSQKHEGWKLVPTEYDDGGYSGGNLNRPALQRLLKDIADGLIDIIVVYKIDRLTRSLHDFSKIVDVLEERNASFVSITQHFNTSSSMGRLTLNMLLSFAQFEREITGERLRDKIAASKKKGMWMGGTPPMGYKRKDKKLYPDESQSAKIQLIFDKYNELKSVQRLKKYLDSQHIYSQHDRPLSVGNLYRILQNRAYIGEVPHKGVWYKGEHKGIIEIGVFHKAQDTLQEHRIDRQRYEPQKSLLCGKLYDDKGNRMSPCWSTGSKGKKYRYYVSQAVIKCKSDKIGKVSKISLLEIETFIDKWFNKQFKEDKSVFANLLKSYSVNDTKQILNSIQNKTIEQKTQRILLGRVDLLPEEITLTIYQEQLCEYIRSLYENRPIKELFKESLKTSLVFYVKYHIAVIDNGAKAIVGERIEKNTNKTLVQLLIQAFNISHDILQGKQVKDLCEKYQLTDRYMRKILTLRFLPAKVILSILDGTQGREITAKQLFEQANQHK

SEQ ID NO: 2919 - protein, 536 aa, Unknown
  Description of Unknown: Integrase B2920 sequence
  PTHR30461:SF3,IPR036162,PS51737,IPR011109, PTHR30461,PF00239,G3DSA:1.10.10.2600,PF14287, IPR006119,SSF53041,IPR025378,SM00857,IPR025827 ,cd03770,IPR038109,PF13408,G3DSA:3.40.50.1390,PF07508,Coil
MKQLIYRVALYMRLSRDDEDYGESVSIETQRKIITQFANEQHFIIVDEYIDDGWTGTNFDRPAFQRMMEDVESGKVNCIITKDLSRLGREHIMMDYYLEFYFPEKRIRYIAVTENEDTEKGLSDFVPFKNLFNEWFAKDTSRKVKAAFKAKFAAGDRICAYVKIGYKRHPEIKNRIVPDEETRWIPEKIFDLAYHGAGAAKITRTLIAEKVPTPSWINYQRFGTFAHVYQNASEEKRYAWTVAQVKYILKDETYIGNTVHYKQTNISFKNKKRIRKPEDEWWRIENTHEGLIPKEMFASVQEQIATRRRMQKDHTTQIFSGLVKCADCGWSMRFGTNRQNKNPYSHYTCSKYGQVGIHCSAHYIRYDVLYAYVLSRIQYWAAQAVQDEDALLERLLQTGNAKQNAERKKIADDLKRAEKRQKELDNLFAKLYEDRIAERITERNFIMLSAKYQEEQNALDGKIDLLNGQISENSERYSNIETWVKLIKQYASPTELDSILLNALVEKITVHEAIKHEDGSREQEVEIFYKFVGKID

SEQ ID NO: 2920 - protein, 536 aa, Unknown
  Description of Unknown: Integrase B2921 sequence
  PTHR30461:SF3,IPR036162,PS51737,IPR011109,PTHR30461, PF00239,G3DSA:1.10.10.2600,IPR006119,PF14287,SSF53041, IPR025378,SM00857,IPR025827,cd03770,IPR038109, PF13408,G3DSA:3.40.50.1390,PF07508,Coil
MKQLIYRVALYMRLSRDDEDYGESVSIETQRKIITQFANEQHFIIVDEYIDDGWTGTNFDRPAFQRMMEDVESGKVNCIITKDLSRLGREHIMMDYYLEFYFPEKRIRYIAVTENEDTEKGLSDFVPFKNLFNEWFAKDTSRKVKAAFKAKFAAGDRICAYVKIGYKRHPEIKNRIVPDEETRWIPEEIFDLAYHGAGAAKITRTLIAEKVPTPSWINYQRFGTFAHVYQNASEEKRYAWTVAQVKYILKDETYIGNTVHYKQTNISFKNKKRIRKPEDEWWRIENTHEGLIPKEMFASVQEQIATRRRMQKDHTTQIFSGLVKCADCGWSMRFGTNRQNKNPYSHYTCSKYGQVGIHCSAHYIRYDVLYAYVLSRIQYWAAQAVQDEDALLERLLQTGNAKQNAERKKIADDLKRAEKRQKELDNLFAKLYEDRIAERITERNFIMLSAKYQEEQNALDGKIDLLNGQISENSERYSNIETWVKLIKQYASPTELDSILLNALVEKITVHEAIKHEDGNREQEVEIFYKFVGKID

SEQ ID NO: 2921 - protein, 536 aa, Unknown
  Description of Unknown: Integrase B2922 sequence
  PTHR30461:SF3,IPR036162,PS51737,IPR011109,PTHR30461, PF00239,G3DSA:1.10.10.2600,IPR006119,SSF53041,cd00338, SM00857,IPR025827,IPR038109,mobidb-lite,PS51736, PF13408,G3DSA:3.40.50.1390,PF07508,Coil
MPRKKKLQEVGGLRLVAYYRYSNGGQQTEQSIEGQRRDCEAYAKAHGYKIVHEYIDRHISGKSDSRPAFQQMISDSDSHLFDAVICWKTDRLARSRYDSIIYKTRLRKNGVKILYAAETVVDGPEGIIIEGLMESLAEYYSAELAQKLRRGQRESALKCIALGGNRSFGYDIGPDKHYCINEKQAPAVRYIFEQYAAGATAADIVRELTARGYRTSRGNPFNKNSICRIITNEMYLGVYKYADIRIEGGVPAMIDRELFNRCQTQLAFNRAHGGGKGAPRADYVLVGKLDCGLCGHAMKGASATGHTGSKHYYYTCTQHVEKKCPKTSIEKSYLEQIIVDGVAKYVLTPEKISQIVDCMMELQAKEQEPKGNPEKDALEAELAECRRKQNNILEAIEEGGSARLAARLRTLEEQEAQLTFALGEINNAPTPPQFSREALTFMFEQFRREEDEVDEEYRRRILDTFVSSILLYEDRAEVKFNITDQKTGDFERVILPISANKKPPEDDDATSNSEGSTALRLVEAMGVEPMSEKSSA

SEQ ID NO: 2922 - protein, 536 aa, Unknown
  Description of Unknown: Integrase B2923 sequence
  SM00857,G3DSA:1.10.10.2600,IPR036162,PF13408,PS51737, G3DSA:3.40.50.1390,IPR025827,IPR006119,IPR038109,PF07508, SSF53041,IPR011109,PTHR30461,PS51736,cd00338, PF00239
MKLTHGAYILARFSTDRQEADSIEVQVSKCREWCERQRLPVLDVFADEAVSGMKETRPQFDRMMRLLSEGGADTVVIYDQSRMFRKMTAWFTLRERLERLGVRVVSVTQPMIGGDLRDPATFMSEGGMALMNQMWVLQTRQKVCEKMRWMAEQGKYTGGVPPLGYVVIDGRIEVCEPEAETVRIIFGDYAAGRSYREIIQRLNAEGRRTKSGGTFGSNSLHDLLKNEKYIGVLTYGRTQKRPDGSRNSHAVASTVMRIEGMIPAIVDRKTWDIVQEKLMANKRKQAGRPVRVREYPLKGKVFCGECKASMSVTCSQGGYYYYACSEKKRKKTCDNMPIKVDDLERMIAEAIKNMLGNPENVDGLICILREERGKIQEQTAMRMKALFDRQAEIKKQLDAAMSAVLAGMHSQSLIDTVHALEAEQAQNDREMTTLHNQAQGTTIPEDRLRELLKVAANDIPALLSVVVRVEVGKDRIRVWTLLDAKPDGTFDFNTDWDDPEIGLIIIPGVAPPVPRIIINGGLLCFSLPRQKKNRAE

SEQ ID NO: 2923 - protein, 536 aa, Unknown
  Description of Unknown: Integrase B2924 sequence
  PTHR30461:SF3,IPR036162,PS51737,IPR011109,PTHR30461, PF00239,G3DSA:1.10.10.2600,IPR006119,SSF53041,cd00338, SM00857,IPR025827,IPR038109,PS51736,mobidb-lite, PF13408,G3DSA:3.40.50.1390,PF07508,Coil
MPRKKKLQEVGGLRLVAYYRYSNGGQQTEQSIEGQRRDCEAYAKAHGYKIVHEYIDRHISGKSDSRPAFQQMISDSDSHLFDAVICWKTDRLARSRYDSIIYKTRLRRNGVKILYAAETVVDGPEGIIIEGLMESLAEYYSAELAQKLRRGQRESALKCIALGGNRSFGYDIGPDKHYCINEKQAPAVRYIFEQYAAGATAADIVRELTARGYRTSRGNPFNKNSICRIITNEMYLGVYKYADIRIEGGVPAMIDRELFNRCQTQLAFNRAHGGGKGAPRADYVLVGKLDCGLCGHAMKGASATGHTGSKHYYYTCTQHVEKKCPKTSIEKNYLEQVIVDGVAKYVLTPEKISQIVDCMMELQAKEQEPKGNPEKDALEAELAECRRKQNNILEAIEEGGSARLAARLRALEEQEAQLTFALGEINNAPAPPQFSREALTFMFEQFRREEDEVDEEYRRRILDTFVSSILLYEDRAEVKFNITDQKTGDFERVILPISANKKPPEDDDITSNSEGSTALRLVEAMGVEPMSEKSSV

SEQ ID NO: 2924 - protein, 536 aa, Unknown
  Description of Unknown: Integrase B2925 sequence
  PTHR30461:SF3,SM00857,G3DSA:1.10.10.2600,IPR036162,PF13408, IPR025827,G3DSA:3.40.50.1390,PS51737,IPR006119,IPR038109, PF07508,IPR011109,SSF53041,PF00239,PTHR30461, PS51736,Coil,cd00338
MKKTKNPVQRAVIYARYSCSNQTEQSIEGQLADCEKFAEKYNYYIVDTYIDRAMSATTDRRPQFQQMIADSATGGFDVIIVWKLDRFARNRYDSAVNKQKLNSNGVKVVSVMEHIEDTPEGALMESVLEGFAEYFSKDLSQKVSRGMRETALKFKATGLIPYGYKKTSDNICVPDEHTAPVVKKIFEMYADGVINKDICDWLNSHGYRTSNGNLFRNQYLRKILNRRRYTGSYTYGDLELHDENQRIISDELFDRVQIQLQAKKRTGRIAREQYILVGKLFCGYCRNPIRGESGRNHQNRIYTYYKCSVNKTGGKCPKTTVQRDIIENNTIKFILNNFLNDEIINSVVDTIQASETAENNSAELITLRTQIEDTDRKINNLLTAIENGVFTPSTKQRLNDLENVKEKLKYELIVKQSEKNNFNATAFKRFLKNIDVDDFKTTEQRQKLINLVLYREYLWNDKVLYIFNLTPSKPNDSVDIDSYVDALLASTGSTSPTDGVPQVAISELLFGYFFVMGFFPFHKHFALSFFALYIYR

SEQ ID NO: 2925 - protein, 536 aa, Unknown
  Description of Unknown: Integrase B2926 sequence
  PTHR30461:SF3,cd00338,SM00857,G3DSA:1.10.10.2600,IPR036162, PF13408,PS51737,G3DSA:3.40.50.1390,IPR025827,IPR006119, IPR038109,PF07508,IPR011109,SSF53041,PTHR30461, PS51736,Coil,PF00239
MQKLKVAAYARVSTDKDDQTNSLDNQRNYFTNYIINHENWKLVDVYFDEGISGTQTEKRVGFNRMIEDAKNKEIDLIITKEVSRFARNTVDTLSYTRKLKEYGVGVVFTLDNIDTRETDGEFRLTIMASIAQEESRKTSERVRWGQRRQMEKGVVFGRDLLGYTVRHGVLAINQEEVPVVKAIFHKYTNEGKGTHVIARELIEEGMRPKRIALWSNTIILKVLRNEKYVGDLLQKKTYTPDFLTHAKKYNHGEEKMVYLQNHHEPIIDRDLWDRTQEELKRRSGSIEQRSKHSNRYWCSGKLRCAECGSRFVSRTKKLKDGTQYKAWRCHAAAIYGSIKKDADGKLVGCSNSAINERSLRTCMNYCISLVQSEKNSIKKEILSEIKELQKSAEKKTDTKKIQKKVDQLEAKKRKAIDLMLDGLISETDLKSQTEWYNEEIKQLNQQLLDSEQENKVKSRQANAMNEYISALDEIMDMDSDNELVYKEVLDHIDVHKGYILDIWLKCIPFAIRLKIKSSGKGEYFKTEIIETSFIEK

SEQ ID NO: 2926 - protein, 536 aa, Unknown
  Description of Unknown: Integrase B2927 sequence
  PTHR30461:SF3,IPR036162,PS51737,IPR011109,PTHR30461, PF00239,G3DSA:1.10.10.2600,PF14287,IPR006119,SSF53041, IPR025378,SM00857,IPR025827,cd03770,IPR038109, PF13408,G3DSA:3.40.50.1390,PF07508,Coil
MKQLIYRVALYMRLSRDDEDYGESVSIETQRKIITQFANEQHFIIVDEYIDDGWTGTNFDRPAFQRMMEDVESGKVNCIITKDLSRLGREHIMMDYYLEFYFPEKRIRYIAVTENEDTEKGLSDFVPFKNLFNEWFAKDTSRKVKAAFKAKFAAGDRICAYVKIGYKRHPEIKNRIVPDEETRWIPEKIFDLAYHGAGAAKITRTLIAEKVPTPSWINYQRFGTFAHVYQNASEEKRYAWTVAQVKYILKDETYIGNTVHYKQTNISFKNKKRIRKPEDEWWRIENTHDGLIPKEMFASVQEQIATRRRMQKDHTTQIFSGLVKCADCGWSMRFGTNRQNKNPYSHYTCSKYGQVGIHCSAHYIRYDVLYAYVLSRIQYWAAQAVQDEDALLERLLQTGNAKQNAERKKIADDLKRAEKRQKELDNLFAKLYEDRIAERITERNFIMLSAKYQEEQNALDGKIDLLNGQISENSERYSNIETWVKLIKQYASPTELDSILLNALVEKIAVHEAIKHEDGSREQEVEIFYKFVGKID

SEQ ID NO: 2927 - protein, 536 aa, Unknown
  Description of Unknown: Integrase B2928 sequence
  PTHR30461:SF3,SM00857,G3DSA:1.10.10.2600,IPR036162,PF13408, IPR025827,G3DSA:3.40.50.1390,PS51737,IPR006119,IPR038109, PF07508,IPR011109,SSF53041,PF00239,PTHR30461, PS51736,Coil,cd00338
MKKTKNSVQRAVIYARYSCSNQTEQSIEGQLADCEKFAEKYNYYIVDTYIDRAMSATTDRRPQFQQMIADSATGGFDVIIVWKLDRFARNRYDSAVNKQKLNSNGVKVVSVMEHIEDTPEGALMESVLEGFAEYFSKDLSQKVSRGMRETALKFKATGLIPYGYKKTSDNICVPDEHTAPVVKKIFEMYAGGMINKDICDWLNSHGYRTSNGNLFKNQYLRKILNRRRYTGSYTYGDLELHDENQRIISDELFDRVQIQLQAKRRTGRIAREQYILVGKLFCGYCRNPIRGESGRNHQNRIYTYYKCSVNKTGGKCPKTTVQRDIIENNTIKFILNNFLNDEIINSVVDTIQASETAENNSAELITLRTQIEDTDRKINNLLTAIENGVFTPSTKQRLNDLENVKEKLKYELIVKQSEKNNFNATAFKRFLKNIDVDDFKTTEQRQKLINLVLYREYLWNDKVLYIFNLTPSKPNDSVDIDSYVDALLASTGSTSPTDGVPQVAISELLFGYFFVMDFFPFHKHFALSCFALYIYR

SEQ ID NO: 2928 - protein, 536 aa, Unknown
  Description of Unknown: Integrase B2929 sequence
  PTHR30461:SF3,IPR036162,PS51737,IPR011109,PTHR30461, PF00239,G3DSA:1.10.10.2600,IPR006119,PF14287,SSF53041, IPR025378,SM00857,IPR025827,cd03770,IPR038109, PF13408,G3DSA:3.40.50.1390,PF07508,Coil
MKQLIYRVALYMRLSRDDEDYGESVSIETQRKIITQFANEQHFIIVDEYIDDGWSGTNFDRPAFQRMMEDVESGKVNCIITKDLSRLGREHIMMDYYLEFYFPEKRIRYIAVTENEDTEKGLSDFVPFKNLFNEWFAKDTSRKVKAAFKAKFAAGDRICAYVKIGYKRHPEIKNRIVPDEETKWIPEKIFDLAYHGAGAAKITRTLIAEKVPTPSWINYQRFGTFAHVYQNASEEKRYAWTVAQVKYILKDETYIGNTVHYKQTNISFKNKKRIRKPEDEWWRIENTHEGLIPKEMFDSVQAQIATRRRMQKDHTTQIFSGLVKCADCGWSMRFGTNRQNKNPYSHYTCSKYGQVGIHCSAHYIRYDVLYAYVLSRIQYWAAQAVQDEDALLERLLQTGNAKQNAERKKIADDLKRSEKRQKELDNLFAKLYEDRIAERITERNFIMLSAKYQEEQNALDGKIDLLNGQISENSERYSNIETWVKLIKQYASPTELDSILLNALVEKITVHEAVKHEDGSREKEVEIFYKFIGKID

SEQ ID NO: 2929 - protein, 536 aa, Unknown
  Description of Unknown: Integrase B2930 sequence
  PTHR30461:SF3,IPR036162,PS51737,IPR011109,PTHR30461, PF00239,G3DSA:1.10.10.2600,IPR006119,SSF53041,cd00338, SM00857,IPR025827,IPR038109,mobidb-lite,PS51736, PF13408,G3DSA:3.40.50.1390,PF07508,Coil
MPRKKKLQEVGGLRLVAYYRYSNGGQQTEQSIEGQRRDCESYAKAHGYKIVHEYIDRHISGKSDSRPAFQQMISDSDSHLFDAVICWKTDRLARSRYDSIIYKTRLRRNGVKILYAAETVVDGPEGIIIEGLMESLAEYYSAELAQKLRRGQRESALKCIALGGNRSFGYDIGPDKHYCINEKQAPAVRYIFEQYAAGATAADIVRELTARGYRTSRGNPFNKNSICRIITNEMYLGVYKYADIRIEGGVPAMIDRELFNRCQTQLAFNRAHGGGKGAPRADYVLVGKLDCGLCGHAMKGASATGHTGSKHYYYTCNQHVEKKCPKTSIEKNYLEQIIVDGVAKYVLTPEKISQIVDCMMELQAKEQEPKGNPEKDALEAELSECRRKQNNILEAIEEGGSARLAARLRALEEQEAQLTFALGEINNAPTPPQFSREALTFMFEQFRREENEVDEEYRRRILDTFVSSILLYEDRAEVKFNITDQKTGDFERVILPISANKKPPEDDDTTSNSEGSTALRLVEAMGVEPMSEKSSV

SEQ ID NO: 2930 - protein, 536 aa, Unknown
  Description of Unknown: Integrase B2931 sequence
  PTHR30461:SF3,IPR036162,PS51737,IPR011109,PTHR30461, PF00239,G3DSA:1.10.10.2600,IPR006119,SSF53041,cd00338, SM00857,IPR025827,IPR038109,mobidb-lite,PS51736, PF13408,G3DSA:3.40.50.1390,PF07508,Coil
MPRKKKLQEVGGLRLVAYYRYSNGGQQTEQSIEGQRRDCEAYAKAHGYKIVHEYIDRHISGKSDSRPAFQQMISDSDSHLFDAVICWKTDRLARSRYDSIIYKTRLRKNGVKILYAAETVVDGPEGIIIEGLMESLAEYYSAELAQKLRRGQRESALKCIALGGNRSFGYDIGPDKHYCINEKQAPAVRYIFEQYAAGATAADIVRELTARGYRTSRGNPFNKNSICRIITNEMYLGVYKYADIRIEGGVPAMIDRELFNRCQTQLAFNRAHGGGKGAPRADYVLVGKLDCGLCGHAMKGASATGHTGSKHYYYTCTQHVEKKCPKTSIEKNYLEQVIVDGVAKYVLTPEKISQIVDCMMELQAKEQEPKGNPEKDALEAELAECRRKQNNILEAIEEGGSARLAARLRALEEQEAQLTFALGEINNAPAPPQFSREALTFMFEQFRREEDEVDEEYRRRILDTFVSSILLYEDRAEVKFNITDQKTGDFERVILPISANKKPPEDDDTTSNSEGSTALRLVEAMGVEPMSEKSSV

SEQ ID NO: 2931 - protein, 536 aa, Unknown
  Description of Unknown: Integrase B2932 sequence
  PTHR30461:SF3,SM00857,G3DSA:1.10.10.2600,IPR036162,PF13408, PS51737,G3DSA:3.40.50.1390,IPR025827,IPR006119,IPR038109, PF07508,IPR011109,SSF53041,PTHR30461,Coil, PS51736,cd00338,PF00239
MKAAIYSRKSKFTGKGESIENQIEMCKKYATDNNYTEISIYEDEGFSGKNTNRPEFKKMMKDAKAHKFDAIICYRLDRISRNVSDFSTLVDELKKLNIDFISIREQFDTSSPMGTAMMFISSVFAQLERETIAERIRDNMYELAKTGRWLGGTPPYGFISEPDYYLDANGKQKKMVKLSPVKSETNLVKSFFESYLKLGSLSKLQKHLIINSINTKRNVAWDVKALQLLLRNPVYVKSSELVISYLESKGATVFGEPNGNGILSYNKKDSKDKYKDISDWILSISKHEGIIDDLLWLKVQKQLDRNKDLAPRLVSNNSSGLLNNILYCKKCGGRMIQKQGHISKKTGEVLRYYVCLTKTNSSGVLCDCKNVRADKLENDIVDELLKETTDESDLIYTIENYKESLKSDIYSKKDLDSIKKQISQKQIQIDNLLEKISLNPNLYDLFEKKLEELNTELKSLKFKKFELESSNENTKLAIKEITASTEMILNFSKLWKNADFPMKKLLLNTYIDKIIYDSDTKSGRMKLFNSKKKGAL

SEQ ID NO: 2932 - protein, 536 aa, Unknown
  Description of Unknown: Integrase B2933 sequence
  PTHR30461:SF3,IPR036162,PS51737,IPR011109,PTHR30461, PF00239,G3DSA:1.10.10.2600,IPR006119,SSF53041,cd00338, SM00857,IPR025827,IPR038109,PS51736,mobidb-lite, PF13408,G3DSA:3.40.50.1390,PF07508,Coil
MPRKKKLQEVGGLRLVAYYRYSNGGQQTEQSIEGQRRDCEAYAKAHGYKIVHEYIDRHISGKSDSRPAFQQMISDSDSHLFDAVICWKTDRLARSRYDSIIYKTRLRKNGVKILYAAETVVDGPEGIIIEGLMESLAEYYSAELAQKLRRGQRESALKCIALGGNRSFGYDIGPDKHYCINEKQAPAVRYIFEQYAAGATAADIVRELTARGYRTSRGNPFNKNSICRIITNEMYLGVYKYADIRIEGGVPAMIDRELFNRCQTQLAFNRAHGGGKGAPRADYVLVGKLDCGLCGHAMKGASATGHTGSKHYYYTCTQHVEKKCPKTSIEKNYLEQVIVDGVAKYVLTPEKISQIVDCMMELQAKEQEPKGNPERDALEAELAECRRKQNNILEAIEEGGSARLAARLRTLEEQEAQLTFALGEINNAPTPPQFSREALTFMFEQFRREEDEVDEEYRRRILDTFVSSILLYEDRAEIKFNITDQKTGDFERVILPISANKKPPEDDDIPSNSEGSTALRLVEAMGVEPMSEKSSA

SEQ ID NO: 2933 - protein, 536 aa, Unknown
  Description of Unknown: Integrase B2934 sequence
  PTHR30461:SF3,cd00338,SM00857,G3DSA:1.10.10.2600,IPR036162, PF13408,IPR025827,PS51737,G3DSA:3.40.50.1390,IPR006119, IPR038109,PF07508,SSF53041,IPR011109,PTHR30461, PS51736,Coil,PF00239
MQRQHGAYIYARYSTENQDADSIDVQVGKCTQYCSQRGLPILGVFADEAVSGMKESRPRFDAMMAQLGMGLADTVVCYDQSRLFRKMTAWFDLREKLSVMGVAVISVTQPMVGGDLRDPTIFLTEGGMALFNQVWVFQSRQKVMEKMQHMARNGQHTGGKPPLGYQVVELGGVKRLAILPPEAETVKRIFAEYDGGRSYHDIIAGLNRDGIKTKRGNPFGTNSLHDLLKNEKYIGTLVYGASPYRADGTRNTHAKDGENVIRVEDAIPAIIDKDQFARVQARMAENKRVQGGRPATRREYPLKGKVFCGYCKSAMSVSISRKSYTYYKCGAKKRQHSCDAGNVSVDALEQTVAENVRLVLGQKGSIDKLIAVLRQQRTVIQDNALAQLKTLISRREELRRKLDNAADLVLDGRGSKTLIARMTDMEREQEQLDAKMAALKRAVDASAVPEQTLRRYAQMMADGSVDNLAPYLAIVCRVEVYGDKVVIWTILDDDPTAPKDFNAPGVQITLGTPSGVPMVFVTADLLRIVATKQSTS

SEQ ID NO: 2934 - protein, 536 aa, Unknown
  Description of Unknown: Integrase B2935 sequence
  PTHR30461:SF3,IPR036162,PS51737,IPR011109,PTHR30461, PF00239,G3DSA:1.10.10.2600,IPR006119,PF14287,SSF53041, IPR025378,SM00857,IPR025827,cd03770,IPR038109, PF13408,G3DSA:3.40.50.1390,PF07508,Coil
MKQLIYRVALYMRLSRDDEDYGESVSIETQRKIITQFANEQHFIIVDEYIDDGWTGTNFDRPAFQRMMEDVESGKVNCIITKDLSRLGREHIMMDYYLEFYFPEKRIRYIAVTENEDTEKGLSDFVPFKNLFNEWFAKDTSRKVKAAFKAKFAAGDRICAYVKIGYKRHPEIKNRIVPDEETRWIPEKIFDLAYHGAGAAKITRTLIAEKVPTPSWINYQRFGTFAHVYQNASEEKRYAWTVAQVKYILKDETYIGNTVHYKQTNISFKNKKRIRNPEDEWWRIENTHEGLIPKEMFASVQEQIATRRRMQKDHTTQIFSGLVKCADCGWSMRFGTNRQNKNPYSHYTCSKYGQVGIHCSAHYIRYDVLYTYVLSRIQYWAAQAVQDEDALLERLLQTGNAKQNAERKKIADDLKRAEKRQKELDNLFAKLYEDRIAERITERNFIMLSAKYQEEQNALDGKIDLLNGQISENSERYSNIETWVKLIKQYASPTELDSILLNALVEKIAVHEAIKHEDGSREQEVEIFYKFVGKID

SEQ ID NO: 2935 - protein, 536 aa, Unknown
  Description of Unknown: Integrase B2936 sequence
  PTHR30461:SF3,IPR036162,PS51737,IPR011109,PTHR30461, PF00239,G3DSA:1.10.10.2600,IPR006119,SSF53041,cd00338, SM00857,IPR025827,IPR038109,mobidb-lite,PS51736, PF13408,G3DSA:3.40.50.1390,PF07508,Coil
MPRKKKLQEVGGLRLVAYYRYSNGGQQTEQSIEGQRRDCEAYAKAHGYKIVHEYIDRHISGKSDSRPAFQQMISDSDSHLFDAVICWKTDRLARSRYDSIIYKTRLRRNGVKILYAAETVVDGPEGIIIEGLMESLAEYYSAELAQKLRRGQRESALKCIALGGNRSFGYDIGPDKHYCINEKQAPAVRYIFEQYAAGATAADIVRELTARGYRTSRGNPFNKNSICRIITNEMYLGVYKYADIRIEGGVPAMIDRELFNRCQTQLAFNRAHGGGKGAPRADYVLVGKLDCGLCGHAMKGASATGHTGSKHYYYTCTQHVEKKCPKTSIEKNYLEQIIVDGVAKYVLTPEKISQIVDCMMELQAKEQEPKGNPEKDALEAELAECRRKQNNILEAIEEGGSARLAARLRALEEQEAQLTFALGEINNAPAPPQFSREALTFMFEQFRREEDEVDEEYRRRILDTFVSSILLYEDRAEVKFNITDQKTGDFERVILPISANKKPPEDDDATSNSEGSTALRLVEAMGVEPMSEKSSA

SEQ ID NO: 2936 - protein, 536 aa, Unknown
  Description of Unknown: Integrase B2937 sequence
  PTHR30461:SF3,IPR036162,PS51737,IPR011109,PTHR30461, PF00239,G3DSA:1.10.10.2600,IPR006119,SSF53041,cd00338, SM00857,IPR025827,IPR038109,PS51736,mobidb-lite, PF13408,G3DSA:3.40.50.1390,PF07508,Coil
MPRKKKLQEVGGLRLVAYYRYSNGGQQTEQSIEGQRRDCEAYAKAHGYKIVHEYIDRHISGKSDSRPAFQQMISDSDSHLFDAVICWKTDRLARSRYDSIIYKTRLRKNGVKILYAAETVVDGPEGIIIEGLMESLAEYYSAELAQKLRRGQRESALKCIALGGNRSFGYDIGPDKHYCINEKQAPAVRYIFEQYAAGATAADIVRELTARGYRTSRGNPFNKNSICRIITNEMYLGVYKYADIRIEGGVPAMIDRELFNRCQTQLAFNRAHGGGKGAPRADYVLVGKLDCGLCGHAMKGASATGHTGSKHYYYTCNQHVEKKCPKTSIEKNYLEQIIVDGVAKYVLTPEKISQIVDCMMELQAKEQEPKGNPEKDALEAELAECRRKQNNILEAIEEGGSARLAARLRALEEQEAQLTFALGEINNAPTPPQFSREALTFMFEQFRREENEVDEEYRRRILDTFVSSILLYEDRAEVKFNITDQKTGDFERVILPISANKKPPEDDGTTSNSEGSTALRLVEAMGVEPMSEKSSA

SEQ ID NO: 2937 - protein, 536 aa, Unknown
  Description of Unknown: Integrase B2938 sequence
  PTHR30461:SF3,IPR036162,PS51737,IPR011109,PTHR30461, PS00397,PF00239,G3DSA:1.10.10.2600,IPR006119,SSF53041, cd00338,SM00857,IPR025827,IPR038109,PS51736, IPR006118,PF13408,G3DSA:3.40.50.1390,PF07508,Coil
MLKNTKIAVYCRVSSDEQAERGTIDNQVTFAQQYADLHHLDIYDVYKDDGVTGTIPLQDRPEGHRLLQDAADERFGLVIFYKMDRLGRSTRVILNAVEALSQHGVGVQSMSEPFDTATPSGRFMLTMFAGVAELDRANILDRMYQGTLRHARLGKWCGGPAPFGYRLQDGYLVISEEPMPGQQLSEADVIRMLYSKTIEGWSALRLAQHLNALGIPNKYTLRGNVAAGSGKWHQSKILYILHNTLYYGERSFGRLSKNSNKNIIPQQVPAIVSKETWDAAQAAIEQHSIMPKFIKRRSYLLRGLIRCGICGHTYVGTYYKRKAGNSIYYVCNAKNTRGVTPEPCKGQTLRGEWIESLVWEDCLRYIKQPDVIAVDEDCRYLQSAGDIKKEIDAATAQLKQLDQERQTVIGLCRQGIITAADLDAQLSEITEKQNTLQQTLEGLNSKNIVTKEDAEKRVKEIADILDGFRQQLQSGGELSFDAKQGIIRTLVKQITVHTELQPGAERDIPTVRVCIDYNFTLLSAKTAMLDPYRQGF

SEQ ID NO: 2938 - protein, 536 aa, Unknown
  Description of Unknown: Integrase B2939 sequence
  PTHR30461:SF3,IPR036162,PS51737,IPR011109,PTHR30461, PF00239,G3DSA:1.10.10.2600,IPR006119,PF14287,SSF53041, IPR025378,SM00857,IPR025827,cd03770,IPR038109, PF13408,G3DSA:3.40.50.1390,PF07508,Coil
MKQLIYRVALYMRLSRDDEDYGESVSIETQRKIITQFANEQHFIIVDEYIDDGWSGTNFDRPAFQRMMEDVESGKVNCIITKDLSRLGREHIMMDYYLEFYFPEKRIRYIAVTENEDTEKGLSDFVPFKNLFNEWFAKDTSRKVKAAFKAKFAAGDRICAYVKIGYKRHPEIKNRIVPDEETRWIPEKIFDLAYHGAGAAKITRTLIAEKVPTPSWINYQRFGTFAHVYQNASEEKRYAWTVAQVKYILKDETYIGNTVHYKQTNISFKNKKRIRKPEDEWWRIENTHEGLIPKEMFDSVQAQIATRRRMQKDHTTQIFSGLVKCADCGWSMRFGTNRQNKNPYSHYTCSKYGQVGIHCSAHYIRYDVLYAYVLSRIQYWAAQAVQDEDALLERLLQTGNAKQNAERKKIADDLKRSEKRQKELDNLFAKLYEDRIAERITERNFIMLSAKYQEEQNALDGKIDLLNGQISENSERYSNIETWVKLIKQYASPTELDSILLNALVEKITVHEAVKHEDGSREQEVEIFYKFIGKID

SEQ ID NO: 2939 - protein, 536 aa, Unknown
  Description of Unknown: Integrase B2940 sequence
  PTHR30461:SF3,SM00857,G3DSA:1.10.10.2600,IPR036162,PF13408, PS51737,IPR025827,G3DSA:3.40.50.1390,IPR006119,IPR038109, PF07508,SSF53041,IPR011109,PTHR30461,Coil, PS51736,cd00338,PF00239
MERAVIYARYSSDHQREESIDAQVRACREYCQRKGYLVTKIYADEAKSGKSIAKREQYKKMLSDSQKNLFDVVVFHKIDRNSRNELDYYLTKNQLISSGIKYEYAAQNIDTSPAGQMVEGILVAVAANYSRNLAEETKKGLKENALKALFNGGRPPLGFEINQENKYVINDYEAGAIRIIFDLYLKGKGYHYIISQLNSLGYKTREGRKFGKNSLYDILRNPKYCGTYTFNKVNKDPSGKRNSHKISENTIIVEDAIPAIISKEDFRKVQEKMNQNRYRSAAYKSKETYLLTGKVFCGICGAAMNGHRASSNGKKYVYYTCSGRDRLGTSACQNKVVPRDDLEELVLLTIEQELLSENSLKKLKDTIEMEYQAVANEYADEASSLSEQKAIAERKLNNLYTVIEQGTADEYDLERLAAVKQELSQIKEKLAKCAGANSIATINPAHIEKVLKVCRKMLFKNITNESLRMLFDDLVNKITIDAKKITLQLKLECSGTYGAEGPYNTIPQKFTLTFIRPRPLTVRQQQAQKKLNPANI

SEQ ID NO: 2940 - protein, 536 aa, Unknown
  Description of Unknown: Integrase B2941 sequence
  PTHR30461:SF3,IPR036162,PS51737,IPR011109,PTHR30461, PF00239,G3DSA:1.10.10.2600,IPR006119,SSF53041,cd00338, SM00857,IPR025827,IPR038109,PS51736,mobidb-lite, PF13408,G3DSA:3.40.50.1390,PF07508,Coil
MPRKKKLQEVGGLRLVAYYRYSNGGQQTEQSIEGQRRDCEAYAKAHGYKIVHEYIDRHISGKSDSRPAFQQMISDSDSHLFDAVICWKTDRLARSRYDSIIYKTRLRRNGVKILYAAETVVDGPEGIIIEGLMESLAEYYSAELAQKLRRGQRESALKCIALGGNRSFGYDIGPDKHYCINEKQAPAVRYIFEQYAAGATAADIVRELTARGYRTSRGNPFNKNSICRIITNEMYLGVYKYADIRIEGGVPAMIDRELFNRCQTQLAFNRAHGGGKGAPRADYVLVGKLDCGLCGHAMKGASATGHTGSKHYYYTCTQHVEKKCPKTSIEKNYLEQVIVDGVAKYVLTPEKISQIVDCMMELQAKEQEPKGNPEKDALEAELAECRRKQNNILEAIEEGGSARLAARLRALEEQEAQLTFALGEINNAPTPPQFSREALTFMFDQFRREEDEVDEEYRRRILDTFVSSILLYEDRAEVKFNITDQKTGDFERVILPISANKKPPEDDDITSNSEGSTALRLVEAMGVEPMSEKSSA

SEQ ID NO: 2941 - protein, 536 aa, Unknown
  Description of Unknown: Integrase B2942 sequence
  PTHR30461:SF3,SM00857,G3DSA:1.10.10.2600,IPR036162,PF13408, IPR025827,G3DSA:3.40.50.1390,PS51737,IPR006119,IPR038109, PF07508,SSF53041,IPR011109,PTHR30461,Coil, PS51736,cd00338,PF00239
MSTAVVYARYSSHSQRDASIDQQLATCRAFAQRGGIDIVDVYTDRALTGTNDNRPGFKKMIADAAKGRWNYVLVYALDRFSRDRYDSAVNKKRLRDCGVKVISATEPITEDPVGSLMESMLEGYAEYYSRELSAKVRRGHADNAKKGIVNGPLPLGYRRGTDGRPEIDPDRAEIVREIYRRAGQGEPLVRIAEDLNARGIRTKTGGPWGKSSFNTLLSNERYTGLYIYQDTRIPGGIPAIISPEDFAAVQHRLGGKKNPRRPVLPDAPPSRRRGADIYLLTGKLFCAGCGAPLVGVSGKARDGSLRHYYACRGRIREGRQCNLKNIRREDIEADIAAAIKQQILNEPTIQAISEAAYTYQLSLCESADLTILRQQLADTTKALKNIMAAIEQGIFTASTKTRLQELEADQQSLTARITAAEAAVENIPTKSEIAATLKYYATGDLADPLYREALIDTFLVRAYVHPDHYDIYFSTDAKSAVSFPLDLKTATLSEPELLNGSYSAPGLGPDKAIRTVTQHIISICGMFRITFNRPSH

SEQ ID NO: 2942 - protein, 536 aa, Unknown
  Description of Unknown: Integrase B2943 sequence
  PTHR30461:SF3,IPR036162,PS51737,PS01030,IPR011109, PTHR30461,PF00239,G3DSA:1.10.10.2600,IPR006119,PF14287, SSF53041,IPR025378,SM00857,IPR025827,cd03770,IPR038109 ,PS51736,IPR019761,PF13408,G3DSA:3.40.50.1390,PF07508,Coil
MLRQTTRNLITALYPRLSHEDELQGESNSISNQKRILETYAKQNGFSNLQWYTDDGYSGANFQRPGFQAMLADIEAGKVGTVIVKDMSRLGRNYLQVGMYTEMIFPQKGVRFIAINDGVDSAQGDNDFAPLRNIFNEWLVRDTSKKIKAVKRSKGMSGKPVTSKPVYGYFMDEDENFIIDGEAAPVVRQIYSLCLAGNGPTKIARMLTEQEIPTPGTLEYRRTGSTRRYHPGYECKWATNTVVHILENREYTGCLVNFKTEKPSYKTKHSVENPIEKQAIFENHHEPIIDTQMWERVQELRKQRKRPNRYDEVGLFSGILFCADCGSVLYQQRYQNATRKQDCYICGSYKKRTRDCTAHFIRTDLLTAGVTDNLRKVTSYAAKHEARFMKLLIEQNEDGGKRRNAARKKELEAAEKRISELSAIFKRLYEDSVTGRISDERFTELSADYEAEQKELKERAAAIRAELSKAQEATVNAEKFMNVVRKYTSFEELTPTLLREFVEKIVVHECSYDENGTRRQDIDIYYSFVGKVDLPE

SEQ ID NO: 2943 - protein, 536 aa, Unknown
  Description of Unknown: Integrase B2944 sequence
  PTHR30461:SF3,IPR036162,PS51737,IPR011109,PTHR30461, PF00239,G3DSA:1.10.10.2600,IPR006119,SSF53041,cd00338, SM00857,IPR025827,IPR038109,PS51736,mobidb-lite, PF13408,G3DSA:3.40.50.1390,PF07508,Coil
MPRKKKLQEVGGLRLVAYYRYSNGGQQTEQSIEGQRRDCEAYAKAHGYKIVHEYIDRHISGKSDSRPAFQQMISDSDSHLFDAVICWKTDRLARSRYDSIIYKTRLRRNGVKILYAAETVVDGPEGIIIEGLMESLAEYYSAELAQKLRRGQRESALKCIALGGNRSFGYDIGPDKHYCINEKQAPAVRYIFEQYAAGATAADIVRELTARGYRTSRGNPFNKNSICRIITNEMYLGVYKYADIRIEGGVPAMIDRELFNRCQTQLAFNRAHGGGKGAPRADYVLVGKLDCGLCGHAMKGASATGHTGSKHYYYTCNQHVEKKCPKTSIEKNYLEQIIVDGVAKYVLTPEKISQIVDCMMELQAKEQEPKGNPEKDALEAELAECRRKQNNILEAIEEGGSARLAARLRTLEEQEAQLTFALGEINNAPTPPQFSREALTFMFEQFRREEDEVDEEYRRRILDTFVSSILLYEDRAEVKFNITDQKTGDFERVILPISANKKPPEDDGTSSNSEGSTALRLVEAMGVEPMSEKSSA

SEQ ID NO: 2944 - protein, 536 aa, Unknown
  Description of Unknown: Integrase B2945 sequence
  PTHR30461:SF3,IPR036162,PS51737,IPR011109,PTHR30461, PF00239,G3DSA:1.10.10.2600,IPR006119,SSF53041,cd00338, SM00857,IPR025827,IPR038109,PS51736,mobidb-lite, PF13408,G3DSA:3.40.50.1390,PF07508,Coil
MPRKKKLQEVGGLRLVAYYRYSNGGQQTEQSIEGQRRDCEAYAKAHGYKIVHEYIDRHISGKSDSRPAFQQMISDSDSHLFDAVICWKTDRLARSRYDSIIYKTRLRRNGVKILYAAETVVDGPEGIIIEGLMESLAEYYSAELAQKLRRGQRESALKCIALGGNRSFGYDIGPDKHYCINEKQAPAVRYIFEQYAAGATAADIVRELTARGYRTSRGNPFNKNSICRIITNEMYLGVYKYADIRIEGGVPAMIDRELFNRCQTQLAFNRAHGGGKGAPRADYVLVGKLDCGLCGHAMKGASATGHTGSKHYYYTCTQHVEKKCPKTSIEKNYLEQVIVDGVAKYVLTPEKISQIVDCMMELQAKEQEPKGNPEKDALEAELAECRRKQNNILEAIEEGGSARLAARLRALEEQEAQLTFALGEINNAPAPPQFSREALTFMFEQFRREEDEVDEEYRRRILDTFVSSILLYEDRAEVKFNITDQKTGDFERVILPISANKKPPEDDDIPSNSEGSTALRLVEAMGVEPMSEKSSV

SEQ ID NO: 2945 - protein, 536 aa, Unknown
  Description of Unknown: Integrase B2946 sequence
  PTHR30461:SF3,IPR036162,PS51737,IPR011109,PTHR30461, PF00239,G3DSA:1.10.10.2600,IPR006119,PF14287,SSF53041, IPR025378,SM00857,IPR025827,cd03770,IPR038109, PF13408,G3DSA:3.40.50.1390,PF07508,Coil
MKQLIYRVALYMRLSRDDEDYGESVSIETQRKIITQFANEQHFIIVDEYIDDGWTGTNFDRPAFQRMMEDVESGKVNCIITKDLSRLGREHIMMDYYLEFYFPEKRIRYIAVTENEDTEKGLSDFVPFKNLFNEWFAKDTSRKVKAAFKAKFAAGDRICAYVKIGYKRHPEIKNRIVPDEETRWIPEKIFDLAYHGAGAAKITRTLIAEKVPTPSWINYQRFGTFAHVYQNASEEKRYAWTVAQVKYILKDETYIGNTVHYKQTNISFKNKKRIRKPEDEWWRIENTHEGLIPKEMFASVQEQIATRRRMQKDHTTQIFSGLVKCADCGWSMRFGTNRQNKNPYSHYTCSKYGQVGIHCSAHYIRYDVLYTYVLSRIQYWAAQAVQDEDALLERLLQTGNAKQNAERKKIADDLKRAEKRQKELDNLFAKLYEDRIAERITERNFIMLSAKYQEEQNALDGKIDLLNGQISENSERYSNIETWVKLIKQYASPTELDSILLNALVEKIAVHEAIKHEDGSREQEVEIFYKFVGKID

SEQ ID NO: 2946 - protein, 536 aa, Unknown
  Description of Unknown: Integrase B2947 sequence
  PTHR30461:SF3,SM00857,G3DSA:1.10.10.2600,IPR036162,PF13408, IPR025827,G3DSA:3.40.50.1390,PS51737,IPR006119,IPR038109, PF07508,IPR011109,SSF53041,PF00239,PTHR30461, PS51736,Coil,cd00338
MQTIPIDLSALTPEERQQFADNPSVLSSDCEAVCCLYMRYSSDRQTEQSIEGQLRELIAYCKHHSYRVAAIYVDRAISAHASMDKRPAFQQMLSDSARSSWKTVLVYKLDRFARNREDSAIARMRLRKNGCNVESAKEGISKNPEGVILEALLEGMAEYYSLELSQKITRGMRESAIKGNCLGGQIPLGYKIENKKYVIDPLTAPLVKEAFSRYGDGETAASICADFNARGYRTASGAEFNKSSFKNIFRNEKYIGVYKYKEIRREGIIPRIIADDAWIAVQSRLKVNEAAPARGKAKVAYLLAGKIFCGHCGAPMTGECGRGKSGKMYNYYSCATRKHHNSCEKKPVPKDWLEDVVAQDALDVLTDEIIEFVAEVAAQQSEEDIQKNTQIPVIRKKISEIEIKIRNLTKALECASVAPDAIVERLAELEAQKKGLSTQLSDEERGVIPLTKESVVVYLKAVREKAVPLETQKAMLIEMLVNSVTVYDDEPGFLKLVYAYRLTQIPTRTYRVPIPAKVPCSDFRTQPAPKLQHALP

SEQ ID NO: 2947 - protein, 536 aa, Unknown
  Description of Unknown: Integrase B2948 sequence
  SM00857,G3DSA:1.10.10.2600,IPR036162,PF13408,IPR025827, PS51737,G3DSA:3.40.50.1390,IPR006119,IPR038109,PF07508, IPR011109,SSF53041,PTHR30461,PS51736,cd00338, PF00239
MKLTHGAYILARFSTDRQDADSIEVQVSRCREWCDRQRLPVLDVFADEAVSGMKETRPQFDRMMRLLSEGGADTVVIYDQSRMFRKMTAWFTLRERLERLGVRVVSVTQPMIGGDLRDPATFMSEGGMALMNQMWVLQTRQKVCEKMRWMAEQGKYTGGVPPLGYVVIDGRIEVCEPEAETVRIIFGDYAAGRSYREIIQRLNAEGRRTKSGGTFGSNSLHDLLKNEKYIGVLTYGRTQKRPDGSRNSHAVASTVMRMEGVIPAIVDRETWDIVQEKLMANKRKQAGRPVRVREYPLKGKVFCGECKASMSVTCSQGGYYYYACSEKKRKKTCDNMPIKVDDLERMIAEAIKNMLGNPENVDGLICILREERGKIQEQTAMRMKALFDRQAEIKKQLDAAMSAVLAGMHSQSLIDTVHALEAEQAQNDREMTTLHNQAQGTTIPEDRLRELLKVAANDIPALLSVVVRVEVGKDRIRVWTLLDAKPDGTFDFNTDWDDPEIGLIIIPGVAPPVPRIIINGGLLCFSLPRPKKNRAE

SEQ ID NO: 2948 - protein, 536 aa, Unknown
  Description of Unknown: Integrase B2949 sequence
  PTHR30461:SF3,IPR036162,PS51737,IPR011109,PTHR30461, PF00239,G3DSA:1.10.10.2600,IPR006119,PF14287,SSF53041, IPR025378,SM00857,IPR025827,cd03770,IPR038109, PF13408,G3DSA:3.40.50.1390,PF07508,Coil
MKQLIYRVALYMRLSRDDEDYGESVSIETQRKIITQFANEQHFIIVDEYIDDGWSGTNFDRPAFQRMMEDVESGKVNCIITKDLSRLGREHIMMDYYLEFYFPEKRIRYIAVTENEDTEKGLSDFVPFKNLFNEWFAKDTSRKVKAAFKAKFAAGDRICAYVKIGYKRHPEIKNRIVPDEETRWIPEKIFDLAYHGAGAAKITRTLIAEKVPTPSWINYQRFGTFAHVYQNTSEEKRYAWTVAQVKYILKDETYIGNTVHYKQTNISFKNKKRIRKPEDEWWRIENTHEGLIPKEMFDSVQAQIATRRRMQKDHTTQIFSGLVKCADCGWSMRFGTNRQNKNPYSHYTCSKYGQVGIHCSAHYIRYDVLYAYVLSRIQYWAAQAVQDEDALLERLLQTGNAKQNAERKKIADDLKRSEKRQKELDNLFAKLYEDRIAERITERNFIMLSAKYQEEQNALDGKIDLLNGQISENSERYSNIETWVKLIKQYASPTELDSILLNALVEKITVHEAVKHEDGSREQEVEIFYKFIGKID

SEQ ID NO: 2949 - protein, 536 aa, Unknown
  Description of Unknown: Integrase B2950 sequence
  PTHR30461:SF3,IPR036162,PS51737,IPR011109,PTHR30461, PF00239,G3DSA:1.10.10.2600,IPR006119,PF14287,SSF53041, IPR025378,SM00857,IPR025827,cd03770,IPR038109, PF13408,G3DSA:3.40.50.1390,PF07508,Coil
MKQLIYRVALYMRLSRDDEDYGESVSIETQRKIITQFANEQHFIIVDEYIDDGWTGTNFDRPAFQRMMEDVESGKVNCIITKDLSRLGREHIMMDYYLEFYFPEKRIRYIAVTENEDTEKGLSDFVPFKNLFNEWFAKDTSRKVKAAFKAKFAAGDRICAYVKIGYKRHPEIKNRIVPDEETRWIPEKIFDLAYHGAGAAKITRTLIAEKVPTPSWINYQRFGTFAHVYQNASEEKRYAWTVAQVKYILKDETYIGNTVHYKQTNISFKNKKRIRKPEDEWWRIENTHEGLIPKEMFDSVQAQIATRRRMQKDHTTQIFSGLVKCADCGWSMRFGTNRQNKNPYSHYTCSKYGQVGIHCSAHYIRYDALYAYVLSRIQYWAAQAVQDEDALLERLLQTGNAKQNAERKKIADDLKRAEKRQKELDNLFAKLYEDRIAERITERNFIMLSAKYQEEQNALDGKIDLLNGQISDNSERYSNIETWVKLIKQYASPTELDSILLNALVEKITVHEAVKHEDGSREQEVEIFYKFVGKID

SEQ ID NO: 2950 - protein, 536 aa, Unknown
  Description of Unknown: Integrase B2951 sequence
  PTHR30461:SF3,IPR036162,PS51737,IPR011109,PTHR30461, PF00239,G3DSA:1.10.10.2600,IPR006119,PF14287,SSF53041, IPR025378,SM00857,IPR025827,cd03770,IPR038109, PF13408,G3DSA:3.40.50.1390,PF07508,Coil
MKQLIYRVALYMRLSRDDEDYGESVSIETQRKIITQFANEQHFIIVDEYIDDGWSGTNFDRPAFQRMMEDVESGKVNCIITKDLSRLGREHIMMDYYLEFYFPEKRIRYIAVTENEDTEKGLSDFVPFKNLFNEWFAKDTSRKVKAAFKAKFAAGDRICAYVKIGYKRHPEIKNRIVPDEETRWIPEKIFDLAYHGAGAAKITRTLIAEKVPTPSWINYQRFGTFAHVYQNTSEEKRYAWTVAQVKYILKDETYIGNTVHYKQTNISFKNKKRIRNPEDEWWRIENTHEGLIPKEMFDSVQAQIATRRRMQKDHTTQIFSGLVKCADCGWSMRFGTNRQNKNPYSHYTCSKYGQVGIHCSAHYIRYDVLYAYVLSRIQYWATQAVQDGDALLERLLQTGNAKQNAERKKIADDLKRAEKRQKELDNLFAKLYEDRIAERITERNFIMLSAKYQEEQNALDGKIDLLNGQISENSERYSNIETWVKLIKQYASPTELDSILLNALVEKITVHEAVKHEDGSREQEVEIFYKFIGKID

SEQ ID NO: 2951 - protein, 536 aa, Unknown
  Description of Unknown: Integrase B2952 sequence
  PTHR30461:SF3,IPR036162,PS51737,IPR011109,PTHR30461, PF00239,G3DSA:1.10.10.2600,PF14287,IPR006119,SSF53041, cd00338,IPR025378,SM00857,IPR025827,IPR038109, PS51736,PF13408,G3DSA:3.40.50.1390,PF07508,Coil
MIIILNDFNTSLRVGIYLRLSNEDRDKISKEEVSESIKNQRNMLLDYIEKNSEFMLIDEYCDEDLSGAGTYRPEFERLIRDCENGKLDVVLCKSQSRFSRDMEIVEKYINNKFKEWNIRFIGLSDNADTEVLGNKKSRQINGLVNEWYLEDVSNNIRSAFYSKMKQGEFISPFAPFGYEISPYDNNKLIVDTAASIIVKEIYDLYLKGMGFTGIAHYLNDKNIPCPSLYKYKKGIKLNIISNRPREEIKWNTNAIKTILKNELYLGHLIQGKRTTVSYKNHKVINKPEDEWIRRENMHEAIIDEETFAKVQLALKERTKPMKSTGIVHNFSGKVFCKECGHYMRKKNSSKHEYLVCSNNRDGYNDCINKSSIRYDALEELVLSHINKKVKKFYDLNILETESAKKENNKFTKKINLLTKQKENIVNQMTKTKNYLKNLYEDKVNGIINAEQFKELITNYNNDDEKLKDQLKSIDNEINYYILKESSKKNTKELFNKYHQLEKLNRVIVVEFVDKIYIGKINDETNTRDIEIKWNFE

SEQ ID NO: 2952 - protein, 536 aa, Unknown
  Description of Unknown: Integrase B2953 sequence
  PTHR30461:SF3,cd00338,SM00857,G3DSA:1.10.10.2600,IPR036162, PF13408,PS51737,G3DSA:3.40.50.1390,IPR025827,IPR006119, IPR038109,PF07508,IPR011109,SSF53041,PTHR30461, Coil,PF00239
MYEEIKTACLYLRYSSSNQTEQSIEGQMHVCQDFCKRHNIRIVEMYIDRATSASKDIEKRVEFLKMIKDSEKGNFNAVIVYKLDRFARSRYDSATYKYRLKRNGVQLISATENITQDPEGIILESVLEGMAEFYSAELSQKINRGMRESAMKHNSIGGAIPLGYKTVDKKLVIDETTAPIVREAFQMYADGESVAEICRTFNNRGYKTSKGTRFGKSSFTKIFRNEKYIGVYKYHDYRAEDVIPPIIDKDLWDRVQVRVGKIKKAPARNKARHTYLLTGKLFCGHCGSAMNADGNSQGYLYYRCYGKKNLDKQCNKRNMEKNLIERLVAQDTMSFLTDEYIEKIATIACDRNKQEIESDSPIPVIRDRIRQVDVSLNNLLKAIETGSAPDMLVKRMGELETEKKDMEVQLKKEMAHQVYIDKEQVIFWLEKFREGDINDEEFCQTVIDLFVNSVTVWDEPDDKFKITIAYNLTSIPQKTYRLSKDGRLSDYASNTPDWEVFCQLWTIKISFFAFIISLTPTTGNCTNCYAVITLSL

SEQ ID NO: 2953 - protein, 536 aa, Unknown
  Description of Unknown: Integrase B2954 sequence
  PTHR30461:SF3,IPR036162,PS51737,IPR011109,PTHR30461, PF00239,G3DSA:1.10.10.2600,IPR006119,SSF53041,cd00338, SM00857,IPR025827,IPR038109,PS51736,mobidb-lite, PF13408,G3DSA:3.40.50.1390,PF07508,Coil
MPRKKKLQEVGGLRLVAYYRYSNGGQQTEQSIEGQRRDCEAYAKAHGYKIVHEYIDRHISGKSDSRPAFQQMISDSDSHLFDAVICWKTDRLARSRYDSIIYKTRLRKNGVKILYAAETVVDGPEGIIIEGLMESLAEYYSAELAQKLRRGQRESALKCIALGGNRSFGYDIGPDKHYCINEKQAPAVRYIFEQYAAGATAADIVRELTARGYRTSRGNPFNKNSICRIITNEMYLGVYKYADIRIEGGVPAMIDRELFNRCQTQLAFNRAHGGGKGAPRADYVLVGKLDCGLCGHAMKGASATGHTGSKHYYYTCTQHVEKKCPKTSIEKNYLERVIVDGVAKYVLTPEKISQIVDCMMELQAKEQEPKGNPEKDALEAELAECRRKQNNILEAIEEGGSARLAARLRTLEEQEAQLTFALGEINNAPTPPQFSREALTFMFEQFRREEDEVDEEYRRRILDTFVSSILLYEDRAEVKFNITDQKTGDFERVILPISANKKPPEDDDIPSNSGGSTALRLVEAMGVEPMSEKSSA

SEQ ID NO: 2954 - protein, 536 aa, Unknown
  Description of Unknown: Integrase B2955 sequence
  PTHR30461:SF3,IPR036162,PS51737,IPR011109,PTHR30461, PF00239,G3DSA:1.10.10.2600,IPR006119,SSF53041,cd00338, SM00857,IPR025827,IPR038109,mobidb-lite,PS51736, PF13408,G3DSA:3.40.50.1390,PF07508,Coil
MPRKKKLQEVGGLRLVAYYRYSNGGQQTEQSIEGQRRDCEAYAKAHGYKIVHEYIDRHISGKSDSRPAFQQMISDSDSHLFDAVICWKTDRLARSRYDSIIYKTRLRKNGVKILYAAETVVDGPEGIIIEGLMESLAEYYSAELAQKLRRGQRESALKCIALGGNRSFGYDIGPDKHYCINEKQAPAVRYIFEQYAAGATAADIVRELTARGYRTSRGNPFNKNSICRIITNEMYLGVYKYADIRIEGGVPAMIDRELFNRCQTQLAFNRAHGGGKGAPRADYVLVGKLDCGLCGHAMKGASATGHTGSKHYYYTCTQHVEKKCPKTSIEKNYLEHVIVDGVAKYVLTPEKISQIVDCMMELQAKEQEPKGNPEKDALEAELAECRRKQNNILEAIEEGGSARLAARLRTLEEQEAQLTFALGEINNAPTPPQFSREALTFMFEQFRREEDEVDEEYRRRILDTFVSSILLYEDRAEVKFNITDQKTGDFERVILPISANKKPPEDDDATSNSEGSTALRLVEAMGVEPMSEKSSA

SEQ ID NO: 2955 - protein, 536 aa, Unknown
  Description of Unknown: Integrase B2956 sequence
  PTHR30461:SF3,SM00857,G3DSA:1.10.10.2600,IPR036162,PF13408, PS51737,G3DSA:3.40.50.1390,IPR025827,IPR006119,IPR038109, PF07508,IPR011109,SSF53041,PTHR30461,Coil, cd00338,PF00239
MARTATKHPAKPKRGKKLEAEEPGVLYGRYSSHNQKDISVEQQFEKGYGLAGEYGIRIVETYADRAVSGRTDKRKDFQRMMADAAKGKFRYVIAWKSNRMGRNMLEALVNEAKLQELGVRVLYVEEDFDDTAAGRFAARSMMNVNQFYSENMAEDIKRGLYDNASNCMVANGHLPYGYKRDDTLHYVIDEAKAAVIREIFVRVSCGEPLVDIYDSLNARGIKTSYGRPWGRSSFQKILSNERYRGIYIYGDVRKEGGIPRIVSDELYFKVQEVLKTKKNPQGRHRVNGDYLLTGKLFCGNCKSPMIGISGTGRTGKLHYYYVCQKKRSEKTCDKKNVRRDEVEYQIAKAIFDNALQDQVIEWIADSTIAYNDRKEAEGHIGILEDQLADVQRSLKNIMSAIEQGIVTETTKSRLLELESERSEIEGKIAAAKADIVPVNREQLIEWLLSLREGDIHDKKYQARLFDTFLIAAYLYDDGTAKLVFSFAGDKNTVTVPLAEAVDSVEENTAEGSFKLCLAPPNSASKDAEFCFILSTF

SEQ ID NO: 2956 - protein, 536 aa, Unknown
  Description of Unknown: Integrase B2957 sequence
  PTHR30461:SF3,IPR036162,PS51737,IPR011109,PTHR30461, PF00239,G3DSA:1.10.10.2600,IPR006119,SSF53041,cd00338, SM00857,IPR025827,IPR038109,mobidb-lite,PS51736, PF13408,G3DSA:3.40.50.1390,PF07508,Coil
MPRKKKLQEVGGLRLVAYYRYSNGGQQTEQSIEGQRRDCDAYAKAHGYKIVHEYIDRHISGKSDSRPAFQQMISDSDSHLFDAVICWKTDRLARSRYDSIIYKTRLRKNGVKILYAAETVVDGPEGIIIEGLMESLAEYYSAELAQKLRRGQRESALKCIALGGNRSFGYDIGPDKHYCINEKQAPAVRYIFEQYAAGATAADIVRELTARGYRTSRGNPFNKNSICRIITNEMYLGVYKYADIRIEGGVPAMIDRELFNRCQTQLAFNRAHGGGKGAPRADYVLVGKLDCGLCGHAMKGASATGHTGSKHYYYTCTQHVEKKCPKTSIEKNYLEQVIVDGVAKYVLTPEKISQIVDCMMELQAKEQEPKGNPEKDALEAELAECRRKQNNILEAIEEGGSARLAARLRALEEQEAQLTFALGEINNAPAPPQFSREALTFMFEQFRREEDEVDEEYRRRILDTFVSSILLYEDRAEVKFNITDQKTGDFERVILPISANKKPPEDDDTTSNSESSTALRLVEAMGVEPMSEKSSV

SEQ ID NO: 2957 - protein, 536 aa, Unknown
  Description of Unknown: Integrase B2958 sequence
  PTHR30461:SF3,IPR036162,PS51737,IPR011109,PTHR30461, PF00239,G3DSA:1.10.10.2600,IPR006119,SSF53041,cd00338, SM00857,IPR025827,IPR038109,mobidb-lite,PS51736, PF13408,G3DSA:3.40.50.1390,PF07508,Coil
MPRKKKLQEVGGLRLVAYYRYSNGGQQTEQSIEGQRRDCEAYAKAHGYKIVHEYIDRHISGKSDSRPAFQQMISDSDSHLFDAVICWKTDRLARSRYDSIIYKTRLRKNGVKILYAAETVVDGPEGIIIEGLMESLAEYYSAELAQKLRRGQRESALKCIALGGNRSFGYDIGPDKHYCINEKQAPAVRYIFEQYAAGATAADIVRELTARGYRTSRGNPFNKNSICRIITNEMYLGVYKYADIRIEGGVPAMIDRELFNRCQTQLAFNRAHGGGKGAPRADYVLVGKLDCGLCGHAMKGASATGHTGSKHYYYTCTQHVEKKCPKTSIEKNYLEQIIVDGVAKYVLTPEKISQIVDCMMELQAKEQEPKGNPEKDTLEAELAECRRKQNNILEAIEEGGSARLAARLRTLEEQEAQLTFALGEINNAPAPPQFSREALTFMFEQFRREEDEVDEEYRRRILDTFVSSILLYEDRAEVKFNITDQKTGDFERVILPISANKKPPEDDDTTSNSEGSTALRLVEAMGVEPMSEKSSA

SEQ ID NO: 2958 - protein, 536 aa, Unknown
  Description of Unknown: Integrase B2959 sequence
  PTHR30461:SF3,cd00338,SM00857,G3DSA:1.10.10.2600,IPR036162, PF13408,PS51737,G3DSA:3.40.50.1390,IPR025827,IPR006119, IPR038109,PF07508,SSF53041,IPR011109,PTHR30461, PS51736,Coil,PF00239
MQKLKVAAYARVSTDKDDQTNSLDNQRNYFTNYIINHENWKLVDVYFDEGISGTQTEKRVGFNRMIEDAKNKEIDLIITKEVSRFARNTVDTLSYTRKLKEYGVGVVFTLDNIDTRETDGEFRLTIMASIAQEESRKTSERVRWGQRRQMEKGVVFGRDLLGYTVRHGVLAINQEEVPVVKAIFHKYTNEGKGTHVIARELIEEGMRPKRIALWSNTIILKVLRNEKYVGDLLQKKTYTPDFLTHAKKYNHGEEEMVYLQNHHEPIIDRDLWDRTQEELKRRSTSAEQKAKHSNRYWCSGKLCCAECGSRFVSRTKKLKNASQYKAWRCHAAANHGALKEDADGNYIGCSNGSINDRSLQTCMNYCISLIQTEKDTLKREILSEIKELQKSAEKKTDTKKIQKKIDQLETKKRKAIDLMLDGLISKDDLKNQTEWYNEEIKQLNQQVLDSEQENKVKSRQANAMKEYISALDEIMDMDSNNELVYKEILDHIDIHKNYILDIWLKCIPFAIRLKVKPSGKGEYFKTEIIETSFIEK

SEQ ID NO: 2959 - protein, 536 aa, Unknown
  Description of Unknown: Integrase B2960 sequence
  PTHR30461:SF3,IPR036162,PS51737,IPR011109,PTHR30461, PF00239,G3DSA:1.10.10.2600,IPR006119,PF14287,SSF53041, IPR025378,SM00857,IPR025827,cd03770,IPR038109, PF13408,G3DSA:3.40.50.1390,PF07508,Coil
MKQLIYRVALYMRLSRDDEDYGESVSIETQRKIITQFANEQHFIIVDEYIDDGWSGTNFDRPAFQRMMEDVESGKVNCIITKDLSRLGREHIMMDYYLEFYFPEKRIRYIAVTENEDTEKGLSDFVPFKNLFNEWFAKDTSRKVKAAFKAKFAAGDRICAYVKIGYKRHPEIKNRIVPDEETRWIPEKIFDLAYHGAGAAKITRTLIAEKVPTPSWINYQRFGTFAHVYQNASEEKRYAWTVAQVKYILKDETYIGNTVHYKQTNISFKNKKRIRKPEDEWWRIENTHEGLIPKEMFDSVQAQIATRRRMQKDHTTQIFSGLVKCADCGWSMRFGTNRQNKNPYSHYTCSKYGQVGIHCSAHYIRYDVLYAYVLSRIQYWAAQAVQDEDALLERLLQTGNAKQNAERKKIADDLKRAEKRQKELDNLFAKLYEDRIAERITERNFIMLSAKYQEEQNALDGKIDLLNGQISENSERYSNIETWVKLIKQYASPTELDSILLNALVEKITVHEAVKHEDGSREQEVEIFYKFVGKID

SEQ ID NO: 2960 - protein, 536 aa, Unknown
  Description of Unknown: Integrase B2961 sequence
  PTHR30461:SF3,IPR036162,PS51737,IPR011109,PTHR30461, PS00397,PF00239,G3DSA:1.10.10.2600,IPR006119,SSF53041, cd00338,SM00857,IPR025827,IPR038109,PS51736, IPR006118,PF13408,G3DSA:3.40.50.1390,PF07508,Coil
MFKNTKIAVYCRVSSDEQAERGTIDNQITFAQQYADLHHLDIYDVYKDDGVTGTIPLQDRPEGHRLLQDAADERFTLVVFYKMDRLGRSTRVILNAVEALSQHGVGVQSMSEPFDTSTPSGRFMLTMFAGVAELDRANILDRMYQGTLRHARLGKWCGGPAPFGYCLQDGYLVVSEEPMPGQQLSEADVIRMLYGKTIEGWSALRLAQHLNALGIPNKYTLRGNVAAGSGKWHQSKILYILHNTLYYGERSFGKMSKNNNKNIIPQQVPAIVSKETWDAAQAAVEQHSIMPKFIKRRSYLLRGLIRCGLCGHTYVGTYYKRKAGNSIYYVCNAKNTRGVTPEPCKGQTLRGEWIESLVWEDCLRYIKQPDVIAVDEDCRYLQSAGDIKKEIDAATAQLKQLDQERQTVIGLCRQGIITAADLDGQLSDITEKQNTLQQTLEGLNSQSLVTKEDAEKRVKEIADILGGFRQQLQSGGELTFDAKQGIIRTLVKQITVHTELQPGAERDIPTVRVCIDYNFTLLPSKSGMLDPYRQGF

SEQ ID NO: 2961 - protein, 536 aa, Unknown
  Description of Unknown: Integrase B2962 sequence
  PTHR30461:SF3,SM00857,G3DSA:1.10.10.2600,IPR036162,PF13408, PS51737,IPR025827,G3DSA:3.40.50.1390,IPR006119,IPR038109, PF07508,IPR011109,SSF53041,PF00239,PTHR30461, PS51736,Coil,cd00338
MQRQHGAYIYARYSTENQDADSIDVQVGKCTQYCSQRGLPILGVFADEAVSGMKESRPRFDAMMAQLGMGLADTVVCYDQSRLFRKMTAWFDLREKLSVMGVAVISVTQPMVGGDLRDPTIFLTEGGMALFNQVWVFQSRQKVMEKMQHMARNGQHTGGKPPLGYQVVELGGVKKLAILQPEAETVKRIFAEYDSGRSYHDIIAGLNRDGIKTKRGNPFGTNSLHDLLKNEKYIGTLVYGASPYRADGTRNTHAKDGENIIRVEDAIPAIIDKDQFARVQARMAENKRVQGGRPATRREYPLKGKVFCGYCKSAMSVSISRKSYTYYKCGAKKRQHSCAAGNVSVDALEQTVAENVRLVLGQKGSIDKLIAVLRQQRTVIQDNALAQLKALISRREELRRKLDNAADLVLDGRGSKTLIARMTDMEREQEQLDAKMAALKRAVDASAVPEQTLRRYAQMMADGSVDNLAPYLAIVCRVEVYGDKVVIWTILDDDPTAPKDFNAPGVQITLGTPSGVPMVFVTADLLRIVATKQSTS

SEQ ID NO: 2962 - protein, 536 aa, Unknown
  Description of Unknown: Integrase B2963 sequence
  PTHR30461:SF3,SM00857,G3DSA:1.10.10.2600,IPR036162,PF13408, IPR025827,G3DSA:3.40.50.1390,PS51737,IPR006119,IPR038109, PF07508,IPR011109,SSF53041,PF00239,PTHR30461, PS51736,Coil,cd00338
MQRQHGAYIYARYSTENQDADSIDVQVGKCTQYCSQRGLPILGVFADEAVSGMKESRPRFDAMMAQLGMGLADTVVCYDQSRLFRKMTAWFDLREKLSVMGVAVISVTQPMVGGDLRDPTIFLTEGGMALFNQVWVFQSRQKVMEKMQHMARNGQHTGGKPPLGYQVVELGGVKRLAILPPEAETVKRIFAEYDSGRSYHDIIAGLNRDGIKTKRGNQFGTNSLHDLLKNEKYIGTLVYGASPYRADGTRNTHAKDGENVIRVDDAIPAIIDKDQFARVQARMAENKRVQGGRPATRREYPLKGKVFCGYCKSAMSVSISRKSYTYYKCGAKKRQHSCAAGNVSVDALEQTVAENVRLVLGQKGSIDKLIAVLRQQRTVIQDNALAQLKTLISRREELRRKLDNAADLVLDGRGSKTLIARMTDMEREQEQLDAKMTALKRAVDASAVPEQTLRRYAQMMADGSVDNLAPYLAIVCRVEVYGDKVVIWTILDDDPTAPKDFNAPGVQITLGVPSGVPMVFVTADLLRIVATKQSTS

SEQ ID NO: 2963 - protein, 536 aa, Unknown
  Description of Unknown: Integrase B2964 sequence
  PTHR30461:SF3,IPR036162,PS51737,IPR011109,PTHR30461, PF00239,G3DSA:1.10.10.2600,IPR006119,SSF53041,cd00338, SM00857,IPR025827,IPR038109,PS51736,mobidb-lite, PF13408,G3DSA:3.40.50.1390,PF07508,Coil
MPRKKKLQEVGGLRLVAYYRYSNGGQQTEQSIEGQRRDCEAYAKAHGYKIVHEYIDRHISGKSDSRPAFQQMISDSDSHLFDAVICWKTDRLARSRYDSIIYKTRLRKNGVKILYAAETVVDGPEGIIIEGLMESLAEYYSAELAQKLRRGQRESALKCIALGGNRSFGYDIGPDKHYCINEKQAPAVRYIFEQYAAGATAADIVRELTARGYRTSRGNPFNKNSICRIITNEMYLGVYKYADIRIDGGVPAMIDRELFNRCQTQLAFNRAHGGGKGAPRADYVLVGKLDCGLCGHAMKGASATGHTGSKHYYYTCTQHVEKKCPKTSIEKNYLEQIIVDGVAKYVLTPEKISQIVDCMMELQAKEQEPKGNPEKDALEAELAECRRKQNNILEAIEEGGSARLAARLRALEEQEAQLTFALGEINNAPTPPQFSREALTFMFEQFRREEDEVDEEYRRRILDTFVSSILLYEDRAEVKFNITDQKTGDFERVILPISANKKPPEDDDTTSNSEGSTALRLVEAMGVEPMSEKSSA

SEQ ID NO: 2964 - protein, 536 aa, Unknown
  Description of Unknown: Integrase B2965 sequence
  PTHR30461:SF3,SM00857,G3DSA:1.10.10.2600,IPR036162,PF13408, IPR025827,G3DSA:3.40.50.1390,PS51737,IPR006119,IPR038109, PF07508,SSF53041,IPR011109,PTHR30461,PS51736, cd00338,PF00239
MKRAALYARYSSDNQRHESIDAQLRASREYCASRNYAIVRIYTDEAITGTSVVRRDAFQKMILDSGDDIFDVVIFHKIDRNARDEIDYYTNVDRLRKNGVTYEYSAEGIDVSTTNGKLTEGIKVAVAAWYSRNLATEVKKGQKENALKGIFNGGRPPLGYKIVNQRYEIEPREAEAVRLIFDMYIHGNGYVKIASELNRRGFTTRNGKPFVKNSLYEILGNERYTGTYIFNRICTDEFGRRNNHKINPDAIRIENAIPAIIDKETFKIVAELRARNKNCSSRFRAVETYLLSGKVKCALCGSPMNGHRVKCKTGTYSYYCCSKTRLPKDVKCAQKLISKTALEKKVANVIMERILSESERPKLFEEMKNYYQMLIGHSEKERHTLNIAKAAAETKLSNLYALVEAGNVIDKFDIMRIQKVKAEITDITNQLNNIPKTTNLKLPDEETFNKILKEMHSALLRDDKEVMEMIINIFVSEVEIGPNYVHIYVETKGPPIFSAKHGSLHLHHFHEYTLIKCRIPRTILCKTLHLNDVVIL

SEQ ID NO: 2965 - protein, 536 aa, Unknown
  Description of Unknown: Integrase B2966 sequence
  PTHR30461:SF3,IPR036162,PS51737,IPR011109,PTHR30461, PF00239,G3DSA:1.10.10.2600,IPR006119,SSF53041,cd00338, SM00857,IPR025827,IPR038109,mobidb-lite,PS51736, PF13408,G3DSA:3.40.50.1390,PF07508,Coil
MPRKKKLQEVGGLRLVAYYRYSNGGQQTEQSIEGQRRDCEAYAKAHGYKIVHEYIDRHISGKSDSRPAFQQMISDSDSHLFDAVICWKTDRLARSRYDSIIYKTRLRRNGVKILYAAETVVDGPEGIIIEGLMESLAEYYSAELAQKLRRGQRESALKCIALGGNRSFGYDIGPDKHYCINEKQAPAVRYIFEQYAAGATAADIVRELTARGYRTSRGNPFNKNSICRIITNEMYLGVYKYADIRIEGGVPAMIDRELFNRCQTQLAFNRAHGGGNGAPRADYVLVGKLDCGLCGHAMKGASATGHTGSKHYYYTCTQHVEKKCPKTSIEKNYLEQVIVDGVAKYVLTPEKISQIVDCMMELQAKEQEPKGNPERDALEAELAECRRKQNNILEAIEEGGSARLAARLRALEEQEAQLTFALGEINNAPAPPQFSREALTFMFEQFRREEDEVDEEYRRRILDTFVSSILLYEDRAEVKFNITDQKTGDFERVILPISTNKKPPEDDDITSNSEGSTALRLVEAMGVEPMSEKSSA

SEQ ID NO: 2966 - protein, 536 aa, Unknown
  Description of Unknown: Integrase B2967 sequence
  PTHR30461:SF3,cd00338,SM00857,G3DSA:1.10.10.2600,IPR036162, PF13408,IPR025827,G3DSA:3.40.50.1390,PS51737,IPR006119, IPR038109,PF07508,IPR011109,SSF53041,PTHR30461, PS51736,Coil,PF00239
MSVDIKWQVPKAQPEANELAVVYARYSSHSQGEQSIEGQLSNARDYAAAHGYTIVHEYVDRAKSGRTDNRAEFQQMLKDTAKRQFSVIILWKVDRFGRNREEIAINKMKCRKNGVRVEYVAETIPDSPEGVILESVLEGFAEYYSLQLSQNIRRGRAESAEKCQSLGGNRPLGYKTGPDKKFVIDENTAPTVKIIFTMYADGKTVTEIVDKLNEMGLRTLRGGPFTKNSLHSILKNKKYIGIYEYQGHEIKDGVPRIIEDDVFNKVQEMLKINKRAPAKTWSRADYILTDKLFCGKCGALMFGESGTSKTGAKHNYYICSNKKRFRSCDKKAVRQADIEDTVLNATHELLQDDELLDYIVDRTWEYYLAQDNSQEELRNLQRQLAQTDTAISNLIRAIEAGILTEETKKRMDELTQQKADLKASIADREIARGFHLKKSHIAYYLRSLRDADWSDKETQKRLIQTFVNAVFVYDDHITLTYNFSGDKNTITLRDMQRFEDGEEFGCRASRSTIGRISEPYIAWGTVFVQTKRHSLP

SEQ ID NO: 2967 - protein, 536 aa, Unknown
  Description of Unknown: Integrase B2968 sequence
  PTHR30461:SF3,SM00857,G3DSA:1.10.10.2600,IPR036162,PF13408, IPR025827,G3DSA:3.40.50.1390,PS51737,IPR006119,IPR038109, PF07508,IPR011109,SSF53041,PF00239,PTHR30461, PS51736,Coil,cd00338
MYEDIKTACLYVRFSSHNQTEQSIEGQTRVCRDFCKRHNIRIVEIYADRATSASKDIEKRVQFLKMIKDSEKGLFDAVIVYKLDRFARSRYDSATYKYRLKRNEVQLISATENISNDPEGIILESVLEGMAEFYSAELSQKINRGMRESAYKHNSIGGAIPLGYKIEDKKLVIDPKTAPIVKEAFEKYADGETVAEICRQFNARGYKTSKGTAFGKSSFTKIFRNERYIGVYTFHDYRAEDAIPAIIDKDLWDRVQLRVGKIKNAPARNKAKVVYLLSGKIFCGHCGSKMNGNCNAGNYYYYQCYGKKNGNVDCKKKNIRKEFIERLVAQDALSLLTDEYIEQIATIACEKNQHEIELDSALPTIRDRIHQVDLSLNNLLKAIESGSAPDMLVKRMGELEKEKKDLQAQAKKESEDIVELDKAQVIYWLEQFRGGSIEDEEFCRMLIDLFVNSVTVWDEDDNTYKVTVVYNLTSLPTKTYRLNKGGTLSDFTSNAPPWIAPRCPLPSGRYSKICPAPGRCGPAPEHDSYKRPFPAG

SEQ ID NO: 2968 - protein, 536 aa, Unknown
  Description of Unknown: Integrase B2969 sequence
  SM00857,G3DSA:1.10.10.2600,IPR036162,PF13408,PS51737, IPR025827,G3DSA:3.40.50.1390,IPR006119,IPR038109,PF07508, IPR011109,SSF53041,PTHR30461,PS51736,cd00338, PF00239
MKLTHGAYILARFSTDRQEADSIEVQVSKCREWCERQRLPVLDVFADEAVSGMKETRPQFDRMMRMLSEGGADTVVIYDQSRMFRKMTAWFALRERLERLGVRVVSVTQPMIGGDLRDPATFMSEGGMALMNQMWVLQTRQKVCEKMRWMAEQGKYTGGVPPLGYVVIDGRIEVCEPEAETVRIIFGDYAAGRSYREIIQRLNAEGRRTKSGGTFGSNSLHDLLKNEKYIGVLTYGRTQKRPDGSRNSHAVASTVMRMEDMIPAIVDRETWDTVQEKLMANKRKQAGRPVRVREYPLKGKVFCGECKASMSVTCSQGGYYYYACSEKKRKKTCDNMPIKVDDLERMIAEAIKNMLGNPENVDGLICILREERGKIQEQTAMRMKALFDRQAEIKKQLDAAMSAVLAGMHSQSLIDTVHALEAEQAQNDREMTTLHNQAQGTTIPEDRLRELLKVAANDIPALLSVVVRVEVGKDRIRVWTLLDAKPDGTFDFNTDWDDPEIGLIIIPGVAPPVPRIIINGGLLCFSLPRQKKNRAE

SEQ ID NO: 2969 - protein, 536 aa, Unknown
  Description of Unknown: Integrase B2970 sequence
  PTHR30461:SF3,IPR036162,PS51737,IPR011109,PTHR30461, PF00239,G3DSA:1.10.10.2600,IPR006119,SSF53041,cd00338, SM00857,IPR025827,IPR038109,PS51736,mobidb-lite, PF13408,G3DSA:3.40.50.1390,PF07508,Coil
MPRKKKLQEVGGLRLVAYYRYSNGGQQTEQSIEGQRRDCEAYAKAHGYKIVHEYIDRHISGKSDSRPAFQQMISDSDSHLFDAVICWKTDRLARSRYDSIIYKTRLRRNGVKILYAAETVVDGPEGIIIEGLMESLAEYYSAELAQKLRRGQRESALKCIALGGNRSFGYDIGPDKHYCINEKQAPAVRYIFEQYAAGATAADIVRELTARGYRTSRGNPFNKNSICRIITNEMYIGVYKYADIRIEGGVPAMIDRELFNRCQTQLAFNRAHGGGKGAPRADYVLVGKLDCGLCGHAMKGASATGHTGSKHYYYTCTQHVEKKCPKTSIEKNYLEQVIVDGVAKYVLTPEKISQIVDCMMELQAKEQEPKGNPEKDALDAELAECRRKQNNILEAIEEGGSARLAARLRALEEQEAQLTFALGEINNAPTPPQFSREALTFMFEQFRREEDEVDEEYRRRILDTFVSSILLYEDRAEVKFNITDQKTGDFERVILPISANKKPPEDDDTTSNSEGSTALRLVEAMGVEPMSEKSSV

SEQ ID NO: 2970 - protein, 536 aa, Unknown
  Description of Unknown: Integrase B2971 sequence
  PTHR30461:SF3,IPR036162,PS51737,IPR011109,PTHR30461, PF00239,G3DSA:1.10.10.2600,IPR006119,PF14287,SSF53041, IPR025378,SM00857,IPR025827,cd03770,IPR038109, PF13408,G3DSA:3.40.50.1390,PF07508,Coil
MKQLIYRVALYMRLSRDDEDYGESVSIETQRKIITQFANEQHFIIVDEYIDDGWSGTNFDRPAFQRMMEDVESGKVNCIITKDLSRLGREHIMMDYYLEFYFPEKRIRYIAVTENEDTEKGLSDFVPFKNLFNEWFAKDTSRKVKAAFKAKFAAGDRICAYVKIGYKRHPEIKNRIVPDEETKWIPEKIFDLAYHGAGAAKITRTLIAEKVPTPSWINYQRFGTFAHVYQNASEEKRYAWTVAQVKYILKDETYIGNTVHYKQTNISFKNKKRIRKPEDEWWRIENTHEGLIPKEMFDSVQAQIATRRRMQKDHTTQIFSGLVKCADCGWSMRFGTNRQNKNPYSHYTCSKYGQVGIHCSAHYIRYDVLYAYVLSRIQYWAAQAVQDEDALLERLLQTGNAKQNAERKKIADDLKRSEKRQKELDNLFAKLYEDRIAERITERNFIMLSAKYQEEQNALDGKIDLLNGQISENSERYSNIETWVKLIKQYASPTELDSILLNALVEKITVHEAVKHEDGSREQEVEIFYKFIGKID

SEQ ID NO: 2971 - protein, 536 aa, Unknown
  Description of Unknown: Integrase B2972 sequence
  PTHR30461:SF3,SM00857,G3DSA:1.10.10.2600,IPR036162,PF13408, IPR025827,G3DSA:3.40.50.1390,PS51737,IPR006119,IPR038109, PF07508,SSF53041,IPR011109,PTHR30461,Coil, PS51736,cd00338,PF00239
MKAAIYSRKSKFTGKGESIENQIEMCKKYAANNNYIETYIYEDEGFSGKNTNRPEFKQMMKDAKMHKFDAIICYRLDRISRNVSDFSSLVDELKNLNIDFVSIREQFDTTNPMGTAMMFISSVFAQLERETIAERIRDNMYELAKTGRWLGGTPPFGFISEPDYYLDANGKQKKMVKLSPVESEIELIKTFFEEYLKLGSLSKLQKYLIKNNINTKRNVAWDIKALQLLLRNPVYVKSSELVISYLDSKGAAVFGEPNGCGILSYNKKDSKDKYKDIKEWVLSIAKHEGVIEDTLWLNVQKQLDRNKCLAPRLVSNDASGLFNSVLYCSHCGSKMIQKQGHISAKTGKKLTYYVCTNKINSSGELCKCKNIRADKLEHDVLEQLFEETSYNSSLINAIEEYKKELQSEMYSKSDINSIKKLIKQKQLQIDNLLEKISLNPNLYDLFEKKLEELNSEVKQLKFKKFELEDSTANIALAIKEIDASTKMLLNFKKLWDNSDHPMKKLLISTLVDKIFYDYEAKTAKIKLFCSKKKGAI

SEQ ID NO: 2972 - protein, 536 aa, Unknown
  Description of Unknown: Integrase B2973 sequence
  PTHR30461:SF3,IPR036162,PS51737,IPR011109,PTHR30461, PF00239,G3DSA:1.10.10.2600,IPR006119,PF14287,SSF53041, IPR025378,SM00857,IPR025827,cd03770,IPR038109, PF13408,G3DSA:3.40.50.1390,PF07508,Coil
MKQLIYRVALYMRLSRDDEDYGESVSIETQRKIITQFANEQHFIIVDEYIDDGWSGTNFDRPAFQRMMEDVESGKVNCIITKDLSRLGREHIMMDYYLEFYFPEKRIRYIAVTENEDTEKGLSDFVPFKNLFNEWFAKDTSRKVKAAFKAKFAAGDRICAYVKIGYKRHPEIKNRIVPDEETRWIPEKIFDLAYHGAGAAKITRTLIAEKVPTPSWINYQRFGTFAHVYQNASEEKRYAWTVAQVKYILKDETYIGNTVHYKQTNISFKNKKRIRKPEDEWWRIENTHEGLIPKEMFDSVQAQIATRRRMQKDHTTQIFSGLVKCADCGWSMRFGTNRQNKNPYSHYTCSKYGQVGIHCSAHYIRYDVLYAYVLSRIQYWATQAVQDEDALLERLLQTGNAKQNAERKKIADDLKRAEKRQKELDNLFAKLYEDRIAERITERNFIMLSAKYQEEQNALDGKIDLLNGQISENSERYSNIETWVKLIKQYASPTELDSILLNALVEKITVHEAVKHEDGSREQEVEIFYKFVGKID

SEQ ID NO: 2973 - protein, 536 aa, Unknown
  Description of Unknown: Integrase B2974 sequence
  PTHR30461:SF3,cd00338,SM00857,G3DSA:1.10.10.2600,IPR036162, PF13408,PS51737,G3DSA:3.40.50.1390,IPR025827,IPR006119, IPR038109,PF07508,IPR011109,SSF53041,PTHR30461, PS51736,Coil,PF00239
MPRKKAPAAEAPRLVAYYRYSGGSRQTEQSIEGQRRDCEAYARARGMTILREYVDRHISGKTDDRPAFQQLVADSAAHTFDAVICWKTDRLARNRYDSAVYKKKLRDNGVEILYAAESNISGAEGIIIEGLMEALAEYYSAELAEKARRGMRESALKGKALGSSRPLGLTVDADKHYIIEPTGAEAVRYIFEQYAAGLSSSSIVERLNAMGLRTSHGGPFNKSSINRIIQNEMYRGVYVSKKFDVRIEGAIPAIIDNDLWKRAQNMFERNRQSRTPHASRADYILSGKLYCGECGCLMKGVCGRSSGNGQMYHYYACPGRSIGRACTRKNIPQDELEAMVVNSVADLLLEPELLEQIADAIVELQQAEAARPDPEKQALEKSLSDVRNKIQNILSAIENGTSSAALSARLADLEQQESTLSYQLSSLTAKKPLTFTRDQILFLLQQFRVSPSERTKAYCRRLVDTFVDHIELTNTELILYFNISDETIDKNKKAPRSNPSKESSTEKRLVRLMFPQSNLSVTVFPSYFLLTRPLFH

SEQ ID NO: 2974 - protein, 536 aa, Unknown
  Description of Unknown: Integrase B2975 sequence
  PTHR30461:SF3,SM00857,G3DSA:1.10.10.2600,IPR036162,PF13408, PS51737,G3DSA:3.40.50.1390,IPR025827,IPR006119,IPR038109, PF07508,IPR011109,SSF53041,PTHR30461,Coil, PS51736,cd00338,PF00239
MKAAIYSRKSKFTGKGESIENQIEMCKKYAADNNYTETFIYEDEGFSGKNTNRPEFKQMMKDAKKHKFDAIICYRLDRISRNVSDFSSLVDELKSLNIDFVSIREQFDTTNPMGTAMMFISSVFAQLERETIAERIRDNMYELAKTGRWLGGTPPYGFISEPDSYLDSNGKQKKMVKLSPINDETELVKSFFKDYLKLGSLGKLQKHLIKNNINTKRNVAWDVKALQMLLRNPVYVKSSELVISYLESKGATVFGDPNGCGILSYNKKDSKSKYKDISEWILSVAQHDGIIEDTLWLNVQKQLDRNKVLAPRLISNDASGLFNSVLRCKECDGKMIQKQGHVSTKTGKKLRYYVCLNKVNSNGELCNCKNIRADKLEHDVLEKLFEETSNNSSLINAIDNYKKKLQSEISSKNDINSIKKLISQKQLQVDNLLDKISLNPNLYDLFEKKLEELNNELKQLKFRKFELEDSSVNMKIAIKEIDASTKMLLNFKQLWENADHSMKKLLISTLIDKIYYDAESKTASIKLFCIKKKGAL

SEQ ID NO: 2975 - protein, 535 aa, Unknown
  Description of Unknown: Integrase B2976 sequence
  PTHR30461:SF3,cd00338,SM00857,G3DSA:1.10.10.2600,IPR036162, PF13408,IPR025827,G3DSA:3.40.50.1390,PS51737,IPR006119, IPR038109,PF07508,IPR011109,SSF53041,PTHR30461, PS51736,Coil,PF00239
MKKKQPNTRHGRAAIYARYSSHNQREASIEQQVKACGELAVRLGLDVVETYEDKAISGKSDRRPSFQRLLRDAEKGYFDCVLAWKSNRMGRNMLQAMTNEARLKDWGVRTFYAEEDFDDTAAGRFALRNMMNVNQFYSENMAEDITRGMMDNASKCLSNGALPLGYKAGENGRIVLDKAQAAVVQEIYTRVACREPFVDIAADLNRRGIKTKRGGTWTKSSFYTICRNERYRGIYIYDDVRVEGGVPRIVSDGLFYRVQEVLKVKKTPQSARHHTGAEDYLLTGKLFCGKCGRPMTGVSGTSRSGEMHYYYTCQKRRREHACDKKNVIREQIEKSVAQAIKRYMLTDEMIQHMADATMAYNARQEKDLHLQDLQGQLAAVKTSAANLLKAIEMGVITETTKARMVELEQEQGRLNAQIENARAELVPITRDNFVSLLHIYRDGDINDSKYLASLFETFLVRVDLYDDHFLIWFNPLGQKTPADIPITSIENGDADEFFDECRSKNVFDWGGKWSTKIKTPAVPRRVFLFWCSVSC

SEQ ID NO: 2976 - protein, 535 aa, Unknown
  Description of Unknown: Integrase B2977 sequence
  PTHR30461:SF3,SM00857,G3DSA:1.10.10.2600,IPR036162,PF13408, IPR025827,G3DSA:3.40.50.1390,PS51737,IPR006119,IPR038109, PF07508,IPR011109,SSF53041,PF00239,PTHR30461, PS51736,Coil,cd00338
MPRKKKLQEVGGLRLVAYYRYSNGGQQTEQSIEGQRRDCEAYAKAHGYKIVHEYIDRHISGKSDSRPAFQQMISDSDSHLFDAVICWKTDRLARSRYDSIIYKTRLRRNGVKILYAAETVVDGPEGIIIEGLMESLAEYYSAELAQKLRRGQRESALKCIALGGNRSFGYDIGPDKHYCINEKQAPAVRYIFEQYAAGATAADIVRELTARGYRTSRGNPFNKNSICRIITNEMYLGVYKYADIRIEGGVPAMIDRELFNRCQTQLAFNRAHGGGKGAPRADYVLVGKLDCGLCGHAMKGASATGHTGSKHYYYTCTQHVEKKCPKTSIEKNYLEQVIVDGVAKYVLTPEKISQIVDCMMELQAKEQEPKGNPEKDALEAELAECRRKQNNILEAIEEGGSARLAARLRALEEQEAQLTFALGEINNAPAPPQFSREALTFMFEQFRREEDEVDEEYRRRILDTFVSSILLYEDRAEVKFNITDQKTGDFELVILPISANKKPPEDDDATSNSEGSTALRLVEAMGVEPIPAVLS

SEQ ID NO: 2977 - protein, 535 aa, Unknown
  Description of Unknown: Integrase B2978 sequence
  cd00338,SM00857,G3DSA:1.10.10.2600,IPR036162,PF13408, IPR025827,PS51737,G3DSA:3.40.50.1390,IPR006119,IPR038109, PF07508,IPR011109,SSF53041,PTHR30461,PS51736, Coil,PF00239
MSIDIKWQVPKAQPEASELAVVYARYSSHSQGEQSIEGQLSNARDYAAAHGYTIVHEYVDRAKSGRTDNRAEFQQMLKDTAKRQFSVIILWKVDRFGRNREEIAINKMKCRKNGVRVEYVAETIPDSPEGVILESVLEGFAEYYSLQLSQNIRRGRAESAEKCQSLGGNRPLGYKTGPDKKFVIDENTAPTVKMIFTMYADGKTVTEIVDKLNELGLRTLRGGPFTKNSLHSILKNKKYIGIYEYQGREIKDGVPRIIEDDVFNKVQEMLKINKRAPAKTWSRADYILTDKLFCGKCGALMFGESGTSKTGAKHNYYICSNKKRFRSCDKKAVRQADIEDTVLNATHELLQDDELLDYIVDRTWEYYLAQDNSQEELRNLQRQLAQTDTAISNLIRAIEAGILTEETKKRMDELTQQKADLKASIADREIARGFHLKKSHIAYYLRSLRDADWSDKEAQKRLIQTFVNAVFVYDDHITLTYNFSGDKNTITLRDMQRFEDGEEFGCRASRSTKTHRYELFWFRNVFGLTRKLPQR

SEQ ID NO: 2978 - protein, 535 aa, Unknown
  Description of Unknown: Integrase B2979 sequence
  PTHR30461:SF3,SM00857,G3DSA:1.10.10.2600,IPR036162,PS51737, G3DSA:3.40.50.1390,IPR006119,IPR038109,PF07508,IPR011109, SSF53041,PTHR30461,Coil,PS51736,cd00338, PF00239
MNSYDISFRPEEVIQYLRKSRSDDPNMTIEEVLEKHEHMLRDFAVNHFGAPVPDCNVYREVASSETIDGRPEMLRLLRAIESPDIHAVLVVDVQRLSRGDLEDAGRLMKLLRYTNTQVITPMKTYDLRDEWDRDIFERELKRGNEYLEYFKKIQARGRLQSVQEGNYLGSKPPYGYDRAVIRIGKKNCPTLAVNKEQADVVRLIYELYVNKDWGAQRIANHLDSLGIHPLHNAHWNPAVIKDILRNYHYIGKVVWNRRKTITVVDNQEVYKTRPWNENMLIFDGRHEAIISEELFHAALARQGRSHRCRPDTRVSNVFASILHCSCGYSMSLRHDGRGSLRLSCDDQRHCKSGSIGYEELIDYICKVLTAYIDDFKIKVKHDNANEVDIHRALVSDLEARLAALEAKEVKQWEVYSMEGMPRAIFNKLNKQVKEDKAEIERALKQARKDSPDPVDYRERIAKFGDALNALQNPAASAEIKNQYLKAIINDMIYTRPGAVRLTADNCSDYGINYKDMAKRGGWYSPPFRLEIKFRF

SEQ ID NO: 2979 - protein, 535 aa, Unknown
  Description of Unknown: Integrase B2980 sequence
  PTHR30461:SF3,cd00338,SM00857,IPR036162,PF13408, IPR025827,G3DSA:3.40.50.1390,PS51737,IPR006119,PF07508, IPR011109,SSF53041,PTHR30461,PS51736,Coil, PF00239
MLTVFLSNGKGDSMIAIYTRQSIEKKDSLSIDAQVKACADYCKAQGWEYEIYAQDHGFSGKSLDRPGFQAMMSAVRSGQVNKIVCYKLDRISRSVSDFAQLLQELEQYKCDFISVTENFDTSSPIGRAMVYICMVFAQMERENIQERVKSNYYYRSGLGFWGGGPAPYGYQLKRQQIAGKVHTVLEPDPNEAPWVKKMYEWYLEPGGSAMKILRLLTENQVPTKRGYKWTSRVLMDVLSKPLYTQNSMDVYNYLTQSGAVISNPPEDFDGTLSVDLYGKKDSSQSKHKRCRKGSDMYCNISLHEAIIDSDTWLQVQYKILARPKIGGRTGTSKNSWFTGLMICGVCGRHVSFTHSARTAGYYICSSRKNCGWNSCSSKPASKKKFDPIIVKFIRDHYDSPETKATIQQAKLAAKTPQVSIERNNLQMELATINNQIDNLLTSLASGNAVMSKYINDKITELDAKRTPLQAKLLQFDATSSVNDELKRLERIEWAMEQLPLVYTEDTFDLSVQVSQALVNNIVFNADGEVTISFAI

SEQ ID NO: 2980 - protein, 535 aa, Unknown
  Description of Unknown: Integrase B2981 sequence
  PTHR30461:SF3,SM00857,IPR036162,PF13408,IPR025827, G3DSA:3.40.50.1390,PS51737,IPR006119,PF07508,SSF53041, IPR011109,PF00239,PTHR30461,PS51736,Coil, cd00338
MLTVFLSNGKGGSMIAIYTRQSIEKKDSLSIDAQVKACADYCKAQGWEYEIYTQDHGFSGKSLDRPGFQAMMSAVRSGQVNKIVCYKLDRISRSVSDFAQLLQELEQYKCDFISVTENFDTSSPIGRAMVYICMVFAQMERENIQERVKSNYYYRSGLGFWGGGPAPYGYQLKRQQIAGKVHTVLEPDPNEAPWVQKMYEWYLEPGGSAMKILRLLTENQVPTKRGYKWTSRVLMDVLSKPLYTQNSMDVYNYLTQSGAVISNPPEDFDGTLSVDLYGKKDSSQSKHKRCRKGSDMYCNISLHEAIIDSDTWLQVQYKILARPKIGGRTGTSKNSWFTGLMICGVCGRHVSFTHSARTAGYYICSSRKNCGWNSCSSKPASKKKFDPIIVKFIRDHYDSPKTKAAIQQAKLAAKTPQVSIERNNLQMELATINNQIDNLLTSLASGNAVMSKYINDKITELDAKRTPLQAKLLQLDATSSVNDELKRLERIEWAMEQLPLVYTEDTFDLSVQVSQALVNNIVFNADGEVTISFAI

SEQ ID NO: 2981 - protein, 535 aa, Unknown
  Description of Unknown: Integrase B2982 sequence
  PTHR30461:SF3,cd00338,SM00857,G3DSA:1.10.10.2600,IPR036162, PF13408,IPR025827,G3DSA:3.40.50.1390,PS51737,IPR006119, IPR038109,PF07508,IPR011109,SSF53041,PTHR30461, PS51736,Coil,PF00239
MKKKQPNTRHGRAAIYARYSSHNQREASIEQQVKACRELAVRLGLDVVETYEDKAISGKSDRRPSFQRLLRDAEKGYFDCVLAWKSNRMGRNMLQAMTNEARLKDWGVRTFYAEEDFDDTAAGRFALRNMMNVNQFYSENMAEDITRGMMDNASKCLSNGALPLGYKAGENGRIVLDKAQAAVVQEIYTRVACREPFVDIAADLNRRGIKTKRGGPWTKSSFYTICRNERYRGIYIYDDVRVEGGVPRIVSDGLFYRVQEVLKVKKTPQSARHHTGAEDYLLTGKLFCGKCGRPMTGVSGTSRSGEMHYYYTCQKRRREHACDKKNVIREQIEKSVAQAIKQYMLTDEMIQHMADATMAYNARQEKDLHLQDLQGQLAAVKTSAANLLKAIEMGVITETTKARMVELEQEQGRLNAQIENARAELVPITRDNFVSLLHIYRDGDINDSKYLASLFETFLVRVDLYDDHFLIWFNPLGQKTPADIPITSIENGDTDEFFDECRSKNVFDWGGKWSTKIKAPAVPRRVFLFWCSVSC

SEQ ID NO: 2982 - protein, 535 aa, Unknown
  Description of Unknown: Integrase B2983 sequence
  PTHR30461:SF3,cd00338,SM00857,G3DSA:1.10.10.2600,IPR036162, PF13408,PS51737,G3DSA:3.40.50.1390,IPR025827,IPR006119, IPR038109,PF07508,IPR011109,SSF53041,PTHR30461, PS51736,Coil,PF00239
MQNAVIYARYSSHGQNEQTIEGQIRVCSEYAQQHKLRVVNIYIDKHKTGTDVNRPQFQKMIDDAATGAFTHVIVYMIDRFARNRYYSTVYRWQLQQQNIRVVSATENISESEEGEFYQMFLEWNAEKYSTRLSKRVREGLTTSVANGTFAGGYLIYGYKKEGKRVVIDEAEASIVRYFFEEYASGVPKKDIAEALNARGERYRGKPWRGRDFDKMLTNAKYTGTFEFGGRLCANTYPQIIDKALFDKVQRRAQQNKYFSGANSARITYLLQGKLYCGHCGANMVADGGTSKTGAVYHYYACTAKKKRRTCTKRNEKKDFLEWYATEQTVAYLSDPRRVALIADDVIAYYESRTDTSEIKRITVERTRIQKEIDNAVNLMVSGVSPEVVKTLDKKIVELTAQLNDLTEYQAKLELERGLQVRREDIIAFVAEFIRGDLHDKEFQKRIIDNLVNAMYIYDDRVVLYFNISGGRETAFIGKEDTDEASGVPLDDNNNAHAGAGGSVQTLTPPLRQKKIIRTPRQFRGSYYSFLTIISA

SEQ ID NO: 2983 - protein, 535 aa, Unknown
  Description of Unknown: Integrase B2984 sequence
  PTHR30461:SF3,SM00857,G3DSA:1.10.10.2600,IPR036162,PS51737, G3DSA:3.40.50.1390,IPR006119,IPR038109,PF07508,IPR011109, SSF53041,PTHR30461,Coil,PS51736,cd00338, PF00239
MNSYDISFRPEEVIQYLRKSRSDDPNMTIEEVLEKHEHMLRDFAVNHFGAPVPDCNVYREVASSETIDGRPEMLRLLRAIESPDIRAVLVVDVQRLSRGDLEDAGRLMKLLRYTNTQVITPMKTYDLRDEWDRDIFERELKRGNEYLEYFKKIQARGRLQSVQEGNYLGSKPPYGYDRAVIRIGKKNCPTLAVNKEQADVVRLIYELYVNKDWGAQRIANHLDSLGIHPLHNAHWNPAVIKDILRNYHYIGKVVWNRRKTITVVDNQEVYKTRPWNENMLIFDGRHEAIISEELFHAALARQGRSHRCRPDTRVSNVFASILHCSCGYSMSLRHDGRGSLRLSCDDQRHCKSGSIGYEELIDYICKVLTAYIDDFKIKVKHDNANEVDIHRALVTDLEARLTALEAKEVKQWEVYSMEGMPRAIFDKLNKHVKEDKAEVERALKQARKDSPDPVDYRERIAKFGDALNALQNPAASAEIKNQYLKAIINDMIYTRPGAVRLTADNCSDYGINYRDMAKRGGWYSPPFRLEIKFRF

SEQ ID NO: 2984 - protein, 535 aa, Unknown
  Description of Unknown: Integrase B2985 sequence
  PTHR30461:SF3,SM00857,G3DSA:1.10.10.2600,IPR036162,PF13408, IPR025827,PS51737,G3DSA:3.40.50.1390,IPR006119,IPR038109, PF07508,IPR011109,SSF53041,PTHR30461,Coil, PS51736,cd00338,PF00239
MKKEKAKTPENNRAAVYARYSSRKQGEQSIEGQLSEAYKYAETHGYNIIHEYIDRAKSGRTDNREAFQEMLRDTAKGTFSTIILWKLDRFGRNREEIAANKYRCKKNGVKVVYVAENVPDSPEGVILESVLEGMAEYYSLQLSQNVRRGMHANAEKCQSTGGTTPLGYAVDPATKKFVIDPNTAPTVRRIFDMYAGGTKISEIVRTLNDSGIRTARGSRFKVDSLYTVLRNVKYTGIYTYNGSVRIENGIPAIVDRATFEKVQEMLKVNKRKPSKLWDTFDYILTDKLFCGMCGSKMVGESGTSKNGTKHSYYTCVKKRRDHACKKKAVRQYYIETLVLDRIAAILDDDSLLAFIADNVYSYYVKLQNDDDMTDALKKRLREVEKAQINILRAIEAGVFNDMTKARMDELDEQKSELQAQIAEEEYAKTGLATRDTILAWLYSQREKDLSDRASQRQLIETFVNAIYVFDDRIEILFNYSRDRRSIKFEELSDLYEYGDVFVSSALSFTSPEAGQPRIMEAGLSLFPYRPMGDWF

SEQ ID NO: 2985 - protein, 535 aa, Unknown
  Description of Unknown: Integrase B2986 sequence
  PTHR30461:SF3,SM00857,G3DSA:1.10.10.2600,IPR036162,PF13408, IPR025827,G3DSA:3.40.50.1390,PS51737,IPR006119,IPR038109, PF07508,IPR011109,SSF53041,PTHR30461,Coil, PS51736,cd00338,PF00239
MKKEKAKTPENNRAAVYARYSSRKQGEQSIEGQLSEAYKYAETHGYNIIHEYIDRAKSGRTDNREAFQEMLRDTAKGTFSTIILWKLDRFGRNREEIAANKYRCKKNGVKVVYVAENVPDSPEGVILESVLEGMAEYYSLQLSQNVRRGMHANAEKCQSTGGTTPLGYAVDPATKKFVIDPNTAPTVRRIFDMYAGGTKISEIVRTLNDSGIRTARGSRFKVDSLYTVLRNVKYTGIYTYNGSVRIENGIPAIVDRATFEKVQEMLKVNKRKPSKLWDTFDYILTDKLFCGMCGSKMVGESGTSKNGTKHSYYTCVKKRRDHACKKKAVRQYYIETLVLDRIAAILDDDSLLAFIADNVYSYYVKLQNDDDMTDALKKRLREVEKAQINILRAIEAGVFNDMTKARMDELDEQKSELQAQIAEEEYAKTGLATRDTILAWLYSQREKDLNDRASQRQLIETFVNAIYVFDDRIEILFNYSRDRRSIKFEELSDLYEYGDVFVSSALSFTSPEAGQPRIMEAGLSLFPYRPMGDWF

SEQ ID NO: 2986 - protein, 535 aa, Unknown
  Description of Unknown: Integrase B2987 sequence
  cd00338,SM00857,G3DSA:1.10.10.2600,IPR036162,PF13408, PS51737,G3DSA:3.40.50.1390,IPR025827,IPR006119,IPR038109, PF07508,IPR011109,SSF53041,PTHR30461,PS51736, Coil,PF00239
MSIDIKWQVPIAKPEVSELAVVYARYSSHSQGEQSIEGQLSNARDYAAAHGYTIVHEYVDRAKSGRTDNRAEFQQMLKDTAKRQFSVIILWKVDRFGRNREEIAINKMKCRKNGVRVEYVAETIPDSPEGVILESVLEGFAEYYSLQLSQNIRRGRAESAEKCQSLGGNRPLGYKTGPDKKFVIDENTAPTVKMIFTMYADGKTVTEIVDKLNEMGLRTLRGGPFTKNSLHSILKNKKYIGVYEYQGREIKDGVPRIIEDDVFNKVQEMLKINKRAPAKTWSRADYILTDKLFCGKCGALMFGESGTSKTGVKHNYYICSNKKRFRSCDKKAVRQADIEDAVLNATHELLQDDELLDYIVDRTWEYYLAQDNSQEELRNLQRQLAQTDTAISNLIRAIEAGILTEETKKRMDELTQQKADLKASIADREIARGFHLKKSHIAYYLRSLRDADWSDKEAQKRLIQTFVNAVFVYDDHITLTYNFSGDKNTITLRDMQRFEDGEEFGCRASRSTKTHRYELFWFRNVFGLTRKLPQR

SEQ ID NO: 2987 - protein, 535 aa, Unknown
  Description of Unknown: Integrase B2988 sequence
  PTHR30461:SF3,SM00857,G3DSA:1.10.10.2600,IPR036162,PF13408, IPR025827,G3DSA:3.40.50.1390,mobidb-lite,PS51737,IPR006119, IPR038109,PF07508,SSF53041,IPR011109,PTHR30461, PS51736,cd00338,PF00239
MPRKKSATGAPVCLVAYYRYSGGSRQNEQSIEGQRHDCEAYARSHGLTITKEYIDRHISGKTDDRPAFQQMISDSDRHAFDAVICWKTDRLARNRYDSAIYKNRLRKNGVKILYAAETVVDGPEGIILEGLMESLAEYYSAELSQKLRRGQRESAMKCIALGGNRSFGYDIGPDKHYCINPQQAPAVRYIFEQYAAGFTAADIVAHLNANGIRTSRGNAFNKNSILRIITNEMYLGVYKYADIRIEGGVPAMIDRDLFDRCQRQLAFNRAHSGGTGPRADYILSGKLFCAACSRPMKGVSGISHSGEKYCYYACPGHTEKKGCTKSNVEKSTLECAIVRATAQYILAPDKLQQILDQVLALQAHQTAPKPDPEKQALEAELSEVLHKQTNLLTALESGSSARLVQRLQDLEQQESTIRVRLAAIPDPPVPPRFTRDELEFMLSQFQRDESEQTLSYQRRLLDTFVSSVTLSDDQAVVCFNLTAPGTHSPERLTVPFSTNKNPAEPSDLTPDSAGSTALRLVEAMGVEPMSEKSSV

SEQ ID NO: 2988 - protein, 535 aa, Unknown
  Description of Unknown: Integrase B2989 sequence
  PTHR30461:SF3,cd00338,SM00857,IPR036162,PF13408, IPR025827,PS51737,G3DSA:3.40.50.1390,IPR006119,PF07508, SSF53041,IPR011109,PTHR30461,PS51736,Coil, PF00239
MLTVFLSNGKGDSMIAIYTRQSIEKKDSLSIDAQVKACADYCKAQGWEYEIYTQDHGFSGKSLDRPGFQAMMSAVRSGQVDKIVCYKLDRISRSVSDFAQLLQELEQYKCDFISVTENFDTSSPIGRAMVYICMVFAQMERENIQERVKSNYYYRSGLGFWGGGPAPYGYQLKRQQIAGKVHTVLEPDPNEAPWVKKMYEWYLEPGGSAMKILRLLTENQVPTKRGYKWTSRVLMDVLSKPLYTQNSMDVYNYLTQSGAVISNPPEDFDGTLSVDLYGKKDSSQSKHKRCRKGSDMYCNISLHEAIIDSDTWLQVQYKILARPKIGGRTGTSKNSWFTGLMICGVCGRHVSFTHSARTAGYYICSSRKNCGWNSCSSKPASKKKFDPIIVKFIRDHYDSPKTKAAIQQAKLAAKTPQVSIERNNLQMELATINNQIDNLLTSLASGNAVMSKYINDKITELDAKRTPLQAKLLQLDATSSVNDELKRLERIEWAMEQLPLVYTEDTFDLSVQVSQALVNNIVFNADGEVTISFAI

SEQ ID NO: 2989 - protein, 535 aa, Unknown
  Description of Unknown: Integrase B2990 sequence
  PTHR30461:SF3,cd00338,SM00857,G3DSA:1.10.10.2600,IPR036162, PF13408,IPR025827,G3DSA:3.40.50.1390,PS51737,IPR006119, IPR038109,PF07508,IPR011109,SSF53041,PTHR30461, PS51736,Coil,PF00239
MSVDIKWQVPKAQPEANELAVVYARYSSHSQGEQSIEGQLSNARDYAAAHGYTIVHEYVDRAKSGRTDNRAEFQQMLKDTAKRQFSVIILWKVDRFGRNREEIAINKMKCRKNGVRVEYVAETIPDSPEGVILESVLEGFAEYYSLQLSQNIRRGRAESAEKCQSLGGNRPLGYKTGPDKKFVIDENTAPTVKMIFTMYADGKTVTEIVDKLNEMGLRTLRGGPFTKNSLHSILKNKKYIGVYEYQGHEIKDGVPRIIEDDVFNKVQEMLKINKRAPAKTWSRADYILTDKLFCGKCGALMFGESGTSKTGVKHNYYICSNKKRFRSCDKKAVRQADIEDTVLNATHELLQDDELLDYIVDRTWEYYLAQDNSQEELRNLQRQLAQTDTAISNLIRAIEAGILTEETKKRMDELTQQKADLKASIADREIARGFHLQKSHIAFYLRSLRDADWSDKEAQKRLIQTFVNAVFVYDDHITLTYNFSGDKSTITLHDMQRFEDGEEFGCRASRSTKTHRYELFWFRNVFGLTRKLPQR

SEQ ID NO: 2990 - protein, 535 aa, Unknown
  Description of Unknown: Integrase B2991 sequence
  PTHR30461:SF3,SM00857,G3DSA:1.10.10.2600,IPR036162,PF13408, IPR025827,G3DSA:3.40.50.1390,PS51737,IPR006119,IPR038109, PF07508,SSF53041,IPR011109,PTHR30461,PS51736, cd00338,PF00239
MQRAVIYARFSSDMQREESIDAQVRACKAYAKNKGYIVVDTYADEAKSGRDVTKRDAYNQMLADAMEDKFDIIIFHKIDRNSRNELNYFTFKDKLEKLGIRYEYAAQPIDALSPEGQMMETMMVGMAAYYSRNLAKETKKGLNENAYKALFNGGCPPLGYKIVDKKYVIDEQEAAAVRLIFDLYLNGYGYAAICRELSAKGYTTKAGKAFAKNSLHDILCNEKYIGTYTFNKIPRKKGGRNSHAAERPEDFISIENAFPAIISKDDWALVRAKMDRNRHRAASYTAKEKYLLSGKVFCGHCGSAMVGHRIRKRYCYYGCTRKEQTPTSKCPQKMIRAEVLEHWVLQILERVVFTVGGMRRIADAIVDAYEAEQKEQAGSQATLLQRKAVAEKKLNNLYKIFEEGNADEFDRQRLNQIKAELREINKSICETSVKPAKLLSKQKIAAILAAMKDEIFVKKNSYYVQQAVDLLVDHVTITDKMLKITLSTQNVCAYFVPRTQTQPIGYASLFFAAEKADIVNFHVMCRPTRERRKLL

SEQ ID NO: 2991 - protein, 535 aa, Unknown
  Description of Unknown: Integrase B2992 sequence
  PTHR30461:SF3,cd00338,SM00857,G3DSA:1.10.10.2600,IPR036162, PF13408,IPR025827,G3DSA:3.40.50.1390,PS51737,IPR006119, IPR038109,PF07508,SSF53041,IPR011109,PTHR30461, PS51736,Coil,PF00239
MKKKQPNTRHGRAAIYARYSSHNQREASIEQQVKACRKLAVRLGLDVVETYEDKAISGKSDRRPSFQRLLRDAEKGYFDCVLAWKSNRMGRNMLQAMTNEARLKDWGVRTFYAEEDFDDTAAGRFALRNMMNVNQFYSENMAEDITRGMMDNASKCLSNGALPLGYKAGENGRIVLDKAQAAVVQEIYTRVACREPFVDIAADLNRRGIKTKRGGPWTKSSFYTICRNERYRGIYIYDDVRVEGGVPRIVSDGLFYRVQEVLKVKKTPQSARHHTGAEDYLLTGKLFCGKCGRPMTGVSGTSRSGEMHYYYTCQKRRREHACDKKNVIREQIEKSVAQAIKQYMLTDEMIQHMADATMAYNARQEKDLHLQDLQGQLAAVKTSAANLLKAIEMGVITETTKARMVELEQEQGRLNAQIENARAELVPITRDNFVSLLHIYRDGDINDSKYLASLFETFLVRVDLYDDHFLIWFNPLGQKTPADIPITSIENGDADEFFDECMSKNVFDWGGKWSTKIKAPAVPRRVFLFWYSVSC

SEQ ID NO: 2992 - protein, 535 aa, Unknown
  Description of Unknown: Integrase B2993 sequence
  PTHR30461:SF3,SM00857,G3DSA:1.10.10.2600,IPR036162,PF13408, PS51737,IPR025827,G3DSA:3.40.50.1390,IPR006119,IPR038109, PF07508,IPR011109,SSF53041,PTHR30461,cd00338, PF00239
MPTSKNTARKYAAGGSSDNSCGVEPLRAVIYARYSSSGQREESIEGQLRDCYEFAKKHGIIVIGEYIDKAMTGRVDRRPDFQRMMKDSEKGRFNCVLLWKMDRFARNRYDSAMYKYKLKKNGIRIFYAKETIPDGPEGIILESVMEGYAEYYSENLAQNVKRGNYDSALELKTLGKTCLGLKTGPDGRYMIDQAEAAIVRRIFEEYAEGERAKDIYERLNSEGYRTSRGGKFNKNSLRRILSNKKYIGVYEYEDIYVENGIPAIITDRDLFERVQKMLKINHDAPARGKAQNFLLTTKLFCGLCGSPMIGDGGTSHTGKAYAYYSCTKRKRGRSCKKESVPKDWIEDLVVGELVKIVHNDELIEQIADRVMEYQKREKDQSGLHALEIRQKENEKAISNMLAAIEAGIITPSTKTRLMELEADRADIEKGIAHELLAEPEFERDQIIYFLERFRSGDINDEAYRIMLVDTFLNSVYLYDDDHLVLVMNYSGENCKVDLKLVEGAVSGDGCKGSAFAPSSALRCEKALRDQGFFVI

SEQ ID NO: 2993 - protein, 535 aa, Unknown
  Description of Unknown: Integrase B2994 sequence
  PTHR30461:SF3,SM00857,G3DSA:1.10.10.2600,IPR036162,PF13408, PS51737,G3DSA:3.40.50.1390,IPR025827,IPR006119,IPR038109, PF07508,IPR011109,SSF53041,PTHR30461,Coil, cd00338,PF00239
MARTATKHPAKPKRGKKLEAEEPGVLYGRYSSHNQKDISVEQQFEKGYGLAGEYGIRIVETYADRAVSGRTDKRKDFQRMMADAAKGKFRYVIAWKSNRMGRNMLEALVNEAKLQELGVRVLYVEEDFDDTAAGRFAARSMMNVNQFYSENMAEDIKRGLYDNASNCMVANGHLPYGYKRDDTLHYVIDEAKAAVIREIFVRVSCGEPLVDIYDSLNARGIKTSYGRPWGRSSFQKILSNERYRGIYIYGDVRKEGGIPRIVSDELYFKVQEVLKTKKNPQGRHRVNGDYLLTGKLFCGNCKSPMIGISGTGRTGKLHYYYVCQKKRSEKTCDKKNVRRDEVEYQIAKAIFDNALQDQVIEWIADSTIAYNDRKEAEGHIGILEDQLADVQRSLKNIMSAIEQGIVTETTKSRLLELESERSEIEGKIAAAKADIVPVNREQLIEWLLSLREGDIHDKKYQARLFDTFLIAAYLYDDGTAKLVFSFAGDKNTVTVPLAEAVDSVEENTAEGSFKLCLAPPKSALKSADFCFIRTF

SEQ ID NO: 2994 - protein, 535 aa, Unknown
  Description of Unknown: Integrase B2995 sequence
  PTHR30461:SF3,cd00338,SM00857,G3DSA:1.10.10.2600,IPR036162, PF13408,PS51737,G3DSA:3.40.50.1390,IPR025827,IPR006119, IPR038109,PF07508,IPR011109,SSF53041,PTHR30461, PS51736,Coil,PF00239
MKFPIDLSTLTKEEISQFEEDPFTLYNGDHDVALYLRYSSSGQSDQSIEGQLRDCRAFCKANHYRIVAIYIDRATTARKDVEKRIHLMEMIADSAKQRWDYVVVWKLDRFSRNRNDSAIMKMRLRKNGVKVLSATEHLSDNPESILLESVLEGMAEFFSAELSQKVTRGMRESALKCHSVGGHVPLGYKIENHKLVVNPDTAHIVQEAFALYANGVSVAEIARKFNAAGYKTAKNTEFNRSSFKVMFQNVRYIGTYTYKDIRIENGVPAIIDRELFDAVQRRLSKTATAPARGKAKVDYLLSGKLFCGHCGASMNGESGVGRSGKTYHYYSCYTKKRRLGCEKRPLRKDYIEEIVARSAFELLTDQLIDEIADMAIKQSEQDMVNETRIPQLTEQLSEIEKSIANITTAIEKGIASETLMNRLVQLEHEKKTINKEIKSEEKYVYRIDRDQIVFWLSQFKCGNIEDENFRRRLIDLLVNSVTVWDEPDGYKITTAYNLTSCKTKTFRVEKSPATENVTGFGFGESECANHRITAW

SEQ ID NO: 2995 - protein, 535 aa, Unknown
  Description of Unknown: Integrase B2996 sequence
  cd00338,SM00857,G3DSA:1.10.10.2600,IPR036162,PF13408, IPR025827,PS51737,G3DSA:3.40.50.1390,IPR006119,IPR038109, PF07508,IPR011109,SSF53041,PTHR30461,PS51736, Coil,PF00239
MVKAVIYCRVSTDDEIQINALDKQIEEAKEAVKQNGWILVDEYIDEGKTGTTTKTRDEYNRLVYDLELNKFDVIVIKSQDRLMRSTKDWYIFIDKLVQNKKKLFFYLENKFYSSDDALITGIKAILAEEYSRELSKKINNAHRNRQKNKGNLIITSKTWGYDNINKQVVINEHEAEIVKMIFDLYVEGFGIRTISNILTNNQIYSRTGKQFPDSTLRNIIRNPLYKGMPIMNRVHYNFDSKSSKLNDESEWIYKYDDTLRIIDDDTWNKANEIMDEKCRINKVAENKYKRIGVKNGISPLSGKIICGECGNVYWRRRYKRVSKQIIVWSCREYVMSGRKTPNYRSHPKNQVVDVGNDFGCDNIHIKDDDLNNVLIQCTKNIYTNKDKILIAAVDILNQVLNNNSTDDIDSLNNQIEEIKNKQEILLDKFLDGTIPEELYKKKNIDLQNKIDDLNQRIEEQKIQLCTKDYITDRVAHLKDEIEKIIDQDLSLQFVYEHIEKIIVHPAKLEIMFDVLPQMEVEVKKINYRRTEYICL

SEQ ID NO: 2996 - protein, 535 aa, Unknown
  Description of Unknown: Integrase B2997 sequence
  SM00857,G3DSA:1.10.10.2600,IPR036162,PF13408,IPR025827, G3DSA:3.40.50.1390,PS51737,IPR006119,IPR038109,PF07508, IPR011109,SSF53041,PTHR30461,Coil,PS51736, cd00338,PF00239
MAKPEVSELAVVYARYSSHSQGEQSIEGQLSNARDYAAAHGYTIVHEYVDRAKSGRTDNRAEFQQMLKDTAKRQFSVIILWKVDRFGRNREEIAINKMKCRKNGVRVEYVAETIPDSPEGVILESVLEGFAEYYSLQLSQNIRRGRAESAEKCQSLGGNRPLGYKTGADKKFVIDENTAPTVKMIFTMYADGKTVTEIVDKLNELGLRTLRGGPFTKNSLHSILKNKKYIGIYEYQGREVKDGVPRIIEDDVFNKVQEMLKINKRAPAKTWSRADYILTDKLFCGKCGALMFGESGTSKTGAKHNYYICSNKKRFRSCDKKAVRQADIEDTVLNATHELLQDDELLDYIVDRTWEYYLAQDNSQEELRNLQRQLAQTDTAISNLIRAIEAGILTEETKKRMDELTQQKADLKASIADREIARGFHLQKSHIAFYLRSLRDADWSDKEAQKRLIQTFVNAVFVYDDHITLTYNFSGDKNTITLRDMQRFEDGEEFGCRASRSTIKRVRKRCTRQKARFYRAFLLPKGRFSKFQNRR

SEQ ID NO: 2997 - protein, 535 aa, Unknown
  Description of Unknown: Integrase B2998 sequence
  PTHR30461:SF3,SM00857,G3DSA:1.10.10.2600,IPR036162,PF13408, IPR025827,G3DSA:3.40.50.1390,PS51737,IPR006119,IPR038109, PF07508,IPR011109,SSF53041,PTHR30461,Coil, PS51736,cd00338,PF00239
MEVQRIPKRTVSVIEPQTSILVDKEKYHQKRVAAYCRVSTDSEEQLTSYQNQMRVYTEMIAANKEWEFAGLYADEGISGTRADKRPEFQRMIRDCQNGKIDYIITKSVSRFARNTVECLEYVRSLKAQGIGIFFEEQNIDTLKNESELYLVIYAGFAQSESESISKHITWTYRKKFEEGKVSFQYKNFLGYRKGADNQPEIVPEEAAIVERIYEMFLAGQPVKMIAQTLQAEKIEIPGKNLSFSKNMIMNILRNEKYCGDCILQKTVTVDCISKTRKANQGEAPMYIVENNHPAIISREVFNRVQEELIRRQALRAKSDKTSITATGKYSKYALTEVLQCAECGSRYRRVTWTAHGRKKIVWRCISRLDYGTKHCKDSITVEEAALHGAVVRALRRFRAEDESTYLTLMKATIGEAIGINGGSEEIDLLTRRIDTLNKRMLDLVNETVAAGKDVESSEDEFKGISDQIEQLNRRIAAIQESIHKDGSRQARLEEIQSIIAERNANETQYDDSIVRQMIECIKVHNDGKLTIIFRV

SEQ ID NO: 2998 - protein, 535 aa, Unknown
  Description of Unknown: Integrase B2999 sequence
  PTHR30461:SF3,cd00338,SM00857,G3DSA:1.10.10.2600,IPR036162, PF13408,IPR025827,G3DSA:3.40.50.1390,PS51737,IPR006119, IPR038109,PF07508,SSF53041,IPR011109,PTHR30461, PS51736,Coil,PF00239
MAKRKKKSIDSSVGVCYARYSSHRQKDVSIEQQVTACQAHAAKRGITLIDSYEDRAVSGRSDKRPAFRRMMADAEKGAFAYVIAWKSNRIGRNMMEAMLNEARLSELGVKVLYVEEDFDNTAAGQFCLRTMMNVNQFYSDNMAEDIRRGMRDNALNCKINGRIPFGYKRGEDGKFCIDEPRAAVVREIYRRIASGESFASIADDLNARGIRTSRGRQWTRTSFCRLVSNEKYRGLYLYEDIRIEEGVPRIVSNELFDQVQHALKTKKNPRGGKRNSACTYLLTGRLFCGYCKSPMIGVCGTGRNGMHYYYACKQHRNEHTCAAKSVRKYELEQSVAQAIKTYVLVPEVIDAIADSAVAYAKKLEAESPVAVLEDQLANVQASIKNLLRAIESGILTETTKSRLLELEAEQAELTRQIRVAQSTLVKVDKPAVVAWLDSLRRGEVEDEKYIETLINTFVAAVYVYDDELKIIFTHSGGSTTVPPEAIKNADTANLDDSYPVRLCRQWWTFAAPGRTAIYMAFGLFILLCPYPSRQG

SEQ ID NO: 2999 - protein, 535 aa, Unknown
  Description of Unknown: Integrase B3000 sequence
  IPR036162,PS51737,PS01030,IPR011109,PTHR30461, PF00239,G3DSA:1.10.10.2600,PF14287,IPR006119,SSF53041, IPR025378,SM00857,IPR025827,cd03770,IPR038109, PS51736,IPR019761,PF13408,G3DSA:3.40.50.1390,PF07508,Coil
MLRQTTQKITALYPRLSHEDELQGESNSISNQKRILETYAKQNGFSNLRWYTDDGYSGANFQRPGFQSMLADIEAGKVATVIVKDMSRLGRNYLQVGMYTEMIFPQKGVRFIAINDGVDSAQGDNDFAPLRNIFNEWLVRDTSKKIKAVKRSKGMSGKPVTSKPVYGYLMDEDENFIIDEEAAPVVKQIYRLCLAGNGPTKIARMLTEQEIPTPGTLEYRRTGSTRRYHPGYECKWATNTVVHILENREYMGCLVNFKTEKPSYKTKHSIENPIEKQAVFENHHEPIIDTQTWERVQELRKQRKRPNRYDEVGLFSGMLFCADCGSVMYQQRYQTDKRKQDCYICGNYKKRTHDCTAHFIRTDLLTAGVLSNLRKVTSYAAKHEARFMKLLIEQNEDGGKRRNAAKKKELEAAEKRIGELSAIFKRLYEDSVSGRISDERFTELSADYEAEQQELKERVARIQAELSKAQEATVNAEKFMNIVRKHMNFEELTHTLLREFVEKIVVHECSYDENGTRRQDIEIYYSFVGKVDLPE

SEQ ID NO: 3000 - protein, 535 aa, Unknown
  Description of Unknown: Integrase B3001 sequence
  PTHR30461:SF3,cd00338,SM00857,G3DSA:1.10.10.2600,IPR036162, PF13408,PS51737,G3DSA:3.40.50.1390,IPR025827,IPR006119, IPR038109,PF07508,IPR011109,SSF53041,PTHR30461, PS51736,Coil,PF00239
MARKKNIAAGLDAVIYARYSSHNQREVSIEQQIAECTKHAAALGLRIVGTYEDRAISGKTDNRPRFQQMMRDAEKGKFQAVVAWKSNRIGRNMLQAMVNEAKLDDYGVKVFYAEEDFDDTAAGRFALRNMMNVNQFYSENMAEDITRGLYDNASKCMANGRQPLGYKRGEDGRVVLDEANAAVVREIFTRVAAGDLFVDIARDLNAQGIKTSKGANWNKGSFQSICQNERYRGIYIYGDVRVADGIPRIVSDDLWYRVQEAMRMKKNPVGTRHRVGAEDYLLTGKLRCGHCGSYMTGVSGTSRNGELHYYYTCQKRRTEHACDKKNIRRDVIEPAVAQAIKMYCLTDDVIAWIADRTVEYWEKHDNDLQIEALEQQLEENKKATSNMLKAIEMGIITEATRTRMVELETEQSRLSVQLNAAKEDVVKIDREQIISYLELLQQGDIHDRDFQMELFKNFLVAVYVYDDNRMKLVFSCMGDQNSVEIPLETGEDPPDGGLSPDAKMFVLTPDSSTRRKSTAQKRVVFFCCYRPKEKL

SEQ ID NO: 3001 - protein, 535 aa, Unknown
  Description of Unknown: Integrase B3002 sequence
  PTHR30461:SF3,SM00857,G3DSA:1.10.10.2600,IPR036162,PF13408, IPR025827,G3DSA:3.40.50.1390,PS51737,IPR006119,IPR038109, PF07508,IPR011109,SSF53041,PTHR30461,Coil, PS51736,cd00338,PF00239
MTAPFPKYNNEAAVIYARYSDGPDQTENSIEGQLRECHEFAARSGLLVVGEYIDRAISGRSADRPDFLRMIEDARKSFFSVVIVWKLDRFARNRFDSAIYRKKLKECGVRLLSAREPIGEGAESIILEGMLEAFAEYYSANLAENVKRGLRQRVLDGHFVGGSPPFGYSLQDGVLTLDEGKAEVMRWAFRAYADGRTKQEIAEAFNARGYRNARGQPFTCKSFVRTFANPAYIGKYRAAGMFLPCPAVIDEETFERVQRRIESNRRRGARNKAKVEYLLSGKLFCGHCGSAMTGLSGTSKGGTIYNYYACFGRRRKNGCKKKHERKDFIEWYVCEQALSYILDPSRLSEIARRVVAAYNADTDAAKARALEKKIAQRQRDIDRAAEALIFCPAGARASICQKIEELTALRDDAQADLNAMHRAARLKINEQQVIDWLRSFYGGDPADVGFQKILIDKLVNAVFLWDDRILIFYNVAGGREVSYIDALALSQQFDEQASLYSDASAPPVVPEFKFLSGFRLIAVLSLRGATKRGSP

SEQ ID NO: 3002 - protein, 535 aa, Unknown
  Description of Unknown: Integrase B3003 sequence
  IPR036162,PS51737,PS01030,IPR011109,PTHR30461, PF00239,G3DSA:1.10.10.2600,PF14287,IPR006119,SSF53041, IPR025378,SM00857,IPR025827,cd03770,IPR038109, PS51736,IPR019761,PF13408,G3DSA:3.40.50.1390,PF07508,Coil
MLRQTTQKITALYPRLSHEDELQGESNSISNQKRILETYAKQNGFSNLRWYTDDGYSGANFQRPGFQSMLADIEAGKVATVIVKDMSRLGRNYLQVGMYTEMIFPQKGVRFIAINDGVDSAQGDNDFAPLRNIFNEWLVRDTSKKIKAVKRSKGMSGKPVTSKPVYGYLMDEDENFIIDEEAAPVVKQIYRLCLAGNGPTKIARMLTEQEIPTPGTLEYRRTGSTRRYHPGYECKWATNTVVHILENREYMGCLVNFKTEKPSYKTKHSIENPIEKQAIFENHHEPIIDTQTWERVQELRKQRKRPNRYDEVGLFSGMLFCADCGSVMYQQRYQTDKRKQDCYICGNYKKRTHDCTAHFIRTDLLTAGVLSNLRKVTSYAAKHEARFMKLLIEQNEDGGKRRNAAKKKELEAAEKRIGELSAIFKRLYEDSVSGRISDERFTELSADYEAEQQELKERVARIQAELSKAQEATVNAEKFMNIVRKHMNFEELTHTLLREFVEKIVVHECSYDENGTRRQDIEIYYSFVGKVDLPE

SEQ ID NO: 3003 - protein, 535 aa, Unknown
  Description of Unknown: Integrase B3004 sequence
  PTHR30461:SF3,SM00857,G3DSA:1.10.10.2600,IPR036162,PF13408, PS51737,IPR025827,G3DSA:3.40.50.1390,IPR006119,IPR038109, PF07508,IPR011109,SSF53041,PTHR30461,cd00338, PF00239
MSTSKNTARKYAAGGGSDNSCGVEPLRAVIYARYSSSGQREESIEGQLRDCYEFAKKHGIIVIGEYIDKAMTGRVDRRPDFQRMMKDSEKGRFNCVLLWKMDRFARNRYDSAMYKYKLKKNGIRIFYAKETIPDGPEGIILESVMEGYAEYYSENLAQNVKRGNYDSALELKTLGKTCLGLKTGPDGRYMIDQAEATIVRRIFEEYAEGERAKDIYERLNSEGYRTSRGGKFNKNSLRRILSNKKYIGVYEYEDIYVENGIPAVITDRDLFERVQKMLKINHDAPARGKAQNFLLTTKLFCGLCGSPMIGDGGTSHTGKAYAYYSCTKRKRGRSCKKESVPKDWIEDLVVGELVKIVHNDELIEQIADRVMEYQKREKDQSGLHALEIRQKENEKAISNMLAAIEAGIITPSTKTRLMELEADRADIEKGIAHELLAEPEFERDQIIYFLERFRSGDINDEAYRIMLVDTFLNSVYLYDDDHLVLVMNYSGENCKVDLKLVEGAVSGDGCKGSAFAPSSALSLVGMSIYKAFLML

SEQ ID NO: 3004 - protein, 535 aa, Unknown
  Description of Unknown: Integrase B3005 sequence
  PTHR30461:SF3,SM00857,G3DSA:1.10.10.2600,IPR036162,PF13408, IPR025827,G3DSA:3.40.50.1390,PS51737,IPR006119,IPR038109, PF07508,SSF53041,IPR011109,PTHR30461,PS51736, cd00338,PF00239
MARAAKQDSNSEIIDGVIYARYSEGPNQTEASIEGQVRECKEYAKRNGIRIINVYSDSKHTGTNDNRAEFQKMLRDSRRGGFSVVVVWKIDRFGRNRAEMAQNKALLKLQGVKVVSAKEYIPDSPEGIILESVLEGMAEYYSANLSQNIKRGMKENALHCKSNGSGKSLGYIVDKDGYFEIEPNEATIVKTIFQKYDEGMKIADIWREIVASGAKTKRGKDFTQYGISRVLSNRAYIGEYRYGDIVTPGGMPRIIDDDLFNRVQERRALSKKAPASRRSNSDVDFLLTGKVFCGHCKGTMRGMSGTSKTGRKFYYYACHDKIFKHNKCTKKNVKKEWLETEVTRITRDDILNKETIEFIADRVVEIQRQEQEDKSMLHYYEQQLRDTQSAINNIMKAIEAGIITSSTKSRLFELEEQKSIIEGEIEREKIITPVIEKEQVIFSLERFFGGDINNKEYQRNIIDMFVNKVILYDDKIIITYNISSQNEISVDVVEQAAFAALDECSSKFSLAPPAGACPCTQFRFTLCKAVFYCRS

SEQ ID NO: 3005 - protein, 535 aa, Unknown
  Description of Unknown: Integrase B3006 sequence
  cd00338,SM00857,G3DSA:1.10.10.2600,IPR036162,PS51737, G3DSA:3.40.50.1390,IPR006119,IPR038109,PF07508,IPR011109, SSF53041,PTHR30461,PS51736,Coil,PF00239
MEKAYNAYLSEKINNSFGGYAIYLRKSRADAEAEARGEGETLARHEKMLLDLAEKMGIKIGKIYREIVSGETIEARPEIQKLLSDVKKGMWKGVLVVEVERLARGETMDQGIVAKAFKISDTKIITPMKTYDPNDEFDEEYFEFGLFMSRREYKTINRRLQRGRVSSVNEGKYVGSVAPYGYERVKIKGDKGYTLRKNSESNTVKIIYDLYAYEDLSLHEVVRRINEMGLKPRKNDKWCVASVKDILANPVYIGKVKWNWRKEVRVYKNEKLIKTRPRNDEYILKDGLHKAIIDDRTWKIVEAKRSLNKLPIPRVNTVQNPLCGLVYCAKCGKKMKRRPYTDRSKEPTIYCDNPKCDNISSKLHFVEEKVIEGLRKWLEHYQLDYKEHIEKINCSRIESIEDTIRSLQEEVKKENDKLLNIFNFLEDGTYTREMFKSRSESVSQNVARLNNSIEEYEARLEQEKIVDKEKAVLVPKIENLLDVYNLLKTPEEKNELLKTVITQVTYLKTEKAIKKDSDPTNFIINLYPKINKANV

SEQ ID NO: 3006 - protein, 535 aa, Unknown
  Description of Unknown: Integrase B3007 sequence
  PTHR30461:SF3,IPR036162,PS51737,IPR011109,PTHR30461, PF00239,G3DSA:1.10.10.2600,IPR006119,SSF53041,cd00338, SM00857,IPR025827,IPR038109,PS51736, mobidb-lite,PF13408,G3DSA:3.40.50.1390,PF07508,Coil
MAKKKKPAGGNAIIYARYSSHNQRDVSIEQQIEACRKHAAELGLTITDTYEDRAISGRTDNRPAFQRMMRDAEDGKFQYVLAWKSNRMGRNMMQAMVNESRLMDCGVKVFYAEEDFDDSAAGRFALRSMMNVNQFYSDNLAEDVRRGLMDNASKCMANGRQPLGYKRGEGGKVVVDEPAAAIVREIYTRIASGEMFMDIARDLNRRGIKTQSGSEWNKSSFKVLCRNERYRGIYIYGDTRIEGGIPPIVDDVLWYKVQEVLKVKKSKNRHHCPSDEDYLLTGKLRCGKCGGYMIGMSGRSKTGDVHHYYACQNRRVGHTCDKKNIRRDVVEPAVAQAIKQYCLTDDAIEWITDQTIAYWEDEDRKLQIDSIENDLSAVQSSISNVMKAIEMGVITETTRDRLIELERQQTDLKSKLALAKEEIVHVDRKDLISSLLAFRHGNVHDRAYQEKLFNAFLIAVYVYDDDHLKLVFNSFGKDDTVNIALDLGENDDNSGLSDVSKSSPILSNGQPEQSHLRKLRWLFCLYDSARKNYYR

SEQ ID NO: 3007 - protein, 535 aa, Unknown
  Description of Unknown: Integrase B3008 sequence
  PTHR30461:SF3,SM00857,G3DSA:1.10.10.2600,IPR036162,PF13408, IPR025827,PS51737,G3DSA:3.40.50.1390,IPR006119,IPR038109, PF07508,IPR011109,SSF53041,PTHR30461,cd00338, PF00239
MPTSKTAARKYAAGGGSDNSCGVEPLRAVIYARYSSSGQREESIEGQLRDCYEFAKKHGIIVIGEYIDKAMTGRVDRRPDFQRMMKDSEKGRFNCVLLWKMDRFARNRYDSAMYKYKLKKNGIRIFYAKETIPDGPEGIILESVMEGYAEYYSENLAQNVKRGNYDSALELKTLGKTCLGLKTGPDGRYMIDQAEAAIVRRIFEEYAEGERAKDIYERLNSEGYRTSRGGKFNKNSLRRILSNKKYIGVYEYEDIYVENGIPAIITDRDLFERVQKMLKINHDAPARGKAQNFLLTAKLFCGLCGSPMIGDGGTSHTGKAYAYYSCTKRKRGRSCKKESVPKDWIEDLVVGELVKIVHNDELIEQIADRVMEYQKREKDQSGLHALEIRQKENEKAISNMLAAIEAGIITPSTKTRLMELEADRADIEKGIAHELLAEPEFERDQIIYFLERFRSGDINDEAYRIMLVDTFLNSVYLYDDDHLVLVMNYSGENCKVDLKLVEGAVSGDGCKGSAFAPSSALRIREVLEIRLLSFL

SEQ ID NO: 3008 - protein, 535 aa, Unknown
  Description of Unknown: Integrase B3009 sequence
  PTHR30461:SF3,cd00338,SM00857,G3DSA:1.10.10.2600,IPR036162, PF13408,IPR025827,G3DSA:3.40.50.1390,PS51737,IPR006119, IPR038109,PF07508,IPR011109,SSF53041,PTHR30461, PS51736,Coil,PF00239
MSVDIKWQVPKAQPEANELAVVYARYSSHSQGEQSIEGQLSNARDYAAAHGYTIVHEYVDRAKSGRTDNRAEFQQMLKDTAKRQFSVIILWKVDRFGRNREEIAINKMKCRKNGVRVEYVAETIPDSPEGVILESVLEGFAEYYSLQLSQNIRRGRAESAEKCQSLGGNRPLGYKTGPDKKFVIDENTAPTVKMIFTMYADGKTVTEIVDKLNEMGLRTLRGGPFTKNSLHSILKNKKYIGVYEYQGREIKDGVPRIIEDDVFNKVQEMLKINKRAPAKTWSRADYILTDKLFCGKCGALMFGESGTSKTGVKHNYYICSNKKRFRSCDKKAVRQADIEDTVLNATHELLQDDELLDYIVDRTWEYYLAQDNSQEELRNLQRQLAQTDTAISNLIRAIEAGILTEETKKRMDELTQQKADLKASIADREIARGFHLQKSHIAFYLRSLRDADWSDKEAQKRLIQTFVNAVFVYDDHITLTYNFSGDKSTITLHDMQRFEDGEEFGCRASRSTKTHRYELFWFRNVFGLTRKLPQR

SEQ ID NO: 3009 - protein, 535 aa, Unknown
  Description of Unknown: Integrase B3010 sequence
  PTHR30461:SF3,SM00857,G3DSA:1.10.10.2600,IPR036162,PF13408, IPR025827,G3DSA:3.40.50.1390,PS51737,IPR006119,IPR038109, PF07508,SSF53041,IPR011109,PTHR30461,Coil, PS51736,cd00338,PF00239
MDSNQRIVRTIPASFTRTTSQVVRLLNVGAYARVSTKKEEQEDSYERQGSHYTKYIKSHDGWQFVDVYADEGITGTRAEKRKDFQRMMDDCRLGKLDKILVKSIARFARNTVDALNAIRELKELGVSVYFENENIDTLSPGGEVLLTILAAMAEQESRTISTNIKWAYQKKFQNGDIQLNYKRFLGYTRDENHNLIIVPEEATVVQRIFREYLYGYSCANIAAGLTKDKIPTPSNKTKWYASVIMSILQNEKYYGGLICGKTYKPDVLSKKRYKNEGQVERYYIENSHPAIISKEEFDLVQAEMRRRQTIRGFSETNQGRYSSKYAFSKRLICGECGAYYRRHAQYCKGEYIHTWVCPTHKIKGGTACSQTYLKEEEIEGAFLEMLKALVGDFKEISDTLKENIVSSLDDSIAEDINETLLQIEVRQTEMLELLREKRAGRISDQEYNERGMAIEKAIQELSERRVKLESKSNSAKLAMMRVEQITTALSDVGSLDKYNGEIFRSIVENVVVRNTYTLDFHLKVGIVESITITRK

SEQ ID NO: 3010 - protein, 535 aa, Unknown
  Description of Unknown: Integrase B3011 sequence
  PTHR30461:SF3,cd00338,SM00857,G3DSA:1.10.10.2600,IPR036162, PF13408,IPR025827,PS51737,G3DSA:3.40.50.1390,IPR006119, IPR038109,PF07508,IPR011109,SSF53041,PTHR30461, PS51736,Coil,PF00239
MSVDIKWQVPKAQPEANELAVVYARYSSHSQGEQSIEGQLSNARDYAAAHGYTIVHEYVDRAKSGRTDNRAEFQQMLKDTAKRQFSVIILWKVDRFGRNREEIAINKMKCRKNGVRVEYVAETIPDSPEGVILESVLEGFAEYYSLQLSQNIRRGRAESAEKCQSLGGNRPLGYKTGPDKKFVIDENTAPTVKMIFTMYADGKTVTEIVDKLNEMGLRTLRGGPFTKNSLHSILKNKKYIGIYEYQGHEIKDGVPRIIEDDVFNKVQEMLKINKRAPAKTWSRADYILTDKLFCGKCGALMFGESGTSKTGAKHNYYICSNKKRFRSCDKKAVRQADIEDTVLNATHELLQDDELLDYIVDRTWEYYLAQDNSQEELRNLQRQLAQTDTAISNLIRAIEAGILTEETKKRMDELTQQKADLKASIADREIARGFHLKKSHIAYYLRSLRDADWSDKETQKRLIQTFVNAVFVYDDHITLTYNFSGDKNTITLRDMQRFEDGEEFGCRASRSTKTHRYELFWFRNVFGLTRKLPQR

SEQ ID NO: 3011 - protein, 535 aa, Unknown
  Description of Unknown: Integrase B3012 sequence
  PTHR30461:SF3,SM00857,G3DSA:1.10.10.2600,IPR036162,PF13408, PS51737,G3DSA:3.40.50.1390,IPR025827,IPR006119,IPR038109, PF07508,IPR011109,SSF53041,PF00239,PTHR30461, PS51736,Coil,cd00338
MRVSVNLNAQKPDTTTNAVIYARYSSHGQTEQSIEGQLAKGHEYAAAQGYTVVHEYIDRAMTGRNDNREAFQKMLSDTGKHQFQVVIVWKVDRFGRNREEIAFNKHTCKKNGVRVEYVAESLPNSPEAVILESVLEGMAEYYSIQLSQNIRRGQLESAKKCQCVGGSVPLGYTLDSDKHFVIDPQTAPVVKKIFDLYAEGATISEITGQLNEQGIRTARKQLFTKNSLTKLLKNEKYIGVYTYKDIVRVEGGVPAIVDESTFDRVQELLKINRRAPSHTWTKVEYLLTDKLFCGHCGSPMVGESGFSHTGAKYSYYGCIKRRREKACDKKPVRQDWIEALVLDETVKLLHDDELMEYIIDRTWEYYQVTDKVQEEKAVLEAQLAEVDKAINNLVRAIEAGIFNAATKSRMDELDAQKAALTASLADLELTSGIRITRDHIEYFLLRLRDLDVKDRECQKRLVQTFVNAVFIYDDGRVKITYNYSGQSSTITLNQIASAEKGKGFVCCLPCSTSQEKSEPDSGWKRVRISLFRQEG

SEQ ID NO: 3012 - protein, 535 aa, Unknown
  Description of Unknown: Integrase B3013 sequence
  PTHR30461:SF3,SM00857,G3DSA:1.10.10.2600,IPR036162,PF13408, PS51737,IPR025827,G3DSA:3.40.50.1390,IPR006119,IPR038109, PF07508,IPR011109,SSF53041,PF00239,PTHR30461, PS51736,Coil,cd00338
MLPSNVKIIKPRAQVVIDEQPLIQYIRVAGYARVSTGKPEQKTSFESQQKHYKSLVARHPDWIDVGLYADEGITGTSIRKRKNFIRMIEDCRAGKIDKIIVKSVSRFARNTVDCLATIEELTALNVEVYFELQNLSSIKDSKTTKLQLTLFASMAQEESETLSESVSYGIRMGIESGRYRMPKAYGYYLDENKKLKIHPQEAEEVRFIFNAFLEGYTAAQICRVLNDRGVKPPKGKAWYDSTIVNMLRNEKYAGDLMLEKTMSRDLKSRKRIPNPGNKYFVGDNHEPIISKEMFERVQREFEYRQNLRGYGKKGKAQYTTKYAFSNKLFCGHCGAKYRRHCYDIKRKDGAGIDHIYTWVCINHKLNGKDACPITQVREETLQRAFVAALNSLVDDKEGFVATVIANINVILQTELSPINIEKLRDQYASKQKELQTLMAQSVTSHDAALVARYETLMVELEELKGRIEKAEESRVTASMHRERSEELQTFLAGKQPFEKFDDMIFRKLVQKAIIKEEEVTFVFSDYLERTVPIIK

SEQ ID NO: 3013 - protein, 535 aa, Unknown
  Description of Unknown: Integrase B3014 sequence
  PTHR30461:SF3,cd00338,SM00857,IPR036162,PF13408, PS51737,IPR025827,G3DSA:3.40.50.1390,IPR006119,PF07508, SSF53041,IPR011109,PTHR30461,PS51736,Coil, PF00239
MLTVFLSNGKGGSMIAIYTRQSIEKKDSLSIDAQVKACADYCKAQGWEYEIYTQDHGFSGKSLDRPGFQAMMSAVRSGQVNKIVCYKLDRISRSVSDFAQLLQELEQYKCDFISVTENFDTSSPIGRAMVYICMVFAQMERENIQERVKSNYYYRSGLGFWGGGPAPYGYQLKRQQIAGKVHTVLEPDPNEAPWVKKMYEWYLEPGGSAMKILRLLTENQVPTKRGYKWTSRVLMDVLSKPLYTQNSMDVYNYLTQSGAVISNPPEDFDGTLSVDLYGKKDSSQSKHKRCRKGSDMYCNISLHEAIIDSDTWLQVQYKILARPKIGGRTGTSKNSWFTGLMICGVCGRHVSFTHSARTAGYYICSSRKNCGWNSCSSKPASKKKFDPIIVKFIRDHYDSPKTKAAIQQAKLAAKTPQVSIERNNLQMELATINNQIDNLLTSLASGNAVMSKYINDKITELDAKRTPLQAKLLQFDATSSVNDELKRLERIEWAMEQLPLVYTEDTFDLSVQVSQALVNNIVFNSDGEVTISFAI

SEQ ID NO: 3014 - protein, 535 aa, Unknown
  Description of Unknown: Integrase B3015 sequence
  SM00857,G3DSA:1.10.10.2600,IPR036162,PF13408,IPR025827, G3DSA:3.40.50.1390,PS51737,IPR006119,IPR038109,PF07508, IPR011109,SSF53041,PTHR30461,Coil,PS51736, cd00338,PF00239
MARPEVSELAVVYARYSSHSQGEQSIEGQLSNARDYAAAHGYTIVHEYVDRAKSGRTDNRAEFQQMLKDTAKRQFSVIILWKVDRFGRNREEIAINKMKCRKNGVRVEYVAETIPDSPEGVILESVLEGFAEYYSLQLSQNIRRGRAESAEKCQSLGGNRPLGYKTGPDKKFVIDENTAPTVKMIFTMYADGKTVTEIVDKLNEMGLRTLRGGPFTKNSLHSILKNKKYIGIYEYQGCEIKDGVPRIIEDDVFNKVQEMLKINKRAPAKTWSRADYILTDKLFCGKCGALMFGESGTSKTGAKHNYYICSNKKRFRSCDKKAVRQADIEDTVLNATHELLQDDELLDYIVDRTWEYYLAQDNSQEELRNLQRQLAQTDTAISNLIRAIEAGILTEETKKRMDELTQQKADLKASIADREIARGFHLKKSHIAYYLRSLRDADWSDKEAQKRLIQTFVNAVFVYDDHITLTYNFSGDKSTVTLRDMQRFEDGEEFGCRASRSTMMWRQKMSPAKSPNISGFFAAQTAIFLCTKTQM

SEQ ID NO: 3015 - protein, 535 aa, Unknown
  Description of Unknown: Integrase B3016 sequence
  PTHR30461:SF3,cd00338,SM00857,G3DSA:1.10.10.2600,IPR036162, PS51737,G3DSA:3.40.50.1390,IPR006119,IPR038109,PF07508, IPR011109,SSF53041,PTHR30461,PS51736,Coil, PF00239
MFDNILDEYCIYLRKSRTDLEAEARGEGETLARHEKTLLELSRRLKISIKKIYREIVSGETIAERPVMQKVLSEVEDGIWKGVLVMEVERLARGDTSDQGTVAQSFKYSNTKIITPMKTYDPNDEYDEEYFEFGLFMSRREFKTINRRLQRGRMSSVNEGKYLGSIAPYGYARYKLVKEKGYSLEIIEEEAEVVKMIFDWYVNGKQMPDGTIEAMGTSLIAHELNILQIPSAKGGLWVTETINTIIRNPVYMGKIKWGSRPLKKKKVDGKIVKTRPRMSIDQMILIPGRHEAIVTEALWIKANEKLALNPSKPISPRKKISNPLASIMICGKCNRRLIRRPYPNRNDTLMCPVKECKNVSSELILVESRIMEGLKNWLASYKADWENRRVEKKEDTQVDLLGKAIKKIEKDIADLQTQLDNLHDLLEQKVYTVEKFLDRSQIISEKIKNKVLDKESLLNKLNDNESQITNKEIVIPKLEHVLDIYYKTDDPALKNELLQSVIEKVVYTKEKGARWHGSLDDFEIKIFPKLPRTHH

SEQ ID NO: 3016 - protein, 535 aa, Unknown
  Description of Unknown: Integrase B3017 sequence
  PTHR30461:SF3,cd00338,SM00857,IPR036162,PF13408, IPR025827,G3DSA:3.40.50.1390,PS51737,IPR006119,PF07508, IPR011109,SSF53041,PTHR30461,PS51736,Coil, PF00239
MLTVFLSNGKGDSMIAIYTRQSIEKKDSLSIDAQVKACADYCKAQGWEYEIYTQDHGFSGKSLDRPGFQAMMSAVRSGQVDKIVCYKLDRISRSVSDFAQLLQDLEQYKCDFISVTENFDTSSPIGRAMVYICMVFAQMERENIQERVKSNYYYRSGLGFWGGGPAPYGYQLKRQQIAGKVHTVLEPDPNEAPWVKKMYEWYLEPGGSAMKILRLLTENQVPTKRGYKWTSRVLMDVLSKPLYTQNSMDVYNYLTQSGAVISNPPEDFDGTLSVDLYGKKDSSQSKHKRCRKGSDMYCNISLHEAIIDSDTWLQVQYKILARPKIGGRTGTSKNSWFTGLMICGVCGRHVSFTHSARTAGYYICSSRKNCGWNSCSSKPASKKKFDPIIVKFIRDHYDSPKTKAAIQQAKLAAKTPQVSIERNNLQMELATINNQIDNLLTSLASGNAVMSKYINDKITELDAKRTPLQARLLQFDATSSVNDELKRLERIEWAMEQLPLVYTEDTFDLSVQVSQALVNNIVFNSDGEVTISFAI

SEQ ID NO: 3017 - protein, 535 aa, Unknown
  Description of Unknown: Integrase B3018 sequence
  PTHR30461:SF3,cd00338,SM00857,G3DSA:1.10.10.2600,IPR036162, PF13408,IPR025827,G3DSA:3.40.50.1390,PS51737,IPR006119, IPR038109,PF07508,IPR011109,SSF53041,PTHR30461, PS51736,Coil,PF00239
MKKKQPNTRHGRAAIYARYSSHNQREASIEQQVKACRELAVRLGLDVVETYEDKAISGKSDRRPSFQRLLRDAEKGYFDCVLAWKSNRMGRNMLQAMTNEARLKDWGVRTFYAEEDFDDTAAGRFALRNMMNVNQFYSENMAEDITRGMMDNASKCLSNGALPLGYKAGENGRIVLDKAQAAVVQEIYTRVACREPFVDIAADLNRRGIKTKRGGPWTKSSFYTICRNERYRGIYIYDDVRVEGGVPRIVSDGLFYRVQEVLKVKKTPQSARHHTGAEDYLLTGKLFCGKCGRPMTGVSGTSRSGEMHYYYTCQKRRREHACDKKNVIREQIEKSVAQAIKQYMLTDEMIQHMADATMAYNARQEKDLHLQDLQGQLAAVKTSAANLLKAIEMGVITETTKARMVELEQEQGRLNAQIENARAELVPITRDNFVSLLHIYRDGDINDSKYLASLFETFLVRVDLYDDHFLIWFNPLGQKTPADIPITSIENGDADEFFDECRSKNVFDWGGKWSTKIKAPAVPRRVFLFWCSVSC

SEQ ID NO: 3018 - protein, 535 aa, Unknown
  Description of Unknown: Integrase B3019 sequence
  PTHR30461:SF3,IPR036162,PS51737,IPR011109,PTHR30461, PF00239,G3DSA:1.10.10.2600,IPR006119,PF14287,SSF53041, IPR025378,SM00857,IPR025827,cd03770,IPR038109, PS51736,PF13408,G3DSA:3.40.50.1390,PF07508,Coil
MRIQNIHRVGIYLRLSRDDGNSNAESMSIVTQKRMLTDYVKERGWDLTETYIDDGYSGTTFDRPAFQRMLKDIERGHIDCVITKDLSRLGRNYAKTGYYTEEYFLEHGVRYIAVNDNVDTMKDDNDIAPFKNILNEMYAKDISRKVRAARAVNAKQGKFLGSKPPFGYTRCPTDKHKLIIDEKPAQIIARMFEMFASGDSGRHISDIFNKEGIPSPRAYFYQQAGRENPLNESMTWNSNTVMQLLKNQVYIGNMVQGKRRVTSFKTKSRAVVPEEDWIVVENTHDAIIGKDLWAKVQKKIATGKSPHVTKSGEISLFAGIARCADCGAAMTFNTKQYDGKTYYIYKCSRYAVHGKSSCSIHHVPASALEEAVLQNIRFNAQLLSENDEELLGKLIELGARGQQREIREAETKLNESVKRLEVVEGMAQKLFEERCTGNVPDSVFKKLMQNYDVEQANLNQIIAEKRNVLMEMENAAIDISAWAEEFKQYTNIDKLDRRIVTTLIDSVEVHESTKENGVVRQHITVNYKFVGQLNA

SEQ ID NO: 3019 - protein, 534 aa, Unknown
  Description of Unknown: Integrase B3020 sequence
  PTHR30461:SF3,cd00338,SM00857,G3DSA:1.10.10.2600,IPR036162, PF13408,IPR025827,G3DSA:3.40.50.1390,PS51737,IPR006119, IPR038109,PF07508,SSF53041,IPR011109,PTHR30461, PS51736,Coil,PF00239
MARKKNTAAGLDAVIYARYSSHNQREVSIEQQVSECMKHAADLGLHIIGTYEDRAISGKTDKRPRFQMMMRDAEKGKFQAVVAWKSNRMGRNMLQAMVNEAKLEDHGVKVFYAEEDFDDTAAGRFALRNMMNVNQFYSENMAEDISRGLYDNASKCMANGKQPLGYKRGEDGRVVLDEANAVVVREIYARVAAGELFVDIARDLNARGVKTNTGGVWNKGSFRSICENERYKGIYIYGDVRVVDGIPRIVSDDLWYKVQEAMKMKKNPVGARHRTGAEDYLLTGKLRCGHCGSYMTGISGTSRNGELHYYYTCQKRRAEHACDKKAVRRDVIEPAIAQAIKMYCLTDEVIEWVADRTVEYWERHDNNLHIEALEQQLDENKKATSNMLKAIEMGIITDATRSRMIELETEQSKLTVQLNAAKEDVVKVDRDEIASYLELLRQGDVNNRDFQMELFKNFLVAAYLYDDNRLKLVFSFAGKESSVEIPLETGEDPPDDASSENAKMFVLTPQCSTRTKAPHGNVWCFFVAAKRVRV

SEQ ID NO: 3020 - protein, 534 aa, Unknown
  Description of Unknown: Integrase B3021 sequence
  PTHR30461:SF3,cd00338,SM00857,G3DSA:1.10.10.2600,IPR036162, PF13408,IPR025827,G3DSA:3.40.50.1390,PS51737,IPR006119, IPR038109,PF07508,IPR011109,SSF53041,PTHR30461, PS51736,Coil,PF00239
MARKKNIAAGLDAVIYARYSSHNQREVSIEQQVAECTKHAAALGLRIVGTYEDRAISGKTDNRPRFQQMMRDAEKGKFQAVVAWKSNRIGRNMLQAMVNEAKLDDYGVKVFYAEEDFDDTAAGRFALRNMMNVNQFYSENMAEDITRGLYDNANKCMANGRQPLGYKRGADGKAMLDEPAAAVVREIFTRVAAGDLFVDIARDLNAKGIKTSKGAAWNKGSFQSICQNERYKGIYIYGDVRIVDGIPRIVSDELWYRVQEAMRMKKNPVGTRHRVGAEDYLLTGKLRCGHCGSYMTGVSGTSRNGELHYYYTCQKRRTEHACNKKNVRRDIIEPAIAQAIKMYCLTDDVIEWMADQTVQYWEKHDNDLQIEALEQQLAENKKATSNMLKAIEMGIITEATRSRMVELETENSKLTAQLSAAKRDVVKINREDLIDELHVLRSKDIHDREVQAELFKDFLVAAYIYDDNRLKLVFSFMGKDNSVEIPLETGEDPPDGEDSPDAKMFVLTPDCSTRTKAPHGNVWCFFVAAKRVRV

SEQ ID NO: 3021 - protein, 534 aa, Unknown
  Description of Unknown: Integrase B3022 sequence
  PTHR30461:SF3,IPR036162,PS51737,IPR011109,PTHR30461, PF00239,G3DSA:1.10.10.2600,IPR006119,SSF53041,cd00338, SM00857,IPR025827,IPR038109,PS51736,mobidb-lite, PF13408,G3DSA:3.40.50.1390,PF07508,Coil
MRKKSNLNAATRAVIYARYSSANQRDCSIEQQVAKCRELAARLGLTVIDVYEDRAISGKTDRRPNFQRMMKDADLRQFDVVLAWKSNRMGRNMLQAMTNEERLRDNGIRTVYAEEDFDDTAAGRFALRNMMNVNQFYSENMAEDITRGLMDNAAKCLSNGSLPLGYKPGDDRHVVLDEAEAAIVQEIFTRVSCYEPFIDIARDLNRRGIKTKKGSEWGRSSFHTICRNERYRGIYIYRDVRIEGGMPRIVSDELFYKVQEVLKVKKNPQGRRKRSGYEEYLLTGKLFCGHCGSPMTGIAGTSKTGAMHYYYTCQKRRTDHSCDKKAVRRDQIERAVGVAIQQQLLTDENIQMMADKLMEYNARTETKYRLQGLQDQLNANKTATANILKAIEMGIITDATKARLLELEKEQGQLLVKIDEAKAEMVPISRNDFVKLLYIYKEGEPTDKKYLAALFDNFLVRVDLYDDHLKITFDPTGGRQPIDIPIGAEESPESPGDSSESSDFEASSQDAEKFVLALHNCTKILERLFGDFLF

SEQ ID NO: 3022 - protein, 534 aa, Unknown
  Description of Unknown: Integrase B3023 sequence
  PTHR30461:SF3,cd00338,SM00857,G3DSA:1.10.10.2600,IPR036162, PF13408,PS51737,G3DSA:3.40.50.1390,IPR025827,IPR006119, IPR038109,PF07508,IPR011109,SSF53041,PTHR30461, PS51736,Coil,PF00239
MARKKNIAAGLDAVIYARYSSHNQREVSIEQQIAECTKHAAALGLRIVGTYEDRAISGKTDNRPRFQQMMRDAEKGKFQAVVAWKSNRIGRNMLQAMVNEAKLDDYGVKVFYAEEDFDDTAAGRFALRNMMNVNQFYSENMAEDITRGLYDNASKCMANGRQPLGYKRGEDGRVVLDEANAAVVREIFTRVAAGDLFVDIARDLNAQGIKTSKGANWNKGSFQSICQNERYRGIYIYGDVRVADGIPRIVSDDLWYRVQEAMRMKKNPVGTRHRVGAEDYLLTGKLRCGHCGSYMTGVSGTSRNGELHYYYTCQKRRTEHACDKKNIRRDVIEPAVAQAIKMYCLTDDVIAWIADRTVEYWEKHDNDLQIEALEQQLEENKKATSNMLKAIEMGIITEATRTRMVELETEQSRLSVQLNAAKEDVVKIDREQIISYLELLQQGDIHDRDFQMELFKNFLVAVYVYDDNRMKLVFSCMGDQNSVEIPLETGEDPPDGGLSLDAKMFVLTPDSSTRSERHHTLCGAFFVVAKRVRA

SEQ ID NO: 3023 - protein, 534 aa, Unknown
  Description of Unknown: Integrase B3024 sequence
  PTHR30461:SF3,cd00338,SM00857,G3DSA:1.10.10.2600,IPR036162, PF13408,PS51737,IPR025827,G3DSA:3.40.50.1390,IPR006119, IPR038109,PF07508,SSF53041,IPR011109,PTHR30461, PS51736,Coil,PF00239
MARKKNIAAGLDAVIYARYSSHNQREVSIEQQIAECTKHAAALGLRIVGTYEDRAISGKTDNRPRFQQMMRDAEKGKFQAVVAWKSNRIGRNMLQAMVNEAKLDDYGVKVFYAEEDFDDTAAGRFALRNMMNVNQFYSENMAEDITRGLYDNANKCMANGRQPLGYKRGADGKVMLDEPAAAVVREIFTRVAAGDLFVDIARDLNAKGIKTSKGAAWNKGSFQSICQNERYKGIYIYGNVRIVDGIPRIVSDELWYRVQEAMRMKKNPVGTRHRVGAEDYLLTGKLRCGHCGSYMTGVSGTSRNGELHYYYTCQKRRTEHACNKKNVRRDVIEPAIAQAIKMYCLTDDVIEWMANQTVQYWEKHDNDLQIEALEQQLAENKKATSNMLKAIEMGIITEATRSRMVELETENSKLTAQLSAAKRDVVKINREDLIDELHILRSKDIHDRDVQAELFKDFLVAAYIYDDNRLKLVFSFMGKDNSVEIPLETGEDPPDGKNSPDAKMFVLTPDCSTKKALYFVGSMVLFFLLSWRSH

SEQ ID NO: 3024 - protein, 534 aa, Unknown
  Description of Unknown: Integrase B3025 sequence
  cd00338,SM00857,G3DSA:1.10.10.2600,IPR036162,PF13408, IPR025827,G3DSA:3.40.50.1390,PS51737,IPR006119,IPR038109, PF07508,IPR011109,SSF53041,PTHR30461,PS51736, Coil,PF00239
MKAVIYARYSCDNQREESIEGQLRECKAFAERKGFKLVGTYIDRAMSAKTDNRPEFQRMIKESANELFDVVIVWKLDRFARNRYDSAHYKATLRKNGVKVISATEVISEGAEGIILESVLEGYAEYYSAELSEKVIRGMTDNALKCQYNGGSLTIGYTIDENKHYQLDTLVAPFIKEAFEMYSSGKMVKDIVKYLNDNGVRSGKGKPITKTSATSMLSNVKYKGQYKYRDIIIDDGVPRIVSDALFNKVQERLKKNKYSRSRFKAKIEYFLSTKLICGYCGEFMIGESGTSRQQIKYNYYKCTGVKRHKGCHKKTVRKADIEEIVLNDVMDKMFKEDLINDIADSVMRLQEKENTTIPLMQKQLAEIHQSINNLVKAMEMGIVSRETKQRFEELEAQRTELETDIIKQEIQEEIITREQVVEWLKEMKRLDLSLDDSKRKLVDTFVNSVYLYDDKVVIIFNCREGASTLALPLDDTSACMRIGEPKQKHTNRFDNMRLYGNQKASRITSRRFYFSLNKKSPALNREREKIFTSP

SEQ ID NO: 3025 - protein, 534 aa, Unknown
  Description of Unknown: Integrase B3026 sequence
  PTHR30461:SF3,IPR036162,PS51737,IPR011109,PTHR30461, PF00239,G3DSA:1.10.10.2600,IPR006119,SSF53041,cd00338, SM00857,IPR025827,IPR038109,PS51736,mobidb-lite, PF13408,G3DSA:3.40.50.1390,PF07508,Coil
MKKRINTNSAARAVIYARYSSANQRDCSIEQQVEKCRELAAREGVTVIEIYADRAISGKTDRRPNFQRMMKDASLRQFDVVLAWKSNRMGRNMLQAMMNEEQLRSNGIRTIYAEEDFDDTAAGRFALRNMMNVNQFYSENMAEDISRGLMDNASKCMSNGSLPLGYKTGKDQKVVLDEAEAAIVQEIFTRVSCYEPFIDIARDLNRRGIKTKKGAEWGRSSFHTICRNERYRGIYIYRDIRVEGGMPRIVSDELFYKVQEVLKVKKNPQGRRKRSGYEEYLLTGKLYCGHCGSPMTGIAGTSKTGAMHYYYTCQKRRTDHSCDKKAVRRDQIEKAVAIAIQQQLLTDENIQMMADETMAYNARTEIKYRLQSLQQQLYSNETSTANIMKAIEMGIITDTTKARLLALEQEHGQLLAKIDTAKAEMVPINREDFVSLLDIYRTGDVNNKKYLAALFDTFLVRVDLYDDHFKITFDPTGGKMPVDIPIGAEDSPESPGDSPESSDFEASPQDAEKFVLALHNRTKILERLFGDFLF

SEQ ID NO: 3026 - protein, 534 aa, Unknown
  Description of Unknown: Integrase B3027 sequence
  PTHR30461:SF3,IPR036162,PS51737,IPR011109,PTHR30461, PF00239,G3DSA:1.10.10.2600,IPR006119,SSF53041,cd00338, SM00857,IPR025827,IPR038109,mobidb-lite,PS51736, PF13408,G3DSA:3.40.50.1390,PF07508,Coil
MKKRINTNSAARAVIYARYSSANQRDCSIEQQVAKCRELAAREGVTVIEIYADRAVSGKTDRRPNFQRMMKDASLRQFDVVLAWKSNRMGRNMLQAMMNEEQLRSNGIRTIYAEEDFDDTAAGRFALRNMMNVNQFYSENMAEDISRGLMDNASKCMSNGSLPLGYKTGKDQKVVLDEAEAAIVQEIFTRVSCYEPFIDIARDLNRRGIKTKKGAEWGRSSFHTICRNERYRGIYIYRDIRVEGGMPRIVSDELFYKVQEVLKVKKNPQGRRKRSGYEEYLLTGKLYCGHCGSTMTGIAGTSKTGAMHYYYTCQKRRTDHSCDKKAVRRDQIEKAVAIAIQQQLLTDENIQMMADETMAYNARTEIKYRLQSLQQQLYSNETSTANIMKAIEMGIITDTTKARLLALEQEHGQLLAKIDTAKAEMVPINREDFVSLLDIYRTGDVNNKKYLAALFDTFLVRVDLYDDHFKITFDPTGGKMPVDIPIGAEDSPESPGDSPESSDFEASPQDAEKFVLALHNRTKILERLFGDFLF

SEQ ID NO: 3027 - protein, 534 aa, Unknown
  Description of Unknown: Integrase B3028 sequence
  PTHR30461:SF3,IPR036162,PS51737,IPR011109,PTHR30461, PF00239,G3DSA:1.10.10.2600,IPR006119,SSF53041,cd00338, SM00857,IPR025827,IPR038109,mobidb-lite,PS51736, PF13408,G3DSA:3.40.50.1390,PF07508,Coil
MRKKSNLNAATRAVIYARYSSANQRDCSIEQQVAKCRELAARLGLTVIDVYEDRAISGKTDRRPNFQRMMKDADLRQFDVVLAWKSNRMGRNMLQAMTNEERLRDNGIRTVYAEEDFDDTAAGRFALRNMMNVNQFYSENMAEDITRGLMDNAAKCLSNGSLPLGYKPGDDRHVVLDEAEAAIVQEIFTRVSCYEPFIDIARDLNRRGIKTKKGSEWGRSSFHTICRNERYRGIYIYRDVRIEGGMPRIVSDELFYKVQEVLKVKKNPQGRRKRSGYEEYLLTGKLFCGHCGSPMTGIAGTSKTGAMHYYYTCQKRRTDHSCDKKAVRRDQIERAVGVAIQQQLLTDENIQMMADKLMEYNARTETKYRLQGLQDQLNANKTATANILKAIEMGIITDATKARLLELEKEQGQLLVKIDEAKAEMVPISRNDFVKLLYIYKEGEPTDKKYLAALFDNFLVRVDLYDDHLKITFDPTGGRQPMDMPIGAEESPESPGDSSESSNFEASSQDAEKFVLALHNCTKILEHLFGDFLF

SEQ ID NO: 3028 - protein, 534 aa, Unknown
  Description of Unknown: Integrase B3029 sequence
  PTHR30461:SF3,cd00338,SM00857,G3DSA:1.10.10.2600,IPR036162, PF13408,PS51737,G3DSA:3.40.50.1390,IPR025827,IPR006119, IPR038109,PF07508,IPR011109,SSF53041,PTHR30461, PS51736,Coil,PF00239
MARKKNIAAGQNAVIYARYSSHNQREVSIEQQVRECMKHAAELGLHVVGTYEDRAISGKTDKRPNFQRMMRDAEKGKFQAVVAWKSNRIGRNMLQAMVNEAKLEDCGVKVFYAEEDFDDTAAGRFALRNMMNVNQFYSENMAEDITRGLYDNASKCMANGRQPLGYKRGEDGRVVLDEANAAVVREIFTRVAAGDLFVDIARDLNAQGIKTSKGANWNKGSFQSICQNERYRGIYIYGDVRVADGIPRIVSDDLWYRVQEAMRMKKNPVGTRHRVGAEDYLLTGKLRCGHCGSYMTGVSGTSRNGELHYYYTCQKRRTEHACDKKNIRRDVIEPAVAQAIKMYCLTDDVIEWMADRTVEYWKKHDNDLQIEALEQQLEENKKATSNMLKAIEMGIITEATRTRMVELETEQSRLSVQLNAAKEDVVKIDREQIISYLELLQQGDIHDRDFQMELFKNFLVAVYVYDDNRMKLVFSCMGDQNSVEIPLETGEDPPDGGLSPDAKMFVLTPDSSTRPERHHTLCGAFFVVAKRVRA

SEQ ID NO: 3029 - protein, 534 aa, Unknown
  Description of Unknown: Integrase B3030 sequence
  PTHR30461:SF3,IPR036162,PS51737,IPR011109,PTHR30461, PF00239,G3DSA:1.10.10.2600,IPR006119,SSF53041,cd00338, SM00857,IPR025827,IPR038109,PS51736,mobidb-lite, PF13408,G3DSA:3.40.50.1390,PF07508,Coil
MKKRINTNSAARAVIYARYSSANQRDCSIEQQVEKCRELAAREGVTVIEIYADRAVSGKTDRRPNFQRMMKDASLRQFDVVLAWKSNRMGRNMLQAMMNEEQLRSNGIRTIYAEEDFDDTAAGRFALRNMMNVNQFYSENMAEDISRGLMDNASKCMSNGSLPLGYKTGKDQKVVLDEAEAAIVQEIFTRVSCYEPFIDIARDLNRRGIKTKKGAEWGRSSFHTICRNERYRGIYIYRDIRVEGGMPRIVSDELFYKVQEVLKVKKNPQGRRKRSGYEEYLLTGKLYCGHCGSTMTGIAGTSKTGAMHYYYTCQKRRTDHSCDKKAVRRDQIEKAVAIAIQQQLLTDENIQMMADETMAYNARTEIKYRLQSLQQQLYSNETSTANIMKAIEMGIITDTTKARLLALEQEHGQLLAKIDTAKAEMVPINREDFVSLLDIYRTGDVNNKKYLAALFDTFLVRVDLYDDHFKITFDPTGGKMPVDIPIGAEDSPESPGDSPESSDFEASPQDAEKFVLALHNRTKILERLFGDFLF

SEQ ID NO: 3030 - protein, 534 aa, Unknown
  Description of Unknown: Integrase B3031 sequence
  SM00857,G3DSA:1.10.10.2600,IPR036162,PF13408,IPR025827, G3DSA:3.40.50.1390,PS51737,PS51736,IPR006119,IPR038109, PF07508,IPR011109,SSF53041,PTHR30461,Coil, mobidb-lite,cd00338,PF00239
MEKLDTRPVADILARYSTDNQNPVTIDVQVEKCREWCERNGYQVGKIFSDEAVSGMKETRAGYEACMMHLGMGGAQLVVVYDQSRMFREFTEWFQFRKDVDMLGARVASVTQPMVGGDLKDPAVFINEAATAMLNHAQVLITRQKTIDALKHNAREGKSSGGKPPLGYDLDKDKKYVVNEHEAEAVRLVFQLFARGFSYGEIIDELNSRGYLTKRGQPFGKNSIFDLLKNEKYIGRLVYGATKAQADGRWNSHAKSKEDAIVVENGVPAIIEQELWEQVQSRIRTRKGAGGRYSAKREYLLTGRVFCGDCGASMVVMGSKASGYQYYECNNKRRTHTCKMKNVRTEWLEQTVAASIKQMLTEPANIEMLVDVARDQARQITTEYDTRRAGLASRYTRVCRQLENGVNALLEGVVSAELKEKVRRLEEEKAEIEAETAELNQYKGYVGLDDATIRRCVENVAKVDIDTPEGLKLILSVVSRVNIHTDTIEIKTLISTDGTDPDPTKSRPQNLELFPSEGLSGEKYHTTPENGSGA

SEQ ID NO: 3031 - protein, 534 aa, Unknown
  Description of Unknown: Integrase B3032 sequence
  PTHR30461:SF3,cd00338,SM00857,G3DSA:1.10.10.2600,IPR036162, PF13408,PS51737,IPR025827,G3DSA:3.40.50.1390,IPR006119, IPR038109,PF07508,IPR011109,SSF53041,PTHR30461, PS51736,Coil,PF00239
MARKKNIAAGQNAVIYARYSSHNQREVSIEQQVRECMKHAAELGLHVVGTYEDRAISGKTDKRPNFQRMMRDAEKGKFQAVVSWKSNRIGRNMLQAMVNEAKLDDYGVKVFYAEEDFDDTAAGRFALRNMMNVNQFYSENMAEDITRGLYDNASKCMANGRQPLGYKRGEDGRVVLDEANAAVVREIFTRVAAGDLFVDIARDLNAQGIKTSKGANWNKGSFQSICQNERYRGIYIYGDVRVADGIPRIVSDDLWYRVQEAMRMKKNPVGTRHRVGAEDYLLTGKLRCGHCGSYMTGVSGTSRNGELHYYYTCQKRRTEHACDKKNIRRDVIEPAVAQAIKMYCLTDDVIAWIADRTVEYWEKHDNDLQIEALEQQLEENKKATSNMLKAIEMGIITEATRTRMVELETEQSRLSVQLNAAKEDVVKIDREQIISYLELLQQGDIHDRDFQMELFKNFLVAVYVYDDNRMKLVFSCMGDQNSVEIPLETGEDPPDGGLSLDAKMFVLTPDSSTRTKALHGNVWCFFVAAKRVRV

SEQ ID NO: 3032 - protein, 534 aa, Unknown
  Description of Unknown: Integrase B3033 sequence
  PTHR30461:SF3,cd00338,SM00857,G3DSA:1.10.10.2600,IPR036162, PF13408,PS51737,G3DSA:3.40.50.1390,IPR025827,IPR006119, IPR038109,PF07508,SSF53041,IPR011109,PTHR30461, PS51736,Coil,PF00239
MARKKNIAAGLDAVIYARYSSHNQREVSIEQQIAECTKHAAALGLRIVGTYEDRAISGKTDNRPRFQQMMRDAEKGKFQAVVAWKSNRIGRNMLQAMVNEAKLDDYGVKVFYAEEDFDDTAAGRFALRNMMNVNQFYSENMAEDITRGLYDNANKCMANGRQPLGYKRGADGKVMLDEPAAAVVREIFTRVAAGDLFVDIARDLNAKGIKTSKGATWNKGSFQSICQNERYKGIYIYGNVRIVDGIPRIVSDELWYKVQEAMRMKKNPVGTRHRVGAEDYLLTGKLRCGHCGSYMTGVSGTSRNGELHYYYTCQKRRTEHACNKKNVRRDVIEPAIAQAIKMYCLTDDVIEWVANRTVEYWEKHDNDLHIEALEQQLEENKKATSNMLKAIEMGIITDATRSRMIELETEQSKLAVQLNAAKADVVKIDRDDLIDELQIFRDMDVNNRSVQAELFKDFLVAAYIYDDNRLKLVFSFMGKDNSIEIPLETGEDPPDGEDSPDAKMFVLTPDCSTRAKALHRNVWCFFVDAKRVRV

SEQ ID NO: 3033 - protein, 534 aa, Unknown
  Description of Unknown: Integrase B3034 sequence
  PTHR30461:SF3,cd00338,SM00857,G3DSA:1.10.10.2600,IPR036162, PF13408,PS51737,IPR025827,G3DSA:3.40.50.1390,IPR006119, IPR038109,PF07508,SSF53041,IPR011109,PTHR30461, PS51736,Coil,PF00239
MATAVRTIPATLNKFNSKPVSAIQKRRVAGYARVSTDFAEQATSYEAQMQYYKAYIQSKPDWIFVDMYSDEGISATTTKHRDGFKRMIDDAMNGKIDLIITKSVSRFARNTVDSLSNVRMLKEKGVEVYFEKENIWTLDAKGELLITIMSSLAQEESRSISENTTWGARKRFADGKASVAYTHFLGYDKDFKINEKEAEVVRYIYKRFISGISCYAIGNELESKGILSPYGLPKWWTSTIISILKNEKYKGDALLQKSYSVDFLQKVRKANNGEVPQYYVENHHEAIISPEIFELAQLELKRRSRKKRYCVKTVFTGKILCGICGNEYGSRVHHSNDECRREVFTCGKPWVRGVHKCPTKNLTVKMAKQLFTDALNKLVDVKKEVIDNLRLLLNETFDTTKLKEEHEKLESELNALAFKYNTLMNENARHIIPDQHNFISNQENLAEQYNSKQARYLELEKQIADKEERGLVLKNFIKELSGAEPGIEFREDLWCALLDHIVVLDKLKAKVVFKDGTEELLDIPNDRKPRVKSE

SEQ ID NO: 3034 - protein, 534 aa, Unknown
  Description of Unknown: Integrase B3035 sequence
  PTHR30461:SF3,cd00338,SM00857,G3DSA:1.10.10.2600,IPR036162, PF13408,IPR025827,PS51737,G3DSA:3.40.50.1390,IPR006119, IPR038109,PF07508,SSF53041,IPR011109,PTHR30461, PS51736,Coil,PF00239
MARKKNIAAGLDAVIYARYSSHNQREVSIEQQIAECTKHAAALGLRIVGTYEDRAISGKTDNRPRFQQMMRDAEKGKFQAVVAWKSNRIGRNMLQAMVNEAKLDDYGVKVFYAEEDFDDTAAGRFALRNMMNVNQFYSENMAEDITRGLYDNANKCMANGRQPLGYKRGADGKVMLDEPAAAVVREIFTRVAAGDLFVDIARDLNAKGIKTSKGAAWNKGSFQSICQNERYKGIYIYGNVRIVDGIPRIVSDELWYRVQEAMRMKKNPVGTRHRVGAEDYLLTGKLRCGHCGSYMTGVSGTSRNGELHYYYTCQKRRTEHACNKKNVRRDVIEPAIAQAIKMYCLTDDVIEWMADQTVQYWEKHDNDLQIEALEQQLAENKKATSNMLKAIEMGIITEATRSRMVELETENSKLTAQLSAAKRDVVKINREDLIDELHVLRSKDIQDREVQAELFKDFLVAAYIYDDNRLKLVFSFMGKDNSVEIPLETGEDPPDGEDSPDAKMFVLTPDCSTRTKALHGNVWCFFVAAKRVRV

SEQ ID NO: 3035 - protein, 534 aa, Unknown
  Description of Unknown: Integrase B3036 sequence
  PTHR30461:SF3,IPR036162,PS51737,IPR011109,PTHR30461, PF00239,G3DSA:1.10.10.2600,IPR006119,SSF53041,cd00338, SM00857,IPR025827,IPR038109,mobidb-lite,PS51736, PF13408,G3DSA:3.40.50.1390,PF07508,Coil
MRKKSNLNAATRAVIYARYSSANQRDCSIEQQVAKCRELAARLGLTVIDVYEDRAISGKTDRRPNFQRMMKDADLRQFDVVLAWKSNRMGRNMLQAMTNEERLRDNGIRTVYAEEDFDDTAAGRFALRNMMNVNQFYSENMAEDITRGLMDNAAKCLSNGSLPLGYKPGDDRHVVLDEAEAAIVQEIFTRVSCYEPFIDIARDLNRRGIKTKKGSEWGRSSFHTICRNERYRGIYIYRDVRIEGGMPRIVSDELFYKVQEVLKVKKNPQGRRKRSGYEEYLLTGKLFCGHCGSPMTGIAGTSKTGAMHYYYTCQKRRTDHSCDKKAVRRDQIERAVGVAIQQQLLTDENIQMMADKLMEYNARTETKYRLQGLQDQLNANKTATANILKAIEMGIITDATKARLLELEKEQGQLLVKIDEAKAEMVPISRNDFVKLLYIYKEGEPTDKKYLAALFDNFLVRVDLYDDHLKITFDPTGGRQPIDMPIGAEESPESPGDSSESSNFEASSQDAEKFVLALHNCTKILERLFGDFLF

SEQ ID NO: 3036 - protein, 534 aa, Unknown
  Description of Unknown: Integrase B3037 sequence
  PTHR30461:SF3,cd00338,SM00857,G3DSA:1.10.10.2600,IPR036162, PF13408,PS51737,G3DSA:3.40.50.1390,IPR025827,IPR006119, IPR038109,PF07508,IPR011109,SSF53041,PTHR30461, PS51736,Coil,PF00239
MARKKNIAAGQNAVIYARYSSHNQREVSIEQQVRECMKHAAELGLHVVGTYEDRAISGKTDKRPNFQRMMRDAEKGKFQAVVAWKSNRIGRNMLQAMVNEAKLEDCGVKVFYAEEDFDDTAAGRFALRNMMNVNQFYSENMAEDITRGLYDNASKCMANGRQPLGYKRGEDGRVVLDEANAAVVREIFTRVAAGDLFVDIARDLNAQGIKTSKGANWNKGSFQSICQNERYRGIYIYGDVRVADGIPRIVSDDLWYRVQEAMRMKKNPVGTRHRVGAEDYLLTGKLRCGHCGSYMTGVSGTSRNGELHYYYTCQKRRTEHACDKKNIRRDVIEPAVAQAIKMYCLTDDVIAWIADRTVEYWEKHDNDLQIEALEQQLEENKKATSNMLKAIEMGIITEATRTRMVELETEQSRLSVQLNAAKEDVVKIDREQIISYLELLQQGDIHDRDFQMELFKNFLVAVYVYDDNRMKLVFSCMGDQNSVEIPLETGEDPPDGGLSPDAKMFVLTPDSSTRSERHHTLCGAFFVVAKRVRA

SEQ ID NO: 3037 - protein, 534 aa, Unknown
  Description of Unknown: Integrase B3038 sequence
  PTHR30461:SF3,cd00338,SM00857,G3DSA:1.10.10.2600,IPR036162, PF13408,PS51737,G3DSA:3.40.50.1390,IPR025827,IPR006119, IPR038109,PF07508,IPR011109,SSF53041,PTHR30461, PS51736,Coil,PF00239
MQKNNNIGNRCVIYARYSCSNQTEQSIEGQMHDCEQFAARNNLQIVNSYIDRATTATTDKRPQFLKMIADSKQCVFDVVLVWKLDRFSRNRYDSAMYKKKLKDNGVRVMSAMENITDSPEGVLMESVLEGFAEYFSKDLSQKVKRGMRETAAKHKITNRIPFGYCKSEEDTYIPDPHTANAVRKVFDMYITGFRKSDIADWLNSNGYKTSYGNQFTLTAITPLIKNTRYIGKYYYADNEYTDETQRIVTDDIFYKAQQKAIANQHGGSCKAIERYLLSNKLYCGYCHNKMIGECGKNQNGLAYHYYTCVGRKRKHICNRKNIKKKDIEQYVINAISRLLNDEYAINKIIETAINYQQNDVEHINEIKDIESTIKEIERKISNILSAIEAGIFTDSTKNRLQELENQKTRLTQELNYKNQSSTKIPRTTLKQILKNLDLSKDATNPEKQNIIDLLIHRIYLWQDKILIVFNQSNLCDNEISVDDTDVNTIIKTLSEPNASSSDSVEYGTPYLLISEFLQLYMYKNIAYQIFTIQQ

SEQ ID NO: 3038 - protein, 534 aa, Unknown
  Description of Unknown: Integrase B3039 sequence
  PTHR30461:SF3,SM00857,G3DSA:1.10.10.2600,IPR036162,PF13408, PS51737,IPR025827,G3DSA:3.40.50.1390,IPR006119,IPR038109, PF07508,IPR011109,SSF53041,PTHR30461,Coil, PS51736,cd00338,PF00239
MVQERLRAVFYARVSTEEEKQLNALEKQIQENRDVISNNGWVLVGEYIDEGKSGTTTKRRSDYKRLLADMTEDKFDIVVCKDQERLQRNTLDWYLFVDNLLKNSLKLFMYLDNKFFTPSEDALITGIKAIIAEEYSRNLSKKLNNANRRRVERALAGEEIAAMGNGKSLAFKIVNGKWVKDEKEAELGKKIFELYLQWNSLRKVRDWVNENGYRNSVGKPFTTESIGRILKNEKAKGIIVMGHHHHDFDKKKIVRMPEEQWVRIPAPELAYVSEEMFDEVQRRLKAKTGKKRGVNAYSNPLSSKLYCGKCGGKLWKHNSNGYVNWHCSSKMAKGDIKCTGVSTTSVKVRKIYSEISKDLVVNKSAVKASMLEWLHKLKASLQIEDKSEAAQKAIEQLERKKNKLTEAYLDEIISKEDYKAKYSALEDQIREQQKLLIPVEENEDVKDIEAVIENIDQEIDTYIASSQFEDSKVDYLIEHTKKITVIDKEYYVIDLDLLAGVILTGKDFLLYVHNTMPQHNVPECLHLPGPSGRA

SEQ ID NO: 3039 - protein, 534 aa, Unknown
  Description of Unknown: Integrase B3040 sequence
  PTHR30461:SF3,IPR036162,PS51737,IPR011109,PTHR30461, PF00239,G3DSA:1.10.10.2600,IPR006119,SSF53041,cd00338, SM00857,IPR025827,IPR038109,mobidb-lite,PS51736, PF13408,G3DSA:3.40.50.1390,PF07508,Coil
MKKRINTNSAARAVIYARYSSANQRDCSIEQQVEKCRELAAREGVTVIEIYADRAVSGKTDRRPNFQRMMKDASLRQFDVVLAWKSNRMGRNMLQAMMNEEQLRSNGIRTIYAEEDFDDTAAGRFALRNMMNVNQFYSENMAEDISRGLMDNASKCMSNGSLPLGYKTGKDQKVVLDEAEAAIVQEIFTRVSCYEPFIDIARDLNRRGIKTKKGAEWGRSSFHTICRNERYRGIYIYRDIRVEGGMPRIVSDELFYKVQEVLKVKKNPQGRRKRSGYEEYLLTGKLYCGHCGSPMTGIAGTSKTGAMHYYYTCQKRRTDHSCDKKAVRRDQIEKAVAIAIQQQLLTDENIQMMADETMAYNARTEIKYRLQSLQQQLYSNETSTANIMKAIEMGIITDTTKARLLALEQEHGQLLAKIDTAKAEMVPINREDFVSLLDIYRTGDVNNKKYLAALFDTFLVRVDLYDDHFKITFDPTGGKMPVDIPIGAEDSPESLGDSPESSDFEASPQDAEKFVLALHNRTKILERLFGDFLF

SEQ ID NO: 3040 - protein, 534 aa, Unknown
  Description of Unknown: Integrase B3041 sequence
  PTHR30461:SF3,SM00857,IPR036162,PF13408,IPR025827, G3DSA:3.40.50.1390,PS51737,IPR006119,SSF53041,IPR011109, PTHR30461,Coil,PS51736,cd00338,PF00239
MNRAAFAIHHNKIKTAPAPTETVYISEDMLLKSTNIVSSSEQSRKRNICFALAVIFVPILNIFYKRRVMQMPEKILRCAIYIRVSTFEQSVHGKSLQAQKECLEQYATDNNMSIVGVYADEGKTARKELKKRKAIHALVEDVKRDKIDVIIFWRLDRWFRNLSDFYKVQDVLDDHGVRWISVSEPGINMETRDGRLQLNVVLSIGQNEVDTTSERIKFVNEASIRQKKLIFGDANMPFGYKTGVVDGKKCMVKDSETEHMVEDFFEYFRNHNSKKGAIRYMQETYGIDFSYGMLRTMLSSEFYKGTYRGYPYCPAYLSEKEWDEMQTISKRNIKNTPSGRIYLFTGLMRCPVCGQKLVGTGCSSIINRKTGEKRTYCYYRCNRALIDHICTYRHRVSQNLIEKYLLENLEREYEKYKVRTNQISEELKKQKKAKDPKKLRKEMERLNILFQKGRISYDYYDKEYQRLEREYSASAAFCEEEETRNLHYVEELLKTDFRQMYDSLSLENRRSFWRSTIQEIYLNEDNTIKGVDFI

SEQ ID NO: 3041 - protein, 534 aa, Unknown
  Description of Unknown: Integrase B3042 sequence
  PTHR30461:SF3,cd00338,SM00857,G3DSA:1.10.10.2600,IPR036162, PF13408,PS51737,IPR025827,G3DSA:3.40.50.1390,IPR006119, IPR038109,PF07508,IPR011109,SSF53041, PTHR30461,PS51736,Coil,PF00239
MARKKNIAAGLDAVIYARYSSHNQREVSIEQQIAECTKHAAALGLRIVGTYEDRAISGKTDNRPRFQQMMRDAEKGKFQAVVAWKSNRIGRNMLQAMVNEAKLDDYGVKVFYAEEDFDDTAAGRFALRNMMNVNQFYSENMAEDITRGLYDNANKCMANGRQPLGYKRGADGKVMLDEPAAAVVREIFTRVAAGDLFVDIARDLNAKGIKTSKGATWNKGSFQSICQNERYKGIYIYGNVRIVDGIPRIVSDELWYKVQEAMRVKKNPVGTRHRVGAEDYLLTGKLRCGHCGSYMTGASGTSRNGELHYYYTCQKRRTEHACNKKNVRRDVIEPAIAQAIKMYCLTDDVIEWMADQTVQYWEKHDNDLQIEALEQQLAENKKATSNMLKAIEMGIITEATRSRMVELETENSKLTAQLSAAKRDVVKINREDLIDELHVLRSKDIHDREVQAELFKDFLVAAYIYDDNRLKLVFSFMGKDNSVEIPLETGEDPPDGEDSPDAKMFVLTPDCSTRTKALHRNVWCFFVAAKRVRA

SEQ ID NO: 3042 - protein, 534 aa, Unknown
  Description of Unknown: Integrase B3043 sequence
  PTHR30461:SF3,IPR036162,PS51737,IPR011109,PTHR30461, PF00239,G3DSA:1.10.10.2600,IPR006119,SSF53041,cd00338, SM00857,IPR025827,IPR038109,mobidb-lite,PS51736, PF13408,G3DSA:3.40.50.1390,PF07508,Coil
MRKKSNLNAATRAVIYARYSSANQRDCSIEQQVAKCRELAARLGLTVIDVYEDRAISGKTDRRPSFQRMMKDADRGIFDIVLAWKSNRMGRDMLQAMTNEERLRDNGIRTVYAEEDFDDTAAGRFALRNMMNVNQFYSENMAEDITRGLMDNAAKCLSNGSLPLGYKPGDDRHVVLDEAEAAIVQEIFTRVSCYEPFIDIARDLNRRGIKTKKGSEWGRSSFHTICRNERYRGIYIYRDVRIEGGMPRIVSDELFYKVQEVLKVKKNPQGRRKRSGYEEYLLTGKLFCGHCGSPMTGIAGTSKTGAMHYYYTCQKRRTDHSCDKKAVRRDQIERAVGVVIQQQLLTDENIQMMADKLMEYNARTETKYRLQGLQDQLNANKTATANILKAIEMGIITDATKARLLELEKEQGQLLVKIDEAKAEMVPISRNDFVKLLYIYKEGEPTDKKYLAALFDNFLVRVDLYDDHLKITFDPTGGRQPIDMPIGAEESPESPGDSSESSNFEASSQDAEKFVLALHNCTRILERLFGDFLF

SEQ ID NO: 3043 - protein, 534 aa, Unknown
  Description of Unknown: Integrase B3044 sequence
  PTHR30461:SF3,SM00857,G3DSA:1.10.10.2600,IPR036162,PF13408, IPR025827,G3DSA:3.40.50.1390,PS51737,IPR006119,IPR038109, PF07508,IPR011109,SSF53041,PF00239,PTHR30461, PS51736,Coil,cd00338
MKRKKFPIDLSMLTEEEIDQFREDSTTLYEGVVDVSLYLRFSSERQKEQSIEGQLRDCISYCKRKGYRIVAIYVDRATTARKDVEKRVYFQQMISDSVHREWQYVIVWKLDRFSRNREDSAVFKMRLRKNGVKVESATENISKNPEGIILEAVLEGIAEYYSADLSQKITRGMRESALKCQCVGGHIPLGYKIEDHKLVVDPETAHIVQEAFQLYANGETVAEICRMFNAKGYRTAKGVEFNRNSFKSMFRNERYIGVYTYRDIRIEDGVPAIIDKDLFETVSRRLSKNAEAPARGKAKVDYLLSGKLFCGHCGASMNGESGTSKTGAIHNYYTCYSRKRRKGCDKKPLKKEWIEFIVAQDAMELLTDDVIEEMADMAIAQSDQDLKENTRIPELTARQKEVEQSISNIAKAIEKGVASDTLLDRLTQLEKDKKDIAKQLAEEEKYIYRIDRDQIIFWLAKFKDGDIEDEEFRRHIIDLMVNSVTVWDEPDGYRITTAYNLTSCKTNTFQATSNSDPSCGEGFGFGTPESTIEG

SEQ ID NO: 3044 - protein, 534 aa, Unknown
  Description of Unknown: Integrase B3045 sequence
  PTHR30461:SF3,cd00338,SM00857,G3DSA:1.10.10.2600,IPR036162, PF13408,PS51737,G3DSA:3.40.50.1390,IPR025827,IPR006119, IPR038109,PF07508,IPR011109,SSF53041,PTHR30461, Coil,PF00239
MKRIHTLYRVSTKKQVDKEKNDIPMQRLACKEFAEQQGWVITREFEEKGVSGFKVSANNRDAIQDLKEAAIKHEFDVLLVFMFDRIGRIDDETPFVVEWFVKHGIEVWSVKEGEQRFDSHVDKLTNYIRFWQASGESEKTSMRIKTRKEQLTLEGCYTGGTVPYGYQLIRKGRLNKKGNEMRDLAIEPAEAEIVREIFNKTIHEGYGSYRIADMLNKRGLRTHSGSKFQCNTIIRILRNRLYCGYIVSGNVTSEALSELTIVESDIFDQAQYILDQRAEKDTQKRQIAFTTKGQALLSGNVFCAHCGGKLTTIRYKDKYMRKDGSEYSVDQIKYSCYHRSRKLCKCDGQATYQSERVDAAVIQIMHDIFDKMAGAPDEDRLKAMIKRQTVGCQAKQRKLSLELQKSKAQLEKLQLEIANALTGNSLFSPEDLSSSITTMKGRIAAAETELHELEQSEFQQRQSIAKILPAYNQFKSWADEFDSATKEQKKMIACQLFKRIEIGRNYAITCELNMTYQQFCEEWSNTEISKKMAI

SEQ ID NO: 3045 - protein, 534 aa, Unknown
  Description of Unknown: Integrase B3046 sequence
  PTHR30461:SF3,cd00338,SM00857,G3DSA:1.10.10.2600,IPR036162, PF13408,IPR025827,PS51737,G3DSA:3.40.50.1390,IPR006119, IPR038109,PF07508,IPR011109,SSF53041,PTHR30461, PS51736,Coil,PF00239
MKTPEYRDGVIYARYSPGPNQSEQSIEGQLRDCERFCADNNIRIIATYIDRKQSGRSDNRTDFQRMLRDSKRRAFSTVVVWKIDRFGRNREEIAKNKAVLRLNGVKVLSAKEHIPDGPEGIILESVLEGLAEYYSANLSQNIVRGMRESALKCQYNGSGLSLGYSVDKDHKFHIDPHGAAIVKMIYEKYDNGEKIADILRYIQASGIKTMKGKEYTHYGISRILRNRAYIGEYKWQDIVIPDGMPRIISDELFERVQRRMEKNKKAPSAGRGVDFLLTAKLFCGHCKSTMIGDSGTGKTGGKWYYYSCRGRKTKKTDCKKRSVPKDWLEREVVALTASYILQDDIISNIADRVVEIQREEHEDNSMLRYYEDRLKEAETSIRNIMRAIESGVFTDSTRDRLVELEAEKADMETEIAKEKITRPIVTREQVIYFLNRFKNGDVDDKEYQRQIIDALVNKVILYDDKITITYNYSGEGKEITADIIEEAADEALSDAEDRCSTFQRLVDPNSAYPNTVIFFVCGLFGLVHKISGKN

SEQ ID NO: 3046 - protein, 534 aa, Unknown
  Description of Unknown: Integrase B3047 sequence
  PTHR30461:SF3,IPR036162,PS51737,IPR011109,PTHR30461, PF00239,G3DSA:1.10.10.2600,IPR006119,SSF53041,cd00338, SM00857,IPR025827,IPR038109,PS51736,mobidb-lite, PF13408,G3DSA:3.40.50.1390,PF07508,Coil
MKKRINTNSAARAVIYARYSSANQRDCSIEQQVEKCRELAAREGVTVIEIYADRAVSGKTDRRPNFQRMMKDASLRQFDVVLAWKSNRMGRNMLQAMMNEEQLRSNGIRTIYAEEDFDDTAAGRFALRNMMNVNQFYSENMAEDISRGLMDNASKCMSNGSLPLGYKTGKDQKVVLDEAEAAIVQEIFTRVSCYEPFIDIARDLNRRGIKTKKGAEWGRSSFHTICRNERYRGIYIYRDIRVEGGMPRIVSDELFYKVQEVLKVKKNPQGRRKRSGYEEYLLTGKLYCGHCGSTMTGIAGTSKTGAMHYYYTCQKRRTDHSCDKKAVRRDQIEKAVAIAIQQQLLTDENIQMMADETMAYNARTEIKYRLQSLQQQLYSNETSTANIMKAIEMGIITDTTKARLLALEQEHGQLLAKIDTAKAEMVPINREDFVSLLDIYRTGDVNNKKYLAALFDTFLVRVDLYDDHFKITFDPTGGKMPVDIPIGAEDSPESPGDSPEPSDFEASPQDAEKFVLALHNRTKILERLFGDFLF

SEQ ID NO: 3047 - protein, 534 aa, Unknown
  Description of Unknown: Integrase B3048 sequence
  PTHR30461:SF3,IPR036162,PS51737,IPR011109,PTHR30461, PF00239,G3DSA:1.10.10.2600,IPR006119,SSF53041,cd00338, SM00857,IPR025827,IPR038109,PS51736,mobidb-lite, PF13408,G3DSA:3.40.50.1390,PF07508,Coil
MRKKSNLNAATRAVIYARYSSANQRDCSIEQQVAKCRELAARLGLTVIDVYEDRAISGKTDRRPNFQRMMKDADLRQFDVVLAWKSNRMGRNMLQAMTNEERLRDNGIRTVYAEEDFDDTAAGRFALRNMMNVNQFYSENMAEDITRGLMDNAAKCLSNGSLPLGYKPGDDRHVVLDEAEAAIVQEIFTRVSCYEPFIDIARDLNRRGIKTKKGAEWGRSSFHTICRNERYRGIYIYRDVRVEGGMPRIISDELFYKVQEVLKVKKNPQGRRKRSGYEEYLLTGKLYCGHCGSPMTGIAGTSKTGAMHYYYTCQKRRTDHSCDKKAVRRDQIERAVGVAIQQQLLTDENIQMMADKLMEYNARTETKHRLQGLQDQLNANKTATANILKAIEMGIITDATKARLLELEKEQAQLLVKIDTAKAEMVPISRNDFVKLLYIYKEGEPTDKKYLAALFDNFLVRVDLYDDHLKITFDPTGGRQPIDMPIGAEDSPESPGDSSESSDFEASSQDAEKFVLALHNCTKILERLFGDFLF

SEQ ID NO: 3048 - protein, 534 aa, Unknown
  Description of Unknown: Integrase B3049 sequence
  PTHR30461:SF3,SM00857,G3DSA:1.10.10.2600,IPR036162,PF13408, IPR025827,G3DSA:3.40.50.1390,PS51737,IPR006119,IPR038109, PF07508,IPR011109,SSF53041,PTHR30461,PS51736, cd00338,PF00239
MARAAKQDNNSEIIDGVIYARYSEGPNQTEASIEGQVRECKEYAKRNGIRIINVYSDSKHTGTNDNRAEFQKMLRDSRRGGFSVVVVWKIDRFGRNRAEMAQNKALLKLQGVKVVSAKEYIPDSPEGIILESVLEGMAEYYSANLSQNIKRGMKENALHCKSNGSGKSLGYIVDKDGYFEIEPNEATIVKTIFQKYDEGMKIADIWREIVASGAKTKRGKDFTQYGISRVLSNRAYIGEYRYGDIVTPGGMPRIIDDDLFNRVQERRALSKKAPASRRSNSDVDFLLTGKVFCGHCKGTMRGMSGTSKTGRKFYYYACHDKIFKHNKCTKKNVKKEWLETEVTRITRDDILNKETIEFIADRVVEIQRQEQEDKSMLRYYEQQLRDTQSAINNIMKAIEAGIITSSTKSRLFELEEQKSIIEGEIEREKIITPVIEKEQVIFSLERFFGGDINNKEYQRNIIDMFVNKVILYDNKIIITYNISSQNEISVDVVEQAAFAALDECSSKLSLPPPATRRGGHFPSRLFCKHTKSPL

SEQ ID NO: 3049 - protein, 533 aa, Unknown
  Description of Unknown: Integrase B3050 sequence
  SM00857,G3DSA:1.10.10.2600,IPR036162,PF13408,PS51737, IPR025827,G3DSA:3.40.50.1390,IPR006119,IPR038109,PF07508, IPR011109,SSF53041,PTHR30461,PS51736,cd00338, PF00239
MQQYCLYLRKSRADAEAEARGEGETLARHERTLLELAKRQQLNVTEIYKEIVSGESLAARPVMQRLLSEVEHGIWAGVLVMEVERLARGDTTDQGIVAQTFKFSNTLIITPTKTYDPENEFDEEYFEFGLFMSRREYKTINRRLQRGRIASIKEGKFVGNKSPYGYERVKIKGDKGFTLKIVPEEAEIVKLIYEWYTHGVLQEDGSYRKIGCELIAQKLNQMKAPTRTGADWILPTVRDMLRNPVYTGKVRWNWRQTVKKMVDGKITKTRPRNDNVLIFKALHEPIISDEVFEAAQNIMSKNPPRPVVDSKRIQNPLAGIVICGICGKPMVRRPYQRPYPDTLMCPRAKCPNVSSDLRRVEQRVISALEVWLEQYKLEWESKDVSPAVKQSEVLKKSFEAQQAEIDKLYKQLSKTHDFLEQGVYNTETFLERSRSISERINIAKESLPKIQAQIDIETAKENNLINVIPKAEKLLETYYTLPTAESKNTMLKEVLEKVVYVKTKRCRKKTDSRDDFEITIFPKIPSQDSRPPA

SEQ ID NO: 3050 - protein, 533 aa, Unknown
  Description of Unknown: Integrase B3051 sequence
  PTHR30461:SF3,SM00857,G3DSA:1.10.10.2600,IPR036162,PF13408, PS51737,IPR025827,G3DSA:3.40.50.1390,IPR006119,IPR038109, PF07508,IPR011109,SSF53041,PTHR30461,Coil, PS51736,cd00338,PF00239
MYEDIKTACLYVRFSSHNQTEQSIEGQTRVCRDFCKRHNIRIVEIYADRATSASKDIEKRVQFLKMIKDSEKGLFDAVIVYKLDRFARSRYDSATYKYRLKRNGVQLISATENISNDPEGIILESVLEGMAEFYSAELSQKINRGMRESAYKHNSIGGAVPLGYKIEDKKLVIDPKTAPIVKEAFEKYADGETVAEICRQFNARGYKTSKGTAFGKSSFTKIFRNERYIGVYSFHDYRAEDAIPAIIDKDLWDRVQLRVGKIKNAPARNKAKVVYLLSGKIFCGHCGSKMNGNCNAGNYCYYQCYGKKNGNVDCKKKNIRKEFIERLVAQDALSLLTDEYIEQIATIACEKNQHEIELDSALPTIRDRIHQVDLSLNHLLKAIESGSAPDMLVKRMGELEKEKKDLQAQAKKESGDIVELDKAQVIYWLEQFRGGSIEDEEFCRMLIDLFVNSVTVWDEDDNTYKVTVAYNLTSLPTKTYRLNKGGTLSDFASNAPGMSANPTITGNLLIHTFHCRLKSHSRKRFWDYDTFVV

SEQ ID NO: 3051 - protein, 533 aa, Unknown
  Description of Unknown: Integrase B3052 sequence
  cd03768,PTHR30461:SF3,SM00857,G3DSA:1.10.10.2600,IPR036162, PF13408,PS51737,IPR025827,G3DSA:3.40.50.1390,IPR006119, IPR038109,PF07508,IPR011109,SSF53041,PTHR30461, PS51736,Coil,PF00239
MIKIAIYSRKSVFTGKGESIENQIELCKNYCNTYVNSGSNLEYIIYEDEGFSGKNTNRPEFQHMIDDIKKKKIDTLICYRLDRISRNVADFSSTLELLQKYNVNFISIKERFDTSTPLGRAMIYIASVFAQLERETIAERVRDNMIQLAKSGRWLGGNIPYGFNIARKTYISDFKEKEFSILSPNKKELETVNFVYSYYIKTHSIRQVTRLLNVNSIIGKNGGSFDLTQIRRMLRNPLYVISDDKSHEYLIKKGLNVFGSPNGNGYITYNKSNQKNISADSNQWIVAVSNHKGIITSDNWLKVQYQLDNNKSKMPRIGTGNNHSLFSGILKCKKCGSNMIVKFSGKNKNNIPYEYYVCSGKQNKYLNKCTTKNIRVDKLDKILTRKLKIHNKTVLIKTLRDSIDNICCDFKNNQISSIEYEIHENKVSMDNLIKQLTKSASSTVSDRLMNEINLLDKNIVRLKKHLETIELEQSHDKKTNIDIKNIINVLNSFSDTIEYIDDTAQKRFLIQTLIKSAVWDSDNNNVEIIFNTH

SEQ ID NO: 3052 - protein, 533 aa, Unknown
  Description of Unknown: Integrase B3053 sequence
  PTHR30461:SF3,cd00338,SM00857,G3DSA:1.10.10.2600,IPR036162, PF13408,IPR025827,G3DSA:3.40.50.1390,PS51737,IPR006119, IPR038109,PF07508,IPR011109,SSF53041,PTHR30461, PS51736,Coil,PF00239
MYEDIKTACLYVRFSSHNQTEQSIEGQTRVCRDFCKRHNIRIVEIYADRATSASKDIEKRVQFLKMIKDSEKGLFDAVIVYKLDRFARSRYDSATYKYRLKRNGVQLISATENISNDPEGIILESVLEGMAEFYSAELSQKINRGMRESAYKHNSIGGAVPLGYKIEDKKLVIDPKTAPLVKEAFEKYADGETVAEICRQFNARGYKTSKGTAFGKSSFTKIFRNERYIGVYTFHDYRAEGAVPAIIDKDLWDRVQLRAGKIKSAPARHKAKVVYLLSGKLFCGHCGSRMNGNCNASNYYYYQCYGKKNGHVDCNKKNIRKEFIERLVAQDALSLLTDEYIEQIAAIACEKNQHEIELDSALPTIRDRIHQVDLSLNNLLKAIESGSAPDMLVKRMGELEKEKKDLQAQAKKESEDIVELDKAQVIYWLEQFRGGSIEDEEFCRMLIDLFVNSVTVWDEDDDTYKVTVAYNLTSLPTKTYRLNKGGTLSDFASNAPGMSANPTITGNLLIHTFHCRLKSHSWKRFWDYDTFVV

SEQ ID NO: 3053 - protein, 533 aa, Unknown
  Description of Unknown: Integrase B3054 sequence
  SM00857,G3DSA:1.10.10.2600,IPR036162,PF13408,PS51737, G3DSA:3.40.50.1390,IPR025827,IPR006119,IPR038109,PF07508, SSF53041,IPR011109,PTHR30461,Coil,PS51736, cd00338,PF00239
MAKPEVSELAVVYARYSSHSQGEQSIEGQLSNARDYAAAHGYTIVHEYVDRAKTGRTDNRAEFQQMLKDTAKRQFSVIILWKVDRFGRNREEIAINKMKCRKNGVRVEYVAETIPDSPEGVILESVLEGFAEYYSLQLSQNIRRGRAESAEKCQSLGGNRPLGYKTGPDKKFVIDENTAPTVKMIFTMYADGKTITEIVDKLNEMGLRTLRGGPFTKNSLHSILKNKKYIGIYEYQGREIKDGVPRIIEDDVFNKVQEMLKINKRAPAKTWSRADYILTDKLFCGKCGALMFGESGTSKTGVKHNYYICSNKKRFRSCDKKAVRQADIEDAVLNATHELLQDDELLDYIVDRTWEYYLAQDNSQEELRNLQRQLAQTDTAISNLIRAIEAGILTEETKKRMDELTQQKADLKASIADREIARGFHLQKSHIAFYLRSLRDADWSDKEAQKRLIQTFVNAVFVYDDHITLTYNFSGDKSTITLRDMQRFEDGEEFGCRASRSTKQVLDEHLFLQRRFRREMFALIHNRKAPSWE

SEQ ID NO: 3054 - protein, 533 aa, Unknown
  Description of Unknown: Integrase B3055 sequence
  PTHR30461:SF3,SM00857,G3DSA:1.10.10.2600,IPR036162,PF13408, PS51737,G3DSA:3.40.50.1390,IPR025827,IPR006119,IPR038109, PF07508,IPR011109,SSF53041,PTHR30461,Coil, PS51736,cd00338,PF00239
MAVFAQAVQPDFNDDVADVVIYSRYSSIGQNDQSIDGQIDACMKYAAQRGFHVVGQYIDRALSGTHADSRPEFQRMIRDSKKGVFRYVLVWKLDRFARNRYDSAIYKNELKKHGVKVLSVTEGIDAGNDSIILEAVLEAMAEEYSRQLSQNVRRGMHQNAEKQLTLGGHAPLGYRVENKRLVVDEKEAEMVRFVFRSYADGMTKTEIAKECNRRGWRTRPGRPFTVNSFSVMLKNQTYIGTYTFKDEITVEGAVPAIVDRATFDKVGTMLERNRRAPGRVKAKEEYQLQGKVFCGYCGAPMVGESGRGRRGATYHYYACATRKKAHTCQKKNEKKGFLEWYVVEQITTHILTDQRIHEIAAGVVAEYNRSFDAAGVRDLERKIRAMDKEMDALVDALIRTTAAPAVAKINERVELLAAQKEEAEVDLAKLKVASRITLSEEEIVAWLRQFVHGDPTDPVFRQRVIDIFVNSIYLYDDKVVMYFNIKDASQVSYIEMQEDLEGLDGSDLNCHGVPGKIPRTAMVLGIFPIIFYL

SEQ ID NO: 3055 - protein, 533 aa, Unknown
  Description of Unknown: Integrase B3056 sequence
  PTHR30461:SF3,cd00338,SM00857,G3DSA:1.10.10.2600,IPR036162, PF13408,PS51737,G3DSA:3.40.50.1390,IPR025827,IPR006119, IPR038109,PF07508,IPR011109,SSF53041,PTHR30461, PS51736,Coil,PF00239
MARKKNIAAGQNAVIYARYSSHNQREVSIEQQVRECMKHAAELGLHVVGTYEDRAISGKTDKRPNFQRMMRDAEKGKFQAVVAWKSNRIGRNMLQAMVNEAKLEDCGVKVFYAEEDFDDTAAGRFALRNMMNVNQFYSENMAEDITRGLYDNASKCMANGRQPLGYKRGEDGRVVLDEANAAVVREIFTRVAAGDLFVDIARDLNAQGIKTSKGANWNKGSFQSICQNERYRGIYIYGDVRVVDGIPRIVSDDLWYRVQEAMRMKKNPVGTRHRVGAEDYLLTGKLRCGHCGSYMTGVSGTSRNGELHYYYTCQKRRTEHACDKKNIRRDVIEPAVAQAIKMYCLTDDVIEWMADRTVEYWEKHDNDLQIEALEQQLEENKKATSNMLKAIEMGIITEATRTRMVELETEQSRLSVQLNAAKEDVVKIDREQIISYLELLQQGDIHDRDFQMELFKNFLVAVYVYDDNRMKLVFSCMGDQNSVEIPLETGEDPPDGGLSPDAKMFVLTPDSSTKKTLHSLCGVFLFCTFVSPA

SEQ ID NO: 3056 - protein, 533 aa, Unknown
  Description of Unknown: Integrase B3057 sequence
  PTHR30461:SF3,cd00338,SM00857,G3DSA:1.10.10.2600,IPR036162, PF13408,PS51737,G3DSA:3.40.50.1390,IPR025827,IPR006119, IPR038109,PF07508,IPR011109,SSF53041,PTHR30461, PS51736,Coil,PF00239
MAKKKKPAGGIAVIYARYSSHNQRDVSIEQQIEACRKHAAELGLTIIATYEDRAISGRTDNRPAFQRLMHDAEKGKFSYVLAWKSNRMGRNMMQAMVNESRLMDCGIKVYYAEEDFDDSAAGRFALRSMMNVNQFYSDNLAEDVRRGLMDNANKCMVNGRQPLGYKRGKDGKVVVDEPAAAIVREVYARVASGELFTDIARDLNRRGIKTADKGEWNKNSFHRLCSNEKYRGIYIYGDVRIEGGIPTIIDDTLWYKVQEALRVKKLKRNGRHRPGDEDYLLTGKLRCGKCGGYMIGMSGRSKTGDIHYYYACQNRRVGRTCDKKNIRRDVIEPAVAQAIKEYCLTDDAIEWIADKTVEYWEKADRNLQLDSIEGDLAAVQSSISNVMKAIEMGVVTETTRDRLIELEKQRTDLKSKLALAKEEVVHVDRKKLISSLLLFRNGDIHDRQYQEDLFKTFLISVYVYDDDDNGHLKIVFNAFGDNNTVDLPIDFGETDNQSAFSDGAEKFDYSLHRSTKKPSDLLRWLFCFVLGPV

SEQ ID NO: 3057 - protein, 533 aa, Unknown
  Description of Unknown: Integrase B3058 sequence
  PTHR30461:SF3,SM00857,G3DSA:1.10.10.2600,IPR036162,PF13408, IPR025827,PS51737,G3DSA:3.40.50.1390,IPR006119,IPR038109, PF07508,SSF53041,IPR011109,PF00239,PTHR30461, PS51736,Coil,cd00338
MKAIIYARYSSDNQREESIEGQIRECMEFAERNGITVFGTYIDRALSAKTDNRPEFQRMIKDSYRKLFDTVLVWKLDRFARNRYDSAYYKNILKKNGVKVISAKENISDGPEGVLLESMLEGWAEYYSVDLSEKIGRGLTENALKGKMNGGGLTFGYRMKDQRLEIDEMTAPVVVEIFTRYADGERMTDIAKDLTRRGIRTSQGNKITLNVVHYLLKNRRYIGEYKFREMIIPDAIPPIVSEELFNRVQEIMARNQKAPAMRKAEDDYILTTRLFCGKCGTFMVGESGKSHTGTIHRYYKCSHAKRKMGCDKKPVKKDWIEDAVIHYIMKIVMNDELIDHIADAILNILAQENSKLPQLNARLKEIETGIQNMLNAIQQGILTPSTKERLEALEQEREEIKVAIYSEELQKPKITKEHIAFWISKFRDVDLTDVTSRKRLVESFVNAVFVYDDKVVFTFNYKDGSKTATIDEITAELGSDLDGTTPPVSTEFEHHKDGIYFRRRCCGLCGIQVKKESNGKTVALFLYITRYKE

SEQ ID NO: 3058 - protein, 533 aa, Unknown
  Description of Unknown: Integrase B3059 sequence
  PTHR30461:SF3,IPR036162,PS51737,IPR011109,PTHR30461, PF00239,G3DSA:1.10.10.2600,cd14728,IPR006119,SSF53041, cd00338,SM00857,IPR025827,IPR038109,PS51736, PF13408,G3DSA:3.40.50.1390,G3DSA:3.40.50.300,PF07508,Coil
MAFQKIKSVPPENALNAVIYARYSSTQQTENSIDGQLRECNRFADLHGYRIIGTYIDRAKSGTSVEERTDFLRMIEDAKKQQFAYIIVYRFDRFARNRYDSVIYKKQLSAVGVRVISTAETVGDGDEAIILESIYEAMDEAYSRRLSTITKRGLKETARKNLWTSIPPFGYQLVDRRPEILPAEADGVKMIFEKYLEGATKKEIADELNRRGLKTKNGNAFDYKKLDSIMHNRLYTGVSEYMGVERTCPAIISIELFDAVQEKLKASAKFYGRKSENTHYALCGKLYCGYCGKAMVGDAGTSRTGTRYNYYSCPGRKKKKACRKKAERQDFIEWYICEQTLKYVLTDKRIKEIAAKVEELAKSEADTSELKEAERRQNELNKQLDELTAKFIQAKSQRVIDKLNEQADELDKQLTAVESDIARLRLRVQHTVSAEQVERYLRSFKTGDLLSEDFRGRVINTLIQCVYLYDDKIIVYFNIKGAKSITHIDAIRDAESLAGSDSSRCGELESNLSEHAYMIYAQGAIGCLIKIER

SEQ ID NO: 3059 - protein, 533 aa, Unknown
  Description of Unknown: Integrase B3060 sequence
  PTHR30461:SF3,cd00338,SM00857,G3DSA:1.10.10.2600,IPR036162, PF13408,PS51737,G3DSA:3.40.50.1390,IPR025827,IPR006119, IPR038109,PF07508,IPR011109,SSF53041,PTHR30461, PS51736,Coil,PF00239
MYEDIKTACLYVRFSSHNQTEQSIEGQTRVCRDFCKRHNIRIVEIYADRATSASKDIEKRVQFLKMIKDSEKGLFDAVIVYKLDRFARSRYDSATYKYRLKRNGVQLISATENISNDPEGIILESVLEGMAEFYSAELSQKINRGMRESAYKHNSIGGAIPLGYKIEDKKLVIDPKTAPIVKEAFEKYADGETVAEICRQFNARGYKTSKGTAFGKSSFTKIFRNERYIGVYTFHDYRAEDAIPAIIDKDLWDRVQLRVGKIKNAPARNKAKVVYLLSGKIFCGHCGSKMNGNCNAGNYYYYQCYGKKNGNVDCKKKNIRKEFIERLVAQDALSLLTDEYIEQIATIACEKNQHEIELDSALPTIRDRIHQVDLSLNNLLKAIESGSAPDMLVKRMGELEKEKKDLQAQAKKESEDIVELDKAQVIYWLEQFRDGSIEDEEFCRMLIDLFVNSVTVWDEDDNTYKVTVAYNLTSLPTKTYRLNKGGTLSDFTSNAPGMSANPTITGNLLIHTFHCRLKSHSRKRFWDYDTFVV

SEQ ID NO: 3060 - protein, 533 aa, Unknown
  Description of Unknown: Integrase B3061 sequence
  PTHR30461:SF3,cd00338,SM00857,G3DSA:1.10.10.2600,IPR036162, PF13408,PS51737,G3DSA:3.40.50.1390,IPR025827,IPR006119, IPR038109,PF07508,IPR011109,SSF53041,PTHR30461, PS51736,Coil,PF00239
MYEDIKTACLYVRFSSHNQTEQSIEGQTRVCRDFCKRHNIRIVEIYADRATSASKDIEKRVQFLKMIKDSEKGLFDAVIVYKLDRFARSRYDSATYKYRLKRNGVQLISATENISNDPEGIILESVLEGMAEFYSAELSQKINRGMRESAYKHNSIGGAIPLGYKIEDKKLVIDPKTAPIVKEAFEKYADGETVAEICRQFNARGYKTSKGTAFGKSSFTKIFRNERYIGVYTFHDYRAEDAIPAIIDKDLWDRVQLRVGKIKNAPARNKAKVVYLLSGKIFCGHCGSKMNGNCNAGNYYYYQCYGKKNGNVDCKKKNIRKEFIERLVAQDALSLLTDEYIEQIATIACEKNQHEIELDSALPTIRDRIHQVDLSLNNLLKAIESGSAPDMLVKRMGELEKEKKDLQAQAKKESEDIVELDKAQVIYWLEQFRGGSIEDEEFCRMLIDLFVNSVTVWDEDDNTYKVTVAYNLTSLPTKTYRLNKGGTLSDFASNAPGMSANPTITGNLLIHTFHCRLKSHSWKRFWDYDTFVV

SEQ ID NO: 3061 - protein, 533 aa, Unknown
  Description of Unknown: Integrase B3062 sequence
  PTHR30461:SF3,cd00338,SM00857,G3DSA:1.10.10.2600,IPR036162, PF13408,IPR025827,G3DSA:3.40.50.1390,PS51737,IPR006119, IPR038109,PF07508,SSF53041,IPR011109,PTHR30461, PS51736,Coil,PF00239
MKSKNKPFVRKAVAYARFSSNNQREESIDAQLRAISDYCERERIQLVDIYSDEAQSAKSDNRDDFKNMTDAIFKGNYDIDAVLVHKFNRFARNKYDSALYKKRLRDIGIKVVSVTQPIDDSPEGRILESMIEAMDEYYSENLALEVKKGLKENALKGKHTGGGKLLGLSVDSEGYYYPNEQAHIVRRIFSEFANGVPKTKIVERLNREGHRNQYGRKFNTRTILDLLQNEKYIGNFVYQHSVTETIRLDGIIKNPIVDYELWEQVQEKRKTHHKPKQRKRNYFMTGKLRCGICGFTYCGSGSKRTSKKGDKLAAYYKCSGKTKHKNSCTNTSLNKEFYEQLVVNTIIENVLTDNAINDIAVKTYKQLEKERKAPLIPTKKLKSQLEAVRKKQEKLMELFLDGGIDKDLLDTKNSSLKDEKRHIESQIDKNEYLENSNSLTVEDVSKFIKVFVNELKEMPDIEFSQIVYNTFVDNIVIYPDRLEIALKVDFSTLYRGDKVNFRGAICSLAPVIVDKTVKRKSHQQSAKQRGLKR

SEQ ID NO: 3062 - protein, 533 aa, Unknown
  Description of Unknown: Integrase B3063 sequence
  PTHR30461:SF3,SM00857,G3DSA:1.10.10.2600,IPR036162,PF13408, PS51737,G3DSA:3.40.50.1390,IPR025827,IPR006119,IPR038109, PF07508,IPR011109,SSF53041,PF00239,PTHR30461, PS51736,Coil,cd00338
MKKFPIDLSCLTEEEISQFQEDPYTLYNGDQDVALYLRYSSTGQSDQSIEGQLRDCRAFCKANHYRIVAIYVDRATTARKDVEKRVHLMEMVADSAKQNWEYVIVWKLDRFARNRNDSAIMKMRLRKNGVKVLSATEHLTDSPESIILESVLEGMAEFFSAELSQKVTRGMRESALKCHSVGGHIPLGYKVENHKLVVDPDTAHIVQEAFSLYANGESVADICRKFNSAGYKTAKNTEFNRSSFKAMFRNTRYIGTYTYKDIVIENGIPAIIDKELFETVQRRLSKTATAPARGKAKVDYLLSGKLFCGHCGASMNGESGAGRHGKVYHYYSCYTKKRKLGCDKRPLKKDYIEGIVARDALNLLTDQLIDEIADMAIRQSEQDLINDTHIPQLTAQLSEVEKSIMNITAAIEKGIASETLMNRLVQLEHEKKTLNKEIKAEEKFVYRIDRDQIVFWLSQFKYGNIEDEDFRRRLIDLLVNSVTVWDEPDGYKITTAYNLTSCKTKTFRVEKNPAAEEATGFDFGESECGLRLP

SEQ ID NO: 3063 - protein, 533 aa, Unknown
  Description of Unknown: Integrase B3064 sequence
  cd00338,SM00857,G3DSA:1.10.10.2600,IPR036162,PS51737, G3DSA:3.40.50.1390,IPR006119,IPR038109,PF07508,IPR011109, SSF53041,PTHR30461,PS51736,Coil,PF00239
MELNRTGRYVMYLRKSRKDDEYGAASNEDVLARHELLLRDTAKRNKIIVSAIYREVRSGDSISARPMMQQLLSELADGRWDGVLVVEIERLARGDTIDQGIVARAFQDSGAMIITPIKIYDPNDEYDEEYFEFGLFMSRREYKTIKRRMQRGRVAASKEGKFCGNKTPYGYKREKISGESGFQLVPDPEEAEVIRKIYDWYVNGIPQPSGSRTMAGMAAIAHQLTAEGYAPRFTSVWSHNTVSDLLKNPVYIGKITWGKNKAIDCLQEDGTLRFRDHRQSSANIFDGRHEPLITEDLYFAAQRRRHSSPHSHTHYVADCSNALTGLIRCKYCGRNLFYRKASARSPKDIMLCGNHECLNIGCFYDVLEARIIDAIRMYADQNSKPVKKPKHDGSLQTSINRIQKELDASATQLDRIYTAYERGVYADDVFLERSSSVKKKISDLQRTLKDLQDQEAKQKQADQEQVEMIPKMRHLVETYWTLSTPSDRNAALKEVIDHIEYEKHKKSPKGGPFDNFSLVIYPRLFSSPFYFNN

SEQ ID NO: 3064 - protein, 533 aa, Unknown
  Description of Unknown: Integrase B3065 sequence
  PTHR30461:SF3,cd00338,SM00857,G3DSA:1.10.10.2600,IPR036162, PF13408,IPR025827,PS51737,G3DSA:3.40.50.1390,IPR006119, IPR038109,PF07508,IPR011109,SSF53041, PTHR30461,PS51736,Coil,PF00239
MDAVAYIRVSTNKEEQELSLENQREFFEKYVGNRNDTLIRIYSDKGKSATKMKNRKDLQRLLSAARRGEFQRLYVKDISRLFRNTLDFITVSRELANLGVQLHLVNMGEGKDIDMFTLNLMAMIAENESQKISERTKFGKQFSKERGIVPNFVFGYDRTDKYTLVPNPEESRWVQKIFDLYTEEEWGMAKIAKFLYESHVKTKKLKDGQPNYNWSQISVGRILTNPIYIGTVINGKESMKDIFTSQRQKNPKEEWYVSERPEFRIISDEQFEKAQQIKEKNAKQYCQREKRSNKHLFSNLIKCNSCGFSYRRYQKQYSPNRPPKVWWTCSKRSSYGSGRCDSEYIRIDEDWLKSALNTLFKSLLDDRESFFTLVETRCNSIIKEYIRNTSGIVLEEVENRLDELKQERERLKTLAVKALITMDEAEHDMIPINEEIEKLSFRLNETNKTREITQKIKASIQAFLNIFSAFDFSGNITNEELKKVVKEIRVVSKNEIYVYFNIAEDIEGLNFPINISDVVEIDTDSDDRAQRCT

SEQ ID NO: 3065 - protein, 533 aa, Unknown
  Description of Unknown: Integrase B3066 sequence
  PTHR30461:SF3,IPR036162,PS51737,IPR011109,PTHR30461, PF00239,G3DSA:1.10.10.2600,cd14728,IPR006119,SSF53041, cd00338,SM00857,IPR025827,IPR038109,PS51736, PF13408,G3DSA:3.40.50.1390,G3DSA:3.40.50.300,PF07508,Coil
MAFQKIKSVPPENALNAVIYARYSSTQQTENSIDGQLRECNRFADLHGYRIIGTYIDRAKSGTSVEERTDFLRMIEDAKKQQFAYIIVYRFDRFARNRYDSVIYKKQLSAVGVRVISTAETVGDGDEAIILESIYEAMDEAYSRRLSTITKRGLKETARKNLWTSIPPFGYQLFDRRPEILPAEADGVKMIFEKYLEGATKKEIADELNRRGLKTKNGNAFDYKKLDSIMHNKLYTGVSEYMGIERTCPAIISTELFDAVQEKLKASAKYYGRKSENTHYALCGKLYCGYCGKAMVGDAGTSRTGTRYNYYSCPGRKKKKACRKKAERQDFIEWYICEQTLKYVLTDKRIKEIAAKVEELAKSEADTSELKEAERRQNELNKQLDELTAKFIQAKSQRVIDKLNEQADELDKQLTAVESDIARLRLRVQHTVSAEQVERYLRSFKTGDLLSEEFRGRVINTLIQCVYLYDDKIIVYFNIKGAKSITHIDAIRDAESLSGSDSSRCGELESNLSEHAYMIYARGAIGCIIKIER

SEQ ID NO: 3066 - protein, 533 aa, Unknown
  Description of Unknown: Integrase B3067 sequence
  PTHR30461:SF3,SM00857,G3DSA:1.10.10.2600,IPR036162,PF13408, IPR025827,PS51737,G3DSA:3.40.50.1390,IPR006119,IPR038109, PF07508,IPR011109,SSF53041,PTHR30461,Coil, PS51736,cd00338,PF00239
MAKPEVSELAVVYARYSSHSQGEQSIEGQLSNARDYAAAHGYTIVHEYVDRAKSGRTDNRAEFQQMLKDTAKRQFSVIILWKVDRFGRNREEIAINKMKCRKNGVRVEYVAETIPDSPEGVILESVLEGFAEYYSLQLSQNIRRGRAESAEKCQSLGGNRPLGYKTGPDKKFVIDENTAPTVKMIFTMYADGKTVTEIVDKLNELGLRTLRGGPFTKNSLHSILKNKKYIGIYEYQGREIKDGVPRIIEDDVFNKVQEMLKINKRAPAKTWSRADYILTDKLFCGKCGALMFGESGTSKTGAKHNYYICSNKKRFRSCDKKAVRQADIEDTVLNATHELLQDDELLDYIVDRTWEYYLAQDNSQEELRNLQRQLAQTDTAISNLIRAIEAGILTEETKKRMDELTQQKADLKASIADREIARGFHLQKSHIAFYLRSLRDADWSDKEAQKRLIQTFVNAVFVYDDHITLTYNFSGDKSTITLHDMQRFEDGEEFGCRASRSTKQVLDEHLFLQRRLRREVFALIHNRKAPSWE

SEQ ID NO: 3067 - protein, 533 aa, Unknown
  Description of Unknown: Integrase B3068 sequence
  cd03768,PTHR30461:SF3,SM00857,G3DSA:1.10.10.2600,IPR036162, PF13408,PS51737,G3DSA:3.40.50.1390,IPR025827,IPR006119, IPR038109,PF07508,IPR011109,SSF53041,PTHR30461, PS51736,Coil,PF00239
MIKIAIYSRKSVFTGKGESIENQIELCKNYCNTYVNSGSNLEYIIYEDEGFSGKNTNRPEFQHMIDDIKKNKIDTLICYRLDRISRNVADFSSTLELLQKYNVNFISIKERFDTSTPLGRAMIYIASVFAQLERETIAERVRDNMIQLAKSGRWLGGNIPYGFNIARKTYISDFKEKEFSILSPNKKELETVNFVYSYYIKTHSIRQVTRLLNVNSIIGKNGGSFDLTQIRRMLRNPLYVISDDKSHQYLIKKGLNVFGSPNGNGYITYNKSNQKNISADSNQWIVAVSNHKGIITSDNWLKVQYQLDNNKSKMPRIGTGKNHSLFSGILKCKKCGSNMIVKFSGKNKNNIPYEYYVCSGKQNKYLNKCTTKNIRVDKLDKLLTRKLKIHNKTALMKTLRDSIDNICCDFKNNQISSIEYEIHENKVSMDNLIKQLAKSASSTVSDRLMNEINLLDKNIVRLKKHLETIELEQSHDKKTNIDIKNIINVLNSFSDTIEYIDDTAQKRFLIQTLIKSAVWDSDNNNVEIIFNTH

SEQ ID NO: 3068 - protein, 533 aa, Unknown
  Description of Unknown: Integrase B3069 sequence
  cd00338,SM00857,G3DSA:1.10.10.2600,IPR036162,PF13408, IPR025827,PS51737,G3DSA:3.40.50.1390,IPR006119,IPR038109, PF07508,IPR011109,SSF53041,PTHR30461,PS51736, Coil,PF00239
MVQEKLRAVFYARVSTEEERQLNALEKQVAECKDAVLQKGWKLVDQYVDEGKSGTQIKRRDEYKRLFEDLENDKFDIVVIKSQDRLQRNTLDWYIWIDRLTTHGKRLYMYLEDTFYSPDNALISGIKAILAEEYSRELSKKINNSYKRRIEAAKNGEKISIVNNSRSLGYDKVNGELVINEKEAEVVRMIFNMYASGEGLRAISNTLYDMGYRNRSGNEIDPTTISRMLSSEKYKGVYVINQRHYDFDTKKTVLNPKSEWVHIPGAVPAIVEPELWDRVQEIKGSKVQSIKNEKRGRNCGKSIFSGKIYCAKCGAKYWRSLENGYVKFKCSSYSKYGKIPGKGCDNKSFSENALYSILQSLSEQIVEINTAEVRKSLLNWLKSLRERLRASQGDDTIKEEIRKQTARKEKLTDAYMDGIISKEDYSKRYKELEKTLEDLKDKLLTLEVNEDLQSIEEVIQNIDKEMEEYLQTQSFNENRVEFLNQHLTKVTVNKDSFLLEFDLIGGAILTGKDFYLFVDNPRGNCKSILDFWS

SEQ ID NO: 3069 - protein, 533 aa, Unknown
  Description of Unknown: Integrase B3070 sequence
  PTHR30461:SF3,cd00338,SM00857,G3DSA:1.10.10.2600,IPR036162, PF13408,PS51737,G3DSA:3.40.50.1390,IPR025827,IPR006119, IPR038109,PF07508,IPR011109,SSF53041,PTHR30461, PS51736,Coil,PF00239
MAKKKKPAGGIAVIYARYSSHNQRDVSIEQQIEACRKHAAELGLTIIATYEDRAISGRTDNRPAFQRLMHDAEKGKFSYVLAWKSNRMGRNMMQAMVNESRLMDCGIKVYYAEEDFDDSAAGRFALRSMMNVNQFYSDNLAEDVRRGLMDNANKCMVNGRQPLGYKRGKDGKVVVDEPAAAIVREVYTRVASGELFTDIARDLNRRGIKTADKGEWNKNSFHRLCSNEKYRGIYIYGDVRIEGGIPTIIDDPLWYKVQEALRVKKLKRNGRHRPGDEDYLLTGKLRCGKCGGYMIGMSGRSKTGDIHYYYACQNRRVGRTCDKKNIRRDVIEPAVAQAIKEYCLTDDAIEWIADKTVEYWEKADRNLQLDSIEGDLVAVQSSISNVMKAIEMGVVTETTRDRLIELEKQRTDLKSKLALAKEEVVHVDRKKLISSLLLFRNGDIHDRQYQEDLFKTFLISVYVYDDDNNGHLKIVFNAFGDNNTVDLPIDFGETDNQSAFSDGAEKFDYSLHRSTKKPSDSLRWLFCFAFGPV

SEQ ID NO: 3070 - protein, 533 aa, Unknown
  Description of Unknown: Integrase B3071 sequence
  PTHR30461:SF3,SM00857,G3DSA:1.10.10.2600,IPR036162,PF13408, IPR025827,G3DSA:3.40.50.1390,PS51737,IPR006119,IPR038109, PF07508,IPR011109,SSF53041,PF00239,PTHR30461, Coil,cd00338
MKKFKFPIDLSMLTEDEIDQFRQDPSTLFQGDTDVCLYLRFSSERQKEQSIEGQLRDCIAYCKRKNYRIVAIYVDRATTARKDVEKRVHFQEMITASVHQTWKLVVVWKLDRFARNREDSAVFKMRLRKNGVKVESATEGISKNPEGIILEAVLEGIAEYYSADLSQKITRGMRESALKCHSIGGHVPLGYKIEDHKLVINPDTAHIVQEAFELYANGETVADICRMFNAKGYRTAKGAEFNRNSFKSMFRNRRYIGVYRYKDFEKEGGVPPIIDKDLFETVQKRLSANAEAPARGKAKVDYLLAGKLFCGHCGGSMNGESGTSKTGAVHNYYACYTRKRQHSCDKKPLRKEWIEQIVAQDAMELLTDDAIQEMADMAISQTEKDLRENTRIPELSERMKETESGIANITKAVEKGIASDALMNRLVELEKEKKNLLRLIAEEEKYVCKIDRDQIVYWLTKFKDGNIDDENFKRIIIDLMVNSVTVWDEPDGFRITTAYNLTSCKNKTFRISSSSDKGFGFEGLESTKLKATF

SEQ ID NO: 3071 - protein, 533 aa, Unknown
  Description of Unknown: Integrase B3072 sequence
  PTHR30461:SF3,SM00857,G3DSA:1.10.10.2600,IPR036162,PS51737, G3DSA:3.40.50.1390,IPR006119,IPR038109,PF07508,IPR011109, SSF53041,PTHR30461,Coil,PS51736,cd00338, PF00239
MYRELPTFCPEEILVYLRKSRADDPSLSVDEVLARHEELLRDWIERNLVHAIPEENYFREVVSGENIKDRPEFQRVLRKIESPKIAAILVVEVQRLSRGDLEDAGRLIKLLRYTHTMVITPQKVYDLEDEYDRDLFERELKRGNDYLEYTKRILNRGRILSVQNGNYIGNTPPYGFDKCWSIDGKKRVPTLKENEKADIVRTIFRMVDSENMSPYAVAKYLDSIGEPAPSGKHWTYNSVLGILRNQHYDKKVIWGHRSTQQVVIDGHIQSTRPRQKEYLVAEGRQPRVIDHEVFERVQKAISGQPRTRRDLNPVNPFAGIVYCANCGRSLSFRFYRRAGRGETCPPRMLCSDQIHCKSSSCYFYEFSEAVQKVLQKHIHDFSIQLDNLLQEPESYAQDNIRLLENRLNELKQKELRQWEKYADGEMPKEIFDQLNERIQKNKQAAQIALDAAREAAPDTADEIQDKITRLSDALRALQDDTIPVSLKNQYLKAVIERIDYSRPASIRALQGTTDRRHGGWSTPPFELQVHMRF

SEQ ID NO: 3072 - protein, 533 aa, Unknown
  Description of Unknown: Integrase B3073 sequence
  SM00857,G3DSA:1.10.10.2600,IPR036162,PS51737,G3DSA:3.40.50.1390, IPR006119,IPR038109,PF07508,IPR011109,SSF53041, PTHR30461,Coil,PS51736,cd00338,PF00239
MEYYIYLRKSRKDREAEMQGEGETLARHQKTLLDLASKMHLNITRIYKEVVSGETIASRPEMQRLLHDIEDGNCAGVLVMEVERLARGDTKDQGVVAEAFKYSGTKIITPIKTYDPADEYDEEYFEFGLFMSRREYKTINRRIQRGRITSAKEGKFISSTAPYGYRKVKIKNGKGYTLEIVPDQANVVRMIYDWYTKGVTNENGICQPIGATSICRKLDMMHIQPMVNATWSKASVSDILKNPVYTGKIRWSYRKEVKKIKDGKVVKTRPDNHDDYILVDGLHQSIISEETFTAAQRMSAKNRKMPLKNNTQLQNPLSGVIRCSICGCTMTRLGPTSHTPYATLKCSNRYCKNISSPLYLVEQKLLIFLEDWLKNYSLDWSNCRSPFATDAEIKMKEHAINSVAESLNTLQEQLNNTYTFLEKGIYTTEIFLERNKLLTEQINSTKCNLDQLNQEYNDILLLQKSQNEFMPRVQNIIDTYWDVKNMKTRNDMLKEILEKVEYTKDKPNTRGKREVANFTLDIYPKIPRKLPMS

SEQ ID NO: 3073 - protein, 533 aa, Unknown
  Description of Unknown: Integrase B3074 sequence
  PTHR30461:SF3,SM00857,G3DSA:1.10.10.2600,IPR036162,PF13408, IPR025827,G3DSA:3.40.50.1390,PS51737,IPR006119,IPR038109, PF07508,SSF53041,IPR011109,PTHR30461, Coil,PS51736,cd00338,PF00239
MRKKFNIDLSMLTPEEQQQFRDDPTTLTKGEVDVALYLRFSSERQKEQSIEGQLRDCIAYCKRKSFRIVAIYVDRATTARKDVEKRVHFQEMISDSAHHLWNFVVVWKLDRFARNREDSAVFKMRLRKNGVRVKSATETISDNPEGIILESVLEGIAEYYSADLSQKITRGLRESAMKGHSVGGHVPLGYKIEDHRLVINPETAPIVQEAFQLYANGESVAEICRIFNGKGYRTAKNSEFNRSSFKSIFKNVRYIGTYIYKDIEKENAIPAIIDKDLFETVQRRLSLAADAPARGKAKVDSLLSGKLFCGHCGATMNGESGTSKTGAIHNYYTCYSRKRRKGCNKNPLKKDFIERVVAQDAMALLTDDVIEELADMAMSQADKDLKENTRIPELSARLTEVEQGINNITKAVEKGIASDALLNRLTELEKEKKDLTSQLREEEKYIYRIDRDQVVFWLTKFQGGDIEDEDCRRRIIDLLVNSVTVWDEPDGYKITTAYNLTSCKTKTFRVSNNADSPSGEGFGFGELSSTKAA

SEQ ID NO: 3074 - protein, 533 aa, Unknown
  Description of Unknown: Integrase B3075 sequence
  SM00857,G3DSA:1.10.10.2600,IPR036162,PF13408,PS51737, G3DSA:3.40.50.1390,IPR025827,mobidb-lite,IPR006119,IPR038109, PF07508,IPR011109,SSF53041,PTHR30461,Coil, PS51736,cd00338,PF00239
MKAVIYARYSSDNQREESIEGQVRECQSFAERKGYTVIRTYIDRALSGTRADNRPQFQQMISDSTLREFQYVIVWKIDRFSRDKFDSVKYKYALKSSGVSVISATEPIDGSPEGQMMESVFEGISVYYIKDLAQKTSRGMTENAIKGKFNGGTLTFGYTIDENHHFQLDPVNAPIVLDVFTRYSEGETIHSILDDINSKMSNNGRKFTYHFLNWMLNNRRYLGEYKFQDTVNNEAIPPIISQELFDKCQHRLNVNKHKAGSFKKNKEKYLLTGKIFCGICGATISGISGTGKCKSIYRYYKCMNVKKHKCNKKPVQKELIENIVLNAAMDIFKDKALIRKISKACFDLQSKESPMLPALKRRLRENQKEIKNLMNAIKAGIVLKTTRSELEKLETEQEQLETNIAMEKLVKPVIPQEKIQAWLMNFAYADLSDQSQKQRIIDIFVNSVYVYDDRVVIFFNYKDGERYVDFSTLDDLENPAGSNEKKTNTHENECSPLIKSGDPSGNRTRDTLIKSQRKIMPVNGSAMRFRCLN

SEQ ID NO: 3075 - protein, 533 aa, Unknown
  Description of Unknown: Integrase B3076 sequence
  PTHR30461:SF3,cd00338,SM00857,G3DSA:1.10.10.2600,IPR036162, PF13408,PS51737,IPR025827,G3DSA:3.40.50.1390,IPR006119, IPR038109,PF07508,IPR011109,SSF53041,PTHR30461, PS51736,Coil,PF00239
MYEDIKTACLYVRFSSHNQTEQSIEGQTRVCRDFCKRHNIRIVEIYADRATSASKDIEKRVQFLKMIKDSEKGLFDAVIVYKLDRFARSRYDSATYKYRLKRNGVQLISATENISNDPEGIILESVLEGMAEFYSAELSQKINRGMRESAYKHNSIGGAIPLGYKIEDKKLVIDPKTAPIVKEAFEKYADGETVAEICRQFNARGYKTSKGTAFGKSSFTKIFRNERYIGVYTFHDYRAEGAVPAIIDKDLWDRVQLRAGKIKSAPARHKAKVVYLLSGKLFCGHCGSRMNGNCNASNYYYYQCYGKKNGHVDCNKKNIRKEFIERLVAQDALSLLTDEYIEQIAAIACEKNQHEIELDSALPTIRDRIHQVDLSLNNLLKAIESGSAPDMLVKRMGELEKEKKDLQAQAKKESEDIVELDKAQVIYWLEQFRGGSIEDEEFCRMLIDLFVNSVTVWDEDDDTYKVTVAYNLTSLPTKTYRLNKGGTLSDFASNAPGMSANPTITGNLLIHTFHCRLKSHSWKRFWDYDTFLV

SEQ ID NO: 3076 - protein, 533 aa, Unknown
  Description of Unknown: Integrase B3077 sequence
  PTHR30461:SF3,cd00338,SM00857,G3DSA:1.10.10.2600,IPR036162, PF13408,IPR025827,PS51737,G3DSA:3.40.50.1390,IPR006119, IPR038109,PF07508,IPR011109,SSF53041,PTHR30461, PS51736,Coil,PF00239
MYEDIKTACLYVRFSSHNQTEQSIEGQTRVCHDFCKRHNIKIVEIYADRATSASKDIEKRVQFLKMIKDSEKGLFDAVIVYKLDRFARSRYDSATYKYRLKRNGVQLISATENISNDPEGIILESVLEGMAEFYSAELSQKINRGMRESAYKHNSIGGAVPLGYKIEDKKLVIDPKTAPIVKEAFEKYADGETVAEICRQFNARGYKTSKGTAFGKSSFTKIFRNERYIGVYTFHDYRAEDAIPAIIDKDLWDRVQVRVGKIKNAPARNKAKVVYLLSGKIFCGHCGSKMNGNCNAGNYYYYQCYGKKNGNVDCKKKNIRKEFIERLVAQDALSLLTDEYIEQIATIACKKNQHEIELDSALPTIRDRIHQVDLSLNNLLKAIESGSAPDMLVKRMGELEKEKKDLQAQAKKESEDIVELDKAQVIYWLEQFRGGSIEDEEFCRMLIDLFVNSVTVWDKDDNTYKVTVAYNLTSLPTKTYRLNKGGTLSDFTSNAPGMSANPTITGNLLIHTFHCRLKSHSWKRFWDYDTFVV

SEQ ID NO: 3077 - protein, 533 aa, Unknown
  Description of Unknown: Integrase B3078 sequence
  cd00338,SM00857,G3DSA:1.10.10.2600,IPR036162,PF13408, IPR025827,G3DSA:3.40.50.1390,PS51737,IPR006119,IPR038109, PF07508,IPR011109,SSF53041,PTHR30461,PS51736, Coil,PF00239
MVQEKLRAVFYARVSTEEEKQLNALEKQVAECKDAVLQKGWKLVDQYVDEGKSGTQIKRRDEYRRLFEDLENDKFDIVVIKSQDRLQRNTLDWYIWIDRLTTHGKRLYMYLEDTFYSPDNALISGIKAILAEEYSRELSKKINNSYKRRIEAAKNGEKISIVNNSRSLGYDKVNGELVINEKEAEVVRMIFNMYASGEGLRAISNTLYDMGYRNRSGNEIDPTTISRMLSSEKYKGVYVINQRHYDFDTKKTVLNPKSEWVHIPGAVPAIVEPELWDRVQEIKGSKVQSIKNEKRGRNCGKSIFSGKIYCAKCGAKYWRSLENGYVKFKCSSYSKYGKIPGKGCDNKSFSENALYSILQSLSEQIVEVNTAEVRKSLLNWLESLRERLRASQGDDTIKEEIRKQTARKEKLTDAYMDGIISKEDYSKRYKELEKTLEDLKDKLLTLEVNEDLQSIEEVIQNIDKEMEEYLQTQSFNESRVEFLNQHLTKVTVNKDSFLLEFDLIGGAILTGKDFYLFVDNPRRYCKSILDFWI

SEQ ID NO: 3078 - protein, 533 aa, Unknown
  Description of Unknown: Integrase B3079 sequence
  PTHR30461:SF3,cd00338,SM00857,G3DSA:1.10.10.2600,IPR036162, PF13408,IPR025827,G3DSA:3.40.50.1390,PS51737,IPR006119, IPR038109,PF07508,IPR011109,SSF53041,PTHR30461, PS51736,Coil,PF00239
MSVDIKWQVPKAQPEANELAVVYARYSSHSQGEQSIEGQLSNARDYAAAHGYTIVHEYVDRAKSGRTDNRAEFQQMLKDTAKRQFSVIILWKVDRFGRNREEIAINKMKCRKNGVRVEYVAETIPDSPEGVILESVLEGFAEYYSLQLSQNIRRGRAESAEKCQSLGGNRPLGYKTGPDKKFVIDENTAPTVKMIFTMYADGKTVTEIVDKLNEMGLRTLRGGPFTKNSLHSILKNKKYIGIYEYQGHEIKDGVPRIIEDDVFNKVQEMLKINKRAPAKTWSRADYILTDKLFCGKCGALMFGESGTSKTGAKHNYYICSNKKRFRSCDKKAVRQADIEDTVLNATHELLQDDELLDYIVDRTWEYYLAQDNSQEELRNLQRQLAQTDTAISNLIRAIEAGILTEETKKRMDELTQQKADLKASIADREIARGFHLKKSHIAYYLRSLRDADWSDKETQKRLIQTFVNAVFVYDDHITLTYNFSGDKNTITLRDMQRFEDGEEFGCRASRSTKGVLHEPFYFVGGFAVTIWFR

SEQ ID NO: 3079 - protein, 533 aa, Unknown
  Description of Unknown: Integrase B3080 sequence
  SM00857,G3DSA:1.10.10.2600,IPR036162,PF13408,PS51737, IPR025827,G3DSA:3.40.50.1390,IPR006119,IPR038109,PF07508, IPR011109,SSF53041,PF00239,PTHR30461,PS51736, Coil,cd00338
MTVKKFPIDLSCLTEEEISQFQEDPYTLYNGDQDVALYLRYSSTGQSDQSIEGQLRDCRAFCKANHYRIVAIYVDRATTARKDMEKRVHLMEMISDSAKQNWEYVIVWKLDRFARNRNDSAIMKMRLRKNGVKVLSATEHLTDSPESIILESVLEGMAEFFSAELSQKVTRGMRESALKCHSVGGHIPLGYKVENHKLVIDPDTAHIVQEAFSLYANGESVAAICRKFNSAGYKTAKNTEFNRSSFKAMFRNTRYIGTYTYKDIVIENGIPAIIDKELFETVQRRLSKTATAPARGKAKVDYLLSGKLFCGHCGASMNGESGAGRHGKVYHYYSCYTKKRKLGCDKRPLKKDYIEGIVARDALNLLTDQLIDEIADMAIRQSEQDLINDTHIPQLTAQLTEVEKSITNITAAIEKGIASETLMNRLVQLEHEKKTLNKEIKAEEKFVYRIDRDQIVFWLSQFKYGNIEDEDFRRRLIDLLVNSVTVWDEPDGYKITTAYNLTSCKTKTFRVEKNPAAEEATGFDFGESECTRI

SEQ ID NO: 3080 - protein, 533 aa, Unknown
  Description of Unknown: Integrase B3081 sequence
  PTHR30461:SF3,SM00857,IPR036162,PF13408,IPR025827, G3DSA:3.40.50.1390,IPR006119,PF07508,IPR011109,SSF53041, PTHR30461,Coil,PS51736,cd00338,PF00239
MLVFGIYARKSLHSDQSDSVENQVLLAEEYIAKHYPDVEKRLIYYIDEDRSGGDMFRPDWERLITDMRNRILDIIVCYKLDRVGRDVADLALFYREIVQYDLIVVPVRDNLEIKEDMTPIEKGMMYMNAVFSQIERENTIVRVSDNMIKLAEKGYWCGGRPPIGFQLQKVMADNSRMHTILVENPSTLPFYHKLVHDFLTEGLSLGGMETKYKKEKFTTPLGAALTGSQIWILLTNPNYVAADGIMYDYYAAMGCKMAKPRELFDGQHGIIAYCRGRGAGKGSHKRKRILNPPEKWIISVGHHLPILDSQTFLAIQNRFGQNVIDKTRKHKIGILKGVLRCSCGRLMRTKYKYDKQYDIEYRHYYCPTRDRLGPEYCTARMVRLDDLDDEVIRQLTAMSLDYELIDQYISPVIPLPNMRTRVTVEKELKSVQNKISNLTQALSNTDAIAAAKYIISSIEALDSQITKLKKELYDISSVESKTRKREVDKMERYRMVCHIIERLDDADYDEINGLIRELFSECVWDGKKLHIKI

SEQ ID NO: 3081 - protein, 533 aa, Unknown
  Description of Unknown: Integrase B3082 sequence
  PTHR30461:SF3,SM00857,G3DSA:1.10.10.2600,IPR036162,PF13408, IPR025827,G3DSA:3.40.50.1390,PS51737,IPR006119,IPR038109, PF07508,IPR011109,SSF53041,PTHR30461, Coil,PS51736,cd00338,PF00239
MSMDIKWQKPKANNGELAVVYARYSSHNQGEQSIEGQLAEAKKYATAHGYTIVHEYVDRAKTGRTDNRTEFQQMLKDTAKKQFSVIILWKVDRFGRNREEIAINKMKCRKNGVRVEYVAETIPNSPEGVILESVLEGFAEYYSLQLSQNIRRGRAESAEKCQSLGGNRPLGYKTGADKKFVIDENTAPTVKMIFTMYANGATVTEIVNKLNEMGLRTLRGGLFTKNSLYTILRNKKYIGIYEYQDHEVKDGVPRIIEDDVFNRVQEMLKINKRAPAKTWSRADYILTDKLFCGKCGALMFGESGTSKTGAKHNYYICSNKKRFRSCDKKAVRQADIEDAVLDATRKLLQDDELLDFIIDRTWECYLAQDNSQEELRNLQRQLAQTDTAISNLIRAIEAGILTEETKKRMDELTQQKADLKASIADREIARGFHLQKSHIAFYLHSLRDADWSDKETQRRLIQTFVNAVFVYDDHITLTYNFSGDNSIVTLRDMQRFEDGEEFGCRASRSTKTHRYELFWFKNVFGLTRKLPQR

SEQ ID NO: 3082 - protein, 533 aa, Unknown
  Description of Unknown: Integrase B3083 sequence
  PTHR30461:SF3,cd00338,SM00857,G3DSA:1.10.10.2600,IPR036162, PF13408,IPR025827,PS51737,G3DSA:3.40.50.1390,IPR006119, IPR038109,PF07508,IPR011109,SSF53041,PTHR30461, PS51736,Coil,PF00239
MDAVAYIRVSTNKEEQELSLENQREFFEKYVGNRNDTLIRIYSDKGKSATKMKNRKDLQRLLSAARRGEFQRLYVKDISRLFRNTLDFITVSRELANLGVQLHLVNMGEGKDIDMFTLNLMAMIAENESQKISERTKFGKQFSKERGIVPNFVFGYDRTDKYTLVPNPEESRWVQKIFDLYTEEEWGMAKIAKFLYESHVKTKKLKDGQPNYNWSQISVGRILTNPIYIGTVINGKESMKDIFTSQRQKNPKEEWYVSERPEFRIISDEQFEKAQQIKEKNAKQYCQREKRSNKHLFSNLIKCNSCGFSYRRYQKQYSPNRPPKVWWTCSKRSSYGSGRCDSEYIRIDEDWLKSALNTLFKSLLDDRESFFTLVETRCNSIIKEYIRNTSGIVLEEVENRLDELKQERERLKTLAVKALITMDEAEHDMIPINEEIEKLSFRLNETNKTREITQKIKASIQAFLNTFSAFDFSGNITNEELKKVVKEIRVVSKNEIYVYFNIAEDIEGLNFPINISDVVEIDTNSNNRAQRCT

SEQ ID NO: 3083 - protein, 533 aa, Unknown
  Description of Unknown: Integrase B3084 sequence
  PTHR30461:SF3,SM00857,G3DSA:1.10.10.2600,IPR036162,PF13408, PS51737,G3DSA:3.40.50.1390,IPR025827,IPR006119,IPR038109, PF07508,IPR011109,SSF53041,PF00239,PTHR30461, PS51736,Coil,cd00338
MYEDIKTACLYVRFSSHNQTEQSIEGQTRVCRDFCKRHNIRIVEIYADRATSASKDIEKRVQFLKMIKDSEKGLFDAVIVYKLDRFARSRYDSATYKYRLKRNGVQLISATENISNDPEGIILESVLEGMAEFYSAELSQKINRGMRESAYKHNSIGGAIPLGYKIEDKKLVIDPKTAPIVKEAFEKYADGETVAEICRQFNARGYKTSKGTAFGKSSFTKIFRNERYIGVYTFHDYRAEDAIPAIIDKDLWDRVQLRVGKIKNAPARNKAKVVYLLSGKIFCGHCGSKMNGNCNAGNYYYYQCYGKKNGNVDCKKKNIRKEFIERLVAQDALSLLTDEYIEQIATIACEKNQHEIELDSALPTIRDRIHQVDLSLNNLLKAIESGSAPDMLVKRIGELEKEKKDLQVQAKKESEDIVELDKAQVIYWLEQFRGGSIEDEEFCRMLIDLFVNSVTVWDEDDNTYKVTVAYNLTSLPTKTYRLNKGGTLSDFTSNAPGMSANPTITGNLLIHTFHCRLKSHSWKRFWDYDTFLV

SEQ ID NO: 3084 - protein, 533 aa, Unknown
  Description of Unknown: Integrase B3085 sequence
  PTHR30461:SF3,cd00338,SM00857,G3DSA:1.10.10.2600,IPR036162, PF13408,IPR025827,G3DSA:3.40.50.1390,PS51737,IPR006119, IPR038109,PF07508,IPR011109,SSF53041,PTHR30461, PS51736,Coil,PF00239
MYEDIKTACLYVRFSSHNQTEQSIEGQTRVCRDFCKRHNIRIVEIYADRATSASKDIEKRVQFLKMIKDSEKGLFDAVIVYKLDRFARSRYDSATYKYRLKRNGVQLISATENISNDPEGIILESVLEGMAEFYSAELSQKINRGMRESAYKHNSIGGAVPLGYKIEDKKLVIDPKTAPLVKEAFEKYADGETVAEICRQFNARGYKTSKGTAFGKSSFTKIFRNERYIGVYTFHDYRAEGAVPAIIDKDLWDRVQLRAGKIKSAPARHKAKVVYLLSGKLFCGHCGSRMNGNCNASNYYYYQCYGKKNGHVDCNKKNIRKEFIERLVAQDALSLLTDEYIEQIATIACEKNQHEIELDSALPTIRDRIHQVDLSLNNLLKAIESGSAPDMLVKRMGELEKEKKDLQAQAKKESEDIVELDKAQVIYWLEQFRGGSIEDEEFCRMLIDLFVNSVTVWDEDDDTYKVTVAYNLTSLPTKTYRLNKGGTLSDFASNASGMSANPTITGNLLIHTFHCRLKSHSWKRFWDYDTFVV

SEQ ID NO: 3085 - protein, 533 aa, Unknown
  Description of Unknown: Integrase B3086 sequence
  PTHR30461:SF3,cd00338,SM00857,G3DSA:1.10.10.2600,IPR036162, PF13408,IPR025827,G3DSA:3.40.50.1390,PS51737,IPR006119, IPR038109,PF07508,SSF53041,IPR011109,PTHR30461, PS51736,Coil,PF00239
MKSKNKQYIRKAVAYARFSSNNQREESIDAQLRAISDYCEREHIQLVDIFSDEAQSAKSDNRDDFKNMTDAIFKGNYDIDAVLVHKFNRFARNKYDSALYKKRLRDIGIKVVSVTQPIDDSPEGRILESMIEAMDEYYSENLALEVKKGLKENALKGKHTGGGKLLGLSVDSEGYYYPNEQAPIVRRIFSEFANGVPKTKIVERLNREGHRNQYGRKFNTRTILDLLQNEKYIGNFVYQHSVTETIRLDGIIKNPIVDYELWEQVQSKRKSHHKPKQRKRNYFMTGKLRCGICGFTYCGSGSKRTSKKGNSLAAYYKCSGKTKHKNSCTNTSLNKEFYEQLVINTIIENILTDNAINDIAVKTYEQLEKERKEPLIPTKKLKSQLEAIRKKQEKLMELFLDGGIDKDLLDTKNSSLKDEKRHIESQIDKNEYLENSNSLTVEDVSKFIKVFVNELKEMPDIEFSQIVYNTFVDNIVIYPDRLEIALKVDFSTLYRGDKVNFRGAICSLAPVIVDKTVKRKSHQQSAKQRGLKR

SEQ ID NO: 3086 - protein, 533 aa, Unknown
  Description of Unknown: Integrase B3087 sequence
  PTHR30461:SF3,cd00338,SM00857,G3DSA:1.10.10.2600,IPR036162, PF13408,IPR025827,G3DSA:3.40.50.1390,PS51737,IPR006119, IPR038109,PF07508,IPR011109,SSF53041,PTHR30461, PS51736,Coil,PF00239
MYEDIKTACLYVRFSSHNQTEQSIEGQTRVCRDFCKRHNIRIVEIYADRATSASKDIEKRVQFLKMIKDSEKGLFDAVIVYKLDRFARSRYDSATYKYRLKRNGVQLISATENISNDPEGIILESVLEGMAEFYSAELSQKINRGMRESAYKHNSIGGAIPLGYKIEDKKLVIDPKTAPIVKEAFEKYADGETVAEICRQFNARGYKTSKGTAFGKSSFTKIFRNERYIGVYTFHDYRAEDAIPAIIDKDLWDRVQLRVGKIKNAPARNKAKVVYLLSGKIFCGHCGSKMNGNCNAGNYCYYQCYGKKNGNVDCKKKNIRKEFIERLVAQDALSLLTDEYIEQIATIACEKNQHEIELDSALPTIRDRIHQVDLSLNHLLKAIESGSAPDMLVKRMGELEKEKKDLQAQAKKESEDIVELDKAQVIYWLEQFRGGSIEDEEFCRMLIDLFVNSVTVWDEDDNTYKVTVAYNLTSLPTKTYRLNKGGTLSDFASNAPGMSANPTITGNLLIHTFHCRLKSHSWKRFWDYDTFVV

SEQ ID NO: 3087 - protein, 533 aa, Unknown
  Description of Unknown: Integrase B3088 sequence
  PTHR30461:SF3,cd00338,SM00857,G3DSA:1.10.10.2600,IPR036162, PF13408,PS51737,G3DSA:3.40.50.1390,IPR025827,IPR006119, IPR038109,PF07508,IPR011109,SSF53041,PTHR30461, PS51736,Coil,PF00239
MYEDIKTACLYVRFSSHNQTEQSIEGQTRVCRDFCKRHNIRIVEIYADRATSASKDIEKRVQFLKMIKDSEKGLFDAVIVYKLDRFARSRYDSATYKYRLKRNGVQLISATENISNDPEGIILESVLEGMAEFYSAELSQKINRGMRESAYKHNSIGGAVPLGYKIEDKKLVIDPKTAPIVKEAFEKYADGETVAEICRQFNARGYKTSKGTAFGKSSFTKIFRNERYIGVYTFHDYRAEDAIPAIIDKDLWDRVQLRVGKIKNAPARNKAKVVYLLSGKIFCGHCGSKMNGNCNAGNYYYYQCYGKKNGNVDCKKKNIRKEFIERLVAQDALSLLTDEYIEQIATIACEKNQHEIELDSALPTIRDRIHQVDLSLNNLLKAIESGSAPDMLVKRMGELEKEKKDLQVQAKKESEDIIELDKAQVIYWLEQFRGGNIEDEEFCRMLIDLFVNSVTVWDEDDNTYKVTVAYNLTSLPTKTYRLNKGGTLSDFTSNAPGMSANPTITGNLLIHTFHCRLKSHSWKRFWDYDTFVV

SEQ ID NO: 3088 - protein, 533 aa, Unknown
  Description of Unknown: Integrase B3089 sequence
  SM00857,G3DSA:1.10.10.2600,IPR036162,PF13408,PS51737, G3DSA:3.40.50.1390,IPR025827,IPR006119,IPR038109,PF07508, SSF53041,IPR011109,PTHR30461,PS51736,cd00338, PF00239
MQQYCLYLRKSRADAEAEARGEGETLARHERTLLELAKRQQLNVTEIYKEIVSGESLAARPVMQRLLSEVEHGIWAGVLVMEVERLARGDTTDQGIVAQTFKFSNTLIITPTKTYDPENEFDEEYFEFGLFMSRREYKTINRRLQRGRIASIKEGKFVGNKSPYGYERVKIKGDKGFTLKIVPEEAEIVKLIYEWYTHGVLQEDGSYRKIGCELIAQKLNQMKAPTRTGADWILPTVRDMLRNPVYTGKVRWNWRQTVKKMVDGKITKTRPRNDNVLIFKALHEPIISDEVFEAAQNIMSKNPPRPVVDSKRIQNPLAGIVICGICGKPMVRRPYQRPYPDTLMCPRAKCPNVSSDLRRVEQRVISALEVWLEQYKLEWESKDVSPAVKQSEVLKKSFEAQQAEIDKLYKQLSKTHDFLEQGVYNTETFLERSRSISERINIAKESLPKIQSQIDAETAKENNLINVIPKAEKLLETYYTLPTAESKNTMLKEVLEKVVYVKTKRCRKKTDSRDDFEITIFPKIPSQDSRPPA

SEQ ID NO: 3089 - protein, 533 aa, Unknown
  Description of Unknown: Integrase B3090 sequence
  SM00857,G3DSA:1.10.10.2600,IPR036162,PF13408,PS51737, G3DSA:3.40.50.1390,IPR025827,IPR006119,IPR038109,PF07508, IPR011109,SSF53041,PTHR30461,Coil,PS51736, cd00338,PF00239
MAKPEVSELAVVYARYSSHSQGEQSIEGQLSNARDYAAAHGYTIVHEYVDRAKSGRTDNRAEFQQMLKDTAKRQFSVIILWKVDRFGRNREEIAINKMKCRKNGVRVEYVAETIPDSPEGVILESVLEGFAEYYSLQLSQNIRRGRAESAEKCQSLGGNRPLGYKTGPDKKFVIDENTAPTVKMIFTMYADGKTVTEIVDKLNEMGLRTLRGGPFTKNSLHSILKNKKYIGVYEYQGREIKDGVPRIIEDDVFNKVQEMLKINKRAPAKTWSRADYILTDKLFCGKCGALMFGESGTSKTGVKHNYYICSNKKRFRSCDKKAVRQADIEDAVLNATHELLQDDELLDYIVDRTWEYYLAQDNSQEELRNLQRQLAQTDTAISNLIRAIEAGILTEETKKRMDELTQQKADLKASIADREIARGFHLQKSHIAFYLRSLRDADWSDKEAQKRLIQTFVNAVFVYDDHITLTYNFSGDKSTITLRDMQRFEDGEEFGCRASRSTKQVLDEHLFLQRRLRREVFALIHNRKAPSWK

SEQ ID NO: 3090 - protein, 533 aa, Unknown
  Description of Unknown: Integrase B3091 sequence
  PTHR30461:SF3,cd00338,SM00857,G3DSA:1.10.10.2600,IPR036162, PF13408,IPR025827,G3DSA:3.40.50.1390,PS51737,IPR006119, IPR038109,PF07508,IPR011109,SSF53041,PTHR30461, PS51736,Coil,PF00239
MARKRINTPEATGVIYARFSSHNQREESIEQQVAECNTFALASGIKIVGVYSDSAKTGRTDRRPQFQKLQREAQKGEFDYIIAYKSNRIARNILNALMFENEMEKLGIKVVYAKEEFGNNAAGRFALRTMMNVNQFFSENMAEDIKRNQADNALNCRANGPAPYGYKTGADGKFVIDEMRAPIVQEIFNRTANAEKFVEISEDLNRRGIKTKNGNEWGKSSFFTILHNERYTGVYIFNDVRIEGGMPVIIERSLFDRVQKIMKTKKNPQGRKRADDGIYLLTGKLFCGKCKSHMIGMSGTSKNGDSHYYYICNEKRTNGTCDKKAVRRNFLENEIAKAIRRYILQPNVMEWIVQQVLSFQKGDVRQVEIANMQERHKEVKKAIANVMIAIDQGIITASTKEHLQDLESERAQLDARILVAQSEAGKAVTRESLLAYLEHFRAANVEDKECQKELFDTFVKAVYLYDDHITLIFDINDGTTEDVEISMDEVEQSLCENVRLNSVVGHQTASCRSQILGRASICLASFHDGVIRS

SEQ ID NO: 3091 - protein, 533 aa, Unknown
  Description of Unknown: Integrase B3092 sequence
  PTHR30461:SF3,IPR036162,PS51737,IPR011109,PTHR30461, PF00239,G3DSA:1.10.10.2600,IPR006119,SSF53041,cd00338, SM00857,IPR025827,IPR038109,PS51736,mobidb-lite, PF13408,G3DSA:3.40.50.1390,PF07508,Coil
MKKRINTNSAARAVIYARYSSANQRDCSIEQQVEKCRELAAREGVTVIEIYADRAISGKTDRRPNFQRMMKDASLRQFDVVLAWKSNRMGRNMLQAMMNEEQLRSNGIRTIYAEEDFDDTAAGRFALRNMMNVNQFYSENMAEDISRGLMDNASKCMSNGSLPLGYKTGKDQKVVLDEAEAAIVQEIFTRVSCYEPFIDIARDLNRRGIKTKKGAEWGRSSFHTICRNERYRGIYIYRDIRVEGGMPRIVSDELFYKVQEVLKVKKNPQGRRKRSGYEEYLLTGKLYCGHCGSPMTGIAGTSKTGAMHYYYTCQKRRTEHSCDKKAVRRDQIEKAVAIAIQQQLLTDENILWMVDQTMAYNAKTEIEYRLQGLRDQLNANKTATANLLKAIEMGIITDTTKARLLELEQEQGCLLAKIDAAKSEMVPIEREDLIAILTRYRKGSLDDKKYLAALFDTFLVRVDLYDDHLKITFDPTGGKTPVDIPIGVEDSPESPGDSPDSADFSVPSQDAEKVRFDSSQLHQTRAKRTQDNR

SEQ ID NO: 3092 - protein, 533 aa, Unknown
  Description of Unknown: Integrase B3093 sequence
  SM00857,G3DSA:1.10.10.2600,IPR036162,PF13408,PS51737, G3DSA:3.40.50.1390,IPR025827,IPR006119,IPR038109,PF07508, IPR011109,SSF53041,PTHR30461,Coil,PS51736, cd00338,PF00239
MAKPEVSELAVVYARYSSHSQGEQSIEGQLSNARDYAAAHGYTIVHEYVDRAKSGRTDNRAEFQQMLKDTAKRQFSVIILWKVDRFGRNREEIAINKMKCRKNGVRVEYVAETIPDSPEGVILESVLEGFAEYYSLQLSQNIRRGRAESAEKCQSLGGNRPLGYKTGPDKKFVIDENTAPTVKMIFTMYADGKTVTEIVDKLNEMGLRTLRGGPFTKNSLHSILKNKKYIGVYEYQGREIKDGVPRIIEDDVFNKVQEMLKINKRAPAKTWSRADYILTDKLFCGKCGALMFGESGTSKTGVKHNYYICSNKKRFRSCDKKAVRQADIEDTVLNATHELLQDDELLDYIVDRTWEYYLAQDNSQEELRNLQRQLAQTDTAISNLIRAIEAGILTEETKKRMDELTQQKADLKASIADREIARGFHLQKSHIAFYLRSLRDADWSDKEAQKRLIQTFVNAVFVYDDHITLTYNFSGDKSTITLRDMQRFEDGEEFGCRASRSTKQVLDEHLFLQRRLRREVFALIHSRKAPSWK

SEQ ID NO: 3093 - protein, 533 aa, Unknown
  Description of Unknown: Integrase B3094 sequence
  PTHR30461:SF3,SM00857,G3DSA:1.10.10.2600,IPR036162,PF13408, IPR025827,G3DSA:3.40.50.1390,PS51737,IPR006119,IPR038109, PF07508,SSF53041,IPR011109,PTHR30461,mobidb-lite, cd00338,PF00239
MPRKPAKHPAKPKRGKKLEVEEPGVLYGRYSSHNQKDISIEQQFEKCYELAAEYGIRIIDTYADRAVSGRTDKRVDFQRMMADAAKGKFRYVLAWKSNRIGRNMLEALVNEARFQELGVRVLYVEEDFDDTAAGRFAARSMMNVNQFYSENMAEDIKRGLYDNAANCMVTNGHLPYGYKADETLHYAIDEPRAAVIREIFTRVSCGEAFVDIMSSLNARGITTSYGRPWGRSSFQKILSNERYRGIYIYGDVRIEGGIPRIVSDELYFKVQEAITTKKNPQGRHRVNGDYLLTGKLFCGHCKSPMTGISGTGRAGKLHFYYVCQKRRTEKTCHKKNVRRDVIELKIAKAIRDYALKDDIIEWIADSCVEDHDRRVSESHLSVFEDQLAEVNRSIKNVMSAIEKGIITETTKGRLMELEAERTAIEGKICAAKAAIVPTNRERLVEWLRSLREGDVHDKKYQAGLFDTFLVAAYLYDDNRVKIVFSFAGDKNTIEIPLEDVIDSIDDEASCVRLSSTLSHQERVDESQLVLFVL

SEQ ID NO: 3094 - protein, 533 aa, Unknown
  Description of Unknown: Integrase B3095 sequence
  SM00857,G3DSA:1.10.10.2600,IPR036162,PF13408,PS51737, IPR025827,G3DSA:3.40.50.1390,mobidb-lite,IPR006119,IPR038109, PF07508,IPR011109,SSF53041,PTHR30461,Coil, PS51736,cd00338,PF00239
MKAVIYARYSSDNQREESIEGQVRECQSFAERKGYTVIRTYIDRALSGTRADNRPQFQQMISDSTLREFQYVIVWKIDRFSRDKFDSVKYKYALKSSGVSVISATEPIDGSPEGQMMESVFEGISVYYIKDLAQKTSRGMTENAIKGKFNGGTLTFGYTIDENHHFQLDPVNAPIVLDVFTRYSEGETIHSILDDINSKMSNNGRKFTYHFLNWMLNNRRYLGEYKFQDTVNNEAIPPIISQELFDKCQHRLNVNKHKAGSFKKNKEKYLLTGKIFCGICGATISGISGTGKCKSIYRYYKCMNVKKHKCNKKPVQKELIENIVLNAALDIFKDKALIRKISKACFDLQSKESPMLPALKRRLRENQKEIKNLMNAIKAGIVLKTTKSELEKLEAEQEQLEINIAMEKLVKPVIPQEKIQAWLMNFAAADLSDQSQKQRIIDIFVNSVYVYDDRVVIFFNYKDGERYVDFSTLDDLENPAGSNEKKTNTHENECSPLIKSGDPSGNRTRDTLIKSQRKIMPVNGSAMRFRCLN

SEQ ID NO: 3095 - protein, 533 aa, Unknown
  Description of Unknown: Integrase B3096 sequence
  SM00857,G3DSA:1.10.10.2600,IPR036162,PS51737,G3DSA:3.40.50.1390, IPR006119,IPR038109,PF07508,IPR011109,SSF53041, PF00239,PTHR30461,PS51736,Coil,cd00338
MELNRTGRYVMYLRKSRKDDEYGAASNEDVLARHEQLLRDTAKRNKIIVSAIYREVRSGDSISARPMMQQLLSELADGHWDGVLVVEIERLARGDTIDQGIVARAFQDSGAMIITPIKIYDPNDEYDEEYFEFGLFMSRREYKTIKRRMQRGRVAASKEGKFCGNKTPYGYKREKLSGESGFQLVPDPEEAEVIRKIYDWYVNGIPQPSGSRTMAGMAAIAHQLTAEGYAPRFTSVWSHNTVSDLLKNPVYIGKITWGKNKTIDCLQEDGTLRFRDHRQSSANVFDGRHEPLITEDLYFAAQRRRHSSPHSHTHYVADCSNALTGLIRCKYCGRNLFYRKASARSPKDIMLCGNHECLNIGCFYDVLEARIIDAIRMYADQNSKPVKKPKHDGSLQTSINRIQKELDASATQLDRIYTAYERGVYADDVFLERSSSVKKKISDLQRTLKDLQDQEAKQKQADQEQINMIPKMRHLVETYWTLSTPSDRNAALKEVIDHIEYEKHKKSPKGGPFDNFSLVIYPRLFSSPFYFNN

SEQ ID NO: 3096 - protein, 532 aa, Unknown
  Description of Unknown: Integrase B3097 sequence
  PTHR30461:SF3,SM00857,G3DSA:1.10.10.2600,IPR036162,PF13408, PS51737,G3DSA:3.40.50.1390,IPR025827,IPR006119,IPR038109, PF07508,IPR011109,SSF53041,PF00239, PTHR30461,PS51736,Coil,cd00338
MRVSVNLNAQKPDTTTNAVIYARYSSHGQTEQSIEGQLAKGHEYAAAQGYTVVHEYIDRAMTGRNDNREAFQKMLSDTGKHQFQVIIVWKVDRFGRNREEIAFNKHTCKKNGVRVEYVAESLPNSPEAVILESVLEGMAEYYSIQLSQNIRRGQLESAKKCQCVGGSVPLGYTLDSDKHFVIDPQTAPVVKKIFDLYAEGATISEITGQLNEQGIRTIRKQLFTKNSLTKLLKNEKYIGVYTYKDIVRVEGGVPAIVDKSTFDRVQELLKINRRAPSHTWTKVEYLLTDKLFCGHCGSPMVGESGFSHTGAKYSYYGCIKRRREKACDKKPVRQDWIEALVLDETVKLLHDDELMEYIIDRTWEYYQVTDKVQEEKAVLEAQLAEVDKAINNLVRAIEAGIFNAATKSRMDELDAQKAALTASLADLELTSGIRITRDHIEYFLLRLRDLDVKDRECQKRLVQTFVNAVFIYDDGRVKITYNYSGQSSTITLNQIASAEKGKGFVCCLPCSTSQEKSEPDSGWKRVRISLFL

SEQ ID NO: 3097 - protein, 532 aa, Unknown
  Description of Unknown: Integrase B3098 sequence
  PTHR30461:SF3,SM00857,G3DSA:1.10.10.2600,IPR036162,PF13408, PS51737,IPR025827,G3DSA:3.40.50.1390,IPR006119,IPR038109, PF07508,IPR011109,SSF53041,PTHR30461,Coil, PS51736,cd00338,PF00239
MQRPHGAYILARYSTDSQNPDSIEVQVDKCSEWCRTNRLPVLGVYADFAVSGMRDDRPQYRRMMEELRLGGADTVVVYDQSRMFRKMTAWFEFRDELASLGVSVASATQPMVGGDLRDPANFLAEGTTALFNQMWVLQTRQKVIAKMRYMARSAQHTGGTPPLGYCVKAGRLEIAPEEADVVRRIFGEYASGRSYREIIEGLNRDGIRTKRGGTFGSNSLHDLLRNPKYIGVLEYGHTCKRPDGKRNTHGSAPSDLIRVEGAVPAIVDHAIFEEVQRRMANNKRVQGGRPSERREYPLRGKVFCAECKTAMVVSISKGRYTYYSCGARHRLHTCDNMPIKVEDLESRVAEAVRTVLGDPSNSAALIRILREEAGAILAGAAGRLADLIARKSSVATQLGHAVDAILGGLDSPALRKKIEALEQEQAELERDMQVLRRQVDASAIPEDRLRELLATITASGDTAALLSVVARVEVSREDITVWTILDTDPGGKVHTDLTDAGISVPIIPGVAPPAPRVIITAAGALCIKFART

SEQ ID NO: 3098 - protein, 532 aa, Unknown
  Description of Unknown: Integrase B3099 sequence
  PTHR30461:SF3,SM00857,G3DSA:1.10.10.2600,IPR036162,PF13408, IPR025827,G3DSA:3.40.50.1390,PS51737,IPR006119,IPR038109, PF07508,SSF53041,IPR011109,PTHR30461,Coil, PS51736,cd00338,PF00239
MPQKFKIDLSMLTPEEQQQFRDDPTTLTKGEVDVALYLRFSSERQKEQSIEGQLRDCIAYCKRKSFRIVAIYVDRATTARKDVEKRVHFQEMISDSAHHLWNFVVVWKLDRFARNREDSAVFKMRLRKNGVRVKSATETISDNPEGIILESVLEGIAEYYSADLSQKITRGLRESAMKGHCVGGHVPLGYKIEDHRLVINPETAHIVQEAFQLYANGESVAEICRIFNGKGYRTAKNSEFNRSSFKSIFKNVRYIGTYIYKDIEKENAIPAIIDKDLFETVQRRLSLAADAPARGKAKVDYLLSGKLFCGHCGAAMHGESGTSKTGAIHNYYTCYSRKRRKGCNKKPLKKDFIERVVAQDAMALLTDDVIEELADMAMSQADRDLKENTRIPELSARLTEIEQGINNITKAVEKGIASDALLNRLTELEKEKKDLTSQLREEEKYIYRIDRDQVVFWLTKFQGGDIEDEDCRRRIIDLLVNSVTVWDEPDGYKITTAYNLTSCKTKTFRVSNNADSPSGGGFGFGELSSTRT

SEQ ID NO: 3099 - protein, 532 aa, Unknown
  Description of Unknown: Integrase B3100 sequence
  PTHR30461:SF3,SM00857,G3DSA:1.10.10.2600,IPR036162,PF13408, PS51737,G3DSA:3.40.50.1390,IPR025827,IPR006119,IPR038109, PF07508,IPR011109,SSF53041,PF00239,PTHR30461, Coil,cd00338
MTRNNNRVCCLYRVSTDKQVDFNSNHEADLPMQRKACHKFAESKGWVIVHEEQEEGVSGHKVRAAARDKLQIIKDYARKGKFDILLVFMFDRIGRIADETPFVVEWFVRNGIRVWSTQEGEQRFDNHTDKLLNYIRFWQADGESEKTSVRTRTSLRQLVEEGHFKGGNAPYGYDLVRSGRINKRKHELYELHINEQEAAVVRIVFDKYVYEGYGPQHIATYLNNSGYRARSGKCWHPSSIRGMVQNLTYTGVLRCGDARSELMPDLQIVPQEQFENAQRIRNERSVRSTAEAENRLPLNIHGKSLLAGNAYCGHCGAKLELTSSRKWRKMADGSLDDTLRIRYTCYGKLRKQTNCTGQTGYTVHILDEIIDKAVRQIFSKMRGIPKEQIVTKRYEKENAERKNHLQDLQTQRNKAEKDLFALKTEVLACIKGESVLPRETLAEMITAQEEKLTELENLCEAASEELEKTAELMDKVSRLYDELISYADLYDSANFEAKKMIVNQLIRRVDVYRGYQINISFNFDLTPYIEGE

SEQ ID NO: 3100 - protein, 532 aa, Unknown
  Description of Unknown: Integrase B3101 sequence
  PTHR30461:SF3,IPR036162,PS51737,IPR011109,PTHR30461, PF00239,G3DSA:1.10.10.2600,IPR006119,SSF53041,cd00338, SM00857,IPR025827,IPR038109,PS51736,mobidb-lite, PF13408,G3DSA:3.40.50.1390,PF07508,Coil
MQQALNAVIYARYSSHSQQEQSIEGQLRDCYAYAQREGLHVVGEYIDRAISGKTDERPDFQRMIVDASKKQFQRVIVWKLDRFARNRYDSAHYKAKLKKYGVKVVSATENISDEPEGIILEGLLESMAEYYSANLSKHVRRGQRESIINGTYLGGVPPIGYKVENKRLVIDERTAPTIRYMFEQYAKGVPKREIIAELNARGIRNKKGKPLTLSSMQAALRNEKYIGIYRYSGQEVTGGCEALIDEATFRKVQERLDKVKHAPAAAKAKIDYLLQGKAFCGYCGSRMVGESGRGKMGNTYHYYACGKRKKEHTCAKKNEKKDFIEWYVVEQTVEYVLTPDRMDYIAAALVAQYEKDFGDNRIKDYEKQLERINGEIRSLVDTLAVCPPSARQPIFDKMELLDVQKTDLEIDIAKLRVAARVQLTEEQIKVWLKQFCKGDLDDMEFRERIIDVFINSVYLYDDKTVIYYNIEGGKQVSYMEMLDSTEEPPFADDPQGSSGVRISNDTPRHYNSNPNAPRYIFVNGLFGIICKR

SEQ ID NO: 3101 - protein, 532 aa, Unknown
  Description of Unknown: Integrase B3102 sequence
  PTHR30461:SF3,SM00857,G3DSA:1.10.10.2600,IPR036162,PF13408, IPR025827,G3DSA:3.40.50.1390,PS51737,IPR006119,IPR038109, PF07508,SSF53041,IPR011109,PF00239,PTHR30461, PS51736,Coil,cd00338
MKAAIYARFSSHNQREESIEGQVRACKRFAKEHGMTIVEIYADRGLSGLHADNRPEFQRMIQDSDHHRFEALIMWNLDRFSRDKYDTAVYKTRLKKNGVSLYYSDQSIPDTPEGIILESLLEGFAQYYSANLARNAKRGLQENARKCLWNGGCVPLGYLIDEHQRFVLEPIGAACVRMIFELYASGQSIKSIVSTLNEKGYKTVKGNHFRLGSIQGILRNRKYIGEYHASGITVPNGIPAIVDVQLFNDVQARLGVIASAKAHNKADIPYLLTTKVFCGHCGSPMIGESGTGKGGATYRYYKCSCRKNRKGTCDKKTEPKDWLEENVVKQTVKNVLRPEVIKEISENCAAALKADASDESLVQALKAQLAETDKALRNLLKAIEAGIISSTTRERMAELESQKSELEAQIAREQLRKPEITAEQISFWLESFLAGDIHDPKYQERIINALVRRVDVYDDGPEKQKLTVFYNITKNNHSSSKISISKCSDIECIALPKRSVAKAADFFICFLHLPLPRRPLCNGAPNHAQPRC

SEQ ID NO: 3102 - protein, 532 aa, Unknown
  Description of Unknown: Integrase B3103 sequence
  PTHR30461:SF3,IPR036162,PS51737,IPR011109,PTHR30461, PF00239,G3DSA:1.10.10.2600,IPR006119,SSF53041,cd00338, SM00857,IPR025827,IPR038109,PS51736,mobidb-lite, PF13408,G3DSA:3.40.50.1390,PF07508,Coil
MQQALNAVIYARYSSHSQQEQSIEGQLRDCYAYAQREGLQVVGEYIDRAISGKTDERPDFQRMIADASKKQFQRVIVWKLDRFARNRYDSAHYKAKLKKYGVKVVSATENISDEPEGIILEGLLESMAEYYSANLSKHVRRGQRESIINGTYLGGVPPIGYKVENKRLVIDERTAPTIRYMFEQYAKGVPKREIIAELNARGIRNKKGKPLTLSSMQAALRNEKYIGIYRYSGQEVTGGCEALIDEATFRKVQERLDKVKHAPAAAKAKIDYLLQGKAFCGYCGSRMVGESGRGKMGNTYHYYACGKRKKEHTCAKKNEKKDFIEWYVVEQTVEYVLTPDRMDYIAAALVAQYEKDFGDNRIKDYEKQLERINGEIRSLVDTLAVCPPSARQPIFDKMELLDVQKTDLEIDIAKLRVAARVQLTEEQIKVWLKQFCKGDLDDMEFRERIIDVFINSVYLYDDKTVIYYNIEGGKQVSYMEMLDSAEEPPFADDPQGSSGVRISNDTPRHYNSNPNAPRYIFVNGLFGIICKR

SEQ ID NO: 3103 - protein, 532 aa, Unknown
  Description of Unknown: Integrase B3104 sequence
  PTHR30461:SF3,SM00857,G3DSA:1.10.10.2600,IPR036162,PF13408, IPR025827,G3DSA:3.40.50.1390,PS51737,IPR006119,IPR038109, PF07508,IPR011109,SSF53041,PTHR30461,Coil, PS51736,cd00338,PF00239
MKGVIYARYSSDKQTEQSIEGQIRECTKFAEENRIEIIKIYTDRALSGKTADREEFQQMISDSADGEFEAIVVYKLDRFARNRYDSAIYKSRLKSNGVKVLSAKENITDSPEGVILESLLEGMAEYYSLDLAQKTSRGMMENALKCRHTGGRPLLGYKLNPDKTYCIDETTAPIVRKIFEMYAQGSSYNQIIDALNKTGAKTGSGKTFGKNSIHDLLKNERYSGVYIYNRIPRDSTGKRNSHGTKEDGMIRIEGGMPAIIDRELWEEVQKKMEGNKKSPARNKAKIDYLLSGKLFCGHCGSAMVGQSSTTRGVVYPYYVCNHKVRLRTCDKKNVKKDDIEDLVIDETVHRVLADEAIDNIADQVAALSFQEGMDTSRMDHLKSQLKSTEEIIINICNAIAQGVLTPSTKKMLEEAEEKKEHLSLELEQEKVIQKNVITKEQVLFWLSQFQNGDTNDPEYRKKLVDVFINKIFVYDDKFVITYNFSGDNNTVELSDVNIALSDLSQSGPPAPQKPKIFVVKNIFGIVKRFIER

SEQ ID NO: 3104 - protein, 532 aa, Unknown
  Description of Unknown: Integrase B3105 sequence
  PTHR30461:SF3,IPR036162,PS51737,IPR011109,PTHR30461, PF00239,G3DSA:1.10.10.2600,IPR006119,SSF53041,cd00338, SM00857,IPR025827,IPR038109,mobidb-lite,PS51736, PF13408,G3DSA:3.40.50.1390,PF07508,Coil
MYEDIKTACLYVRFSSHNQTEQSIEGQTRVCRDFCKRHNIRIVEIYADRATSASKDIEKRVQFLKMIKDSEKGLFDAVIVYKLDRFARSRYDSATYKYRLKRNGVQLISATENISNDPEGIILESVLEGMAEFYSAELSQKINRGMRESAYKHNSIGGAIPLGYKIEDKKLVIDPKTAPIVKEAFEKYADGETVAEICRQFNARGYKTSKGTAFGKSSFTKIFRNERYIGVYTFHDYRAEDAIPAIIDKDLWDRVQLRVGKIKNAPARNKAKVVYLLSGKIFCGHCGSKMNGNCNAGNYCYYQCYGKKNGNVDCKKKNIRKEFIERLVAQDALSLLTDEYIEQIATIACEKNQHEIELDSALPTIRDRIHQVDLSLNHLLKAIESGSAPDMLVKRMGELEKEKKDLQAQAKKESEDIVELDKAQVIYWLEQFRGGSIEDEEFCRMLIDLFVNSVTVWDEDDNTYKVTVAYNLTSLPTKTYRLNKGGTLSDFASNAPETGAAQKSPDTPDRSRRRQSRRPIRWSGRAWASCFR

SEQ ID NO: 3105 - protein, 532 aa, Unknown
  Description of Unknown: Integrase B3106 sequence
  SM00857,G3DSA:1.10.10.2600,IPR036162,PS51737,G3DSA:3.40.50.1390, IPR006119,IPR038109,PF07508,IPR011109,SSF53041, PTHR30461,Coil,PS51736,cd00338,PF00239
MVLLDTYCIYLRKSRADAEAEARGEGETLARHEHTLCDLAKRQKLHISKIYREIVSGETIAARPQMQQLLQDVESGIYAGVLVMEVERLARGDTIDQGIVAQAFKYSGTKIVTPTKTYNPDNEFDEEYFEFSLFMSRREYKTIKRRMQAGRAAAAKEGKFVGNIPPYGYDRKKLDHDSGFMLVPNEKAKIVKIIFEWYTVGVVMPDGTRQRIGTTHIANRLHQMGIKTPRGGRWNNYSVRSILLNPVYCGVIRWGYRRGKSKLQNGVITKTRPTAEDGYIEAKGLHEPIISQDTYETAQELAHAAAKIPKVKLGGALKNPLAGIVVCRKCGKSMGRQPYTSEKYSGEMLICKNPDCRCVSSDIHIVEQRLLDSLAEWLHQYEVQWKEHTLQAAAAEPKDDQTAVLEDLRKEQAKAKAQLAKAYDLLEQEIYDTNTFVERSSILKAKIADLQDSIDHVEKSVREMSSRDDDMQKIIPKVKHILEVYSTLPDASAKNQLLKEVLEKAEYSKDHSTRWHGNPDDFDLVIFPKLPR

SEQ ID NO: 3106 - protein, 532 aa, Unknown
  Description of Unknown: Integrase B3107 sequence
  PTHR30461:SF3,cd00338,SM00857,IPR036162,PS51737, G3DSA:3.40.50.1390,IPR006119,PF07508,IPR011109,SSF53041, PTHR30461,Coil,PF00239
MEQKVAIYCRVSTQSNDQANSIDTQKSLLINYCREHGLAYDLYIDHGYSGTNIKRPKFLELMEKCSLVYVPKFDILTIDRTKEVQYKTILVKNTSRLGRDMYLLQILNMLKKVGVIVEYLEDGKSTATMDNAMDSFMIGLSTLLDRNFSEANSKKIITGMREGAKKGNLNFAKIFGYDKVDDHLVVNKAESKIVQTIFNMYTEEGKGFRRIAQELNEAGYRSKNNKPFSHNSIADIISQSKYYGNLTRNKQARSKLLKEKSVTIRPKDQWIQHNYGDIVNGEKWEKIPPLITKEQWLKAQQIRDNRAGDTRGIWKGIGNWAGKIHCKCGNNYVRNSYKDHHGKTHTYLVCYLKKTKGLRACNSINLSEEKILNVVTQDYINGLVLRQKLIQIQGITHKIRALHTEMNNYSQLDLDSVQNRLYKVKQRKQVLLDRLLDNTIDNTTYKEKAVELDEQINNLTTTINEITNNYNDINNKINQLQQKKKQVAQIKINKTYSKEDIIESIKNIYVDGNKLEIHIDINGVLFKDTLYI

SEQ ID NO: 3107 - protein, 532 aa, Unknown
  Description of Unknown: Integrase B3108 sequence
  PTHR30461:SF3,cd00338,SM00857,G3DSA:1.10.10.2600,IPR036162, PF13408,PS51737,G3DSA:3.40.50.1390,IPR025827,IPR006119, IPR038109,PF07508,SSF53041,IPR011109,PTHR30461, Coil,PF00239
MTENNNRVCCLYRVSTDKQVDFNSNHEADLPMQRKACHKFAESKGWVIVHEEQEEGVSGHKVRAAARDKLQIIKDYARKGKFDILLVFMFDRIGRIADETPFVVEWFVRNGIRVWSTQEGEQRFDNHTDKLLNYIRFWQADGESEKTSVRTRTSLRQLVEEGRFKGGNAPYGYDLTRNGRTNKRKHELYELHINEQEAAVVRIVFDKYVYEGYGPQHIATYLNNSGYRARSGKCWHPSSIRGMVQNLTYTGVLRCGDARSELMPDLQIISQQQFETAQRIRDNRSVRAAADAENRTPLNIHGKSLLSGNAYCGHCGAKLELTSSRKWRKLADGSLDDTLRVRYTCYGKLRKQTECTGQTGYTVHILDEIIDKAVRQIFSKMRGIPKEQIVTKRYEKENAERKNHLQALQAEKDKAEKDLLALKAEILACIKGESVLPRETLAEIITEQEEKLTELEALCESASDELVRKAELMDNVSKLYDELISYADLYDSANFEAKKMIVNQLIRRVDVCRGYQINISFNFDLTPYIEGE

SEQ ID NO: 3108 - protein, 532 aa, Unknown
  Description of Unknown: Integrase B3109 sequence
  PTHR30461:SF3,SM00857,G3DSA:1.10.10.2600,IPR036162,PF13408, IPR025827,PS51737,G3DSA:3.40.50.1390,IPR006119,IPR038109, PF07508,IPR011109,SSF53041,PTHR30461,Coil, PS51736,cd00338,PF00239
MTNNYTQQKKELLYDMVSGVTYVDAYCRYSSTMQDEGNSIEYQMEDIEKYCANNGLVVRKWYIDKAKSAKKVAGRDSFYEMIEDIKAGTSASALIVWKTNRAFRNAYESHKYRNFLRENNIKLISVTQNIDEDTSTGRLTTNILSDIDQYKSEETAEQVTAALRLMAKRGFYTGQPIPCGYKTVPADDNGKPRKRYAICEEESPKIIKVFKDFADGVPPSIILEYMRQEGLKTDRGKPFDYNALMRMLKNDFYIGTRRYDKKSDDPVIVENCHPALIDNKTFDGVQYMFTSRRNENSIKSRKNGKKRYYYCTGLLYCENCGGAYFGKSSGEHAYYHCSARVKRKACNGKAIRQDFLENYVLRVIKEHIFSPEAIEKIAEEALKDLQKPAGPVTSKKELTAQKTKLLTEIANLTQMRLDGEISKDVFAIMKKPKDDEIAEIEMRLHMMEQQQNAAIDKEFIVDYIGKMISHIESGDPELIKYVFENTVEKIIISDSKVEIHLAIYFNKKLHNKTLALPNYTLCKKIDRKKIIK

SEQ ID NO: 3109 - protein, 532 aa, Unknown
  Description of Unknown: Integrase B3110 sequence
  PTHR30461:SF3,SM00857,G3DSA:1.10.10.2600,IPR036162,PF13408, IPR025827,G3DSA:3.40.50.1390,PS51737,IPR006119,IPR038109, PF07508,IPR011109,SSF53041,PTHR30461,Coil, PS51736,cd00338,PF00239
MKGVIYARYSSDKQTEQSIEGQIRECTKFAEENRIEIIKIYTDRALSGKTADREEFQQMISDSADGEFEAIVVYKLDRFARNRYDSAIYKSRLKSNGVKVLSAKENITDSPEGVILESLLEGMAEYYSLDLAQKTSRGMMENALKCRYTGGRPLLGYKLNPDKTYCIDETTAPIVRKIFEMYAQGSSYNQIIDALNKTGAKTGSGKTFGKNSIHDLLKNERYSGVYIYNRIPRDSTGKRNSHGTKEDGMIRIEGGMPAIIDRELWEEVQKKMEGNKKSPARNKAKIDYLLSGKLFCGHCGSAMVGQSSTTRGVVYPYYVCNHKVRLRTCDKKNVKKDDIEDLVIDETVHRVLADEAIDNIADQVAALSFQEGMDTSRMDHLKSQLKSTEEIIINICNAIAQGVLTPSTKKMLEEAEEKKEHLSLELEQEKVIQKNVITKEQVLFWLSQFQNGDTNDPEYRKKLVDVFINKIFVYDDKFVITYNFSGDNNTVELSDVNIALSDLSQSGPPAPQKPKIFVVKNIFGIVKRFIER

SEQ ID NO: 3110 - protein, 532 aa, Unknown
  Description of Unknown: Integrase B3111 sequence
  cd00338,SM00857,G3DSA:1.10.10.2600,IPR036162,PF13408, PS51737,G3DSA:3.40.50.1390,IPR025827,IPR006119,IPR038109, PF07508,IPR011109,SSF53041,PTHR30461,PS51736, Coil,PF00239
MGKTMTEGSSALKEKRVIVIEATEQQEAKKLRVAAYARVSSDSSDQLNSFMAQMNYYSDLISTHEGWAMADIYADEGITGTSAEKRLEFQRLLSDCHKGRIDKILVKSISRFARNTKECLETIRSLKAIGVGVYFEEQNIDTAAMSGELLTAVFASIAQKESESISGNMRWSYEHRMKSGTYLPSSMPYGYTIKDKKIVVDEDQAKIVRLIFSSYLAGTNMVEIAKILNDAGVSVKNGDPQQKWSKSSISYILSNEKYIGDSLWQKTYSTDTFPVRRYVNNGEREKYYAQNTHPAIIDFKTYDAVQKLKAARKEILDNSPKKTSPLSHSIYCGHCGALFRRKMCRGIQYWECSKHAQSKNNCIIHQIPETEFHNAFLRLYHKLKLHGRPILKQMITDLQTVRERRMLWSVDIIELNKRISDLTDQDHTLSEMNKLGLVDPDIYISQSNELARKIAAAKQEKERLIGLSQDTTIPQTRELMEIIEFSPDFLPTFDSESFTGLVEKITVESNESLRITLKNGLELREKIERTIR

SEQ ID NO: 3111 - protein, 532 aa, Unknown
  Description of Unknown: Integrase B3112 sequence
  PTHR30461:SF3,SM00857,G3DSA:1.10.10.2600,IPR036162,PF13408, IPR025827,G3DSA:3.40.50.1390,PS51737,IPR006119,IPR038109, PF07508,IPR011109,SSF53041,PTHR30461,Coil, cd00338,PF00239
MTGRNDNRDEFQQMLSDCAKKQFQVVIVWKVDRIGRNREEITFNKYRMKKHGVRVEYVAENIPDSPEAVILESVLEGMAEYYSLQLSQNIRRGYRENAKKCKYAGGRVPLGYKLAEDKSFEIDPATAPIVKDIFNRYASGQTITEIITDLNAQGLRTATGSEFTKNSLRALLKNEKYIGIFDFKNGEIRIEDGVPALTDKSTFDKVQKLLVTNQRAPAHKWSKAEYLLTDKLFCGSCGGLMAGESGTSKTGAKYSYYLCTNHKRKRGCTQKAIRADWLEKYVLDTAKSIILDDKTIEFIADGTWEYYQQHERRREKVEALKGQLAEVDKALTNIMRAIESGLPFTETAKARVEELDGQKTALTSAIAEAELAYDSGLTRDHILFFLKQFQEFDYSQPQYQKRLIDTFINSIYVYPDEMTFNFNFGNESRTIKFEEMEAAKDGEVFARCAPCSTIKGLLLDRITIKARALFCCILCENKSISEHFKHLRLFRLFRRGGLFCFRGKRLFDAFHFMGIRFILVMFVERIVSYRNN

SEQ ID NO: 3112 - protein, 532 aa, Unknown
  Description of Unknown: Integrase B3113 sequence
  PTHR30461:SF3,SM00857,G3DSA:1.10.10.2600,IPR036162,PF13408, PS51737,IPR025827,G3DSA:3.40.50.1390,IPR006119,IPR038109, PF07508,IPR011109,SSF53041,PF00239,PTHR30461, Coil,cd00338
MTENNNRVCCLYRVSTDKQVDFTSNHEADLPMQRKACHKFAESKGWVIVHEEQEEGVSGHKVRAAARDKLQIIKDYARRGKFDILLVFMFDRIGRIADETPFVVEWFVRNGIRVWSTQEGEQRFDNHTDKLLNYIRFWQADGESEKTSVRTRTSLRQLVEEGHFKGGNAPYGYDLVRSGRINKRKHELYELHINEQEAAVVRIVFDKYVYEGYGPQHIATYLNNSGYRARSGKCWHPSSIRGMVQNLTYTGVLRCGDARSELMPDLQIVPQEQFENAQRIRNERSVRSTAEAENRLPLNIHGKSLLAGNAYCGHCGAKLELTSSRKWRKMADGSLDDTLRIRYTCYGKLRKQTNCTGQTGYTVHILDEIIDKAVRQIFSKMRGIPKEQIVTKRYEKENAERKNHLQDLQTQRNKAEKDLLALKTEVLACIKGESVLPRETLAEMITAQEEKLTELENLCEAASEELEKTAELMDKVSRLYDELISYADLYDSANFEAKKMIVNQLIRRVDVYRGYQINISFNFDLTPYIEGE

SEQ ID NO: 3113 - protein, 532 aa, Unknown
  Description of Unknown: Integrase B3114 sequence
  PTHR30461:SF3,SM00857,G3DSA:1.10.10.2600,IPR036162,PF13408, PS51737,G3DSA:3.40.50.1390,IPR025827,IPR006119,IPR038109, PF07508,IPR011109,SSF53041,PTHR30461,Coil, cd00338,PF00239
MTENNNRVCCLYRVSTDKQVDFNSNHEADLPMQRKACHKFAESKGWVIVHEEQEEGVSGHKVRAAARDKLQIIKDYARKGKFDILLVFMFDRIGRIADETPFVVEWFVRNGIRVWSTQEGEQRFDNHTDKLLNYIRFWQADGESEKTSVRTRTSLRQLVEEGHFKGGNAPYGYDLVRNGRINKRKHELYELHINEQEAAVVRIVFDKYVYEGYGPQHIATYLNNSGYRARSGKCWHPSSIRGMVQNLTYTGVLRCGDARSELMPDLQIVPQEQFENAQRIRNERSVRSTAEAENRLPLNIHGKSLLAGNAYCGHCGAKLELTSSRKWRKMADGSLDDTLRIRYTCYGKLRKQTNCTGQTGYTVHILDEIIDKAVRQIFSKMRGIPKEQIVTKRYEKETTERKNHLQDLQTQRDKAEKDLLSLKAEILACIKGESVFPRETLAEMITEQEEKLKELEDLCESASEELERTAELMDKVSRLYDELISYADLYDSANFEAKKMVVNQLIRRVDVYRGYQINISFNFDLTPYIEGE

SEQ ID NO: 3114 - protein, 532 aa, Unknown
  Description of Unknown: Integrase B3115 sequence
  PTHR30461:SF3,SM00857,G3DSA:1.10.10.2600,IPR036162,PF13408, PS51737,IPR025827,G3DSA:3.40.50.1390,IPR006119,IPR038109, PF07508,IPR011109,SSF53041,PTHR30461,Coil, cd00338,PF00239
MTENNNRVCCLYRVSTDKQVDFNSNHEADLPMQRKACHKFAESKGWVIVHEEQEEGVSGHKVRAAARDKLQIIKDYARKGKFDILLVFMFDRIGRIADETPFVVEWFVRNGIRVWSTQEGEQRFDNHTDKLLNYIRFWQADGESEKTSVRTRTSLRQLVEEGHFKGGNAPYGYDLVRSGRINKRKHELYELHINEQEAAVVRIVFDKYVYEGYGPQHIATYLNNSGYRARSGKCWHPSSIRGMVQNLTYTGVLRCGDARSELMPDLQIVPQEQFENAQRIRNERSVRSTAEAENRLPLNIHGKSLLAGNAYCGHCGAKLELTSSRKWRKMADGSLDDTLRIRYTCYGKLRKQTNCTGQTGYTVHILDEIIDKAVRQIFSKMRGIPKEQIVTKRYEKETTERKNHLQDLQTQRDKAEKDLLSLKAEILACIKGESVLPRETLAEMITEQEEKLKELEDLCESASEELERTAELMDKVSRLYDELISYADLYDSANFEAKKMVVNQLIRRVDVYRGYQINISFNFDLTPYIEGE

SEQ ID NO: 3115 - protein, 532 aa, Unknown
  Description of Unknown: Integrase B3116 sequence
  PTHR30461:SF3,SM00857,G3DSA:1.10.10.2600,IPR036162,PF13408, IPR025827,G3DSA:3.40.50.1390,PS51737,IPR006119,IPR038109, PF07508,IPR011109,SSF53041,PTHR30461,Coil, cd00338,PF00239
MIVTKPTQEKTLKTVYCLYRVSTKGQVDKNDIPMQKQSCREFAEHQPGWVIKKEFQEKGVSGFKVSANDRDAVQELKTAAENKEFDILLVFMFDRIGRIDNETPFVVEWFIQHGIEVWSVNEGEQRMDSHVDKLMNYIRFWQANGESQKTSMRVKTRLHQLVEDGIYTGGCAPFGYRLVKSGVVNKRGKELLTLEIDPIEKEMVKTIFEKTVKDGYGSYVMAQYVNDRKTLTHNGAKFQSNTIKRILQNPIYCGYYNRGGVTSKRVKELQIIDDAVFDEAQKILEQRKYTNEKKTQLARTAKSSTMLGGNIYCAHCGKKLCANSFVDRYTTKDGTTHDGGRRFRYLCSGKAMKRNECDGQSVYSAAKVDEIVLDALHKCFDKIKATPKDAAIEKKYRTQISQIKTEIKRLNKETETLKRKLGELTEEIANSLMGDSKFTPDVLSMAIETTKGKIADNVQRIAEKQNQLNDKETDMSKIDYYYEEFVSWADEFDNAPAERQRMIICKLFKEILVGKGYSVQILMDSSYEQFLI

SEQ ID NO: 3116 - protein, 532 aa, Unknown
  Description of Unknown: Integrase B3117 sequence
  PTHR30461:SF3,SM00857,G3DSA:1.10.10.2600,IPR036162,PF13408, PS51737,G3DSA:3.40.50.1390,IPR025827,IPR006119,IPR038109, PF07508,SSF53041,IPR011109,PTHR30461,Coil, PS51736,cd00338,PF00239
MPQKFKIDLSMLTPEEQQQFRDDPTTLTKGEVDVALYLRFSSERQKEQSIEGQLRDCIAYCKRKSFRIVAIYVDRATTARKDVEKRVHFQEMISDSAHHLWNFVVVWKLDRFARNREDSAVFKMRLRKNGVRVKSATETISDNPEGIILESVLEGIAEYYSADLSQKITRGLRESAMKGHCVGGHVPLGYKIEDHRLVINPETAHIVQEAFQLYANGESVAEICRIFNGKGYRTAKNSEFNRSSFKSIFKNVRYIGTYIYKDIEKENAIPAIIDKDLFETVQRRLSLAADAPARGKAKVDYLLSGKLFCGHCGAAMHGESGTSKTGAIHNYYTCYSRKRRKGCNKKPLKKDFIERVVAQDAMALLTDDVIEELADMAMSQANRDLKENTRIPELSARLTEIKQGINNITKAVEKGIASDALLNRLTELEKEKKDLTSQLREEEKYIYRIDRDQVVFWLTKFQGGDIEDEDCRRRIIDLLVNSVTVWDEPDGYKITTAYNLTSCKTKTFRVSNNADSPSGEGFGFGELSSTRT

SEQ ID NO: 3117 - protein, 532 aa, Unknown
  Description of Unknown: Integrase B3118 sequence
  PTHR30461:SF3,IPR036162,PS51737,IPR011109,PTHR30461, PF00239,G3DSA:1.10.10.2600,IPR006119,SSF53041,cd00338, SM00857,IPR025827,IPR038109,PS51736,mobidb-lite, PF13408,G3DSA:3.40.50.1390,PF07508,Coil
MQQALNAVIYARYSSHSQQEQSIEGQLRDCYAYAQREGLHVVGEYIDRAISGKTDDRPDFQKMIADASKQQFQRVIVWKLDRFARNRYDSAHYKAKLKKYGVKVISATENITDAPEGIILEGLLESMAEYYSANLSKHVRRGQRESIINGTYLGGVPPIGYKVENKRLVIDERTAPTIRYMFEQYAKGVSKREIIAELNARGIRNKKGKPLTLSSMQAALRNKKYIGVYLYNGQEVAGGCEALIDEATFYKVQERLDKVKHAPAASKAKIDYLLQGKAFCGYCGTRMVGESGRGKMGNTYHYYACGKRKKEHTCNKKNEKKDFIEWYVVEQTVEYVLTPDRMDYIAAALVAQYEKDFGDNHIKDYEKQLERVNAEISSLVDTLAVCPPAARKPIFDKMELLDVQKTDLEIDIAKLHVAARVQLTEEQIKTWLKTFCKGDLDDMEFRERIIDVFINSVYLYDDKTVIYYNIEGGKQVSYMEMLDSTEEPPFADDLQGSSGVRISNDTPRHYNSNPNAPRFIFVNGLFGIICKR

SEQ ID NO: 3118 - protein, 532 aa, Unknown
  Description of Unknown: Integrase B3119 sequence
  PTHR30461:SF3,cd00338,SM00857,G3DSA:1.10.10.2600,IPR036162, PF13408,PS51737,G3DSA:3.40.50.1390,IPR025827,IPR006119, IPR038109,PF07508,IPR011109,SSF53041,PTHR30461, PS51736,Coil,PF00239
MYEDIKTACLYVRFSSHNQTEQSIEGQTRVCRDFCKRHNIRIVEIYADRATSASKDIEKRVQFLKMIKDSEKGLFDAVIVYKLDRFARSRYDSATYKYRLKRNGVQLISATENISNDPEGIILESVLEGMAEFYSAELSQKINRGMRESAYKHNSIGGAVPLGYKIEDKKLVIDPKTAPIVKEAFEKYADGETVAEICRQFNARGYKTSKGTAFGKSSFTKIFRNERYIGVYTFHDYRAEDAIPAIIDKDLWNRVQLRVGKIKNAPARNKAKVVYLLSGKIFCGHCGSKMNGNCNAGNYYYYQCYGKKNGNVDCKKKNIRKEFIERLVAQDALSLLTDEYIEQIATIACEKNQHEIELDSALPTIRDRIHQVDLSLNNLLKAIESGSAPDMLVKRMGELEKEKKDLQVQAKKESEDIIELDKVQVIYWLEQFRGGNIEDEEFCRMLIDLFVNSVTVWDEDDNTYKVTVAYNLTSLPTKTYRLNKGGTLSDFTSNAPAKQGIKACTVCPTVLGRHPEPGLCFHFPWNQRWNNI

SEQ ID NO: 3119 - protein, 532 aa, Unknown
  Description of Unknown: Integrase B3120 sequence
  PTHR30461:SF3,SM00857,G3DSA:1.10.10.2600,IPR036162,PF13408, IPR025827,G3DSA:3.40.50.1390,PS51737,IPR006119,IPR038109, PF07508,SSF53041,IPR011109,PF00239,PTHR30461, PS51736,Coil,cd00338
MRVSVNLNAQKPDTTTNAVIYARYSSHGQTEQSIEGQLAKGHEYAAAQGYTVVHEYIDRAMTGRNDNREAFQKMLSDTGKHQFQVVIVWKVDRFGRNREEIAFNKHTCKKNGVRVEYVAESLPNSPEAVILESVLEGMAEYYSIQLSQNIRRGQLESAKKCQCVGGSVPLGYTLDSDKHFVIDPQTAPVVKKIFDLYAEGATISEITGQLNEQGIRTARKQLFTKNSLTKLLKNEKYIGVYTYKDIVRVEGGVPAIVDKSTFDRVQELLKINRRAPSHTWTKVEYLLTDKLFCGHCGSPMVGESGFSHTGAKYSYYGCIKRRREKACDKKPVRQDWIEALVLDETVKLLHDDELMEYIIDRTWEYYQVTDKVQEEKAVLEAQLAEVDKAINNLVRAIEAGIFNAATKSRMDELDAQKAALTASLADLELTSGIRITRDHIEYFLLRLRDLDVKDRECQKRLVQTFVNAVFIYDDGRVKITYNYSGQSSTITLNQIASAEKGKGFVCCLPCSTSSPRFPRGVAAFFCFGENRV

SEQ ID NO: 3120 - protein, 532 aa, Unknown
  Description of Unknown: Integrase B3121 sequence
  PTHR30461:SF3,cd00338,SM00857,G3DSA:1.10.10.2600,IPR036162, PF13408,IPR025827,PS51737,G3DSA:3.40.50.1390,IPR006119, IPR038109,PF07508,IPR011109,SSF53041,PTHR30461, PS51736,Coil,PF00239
MKKKQPNTRHGRAAIYARYSSHNQREASIEQQVKACRELAVRLGLDVVETYEDKAISGKSDRRPSFQRLLRDAEKGYFDCVLAWKSNRMGRNMLQAMTNEARLKDWGVRTFYAEEDFDDTAAGRFALRNMMNVNQFYSENMAEDITRGMMDNASKCLSNGALPLGYKAGENGRIVLDKAQAAVVQEIYTRVACREPFVDIAADLNRRGIKTKRGGPWTKSSFYTICRNERYRGIYIYDDVRVEGGVPRIVSDGLFYRVQEVLKVKKTPQSARHHTGAEDYLLTGKLFCGKCGRPMTGVSGTSRSGEMHYYYTCQKRRREHACDKKNVIREQIEKSVAQAIKQYMLTDEMIQHMADATMAYNARQEKDLHLQDLQGQLAAVKTSAANLLKAIEMGVITETTKARMVELEQEQGRLNAQIENARAELVPITRDNFVSLLHIYRDGDINDSKYLASLFETFLVRVDLYDDHFLIWFNPLGQKTPADIPITSIENGDVDEFFDECRSKNVFDWGGKWSTKIKHPPYPGGCFCFGAL

SEQ ID NO: 3121 - protein, 532 aa, Unknown
  Description of Unknown: Integrase B3122 sequence
  PTHR30461:SF3,SM00857,G3DSA:1.10.10.2600,IPR036162,PF13408, IPR025827,G3DSA:3.40.50.1390,PS51737,IPR006119,IPR038109, PF07508,IPR011109,SSF53041,PTHR30461,Coil, PS51736,cd00338,PF00239
MQRPHGAYILARYSTDNQNPDSIEVQVDKCSEWCRANRLPVLGVYADFAVSGMRDDRPQYRRMMEELRLGGADTVVVYDQSRMFRKMTAWFEFRDELAALGVAVASATQPMVGGDLRDPANFLAEGATALFNQIWVLQTRQKVIAKMRYMARSAQHTGGTPPLGYCVKDGRLEVVPEEAGVVRRIFGEYASGRSYREIIDGLNRDGIRTKRGGTFGSNSLHDLLRNPKYIGVLEYGHTCKRPDGKRNTHGSAPSDLIRVEGAVPAIVDQAIFEEVQRRMAKNKRAQGGRPPELREYPLRGKVFCAECKTAMVVSISKGRYTYYSCGARHRLHTCDNMPIKVEDLEARVAEAVRTVLDEPSNSAALIRILREEAVAIQTGAAGRLADLIVRKNSVAAQLGHAVDAILGGLDSPALRKKIEALEQEQAELERDMQALRRQVDASAIPEDRLRELLAIITASGDTAALLSVVARVEVGRDEITVWTILDTDPGGKVHTDPTDAGISVPITPGAAPPAPRVIITAAGALCIKFART

SEQ ID NO: 3122 - protein, 532 aa, Unknown
  Description of Unknown: Integrase B3123 sequence
  PTHR30461:SF3,cd00338,SM00857,G3DSA:1.10.10.2600,IPR036162, PF13408,IPR025827,PS51737,G3DSA:3.40.50.1390,IPR006119, IPR038109,PF07508,SSF53041,IPR011109,PTHR30461, PS51736,Coil,PF00239
MARKKNTAAGLDAVIYARYSSHNQREVSIEQQVSECMKHAADLGLHIIGTYEDRAISGKTDKRPRFQMMMRDAEKGKFQAVVAWKSNRMGRNMLQAMVNEAKLEDHGVKVFYAEEDFDDTAAGRFALRNMMNVNQFYSENMAEDISRGLYDNASKCMANGKQPLGYKRGEDGRVVLDEANAVVVREIYARVAAGELFVDIARDLNARGVKTNTGGVWNKGSFRSICENERYKGIYIYGDVRVVDGIPRIVSDDLWYKVQEAMKMKKNPVGARHRTGAEDYLLTGKLRCGHCGSYMTGISGTSRNGELHYYYTCQKRRAEHACDKKAVRRDVIEPAIAQAIKMYCLTDEVIEWVADRTVEYWERHDNNLHIEALEQQLDENKKATSNMLKAIEMGIITDATRSRMIELETEQSKLTVQLNAAKEDVVKVDRDEIASYLELLRQGDVNNRDFQMELFKNFLVAAYLYDDNRLKLVFSFAGKESSVEIPLETGEDPPDDASSENAKMFVLTPQCSTRKKSTTRKRVVLFSLRPTE

SEQ ID NO: 3123 - protein, 532 aa, Unknown
  Description of Unknown: Integrase B3124 sequence
  PTHR30461:SF3,cd00338,SM00857,G3DSA:1.10.10.2600,IPR036162, PF13408,IPR025827,G3DSA:3.40.50.1390,PS51737,IPR006119, IPR038109,PF07508,SSF53041,IPR011109,PTHR30461, PS51736,Coil,PF00239
MAKAKQKAATNDISKLAVIYARYSSHNQTEQSIEGQLAAGHRYADLKGYTVVHEYIDRAMTGRNDNRDDFQKMLSDTSKKQFGAIIVWKVDRFGRNREEITFNKYRCKKNGVRVEYVAENLPDSPEGVILESVLEGMAEYYSLQLSQNVQRGLLESAKKHQVIGGNVPLGLMMDAHKKYVPDPKTAPTVKLIFDMYAEGSTTSEIINHLNSIGMRTKAGKPFTKSSLTTVLKNEKYIGVYKYKDIIRDEGVIPPIVDKEIFYKVQELLKVNRRMPSHKWSYSDYILTDKLFCGKCGTAMVGESGFGKMGVKYSYYICAKRRKDKTCDKKPVRQEWIEEIVLQRVQGILQNEELLEFIAENTWQYYLAQDESMEKLKGLQTELDKVEKSAANLMKAIEAGIFNDMTKARMDELDDQRAVIKKAMAEIEIEKGFKLTKDHILYFLEQFKKLDYKDRDCQRRLIDVFVNSIFVYDDKLRIAFNFGGSDSTITLNEVDKADRGEGFVCCASCPAKYLKPVHSWKHDVPAFSLYIFI

SEQ ID NO: 3124 - protein, 532 aa, Unknown
  Description of Unknown: Integrase B3125 sequence
  PTHR30461:SF3,SM00857,G3DSA:1.10.10.2600,IPR036162,PF13408, PS51737,G3DSA:3.40.50.1390,IPR025827,IPR006119,IPR038109, PF07508,SSF53041,IPR011109,PTHR30461,Coil, PS51736,cd00338,PF00239
MAKRKITVIPSTINPLTQTPVGSVQKRKVAAYARVSTDSDEQYTSYETQKTYYENYIKSKPEWEFVRVYADEGISGTNTKKREGFKSMITDALDGKIDLIVTKSISRFARNTLDTISYIRKLKSAGVEVYFEKENLWSLDSKSEFVLTIMASIAQEESRSISMNVTLGKRWQMQEGKVSFAYSRMLGFKKTENGYAIDKEQAKIVKEIYTDFLIWGMTSTGIANKLTKRGVKTPSGKSEWSKNNIESILTNEKYKGDALLQKTYVVDYLEHKVAMNKGEITQYYVKDSHEAIIDKAEWDMVQDEIKRRKELGATYSASSIFISKLVCGDCGGIYGKKLWHSNDDYRSERYLCNNKYKDKNKRCTTPALTEKTIIDAFIKAYNSVMVDKNSLIEDAEAIKLLLSDTSKIDNEMDKLNTELQVINGLVDHLVRDNSSRLQSQEEYQKKYDELVTRYQNAKTRYEELSIEKSRKEFQSLRLDMFISKIKESPSLISEWNMEIWSILVDKAIVNSNCSITFRFRNGVEKTIKVKKC

SEQ ID NO: 3125 - protein, 532 aa, Unknown
  Description of Unknown: Integrase B3126 sequence
  PTHR30461:SF3,cd00338,SM00857,G3DSA:1.10.10.2600,IPR036162, PF13408,PS51737,IPR025827,G3DSA:3.40.50.1390,IPR006119, IPR038109,PF07508,IPR011109,SSF53041,PTHR30461, PS51736,Coil,PF00239
MARKKNIAAGQDAVIYARYSSHNQREVSIEQQIAECTKYAAALGLRIVGTYEDRAISGKTDNRPRFQQMMRDAGKGKFQAVVAWKSNRIGRNMLQAMVNEAKLDDYGVKVFYAEEDFDDTAAGRFALRNMMNVNQFYSENMAEDITRGLYDNASKCMANGRQPLGYKRGEDGRVVLDEANAAVVREIFTRVAAGDLFVDIARDLNAQGIKTSKGANWNKGSFQSICQNERYRGIYIYGDVRVADGIPRIVSDDLWYRVQEAMRMKKNPVGTRHRVGAEDYLLTGKLRCGHCGSYMTGVSGTSRNGELHYYYTCQKRRTEHACDKKNIRRDVIEPAVAQAIKMYCLTDDVIEWMADRTVEYWEKHDNDLQIEALEQQLAENKKATSNMLKAIEMGIITEATRTRMVELETEQSRLSVQLNAAKEDVVKIDREQIISYLELLQQGDIHDRDFQMELFKNFLVAVYVYDDNRMKLVFSCMGDQNSVEIPLETGEDPPDGGLSPDAKMFVLTPDSSTRRKKHYTETCGVFLLLPNE

SEQ ID NO: 3126 - protein, 532 aa, Unknown
  Description of Unknown: Integrase B3127 sequence
  PTHR30461:SF3,SM00857,G3DSA:1.10.10.2600,IPR036162,PF13408, PS51737,G3DSA:3.40.50.1390,IPR025827,IPR006119,IPR038109, PF07508,IPR011109,SSF53041,PTHR30461,Coil, PS51736,cd00338,PF00239
MNAVIYARYSSYNQTERSIEGQLEDCTEYADRNGLTIVGTYCDRAKSGTKAETRPEFLKMIKDSEKQKFQIVLVWKLDRFARNRYDSAMFRAKLKKNGVGLKSVTENISDEPDGIILQGVIEAMAEYYSANLSQNVKRGLRVARERGTFTGGRVMLGYQIIDKKPVPHPQEAKLVRSIFERIADGQTVRQIIDDFNARGLRTRSGQPFTRTSFQTLLKSPRVAGYEIIDGERSPSIYPAIVSEELFGAVQARLAVNAHLGGREKAKDRYLLQGKAFCGHCGAPMVGESGVGRRGTLYRYYTCATRKATHACKKKNVPKHELENLVVNSIVEKILSSDRIKSICAAVSDYFADNDAVAKIKELEAQLREVEDSIRKTADLMLANADLPALIKPLREKAVALSARAEDIKADLSATRAEAGSEITPESVHEWVCSFAKKDFTVPENRIALIETFLNSVYVFDDHLLIFCNSSKDTEQIPYADALKIPFSSPSESTAAPPGGSDSGCQTQPFPQIRTAFICFGCFGLFIPLHQDG

SEQ ID NO: 3127 - protein, 532 aa, Unknown
  Description of Unknown: Integrase B3128 sequence
  PTHR30461:SF3,cd00338,SM00857,G3DSA:1.10.10.2600,IPR036162, PF13408,PS51737,IPR025827,G3DSA:3.40.50.1390,IPR006119, IPR038109,PF07508,IPR011109,SSF53041,PTHR30461, PS51736,Coil,PF00239
MIKIRAAIYVRKSRLSEKGESINNQIELCKKYFSNLHLDDNIEFIIYQDEGFSGGNINRPKFQKLIKDVKKKRFNYLVCYKLDRISRNVADFTSTLKILEENNVNFISITEQFDTTSVMGRAMINISATFAQMERETIAERIKDNMLELSKTGRWLGGTCPLGFKSIPITYESNGHKKKMYSLEIIEEEMEIVRLIYDMYIEKHSCSPIARYLCSNSIKGKNGGDFSRNTVLQILTNPVYCTADKKAFEYFKSKGSIVEGNINSNKGLMAYNKRKNGRKDNPIDEWIISTGEHLGAIPSAKWIQCQQILDDVRKKSNNKSGTGNKFLLSGLLKCEHCGSSMCSWSRNNPKSNKYERYYRCELKNRASKRCTCKMLNADKAETFVIDLLKNFNIKYLDNIKSKSSSINAANIEREKNMLNKTLTENNKIISGLIKKLALLDDIDVLKAIQSEIKTLKNDNENIEKNINDLSIKSFIVEDETENKKAFIESLNLFKNTIDFIDDVEIKRNMIKNLVEYFTYNSDTKQIKFKIRL

SEQ ID NO: 3128 - protein, 532 aa, Unknown
  Description of Unknown: Integrase B3129 sequence
  PTHR30461:SF3,cd00338,SM00857,G3DSA:1.10.10.2600,IPR036162, PF13408,PS51737,G3DSA:3.40.50.1390,IPR025827,IPR006119, IPR038109,PF07508,IPR011109,SSF53041,PTHR30461, Coil,PF00239
MTENNNRVCCLYRVSTDKQVDFNSNHEADLPMQRKACHKFAEAKGRVIVHEEREEGVSGHKVRAATRDKLQIIKDYARKGKFDILLVFMFDRIGRIADETPFVVEWFVRNGIRVWSTQEGEQRFDNHTDKLLNYIRFWQADGESEKTSVRTRTSLRQLVEEGHFKGGNAPYGYDLVRSGRINKRKHELYELHINEQEAAVVRIVFDKYVYEGYGPQHIATYLNNSGYRARSGKCWHPSSIRGMVQNLTYTGVLRCGDARSELMPDLQIVPQEQFENAQRIRNERSVRSTAEAENRLPLNIHGKSLLAGNAYCGHCGAKLELTSSRKWRKMADGSLDDTLRIRYTCYGKLRKQTNCTGQTGYTVHILDEIIDKAVRQIFSKMRGIPKEQIVTKRYEKENTERKNHLQDLQTQRDKAEKDLLSLKAEILACIKGESVLPRETLAEMITEQEEKLKELEDLCESASEELERTAELMDKVSRLYDELISYADLYDSASFEAKKMIVNQLIRRVDVYRGYQINISFNFDLTPYIEGE

SEQ ID NO: 3129 - protein, 532 aa, Unknown
  Description of Unknown: Integrase B3130 sequence
  PTHR30461:SF3,cd00338,SM00857,G3DSA:1.10.10.2600,IPR036162, PF13408,PS51737,IPR025827,G3DSA:3.40.50.1390,IPR006119, IPR038109,PF07508,IPR011109,SSF53041,PTHR30461, PS51736,Coil,PF00239
MNVVIYARFSSSGQREESIEGQVKVCTEYAENNDYTVIGTYVDRALTGRNDKRPDLQRLLSDSNNNNFQAVIVYSIDRFGRNLQQCLTNENKLKQNGVALFSATEHFTNDPAGIFYRNLMMAHSQYYCDELSQKIRRGMDINAEKCLSTGGNIALGFKVDDKKNFQIDPDTAPIVQYIFESYASGKTVTEIINQLNSQGLKTSRGVPFNKNSLHSMLKNKRYIGIYTYKGTEKIGGMPRIISDELFNKVAEIMNKNRKAPARARAKVEYLLTTKIFCGYCKEMMTGFSGTGKSGKVYRYYVCNGTKKKACKKKKVNKEYIEDLVVNECRKLLTNENIKKIANSISKISESEKDTAHLKFLKKALSENERKHKNALNAIIECDLESVRKSLYEQIPILEKEHSELQKQIALEEKNFPVLTVPMVHFFLRKLKDGNVDDIKYRKTLINVFINKIYLYDDKLTIIFNSGDNPVTINDFLLSEIEDNSKKAEGLFLDGVAPPIESLYEHLSSPSREENELLCSYCAIFFPPSRYHN

SEQ ID NO: 3130 - protein, 532 aa, Unknown
  Description of Unknown: Integrase B3131 sequence
  PTHR30461:SF3,SM00857,G3DSA:1.10.10.2600,IPR036162,PF13408, PS51737,G3DSA:3.40.50.1390,IPR025827,IPR006119,IPR038109, PF07508,IPR011109,SSF53041,PTHR30461,Coil, cd00338,PF00239
MIATKPTQEKTVKTVYCLYRVSTKGQVDKNDIPMQKQSCREFAEHQPGWVIKKEFQEKGVSGFKVSANDRDAVQELKTAAENKEFDILLVFMFDRIGRIDNETPFVVEWFIQHGIEVWSVNEGEQRMDSHVDKLMNYIRFWQANGESQKTSMRVKTRLHQLVEDGIYTGGCAPFGYRLVKSGVVNKRGKELLTLEIDPIEKEMVKTIFEKTVKDGYGSYVMAQYVNDRKMLTHNGAKFQSNTIKRILQNPIYCGYYNRGGVTSKRVKELQIIDDAVFDEAQKILEQRKYTNEEKTQLSRTAKSSTMLGGNIYCAHCGKKLCANSFVDRYTTKDGTTHDGGRRFRYLCSGKAMKRNECDGQSVYSAAKVDEIVLDALHKCFDKIKATPKDAAIEKKYRTQISQIKTEIKRLNKETETLKRKLGELTEEIANSLLGDSKFTPDVLSMAIETTKTKIADNVQRIAEKQNQLNDKETDMNKIDYYYEEFVSWADEFDNAPAERQRMIICKLFKEILVGRGYSVQILMDSSYEQFLI

SEQ ID NO: 3131 - protein, 532 aa, Unknown
  Description of Unknown: Integrase B3132 sequence
  PTHR30461:SF3,cd00338,SM00857,G3DSA:1.10.10.2600,IPR036162, PF13408,PS51737,G3DSA:3.40.50.1390,IPR025827,IPR006119, IPR038109,PF07508,IPR011109,SSF53041,PTHR30461, PS51736,Coil,PF00239
MIKIRAAIYVRKSRLSEKGESINNQIELCKKYFSNLHLEDNIEFIIYQDEGFSGGNINRPEFQKLIKDVKKRRFNYLVCYKLDRISRNVADFTSTLKILEENNVNFISITEQFDTTSVMGRAMINISATFAQMERETIAERIKDNMLELSKTGRWLGGTSPLGFKSIPITYESNGHKKKMYSLEIVEEEMEIVRLIYDMYIEKHSCSPIARYLCSNSIKGKNGGDFSRNTVLQILTNPVYCTADKKAFEYFKSKGSSVKGNINSNKGLMAYNKRKNGKKDNPMDEWIISTGEHLGAIPSAKWIQCQQILDDVRKKSNNKSGTGNKFLLSGLLKCEHCGSSMCSWSRNNPKTNKYERYYRCELKNRASKRCTCKMLNADKAETFVIDLLKNFNIKYLDNIKSKSSSINAANIEREKNMLNKTLSENNKIISGLIKKLALIDDIDVIKAIQSEIKNLKTDNENIEKNINDLSIKSFIVEDETENKKAFIESLNLFKNTIDYIDDTEIKRNMIKNLVNHFTYNSDTKQIKFKISL

SEQ ID NO: 3132 - protein, 532 aa, Unknown
  Description of Unknown: Integrase B3133 sequence
  SM00857,G3DSA:1.10.10.2600,IPR036162,PS51737,G3DSA:3.40.50.1390, IPR006119,IPR038109,PF07508,IPR011109,SSF53041, PF00239,PTHR30461,PS51736,Coil,cd00338
MSEKYAIYLRKSRADMEAEARGEGETLARHLAMLQNLSRRNGHDIGHVYREIVSGESIDNRPQMQQLLHDVAAGMWAGIYCTEVERLARGNTTDQGRVAEAFQFSGTKIITLAKTYDPNNEFDTEYFEFGLFMARREYKSINRRIQAGRKQSVMEGRYIYSRPAYGYRKVKIQGDKGYTLAIDEQEALVVRRIFEQYAATDDGLVVIARQLREEGTPTGQYGSVWGESRIHRMITNEVYLGMIRDGHDKQIKVMQNGVILKKRAITRDYTLVQGLHPAIISRELYDACQRKLHSPRPRGTAASPGFNHAQGIPKNDGQYCANSLAGLLVCAECGHIMRRKAACGRQRDRLFCHTPGCPTVATYFEDVEQSILSTLRQWMEAAETDWQPDPNPAIASALARIDALKKEKAATAAQLDKLYDLLERGLYSEELFTARRIALKQRMAALDGEIAEANRQAKTQYVPIAQLYDQIKSLLDVYDHSSAGQKNRMLKSCISKIVYHKSQRGNIINGRTVVDGNQFELEVYPRLASQDE

SEQ ID NO: 3133 - protein, 532 aa, Unknown
  Description of Unknown: Integrase B3134 sequence
  PTHR30461:SF3,SM00857,G3DSA:1.10.10.2600,IPR036162,PF13408, PS51737,G3DSA:3.40.50.1390,IPR025827,IPR006119,IPR038109, PF07508,IPR011109,SSF53041,PF00239, PTHR30461,PS51736,Coil,cd00338
MKKFPIDLSCLTEEEISQFQEDPYTLYNGDQDVALYLRYSSTGQSDQSIEGQLRDCRTFCKANHYRIVAIYVDRATTARKDVEKRVHLMEMISDSAKQNWEYVIVWKLDRFARNRNDSAIMKMRLRKNGVKVLSATEHLTDSPESIILESVLEGMAEFFSAELSQKVTRGMRESALKCHSVGGHIPLGYKVENHKLVVDPDTAHIVQEAFSLYANGESVADICRKFNSAGYKTAKNTEFNRSSFKAMFRNTRYIGTYTYKDIVIENGIPAIIDKELFETVQRRLSKTATAPARGKAKVDYLLSGKLFCGHCGASMNGESGAGRHGKVYHYYSCYTKKRKLGCDKRPLKKDYIEGIVARDALNLLTDQLIDEIADMAIRQSEQDLINDTHIPQLTAQLSEVEKSITNITAAIEKGIASETLMNRLVQLEHEKKTINKEIKAEEKFVYRIDRDQIVFWLSQFKYGNIEDENFRRRLIDLLVNSVTVWDEPDGYKITTAYNLTSCKTKTFRVEKNPAAEEATGFDFGESECTKSP

SEQ ID NO: 3134 - protein, 532 aa, Unknown
  Description of Unknown: Integrase B3135 sequence
  cd03768,PTHR30461:SF3,SM00857,G3DSA:1.10.10.2600,IPR036162, PF13408,IPR025827,G3DSA:3.40.50.1390,PS51737,IPR006119, IPR038109,PF07508,IPR011109,SSF53041,PTHR30461, PS51736,Coil,PF00239
MKVAIYSRKSVFTGKGESIENQIELCKEYCNRNYDEKIEFVVYEDEGFSGGNINRPQFKAMIKDIKAKEYDALICYRLDRISRNVADFSATLELLQANNCDFISIKEQFDTSTPMGRAMVYISSVFAQLERETIAERVRDNMVQLAKTGRWLGGITPLGFDSERIIYYDENFKERSMSKLTVNDSEMELVKEIYELYYELKSATQVSKRLADKRIKGKRGGFLNSSRILDIISNPAYVKSDKKTHEYLKSIGINVFGESNGNGYLSYNKARNGIETDIETWIAAVSRHEGIIDSDKWIAVQKNRHKMKGSQIKAVASKSETLLNGILKCSVCGSKMYAKKGKLSPVTGKHNYYYICSKKDSQFGVTCDNKNINSQKIDKLVLNELETYDKEYLKTHLLSTAKNFKRNLTENNFIELINEKESQIGNLVKNLSLAPNPEVSGYIMNEITKLQSEVQNLKEKQKNCDKDSYDISVDIDQIEILNDLLTNMLNTIDKVDYTEKRKLLHSVVEEVIWNGKGYTVEINLIGSKKKLI

SEQ ID NO: 3135 - protein, 532 aa, Unknown
  Description of Unknown: Integrase B3136 sequence
  PTHR30461:SF3,SM00857,G3DSA:1.10.10.2600,IPR036162,PF13408, IPR025827,G3DSA:3.40.50.1390,PS51737,IPR006119,IPR038109, PF07508,IPR011109,SSF53041,PF00239,PTHR30461, PS51736,Coil,cd00338
MRAFIYCRFSSHKQQELSIEGQRDICQEYADKHNITVVGQYADRARSGKTENRADFRRLMRDAATGVVDCVLVWRYDRFFRNRAESALYRKQLEAAGVHLISVTEYIPEGSAGIITQGMIETVAEYFSAKLSEDVSRGMNKAAQHCQIVGRAPLGYRAGPNKRWQIDPVGAELVRRIFEWYASGKAMGQLAAQLNEEGRRTTNGTLYTRSSFNSILRNEKYIGVYSYGGEVRIEGGCPRIIEDELFFTVQRRLSANRHRPGAYKAEVPYLLSGKLFCGLCGAPMTGTAGTSHTGARHYYYICNNRRAKTCKKKNVRLDLIEEAVLQSALDILTDENIAYISTEVERRCAENSDSAALLASLNAQLEEVQRRLKNIGNAIAQGIITETTKELLEEAEADRTALRQQIDRAKVQAALVVKAEAVACWLDGFRRGDRTDPDFRRQVFGALVHSVFVYDDYLKIIFNVDSAGAAVVPYEAAQAVTPSEAPPGSYLDTLGAPRKAATNVAAFLLHHSLWDGLALRASARVRLAGTGR

SEQ ID NO: 3136 - protein, 532 aa, Unknown
  Description of Unknown: Integrase B3137 sequence
  PTHR30461:SF3,cd00338,SM00857,G3DSA:1.10.10.2600,IPR036162, PF13408,PS51737,G3DSA:3.40.50.1390,IPR025827,IPR006119, IPR038109,PF07508,IPR011109,SSF53041,PTHR30461, PS51736,Coil,PF00239
MARKKNIAAGQNAVIYARYSSHNQREVSIEQQVRECMKHAAELGLHVVGTYEDRAISGKTDKRPNFQRMMRDAEKGKFQAVVAWKSNRIGRNMLQAMVNEAKLEDCGVKVFYAEEDFDDTAAGRFALRNMMNVNQFYSENMAEDITRGLYDNASKCMANGRQPLGYKRGEDGRVVLDEANAAVVREIFTRVAAGDLFVDIARDLNAQGIKTSKGANWNKGSFQSICQNERYRGIYIYGDVRVADGIPRIVSDDLWYRVQEAMRMKKNPVGTRHRVGAEDYLLTGKLRCGHCGSYMTGVSGTSRNGELHYYYTCQKRRTEHACDKKNIRRDVIEPAVAQAIKMYCLTDDVIEWMADRTVEYWKKHDNDLQIEALEQQLEENKKATSNMLKAIEMGIITEATRTRMVELETEQSRLSVQLNAAKEDVVKIDREQIISYLELLQQGDIHDRDFQMELFKNFLVAVYVYDDNRMKLVFSCMGDQNSVEIPLETGEDPPDGGLSPDAKMFVLTPDSSTRRKKHYTETCGVFLLLPNE

SEQ ID NO: 3137 - protein, 532 aa, Unknown
  Description of Unknown: Integrase B3138 sequence
  SM00857,G3DSA:1.10.10.2600,IPR036162,PF13408,PS51737, G3DSA:3.40.50.1390,IPR025827,IPR006119,IPR038109,PF07508, IPR011109,SSF53041,PTHR30461,Coil,PS51736, cd00338,PF00239
MIYARYSSGAQKDVSIDQQVRACRDFADRQALEIVAVYDDRALTGTNDHRPNFQRMISDSSAERWRYVIVYSLDRFARNRYDSAIYKRELRDHGIRVLSATEYLSDDPTGVLLESMLEGYAEYYSKELSRKTQRGMKDNARRCKINGPIPAGYMRGPDGRYAIYEPDAAVIRDLFRRVSDGEAVASVVRDISARDLRRVKGQPWSRSCLYAALSNERYAGVYIYGDIRIDGGIPPIISRELFDSVQLLLESKPNPRKELHSPVRRKNDNGLFLLTGKLFCGDCGSPMIGTSGRGKYGSVYYYYACRGQKAHGCKKAPIRREQIEYEIAAALKANFLNPEVIPQLADAFMAARGQNDAQLELQSLLDRQADVRRSLKNIMAAIEQGIFAPTVQTRLTQLESESQQIDARIAILSRQLKDLPTRDDIIALLDFYRQGDLDDSRYRETLLDAFLRAAYVYSDHYDLVCAIGKDGQSITVPTASALSAALSDGPKSSDSGLSGSPNRAIRTLSGKIVVFDVFFVFRCPAMRIKKHL

SEQ ID NO: 3138 - protein, 532 aa, Unknown
  Description of Unknown: Integrase B3139 sequence
  SM00857,G3DSA:1.10.10.2600,IPR036162,PS51737,G3DSA:3.40.50.1390, mobidb-lite,IPR006119,IPR038109,PF07508,IPR011109, SSF53041,PF00239,PTHR30461,PS51736,Coil, cd00338
MPEKYAIYLRKSRADMEAEARGEGETLARHLAMLQNLARRNGHDIGQVYREIVSGESIDNRPQMQQLLHDVAAGMWAGIYCTEVERLARGNTTDQGRVAEAFQFSGTKIITLAKTYDPNNEFDTEYFEFGLFMARREYKSINRRIQAGRKQSVMEGRYIYSRPAYGYRKVKIHGDKGYTLAIDEQEAIVVRRIFEQYATTDDGLVVIARQLREEGTPTGQYGSVWGESRVHRMITNEVYLGMIRDGHDKQIKVMQNGVILKKRAITRDYTLVQGLHPAIISRELYDACQRKLHSPRPRGTAASPGFNHAQGIPKNDGQYRANSLAGLLVCAECGHIMRRKASCGRQRDRLFCHTPGCPTVATYFEDVEQSILSTLRQWMEAAETDGQPDPNPAIASALARIEALKKEKAATAAQLDKLYDLLERGLYSEELFTARRIALKQRMAALDGEIAEANRQAKTQYVPIAQLYDQIKSLLDVYDHSSAGQKNRMLKSCISKIVYHKSQRGNIINGRTVVDGNQFELEVYPRLASQDE

SEQ ID NO: 3139 - protein, 532 aa, Unknown
  Description of Unknown: Integrase B3140 sequence
  PTHR30461:SF3,SM00857,G3DSA:1.10.10.2600,IPR036162,PF13408, PS51737,G3DSA:3.40.50.1390,IPR025827,IPR006119,IPR038109, PF07508,IPR011109,SSF53041,PF00239,PTHR30461, PS51736,Coil,cd00338
MARKKNIAAGQDAVIYARYSSHNQREVSIEQQVSECMKHAAELGLHVVGTYEDRAISGKTDNRPRFQQMMRDAEKGKFQAVVSWKSNRIGRNMLQAMVNEAKLDDYGVKVFYAEEDFDDTAAGRFALRNMMNVNQFYSENMAEDITRGLYDNASKCMANGRQPLGYKRGEDGRVVLDEANAAVVREIFTRVAAGDLFVDIARDLNAQGIKTSKGANWNKGSFQSICQNERYRGIYIYGDVRVADGIPRIVSDDLWYRVQEAMRMKKNPVGTRHRVGAEDYLLTGKLRCGHCGSYMTGVSGTSRNGELHYYYTCQKRRTEHACDKKNIRRDVIEPAVAQAIKMYCLTDDVIAWIADRTVEYWEKHDNDLQIEALEQQLEENKKATSNMLKAIEMGIITEATRTRMVELETEQSRLSVQLNAAKEDVVKIDREQIISYLELLQQGDIHDRDFQMELFKNFLVAVYVYDDNRMKLVFSCMGDQNSVEIPLETGEDPPDGGLSPDAKMFVLTPDSSTRNKKHYTEMCGAFLLTPNE

SEQ ID NO: 3140 - protein, 532 aa, Unknown
  Description of Unknown: Integrase B3141 sequence
  PTHR30461:SF3,IPR036162,PS51737,IPR011109,PTHR30461, PF00239,G3DSA:1.10.10.2600,IPR006119,SSF53041,cd00338, SM00857,IPR025827,IPR038109,PS51736,mobidb-lite, PF13408,G3DSA:3.40.50.1390,PF07508,Coil
MPRKKKLQEVGGLRLVAYYRYSNGGQQTEQSIEGQRRDCEAYAKAHGYKIVHEYIDRHISGKSDSRPAFQQMISDSDSHLFDAVICWKTDRLARSRYDSIIYKTRLRKNGVKILYAAETVVDGPEGIIIEGLMESLAEYYSAELAQKLRRGQRESALKCIALGGNRSFGYDIGPDKHYCINEKQAPAVRYIFEQYAAGATAADIVRELTARGYRTSRGNPFNKNSICRIITNEMYLGVYKYADIRIEGGVPAMIDRELFNRCQTQLAFNRAHGGGKGAPRADYVLVGKLDCGLCGHAMKGASATGHTGSKHYYYTCTQHVEKKCPKTSIEKNYLEQVIVDGVAKYVLTPEKISQIVDCMMELQAKEQEPKGNPERDALEAELVECRRKQNNILEAIEEGGSARLAARLRTLEEQEAQLTFALGEINNAPSPPQFSREALTFMFEQFRREEDEVDEEYRRRILDTFVSSILLYEDRAEVKFNITDQKTGDFERVILPISVNKKPPEDDDATSNSEGSTALRLVEAMGVEQWKS

SEQ ID NO: 3141 - protein, 532 aa, Unknown
  Description of Unknown: Integrase B3142 sequence
  SM00857,G3DSA:1.10.10.2600,IPR036162,PF13408,IPR025827, PS51737,G3DSA:3.40.50.1390,IPR006119,IPR038109,PF07508, IPR011109,SSF53041,PTHR30461,PS51736,cd00338, PF00239
MVKNRAAIYARFSSHNQRSESIEIQVENSRRYCEQEGLQVVREYCDYAQTGRNVDRAEFQRMMRDAKLGLFDYVVIYKVTRIMRNRDEMALARIMLRKSGVEILYAGEEIASGSSGVLQLGMLEVLAEWESAIDSERIRDGIQKNAQRCMANGRTLYGWDIVDGRYVVNEREAAVMRRMKNMLFSGSSVADIVRAVSAERSKRGAKFTNDTVSKLLRRVQNAGVYKYAGNEVEDGMPALWPQCEQYMINSILDDRHRPRRKIDSAREFPLTGKFYCSTCGAPMFGTSGTSKNGSAYHYYKCRECRRTVRRDLIEGAVADMTYEAVKRNDVRARIAETLAGYEAEQGSDEKPESYFIKKEIRRIETTFERIWHAIEDGIAPPGGKERIEELNRQKSELEARLCAIEKSESCEVSVDDVLLWLDSLANDTTPLEILNEWVRFVDIDGKDISVYFMFDDLPDDFNPTKKKAEHPCYQRCSTNSLMVELMRETANSREFSERDNHAIQLDTCIVQATNSWFVIVGLLENNNQHFSK

SEQ ID NO: 3142 - protein, 532 aa, Unknown
  Description of Unknown: Integrase B3143 sequence
  SM00857,G3DSA:1.10.10.2600,IPR036162,PF13408,PS51737, IPR025827,G3DSA:3.40.50.1390,IPR006119,IPR038109,PF07508, IPR011109,SSF53041,PTHR30461,Coil,PS51736, cd00338,PF00239
MIYARYSSGAQKDVSIDQQVRACRDFADRQALEIVAVYDDRALTGTNDHRPNFQRMISDSSAERWRYVIVYSLDRFARNRYDSAIYKRELRDHGIRVLSATEYLSDDPTGVLLESMLEGYAEYYSKELSRKTQRGMKDNARRCKINGPIPAGYMRGPDGRYAIYEPDAAVIRDLFRRVSDGEAVASVVRDISARDLRRVKGQPWSRSCLYAALSNERYAGVYIYGDIRIDGGIPPIISRELFDSVQLLLESKPNPRKELHSPVRRKNDNGLFLLTGKLFCGDCGSPMIGTSGRGKYGSVYYYYACRGQKAHGCKKAPIRREQIEYEIAAALKANFLNPEVIPQLADAFMAARGQNDAQLELQSLLDRQADVRRSLKNIMAAIEQGIFAPTVQTRLTQLESESQQIDARIAILSRQLKDLPTRDDIIALLDFYRQGDLDDSRYRETLLDAFLRAAYVYSDHYDLVCAIGKDGQSITVPTASALSAALSDGPKSSDSGLSGSPIRAIRTLNSKIVVFDVFFAFRCSAMRIKKHL

SEQ ID NO: 3143 - protein, 532 aa, Unknown
  Description of Unknown: Integrase B3144 sequence
  PTHR30461:SF3,SM00857,G3DSA:1.10.10.2600,IPR036162,PF13408, PS51737,G3DSA:3.40.50.1390,IPR025827,IPR006119,IPR038109, PF07508,IPR011109,SSF53041,PF00239,PTHR30461, PS51736,Coil,cd00338
MKKFPIDLSCLTEEEISQFQEDPYTLYNGDQNVAIYLRYSSTGQSDQSIEGQLRDCRAFCKANHYRIVAIYVDRATTARKDVEKRVHLMEMISDSAKQNWEYVIVWKLDRFARNRNDSAIMKMRLRKNGVKVLSATEHLTDSPESIILESVLEGMAEFFSAELSQKVTRGMRESALKCHSVGGHIPLGYKVENHKLVVDPDTAHIVQEAFSLYANGESVADICRKFNSAGYKTAKNTEFNRSSFKAMFRNTRYIGTYTYKDIVIENGIPAIIDKELFETVQRRVSKTATAPARGKAKVDYLLSGKLFCGHCGASMNGESGAGRHGKVYHYYSCYTKKRKLGCDKRPLKKDYIEGIVARDALNLLTDQLIDEIADMAIRQSEQDLINDTHIPQLTAQLSEVEKSITNITAAIEKGIASETLMNRLVQLEHEKKTLNKEIKAEEKFVYRIDRDQIVFWLSQFKYGNIEDENFRRRLIDLLVNSVTVWDEPDGYKITTAYNLTSCKTKTFRVEKNPAAEEATGFDFGESECTKSP

SEQ ID NO: 3144 - protein, 531 aa, Unknown
  Description of Unknown: Integrase B3145 sequence
  cd00338,SM00857,G3DSA:1.10.10.2600,IPR036162,PS51737, G3DSA:3.40.50.1390,IPR006119,IPR038109,PF07508,IPR011109, SSF53041,PTHR30461,PS51736,Coil,PF00239
MDEYFIYLRKSRADMEAEAHGEGETLARHERALLELAKRLHLNVTQIYREVVSGETIAARPVMQRILSEVEQGVWAGGLVMEIERLARGDTIDQGIIAQTFKFSDTKIITPMKIYDPNNEYDEEYFEFGLFMSRREYKVINRRLQRGKLAAAKEGKWVPCRAPYGYRRIKLKNEKGWSLEPVEEEADVVRLIFQLYTRGAQAEDGSFQRMPLGAIARHLDDLGIPSPQGGLWGRPALAAMVQNPAYIGKVRWGQHPSKKKVVDGKVVRQRVQADADEVHVFEGRHPAIIEQEVFDIANEMVKRRVNSSTHIDLSVKNPLTRVVFCACCGHAMGRATSAARPDAGSLVCRTHGCPTVSTRLDIVEERILAGLAEWLSGYELEWAEANSPEHRVASNAEVKQKALQRAEGDLARLQKQLERTHDLLEQGVYDVDTFLDRSRSLAEKINAAKELAASLRQEVVVEEEREANRKNIIPKVKNLIEVYHSLPSAEEKNEMLKDIVEKVVYKKIAVPGKRLKPDDFEIEIYPRIPRK

SEQ ID NO: 3145 - protein, 531 aa, Unknown
  Description of Unknown: Integrase B3146 sequence
  cd00338,SM00857,G3DSA:1.10.10.2600,IPR036162, PS51737,G3DSA:3.40.50.1390,IPR006119,IPR038109, PF07508,SSF53041,IPR011109,PTHR30461, PS51736,Coil,PF00239
MEQYCLYLRKSRSDVEAENHGEEETLARHEKILLELAKSREYNVTQIYREVVSGETIAARPVMQQLLSEVEHGIWSGVLVVEVERLARGDTIDQGIVAQTFKYSDTQIITPMKTYNPNNEYDEEYFEFGLFMSRREYKTINRRLQRGRLSSVKEGKCVCSIAPYGYDKVKLKGDKGFTLAPNPNEADVIKMIFELYTKGELQPDGTYKRIGVALIARKLNEMKIPARKSEYWVPASIKDMLRNPVYAGKIRWNWRSQNKRMQSGSISISRPRSEEDNCIIVNGLHPALITEETFDLAQEYLAKNPPRPTKRNAPTKNPLAGIVVCAFCGRKLVRRPYTSASCPPTLICSVPHCPNVSSFLHLVEERILKSLEEWLRNYKLQWNLSNNKPSELISESEILRQSLNDINSQIAKLNKQMIKAHELLEQDIYTTEVFLERSRAITERLNQLSYDKAEIEKRLGVETIREKSMKEIIPKVEKLLDVYHELPSAKEKNDMLKDVLEKVVYKKTQNTRWSGSPDDFEITIYPKLPKS

SEQ ID NO: 3146 - protein, 531 aa, Unknown
  Description of Unknown: Integrase B3147 sequence
  cd00338,SM00857,G3DSA:1.10.10.2600,IPR036162,PS51737, G3DSA:3.40.50.1390,IPR006119,IPR038109,PF07508,IPR011109, SSF53041,PTHR30461,PS51736,Coil,PF00239
MEQYCLYLRKSRSDVEAENHGEEETLARHEKILLELAKRREYNVTQIYREVVSGETIAARPVMQQLLSEVEHGIWSGVLVVEVERLARGDTIDQGIVAQTFKYSDTQIITPMKTYNPNNEYDEEYFEFGLFMSRREYKTINRRLQRGRLSSVKEGKCVCSIAPYGYDKVKLKGDKGFTLAPNPNEADVIKMIFELYTKGELQPDGTYKRIGVALIARKLNEMKIPARKSEYWVPASIKDMLRNPVYAGKIRWNWRSQNKRMQSGSISISRPRSEEDNCIIVNGLHPALITEETFDLAQEYLAKNPPRPTKRNAPTKNPLAGIAVCAFCGRKLVRRPYTSASCPPTLICSVPHCPNVSSFLHLVEERILKSLEEWLRNYKLQWNLSNNKPSELISESEILRQSLNDINSQIAKLNKQMIKAHELLEQDIYTTDVFLERSRTITERLNQLSYDKAEIEKRLGVETIREKSMKEIIPKVEKLLDVYHELPSAKEKNDMLKDVLEKVVYKKTQNTRWSGSPDDFEITIYPKLPKS

SEQ ID NO: 3147 - protein, 531 aa, Unknown
  Description of Unknown: Integrase B3148 sequence
  cd00338,SM00857,G3DSA:1.10.10.2600,IPR036162, PS51737,G3DSA:3.40.50.1390,IPR006119,IPR038109, PF07508,IPR011109,SSF53041,PTHR30461, PS51736,Coil,PF00239
MEQYCLYLRKSRSDIEAENHGEEETLARHEKILLELAKKREYNVTQIYREVVSGETIAARPVMQQLLSEVEHGMWSGVLVVEVERLARGDTIDQGIVAQTFKYSDTQIITPMKTYNPNNEYDEEYFEFGLFMSRREYKTINRRLQRGRLSSVKEGKCVCSIAPYGYDKVKLKGDKGFTLAPNPNEADVIKMIFELYTKGELQPDGTYKRIGVALIARKLNEMKIPARKSEYWVPASIKDMLRNPVYAGKIRWNWRSQNKRMQSGSISISRPRSEEDNCIIVNGLHPALITEETFDLVQEYLAKNPPRPTKRNAPTKNPLAGIAVCAFCGRKLVRRPYTSASCPPTLICSVPHCPNVSSFLHLVEERILKSLEEWLRNYKLQWNLSNNKPSELISESEILRQSLNDINSQIAKLNKQMIKAHELLEQDIYTTDVFLERSRTITERLNQLSYDKAEIEKRLGVETIREKSMKEIIPKVEKLLDVYHELPSAKEKNDMLKDVLEKVVYKKTQNTRWSGSPDDFEITIYPKLPKS

SEQ ID NO: 3148 - protein, 531 aa, Unknown
  Description of Unknown: Integrase B3149 sequence
  cd00338,SM00857,G3DSA:1.10.10.2600,IPR036162,PS51737, G3DSA:3.40.50.1390,IPR006119,IPR038109,PF07508,IPR011109, SSF53041,PTHR30461,PS51736,Coil,PF00239
MEQYCLYLRKSRSDIEAENHGEEETLARHEKILLELAKKREYNVTQIYREVVSGETIAARPVMQQLLSEVEHGIWSGVLVVEVERLARGDTIDQGIVAQTFKYSDTQIITPMKTYNPNNEYDEEYFEFGLFMSRREYKTINRRLQRGRLSSVKEGKCVCSIAPYGYDKVKLKGDKGFTLAPNPNEADVIKMIFELYTKGELQPDGTYKRIGVALIARKLNEMKIPARKSEYWVPASIKDMLRNPVYAGKIRWNWRSQNKRMQSGSISISRPRSEEDNCIIVNGLHPALITEETFDLAQEYLAKNPPRPTKRNAPTKNPLAGIVVCAFCGRKLVRRPYTSASCPPTLICSVPHCPNVSSFLHLVEERILKSLEEWLRNYKLQWNLSNNKPSELISESEILRQSLNDINSQIAKLNKQMIKAHELLEQDIYTTDVFLERSRTITERLNQLSYDKAEIEKRLGVETIREKSMKEIIPKVEKLLDVYHELPSAKEKNDMLKDVLEKVVYKKTQNTRWSGSPDDFEITIYPKLPKS

SEQ ID NO: 3149 - protein, 531 aa, Unknown
  Description of Unknown: Integrase B3150 sequence
  cd00338,SM00857,G3DSA:1.10.10.2600,IPR036162, PS51737,G3DSA:3.40.50.1390,IPR006119,IPR038109, PF07508,IPR011109,SSF53041,PTHR30461, PS51736,Coil,PF00239
MDEYFIYLRKSRADMEAEAHGEGETLARHERALLELAKRLHLNVTQIYREVVSGETIAARPVMQRILSEVEQGVWAGGLVMEIERLARGDTIDQGIIAQTFKFSDTKIITPMKIYDPNNEYDEEYFEFGLFMSRREYKVINRRLQRGKLAAAKEGKWVPCRAPYGYRRIKLKNEKGWSLEPVEEEADVVRLIFQLYTRGAQAEDGSFQRMPLGAIARHLDDLGIPSPQGGLWGRPALAAMVQNPAYIGKVRWGQHPSKKKVVDGKVVRQRVQADADEVHVFEGRHPAIIEQEVFDIANEMVKRRVNSSTHIDLSVKNPLTRVVFCACCGHAMGRATSAARPDAGSLVCRTHGCPTVSTRLDIVEERILAGLTEWLSGYELEWTEANSPEHRVASNAEIKQKALQRAEGDLARLQKQLERTHDLLEQGVYDVDTFLDRSRSLAEKINAAKELAASLRQEVVVEEEREANRKNIIPKVKNLIEVYHSLPSAEEKNEMLKDVVEKVVYKKIAVPGKRLKPDDFEIEIYPRIPRK

SEQ ID NO: 3150 - protein, 531 aa, Unknown
  Description of Unknown: Integrase B3151 sequence
  SM00857,G3DSA:1.10.10.2600,IPR036162,PS51737,G3DSA:3.40.50.1390, IPR006119,IPR038109,PF07508,IPR011109,SSF53041, PF00239,PTHR30461,PS51736,Coil,cd00338
MEQYCLYLRKSRSDIEAENHGEEETLARHEKILLELAKKREYNVTQIYREVVSGETIAARPVMQQLLSEVEHGIWSGVLVVEVERLARGDTIDQGIVAQTFKYSDTQIITPMKTYNPNNEYDEEYFEFGLFMSRREYKTINRRLQRGRLSSVKEGKCVCSISPYGYDKVKLKGDKGFTLAPNPNEADVIKMIFELYTKGELQPDGTYKRIGVALIARKLNEMKIPARKSEYWVPASIKDMLRNPVYAGKIRWNWRSQSKRMQSGSISISRPRSEEDNCIIVNGLHPALITEETFDLVQEYLAKNPPRPTKRNAPTKNPLAGIVVCAFCGRKLVRRPYTSASCPPTLICSVPHCPNVSSFLHLVEERILKSLEEWLRNYKLQWNLSNNKPSELISESEILRQSLNDINSQITKLNKQMIKAHELLEQDIYTTEVFLERSRAITERLNQLSYDKAEIEKRLGTETIREKSMKEIIPKVEKLLDVYHELPSAKEKNDMLKDVLEKVVYKKTQNTRWSGSPDDFEITIYPKLPKS

SEQ ID NO: 3151 - protein, 531 aa, Unknown
  Description of Unknown: Integrase B3152 sequence
  PTHR30461:SF3,cd00338,SM00857,G3DSA:1.10.10.2600,IPR036162, PF13408,PS51737,G3DSA:3.40.50.1390,IPR025827,IPR006119, IPR038109,PF07508,IPR011109,SSF53041, PTHR30461,PS51736,Coil,PF00239
MYEEIKTVCLYVRYSSSNQTEQSIEGQIRVCKDFCNRYGFRIVEIYTDRATSASKDIEKRVNFLKMIKDSEKQTFDAVVVYKLDRFARSRYDSATYKYRLKKNGVQLISATENISDDPEGIILESVLEGMAEFYSAELSQKINRGLRESAYKHNSIGGSIPLGYKTVDKKLVIDEETAPIVRQAFEMYAEGHTVADICRTFNARGYKTSKGTRFGKSSFSKIFRNERYIGVYQFHDYRAEGVIPAIIDKKLFDQVQARLKITGQAPGQYKAKRIYLLSGKLFCGHCGSKMNANSNGHGGYSYYECYGKKNLHKDCHKRNLRKDFIEEVVAKDAMSLLTDERIEEIATIAVQTNTHEVETSTDIPTIRSRLHETKLSLENITKAIETGLTPETLVKRMVELEKEKKTLEAELKKEESGVVYLDKVQVIYWLEQFKYGDIEDDDFRRLLIDLFVNSVTVWDEPDDYFKITIAYNLTSLQEKTYRLPKGGTLSDLALNPPALESNPIVEGTLMFHTIHHQLKPHEWKKFRATER

SEQ ID NO: 3152 - protein, 531 aa, Unknown
  Description of Unknown: Integrase B3153 sequence
  PTHR30461:SF3,SM00857,G3DSA:1.10.10.2600,IPR036162,PF13408, IPR025827,G3DSA:3.40.50.1390,PS51737,IPR006119,IPR038109, PF07508,IPR011109,SSF53041,PF00239,PTHR30461, PS51736,Coil,cd00338
MNVVIYARYSCERQTEQSIEGQLRECEEFAEKHDMTIVDTYIDRAISGTSTNHREAFLKMIADSEKHTFEGVLMYKMDRFARNRYDSAVYKAKLKKNGVRVYYAKEQIPEGPEGIILESLLEGMAEYYSAELSQKIKRGMRENALKGKATGGSTAIGYKITPDKTFAIDEDYADVVRHIFRSYARGERVEDICKDLNEKGIRTPKGYLFNQSTMRKMLQNEKYIGVYICKDVRLEDAIPPIIDKSLFHEVQQILAKNRKAPARAKAKVDYLLSGKAYCGKCGNGLVGESSNPNSDSRPHYYYKCANRKKGLGCDKKTIRKEELENLVAQKVAEVVLRPEKIKEIAQRCEEMQRDMVRTIRNPEADMLKKQLEKTKKSIANIMLAMEQGIFTKSTKEHLEALEQRKETLEIEIQRTSMVEKVDIITADQIEFMLLQFLPEANTDVTAYADDIISCFVHSVYLWDDSCAIWLNLSNQQPKPHKNRCAKVTPESTQRLQLSVDLLSGNVKKNLVQKNVGENSHLETSPPPHKNT

SEQ ID NO: 3153 - protein, 531 aa, Unknown
  Description of Unknown: Integrase B3154 sequence
  PTHR30461:SF3,cd00338,SM00857,G3DSA:1.10.10.2600,IPR036162, PF13408,PS51737,G3DSA:3.40.50.1390,IPR025827,IPR006119, IPR038109,PF07508,IPR011109,SSF53041,PTHR30461, PS51736,Coil,PF00239
MARKKNIAAGLDAVIYARYSSHNQREVSIEQQIAECTKHAAALGLRIVGTYEDRAISGKTDNRPRFQQMMRDAEKGKFQAVVAWKSNRIGRNMLQAMVNEAKLDDYGVKVFYAEEDFDDTAAGRFALRNMMNVNQFYSENMAEDITRGLYDNASKCMANGRQPLGYKRGEDGRVVLDEANAAVVREIFTRVAAGDLFVDIARDLNAQGIKTSKGANWNKGSFQSICQNERYRGIYIYGDVRVADGIPRIVSDDLWYRVQEAMRMKKNPVGTRHRVGAEDYLLTGKLRCGHCGSYMTGVSGTSRNGELHYYYTCQKRRTEHACDKKNIRRDVIEPAVAQAIKMYCLTDDVIAWIADRTVEYWEKHDNDLQIEALEQQLEENKKATSNMLKAIEMGIITEATRTRMVELETEQSRLSVQLNAAKEDVVKIDREQIISYLELLQQGDIHDRDFQMELFKNFLVAVYVYDDNRMKLVFSCMGDQNSVEIPLETGEDPPDGGLSPDAKMFVLTPDSSTKKTLHSLCSVFLFCTFAA

SEQ ID NO: 3154 - protein, 531 aa, Unknown
  Description of Unknown: Integrase B3155 sequence
  PTHR30461:SF3,cd00338,SM00857,G3DSA:1.10.10.2600,IPR036162, PF13408,PS51737,IPR025827,G3DSA:3.40.50.1390,IPR006119, IPR038109,PF07508,SSF53041,IPR011109,PTHR30461, PS51736,Coil,PF00239
MLYDIKSVDLENIIIYLRKSRSDDPSMSVEEVLASHERQLQEYSKTMFGEKIPEEHIFREVVSGETIADRPVMKEIMKLLETGMVKAVLVIEPQRLSRGDLEDCGRIVNTFRYTNTLIVTPPKTYNLSDEYDRKFFEMELTRGNDYLEYTKKILNRGRYASVKQGNFIGSIAPYGYKKVKNVSSHSKSYTLEIIPEEADAVKMMYHLYVDEGFGFARIARQLDELGIKPRHASHWSSSALKDMIENPVYIGKIRWNWRKTEKIMVDGQIVKTRPKTKDPSQWIYVDGKHEPIIDEETYNKAIGKRRINVSVRKSKEIVNPFAGLLFCGKCGKAMSYKRTYNRKKDGSKAYCLSMLCNDQAVCKTKSVKYDALEDRVIQVLKDSIADFELKLENDDGNAHKIQMDLIQDLQNTITNLKQKDARQKDAYEDGIYTKQEYAVRNAKVQEEIAEAKKALANAQNTLPPSVDYNEKIIKFTDCLNAFQSPDVSPREKNNLLKACVSKILYYNDGVSKVGIGRHVENKFNIEVTLRL

SEQ ID NO: 3155 - protein, 531 aa, Unknown
  Description of Unknown: Integrase B3156 sequence
  cd00338,SM00857,G3DSA:1.10.10.2600,IPR036162,PS51737, G3DSA:3.40.50.1390,IPR006119,IPR038109,PF07508,IPR011109, SSF53041,PTHR30461,PS51736,Coil,PF00239
MDTYCIYLRKSRADAEAEARGEGETLARHEHTLCDVAKRQKLHISKIYREIVSGETIAARPQMQQLLQDVESGIYAGVLVMEVERLARGDTIDQGIVAQAFKYSGTKIVTPTKTYDPDNEFDEEYFEFSLFMSRREYKTIKRRMQAGRAAAAKEGKYVGNKPPYGYDRKKLDHDSGFTLVPNPEEAKVVKLIFEWYVHGVVMDDGTKQRIGSTTIANRLHLMGCKTRYGGRWSLNTVRGILTNPVYAGIIRWGYLAEKKVLSDGVVTKSRPIAKDDYIMAKGLHEPLITLEEWETAQELGHQKRTIPKVNCNFKLQNPLAGILVCKKCGRSMTRRPYGKKNRQDTILCKTPDCPNVASDLCLVEQRLLDSLAEWLHQYEVQWQEHTLQAPATEPEDDQTAVLEDLRKEQAKVKAQLEKAYDLLEQDIYDTNTFVERSGTLKAKIADLQDSIDRIEESVREMSSRDDDMQKIMPKVKHLLEVYDTLPDASAKNQLLKEVLEKAEYSKEHGTRWHGNPDDFEVVIYPKLPKMR

SEQ ID NO: 3156 - protein, 531 aa, Unknown
  Description of Unknown: Integrase B3157 sequence
  cd00338,SM00857,G3DSA:1.10.10.2600,IPR036162, PS51737,G3DSA:3.40.50.1390,IPR006119,IPR038109, PF07508,IPR011109,SSF53041,PTHR30461, PS51736,Coil,PF00239
MEQYCLYLRKSRSDIEAENHGEEETLARHEKILLDLAKKREYNVTQIYREVVSGETIAARPVMQQLLSEVEHGIWSGVLVVEVERLARGDTIDQGIVAQTFKYSDTQIITPMKTYNPNNEYDEEYFEFGLFMSRREYKTINRRLQRGRLSSVKEGKCVCSIAPYGYDKVKLKGDKGFTLAPNPNEADVIKMIFELYTKGELQPDGTYKRIGVALIARKLNEMKIPARKSEYWVPASIKDMLRNPVYAGKIRWNWRSQNKRMQSGSISISRPRSEEDNCIIVNGLHPALITEETFDLVQEYLAKNPPRPTKRNAPTKNPLAGIVVCAFCGRKLVRRPYTSASCPPTLICSVPHCPNVSSFLHLVEERILKSLEEWLRNYKLQWNLSNNKPSELISESEILRQSLNDINSQITKLNKQMIKAHELLEQDIYTTEVFLERSRTITERLNQLSYDKAEIEKRLGTETIREKSMKEIIPKVEKLLDVYHELPSAKEKNDMLKDVLEKVVYKKTQNTRWSGSPDDFEITIYPKLPKS

SEQ ID NO: 3157 - protein, 531 aa, Unknown
  Description of Unknown: Integrase B3158 sequence
  cd00338,SM00857,G3DSA:1.10.10.2600,IPR036162,PS51737, G3DSA:3.40.50.1390,IPR006119,IPR038109,PF07508,IPR011109, SSF53041,PTHR30461,PS51736,Coil,PF00239
MEQYCLYLRKSRSDVEAENHGEEETLARHEKILLELAKRREYNVTQIYREVVSGETIAARPVMQQLLSEVEHGIWSGVLVVEVERLARGDTIDQGIVAQTFKYSDTQIITPMKTYNPNNEYDEEYFEFGLFMSRREYKTINRRLQRGRLSSVKEGKCVCSIAPYGYDKVKLKGDKGFTLAPNPNEADVIKMIFELYTKGELQPDGTYKRIGVALIARKLNEMKIPARKSEYWVPASIKDMLRNPVYAGKIRWNWRSQNKRMQSGSISISRPRSEEDNCIIVNGLHPALITEETFDLAQEYLAKNPPRPTKRNAPTKNPLAGIVVCAFCGRKLVRRPYTSASCPPTLICSVPHCPNVSSFLHLVEERILKSLEEWLRNYKLQWNLSNNKPSELISESEILRQSLNDINSQIAKLNKQMIKAHELLEQDIYTTEVFLERSRAITERLNQLSYDKAEIEKRLGIETIREKSMKEIIPKVEKLLDVYHELPSAKEKNDMLKDVLEKVVYKKTQNTRWSGSPDDFEITIYPKLPKS

SEQ ID NO: 3158 - protein, 531 aa, Unknown
  Description of Unknown: Integrase B3159 sequence
  PTHR30461:SF3,cd00338,SM00857,G3DSA:1.10.10.2600,IPR036162, PF13408,IPR025827,G3DSA:3.40.50.1390,PS51737,IPR006119, IPR038109,PF07508,IPR011109,SSF53041, PTHR30461,PS51736,Coil,PF00239
MKKENEIRAVVYARYSSHSQTEQSIEGQISAAQVYAKAKGYTIVKEYVDRAKTGKNDNREAFQQMLSDTAKHEFSVIIVWKVDRFGRNREEITFNKYRCKKNDVRVEYIAEAVPDSPEGVILESVLEGMAEYYSLQLAQNIRRGIRASAEKCQAIGGHCSLGYAIDPKTKKYVIDPDTAPTVQLIFEKYAEGYTGMDIVRLLNEKGLRTVRGKPFTKNSLWTILKNERYAGVYLFKDEVRVEGGIPALVSRETFDKVQEMLEINHRSPVNTWNRATYLLTDKLFCGHCGSKMVGECGTSRTGATYNYYICAGKKRERNCSKKAVRQDWIEKVVLQQIRRVLFDQEFLEFIAHKAYTYYLEEKKKLDQSAAIKAQLSSVESSIDNLIRAMEAGIFSASTKSRLDDLENQKAALTRTLAEIKLSEESFDLTEDRILFFLESMRGLDMDDVDSRKRLVKTFVNAVYLYDDKITLAFNFTDSCEKPEIIELADIADGVVEKFVHRASCSTITRTYELNVRLIKMCFVMTVERPVG

SEQ ID NO: 3159 - protein, 531 aa, Unknown
  Description of Unknown: Integrase B3160 sequence
  cd00338,SM00857,G3DSA:1.10.10.2600,IPR036162,PS51737, G3DSA:3.40.50.1390,IPR006119,IPR038109,PF07508,IPR011109, SSF53041,PTHR30461,PS51736,Coil,PF00239
MEQYCLYLRKSRSDVEAENHGEEETLARHEKILLELAKRREYNVTQIYREVVSGETIAARPVMQQLLSEVEHGIWSGVLVVEVERLARGDTIDQGIVAQTFKYSDTQIITPMKTYNPNNEYDEEYFEFGLFMSRREYKTINRRLQRGRLSSVKEGKCVCSIAPYGYDKVKLKGDKGFTLAPNPNEADVIKMIFELYTKGELQPDGTYKRIGVALIARKLNEMKIPARKSEYWVPASIKDMLRNPVYAGKIRWNWRSQNKRMQSGSISISRPRSEEDNCIIVNGLHPALITEETFDLAQEYLAKNPPRPTKRNAPTKNPLAGIVVCAFCGRKLVRRPYTSASCPPTLICSVPHCPNVSSFLHLVEERILKSLEEWLRNYKLQWNLSNNKPSELISESEILRQSLNDINSQITKLNKQMIKAHELLEQDIYTTDVFLERSRTITERLNQLSYDKAEIEKRLGVETIREKSMKEIIPKVEKLLDVYHELPSAKEKNDMLKNVLEKVVYKKTQNTRWSGSPDDFEITIYPKLPKS

SEQ ID NO: 3160 - protein, 531 aa, Unknown
  Description of Unknown: Integrase B3161 sequence
  cd00338,SM00857,G3DSA:1.10.10.2600,IPR036162, PS51737,G3DSA:3.40.50.1390,IPR006119,IPR038109, PF07508,IPR011109,SSF53041,PTHR30461, PS51736,Coil,PF00239
MDTYCIYLRKSRADAEAEARGEGETLARHEHTLCDVAKRQKLHISKIYREIVSGETIAARPQMQQLLQDVESGIYAGVLVMEVERLARGDTIDQGIVAQAFKYSGTKIVTPTKTYDPDNEFDEEYFEFSLFMSRREYKTIKRRMQAGRAAAAKEGKYVGNKPPYGYDRKKLDHDSGFTLVPNPEEAKVVKLIFEWYVHGVVMDDGTKQRIGSTTIANRLHLMGCKTRYGGRWSLNTVRGILTNPVYAGVIRWGYLAEKKVLSDGVVTKSRPISKGGYIMAKGLHEPLITLEEWETAQELGHQKRTIPKVNCNFKLQNPLAGILVCKKCGRSMTRRPYGKKNRQDTILCKTPGCPNVASDLCLVEKRLLDSLAEWLHQYEVQWQEHTLQAPATEPEDDHTAVLEDLRKEQAKVKAQLAKAYDLLEQEIYDTNTFIERSGTLKAKIADLQDSIDRIEESVREMSSRDDDMQKIMPKVKHLLEVYDTLPDASAKNQLLKEVLEKSEYSKENGTRWHGNPDDFEVVIYPKLPKMH

SEQ ID NO: 3161 - protein, 531 aa, Unknown
  Description of Unknown: Integrase B3162 sequence
  SM00857,G3DSA:1.10.10.2600,IPR036162,PS51737,G3DSA:3.40.50.1390, IPR006119,IPR038109,PF07508,IPR011109,SSF53041, PF00239,PTHR30461,PS51736,Coil,cd00338
MEQYCLYLRKSRSDIEAENHGEEETLARHEKILLDLAKKREYNVTQIYREVVSGETIAARPVMQQLLSEVEHGIWSGVLVVEVERLARGDTIDQGIVAQTFKYSDTQIITPMKTYNPNNEYDEEYFEFGLFMSRREYKTINRRLQRGRLSSVKEGKCVCSIAPYGYDKVKLKGDKGFTLAPNPNEADVIKMIFELYTKGEMQPDGTYKRLGVALIARKLNEMKIPARKSEYWVPASIKDMLRNPVYAGKIRWNWRSQNKRMQSGSISISRPRSEEDNCIIVNGLHPALITEETFDLAQEYLAKNPPRPTKRNAPTKNPLAGIVVCAFCGRKLVRRPYTSASCPPTLICSVPHCPNVSSFLHLVEERILKSLEEWLRNYKLQWNLSNNKPSELISESEILRQSLNDINSQIAKLNKQMIKAHELLEQDIYTTDVFLERSRTITERLNQLSYDKAEIEKRLGVETIREKSMKEIIPKVEKLLDVYHELPSAKEKNDMLKDVLEKVVYKKTQNTRWSGSPDDFEITIYPKLPKS

SEQ ID NO: 3162 - protein, 531 aa, Unknown
  Description of Unknown: Integrase B3163 sequence
  SM00857,G3DSA:1.10.10.2600,IPR036162,PS51737, G3DSA:3.40.50.1390,IPR006119,IPR038109,PF07508, IPR011109,SSF53041,PTHR30461,PS51736, cd00338,PF00239
MEQYCLYLRKSRSDIEAENHGEEETLARHEKILLELAKKREYNVTQIYREVVSGETIAARPVMQQLLSEVEHGIWSGVLVVEVERLARGDTIDQGIVAQTFKYSDTQIITPMKTYNPNNEYDEEYFEFGLFMSRREYKTINRRLQRGRLSSVKEGKCVCSIAPYGYDKVKLKGDKGFTLAPNPNEADVIKMIFELYTKGELQPDGTYKRIGVALIARKLNEMKIPARKSEYWVPASIKDMLRNPVYAGKIRWNWRSQNKRMQSGSISISRPRSEEDNCIIVNGLHPALITEETFDLVQEYLAKNPPRPTKRNAPTKNPLAGIVVCAFCGRKLVRRPYTSASCPPTLICSVPHCPNVSSFLHLVEERILKSLEEWLRNYKLQWNLSNNKPSELISESEILRQSLNDINSQTTKLNKQMIKAHELLEQDIYTTEVFLERSRTITERLNQLSYDKAEIEKRLGVETIREKSMKEIIPKVEKLLDVYHELPSAKEKNDMLKDVLEKVVYKKTQNTRWSGSPDDFEITIYPKLPKS

SEQ ID NO: 3163 - protein, 531 aa, Unknown
  Description of Unknown: Integrase B3164 sequence
  cd00338,SM00857,G3DSA:1.10.10.2600,IPR036162,PS51737, G3DSA:3.40.50.1390,IPR006119,IPR038109,PF07508,IPR011109, SSF53041,PTHR30461,PS51736,Coil,PF00239
MDTYCIYLRKSRADAEAEARGEGETLARHEHTLCDVAKRQKLHISKIYREIVSGETIAARPQMQQLLQDVESGIYAGVLVMEVERLARGDTIDQGIVAQAFKYSGTKIVTPTKTYDPDNEFDEEYFEFSLFMSRREYKTIKRRMQAGRAAAAKEGKYVGNKPPYGYDRKKLDHDSGFTLVPNPEEAKVVKLIFEWYVHGVVMDDGTKQRIGSTTIANRLHLMGCKTRYGGRWSLNTVRGILTNPVYAGIIRWGYLAEKKVLSDGVVTKSRPIAKDDYIMAKGLHEPLITLEEWETAQELGHQKRTIPKVNCSFKLQNPLAGILVCKKCGRSMTRRPYGKKNRQDTILCKTPDCPNVASDLCLVEQRLLDSLAEWLHQYEVQWQEHTLQAPATEPEDDQTAVLEDLRKEQAKVKAQLEKAYDLLEQDIYDTNTFVERSGTLKAKIADLQDSIDRIEKNVREMSSRDDDMQKIMPKVKHLLEVYDTLPDASAKNQLLKEVLEKAEYSKEHGTRWHGNPDDFEVVIYPKLPKMR

SEQ ID NO: 3164 - protein, 531 aa, Unknown
  Description of Unknown: Integrase B3165 sequence
  SM00857,G3DSA:1.10.10.2600,IPR036162,PF13408, IPR025827,G3DSA:3.40.50.1390,PS51737,IPR006119, IPR038109,PF07508,SSF53041,IPR011109, PF00239,PTHR30461,PS51736,Coil,cd00338
MARKKKQASGDAVIYARYSSHNQRDVSIEQQIEACRKYAASLGLKITVTYEDRAISGRTDNRPAFQRMMNDAEDGKFCYVLAWKSNRMGRNMMQAMVNEARLVDCGVKVYYAEEDFDDSAAGRFALRSMMNVNQFYSDNLAEDVRRGLMDNASKCIANGKQPFGYKRGSDGKVVLDEPAAAVVREVFTRVASGETNTSIARDLNRRGIKTGSNGEWNKCSFHGLCTNERYRGIYIYGETRIEGGIPRIIDDRLWHKVQEAIRMRNRRKNGRHRPGEDDYLLTGKLRCGHCGGYMIGMSGTSKTGTIHHYYACQNRRVGRTCDKKNIRRDIIEPAVAQAIKQYCLTDDVIEWIADKTIEYWEDEDRKLQITSLENELADIKSSISNVMKAIEQGVITSTTRDRLIELEAQQSDLSAKLNSAKEDLVHVDRKNLISSLLLFRNGDVYDRQYQEDLFNTFLVAAYVYDDGNRLKLVFNCFGDSNTVDLDLCSDENNDNSSISNEANCGNLFAQALKQSTRLKPSEEAQVAFLFV

SEQ ID NO: 3165 - protein, 531 aa, Unknown
  Description of Unknown: Integrase B3166 sequence
  PTHR30461:SF3,SM00857,G3DSA:1.10.10.2600,IPR036162,PF13408, IPR025827,G3DSA:3.40.50.1390,PS51737,IPR006119,IPR038109, PF07508,SSF53041,IPR011109,PF00239,PTHR30461, PS51736,Coil,cd00338
MKAAIYARFSSHNQREESIEGQVRACKRFAKEHGMTIVEIYADRGLSGLHADNRPEFQRMIQDSDHHRFEALIMWNLDRFSRDKYDTAVYKTRLKKNGVSLYYSDQSIPDTPEGIILESLLEGFAQYYSANLARNAKRGLQENARKCLWNGGCVPLGYLIDEHQRFVLEPIGAACVRMIFELYASGQSIKSIVCTLNEKGYKTVKGNRFRLGSIQGILRNRKYIGEYHASGITVPNGIPAIVDVQLFNDVQARLGVVASAKAHNKADIPYLLTTKVFCGHCGSPMIGESGTGKGGATYRYYKCSCRKNRKGTCDKKTEPKDWLEENVVRQTVKNVLRPEVIKEISENCAAALKADASDESLVQALKAQLAETDKALRNLLKAIEAGIISSTTRERMAELESQKSELEAQIAREQLRKPEITAEQISFWLESFLAGDIHDPKYQERIINALVRRVDVYDDGPEKQKLTIFYNITKNNRSFSKISISKCSDIECIALPKRSVAKATDFFLCFLQKDENRTAVNTVPFGTVEPS

SEQ ID NO: 3166 - protein, 531 aa, Unknown
  Description of Unknown: Integrase B3167 sequence
  PTHR30461:SF3,SM00857,G3DSA:1.10.10.2600,IPR036162,PS51737, G3DSA:3.40.50.1390,IPR006119,IPR038109,PF07508,IPR011109, SSF53041,PF00239,PTHR30461,PS51736,Coil, cd00338
MLYEINREDFENVIIYLRKSRADDPCMTVEEVLASHERQLQEYSMTFFGAKIPEDRIFREVVSGETIADRPVMKEVMTLLETGIIKGVLVIEPQRLSRGDLEDCGKIINTFRYTNTLVITPSKTYNISDEYDRKFFEMELTRGNDYLEYTKRILSRGKLASVKQGNFIGSVAPYGYKKVTKGTGKDTYHTLEIIPEQAEAVRLMFKLYLEGNGFTNISICLDRLGYKPLKSQHWSPAAISDILENPVYTGKIRWNYFKTVKKMQNGQIIKSRPINRDTSDVIIVPGKHEAIIDQKIFDAALERRGSTPKVKKGNELKNPFAGLLFCGTAGCGRSMSFKQYKDYRSKTDKRSEYMLCTNQRICHTKSVQYSAFVAKVKESLQASIKDFEVKLKAEQENADDLRQNIIKNLEAEISRLKIKDARQKDAYEDGLYSKEEYAKRNAKLQEQLYNAMNTLQQEKSATAPSVDYEEKIMRFKDCLAIIDDTTVSAGKKNELLKSCIERINYYNNCESKPGLGRYVDNPFHLEVILRL

SEQ ID NO: 3167 - protein, 531 aa, Unknown
  Description of Unknown: Integrase B3168 sequence
  PTHR30461:SF3,cd00338,SM00857,G3DSA:1.10.10.2600,IPR036162, PF13408,PS51737,G3DSA:3.40.50.1390,IPR025827,IPR006119, IPR038109,PF07508,IPR011109,SSF53041,PTHR30461, PS51736,Coil,PF00239
MARKKNIAAGQNAVIYARYSSHNQREVSIEQQVRECMKHAAELGLHVVGTYEDRAISGKTDKRPNFQRMMRDAEKGKFQAVVAWKSNRIGRNMLQAMVNEAKLEDCGVKVFYAEEDFDDTAAGRFALRNMMNVNQFYSENMAEDITRGLYDNASKCMANGRQPLGYKRGEDGRVVLDEANAAVVREIFTRVAAGDLFVDIARDLNAQGIKTSKGANWNKGSFQSICQNERYRGIYIYGDVRVVDGIPRIVSDDLWYRVQEAMRMKKNPVGTRHRVGAEDYLLTGKLRCGHCGSYMTGVSGTSRNGELHYYYTCQKRRTEHACDKKNIRRDVIEPAVAQAIKMYCLTDDVIEWMADRTVEYWEKHDNDLQIEALEQQLEENKKATSNMLKAIEMGIITEATRTRMVELETEQSRLSVQLNAAKEDVVKIDREQIISYLELLQQGDIHDRDFQMELFKNFLVAVYVYDDNRMKLVFSCMGDQNSVEIPLETGEDPPDGGLSPDAKMFVLTPDSSTKKTLHSLCGVFLFCTFVA

SEQ ID NO: 3168 - protein, 531 aa, Unknown
  Description of Unknown: Integrase B3169 sequence
  SM00857,G3DSA:1.10.10.2600,IPR036162,PF13408,PS51737, G3DSA:3.40.50.1390,IPR025827,IPR006119,IPR038109,PF07508, IPR011109,SSF53041,PTHR30461,Coil,PS51736, cd00338,PF00239
MAKPEVSELAVVYARYSSHSQGEQSIEGQLSNARDYAAAHGYTIVHEYVDRAKSGRTDNRAEFQQMLKDTAKRQFSVIILWKVDRFGRNREEIAINKMKCRKNGVRVEYVAETIPDSPEGVILESVLEGFAEYYSLQLSQNIRRGRAESAEKCQSLGGNRPLGYKTGPDKKFVIDENTAPTVKMIFTMYADGKTVTEIVDKLNEMGLRTLRGGPFTKNSLHSILKNKKYIGVYEYQGREIKDGVPRIIEDDVFNKVQEMLKINKRAPAKTWSRADYILTDKLFCGKCGALMFGESGTSKTGVKHNYYICSNKKRFRSCDKKAVRQADIEDTVLNATHELLQDDELLDYIVDRTWEYYLAQDNSQEKLRNLQRQLAQTDTAISNLIRAIEAGILTEETKKRMDELTQQKADLKASIADREIARGFHLQKSHIAFYLRSLRDADWSDKEAQKRLIQTFVNAVFVYDDHITLTYNFSGDKSTITLHDMQRFEDGEEFGCRASRSTKTTLDELKSSMVTSEWLSCVLYRTVILSS

SEQ ID NO: 3169 - protein, 531 aa, Unknown
  Description of Unknown: Integrase B3170 sequence
  SM00857,G3DSA:1.10.10.2600,IPR036162,PF13408,PS51737, G3DSA:3.40.50.1390,IPR025827,IPR006119,IPR038109,PF07508, IPR011109,SSF53041,PTHR30461,Coil,PS51736, cd00338,PF00239
MDTYCIYLRKSRADAEAEARGEGETLARHEHTLCDVAKRQKLHISKIYREIVSGETIAARPQMQQLLQDVENGIYAGVLVMEVERLARGDTIDQGIVAQAFKYSGTKIVTPTKTYDPDNEFDEEYFEFSLFMSRREYKTIKRRMQAGRAAAAKEGKYVGNKPPYGYDRKKLDHDSGFTLVPNPEEAKVVKLIFEWYVHGVVMDDGTKQRIGSTTIANRLHLMGCKTRYGGRWSLNTVRGILTNPVYAGIIRWGYLAEKKVLSDGVVTKSRPIAKDDYIMAKGLHEPLITLEEWETAQELGHQKRTIPKVNCNFKLQNPLAGILVCKKCGRSMTRRPYGKKNRQDTILCKTPGCPNVASDLYLVEQRLLDSLAEWLHQYEVQWQEHTLQAPATEPEDDQTAVLENLRKEQAKVKAQLAKAYDLLEQEIYDTNTFVERSGTLKAKIADLQDSIDRIEESVREMSSRDDDMQKIMPKVKHLLEVYDTLPDASAKNQLLKEVLEKAEYSKEHGTRWHGNPDDFEVVIYPKLPKMR

SEQ ID NO: 3170 - protein, 531 aa, Unknown
  Description of Unknown: Integrase B3171 sequence
  cd00338,SM00857,G3DSA:1.10.10.2600,IPR036162,PS51737, G3DSA:3.40.50.1390,IPR006119,IPR038109,PF07508,IPR011109, SSF53041,PTHR30461,PS51736,Coil,PF00239
MEQYCLYLRKSRSDIEAENHGEEETLARHEKILLDLAKKREYNVTQIYREVVSGETIAARPVMQQLLSEVEHGIWSGVLVVEVERLARGDTIDQGIVAQTFKYSDTQIITPMKTYNPNNEYDEEYFEFGLFMSRREYKTINRRLQRGRLSSVKEGKCVCSIAPYGYDKVKLKGDKGFTLAPNPNEADVIKMIFELYTKGELQPDGTYKRIGVALIARKLNEMKIPARKSEYWVPASIKDMLRNPVYAGKIRWNWRSQSKRMQSGSISISRPRSEEDNCIIVNGLHPALITEETFDLVQEYLAKNPPRPTKRNAPTKNPLAGIVVCAFCGRKLVRRPYTSASCPPTLICSVPHCPNVSSFLHLVEERILKSLEEWLRNYKLQWNLSNNKPSELISESEILRQSLNDINSQITKLNKQMIKAHELLEQDIYTTEVFLERSRAITERLNQLSYDKAEIEKRLGTETIREKSMKEIIPKVEKLLDVYHELPSAKEKNDMLKDVLEKVVYKKTQNTRWSGSPDDFEITIYPKLPKS

SEQ ID NO: 3171 - protein, 531 aa, Unknown
  Description of Unknown: Integrase B3172 sequence
  cd00338,SM00857,G3DSA:1.10.10.2600,IPR036162, PS51737,G3DSA:3.40.50.1390,IPR006119,IPR038109, PF07508,IPR011109,SSF53041,PTHR30461, PS51736,Coil,PF00239
MEQYCLYLRKSRSDIEAENHGEEETLARHEKILLELAKKREYNVTQIYREVVSGETIAARPVMQQLLSEVEHGMWSGVLVVEVERLARGDTIDQGIVAQTFKYSDTQIITPMKTYNPNNEYDEEYFEFGLFMSRREYKTINRRLQRGRLSSVKEGKCVCSIAPYGYDKVKLKGDKGFTLAPNPNEADVIKMIFELYTKGELQPDGTYKRIGVALIARKLNEMKIPARKSEYWVPASIKDMLRNPVYAGKIRWNWRSQNKRMQSGSISISRPRSEEDNCIIVNGLHPALITEETFGLAQEYLAKNPPRPTKRNAPTKNPLAGIVVCAFCGRKLVRRPYTSASCPPTLICSVPHCPNVSSFLHLVEERILKSLEEWLRNYKLQWNLSNNKPSELISESEILRQSLNDINSQIAKLNKQMIKAHELLEQDIYTTDVFLERSRTITERLNQLSYDKAEIEKRLGVETIREKSMKEIIPKVEKLLDVYHELPSAKEKNDMLKDVLEKVVYRKTQNTRWSGSPDDFEITIYPKLPKS

SEQ ID NO: 3172 - protein, 531 aa, Unknown
  Description of Unknown: Integrase B3173 sequence
  SM00857,G3DSA:1.10.10.2600,IPR036162,PS51737,G3DSA:3.40.50.1390, IPR006119,IPR038109,PF07508,IPR011109,SSF53041, PTHR30461,PS51736,cd00338,PF00239
MEQYCLYLRKSRSDVEAENHGEEETLARHEKILLELAKRREYNVTQIYREVVSGETIAARPVMQQLLSEVEHGIWSGVLVVEVERLARGDTVDQGIVAQTFKYSDTQIITPMKTYNPNNEYDEEYFEFGLFMSRREYKTINRRLQRGRLSSVKEGKCVCSIAPYGYDKVKLKGDKGFTLAPNPNEADVIKMIFELYTKGELQPDGTYKRIGVALIARKLNEMKIPARKSEYWVPASIKDMLRNPVYAGKIRWNWRSQNKRMQSGNISISRPRSEEDSCIIVNGLHPALITEETFDLVQEYLAKNPPRPTKRNAPTKNPLAGIVVCAFCGRKLVRRPYTSASCPPTLICSVPHCPNVSSFLHLVEERILKSLEEWLRNYKLQWNLSNNKPSELISESEILRQSLNDINSQTTKLNKQMIKAHELLEQDIYTTEVFLERSRAITERLNQLSYDKAEIEKRLGVETIREKSMKEIIPKVEKLLDVYHELPSAKEKNDMLKDVLEKVVYKKTQNTRWSGSPDDFEITIYPKLPKS

SEQ ID NO: 3173 - protein, 531 aa, Unknown
  Description of Unknown: Integrase B3174 sequence
  SM00857,G3DSA:1.10.10.2600,IPR036162,PF13408, PS51737,G3DSA:3.40.50.1390,IPR025827,IPR006119, IPR038109,PF07508,IPR011109,SSF53041, PF00239,PTHR30461,PS51736,Coil,cd00338
MARKKKQASGDAVIYARYSSHNQRDVSIEQQIEACRKYAASLGLKITVTYEDRAISGRTDNRPAFQRMMNDAEDGKFCYVLAWKSNRMGRNMMQAMVNEARLVDCGVKVYYAEEDFDDSAAGRFALRSMMNVNQFYSDNLAEDVRRGLMDNASKCIANGKQPFGYKRGSDGKVVLDEPAAAVVREVFTRVASGETNTSIARDLNRRGIKTGSNGEWNKCSFHGLCTNERYRGIYIYGETRIEGGVPRIIDDRLWHKVQEAIRMRNRRKNGRHRPGEDDYLLTGKLRCGHCGGYMIGMSGTSKTGTIHHYYACQNRRVGRTCDKKNIRRDIIEPAVAQAIKQYCLTDDVIEWIADKTIEYWEDEDRKLQITSLENELADIKSSISNVMKAIEQGVITSTTRDRLIELEAQQSDLSAKLNSAKEDLVHVDRKNLISSLLLFRNGDVYDRQYQEDLFNTFLVAAYVYDDGNRLKLVFNCFGDSNTVDLDLCSDENNDNSSISNEANCGNLFAQALKQSTRTKPSEETQVAFLFV

SEQ ID NO: 3174 - protein, 531 aa, Unknown
  Description of Unknown: Integrase B3175 sequence
  PTHR30461:SF3,cd00338,SM00857,G3DSA:1.10.10.2600,IPR036162, PF13408,PS51737,G3DSA:3.40.50.1390,IPR025827,IPR006119, IPR038109,PF07508,IPR011109,SSF53041,PTHR30461, PS51736,Coil,PF00239
MKKENEIRAVVYARYSSHSQTEQSIEGQISAAQIYAKAKGYTIVKEYVDRAKTGKNDNREAFQQMLSDTAKHEFSVIIVWKVDRFGRNREEITFNKYRCKKNDVRVEYIAEAVPDSPEGVILESVLEGMAEYYSLQLAQNIRRGIRASAEKCQAIGGHCSLGYAIDPKTKKYVIDPDTAPTVQLIFEKYAEGYTGMDIVRLLNEKGLRTVRGKPFTKNSLWTILKNERYAGVYLFKDEVRVEGGIPALVSRETFDKVQEMLEINHRSPVNTWNRATYLLTDKLFCGHCGSKMVGECGTSRTGATYNYYICAGKKRERNCSKKAVRQGWLEKVVLKQICRVLFDQEFLEFIAHKAYTYYLDEKKKLDQSAAIKAQLSSVESSIDNLIRAMEAGIFSASTKSRLDDLENQKAALTRTLAEIKLSEESFDLTEDRILFFLESMRGLDMDDVDSRKRLVKTFVNAVYLYDDKITLAFNFTDSCEKPEIIELADIADGVVEKFVHRASCSTITRTYELNVRLIKMCFVMTVERPVG

SEQ ID NO: 3175 - protein, 531 aa, Unknown
  Description of Unknown: Integrase B3176 sequence
  SM00857,G3DSA:1.10.10.2600,IPR036162,PF13408,PS51737, G3DSA:3.40.50.1390,IPR025827,IPR006119,IPR038109,PF07508, IPR011109,SSF53041,PF00239,PTHR30461,PS51736, Coil,cd00338
MARKKKQASGDAVIYARYSSHNQRDVSIEQQIEACRKYAASLGLKITVTYEDRAISGRTDNRPAFQRMMNDAEDGKFCYVLAWKSNRMGRNMMQAMVNEARLVDCGVKVYYAEEDFDDSAAGRFALRSMMNVNQFYSDNLAEDVRRGLMDNASKCIANGKQPFGYKRGSDGKVVLDEPAAAVVREVFTRVASGETNTSIARDLNRRGIKTGSNGEWNKCSFHGLCTNERYRGIYIYGETRIEGGVPRIIDDRLWHKVQEAIRMRNRRKNGRHRPDEDDYLLTGKLRCGHCGGYMIGMSGTSKTGTIHHYYACQNRRVGRTCDKKNIRRDIIEPAVAQAIKQYCLTDDVIEWIADKTIEYWEDEDRKLQITSLENELADIKSSISNVMKAIEQGVITSTTRDRLIELEAQQSDLSAKLNSAKEDLVHVDRKNLISSLLLFRNGDVYDRQYQEDLFNTFLVAAYVYDDGNRLKLVFNCFGDSNTVDLDLCSDENNDNSSISNEANCGNLFAQALKQSTRLKPSEEAQVAFLFV

SEQ ID NO: 3176 - protein, 531 aa, Unknown
  Description of Unknown: Integrase B3177 sequence
  cd00338,SM00857,G3DSA:1.10.10.2600,IPR036162,PS51737, G3DSA:3.40.50.1390,IPR006119,IPR038109,PF07508,SSF53041, IPR011109,PTHR30461,PS51736,Coil,PF00239
MEQYCLYLRKSRSDVEAENHGEEETLARHEKILLELAKRREYNVTQIYREVVSGETIAARPVMQQLLSEVEHGIWSGVLVVEVERLARGDTIDQGIVAQTFKYSDTQIITPMKTYNPNNEYDEEYFEFGLFMSRREYKTINRRLQRGRLSSVKEGKCVCSIAPYGYDKVKLKGDKGFTLAPNPNEADVIKLIFELYTKGELQPDGTYKRLGVALIARKLNEMKRPARKSEYWVPASIKDMLRNPVYAGKIRWNWRSQNKRMQSGSISISRPRSEEDNCIIVNGLHPALITEETFDLAQEYLAKNPPRPTKRNAPTKNPLAGIVVCDFCGRKLVRRPYTSASCPPTLICSVPHCPNVSSFLHLVEERILKSLEEWLRNYKLQWNLSNNKPSELISESEILRQSLNDINSQIAKLNKQMIKAHELLEQDIYTTDVFLERSRTITERLNQLSYDKAEIEKRLGVETIREKSMKEIIPKVEKLLDVYHELPSAKEKNDMLKDVLEKVVYKKTQNTRWSGSPDDFEITIYPKLPKS

SEQ ID NO: 3177 - protein, 531 aa, Unknown
  Description of Unknown: Integrase B3178 sequence
  PTHR30461:SF3,SM00857,G3DSA:1.10.10.2600,IPR036162,PF13408, IPR025827,PS51737,G3DSA:3.40.50.1390,IPR006119,IPR038109, PF07508,SSF53041,IPR011109,PTHR30461, Coil,PS51736,cd00338,PF00239
MKKENEIRAVVYARYSSHSQTEQSIEGQLAAAQTYAKAKGYTIVKEYVDRAKTGKNDNREAFQQMLSDTAKHEFSVIIVWKVDRFGRNREEITFNKYRCKKNDVRVEYIAEAVPDSPEGVILESVLEGMAEYYSLQLAQNIRRGIRASAEKCQAIGGHCSLGYAIDPKTKKYVIDPDTAPTVQLIFEKYAEGYTGMDIVRLLNEKGLRTVRGKPFTKNSLWTILKNERYAGVYLFKDEVRVEGGIPALVSRETFDKVQEMLEINHRSPVNTWNRATYLLTDKLFCGHCGSKMVGECGTSRTGATYNYYICAGKKRERNCSKKAVRQDWIEKVVLQQIRRVLFDQEFLEFIAHKAYTYYLEEKKKLDQSAAIKAQLSSVESSIDNLIRAMEAGIFSASTKSRLDDLENQKAALTRTLAEIKLSEESFDLTEDRILFFLESMRGLDMDDVDSRKRLVKTFVNAVYLYDDKITLAFNFTDSCEKPEIIELADIADGVVEKFVHRASCSTITRTYELNVRLVKMCFVMTVERPVG

SEQ ID NO: 3178 - protein, 531 aa, Unknown
  Description of Unknown: Integrase B3179 sequence
  SM00857,G3DSA:1.10.10.2600,IPR036162,PS51737,G3DSA:3.40.50.1390, IPR006119,IPR038109,PF07508,IPR011109,SSF53041, PF00239,PTHR30461,PS51736,Coil,cd00338
MEQYCLYLRKSRSDIEAENHGEEETLARHEKILLDLAKKREYNVTQIYREVVSGETIAARPVMQQLLSEVEHGIWSGVLVVEVERLARGDTIDQGIVAQTFKYSDTQIITPMKTYNPNNEYDEEYFEFGLFMSRREYKTINRRLQRGRLSSVKEGKCVCSIAPYGYDKVKLKGDKGFTLAPNPNEADVIKMIFELYTKGELQPDGTYKRLGVALIARKLNEMKIPARKSEYWVPASIKDMLRNPVYAGKIRWNWRSQNKRMQSGSISISRPRSEEDNCIIVNGLHPALITEETFDLAQEYLAKNPPRPTKRNAPTKNPLAGIVVCAFCGRKLVRRPYTSASCPPTLICSVPHCPNVSSFLHLVEERILKSLEEWLRNYKLQWNLSNNKPSELISESEILRQSLNDINSQIAKLNKQMIKAHELLEQDIYTTDVFLERSRTITERLNQLSYDKAEIEKRLGVETIREKSMKEIIPKVEKLLDVYHELPSAKEKNDMLKDVLEKVVYKKTQNTRWSGSPDDFEITIYPKLPKS

SEQ ID NO: 3179 - protein, 531 aa, Unknown
  Description of Unknown: Integrase B3180 sequence
  SM00857,G3DSA:1.10.10.2600,IPR036162,PF13408, IPR025827,PS51737,G3DSA:3.40.50.1390,IPR006119, IPR038109,PF07508,IPR011109,SSF53041, PTHR30461,cd00338,PF00239
MPRVPSHKQQSFAVIYARYSSDSQRDASIEDQLRECHAWADAHGYTIIEEYCDYAMTGRNDDRPAFQRMIADSDKGHFTAVITYQTSRFARNRYDAAVYKHRLKRAGVTVHYAASDIPEGPEGILLEALMEGMDEYYSANLSKNIRRGQEGNARKALFSGGAIPVGLRISPDRTYEPDPLTAPHVLRAFQMIDEGKMQKDVIDYFNTCGLRTNKGNPYTKDSVAHMFSNRKYLGEYRYRDVVIPGAFPAIVPEDLFERVQQRLAQNLHVKGGHARAMVDFLLTGKLFCGHCGSPMVGDSGTSRNGTTHYYYSCSCRKRGESCTKKSERRRPLEIAIVEETVRHVLQPDIITAVVDRVMEIYEREQREDHVLASLQAEEKTITTALTNLMAAIEMGIFTPTTRDRMLELEAQKKDVAARITIHQATRPRIDRDRVEFFLHSFRLGDPASTDYRRKVISSLIDRVTITDLPTPDGTPTHRRLDLVYNLTEHRTSTASLCSDAGGYPPLYPPHPNTIYIIDGQLRMWTTIEAPI

SEQ ID NO: 3180 - protein, 531 aa, Unknown
  Description of Unknown: Integrase B3181 sequence
  cd00338,SM00857,G3DSA:1.10.10.2600,IPR036162,PS51737, G3DSA:3.40.50.1390,IPR006119,IPR038109,PF07508,SSF53041, IPR011109,PTHR30461,PS51736,Coil,PF00239
MEQYCLYLRKSRSDVEAENHGEEETLARHEKILLELAKRREYNVTQIYREVVSGETIAARPVMQQLLSEVEHGIWSGVLVVEVERLARGDTIDQGIVAQTFKYSDTQIITPMKTYNPNNEYDEEYFEFGLFMSRREYKTINRRLQRGRLSSVKEGKCVCSIAPYGYDKVKLKGDKGFTLAPNPNEADVIKLIFELYTKGELQPDGTYKRLGVALIARKLNEMKIPARKSEYWVPASIKDMLRNPVYAGKIRWNWRSQNKRMQSGSISISRPRSEEDNCIIVNGLHPALITEVTFDLAQEYLAKNPPRPTKRNAPTKNPLAGIVVCAFCGRKLVRRPYTSASCPPTLICSVPHCPNVSSFLHLVEERILKSLEEWLRNYKLQWNLSNNKPSELISESEILRQSLNDINSQIAKLNKQMIKAHELLEQDIYTTEVFLERSRAITERLNQLSYDKAEIEKRLGIETIREKSMKEIIPKVEKLLDVYHELPSAKEKNDMLKDVLEKVVYKKTQNTRWSGSPDDFEITIYPKLPKS

SEQ ID NO: 3181 - protein, 531 aa, Unknown
  Description of Unknown: Integrase B3182 sequence
  cd00338,SM00857,G3DSA:1.10.10.2600,IPR036162, PS51737,G3DSA:3.40.50.1390,IPR006119,IPR038109, PF07508,IPR011109,SSF53041,PTHR30461, PS51736,Coil,PF00239
MEQYCLYLRKSRSDIEAENHGEEETLARHEKILLELAKKREYNVTQIYREVVSGETIAARPVMQQLLSEVEHGIWSGVLVVEVERLARGDTIDQGIVAQTFKYSDTQIITPMKTYNPNNEYDEEYFEFGLFMSRREYKTINRRLQRGRLSSVKEGKCVCSIAPYGYDKVKLKGDKGFTLAPNPNEADVIKLIFELYTKGELQPDGTYKRLGVALIARKLNEMKIPTRKSEYWVPASIKDMLRNPVYAGKIRWNWRSQNKRMQSGSISISRPRSEEDNCIIVNGLHPALITEETFDLAQEYLAKNPPRPTKRNAPTKNPLAGIVVCAFCGRKLVRRPYTSASCPPTLICSVPHCPNVSSFLHLVEERILKSLEEWLRNYKLQWNLSNNKPSELISESEILRQSLNDINSQIAKLNKQMIKAHELLEQDIYTTDVFLERSRTITERLNQLSYDKAEIEKRLGVETIREKSMKEIIPKVEKLLDVYHELPSAKEKNDMLKDVLEKVVYKKTQNTRWSGSPDDFEITIYPKLPKS

SEQ ID NO: 3182 - protein, 531 aa, Unknown
  Description of Unknown: Integrase B3183 sequence
  PTHR30461:SF3,SM00857,G3DSA:1.10.10.2600,IPR036162,PF13408, IPR025827,PS51737,G3DSA:3.40.50.1390,IPR006119,IPR038109, PF07508,SSF53041,IPR011109,PF00239,PTHR30461, PS51736,Coil,cd00338
MKAAIYARFSSHNQREESIEGQVRACKRFAKEHGMTIVEIYADRGLSGLHADNRPEFQRMIQDSDHHRFEALIMWNLDRFSRDKYDTAVYKTRLKKNGVSLYYSDQSIPDTPEGIILESLLEGFAQYYSANLARNAKRGLQENARKCLWNGGCVPLGYLIDEHQRFVLEPIGAACVRMIFELYASGQSIKSIVCTLNEKGYKTVKGNRFRLGSIQGILRNRKYIGEYHASGITVPNGIPAIVDVQLFNDVQARLGVVASAKAHNKADIPYLLTTKVFCGHCGSPMIGESGTGKGGATYRYYKCSCRKNRKGTCDKKTEPKDWLEENVVRQTVKNVLRPEVIKEISENCAAALKADASDESLVQALKAQLAETDKALRNLLKAIEAGIISSTTRERMAELESQKSELEAQIAREQLRKPEITAEQISFWLESFLAGDIHDPKYQERIINALVRRVDVYDDEPEKQKLTIFYNITKNNRSSSKISISKCSDIECIALPKRSVAKAADFFIRFLQKDENRTAVNTVPFGTVEPS

SEQ ID NO: 3183 - protein, 531 aa, Unknown
  Description of Unknown: Integrase B3184 sequence
  cd00338,SM00857,G3DSA:1.10.10.2600,IPR036162,PS51737, G3DSA:3.40.50.1390,IPR006119,IPR038109,PF07508,IPR011109, SSF53041,PTHR30461,PS51736,Coil,PF00239
MEQYCLYLRKSRSDVEAENHGEEETLARHEKILLELAKRREYNVTQIYREVVSGETIAARPVMQQLLSEVEHGLWSGVLVVEVERLARGDTIDQGIVAQTFKYSDTQIITPMKTYNPNNEYDEEYFEFGLFMSRREYKTINRRLQRGRLSSVKEGKCVCSIAPYGYDKVKLKGDKGFTLAPNPNEADVIKLIFELYTKGELQPDGTYKRLGVALIARKLNEMKIPARKSEYWVPASIKDMLRNPVYAGKIRWNWRSQSKRMQSGSISISRPRSEEDNCIIVNGLHPALITEETFDLVQEYLAKNPPRPTKRNAPTKNPLAGIVVCAFCGRKLVRRPYTSASCPPTLICSVPHCPNVSSFLHLVEERILKSLEEWLRNYKLQWNLSNSKPSELISESEILRQSLNDINSQITKLNKQMIKAHELLEQDIYTTEVFLERSRAITERLNQLSYDKAEIEKRLGVETIREKSMKEIIPKVEKLLDVYHELPSAKEKNDMLKDVLEKVVYKKTQNTRWSGSPDDFEITIYPKLPKS

SEQ ID NO: 3184 - protein, 531 aa, Unknown
  Description of Unknown: Integrase B3185 sequence
  PTHR30461:SF3,SM00857,G3DSA:1.10.10.2600,IPR036162,PS51737, G3DSA:3.40.50.1390,IPR006119,IPR038109,PF07508,SSF53041, IPR011109,PTHR30461,Coil,PS51736, cd00338,PF00239
MLYEINREDFENVIIYLRKSRADDPCMTVEEVLASHERQLQEYSMTFFGAKIPEERIFREVVSGETIADRPVMKEVMTLLETGIIKGVLVIEPQRLSRGDLEDCGKIINTFRYTNTLVITPSKTYNISDEYDRKFFEMELTRGNDYLEYTKRILSRGKLASVKQGNFIGSVAPYGYKKVTKGTGKDTYHTLEIIPEQAEAVRLMFKLYLEGNGFTNISICLDRLGYKPLKSQHWSPAAISDILENPVYTGKIRWNYFKTVKKMQNGQIIKSRPINRDTSDVIIVPGKHEAIIDQKIFDAALERRGSTPKVKKGNELKNPFAGLLFCGTAGCGRSMSFKQYKDYRSKTDKRSEYMLCTNQRICHTKSVQYSAFVAKVKESLQASIKDFEVKLKAEQENADDLRQNIIKNLEAEVSRLKIKDARQKDAYEDGLYSKEEYAKRNAKLQEQLYNTMNTLQQEKSATAPSVDYEEKIMRFKDCLAIIDDTTVSAGKKNELLKSCIERINYYNNCESKPGLGRYVDNPFHLEVILRL

SEQ ID NO: 3185 - protein, 531 aa, Unknown
  Description of Unknown: Integrase B3186 sequence
  SM00857,G3DSA:1.10.10.2600,IPR036162,PF13408,PS51737, IPR025827,G3DSA:3.40.50.1390,IPR006119,IPR038109,PF07508, IPR011109,SSF53041,PF00239,PTHR30461,PS51736, Coil,cd00338
MARKKKQASGDAVIYARYSSHNQRDVSIEQQIEACRKYAASLGLKITVTYEDRAISGRTDNRPAFQRMMNDAEDGKFCYVLAWKSNRMGRNMMQAMVNEARLVDCGVKVYYAEEDFDDSAAGRFALRSMMNVNQFYSDNLAEDVRRGLMDNASKCIANGKQPFGYKRGSDGKVVLDEPAAAVVREVFTRVASGETNTSIARDLNRRGIKTGSNGEWNKCSFHGLCTNERYRGIYIYGETRIEGGVPRIIDDRLWHKVQEAIRMRNRRKNGRHRPGEDDYLLTGKLRCGHCGGYMIGMSGTSKTGTIHHYYACQNRRVGRTCDKKNIRRDIIEPAVAQAIKQYCLTDDVIEWIADKTIEYWEDDDRKLQITSLENELADIKSSISNVMKAIEQGVITSTTRDRLIELETQQSDLSAKLNSAKEDLVHVDRKNLISSLLLFRNGDVYDRQYQEDLFNTFLVAAYVYDDGNRLKLVFNCFGDSNTVDLDLCSDENNDNSSISNEANCGNLFAQALKQSTRTKPSEEAQVAFLFV

SEQ ID NO: 3186 - protein, 531 aa, Unknown
  Description of Unknown: Integrase B3187 sequence
  cd00338,SM00857,G3DSA:1.10.10.2600,IPR036162,PS51737, G3DSA:3.40.50.1390,IPR006119,IPR038109,PF07508,IPR011109, SSF53041,PTHR30461,PS51736,Coil,PF00239
MEQYCLYLRKSRSDIEAENHGEEETLARHEKILLELAKKREYNVTQIYREVVSGETIAARPVMQQLLSEVEHGIWSGVLVVEVERLARGDTIDQGIVAQTFKYSDTQIITPMKTYNPNNEYDEEYFEFGLFMSRREYKTINRRLQRGRLSSVKEGKCVCSIAPYGYDKVKLKGDKGFTLAPNPNEADVIKLIFELYTKGELQPDGTYKRLGVALITRKLNEMKRPARKSEYWVPASIKDMLRNPVYAGKIRWNWRSQNKRMQSGSISISRPRSEEDNCIIVNGLHPALITEETFDLAQEYLAKNPPRPTKRNAPTKNPLAGIVVCAFCGRKLVRRPYTSASRPPTLICSVPHCPNVSSFLHLVEERILKSLEEWLRNYKLQWNLSNNKPSELISESEILRQSLNDINSQIAKLNKQMIKAHELLEQDIYTTDVFLERSRTITERLNQLSYDKAEIEKRLGVETIREKSMKEIIPKVEKLLDVYHELPSAKEKNDMLKDVLEKVVYKKTQNTRWSGSPDDFEITIYPKLPKS

SEQ ID NO: 3187 - protein, 531 aa, Unknown
  Description of Unknown: Integrase B3188 sequence
  SM00857,G3DSA:1.10.10.2600,IPR036162,PF13408, IPR025827,PS51737,G3DSA:3.40.50.1390,IPR006119, IPR038109,PF07508,IPR011109,SSF53041, PTHR30461,Coil,PS51736,cd00338,PF00239
MAKPEVSELAVVYARYSSHSQGEQSIEGQLSNARDYAAAHGYTIVHEYVDRAKSGRTDNRAEFQQMLKDTAKRQFSVIILWKVDRFGRNREEIAINKMKCRKNGVRVEYVAETIPDSPEGVILESVLEGFAEYYSLQLSQNIRRGRAESAEKCQSLGGNRPLGYKTGPDKKFVIDENTAPTVKMIFTMYADGKTVTEIVDKLNEMGLRTLRGGPFTKNSLHSILKNKKYIGVYEYQGREIKDGVPRIIEDDVFNKVQEMLKINKRAPAKTWSRADYILTDKLFCGKCGALMFGESGTSKTGVKHNYYICSNKKRFRSCDKKAVRQADIEDTVLNATHELLQDDELLDYIVDRTWEYYLAQDNSQEELRNLQRQLAQTDTAISNLIRAIEAGILTEETKTRMDELTQQKADLKASIADREIARGFHLQKSHIAFYLRSLRDADWSDKEAQKRLIQTFVNAVFVYDDHITLTYNFSGDKSTITLRDMQRFEDGEEFGCRASRSTKTTLDELKSSMVTSEWLSCVLYRTVILSS

SEQ ID NO: 3188 - protein, 531 aa, Unknown
  Description of Unknown: Integrase B3189 sequence
  PTHR30461:SF3,SM00857,G3DSA:1.10.10.2600,IPR036162,PS51737, G3DSA:3.40.50.1390,IPR006119,IPR038109,PF07508,IPR011109, SSF53041,PF00239,PTHR30461,PS51736,Coil, cd00338
MLYEINREDFENVIIYLRKSRADDPCMTVEEVLASHERQLQEYSMTFFGAKIPEERIFREVVSGETIADRPVMKEVMTLLETGIIKGVLVIEPQRLSRGDLEDCGKIINTFRYTNTLVITPSKTYNISDEYDRKFFEMELTRGNDYLEYTKRILSRGKLASVKQGNFIGSVAPYGYKKVTKGTGKDTYHTLEIIPEQAEAVRLMFKLYLEGNGFTNISICLDRLGYKPLKSQHWSPAAISDILENPVYTGKIRWNYFKTVKKMQNGQIIKSRPINRDTSDVIIVPGKHEAIIDQKIFDAALERRGSTPKVKKGNELKNPFAGLLFCGTAGCGRSMSFKQYKDYRSKTDKRSEYMLCTNQRICHTKSVQYSAFVAKVKESLQASIKDFEVKLKAEQENADDLRQNIIKNLEAEISRLKIKDARQKDAYEDGLYSKEEYAKRNAKLQEQLYNAMNTLQQEKSATAPSVDYEEKIMRFKDCLAIIDDTTVSAGKKNELLKSCIERINYYNNCESKPGLGRYVDNPFHLEVILRL

SEQ ID NO: 3189 - protein, 531 aa, Unknown
  Description of Unknown: Integrase B3190 sequence
  SM00857,G3DSA:1.10.10.2600,IPR036162,PF13408,PS51737, G3DSA:3.40.50.1390,IPR025827,IPR006119,IPR038109,PF07508, IPR011109,SSF53041,PF00239,PTHR30461,PS51736, Coil,cd00338
MARKKKQASGDAVIYARYSSHNQRDVSIEQQIEACRKYAASLGLKITVTYEDRAISGRTDNRPAFQRMMNDAEDGKFCYVLAWKSNRMGRNMMQAMVNEARLVDCGVKVYYAEEDFDDSAAGRFALRSMMNVNQFYSDNLAEDVRRGLMDNASKCIANGKQPFGYKRGSDGKVVLDEPAAAVVREVFTRVASGETNTSIARDLNRRGIKTGSNGEWNKCSFHGLCTNERYRGIYIYGETRIEGGVPRIIDDRLWHKVQEAIRMRNRRKNGRHRPGEDDYLLTGKLRCGHCGGYMIGMSGTSKTGTIHHYYACQNRRVGRTCDKKNIRRDIIEPAVAQAIKQYCLTDDVIEWIADKTIEYWEDEDRKLQITSLENELADIKSSISNVMKAIEQGVITSTTRDRLIELEAQQSDLSAKLNSAKEDLVHVDRKNLISSLLLFRNGDVYDRQYQEDLFNTFLVAAYVYDDGNRLKLVFNCFGDSNTIDLDLCSDENNDNSSISNEANCGNLFAQALKQSTRLKPSEETQVAFLFV

SEQ ID NO: 3190 - protein, 531 aa, Unknown
  Description of Unknown: Integrase B3191 sequence
  SM00857,G3DSA:1.10.10.2600,IPR036162,PF13408,PS51737, IPR025827,G3DSA:3.40.50.1390,IPR006119,IPR038109,PF07508, IPR011109,SSF53041,PF00239,PTHR30461,PS51736, Coil,cd00338
MARKKKQASGDAVIYARYSSHNQRDVSIEQQIEACRKYAASLGLKITVTYEDRAISGRTDNRPAFQRMMNDAEDGKFCYVLAWKSNRMGRNMMQAMVNEARLVDCGVKVYYAEEDFDDSAAGRFALRSMMNVNQFYSDNLAEDVRRGLMDNASKCIANGKQPFGYKRGSDGKVVLDEPAAAVVREVFTRVASGETNTSIARDLNRRGIKTGSNGEWNKCSFHGLCTNERYRGIYIYGETRIEGGVPRIIDDRLWHKVQEAIRMRNRRKNGRHRPGEDDYLLTGKLRCGHCGGYMIGMSGTSKTGTIHHYYACQNRRVGRTCDKKNIRRDIIEPAVAQAIKQYCLTDDVIEWIADKTIEYWEDEDRKLQITSLENELADIKSSISNVMKAIEQGVITSTTRDRLIELEAQQSDLSAKLNSAKEDLVHVDRKNLISSLLLFRNGDVYDRQYQEDLFNTFLVAAYVYDDGNRLKLVFNCFGDSNTVDLDLCSDENNDNSSILNEANCGNLFAQALKQSTRLKPSEEAQVAFLFV

SEQ ID NO: 3191 - protein, 531 aa, Unknown
  Description of Unknown: Integrase B3192 sequence
  PTHR30461:SF3,cd00338,SM00857,G3DSA:1.10.10.2600,IPR036162, PF13408,IPR025827,G3DSA:3.40.50.1390,PS51737,IPR006119, IPR038109,PF07508,SSF53041,IPR011109,PTHR30461, PS51736,Coil,PF00239
MLYDIKSVDLENIIIYLRKSRSDDPSMSVEEVLASHERQLQEYSKTMFGEKIPEEHIFREVVSGETIADRPVMKEIMKLLETGMVKAVLVIEPQRLSRGDLEDCGRIVNTFRYTNTLIVTPPKTYNLSDEYDRKFFEMELTRGNDYLEYTKKILNRGRYASVKQGNFIGSIAPYGYKKVKNVSSHSKSYTLEIIPEEADAVKMMYHLYVDEGFGFARIARQLDELGIKPRHASHWSSSALKDMIENPVYIGKIRWNWRKTEKIMVDGQIVKTRPKTKDPSQWIYVDGKHEPIIDEETYNKAIGKRRINVSVRKSKEIVNPFAGLLFCGKCGKAMSYKRTYNRKKDGSKAYCLSMLCNDQAVCKTKSVKYDALEDRVIQVLKDSIADFELKLENDDGNAHKIQMDLIQDLQNTITNLKQKDARQKDAYEDGIYTKQEYAVRNAKVQEEIAEAKKALANAQNTLPPSVDYNEKIIKFTDCLNAFHSPDVSPREKNNLLKACVSKILYYNDGVSKVGIGRHVENKFNIEVTLRL

SEQ ID NO: 3192 - protein, 531 aa, Unknown
  Description of Unknown: Integrase B3193 sequence
  PTHR30461:SF3,SM00857,G3DSA:1.10.10.2600,IPR036162,PF13408, IPR025827,G3DSA:3.40.50.1390,PS51737,IPR006119,IPR038109, PF07508,SSF53041,IPR011109,PTHR30461,Coil, PS51736,cd00338,PF00239
MKAAIYARFSSHNQREESIEGQVRACKRFAKEHGMTVIEIYADRGLSGLHADNRPEFQRMIQDSDHHRFEALIMWNLDRFSRDKYDTAVYKTRLKKNGVSLYYSDQSIPDTPEGIILESLLEGFAQYYSANLARNAKRGLQENARKCLWNGGCVPLGYLIDEHQRFVLEPIGAACVRMIFELYASGQSIKSIVCTLNEKGYKTVKGNRFRLGSIQGILRNRKYIGEYHASGITVPNGIPAIVDVQLFNDVQARLGVVASAKAHNKADIPYLLTTKVFCGHCGSPMIGESGTGKGGATYRYYKCSCRKNRKGTCDKKTEPKDWLEENVVRQTVKNVLRPEVIKEISENCAAALKADASDESLVQALKAQLAETDKGLRNLLKAIEAGIISSTTRERMAELESQKSELEAQIAREQLRKPEITAEQISFWLESFLAGDIHDPKYQERIINALVRRVDVYDDGPEKQKLTIFYNITKNNHSSSKISISKCSDIECIALPKRSVAKAADFFIRFLQKDENRTAVNTVPFGTVEPS

SEQ ID NO: 3193 - protein, 531 aa, Unknown
  Description of Unknown: Integrase B3194 sequence
  PTHR30461:SF3,SM00857,G3DSA:1.10.10.2600,IPR036162,PF13408, IPR025827,G3DSA:3.40.50.1390,PS51737,IPR006119,IPR038109, PF07508,IPR011109,SSF53041,PF00239,PTHR30461, Coil,cd00338
MKKFKFPIDLSMLTEEEINQFREDPSTLFQGDTDVCLYLRFSSERQKEQSIEGQLRDCIAYCKRKNYRIVAIYVDRATTARKDVEKRVHFQEMITASVHQTWKLVIVWKLDRFARNREDSAIFKMRLRRNGVKVESATEGISKNPEGIILEAVLEGMAEYYSADLSQKITRGMRESALKCHSIGGHVPLGYKIEDHKLVINPDTAHIVQEAFELYANGETVADICRMFNAKGYRTAKGAEFNRNSFKSMFRNRRYIGVYRYKDFEKEGGVPAIIDKELFETVQRRLSTNAEAPARGKAKVDYLLAGKLFCGHCGGSMNGESGTSKTGAVHNYYTCYTRKRHHSCDKKPLRKEWIEQIVAQDAMELLTDDAIQEMADMAISQTEKDLRENTRIPELSERMKETESGISNITKAVEKGIASDALMNRLVELEKEKKNLLRLIAEEEKYVCKIDRDQIVYWLTKFKDGNIEDENFKRIIIDLMVNSVTVWDEPDGFRITTAYNLTSCKNKTFRIPSSSDKGFGFEGLESTKKGG

SEQ ID NO: 3194 - protein, 531 aa, Unknown
  Description of Unknown: Integrase B3195 sequence
  PTHR30461:SF3,cd00338,SM00857,G3DSA:1.10.10.2600,IPR036162, PF13408,PS51737,IPR025827,G3DSA:3.40.50.1390,IPR006119, IPR038109,PF07508,IPR011109,SSF53041,PTHR30461, PS51736,Coil,PF00239
MKKDNEIRAVVYARYSSHSQTEQSIEGQISAAQVYAKAKGYTIVKEYVDRAKTGKNDNREAFQQMLSDTAKHEFSVIIVWKVDRFGRNREEITFNKYRCKKNDVRVEYIAEAVPDSPEGVILESVLEGMAEYYSLQLAQNIRRGIRASAEKCQAIGGHCSLGYAIDPKTKKYVIDPDTAPTVQLIFEKYAEGYTGMDIVRLLNEKGLRTVRGKPFTKNSLWTILKNERYAGVYLFKNEVRVEGGIPALVSRETFDKVQEMLEINHRSPVNTWNRATYLLTDKLFCGHCGSKMVGECGTSRTGATYNYYICAGKKRERNCSKKAVRQDWIEKVVLQQIRRVLFDQEFLEFIAHKAYTYYLDEKKKLDQSAAIKAQLSSVESSIDNLIRAMEAGIFSASTKSRLDDLENQKAALTRTLAEIKLSEESFDLTEDRILFFLESMRGLDMDDVDSRKRLVKTFVNAVYLYDDKITLAFNFTDSCEKPEIIELADIADGVVEKFVHRASCSTITRTYELNVQLIKMCFVMTVERPVG

SEQ ID NO: 3195 - protein, 531 aa, Unknown
  Description of Unknown: Integrase B3196 sequence
  cd00338,SM00857,G3DSA:1.10.10.2600,IPR036162,PS51737, G3DSA:3.40.50.1390,IPR006119,IPR038109,PF07508,IPR011109, SSF53041,PTHR30461,PS51736,Coil,PF00239
MEQYCLYLRKSRSDVEAENHGEEETLARHEKILLELAKRREYNVTQIYREVVSGETIAARPVMQQLLSEVEHGIWSGVLVVEVERLARGDTIDQGIVAQTFKYSDTQIITPMKTYNPNNEYDEEYFEFGLFMSRREYKTINRRLQRGRLSSVKEGKCVCSIAPYGYDKVKLKGDKGFTLAPNPNEADVIKMIFELYTKGELQPDGTYKRIGVALIARKLNEMKIPARKSEYWVPASIKDMLRNPVYAGKIRWNWRSQNKRMQSGSISISRPRSEEDNCIIVNGLHPALITEETFDLVQEYLAKNPPRPTKRNAPTKNPLAGIVVCAFCGRKLVRRPYTSASCPPTLICSVPHCPNVSSFLHLVEERILKSLEEWLRNYKLQWNLSNNKPSELISESEILRQSLNDINSQIAKLNKQMIKAHELLEQDIYTTDVFLERSRTITERLNQLSYDKAEIEKRLGVETIREKSMKEIIPKVEKLLDVYHELPSAKEKNDMLKDVLEKVVYKKTQNTRWSGSPDDFEITIYPKLPKS

SEQ ID NO: 3196 - protein, 531 aa, Unknown
  Description of Unknown: Integrase B3197 sequence
  PTHR30461:SF3,SM00857,G3DSA:1.10.10.2600,IPR036162,PF13408, PS51737,G3DSA:3.40.50.1390,IPR025827,IPR006119,IPR038109, PF07508,IPR011109,SSF53041,PF00239, PTHR30461,PS51736,Coil,cd00338
MENAVIYARYSSDKQTEQSIEGQLRICTAYAEQNNFNIVHHYIDRAMSGTNDRRPEFQQMISDSSGKQFRYIIVYKFDRFARNMYDSAIYEHKLEQNGVKVLSATEQVGDGNESLIIKAVLRAMAEMYSRQLSDNVKRGMKESALKANSTGGTIPFGYRLEDKKLVLDDRTAPFAKYIFEEYAAGKAKMDIVRDLKDKGCRKNNGKVLTIQNITYILSNIKYTGVFKFKDIEVEDGCPALVGKEIFDRCKERAERERRKYGKSAQEVDYLLVGKLYCGYCKKPMIGDSGTSRNGDKHHYYTCYTRKSRRRTGETCKKKSEQKEFLEWYVVQQVKEYILDNRRIEIITDAIIKKFKEMFDSSGEEAFLRRLRSIDHEVDDAVDALLKTKNPAALDKINARLEDLQMERNNVEAELSKFRITKDVIPDREDLLEWLKSFQGDALDPEYQKKMIDTFINAIYLYDDKVVICFNLKGGKQVSGIEELEHSDELDECSSSLLNGSPCWTRTNDPAVNSGCVWYTIWHHTIPYSVKR

SEQ ID NO: 3197 - protein, 531 aa, Unknown
  Description of Unknown: Integrase B3198 sequence
  PTHR30461:SF3,SM00857,G3DSA:1.10.10.2600,IPR036162,PF13408, PS51737,G3DSA:3.40.50.1390,IPR025827,IPR006119,IPR038109, PF07508,SSF53041,IPR011109,PF00239,PTHR30461, PS51736,Coil,cd00338
MKNGFTIINEYCDRALSGKTDNRPMFQKLIRDSEKRQFEAVVMYTLDRFARNRYDSAIYKAKLKKNGVKVFYAKQPMPDTPEGIILESVLEGYAEYYSENLARNIRRGLKENALQGIAVGGANLALGYTVGPDRKYVVEPIGAKIVQEIFQMYADGHSASQIIDYCNEKGYKTARGNPFNKNSLKTILRNEKYIGTYKYMDVVIPHGVPAIIEDTLFEKVQAMLKHNSTARAKSKAHEDYLLTSKVFCGHCGSPMIGESGTSKTGKVYYYYKCAARKRSLACRKAPERKDWLEEVVVRFTVQKVLTDENIARIAKKAMELIEGDSADNSYLMALQGELKGIHIKINNLVSAIEQGIITPSTKNRLTELEGEKNEVEGKIAAEEMKKPLLTRERIEYWLTSFKSGDIDDVEYRRRVIDTLVNSIYVYDEDDGSKTIVFTFNLSGQNTATLKSSDFGCFAPPSANKANTMVFFVGHVFGVILRNERSPAREKSLAGFWHYLASISCGISQNNSSKGTFSTFAMIYSSISRTHR

SEQ ID NO: 3198 - protein, 531 aa, Unknown
  Description of Unknown: Integrase B3199 sequence
  SM00857,G3DSA:1.10.10.2600,IPR036162,PS51737,G3DSA:3.40.50.1390, IPR006119,IPR038109,PF07508,IPR011109,SSF53041, PF00239,PTHR30461,PS51736,Coil,cd00338
MEQYCLYLRKSRSDVEAENHGEEETLARHEKILLELAKKREYNVTQIYREVVSGETIAARPVMQQLLSEVEHGIWSGVLVVEVERLARGDTIDQGIVAQTFKYSDTQIITPMKTYNPNNEYDEEYFEFGLFMSRREYKTINRRLQRGRLSSVKEGKCVCSIAPYGYDKVKLKGDKGFTLAPNPNEADVIKMIFELYTKGELQPDGTYKRIGVALIARKLNEMKIPARKSEYWVPASIKDMLRNPVYAGKIRWNWRSQNKSMQSGSISISRPRSEEDNCIIVNGLHPALITEETFDLAQEYLAKNPPRPTKRNAPTKNPLAGIVVCAFCGRKLVRRPYTSASCPPTLICSVPHCPNVSSFLHLVEERILKSLEEWLRNYKLQWNLSNNKPSELISESEILRQSLNDINSQITKLNKQMIKAHELLEQDIYTTEVFLERSRAITERLNQLSYDKAEIEKRLGVETIREKSMKEIIPKVEKLLDVYHELPSAKEKNDMLKDVLEKVVYKKTQNTRWSGSPDDFEITIYPKLPKS

SEQ ID NO: 3199 - protein, 531 aa, Unknown
  Description of Unknown: Integrase B3200 sequence
  PTHR30461:SF3,cd00338,SM00857,G3DSA:1.10.10.2600,IPR036162, PF13408,IPR025827,G3DSA:3.40.50.1390,PS51737,IPR006119, IPR038109,PF07508,IPR011109,SSF53041, PTHR30461,PS51736,Coil,PF00239
MKKENEIRAVVYARYSSHSQTEQSIEGQISAAQVYAKAKGYTIVKEYVDRAKTGKNDNREAFQQMLSDTAKHEFSVIIVWKVDRFGRNREEITFNKYRCKKNDVRVEYIAEAVPDSPEGVILESVLEGMAEYYSLQLAQNIRRGIRASAEKCQAIGGHCSLGYAIDPKTKKYVIDPDTAPTVQLIFEKYAEGYTGMDIVRLLNEKGLRTVRGKPFTKNSLWTILKNERYAGVYLFKDEVRVEGGIPALVSRETFDKVQEMLEINHRSPVNTWNRATYLLTDKLFCGHCGSKMVGECGTSRTGATYNYYICAGKKRERNCSKKAVRQDWIEKVVLQQIRRVLFDQEFLEFIAHKAYTYYLEEKKKLDQSAAIKAQLSSVESSIDNLIRAMEAGIFSASTKSRLDDLENQKAALTRTLAEIKLSEESFDLTEDRILFFLESMRGLDMDDVDSRKRLVKTFVNAVYLYDDKITLAFNFTDSCEKPEIIELADIADGVVEKFVHRSSCSTITRTYELNVRLIKMCFVMTVERPVG

SEQ ID NO: 3200 - protein, 531 aa, Unknown
  Description of Unknown: Integrase B3201 sequence
  PTHR30461:SF3,cd00338,SM00857,G3DSA:1.10.10.2600,IPR036162, PF13408,IPR025827,G3DSA:3.40.50.1390,PS51737,IPR006119, IPR038109,PF07508,IPR011109,SSF53041,PTHR30461, PS51736,Coil,PF00239
MKKENEIRAVVYARYSSHSQTEQSIEGQISAAQIYAKAKGYTIVKEYVDRAKTGKNDNREAFQQMLSDTAKHEFSVIIVWKVDRFGRNREEITFNKYRCKKNDVRVEYIAEAVPDSPEGVILESVLEGMAEYYSLQLAQNIRRGIRASAEKCQAIGGHCSLGYAIDPKTKKYVIDPDTAPTVQLIFEKYAEGYTGMDIVRLLNEKGLRTVRGKPFTKNSLWTILKNERYAGVYLFKDEVRVEGGIPALVSRETFDKVQEMLEINHRSPVNTWNRATYLLTDKLFCGHCGSKMVGECGTSRTGATYNYYICAGKKRERNCSKKAVRQDWIEKVVLQQIRRVLFDQEFLGFIAHKAYTYYLEEKKKLDQSAAIKAQLSSVESSIDNLIRAMEAGIFSASTKSRLDDLENQKAALTRTLAEIKLSEESFDLTEDRILFFLESMRGLDMDDVDSRKRLVKTFVNAVYLYDDKITLAFNFTDSCEKPEIIELADIADGVVEKFVHRASCSTKTRTYELNVRLIKMCFVMTVERPVG

SEQ ID NO: 3201 - protein, 531 aa, Unknown
  Description of Unknown: Integrase B3202 sequence
  PTHR30461:SF3,SM00857,G3DSA:1.10.10.2600,IPR036162,PF13408, IPR025827,G3DSA:3.40.50.1390,PS51737,IPR006119,IPR038109, PF07508,SSF53041,IPR011109,PF00239,PTHR30461, PS51736,Coil,cd00338
MTAVIYARYSSDNQREESIEGQIRECTAYAEKNGITVVKHYIDRAISAKTDNRPEFQQMIKDSDKKLFDIVLVWKLDRFARNRYDSARYKTQLKKNGVKLMSATEIISEGPEGIILESVLEGYAEYYSADLAEKVVRGQTENILKGRCNGGRGTFGYTLDSERKFHIDPLTSPFVLESFKKYNEGSTMKEIRDWLNENGIKNPVGGAFTYNSVEHMLKNRRYIGELKFRDVVVPDAIPPIIPLELFEDVQEKIAKNKKAPARRKAEDDYLLTTKLFCGYCGALMFGESGTSRTGEVHRYYKCATAKKHRGCKKKTVRKQWLEDLVVNQTMQLVKDDAAMESIIAKVMELQNKENTNIPLYEKQLRDAESGIQNMLNAIQAGILTSSTKERLEQLEETKRELEARIAEEKLAKPKVTEEFIRFWLLRFRKLDMSLKDQRQALVDTFINAIYLYDDKVLITFNYKEGTQTVTFGEATEVASEGNGSDLDCFTAPRSIHGMPMKSRYFVDFFVICVYRILPDTARYCLLLPGTL

SEQ ID NO: 3202 - protein, 531 aa, Unknown
  Description of Unknown: Integrase B3203 sequence
  PTHR30461:SF3,cd00338,SM00857,G3DSA:1.10.10.2600,IPR036162, PF13408,IPR025827,G3DSA:3.40.50.1390,PS51737,IPR006119, IPR038109,PF07508,IPR011109,SSF53041,PTHR30461, Coil,PF00239
MKKFKFPIDLSMLTEEEINQFREDPSTLFQGEIDVCLYLRFSSERQKEQSIEGQLRDCIAHCKRKSYRIVAIFVDRATTARKDVEKRVHFQEMITASVHQTWKLVIVWKLDRFARNREDSAVFKMRLRKNGVKVESATEGISKNPEGIILEAVLEGIAEYYSADLSQKITRGMRESALKCHSIGGHVPLGYKIEDHRLVINPNTAHIVQEAFELYANGETVADICRMFNTKGYRTAKGAEFNRNSFKSMFRNKRYIGVYTYKEIEKEGGVPAIIDKELFETVQRRLSANAEAPARGKAKVDYLLAGKLFCGHCGGSMNGESGTSKTGAIHHYYSCYSRKRHHSCDKKPLRKEWIEQIVAQDAMELLTDDAIQEMADMAISQTEKDLRENTRIPELSERMKETESGIANITKAVEKGIASDALMSRLVELEKEKKNLLRLIAEEEKYVCKIDRDQIVYWLTKFKDGNIEDENFKRIIIDLMVNSVTVWDEPDSFRITTAYNLTSCKNKTFRISSSSDKGFGFEGLESTMKKA

SEQ ID NO: 3203 - protein, 531 aa, Unknown
  Description of Unknown: Integrase B3204 sequence
  PTHR30461:SF3,SM00857,G3DSA:1.10.10.2600,IPR036162,PF13408, IPR025827,PS51737,G3DSA:3.40.50.1390,IPR006119,IPR038109, PF07508,IPR011109,SSF53041,PTHR30461,Coil, PS51736,cd00338,PF00239
MGKKQKTNGGDAVIYARYSSHNQRDVSIEQQVEACRKHAAELGLTVTATYEDRAISGKTDKRPSFQRMMRDAEQHKFAYVLAWKSNRIGRNMMQALVNESRLVDCGVKVFYAEEDFDDNAAGRFALRSMMNVNQFYIENMAEDVKRGLYDNAKKGLVNGSLPLGYKRGADGKPEIDEPKAAIVREIYTRVAAGELFASIADDLNARGIKTARGREWNKGSFHVLCHNDRYRGIYMYGDIRIPGGMPRIISDELFYDAQEAYSMKKDNRYGRARHGAENYLLTGKLYCGHCGGYMVGISGTSKTGEMHYYYACQKHRLEHTCEKKAIRRDVIENAVARAIMMYCLDDETIDFIVDSTIAYFKQKDHELHIEAMENELAAVQQAISNLMKAIEAGIITPTTRTRLLDLEEQQAKLSAKINTAKAERVEIDRDNLIAGLQLFRTGDIKNKKFLAKLFNTFLIAVYLYDDNRLKIVFSFTGNHNSVEIPLELDNDCPDSEIVSDETEVRMSHLECGRSGTLHIPHKNPCGSRKAF

SEQ ID NO: 3204 - protein, 531 aa, Unknown
  Description of Unknown: Integrase B3205 sequence
  SM00857,G3DSA:1.10.10.2600,IPR036162,PF13408,PS51737, G3DSA:3.40.50.1390,IPR025827,IPR006119,IPR038109,PF07508, IPR011109,SSF53041,PF00239,PTHR30461,PS51736, Coil,cd00338
MARKKKQASGDAVIYARYSSHNQRDVSIEQQIEACRKYAASLGLKITVTYEDRAISGRTDNRPAFQRMMNDAEDGKFCYVLAWKSNRMGRNMMQAMVNEARLVDCGVKVYYAEEDFDDSAAGRFALRSMMNVNQFYSDNLAEDVRRGLMDNASKCIANGKQPFGYKRGSDGKVVLDEPAAAVVREVFTRVASGETNTSIARDLNRRGIKTGSNGEWNKCSFHGLCTNERYRGIYIYGETRIEGGVPRIIDDRLWHKVQEAIRMRNRRKNGRHRPGEDDYLLTGKLRCGHCGGYMIGMSGTSKTGTIHHYYACQNRRVGRTCDKKNIRRDIIEPAVAQAIKQYCLTDDVIEWIADKTIEYWEDEDRKLQITSLENELADIKSSISNVMKAIEQGVITSTTRDRLIELEAQQSDLSAKLNSAKEDLVHVDRKNLISSLLLFRNGDVYDRQYQEDLFNTFLVAAYVYDDGNRLKLVFNCFGDSNTVDLDLCSDENNDNSSISNEANCGNLFAQALKQSTRLKPSEEAQVAFLFV

SEQ ID NO: 3205 - protein, 531 aa, Unknown
  Description of Unknown: Integrase B3206 sequence
  SM00857,G3DSA:1.10.10.2600,IPR036162,PS51737,G3DSA:3.40.50.1390, IPR006119,IPR038109,PF07508,IPR011109,SSF53041, PTHR30461,PS51736,cd00338,PF00239
MEQYCLYLRKSRSDIEAENHGEEETLARHEKILLELAKKREYNVTQIYREVVSGETIAARPVMQQLLSEVEHGIWSGVLVVEVERLARGDTIDQGIVAQTFKYSDTQIITPMKTYNPNNEYDEEYFEFGLFMSRREYKTINRRLQRGRLSSVKEGKCVCSIAPYGYDKVKLKGDKGFTLAPNPNEADVIKMIFELYTKGELQPDGTYKRIGVALIARKLNEMKIPARKSEYWVPASIKDMLRNPVYAGKIRWNWRSQSKRMQSGSISISRPRSEEDNCIIVNGLHPALITEETFDLVQEYLAKNPPRPTKRNAPTKNPLAGIVVCAFCGRKLVRRPYTSASCPPTLICSVPHCPNVSSFLHLVEERILKSLEEWLRNYKLQWNLSNNKPSKLISESEILRQSLNDINSHIAKLNKQMIKAHELLEQDIYTTDVFLERSRTITERLNQLSYDKAEIEKRLGVETIREKSMKEIIPKVEKLLDVYHELPSAKEKNDMLKDVLEKVVYKKTQNTRWSGSPDDFEITIYPKLPKS

SEQ ID NO: 3206 - protein, 531 aa, Unknown
  Description of Unknown: Integrase B3207 sequence
  PTHR30461:SF3,cd00338,SM00857,G3DSA:1.10.10.2600, IPR036162,PF13408,IPR025827,PS51737, G3DSA:3.40.50.1390,IPR006119,IPR038109,PF07508, IPR011109,SSF53041,PTHR30461,PS51736,Coil,PF00239
MKKENEIRAVVYARYSSHSQTEQSIEGQISAAQVYAKAKGYTIVKEYVDRAKTGKNDNREAFQQMLSDTAKHEFSVIIVWKVDRFGRNREEITFNKYRCKKNDVRVEYIAEAVPDSPEGVILESVLEGMAEYYSLQLAQNIRRGIRASAEKCQAIGGHCSLGYAIDPKTKKYVIDPDTAPTVQLIFEKYAEGYTGMDIVRLLNEKGLRTVQGKPFTKNSLWTILKNERYAGVYLFKDEVRVEGGIPALVSRETFDKVQEMLEINHRSPVNTWNRATYLLTDKLFCGHCGSKMVGECGTSRTGATYNYYICAGKKRERNCSKKAVRQGWIEKVVLQQIRRVLFDQEFLEFIAHKAYTYYLDEKKKLDQSAAIKAQLSSVESSIDNLIRAMEAGIFSASTKSRLDDLENQKAALTRTLAEIKLSEESFDLTEDRILFFLESMRGLDMDDVDSRKRLVKTFVNAVYLYDDKITLAFNFTDSCEKPEIIELADIADGVVEKFVHRASCSTITRTYELNVQFIKMCFVMTVERPVG

SEQ ID NO: 3207 - protein, 530 aa, Unknown
  Description of Unknown: Integrase B3208 sequence
  SM00857,G3DSA:1.10.10.2600,IPR036162,PS51737,G3DSA:3.40.50.1390, IPR006119,IPR038109,PF07508,IPR011109,SSF53041, PF00239,PTHR30461,PS51736,Coil,cd00338
MEQYLIYLRKSRSDLEAEAHGEGETLSRHEHTLLELAKRQHLNVTDIYREVVSGDTIAARPMMQRVLSEVEQGVWSGVLVMEVERLARGDTIDQGIIAQTFKFSGTKIITPIKTYDPDNEFDEEYFEFGLFMSRREYKIINRRLQRGRLASAKEGKWPSGLAPFGYRRVKLKNEKGCSLEPIEEQAAIVRMIFDLYTVGLQDEDGSARPLSLGSIATRLNDMHIPSPSGSQWARITIRGIIKNPTYIGMVRWGSRETKKKVVDGKVVSVRGPADPEKECVFKGIHPPLIPKETFELANDKLTRSENTSTHKEKVVRNPLAGLLVCSECGRQMMRMINPVHPDMPVVRCPRRGCPNCSSYLPIVEERVIQGLSEWMKGYELEWSSAAVSSSVSSVGVREKALASAEAELRKLQQQLERTHDFLEQGIYDTDTFLSRSRMLSDKITAAKESAARCSRELTEEKLRETSRRDIIPKVKNLLDVYPLLETAEEKNALLKDVLEKVVYQKLNEKRKKSPDGFIIEIYPRIPKSEK

SEQ ID NO: 3208 - protein, 530 aa, Unknown
  Description of Unknown: Integrase B3209 sequence
  PTHR30461:SF3,cd00338,SM00857,G3DSA:1.10.10.2600,IPR036162, PF13408,IPR025827,G3DSA:3.40.50.1390,PS51737,IPR006119, IPR038109,PF07508,SSF53041,IPR011109, PTHR30461,PS51736,Coil,PF00239
MQTIPIDLSALTPEERQQFADNPSVLSSDCEAVCCLYMRYSSDRQTEQSIEGQLRELIAYCKHHSYRVAAIYVDRAISAHASMDKRPAFQQMLADSARSSWKTVLVYKLDRFARNREDSAIARMRLRKNGCNVESAKEGISKNPEGVILEALLEGMAEYYSLELSQKITRGMRESAIKGNCLGGQIPLGYKIENKKYVIDPLTAPLVKEAFSRYGDGETAASICADFNARGYRTASGAEFNKSSFKNIFRNEKYIGVYKYKEMRREGIIPRIIADDAWIAVQSRLKVNEAAPARGKAKVAYLLAGKIFCGHCGAPMTGECGRGKSGKMYNYYSCATRKHHNSCEKKPVPKDWLEDVVAQDALDVLTDEIIEFVAEVAAQQSEEDIQKNTQIPVIRKKISEIENKIRNLTKALECASVAPDAIVERLAELEAQKKGLSTQLSDEERGVIPLTKESVVVYLKAVREKAVPLETQKAMLIEMLVNSVTVYDDEPGFLKLVYAYRLTQIPTRTYRVPIPAKVPCSDFRTQPAPK

SEQ ID NO: 3209 - protein, 530 aa, Unknown
  Description of Unknown: Integrase B3210 sequence
  cd00338,SM00857,G3DSA:1.10.10.2600,IPR036162,PS51737, G3DSA:3.40.50.1390,IPR006119,IPR038109,PF07508,SSF53041, IPR011109,PTHR30461,PS51736,Coil,PF00239
MEQYLIYLRKSRSDLEAEAHGEGETLSRHEHTLLELAKRQHLNVTDIYREVVSGDTIAARPMMQRVLSEVEQGVWSGVLVMEVERLARGDTIDQGIIAQTFKFSGTKIITPIKTYDPDNEFDEEYFEFGLFMSRREYKIINRRLQRGRLASAKEGKWPSGLAPFGYRRVKLKNEKGCSLEPIEEQAAIVRMIFDLYTVGLQDEDGSARPLSLGSIATRLNDMHIPSPSGSQWARITIRGIIKNPTYIGMVRWGSRETKKKVVDGKVVSVRGPADPEKECVFKGIHPPLVPKETFELANDKLARSENTSTHKEKVVRNPLAGLLVCSECGRQMMRMINPVHPDMPVVRCPRRGCPNCSSYLPIVEERVIQGLSEWMKGYELEWSSAAASSSVSSVGVREKALASAEAELRKLQQQLERTHDFLEQGIYDTDTFLSRSRMLSDKIAAAKDSVTRCSRELTEEKLRETSRRDIIPKVKNLLDVYPLLETAEEKNALLKEVLEKVVYQKLNEKRKKSPDGFTIEIYPRIPKSEK

SEQ ID NO: 3210 - protein, 530 aa, Unknown
  Description of Unknown: Integrase B3211 sequence
  SM00857,G3DSA:1.10.10.2600,IPR036162,PS51737, G3DSA:3.40.50.1390,IPR006119,IPR038109,PF07508, IPR011109,SSF53041,PF00239,PTHR30461, PS51736,Coil,cd00338
MEQYLIYLRKSRSDLEAEAHGEGETLSRHEHTLLELAKRQHLNVTDIYREVVSGDTIAARPMMQRVLSEVEQGVWSGVLVMEVERLARGDTIDQGIIAQTFKFSGTKIITPIKTYDPDNEFDEEYFEFGLFMSRREYKIINRRLQRGRLASAKEGKWPSGLAPFGYRRVKLKNEKGCSLEPIEEQAAIVRMIFDLYTVGLQDEDGSARPLSLGSIATRLNDMHIPSPSGSQWARITIRGIIKNPTYIGMVRWGSRETKKKVVDGKVVSVRGPADPEKECVFKGIHPPLIPKETFELANDKLTRSENTSTHKEKVVRNPLAGLLVCSECGRQMMRMINPVHPDMPVVRCPRRGCPNCSSYLPIVEERVMQGLSEWMKGYELEWSSVAASSSVSSVGVREKALASAEAELRKLQQQLERTHDFLEQGIYDTDTFLSRSRMLSDKIAAAKDSVARCSRELTEEKLRETSRRDIIPKVKNLLDVYPLLETAEEKNALLKEVLEKVVYQKLNEKRKKSPDGFTIEIYPRIPKSEK

SEQ ID NO: 3211 - protein, 530 aa, Unknown
  Description of Unknown: Integrase B3212 sequence
  SM00857,G3DSA:1.10.10.2600,IPR036162,PS51737,G3DSA:3.40.50.1390, IPR006119,IPR038109,PF07508,SSF53041,IPR011109, PTHR30461,Coil,PS51736,cd00338,PF00239
MEQYLIYLRKSRSDLEAEAHGEGETLSRHEHTLLELAKRQHLNVTDIYREVVSGDTIAARPMMQRVLSEVEQGVWSGVLVMEVERLARGDTIDQGIIAQTFKFSGTKIITPIKTYDPDNEFDEEYFEFGLFMSRREYKIINRRLQRGRLASAKEGKWPSGLAPFGYRRVKLKNEKGCSLEPIEEQAAIVRMIFDLYTVGLQDEDGSARPLSLGSIATRLNDMHIPSPSGSQWARITIRGIIKNPTYIGMVRWGSRETKKKVVDGKVVSVRGPADPEKECVFKGIHPPLVPKETFELANDKLTRSENTSTHKEKVVRNPLAGLLVCSECGRQMMRMINPVHPDMPVVRCPRRGCPNCSSYLPIVEERVIQGLSEWMKGYELEWSSAAASSSVSSVGVREKALASAEAELRKLQQQLERTHDFLEQDIYDTDTFLSRSRMLSDKIAAAKDSVTRCSRELTEEKLRETSRRDIIPKVKNLLDVYPLLETAEEKNALLKEVLEKVVYQKLNEKRKKSPDGFTIEIYPRIPKSEK

SEQ ID NO: 3212 - protein, 530 aa, Unknown
  Description of Unknown: Integrase B3213 sequence
  cd00338,SM00857,G3DSA:1.10.10.2600,IPR036162, PS51737,G3DSA:3.40.50.1390,IPR006119,IPR038109, PF07508,IPR011109,SSF53041,PTHR30461, PS51736,Coil,PF00239
MEQYLIYLRKSRSDLEAEAHGEGETLSRHEHTLLELAKRQHLNVTDIYREVVSGDTIAARPMMQRVLSEVEQGVWSGVLVMEVERLARGDTIDQGIIAQTFKFSGTKIITPIKTYDPDNEFDEEYFEFGLFMSRREYKIINRRLQRGRLASAKEGKWPSGLAPFGYRRVKLKNEKGCSLEPIEEQAAIVRMIFDLYTVGLQDEDGSAHPLSLGSIATRLNDMHIPSPSGSQWARITIRGIIKNPTYIGMVRWGSRETKKKVVDGKVVSVRGPADPEKECVFKGIHPPLIPKETFELANDKLTRSENTSTHTEKVVRNPLAGLLVCSECGRQMMRMINPVHPDMPVVRCPRRGCPNCSSYLPIVEERVIQGLSEWMKGYELEWSSAAASSSVSSVGVREKALASAEAELRKLQQQLERTHDFLEQGIYDTDTFLSRSRMLSDKIAAAKDSVARCSRELTEEKLRETSRRDIIPKVKNLLDVYPLLETAEEKNALLKEVLEKVVYQKLNEKRKKSPDGFTIEIYPRIPKSEK

SEQ ID NO: 3213 - protein, 530 aa, Unknown
  Description of Unknown: Integrase B3214 sequence
  cd00338,SM00857,G3DSA:1.10.10.2600,IPR036162,PS51737, G3DSA:3.40.50.1390,IPR006119,IPR038109,PF07508,IPR011109, SSF53041,PTHR30461,PS51736,Coil,PF00239
MEQYLIYLRKSRSDLEAEAHGEGETLSRHEHTLLELAKRQHLNVTDIYREVVSGDTIAARPMMQRVLSEVEQGVWSGVLVMEVERLARGDTIDQGIIAQTFKFSGTKIITPIKTYDPDNEFDEEYFEFGLFMSRREYKIINRRLQRGRLASAKEGKWPSGLAPFGYRRVKLKNEKGCSLEPIEEQAAIVRMIFDLYTVGLQDEDGSARPLSLGSIATRLNDMHIPSPSGSQWARITIRGIIKNPTYIGMVRWGSRETKKKVVDGKVVSVRGPADPEKECVFKGIHPPLVPKETFELANDKLTRSENTSTHKEKVVRNPLAGLLVCSECGRQMMRMINPVHPDMPVVRCPRRGCPNCSSYLPIVEERVIQGLSEWMKGYELEWSSAAASSSVSSVGVREKALASAETELRKLQQQLERTHDFLEQGIYDTDTFLSRSRMLSDKIAAAKDSVTRCSRELTEEKLRETSRRDIIPKVKNLLDVYPLLETAEEKNALLKEVLEKVVYQKLNEKRKKSPDGFTIEIYPRIPKSEK

SEQ ID NO: 3214 - protein, 530 aa, Unknown
  Description of Unknown: Integrase B3215 sequence
  SM00857,G3DSA:1.10.10.2600,IPR036162,PS51737, G3DSA:3.40.50.1390,IPR006119,IPR038109,PF07508, IPR011109,SSF53041,PTHR30461,Coil, PS51736,cd00338,PF00239
MEQYLIYLRKSRSDIEAEAHGEGETLSRHEHTLLELAKRQHLNVTDIYREVVSGDTIAARPMMQRVLSEVEQGVWSGVLVMEVERLARGDTIDQGIIAQTFKFSGTKIITPIKTYDPDNEFDEEYFEFGLFMSRREYKIINRRLQRGRLASAKEGKWPSGLAPFGYRRVKLKNEKGCSLEPIEEQAAIVRMIFDLYTVGLQDEDGSARPLSLGSIATRLNDMHIPSPSGSQWARITIRGIIKNPTYIGMVRWGSRETKKKVVDGKVVSVRGPADPEKECVFKGIHPPLIPKETFELANDKLTRSENTSTHKEKVVRNPLAGLLVCSECGRQMMRMINPVHPDMPVVRCPRRGCPNCSSYLPIVEERVIQGLSEWMKGYELEWSSAAASSSVSSVGVREKALASAEAELRKLQQQLERTHDFLEQGVYDTDTFLSRSRMLSDKIAAAKDSVARCSRELTEEKLRETSRRDIIPKVKNLLDVYPLLETAEEKNALLKEVLEKVVYQKLNEKRKKSPDGFTIEIYPRIPKSEK

SEQ ID NO: 3215 - protein, 530 aa, Unknown
  Description of Unknown: Integrase B3216 sequence
  SM00857,G3DSA:1.10.10.2600,IPR036162,PS51737,G3DSA:3.40.50.1390, IPR006119,IPR038109,PF07508,IPR011109,SSF53041, PTHR30461,Coil,PS51736,cd00338,PF00239
MEQYLIYLRKSRSDLEAEAHGEGETLSRHEHTLLELAKRQHLNVTDIYREVVSGDTIAARPMMQRVLSEVEQGVWSGVLVMEVERLARGDTIDQGIIAQTFKFSGTKIITPIKTYDPDNEFDEEYFEFGLFMSRREYKIINRRLQRGRLASAKEGKWPSGLAPFGYRRVKLKNEKGCSLEPIEEQAAIVRMIFDLYTVGLQDEDGSARPLSLGSIATRLNDMHIPSPSGSQWARITIRGIIKNPTYIGMVRWGSRETKKKVVDGKVVSVRGPADPEKECIFKGIHPPLIPKETFELANDKLTRSENTSTHKEKVVRNPLAGLLVCSECGRQMMRMINPVHPDMPVVRCPRRGCPNCSSYLPIVEERVIQGLSEWMKGYELEWSSAAASSSVSSVGVREKALASAEAELRKLQQQLERTHDFLEQGIYDTDTFLSRSRMLSDKIAAAKDSVARCSRELTEEKLRETSRRDIIPKVKNLLDVYPLLETAEEKNALLKEVLEKVVYQKLNEKRKKSPDGFTIEIYPRIPKSEK

SEQ ID NO: 3216 - protein, 530 aa, Unknown
  Description of Unknown: Integrase B3217 sequence
  SM00857,G3DSA:1.10.10.2600,IPR036162,PS51737, G3DSA:3.40.50.1390,IPR006119,IPR038109,PF07508, SSF53041,IPR011109,PF00239,PTHR30461, PS51736,Coil,cd00338
MEQYLIYLRKSRSDLEAEAHGEGETLSRHEHTLLELAKRQHLNVTDIYREVVSGDTIAARPMMQRVLSEVEQSVWSGVLVMEVERLARGDTIDQGIIAQTFKFSGTKIITPIKTYDPDNEFDEEYFEFGLFMSRREYKIINRRLQRGRLASAKEGKWPSGLAPFGYRRVKLKNEKGCSLEPIEEQAAIVRMIFDLYTVGLQDEDGSARPLSLGSIATRLNDMHIPSPSGSQWARITIRGIIKNPTYIGMVRWGSRETKKKVVDGKVVSVRGPADPEKECVFKGIHPPLVPKETFELANDKLTRSENTSTHKEKVVRNPLAGLLVCSECGRQMMRMINPVHPDMPVVRCPRRGCPNCSSYLPIVEERVIQGLSEWMKGYELEWSSAAASSSVSSVGVREKALASAETELRKLQQQLERTHDFLEQGIYDTDTFLSRSRMLSDKIAAAKDSVTRCSRELTEEKLRETSRRDIIPKVKNLLDVYPLLETAEEKNALLKEVLEKVVYQKLNEKRKKSPDGFTIEIYPRIPKSEK

SEQ ID NO: 3217 - protein, 530 aa, Unknown
  Description of Unknown: Integrase B3218 sequence
  cd00338,SM00857,G3DSA:1.10.10.2600,IPR036162,PS51737, G3DSA:3.40.50.1390,IPR006119,IPR038109,PF07508,IPR011109, SSF53041,PTHR30461,PS51736,Coil,PF00239
MEQYLIYLRKSRSDLEAEAHGEGETLSRHEHTLLELAKRQHLNVTDIYREVVSGDTIAARPMMQRVLSEVEQGVWSGVLVMEVERLARGDTIDQGIIAQTFKFSGTKIITPIKTYDPDNEFDEEYFEFGLFMSRREYKIINRRLQRGRLASAKEGKWPSGLAPFGYRRVKLKNEKGCSLEPIEEQAAIVRMIFDLYTVGLQDEDGSARPLSLGSIATRLNDMRIPSPSGSQWARITIRGIIKNPTYIGMVRWGSRETKKKVVDGKVVSVRGPADPEKECVFKGIHPPLIPKETFELANDKLTRSENTSTRKEKVVRNPLAGLLVCSECGRQMMRMINPVHPDMPVVRCPRRGCPNCSSYLPIVEERVIQGLSEWMKGYELEWSSAAASSSVSSVGVREKALTSAEAELRKLQQQLERTHDFLEQGIYDTDTFLSRSRMLSDKIASAKDSVTRCSRELTEEKLRETSRRDIIPKVKNLLDVYPLLETAEEKNALLKEVLEKVVYQKLNEKRKKSPDGFTIEIYPRIPKSEK

SEQ ID NO: 3218 - protein, 530 aa, Unknown
  Description of Unknown: Integrase B3219 sequence
  SM00857,G3DSA:1.10.10.2600,IPR036162,PS51737, G3DSA:3.40.50.1390,IPR006119,IPR038109,PF07508, IPR011109,SSF53041,PTHR30461,Coil, PS51736,cd00338,PF00239
MEQYLIYLRKSRSDLEAEAHGEGETLSRHEHTLLELAKRQHLNVTDIYREVVSGDTIAARPMMQRVLSEVEQGVWSGVLVMEVERLARGDTIDQGIIAQTFKFSGTKIITPIKTYDPDNEFDEEYFEFGLFMSRREYKIINRRLQRGRLASAKEGKWPSGLAPFGYRRVKLKNEKGCSLEPIEEQAAIVRMIFDLYTVGLQDEDGSARPLSLGSIATRLNDMHIPSPSGSQWARITIRGIIKNPTYIGMVRWGSRETKKKVVDGKVVSVRGPADPEKECIFKGIHPPLIPKETFELANDKLTRSENTSTHKEKVVRNPLAGLLVCSECGRQMMRMINPAHPDMPVVRCPRRGCPNCSSYLPIVEERVIQGLSEWMKGYELEWSSAAASSSVSSVGVREKALASAEAELRKLQQQLERTHDFLEQGIYDTDTFLSRSRMLSDKIAAAKDSVTRCSRELTEEKLRETSRRDIIPKVKNLLDVYPLLETAEEKNALLKEVLEKVVYQKLNEKRKKSPDGFTIEIYPRIPKSEK

SEQ ID NO: 3219 - protein, 530 aa, Unknown
  Description of Unknown: Integrase B3220 sequence
  cd00338,SM00857,G3DSA:1.10.10.2600,IPR036162,PS51737, G3DSA:3.40.50.1390,IPR006119,IPR038109,PF07508,IPR011109, SSF53041,PTHR30461,PS51736,Coil,PF00239
MEQYLIYLRKSRSDLEAEAHGEGETLSRHEHTLLELAKRQHLNVTDIYREVVSGDTIAARPMMQRVLSEVEQGVWSGVLVMEVERLARGDTIDQGIIAQTFKFSGTKIITPIKTYDPDNEFDEEYFEFGLFMSRREYKIINRRLQRGRLASAKEGKWPSGLAPFGYRRVKLKNEKGCSLEPIEEQAAIVRMIFDLYTVGLQDEDGSARPLSLGSIATRLNDMHIPSPSGSQWARITIRGIIKNPTYIGMVRWGSRETKKKVVDGKVVSVRGPADPEKECVFKGIHPPLVPKETFELANDKLTRSENTSTHKEKVVRNPLAGLLVCSECGRQMMRMINPVHPDMPVVRCPRRGCPNCSSYLPIVEERVIQGLSEWMKGYELEWSSAAASSSVSSVGVREKALASAETELRKLQQQLERTHDFLEQGIYDTDTFLSRSRMLSDKIAAAKDSVTRCSRELTEEKLRETSRRDIIPKVKNLLDVYPLLETAEEKNALLKEVLEKVAYQKLNEKRKKSPDGFTIEIYPRIPKSEK

SEQ ID NO: 3220 - protein, 530 aa, Unknown
  Description of Unknown: Integrase B3221 sequence
  cd00338,SM00857,G3DSA:1.10.10.2600,IPR036162, PS51737,G3DSA:3.40.50.1390,IPR006119,IPR038109, PF07508,IPR011109,SSF53041,PTHR30461, PS51736,Coil,PF00239
MEQYLIYLRKSRSDLEAEAHGEGETLSRHEHTLLELAKRQHLNVTDIYREVVSGDTIAARPMMQRVLSEVEQGVWSGVLVMEVERLARGDTIDQGIIAQTFKFSGTKIITPIKTYDPDNEFDEEYFEFGLFMSRREYKIINRRLQRGRLASAKEGKWPSGLAPFGYRRVKLKNEKGCSLEPIEEQAAIVRMIFDLYTVGLQDEDGSARPLSLGSIATRLNDMHIPSPSGSQWARITIRGIIKNPTYIGMVRWGSRETKKKVVDGKVVSVRGPADPEKECIFKGIHPPLIPKETFELANDKLTRSENTSTHKEKVVRNPLAGLLVCSECGRQMMRMINPVHPDMPVVRCPRRGCPNCSSYLPIVEERVIQGLSEWMKGYELEWSSAAASSSVSSVGVREKALASAEAELRKLQQQLERTHDFLEQGIYDTDTFLSRSRMLSDKIAAAKDSVTRCSRELTEEKLRETSRRDIIPKVKNLLDVYPLLETAEEKNALLKEVLEKVVYQKLNEKRKKSPDGFTIEIYPRIPKSEK

SEQ ID NO: 3221 - protein, 530 aa, Unknown
  Description of Unknown: Integrase B3222 sequence
  PTHR30461:SF3,cd00338,SM00857,G3DSA:1.10.10.2600,IPR036162, PF13408,PS51737,G3DSA:3.40.50.1390,IPR025827,IPR006119, IPR038109,PF07508,IPR011109,SSF53041,PTHR30461, PS51736,Coil,PF00239
MARKKNIAAGQNAVIYARYSSHNQREVSIEQQVRECMKHAAELGLHVVGTYEDRAISGKTDKRPNFQRMMRDAEKGKFQAVVAWKSNRIGRNMLQAMVNEAKLEDCGVKVFYAEEDFDDTAAGRFALRNMMNVNQFYSENMAEDITRGLYDNASKCMANGRQPLGYKRGEDGRVVLDDANAAVVREIFTRVAAGDLFVDIARDLNAQGIKTSKGANWNKGSFQSICQNERYRGIYIYGDVRVVDGIPRIVSDDLWYRVQEAMRMKKNPVGTRHRVGAEDYLLTGKLRCGHCGSYMTGVSGTSRNGELHYYYTCQKRRTEHACDKKNIRRDVIEPAVAQAIKMYCLTDDVIEWMADRTVEYWEKHDNDLQIEALEQQLEENKKATSNMLKAIEMGIITEATRTRMVELETEQSRLSVQLNAAKEDVVKIDREQIISYLELLQQGDIHDRDFQMELFKNFLVAVYVYDGNRMKLVFSCMGDQNSVEIPLETGEDPPDGGLSPDAKMFVLTPDSSTKKALYFVGSTVLFFLLS

SEQ ID NO: 3222 - protein, 530 aa, Unknown
  Description of Unknown: Integrase B3223 sequence
  cd00338,SM00857,G3DSA:1.10.10.2600,IPR036162,PS51737, G3DSA:3.40.50.1390,IPR006119,IPR038109,PF07508,IPR011109, SSF53041,PTHR30461,PS51736,Coil,PF00239
MEQYLIYLRKSRSDLEAEAHGEGETLSRHEHTLLELAKRQHLNVTDIYREVVSGDTIAARPMMQRVLSEVEQGVWSGVLVMEVERLARGDTIDQGIIAQTFKFSGTKIITPIKTYDPDNEFDEEYFEFGLFMSRREYKIINRRLQRGRLASAKEGKWPSGLAPFGYRRVKLKNEKGCSLEPIEEQAAIVRMIFDLYTVGLQDEDGSARPLSLGSIATRLNDMHIPSPSGSQWARITIRGIIKNPTYIGMVRWGSRETKKKVVDGKVVSVRGPADPEKECIFKGIHPPLIPKETFELANDKLARSENTSTHKEKVVRNPLAGLLVCSECGRQMMRMINPVHPDMPVVRCPRRGCPNCSSYLPVVEERVIQGLSEWMKGYELEWSSAAVSSSVSSVGVREKALASAEAELRKLQQQLERTHDFLEQGIYDTDTFLSRSRMLSDKIAAAKESVTRCSRELTEEKLRETSRRDIIPKVKNLLDVYPLLETAEEKNALLKEVLEKVVYQKLNEKRKKSPDGFTIEIYPRIPKSEK

SEQ ID NO: 3223 - protein, 530 aa, Unknown
  Description of Unknown: Integrase B3224 sequence
  PTHR30461:SF3,SM00857,G3DSA:1.10.10.2600,IPR036162,PF13408, IPR025827,G3DSA:3.40.50.1390,PS51737,IPR006119,IPR038109, PF07508,IPR011109,SSF53041,PTHR30461, Coil,PS51736,cd00338,PF00239
MQTIPIDLSALTPEERQQFADNPSVLSSDCEAVCCLYMRYSSDRQTEQSIEGQLRELIAYCKHHSYRVAAIYVDRAISAHASMDKRPAFQQMLSDSARSSWKTVLVYKLDRFARNREDSAIARMRLRKNGCNVESAKEGISKNPEGVILEALLEGMAEYYSLELSQKITRGMRESAIKGNCLGGQIPLGYKIENKKYVIDPLTAPLVKEAFSRYGDGETAASICADFNARGYRTASGAEFNKSSFKNIFRNEKYIGVYKYKEMRREGIIPRIIADDAWIAVQSRLKDNEAAPARGKAKVAYLLAGKIFCGHCGAPMTGECGRGKSGKMYNYYSCATRKHHNSCEKKPVPKDWLEDVVAQDALDVLTDEIIEFVAEVAAQQSEEDIQKNTQIPVIRKKISEIENKIHNLTKALECASVAPDAIVERLAELEAQKKGLATQLSDEERGVVPLTKESVVVYLKAVRENAVPLETQKAMLIDMLVNSVTVYDDEPGFLKLIYAYRLTQIPARTYRVPISEKVPCSDFRTQPAPK

SEQ ID NO: 3224 - protein, 530 aa, Unknown
  Description of Unknown: Integrase B3225 sequence
  PTHR30461:SF3,SM00857,G3DSA:1.10.10.2600,IPR036162,PF13408, IPR025827,PS51737,G3DSA:3.40.50.1390,IPR006119,IPR038109, PF07508,IPR011109,SSF53041,PTHR30461,cd00338, PF00239
MPTSKNTARKYAAGGSSDNSCGVEPLRAVIYARYSSSGQREESIEGQLRDCYEFAKKHGIIVIGEYIDKAMTGRVDRRPDFQRMMKDSEKGRFNCVLLWKMDRFARNRYDSAMYKYKLKKNGIRIFYAKETIPDGPEGIILESVMEGYAEYYSENLAQNVKRGNYDSALELKTLGKTCLGLKTGPDGRYMIDQAEAAIVRRIFEEYAEGERAKDIYERLNSEGYRTSRGGKFNKNSLRRILSNKKYIGVYEYEDIYVENGIPAIITDRDLFERVQKMLKINHDAPARGKAQNFLLTTKLFCGLCGSPMIGDGGTSHTGKAYAYYSCTKRKRGRSCKKESVPKDWIEDLVVGELVKIVHNDELIEQIADRVMEYQKREKDQSGLHALEIRQKENEKAISNMLAAIEAGIITPSTKTRLMELEADRADIEKGIAHELLAEPEFERDQIIYFLERFRSGDINDEAYRIMLVDTFLNSVYLYDDDHLVLVMNYSGENCKVDLKLVEGAVSGDDCKGSAFAPSSALQHRFCKKWC

SEQ ID NO: 3225 - protein, 530 aa, Unknown
  Description of Unknown: Integrase B3226 sequence
  cd00338,SM00857,G3DSA:1.10.10.2600,IPR036162,PS51737, G3DSA:3.40.50.1390,IPR006119,IPR038109,PF07508,IPR011109, SSF53041,PTHR30461,PS51736,Coil,PF00239
MEQYLIYLRKSRSDLEAEAHGEGETLSRHEHTLLELAKRQHLNVTDIYREVVSGDTIAARPMMQRVLSEVEQGVWSGVLVMEVERLARGDTIDQGIIAQTFKFSGTKIITPIKTYDPDNEFDEEYFEFGLFMSRREYKIINRRLQRGRLASAKEGKWPSGLAPFGYRRVKLKNEKGCSLEPIEEQAAIVRMIFDLYTVGLQDEDGSARPLSLGSIATRLNDMHIPSPSGSQWARITIRGIIKNPTYIGMVRWGSRETKKKVVDGKVVSVRGPADPEKECVFKGIHPPLIPKETFELANDKLTRSENTSTHKEKVVRNPLAGLLVCSECGRQMMRMINPVHPDMPVVRCPRRGCPNCSSYLPIVEERVIQGLSEWMKGYELEWSSAAASSSVSSVGVREKALASAEAELRKLQQQLERTHDFLEQGIYDTDTFLSRSRMLSDKIAAAKDSVTRCSRELTEEKLRETSRRDIIPKVKNLLDVYPLLETAEEKNALLKEVLEKVVYQKLNEKHKKSPDGFTIEIYPRIPKSEK

SEQ ID NO: 3226 - protein, 530 aa, Unknown
  Description of Unknown: Integrase B3227 sequence
  cd00338,SM00857,G3DSA:1.10.10.2600,IPR036162, PS51737,G3DSA:3.40.50.1390,IPR006119,IPR038109, PF07508,IPR011109,SSF53041,PTHR30461, PS51736,Coil,PF00239
MEQYLIYLRKSRSDLEAEAHGEGETLSRHEHTLLELAKRQHLNVTDIYREVVSGDTIAARPMMQRVLSEVEQGVWSGVLVMEVERLARGDTIDQGIIAQTFKFSGTKIITPIKTYDPDNEFDEEYFEFGLFMSRREYKIINRRLQRGRLASAKEGKWPSGLAPFGYRRVKLKNEKGCSLEPIEEQAAIVRMIFDLYTVGLQDEDGSAHPLSLGSIATRLNDMHIPSPSGSQWARITIRGIIKNPTYIGMVRWGSRETKKKVVDGKVVSVRGPADPEKECIFKGIHPPLIPKETFELANDKLARSENTSTHKEKVVRNPLAGLLVCSECGRQMMRMINPVHPDMPVVRCPRRGCPNCSSYLPIVEERVIQGLSEWMKGYELEWSSATASSSVSSVGVREKALASAEAELRKLQQQLERTHDFLEQGIYDTDTFLSRSRMLSDKIAAAKDSVARCSRELTEEKLRETSRRDIIPKVKNLLDVYPLLETAEEKNALLKEVLEKVVYQKLNEKRKKSPDGFTIEIYPRIPKSEK

SEQ ID NO: 3227 - protein, 530 aa, Unknown
  Description of Unknown: Integrase B3228 sequence
  SM00857,G3DSA:1.10.10.2600,IPR036162,PS51737,G3DSA:3.40.50.1390, IPR006119,IPR038109,PF07508,IPR011109,SSF53041, PTHR30461,Coil,PS51736,cd00338,PF00239
MPYCLYVRKSRADAEAEARGEGETLTRHINALLDLAKRRHLDITQIYREIVSGETIAARPVMQQLLSEVEQGLWDGVLVMEVERLARGDTVDQGIVAQTFKFSDTKIITPIKDYDPNNEFDEEYFEFGLFMSRREYKTINRRLQRGRIASVKEGKYVGSQSPYGYQREKLVGDKGYTLAPLPAEADIVRLIFQLYTKGEEQEDGSYKRLGVSRIVRRLNDMRIPPRKSTHWSPATIRDILINPVYIGKIRWNWRKDSKKMVDGRVVIARPRSSIDDCVLADGKHPPLIDDATFALAQEYMAQNPPHPIGERNKVKNPLSGLVVCAKCGKKMVRRPYNDRNQADTLLCADTACDNISSALFYVEERVLQALSDWLAEYRLQWETADDTSENASAVNLKEKALRRLDTEYDTLNKQLDNAHDLLEQGVYTTEQFLDRSRKLSERIKKNEADRSTLGADIAADKKREQGRKQIIPKVEKLLDVYDSLPSAKAKNDMLKEVLEKVVYLKTKNGRWNNAPDDFEITLYPKIPKSD

SEQ ID NO: 3228 - protein, 530 aa, Unknown
  Description of Unknown: Integrase B3229 sequence
  cd00338,SM00857,G3DSA:1.10.10.2600,IPR036162, PF13408,IPR025827,PS51737,G3DSA:3.40.50.1390, IPR006119,IPR038109,PF07508,IPR011109, SSF53041,PTHR30461,PS51736,Coil,PF00239
MAQENYIIYLRKSRADAEAEARGEGETLARHEKALLELARRQKLNVTDIYREIVSGETIAARPVMQRVLAEVEQGRWVGVLVMEVERLARGDTMDQGLVAQTFKFSGAKIITPMKTYDPSNEFDEEYFEFGLFMARREYKVINRRMQRGREASAREGKFLGNHPPYGYVRKKLEREKGYTLEPHPGQADVIRMIFDLYTIGYPLEDGAYRRLGVSLIARRLNEMAIPPQKGGAWSESSIRDILINPVYAGMIRWNTRPHVKRMVDGQITVTRPRARPEDRICVKGLHEPLISTDTFDAAQKLMSCNRPAPIGRAKGVKNPLAGIVVCGVCGRKLVRRPYPAGRGQPDTLMCPNASCSNVSSALHYVEEHILSALRDWLAEYKLKLLTQGETLSPSALASKKMTLRVVEAELSKLNKQMERLHDLLEQGVYDVDVFLNRSRILGEQIAKAKASIEALNEEIKLEEARSGAYKNIIPKVQHLLDSYHDLSNPKAQNDLLREVLDKAVYTKTIKGRWHAAPDDFEITIFPRLS

SEQ ID NO: 3229 - protein, 530 aa, Unknown
  Description of Unknown: Integrase B3230 sequence
  SM00857,G3DSA:1.10.10.2600,IPR036162,PS51737,G3DSA:3.40.50.1390, IPR006119,IPR038109,PF07508,IPR011109,SSF53041, PF00239,PTHR30461,PS51736,Coil,cd00338
MEQYLIYLRKSRSDLEAEAHGEGETLSRHEHTLLELAKRQHLNVTDIYREVVSGDTIAARPMMQRVLSEVEQGVWSGVLVMEVERLARGDTIDQGIIAQTFKFSGTKIITPIKTYDPDNEFDEEYFEFGLFMSRREYKIINRRLQRGRLASAKEGKWPSGLAPFGYRRVKLKNEKGCSLEPIEEQAAIVRMIFDLYTVGLQDEDGSARPLSLGSIATRLNDMHIPSPSGSQWARITIRGIIKNPTYIGMVRWGSRETKKKVVDGKVVSVRGPADPEKECVFKGIHPPLIPKETFELANDKLTRSENTSTHTEKVVRNPLAGLLVCSECGRQMMRMINPVRPDMPVVRCPRRGCPNCSSYLPIVEERVIQGLSEWMKGYELEWSSAAASSSVSSVGVREKALASAEAELRKLQQQLERTHDFLEQGIYDTDTFLSRSRMLSDKIAAAKDSVARCSRELTEEKLRETSRRDIIPKVKNLLDVYPLLETAEEKNALLKEVLEKVVYQKLNEKRKKSPDGFTIEIYPRIPKSEK

SEQ ID NO: 3230 - protein, 530 aa, Unknown
  Description of Unknown: Integrase B3231 sequence
  cd00338,SM00857,G3DSA:1.10.10.2600,IPR036162, PS51737,G3DSA:3.40.50.1390,IPR006119,IPR038109, PF07508,IPR011109,SSF53041,PTHR30461, PS51736,Coil,PF00239
MEQYLIYLRKSRSDLEAEAHGEGETLSRHEHTLLELAKRQHLNVTDIYREVVSGDTIAARPMMQRVLSEVEQGVWSGVLVMEVERLARGDTIDQGIIAQTFKFSGTKIITPIKTYDPDNEFDEEYFEFGLFMSRREYKIINRRLQRGRLASAKEGKWPSGLAPFGYRRVKLKNEKGCSLEPIEEQAAIVRMIFDLYTVGLQDEDGSARPLSLGSIATRLNDMRIPSPSGSQWARITIRGIIKNPTYIGMVRWGSRETKKKVVDGKVVSVRGPADPEKECVFKGIHPPLIPKETFELANDKLTRSENTSTHKEKVVRNPLAGLLVCSECGRQMMRMINPVNPDMPVVRCPRRGCPNCSSYLPIVEERVIQGLSEWMKGYELEWSSTAASSSVSSVGVREKALASAEAELRKLQQQLERTHDFLEQGIYDTDTFLSRSRMLSDKIAAAKDSVTRCSRELTEEKLRETSRRDIIPKVKNLLDVYPLLETAEEKNALLKEVLEKVVYQKLNEKRKKSPDGFIIEIYPRIPKSEK

SEQ ID NO: 3231 - protein, 530 aa, Unknown
  Description of Unknown: Integrase B3232 sequence
  SM00857,G3DSA:1.10.10.2600,IPR036162,PS51737,G3DSA:3.40.50.1390, IPR006119,IPR038109,PF07508,IPR011109,SSF53041, PF00239,PTHR30461,PS51736,Coil,cd00338
MEQYLIYLRKSRSDLEAEAHGEGETLSRHEHTLLELAKRQHLNVTDIYREVVSGDTIAARPMMQRVLSEVEQGVWSGVLVMEVERLARGDTIDQGIIAQTFKFSGTKIITPIKTYDPDNEFDEEYFEFGLFMSRREYKIINRRLQRGRLASAKEGKWPSGLAPFGYRRVKLKNEKGCSLEPIEEQAAIVRMIFDLYTVGLQDEDGSARPLSLGSIAARLNDMRIPSPSGSQWTRITIRGIIKNPTYIGMVRWGSRETKKKVVDGKVVSVRGPADPEKECVFKGIHPPLIPKETFELANDKLTRSENTSTHKEKVVRNPLAGLLVCSECGRLMMRMINPVRPDMPVVRCPRRGCPNCSSYLPIVEERVIQGLSEWMKGYELEWSSAAASSSVSSVGVREKALASAEAELRKLQQQLERTHDFLEQGIYDTDTFLSRSRMLSDKIAAAKDSVARCSRELTEEKLRETSRRDIIPKVKNLLDVYPLLETAEEKNALLKEVLEKVVYQKLNEKRKKSPDGFTIEIYPRIPKSEK

SEQ ID NO: 3232 - protein, 530 aa, Unknown
  Description of Unknown: Integrase B3233 sequence
  SM00857,G3DSA:1.10.10.2600,IPR036162,PS51737, G3DSA:3.40.50.1390,IPR006119,IPR038109,PF07508, IPR011109,SSF53041,PF00239,PTHR30461, PS51736,Coil,cd00338
MEQYLIYLRKSRSDLEAEAHGEGETLSRHEHTLLELAKRQHLNVTDIYREVVSGDTIAARPMMQRVLSEVEQGVWSGVLVMEVERLARGDTIDQGIIAQTFKFSGTKIITPIKTYDPDNEFDEEYFEFGLFMSRREYKIINRRLQRGRLASAKEGKWPSGLAPFGYRRVKLKNEKGCSLEPIEEQAAIVRMIFDLYTVGLQDEDGSARPLSLGSIATRLNDMHIPSPSGSQWARITIRGIIKNPTYIGMVRWGSRETKKKVVDGKVVSVRGPADPEKECIFKGIHPPLIPKETFELANDKLTRSENTSTHKEKVVRNPLAGLLVCSECGRQMMRMINPVRPDMPVVRCPRRGCPNCSSYLPIVEERVIQGLSEWMKGYELEWSSAAASSSVSSVGVREKALASAEAELRKLQQQLERTHDFLEQGIYDTDTFLSRSRMLSDKIAAAKDSVARCSRELTEEKLRETSRRDIIPKVKNLLDVYPLLETAEEKNALLKEVLEKVVYQKLNEKRKKSPDGFTIEIYPRIPKSEK

SEQ ID NO: 3233 - protein, 530 aa, Unknown
  Description of Unknown: Integrase B3234 sequence
  cd00338,SM00857,G3DSA:1.10.10.2600,IPR036162,PS51737, G3DSA:3.40.50.1390,IPR006119,IPR038109,PF07508,IPR011109, SSF53041,PTHR30461,PS51736,Coil,PF00239
MEQYLIYLRKSRSDIEAEAHGEGETLSRHEHTLLELAKRQHLNVTDIYREVVSGDTIAARPMMQRVLSEVEQGVWSGVLVMEVERLARGDTIDQGIIAQTFKFSGTKIITPIKTYDPDNEFDEEYFEFGLFMSRREYKIINRRLQRGRLASAKEGKWPSGLAPFGYRRVKLKNEKGCSLEPIEEQAAIVRMIFDLYTVGLQDEDGSARPLSLGSIATRLNDMHIPSPSGSQWARITIRGIIKNPTYIGMVRWGSRETKKKVVDGKVVSVRGPADPEKECVFKGIHPPLIPKETFELANDKLTRSENTSTHKEKVVRNPLAGLLVCSECGRQMMRMINPVHPDMPVVRCPRRGCPNCSSYLPIVEERVIQGLSEWMKGYELEWSSAAASSSVSSVGVREKALASAEAELRKLQQQLERTHDFLEQGVYDTDTFLSRSRMLSDKIAAAKDSVARCSRELTEEKLRETSRREIIPKVKNLLDVYPLLETAEEKNALLKEVLEKVVYQKLNEKRKKSPDGFTIEIYPRIPKSEK

SEQ ID NO: 3234 - protein, 530 aa, Unknown
  Description of Unknown: Integrase B3235 sequence
  cd00338,SM00857,G3DSA:1.10.10.2600,IPR036162, PS51737,G3DSA:3.40.50.1390,IPR006119,IPR038109, PF07508,IPR011109,SSF53041,PTHR30461, PS51736,Coil,PF00239
MEQYLIYLRKSRSDLEAEAHGEGETLSRHEHTLLELAKRQHLNVTDIYREVVSGDTIAARPMMQRVLSEVEQGVWSGVLVMEVERLARGDTIDQGIIAQTFKFSGTKIITPIKTYDPDNEFDEEYFEFGLFMSRREYKIINRRLQRGRLASAKEGKWPSGLAPFGYRRVKLKNEKGCSLEPIEEQAAIVRMIFDLYTVGLRDEDGSSRPLSLGSIATRLNDMHIPSPSGSQWARITIRGIVKNPTYIGMVRWGSRETKKKVVDGKVVSVRGPADPEKECVFKGIHPPLVPKEIFELANDKLTRSENTSTRKEKVVRNPLAGLLVCSECGRQMMRMINPVHPDMPVVRCPRRGCPNCSSYLPIVEERVMQGLSEWMKGYELEWSSAAASSSVSSVGVREKAFASAEAELRKLQQQLERTHDFLEQGIYDTDTFLSRSRMLSDKIAAAKDSVTRCSRELTEEKLRETSRRDIIPKVKNLLDVYPLLETAEEKNALLKEVLEKVVYQKLNEKRKKSPDGFTIEIYPRIPKSEK

SEQ ID NO: 3235 - protein, 530 aa, Unknown
  Description of Unknown: Integrase B3236 sequence
  cd00338,SM00857,G3DSA:1.10.10.2600,IPR036162,PS51737, G3DSA:3.40.50.1390,IPR006119,IPR038109,PF07508,SSF53041, IPR011109,PTHR30461,PS51736,Coil,PF00239
MEQYLIYLRKSRSDLEAEAHGEGETLSRHEHTLLELAKRQHLNVTDIYREVVSGDTIAARPMMQRVLSEVEQSVWSGVLVMEVERLARGDTIDQGIIAQTFKFSGTKIITPIKTYDPDNEFDEEYFEFGLFMSRREYKIINRRLQRGRLASAKEGKWPSGLAPFGYRRVKLKNEKGCSLEPIEEQAAIVRMIFDLYTVGLQDEDGSARPLSLGSIATRLNDMHIPSPSGSQWARITIRGIIKNPTYIGMVRWGSRETKKKVVDGKVVSVRGPADPEKECVFKGIHPPLVPKETFELANDKLTRSENTSTHKEKVVRNPLAGLLVCSECGRQMMRMINPVHPDMPVVRCPRRGCPNCSSYLPIVEERVIQGLSEWMKGYELEWSSAAASSSVSSVGVREKALASAEAELRKLQQQLERTHDFLEQGIYDTDTFLSRSRMLSDKIAAAKDSVTRCSRELTEEKLRETSRRDIIPKVKNLLDVYPLLETAEEKNALLKEVLEKVVYQKLNEKRKKSPDGFTIEIYPRIPKSEK

SEQ ID NO: 3236 - protein, 530 aa, Unknown
  Description of Unknown: Integrase B3237 sequence
  cd00338,SM00857,G3DSA:1.10.10.2600,IPR036162, PS51737,G3DSA:3.40.50.1390,IPR006119,IPR038109, PF07508,IPR011109,SSF53041,PTHR30461, PS51736,Coil,PF00239
MEQYLIYLRKSRSDLEAEAHGEGETLSRHEHTLLELAKRQHLNVTDIYREVVSGDTIAARPMMQRVLSEVEQGVWSGVLVMEVERLARGDTIDQGIIAQTFKFSGTKIITPIKTYDPDNEFDEEYFEFGLFMSRREYKIINRRLQRGRLASAKEGKWPSGLAPFGYRRVKLKNEKGCSLEPIEEQAAIVRMIFDLYTVGLQDEDGSARPLSLGSIATRLNDMRVPSPSGSQWTRITIRGIIKNPTYIGMVRWGSRETKKKVVDGKVVSVRGPADPEKECVFKGIHPPLIPKETFELANDKLTRSENTSTHKEKVVRNPLAGLLVCSECGRQMMRMINPVHPDMPVVRCPRRGCPNCSSYLPIVEERVIQGLAEWMKGYELEWSSAAASSSVSSVGVREKALAGAEAELRKLQQQLERTHDFLEQGIYDTDTFLSRSRMLSDKIAAAKESVARCSRELTEEKLRETSRRDIIPKVKNLLDVYPLLETAEEKNALLKEVLEKVVYQKLNEKRKKSPDGFTIEIYPRIPKSEK

SEQ ID NO: 3237 - protein, 530 aa, Unknown
  Description of Unknown: Integrase B3238 sequence
  PTHR30461:SF3,cd00338,SM00857,G3DSA:1.10.10.2600,IPR036162, PF13408,PS51737,IPR025827,G3DSA:3.40.50.1390,IPR006119, IPR038109,PF07508,IPR011109,SSF53041,PTHR30461, PS51736,Coil,PF00239
MSSVDKTAVIYARYSSHGQTEQSIDGQIAAAQKYAEGKGYTIIHIYADRAMTGRNDDREQFQKMLSDTATHQFGVILLWKIDRFGRNREEIAFNRYRCKKNGVRVERVAEDVPDGPEGVILDSVLEGMAEYYSLQLAQNVRRGQRESAKKSQSNGGTRMIGYKVNPDTKRYEVDPDTAPFITEVFRRYAGGQTMAEIAAWLNAQGLRATRGGMFTVNSLHRLLKNEKYTGVYIFRDIRNEGGMPALIDRATFDKVQEMLKVNRRAPSRVWSRAEYLLTDKLFCGHCGAPMAGVSGHGHTGVKHNYYTCLNRKRKKSCTKKSVRQDVLEPLVLKSIRNLLQDDATLKYIADRVWAEYERSDTSGDTIRALDRQIADVDRALSNVMKAIEMGIINEMTKARMDELTEQKQALSAARADAGLARGFKLTRNMVLYFLRKMAAMDISDRDSQKRLIKTFVNAIYLYDDHFDIAFNYTENGKVIVKMQEIDDASTGGAFGCCAQCPTINHQDEHTTFITMIGNVFVLFCPFPGLK

SEQ ID NO: 3238 - protein, 530 aa, Unknown
  Description of Unknown: Integrase B3239 sequence
  cd00338,SM00857,G3DSA:1.10.10.2600,IPR036162,PS51737, G3DSA:3.40.50.1390,IPR006119,IPR038109,PF07508,IPR011109, SSF53041,PTHR30461,PS51736,Coil,PF00239
MEQYLIYLRKSRSDLEAEAHGEGETLSRHEHTLLELAKRQHLNVTDIYREVVSGDTIAARPMMQRVLSEVEQGVWSGVLVMEVERLARGDTIDQGIIAQTFKFSGTKIITPIKTYDPDNEFDEEYFEFGLFMSRREYKIINRRLQRGRLASAKEGKWPSGLAPFGYRRVKLKNEKGCSLEPIEEQAAIVRMIFDLYTVGLQDEDGSARPLSLGSIATRLNDMHIPSPSGSQWARITIRGIIKNPTYIGMVRWGSRETKKKVVDGKVVSVRGPADPEKECVFKGIHPPLVPKETFELANDKLTRSENTSTHKEKVVRNPLAGLLVCSECGRQMMRMINPVHPDMPVVRCPRRGCPNCSSYLPIVEERVIQGLSEWMKGYELEWSSAAASSSVSSVGVREKALASAEAELRKLQQQLERTHDFLEQGVYDTDTFLSRSRMLSDKIAAAKDSVARCSRELTEEKLRETSRREIIPKVKNLLDVYPLLETAEEKNALLKEVLEKVVYQKLNEKRKKSPDGFTIEIYPRIPKSEK

SEQ ID NO: 3239 - protein, 530 aa, Unknown
  Description of Unknown: Integrase B3240 sequence
  cd00338,SM00857,G3DSA:1.10.10.2600,IPR036162, PS51737,G3DSA:3.40.50.1390,IPR006119,IPR038109, PF07508,IPR011109,SSF53041,PTHR30461, PS51736,Coil,PF00239
MEQYLIYLRKSRSDLEAEAHGEGETLSRHEHTLLELAKRQHLNVTDIYREVVSGDTIAARPMMQRVLSEVEQGVWSGVLVMEVERLARGDTIDQGIIAQTFKFSGTKIITPIKTYDPDNEFDEEYFEFGLFMSRREYKIINRRLQRGRLASAKEGKWPSGLAPFGYRRVKLKNEKGCSLEPIEEQAAIVRMIFDLYTVGLQDEDGSARPLSLGSIATRLNDMHIPSPSGSQWARITIRGIIKNPTYIGMVRWGSRETKKKVVDGKVVSVRGPADPEKECIFKGIHPPLIPKETFELANDKLTRSENTSTHKEKVVRNPLAGLLVCSECGRQMMRMINPVRPDMPVVRCPRRGCPNCSSYLPIVEERVIQGLSEWMKGYELEWSSAAASSSVSLVGVREKALASAEAELRKLQQQLERTHDFLEQGIYDTDTFLSRSRMLSDKIAAAKDSVARCSRELTEEKLRETSRRDIIPKVKNLLDVYPLLETAEEKNALLKEVLEKVVYQKLNEKRKKSPDGFTIEIYPRIPKSEK

SEQ ID NO: 3240 - protein, 530 aa, Unknown
  Description of Unknown: Integrase B3241 sequence
  PTHR30461:SF3,SM00857,G3DSA:1.10.10.2600,IPR036162,PF13408, IPR025827,PS51737,G3DSA:3.40.50.1390,IPR006119,IPR038109, PF07508,IPR011109,SSF53041,PTHR30461,Coil, PS51736,cd00338,PF00239
MQTIPIDLSALTPEERQQFAENPSVLSTGCETVCCLYMRYSSDRQTEQSIEGQLRELIAYCKHHSYRVAAIYVDRAISAHASMDKRPAFQQMLSDSARSSWKTVLVYKLDRFARNREDSAIARMRLRKNGCNVESAKEGISKNPEGVILEALLEGMAEYYSLELSQKITRGMRESAIKGNCLGGQIPLGYKIENKKYVIDPLTAPLVKEAFSRYGDGETAASICEDFNARGYRTASGAEFNKSSFKNIFRNEKYIGVYKYKEMRREGIIPRIIADDAWIAVQSRLKVNEAAPARGKAKVPYLLAGKLFCGHCGAPMTGECGRGKSGKMYNYYSCATRKHHNSCEKKPVPKDWLEDVVAQDALDVLTDEIIEFVAEVAAQQSEEDIQKNTQIPVIRKKISEIENKIRNLTKALECASVAPDAIVERLAELEAQKKGLSTQLSDEERGVIPLTKESVVVYLKAVREKAVPLETQKAMLIEMLVNSVTVYDDEPGFLKLVYAYRLTQIPTRTYRVPIPAKVPCSDFRTQPAPK

SEQ ID NO: 3241 - protein, 530 aa, Unknown
  Description of Unknown: Integrase B3242 sequence
  SM00857,G3DSA:1.10.10.2600,IPR036162,PS51737,G3DSA:3.40.50.1390, IPR006119,IPR038109,PF07508,IPR011109,SSF53041, PTHR30461,Coil,PS51736,cd00338,PF00239
MEQYLIYLRKSRSDLEAEAHGEGETLSRHEHTLLELAKRQHLNVTDIYREVVSGDTIAARPMMQRVLSEVEQGVWSGVLVMEVERLARGDTIDQGIIAQTFKFSGTKIITPIKTYDPDNEFDEEYFEFGLFMSRREYKIINRRLQRGRLASAKEGKWPSGLAPFGYRRVKLKNEKGCSLEPIEEQAAIVRMIFDLYTVGLQDEDGSARPLSLGSIATRLNDMRIPSPSGSQWARITIRGIIKNPTYIGMVRWGSRETKKKVVDGKVVSVRGPADPEKECVFKGIHPPLIPKETFELANDKLTRSENTSTRKEKVVRNPLAGLLVCSECGRQMMRMINPVHPDMPVVRCPRRGCPNCSSYLPIVEERVIQGLSEWMKGYELEWSSAAASSSVSSVGVREKALTSAEAELRKLQQQLERTHDFLEQGIYDTDTFLSRSRMLSDKIAAAKDSVTRCSRELTEEKLRETSRRDIIPKVKNLLDVYPLLETAEEKNALLKEVLEKVVYQKLNEKRKKSPDGFTIEIYPRIPKSEK

SEQ ID NO: 3242 - protein, 530 aa, Unknown
  Description of Unknown: Integrase B3243 sequence
  cd00338,SM00857,G3DSA:1.10.10.2600,IPR036162, PS51737,G3DSA:3.40.50.1390,IPR006119,IPR038109, PF07508,IPR011109,SSF53041,PTHR30461, PS51736,Coil,PF00239
MEQYLIYLRKSRSDLEAEAHGEGETLSRHEHTLLELAKRQHLNVTDIYREVVSGDTIAARPMMQRVLSEVEQGVWSGVLVMEVERLARGDTIDQGIIAQTFKFSGTKIITPIKTYDPDNEFDEEYFEFGLFMSRREYKIINRRLQRGRLASAKEGKWPSGLAPFGYRRVKLKNEKGCSLEPIEEQAAIVRMIFDLYTVGLQDEDGSARPLSLGSIATRLNDMHIPSPSGSQWARITIRGIIKNPTYIGMVRWGSRETKKKVVDGKVVSVRGPADPEKECVFKGIHPPLIPKETFELANGKLTRSENTSTHKEKVVRNPLAGLLVCSECGRQMMRMINPVHPDMPVVRCPRRGCPNCSSYLPIVEERVIQGLSEWMKGYELEWSSAAASSSVSSVGVREKALASAEAELRKLQQQLERTHDFLEQGVYDTDTFLSRSRMLSDKIAAAKDSVARCSRELTEEKLRETSRREIIPKVKNLLDVYPLLETAEEKNALLKEVLEKIVYQKLNEKRKKSPDGFTIEIYPRIPKSEK

SEQ ID NO: 3243 - protein, 530 aa, Unknown
  Description of Unknown: Integrase B3244 sequence
  SM00857,G3DSA:1.10.10.2600,IPR036162,PS51737,G3DSA:3.40.50.1390, IPR006119,IPR038109,PF07508,IPR011109,SSF53041, PF00239,PTHR30461,PS51736,Coil,cd00338
MEQYLIYLRKSRSDLEAEAHGEGETLSRHEHTLLELAKRQHLNVTDIYREVVSGDTIAARPMMQRVLSEVEQGVWSGVLVMEVERLARGDTIDQGIIAQTFKFSGTKIITPIKTYDPDNEFDEEYFEFGLFMSRREYKIINRRLQRGRLASAKEGKWPSGLAPFGYRRVKLKNEKGCSLEPIEEQAAIVRMIFDLYTVGLQDKDGSARPLSLGSIATRLNDMRIPSPSGSQWARITIRGIIKNPTYIGMVRWGSRETKKKVVDGKVVSVRGPADPEKECVFKGIHPPLIPKETFELANDKLARSENTSTRKEKVVRNPLAGLLVCSECGRQMMRMINPVHPDMPVVRCPRRGCPNCSSYLPIVEERVIQGLSEWMKGYELEWSSAAASSSVSSVGVREKALASAEAELRKLQQQLERTHDFLEQGVYDTDTFLSRSRMLSDKIAVAKDSVARCSRELTEEKLRETSRRDIIPKVRNLLDVYPLLETAEEKNALLKEVLEKVVYQKLNEKRKKSPDGFTIEIYPRIPKSEK

SEQ ID NO: 3244 - protein, 530 aa, Unknown
  Description of Unknown: Integrase B3245 sequence
  cd00338,SM00857,G3DSA:1.10.10.2600,IPR036162, PS51737,G3DSA:3.40.50.1390,IPR006119,IPR038109, PF07508,IPR011109,SSF53041,PTHR30461, PS51736,Coil,PF00239
MEQYLIYLRKSRSDLEAEAHGEGETLSRHEHTLLELAKRQHLNVTDIYREVVSGDTIAARPMMQRVLSEVEQGVWSGVLVMEVERLARGDTIDQGIIAQTFKFSGTKIITPIKTYDPDNEFDEEYFEFGLFMSRREYKIINRRLQRGRLASAKEGKWPSGLAPFGYRRVKLKNEKGCSLEPIEEQAAIVRMIFDLYTVGLQDEDGSARPLSLGSIATRLNDMRIPSPSGSQWARITIRGIIKNPTYIGMVRWGSRETKKKVVDGKVVSVRGPADPEKECVFKGIHPPLIPKETFELANDKLTRSENTSTHKEKVVRNPLAGLLVCSECGRQMMRMINPVHPDMPVVRCPRRGCPNCSSYLPIVEERVIQGLSEWMKGYELEWSSAAASSSVSSVGVREKALASAEAELRKLQQQLERTHDFLEQGIYDTDTFLSRSRMLSDKIAAAKDSVTRCSRELTEEKLRETSRRDIIPKVKNLLDVYPLLETAEEKNALLKEVLEKVVYQKLNEKRKKSPDGFIIEIYPRIPKSEK

SEQ ID NO: 3245 - protein, 530 aa, Unknown
  Description of Unknown: Integrase B3246 sequence
  cd00338,SM00857,G3DSA:1.10.10.2600,IPR036162,PS51737, G3DSA:3.40.50.1390,IPR006119,IPR038109,PF07508,SSF53041, IPR011109,PTHR30461,PS51736,Coil,PF00239
MEQYLIYLRKSRSDLEAEAHGEGETLSRHEHTLLELAKRQHLNVTDIYREVVSGDTIAARPMMQRVLSEVEQGVWSGVLVMEVERLARGDTIDQGIIAQTFKFSGTKIITPIKTYDPDNEFDEEYFEFGLFMSRREYKIINRRLQRGRLASAKEGKWPSGLAPFGYRRVKLKNEKGCSLEPIEEQAAIVRMIFDLYTVGLQDEDGSARPLSLGSIATRLNDMHIPSPSGSQWARITIRGIIKNPTYIGMVRWGSRETKKKVVDGKVVSVRGPADPEKECVFKGIHPPLVPKETFELANDKLARSENTSTHKEKVVRNPLAGLLVCSECGRQMMRMINPVHPDMPVVRCPRRGCPNCSSYLPIVEERVIQGLSEWMKGYELEWSSAAASSSVSSVGVREKALASAEAELRKLQQQLERTHDFLEQGIYDTDTFLSRSRMLSDKIAAAKDSVTRCSRELTEEKLRETSRRDIIPKVKNLLDVYPLLETAEEKNALLKEVLEKVVYQKLNEKRKKNPDGFTIEIYPRIPKSEK

SEQ ID NO: 3246 - protein, 530 aa, Unknown
  Description of Unknown: Integrase B3247 sequence
  cd00338,SM00857,G3DSA:1.10.10.2600,IPR036162, PS51737,G3DSA:3.40.50.1390,IPR006119,IPR038109, PF07508,IPR011109,SSF53041,PTHR30461, PS51736,Coil,PF00239
MEQYLIYLRKSRSDLEAEAHGEGETLSRHEHTLLELAKRQHLNVTDIYREVVSGDTIAARPMMQRVLSEVEQGVWSGVLVMEVERLARGDTIDQGIIAQTFKFSGTKIITPIKTYDPDNEFDEEYFEFGLFMSRREYKIINRRLQRGRLASAKEGKWPSGLAPFGYRRVKLKNEKGCSLEPIEEQAAIVRMIFDLYTVGLRDEDGSARPLSLGSIATRLNDMHIPSPSGSQWARITIRGIIKNPTYIGMVRWGSRETKKKVVDGKVVSVRGPADPEKECIFKGIHPPLIPKETFELANDKLARSENTSTHKEKVVRNPLAGLLVCSECGRQMMRMINPVHPDMPVVRCPRRGCPNCSSYLPIVEERVIQGLSEWMKGYELEWSSAAASSSVSSVGVREKALASAEAELRKLQQQLERTHDFLEQGIYDTDTFLSRSRMLSDKIAAAKDSVARCSRELTEEKLRETSRRDIIPKVKNLLDVYPLLETAEEKNALLKEVLEKVVYKKLNEKRKKSPDGFTIEIYPRIPKSEK

SEQ ID NO: 3247 - protein, 530 aa, Unknown
  Description of Unknown: Integrase B3248 sequence
  PTHR30461:SF3,cd00338,SM00857,G3DSA:1.10.10.2600,IPR036162, PF13408,IPR025827,G3DSA:3.40.50.1390,PS51737,IPR006119, IPR038109,PF07508,SSF53041,IPR011109,PTHR30461, PS51736,Coil,PF00239
MQTIPIDLSALTPEERQQFADNPSVLSSDCEAVCCLYMRYSSDRQTEQSIEGQLRELIAYCKHHSYRVAAIYVDRAISAHASMDKRPAFQQMLADSARSSWKTVLVYKLDRFARNREDSAIARMRLRKNGCNVESAKEGISKNPEGVILEALLEGMAEYYSLELSQKITRGMRESAIKGNCLGGQIPLGYKIENKKYVIDPLTAPLVKEAFSRYGDGETAASICADFNARGYRTASGAEFNKSSFKNIFRNEKYIGVYKYKEMRREGIIPRIIADDAWIAVQSRLKVNEAAPARGKAKVPYLLAGKLFCGHCGAPMTGECGRGKSGKMYNYYSCATRKHHNSCEKKPVPKDWLEDVVAQDALDVLTDEIIEFVAEVAAQQSEEDIQKNTQIPVIRKKISEIENKIRNLTKALECASVAPDAIVERLAELEAQKKGLSTQLSDEERGVIPLTKESVVVYLKAVREKAVPLETQKAMLIEMLVNSVTVYDDEPGFLKLVYAYRLTQIPTRTYRVPIPAKVPCSDFRTQPAPK

SEQ ID NO: 3248 - protein, 530 aa, Unknown
  Description of Unknown: Integrase B3249 sequence
  cd00338,SM00857,G3DSA:1.10.10.2600,IPR036162,PS51737, G3DSA:3.40.50.1390,IPR006119,IPR038109,PF07508,IPR011109, SSF53041,PTHR30461,PS51736,Coil,PF00239
MEQYLIYLRKSRSDIEAEAHGEGETLSRHEHTLLELAKRQHLNVTDIYREVVSGDTIAARPMMQRVLSEVEQGVWSGVLVMEVERLARGDTIDQGIIAQTFKFSGTKIITPIKTYDPDNEFDEEYFEFGLFMSRREYKIINRRLQRGRLASAKEGKWPSGLAPFGYRRVKLKNEKGCSLEPIEEQAAIVRMIFDLYTVGFQDEDGSARPLSLGSIATRLNDMHIPSPSGSQWARITIRGIIKNPTYIGMVRWGSRETKKKVVDGKVVSVRGPADPEKECVFKGIHPPLIPKETFELANDKLTRSENTSTHKEKVVRNPLAGLLVCSECGRQMMRMINPVHPDMPVVRCPRRGCPNCSSYLPIVEERVIQGLSEWMKGYELEWSSAAASSSVSSVGVREKALASAEAELRKLQQQLERTHDFLEQGIYDTDTFLSRSRMLSDKIAAAKDSVTRCSRELTEEKLRETSRRDIIPKVKNLLDVYPLLETAEEKNALLKEVLEKVVYQKLNEKRKKSPDGFTIEIYPRIPKSEK

SEQ ID NO: 3249 - protein, 530 aa, Unknown
  Description of Unknown: Integrase B3250 sequence
  SM00857,G3DSA:1.10.10.2600,IPR036162,PS51737, G3DSA:3.40.50.1390,IPR006119,IPR038109,PF07508, IPR011109,SSF53041,PF00239,PTHR30461, PS51736,Coil,cd00338
MEQYLIYLRKSRSDLEAEAHGEGETLSRHEHTLLELAKRQHLNVTDIYREVVSGDTIAARPMMQRVLSEVEQGVWSGVLVMEVERLARGDTIDQGIIAQTFKFSGTKIITPIKTYDPDNEFDEEYFEFGLFMSRREYKIINRRLQRGRLASAKEGKWPSGLAPFGYRRVKLKNEKGCSLEPIEEQAAIVRMIFDLYTVGLQNEDGSARPLSLGSIAARLNDMRIPSPSGSQWTRITIRGIVKNPTYIGMVRWGSRETKKKVVDGKVVSVRGPADPEKECVFKGIHPPLIPKETFELANDKLTRSENTSTHKEKVVRNPLAGLLVCSECGRQMMRMINPVHPDMPVVRCPRRGCPNCSSYLPIVEERVIQGLSEWMKGYELEWSSAAASSSVSSVGVREKALASAEAELRKLQQQLERTHDFLEQGIYDTDTFLSRSRMLSDKIAAAKDSVAHCSRELTEEKLRETSRRDIIPKVKNLLDVYPLLETAEEKNALLKEVLEKVVYQKLNEKRKKSPDGFTIEIYPRIPKSEK

SEQ ID NO: 3250 - protein, 530 aa, Unknown
  Description of Unknown: Integrase B3251 sequence
  SM00857,G3DSA:1.10.10.2600,IPR036162,PS51737,G3DSA:3.40.50.1390, IPR006119,IPR038109,PF07508,IPR011109,SSF53041, PTHR30461,Coil,PS51736,cd00338,PF00239
MPYCLYVRKSRADAEAEARGEGETLTRHINALLDLAKRRHLDITQIYREIVSGETIAARPVMQQLLSEVEQGLWDGVLVMEVERLARGDTVDQGIVAQTFKFSDTKIITPIKDYDPNNEFDEEYFEFGLFMSRREYKTINRRLQRGRIASVKEGKYVGSQSPYGYQREKLVGDKGYTLAPLPAEADIVRLIFQLYTKGEEQEDGSYKRLGVSRIVRRLNDMRIPPRKSNHWSPATIRDILINPVYIGKIRWNWRKDSKKMVDGRVVIARPRSSIDDCVLADGKHPPLIDDATFALAQEYMAQNPPHPIGERNKVKNPLSGLVVCAKCGKKMVRRPYNDRNQADTLLCADTACDNISSALFYVEERVLQALSDWLAEYRLQWETADDTADNASAVNLKEKALRRLATEYDTLNKQLDNAHDLLEQGVYTTEQFLDRSRKLSERIKKNEADRSTLGADIAADKKREQGRKQIIPKVEKLLDVYDSLPSAKAKNDMLKEVLEKVVYLKTKNGRWNNAPDDFEITLYPKIPKSD

SEQ ID NO: 3251 - protein, 530 aa, Unknown
  Description of Unknown: Integrase B3252 sequence
  cd00338,SM00857,G3DSA:1.10.10.2600,IPR036162, PS51737,G3DSA:3.40.50.1390,IPR006119,IPR038109, PF07508,IPR011109,SSF53041,PTHR30461, PS51736,Coil,PF00239
MEQYLIYLRKSRSDLEAEAHGEGETLSRHEHTLLELAKRQHLNVTDIYREVVSGDTIAARPMMQRVLSEVEQGVWSGVLVMEVERLARGDTIDQGIIAQTFKFSGTKIITPIKTYDPDNEFDEEYFEFGLFMSRREYKIINRRLQRGRLASAKEGKWPSGLAPFGYRRVKLKNEKGCSLEPIEEQAAIVRMIFDLYTVGLQDEDGSARPLSLGSIATRLNDMHIPSPSGSQWARITIRGIIKNPTYIGMVRWGSRETKKKVVDGKVVSVRGPADPEKECVFKGIHPPLVSKETFELANDKLARSENTSTHKEKVVRNPLAGLLVCSECGRQMMRMINPVHPDMPVVRCPRRGCPNCSSYLPIVEERVIQGLSEWMKGYELEWSSAAASSSVSSVGVREKALASAEAELRKLQQQLERAHDFLEQGIYDTDTFLSRSRMLSDKIAAAKDSVTRCSRELTEEKLRETSRRDIIPKVKNLLDVYPLLETAEEKNALLKEVLEKVVYQKLNEKRKKSPDGFTIEIYPRIPKSEK

SEQ ID NO: 3252 - protein, 530 aa, Unknown
  Description of Unknown: Integrase B3253 sequence
  SM00857,G3DSA:1.10.10.2600,IPR036162,PS51737,G3DSA:3.40.50.1390, IPR006119,IPR038109,PF07508,IPR011109,SSF53041, PF00239,PTHR30461,PS51736,Coil,cd00338
MEQYLIYLRKSRSDLEAEAHGEGETLSRHEHTLLELAKRQHLNVTDIYREVVSGDTIAARPMMQRVLSEVEQGVWSGVLVMEVERLARGDTIDQGIIAQTFKFSGTKIITPIKTYDPDNEFDEEYFEFGLFMSRREYKIINRRLQRGRLASAKEGKWPSGLAPFGYRRVKLKNEKGCSLEPIEEQAAIVRMIFDLYTVGLRDEDGSARPLSLGSIATRLNDMRIPSPSGSQWARITIRGIIKNPTYIGMVRWGSRETKKKVVDGKVVSVRGPADPEKECIFKGIHPPLIPKETFELANDKLARSENTSTHKEKVVRNPLAGLLVCSECGRQMMRMINPVHPDMPVVRCPRRGCPNCSSYLPIVEERVIQGLSEWMKGYELEWSSAAASSSVSSVGVREKALASAEAELRKLQQQLERTHDFLEQGVYDTDTFLSRSRMLSDKIAAAKDSVTRCSRELTEEKLRETSRRDIIPKVKNLLDVYPLLETAEEKNALLKEVLEKVVYQKLNEKRKKSPDGFTIEIYPRIPKSEK

SEQ ID NO: 3253 - protein, 530 aa, Unknown
  Description of Unknown: Integrase B3254 sequence
  PTHR30461:SF3,cd00338,SM00857,G3DSA:1.10.10.2600,IPR036162, PF13408,IPR025827,PS51737,G3DSA:3.40.50.1390,IPR006119, IPR038109,PF07508,IPR011109,SSF53041, PTHR30461,PS51736,Coil,PF00239
MKKFPIDLSCLTEEEISQFQEDPYTLYNGDQDVALYLRYSSTGQSDQSIEGQLRDCRAFCKANHYRIVAIYVDRATTARKDVEKRVHLMEMISDSAKQNWEYVIVWKLDRFARNRNDSAIMKMRLRKNGVKVLSATEHLTDSPESIILESVLEGMAEFFSAELSQKVTRGMRESALKCHSVGGHIPLGYKVENHKLVVDPDTAHIVQEAFSLYANGESVADICRKFNSAGYKTAKNTEFNRSSFKAMFRNTRYIGTYTYKDIVIENGIPAIIDKELFETVQRRLSKTATAPARGKAKVDYLLSGKLFCGHCGASMNGESGAGRHGKVYHYYSCYTKKRKLGCDKRPLKKDYIEGIVARDALNLLTDQLIDEIADMAIRQSEQDLINDTHIPQLTAQLSEVEKSITNITAAIEKGIASETLMNRLVQLEHEKKTLNKEIKAEEKFVYRIDRDQIVFWLSQFKYGNIEDENFRRRLIDLLVNSVTVWDEPDGYKITTAYNLTSCKTKTFRVEKNPAAEEATGFDFGESECTK

SEQ ID NO: 3254 - protein, 530 aa, Unknown
  Description of Unknown: Integrase B3255 sequence
  cd00338,SM00857,G3DSA:1.10.10.2600,IPR036162,PS51737, G3DSA:3.40.50.1390,IPR006119,IPR038109,PF07508,IPR011109, SSF53041,PTHR30461,PS51736,Coil,PF00239
MEQYLIYLRKSRSDLEAEAHGEGETLSRHEHTLLELAKRQHLNVTDIYREVVSGDTIAARPMMQRVLSEVEQGVWSGVIVMEVERLARGDTIDQGIIAQTFKFSGTKIITPIKTYDPDNEFDEEYFEFGLFMSRREYKIINRRLQRGRLASAKEGKWPSGLAPFGYRRVKLKNEKGCSLEPIEEQAAIVRMIFDLYTVGLQDEDGSARPLSLGSIATRLNDMHIPSPSGSQWARITIRGIIKNPTYIGMVRWGSRETKKKVVDGKVVSVRGPADPEKECIFKGIHPPLIPKETFELANDKLTRSENTSTHKEKVVRNPLAGLLVCSECGRQMMRMINPVRPDMPVVRCPRRGCPTCSSYLPIVEERVIQGLSEWMKGYELEWSSAAASSSVSSVGVREKALSSAEAELRKLQQQLERTHDFLEQGIYDTDTFLSRSRMLSDKIAAAKDSVARCSRELTEEKLRETSRRDIIPKVKNLLDVYPLLETAEEKNALLKEVLEKVVYQKLNEKRKKSPDGFTIEIYPRIPKSEK

SEQ ID NO: 3255 - protein, 530 aa, Unknown
  Description of Unknown: Integrase B3256 sequence
  SM00857,G3DSA:1.10.10.2600,IPR036162,PS51737, G3DSA:3.40.50.1390,IPR006119,IPR038109,PF07508, IPR011109,SSF53041,PF00239,PTHR30461, PS51736,Coil,cd00338
MEQYLIYLRKSRSDLEAEAHGEGETLSRHEHTLLELAKRQHLNVTDIYREVVSGDTIAARPMMQRVLSEVEQGVWSGVLVMEVERLARGDTIDQGIIAQTFKFSGTKIITPIKTYDPDNEFDEEYFEFGLFMSRREYKIINRRLQRGRLASAKEGKWPSGLAPFGYRRVKLKNEKGCSLEPIEEQAAIVRMIFDLYTVGLQDEDGSARPLSLGSIATRLNDMHIPSPSGSQWARITIRGIIKNPTYIGMVRWGSRETKKKVVDGKVVSVRGPADPEKECVFKGIHPPLIPKETFELANDKLTRSENTSTHKEKVVRNPLAGLLVCSECGRQMMRMINPVHPDMPVVRCPRRGCPNCSSYLPIVEERVIQGLSEWMKGYELEWSSAAASSSVSSVGVREKALASAEAELRKLQQQLERTHDFLEQGVYDTDTFLSRSRMLSDKIAAAKDSVTRCSRELTEEKLRETSRRDIIPKVKNLLDVYPLLETAEEKNALLKEVLEKVVYQKLNEKRKKSPDGFTIEIYPRIPKSEK

SEQ ID NO: 3256 - protein, 530 aa, Unknown
  Description of Unknown: Integrase B3257 sequence
  PTHR30461:SF3,SM00857,G3DSA:1.10.10.2600,IPR036162,PF13408, IPR025827,PS51737,G3DSA:3.40.50.1390,IPR006119,IPR038109, PF07508,IPR011109,SSF53041,PTHR30461,Coil, PS51736,cd00338,PF00239
MTVINEYCDRAISGKTDNRPSFQRLIKDSEKGQFEAVIMYTLDRFARNRYDSAIYKAKLKKHGVRVFYAKQPMPDTPEGIILESVLEGYAEYYSENLSRNIKRGLKENALQCIATGGAGVALGYTVGEDRKYQIDPVGAKIVQEVFEMYADGMSATQIINVCNERGYKTSRGNPFNKNSLRTMLKNDKYIGVYRFMDVVVEGGVPAIISKELFDKVQAKLQHNYTARARNKAKEDYLLTTKLFCGHCGSPMVGESGTSKTGKLHFYYKCIDRKRKHVCTKKVEKKDWIEELVTRFTVQEVLTDENIDRIATKAMEIIEKESADTTYLEGLQNELKEVQKKIKNIMTAIEQGIITSTTKDRLEELESEKNEIEGRIAREEIKKPLLTKERIVYWLLSFKSGDINDIEYRRRVIDTLVNSVYIYDDGDKGRRIVLTFNVSGQNTATISCSDIACSAPPKREAKKDIEDKTSVFSRLPRPVDQQIYGPYFSDILPCAIHSGRSRTHTIFTLSGISFEAGILLLQDLGLFYSAV

SEQ ID NO: 3257 - protein, 530 aa, Unknown
  Description of Unknown: Integrase B3258 sequence
  SM00857,G3DSA:1.10.10.2600,IPR036162,PF13408,PS51737, G3DSA:3.40.50.1390,IPR025827,IPR006119,IPR038109,PF07508, IPR011109,SSF53041,PTHR30461,Coil,PS51736, cd00338,PF00239
MEQYCIYLRKSRADAEAEARGEGETLARHEKMLLAVAKRDRYHISKIYREIVSGETIAARPQMQQLLQDVEQGLYAGVLVMEVERLARGDTIDQGIMAQTFRYSDTKIITPMKVYDPNNEFDEEYFEFGLFMSRREYKTINRRLQRGRAASAKEGKYAGNITPYGYTRVKLEHDKGFRLVPDPEEAKIVQLVYDWYLNGEPQEDGSRKRLGSTYIARKLNAAHVPTRHGGKWGVNSVRGILINPVYTGKIRWNYRPAKKSMENGAVVKTRSEAEEGDYILADGLHEALISEEAYHAVQEDMHHKAVSGTHDGKKLCNPLAGLVYCACCKHVMVRRPHNKRFHTDTLMCNTLDCPNVSADLEAVERRVLSGIRDWLEQYEVEWSKNHQEPDAMDAQIATKKAAIQAAEKEQDVLKKQLDNAYDFLEQGIYDTDVFLFRSQALNDRIQDTQNSIKALQEELHREQMRKEGIEEIIPKAKHVLEVYGSLTDAKSKNELLKTVLERVEYYKGKSARWSGNPDNFEVVLFPKLPK

SEQ ID NO: 3258 - protein, 530 aa, Unknown
  Description of Unknown: Integrase B3259 sequence
  cd00338,SM00857,G3DSA:1.10.10.2600,IPR036162,PS51737, G3DSA:3.40.50.1390,IPR006119,IPR038109,PF07508,IPR011109, SSF53041,PTHR30461,PS51736,Coil,PF00239
MEQYLIYLRKSRSDLEAEAHGEGETLSRHEHTLLELAKRQHLNVTDIYREVVSGDTIAARPMMQRVLSEVEQGVWSGVLVMEVERLARGDTIDQGIIAQTFKFSGTKIITPIKTYDPDNEFDEEYFEFGLFMSRREYKIINRRLQRGRLASAKEGKWPSGLAPFGYRRVKLKNEKGCSLEPIEEQAAIVRMIFDLYTVGLQDEDGSARPLSLGSIATRLNDMHIPSPSGSQWARITIRGIIKNPTYIGMVRWGSRETKKKVVDGKVVSVRGPADPEKECVFKGIHPPLIPKETFELANDKLTRSENTSTHKEKVVRNPLAGLLVCSECGRQMMRTINPVHPDMPVVRCPRRGCPNCSSYLPIVEERVIQGLSEWMKGYELEWSSAAASSSVSSVGVREKALASAEAELRKLQQQLERTHDFLEQGIYDTDTFLSRSRMLSDKIAAAKDSVTRCSRELTEEKLRETSRRDIIPKVKNLLDVYPLLETAEEKNALLKEVLEKVVYQKLNEKRKKSPDGFTIEIYPRIPKSEK

SEQ ID NO: 3259 - protein, 530 aa, Unknown
  Description of Unknown: Integrase B3260 sequence
  cd00338,SM00857,G3DSA:1.10.10.2600,IPR036162, PS51737,G3DSA:3.40.50.1390,IPR006119,IPR038109, PF07508,IPR011109,SSF53041,PTHR30461, PS51736,Coil,PF00239
MEQYLIYLRKSRSDLEAEAHGEGETLSRHEHTLLELAKRQHLNVTDIYREVVSGDTIAARPMMQRVLSEVEQGVWSGVLVMEVERLARGDTIDQGIIAQTFKFSGTKIITPIKTYDPDNEFDEEYFEFGLFMSRREYKIINRRLQRGRLASAKEGKWPSGLAPFGYRRVKLKNEKGCSLEPIEEQAAIVRMIFDLYTVGLQDEDGSARPLSLGSIATRLNDMHIPSPSGSQWARITIRGIIKNPTYIGMVRWGSRETKKKVVDGKVVSVRGPADPEKECIFKGIHPPLIPKETFELANDKLTRSENTSTHKEKVVRNPLAGLLVCSECGRQMMRMINPVNPDMPVVRCPRRGCPNCSSYLPIVEERVIQGLSEWMKGYELEWSSAAASSSVSSVGVREKALASAEAELRKLQQQLERTHDFLEQGIYDTDTFLSRSRMLSDKIASAKDSVTRCSRELTEEKLRETSRRDIIPKVKNLLDVYPLLETAAEKNALLKEVLEKVVYQKLNEKRKKSPDGFTIEIYPRIPKSEK

SEQ ID NO: 3260 - protein, 530 aa, Unknown
  Description of Unknown: Integrase B3261 sequence
  SM00857,G3DSA:1.10.10.2600,IPR036162,PS51737,G3DSA:3.40.50.1390, IPR006119,IPR038109,PF07508,IPR011109,SSF53041, PF00239,PTHR30461,PS51736,Coil,cd00338
MEQYLIYLRKSRSDLEAEAHGEGETLSRHEHTLLELAKRQHLNVTDIYREVVSGDTIAARPMMQRVLSEVEQGVWSGVLVMEVERLARGDTIDQGIIAQTFKFSGTKIITPIKTYDPDNEFDEEYFEFGLFMSRREYKIINRRLQRGRLASAKEGKWPSGLAPFGYRRVKLKNEKGCSLEPIEEQAAIVRMIFDLYTVGLQDEDGSARPLSLGSIATRLNDMHIPSPSGSQWARITIRGIIKNPTYIGMVRWGSRETKKKVVDGKVVSVRGPADPEKECVFKGIHPPLIPKETFELANDKLTRSENTSTHKEKVVRNPLAGLLVCSECGRQMMRMINPVHPDMPVVRCPRRGCPNCSSYLPIVEERVIQGLSEWMKGYELEWSSAAASSFVSSVGVREKVLASAEAELRKLQQQLERTHDFLEQGIYDTDTFLSRSRMLSDKIAAAKDSVTRCSRELTEEKLRETSRRDIIPKVKNLLDVYPLLETAEEKNALLKEVLEKVVYQKLNEKRKKSPDGFTIEIYPRIPKSEK

SEQ ID NO: 3261 - protein, 530 aa, Unknown
  Description of Unknown: Integrase B3262 sequence
  cd00338,SM00857,G3DSA:1.10.10.2600,IPR036162, PS51737,G3DSA:3.40.50.1390,IPR006119,IPR038109, PF07508,IPR011109,SSF53041,PTHR30461, PS51736,Coil,PF00239
MEQYLIYLRKSRSDLEAEAHGEGETLSRHEHTLLELAKRQHLNVTDIYREVVSGDTIAARPMMQRVLSEVEQGVWSGVLVMEVERLARGDTIDQGIIAQTFKFSGTKIITPIKTYDPDNEFDEEYFEFGLFMSRREYKIINRRLQRGRLASAKEGKWPSGLAPFGYRRVKLKNEKGCSLEPIEEQAAIVRMIFDLYTVGLQDEDGSARPLSLGSIATRLNDMHIPSPSGSQWARITIRGIIKNPTYIGMVRWGSRETKKKVVDGKVVSVRGPADPEKECIFKGIHPPLIPKETFELANDKLTRSENTSTHKEKVVRNPLAGLLVCSECGRQMMRMINPVRPDMPVVRCPRRGCPNCSSYLPIVEERVIQGLSEWMKGYELEWSSAAASSSVSSVGVRKKALASAEAELRKLQQQLERTHDFLEQGIYDTDTFLSRSRMLSDKIAAAKDSVTRCSRELTEEKLRETSRRDIIPKVKNLLDVYPLLETAEEKNALLKEVLEKVVYQKLNEKRKKSPDGFTIEIYPRIPKSEK

SEQ ID NO: 3262 - protein, 530 aa, Unknown
  Description of Unknown: Integrase B3263 sequence
  cd00338,SM00857,G3DSA:1.10.10.2600,IPR036162,PS51737, G3DSA:3.40.50.1390,IPR006119,IPR038109,PF07508,IPR011109, SSF53041,PTHR30461,PS51736,Coil,PF00239
MEQYLIYLRKSRSDLEAEAHGEGETLSRHEHTLLELAKRQHLNVTDIYREVVSGDTIAARPMMQRVLSEVEQGVWSGVLVMEVERLARGDTIDQGIIAQTFKFSGTKIITPIKTYDPDNEFDEEYFEFGLFMSRREYKIINRRLQRGRLASAKEGKWPSGLAPFGYRRVKLKNEKGCSLEPIEEQAAIVRMIFDLYTVGLQDEDGSARPLSLGSIATRLNDMHIPSPSGSQWARITIRGIIKNPTYIGMVRWGSRETKKKVVDGKVVSVRGPADPEKECVFKGIHPPLIPKETFELANDKLIRSENTSTHKEKVVRNPLAGLLVCSECGRQMMRMINPVHPDMPVVRCPRRGCPNCSSYLPIVEERVIQGLSEWMKGYELEWSSAAASSSVSSVGVREKALASAEAELRKLQQQLERTHDFLEQGIYDTDTFLSRSRMLSDKIAAAKDSVARCSRELTEEKLRETSRRDIIPKVKNLLDVYPLLETAEEKNALLKEVLEKVVYQKLNEKRKKSPDGFTIEIYPRIPKSEK

SEQ ID NO: 3263 - protein, 530 aa, Unknown
  Description of Unknown: Integrase B3264 sequence
  cd00338,SM00857,G3DSA:1.10.10.2600,IPR036162, PS51737,G3DSA:3.40.50.1390,IPR006119,IPR038109, PF07508,IPR011109,SSF53041,PTHR30461, PS51736,Coil,PF00239
MEQYLIYLRKSRSDLEAEAHGEGETLSRHEHTLLELAKRQHLNVTDIYREVVSGDTIAARPMMQRVLSEVEQGVWSGVLVMEVERLARGDTIDQGIIAQTFKFSGTKIITPIKTYDPDNEFDEEYFEFGLFMSRREYKIINRRLQRGRLASAKEGKWPSGLAPFGYRRVKLKNEKGCSLEPIEEQAAIVRMIFDLYTVGLQDEDGSARPLSLGSIAARLNDMRVPSPSGSQWTRITIRGIIKNPTYIGMVRWGSRETKKKVVDGKVVSVRGPADPEKECVFKGIHPPLIPKETFELANDKLTRSENTSTHKEKVVRNPLAGLLVCSECGRQMMRMINPVHPDMPVVRCPRRGCPNCSSYLPIVEERVIQGLSEWMKGYELEWSSAAASSSVSSVGVREKALASAEAELRKLQQQLERTHDFLEQGIYDTDTFLSRSRMLSDKIAAAKDSVARCSRELTEEKLRETSRRDIIPKVKNLLDVYPLLETAEEKNALLKEVLEKVVYQKLNEKRKKSPDGFTIEIYPRIPKSEK

SEQ ID NO: 3264 - protein, 530 aa, Unknown
  Description of Unknown: Integrase B3265 sequence
  cd00338,SM00857,G3DSA:1.10.10.2600,IPR036162,PS51737, G3DSA:3.40.50.1390,IPR006119,IPR038109,PF07508,IPR011109, SSF53041,PTHR30461,PS51736,Coil,PF00239
MEQYLIYLRKSRSDLEAEAHGEGETLSRHEHTLLELAKRQHLNVTDIYREVVSGDTIAARPMMQRVLSEVEQGVWSGVLVMEVERLARGDTIDQGIIAQTFKFSGTKIITPIKTYDPDNEFDEEYFEFGLFMSRREYKIINRRLQRGRLASAKEGKWPSGLAPFGYRRVKLKNEKGCSLEPIEEQAAIVRMIFDLYTVGLQDEDGSARPLSLGSIATRLNDMHIPSPSGSQWARITIRGIIKNPTYIGMVRWGSRETKKKVVDGKVVSVRGPAGPEKECVFKGIHPPLIPKETFELANDKLTRSENTSTRKEKVVRNPLAGLLVCSECGRQMMRMINPVHPDMPVVRCPRRGCPNCSSYLPIVEERVIQGLSEWMKGYELEWSSAAASSSVSSVGVREKALASAEAELRKLQQQLERTHDFLEQGIYDTDTFLSRSRMLSDKIAAAKDSVTRCSRELTEEKLRETSRRDIIPKVKNLLDVYPLLETAEEKNALLKEVLEKVVYQKLNEKRKKSPDGFTIEIYPRIPKSEK

SEQ ID NO: 3265 - protein, 530 aa, Unknown
  Description of Unknown: Integrase B3266 sequence
  PTHR30461:SF3,cd00338,SM00857,G3DSA:1.10.10.2600,IPR036162, PF13408,IPR025827,G3DSA:3.40.50.1390,PS51737,IPR006119, IPR038109,PF07508,SSF53041,IPR011109, PTHR30461,PS51736,Coil,PF00239
MYEEIKQVVLYVRYSSANQTEQSIEGQVRVCSDFCQRHGFRIIEIYADRATSASKDIEKRVEFLRMIKDAEKKNFQAVIVYKLDRFARSRYDSANYKYRLRKNGVQLISATENISNDPEGIILESVLEGMAEFYSAELSQKITRGLKESAYKHNSIGGAIPLGYKSEGKKLVIDEETAPIVRQAFEMYAEGHSVADICRLFNSRGYKTSKGTNFGKSSFSKMFHNERYIGVYQFHDYRAEDAIPAIIDKKLFYQVQARMKSSGKAPGQFKARHIYLLSGKLYCGHCGSKMNANSNGTAGYSYYECYGKKNLHKDCHKRNLRKDFIEDIVINDAMSLLTDENINQIAEVTIRTNLHDIEHCTDIPAIKDKLHETKLSLSNITKAIENGLAPETLVKRMVELEKDKKALEEELKKEEKKVSYLDKEQVIFWLNQFKNGDIEDADFRRQLIDLFVNHVTVWDEDDNHFKVTIAYNLTSLHEKTYHLKRGGRLSDLSSMHQDSVSNPIIQGTLLYHTTHCHLKPHQWRKFNQEV

SEQ ID NO: 3266 - protein, 530 aa, Unknown
  Description of Unknown: Integrase B3267 sequence
  cd00338,SM00857,G3DSA:1.10.10.2600,IPR036162,PS51737, G3DSA:3.40.50.1390,IPR006119,IPR038109,PF07508,SSF53041, IPR011109,PTHR30461,PS51736,Coil,PF00239
MEQYLIYLRKSRSDLEAEAHGEGETLSRHEHTLLELAKRQHLNVTDIYREVVSGDTIAARPMMQRVLSEVEQGVWSGVLVMEVERLARGDTIDQGIIAQTFKFSGTKIITPIKTYDPDNEFDEEYFEFGLFMSRREYKIINRRLQRGRLASAKEGKWPSGLAPFGYRRVKLKNEKGCSLEPIEEQAAIVRMIFDLYTVGLQDEDGSAHPLSLGSIATRLNDMHIPSPSGSQWARITIRGIIKNPTYIGMVRWGSRETKKKVVDGKVVSVRGPADPEKECVFKGIHPPLVPKETFELANDKLARSENTSTHKEKVVRNPLAGLLVCSECGRQMMRMINPVHPDMPVVRCPRRGCPNCSSYLPIVEERVIQGLSEWMKGYELEWSSAAASSSVSSVGVREKALASAEAELRKLQQQLERTHDFLEQGIYDTDTFLSRSRMLSDKIAAAKDSVTRCSRELTEEKLRETSRRDIIPKVKNLLDVYPLLETAEEKNALLKEVLEKVVYQKLNEKRKKSPDGFTIEIYPRIPKSEK

SEQ ID NO: 3267 - protein, 530 aa, Unknown
  Description of Unknown: Integrase B3268 sequence
  SM00857,G3DSA:1.10.10.2600,IPR036162,PF13408, IPR025827,G3DSA:3.40.50.1390,PS51737,IPR006119, IPR038109,PF07508,IPR011109,SSF53041, PF00239,PTHR30461,PS51736,Coil,cd00338
MKKQLNLYGHYCAYLRKSRADRDNMYATDEDVLARHESILADLSKRLGIVIEKTYREVVSGDTIAARPEVQQLLEQVEDGLWDGVLVVEVERLARGDSIDQGTISRSFALSHTLIITPNKIYDPDDEFDSEYFEFGLFMSRREYKTINRRLNRGRDQSAEEGKYIGNKPPYGYERVKLQGEKGFTLSPDPNKADIVRMIFDMYVKGEDSGSTGVSKIVRKLNAMHIPAAMGGDWTTSTVQDMLSNPVYIGKIRHKWRPAVKSVKDGVLSVSRPRDKERVTIYEGRHPGIISPDIYAAAQEKRKKNPGKTVPSRYIIQNPLSGLVVCGKCGRKMIRRPYKPPQKDTLLCYHTNCSQIGSPLYLVEQEILNALRAIVDDTINPSISLPETSDNTLKTKLKILNEKEKELDDLQLQKDRIYNFLEQGIYSIDEFRERSTRNTDEMEKIQTTVEVLKTEIKKLNSYQKKKKEFIPRCEHLLEHYEELTVEQKNDCLKELLDKVEYDKNERNKHGEGDKPNFKLHLYPKFFSDNY

SEQ ID NO: 3268 - protein, 530 aa, Unknown
  Description of Unknown: Integrase B3269 sequence
  SM00857,G3DSA:1.10.10.2600,IPR036162,PS51737,G3DSA:3.40.50.1390, IPR006119,IPR038109,PF07508,IPR011109,SSF53041, PF00239,PTHR30461,PS51736,Coil,cd00338
MEQYLIYLRKSRSDLEAEAHGEGETLSRHEHTLLELAKRQHLNVTDIYREVVSGDTIAARPMMQRVLSEVEQGVWSGVLVMEVERLARGDTIDQGIIAQTFKFSGTKIITPIKTYDPDNEFDEEYFEFGLFMSRREYKIINRRLQRGRLASAKEGKWPSGLAPFGYRRVKLKNEKGCSLEPIEEQAAIVRMIFDLYTVGLQDEDGSTRPLSLGSIATRLNDMHIPSPSGSQWARITIRGIIKNPTYIGMVRWGSRETKKKVVDGKVVSVRGPADPEKECIFKGIHPPLIPKETFELANDKLARSENTSTHKEKVVRNPLAGLLVCSECGRQMMRMINPVHPDMPVVRCPRRGCPNCSSYLPIVEERVIQGLSEWMKGYELEWSSAAASSSVSSVGVREKALASAEAELRKLQQQLERTHDFLEQGVYDTDTFLSRSRMLSDKIAAAKESTARCSRELTEEKLRETSRRDIIPKVKNLLDVYPMLETAEEKNALLKEVLEKVVYQKLNEKRKKSPDGFTIEIYPRIPKSEK

SEQ ID NO: 3269 - protein, 530 aa, Unknown
  Description of Unknown: Integrase B3270 sequence
  SM00857,G3DSA:1.10.10.2600,IPR036162,PS51737, G3DSA:3.40.50.1390,IPR006119,IPR038109,PF07508, IPR011109,SSF53041,PF00239,PTHR30461, PS51736,Coil,cd00338
MEQYLIYLRKSRSDLEAEAHGEGETLSRHEHTLLELAKRQHLNVTDIYREVVSGDTIAARPMMQRVLSEVEQGVWSGVLVMEVERLARGDTIDQGIIAQTFKFSGTKIITPIKTYDPDNEFDEEYFEFGLFMSRREYKIINRRLQRGRLASAKEGKWPSGLAPFGYRRVKLKNEKGCSLEPIEEQAAIVRMIFDLYTVGLQDEDGSARPLSLGSIATRLNDMHIPSPSGSQWARITIRGIIKNPTYIGMVRWGSRETKKKVVDGKVVSVRGPADPEKECIFKGIHPPLIPKETFELANDKLTRSENTSTHKEKVVRNPLAGLLVCSECGRQMMRMINPVHPDMPVVRCPRRGCPNCSSYLPIVEERVIQGLSEWMKGYELEWSSAAASSSVSSVGVREKALASAEAELRKLQQQLERTHDFLEQGVYDTDTFLSRSRMLSDKIAAAKESTARCSRELTEEKLRETSRRDIIPKVKNLLDVYPLLETAEEKNALLKEVLEKVVYQKLNEKRKKSPDGFTIEIYPRIPKSEK

SEQ ID NO: 3270 - protein, 530 aa, Unknown
  Description of Unknown: Integrase B3271 sequence
  PTHR30461:SF3,cd00338,SM00857,G3DSA:1.10.10.2600,IPR036162, PF13408,PS51737,G3DSA:3.40.50.1390,IPR025827,IPR006119, IPR038109,PF07508,IPR011109,SSF53041,PTHR30461, PS51736,Coil,PF00239
MARKKNIAAGQDAVIYARYSSHNQREVSIEQQIAECTKYAAALGLRIVGTYEDRAISGKTDNRPRFQQMMRDAGKGKFQAVVAWKSNRIGRNMLQAMVNEAKLDDYGVKVFYAEEDFDDTAAGRFALRNMMNVNQFYSENMAEDITRGLYDNASKCMANGRQPLGYKRGEDGRVVLDEANAAVVREIFTRVAAGDLFVDIARDLNAQGIKTSKGANWNKGSFQSICQNERYRGIYIYGDVRVADGIPRIVSDDLWYRVQEAMRMKKNPVGTRHRVGAEDYLLTGKLRCGHCGSYMTGVSGTSRNGELHYYYTCQKRRTEHACDKKNIRRDVIEPAVAQAIKMYCLTDDVIEWMADRTVEYWEKHDNDLQIEALEQQLAENKKATSNMLKAIEMGIITEATRTRMVELETEQSRLSVQLNAAKEDVVKIDREQIISYLELLQQGDIHDRDFQMELFKNFLVAVYVYDDNRMKLVFSCMGDQNSVEIPLETGEDPPDGGLSPDAKMFVLTPDSSTKKALYFVGSMVLFFLLS

SEQ ID NO: 3271 - protein, 530 aa, Unknown
  Description of Unknown: Integrase B3272 sequence
  SM00857,G3DSA:1.10.10.2600,IPR036162,PS51737,G3DSA:3.40.50.1390, IPR006119,IPR038109,PF07508,IPR011109,SSF53041, PTHR30461,PS51736,cd00338,PF00239
MEQYLIYLRKSRSDLEAEAHGEGETLSRHEHTLLELAKRQHLNVTDIYREVVSGDTIAARPMMQRVLSEVEQGVWSGVLVMEVERLARGDTIDQGIIAQTFKFSGTKIITPIKTYDPDNEFDEEYFEFGLFMSRREYKIINRRLQRGRLASAKEGKWPSGLAPFGYRRVKLKNEKGCSLEPIEEQAAIVRMIFDLYTVGLQDEDGSARPLSLGSIATRLNDMHIPSPSGSQWARITIRGIIKNPTYIGMVRWGSRETKKKVVDGKVVSVRGPADPEKECIFKGIHPPLIPKETFELANDKLTRSENTSTHKEKVVRNPLAGLLVCSECGRQMMRMINPVHPDMPVVRCPRRGCPNCSSYLPIVEERVIQGLSEWMKGYELEWSSAAASSSVSSVGVREKALASAEVELHKLQQQLERTHDFLEQGIYDTDTFLSRSRMLSDKIAAAKDSVARCSRELTEEKLRETSRRDIIPKVKNLLDVYPLLETAEEKNALLKEVLEKVVYQKLNEKRKKSPDGFTIEIYPRIPKSEK

SEQ ID NO: 3272 - protein, 530 aa, Unknown
  Description of Unknown: Integrase B3273 sequence
  SM00857,G3DSA:1.10.10.2600,IPR036162,PS51737, G3DSA:3.40.50.1390,IPR006119,IPR038109,PF07508, IPR011109,SSF53041,PF00239,PTHR30461, PS51736,Coil,cd00338
MEQYLIYLRKSRSDLEAEAHGEGETLSRHEHTLLELAKRQHLNVTDIYREVVSGDTIAARPMMQRVLSEVEQGVWSGVLVMEVERLARGDTIDQGIIAQTFKFSGTKIITPIKTYDPDNEFDEEYFEFGLFMSRREYKIINRRLQRGRLASAKEGKWPSGLAPFGYRRVKLKNEKGCSLEPIEEQAAIVRMIFDLYTVGLQDEDGSARPLSLGSIATRLNDMHIPSPSGSQWARITIRGIIKNPTYIGMVRWGSRETKKKVVDGKVVSVRGPADPEKECIFKGIHPPLIPKETFELANDKLARSENTSTHKEKVVRNPLAGMLVCSECGRQMMRMINPVHPDMPVVRCPRRGCPNCSSYLPIVEERVIQGLSEWMKGYELEWSSAAASSSVSSVGVREKALASAEAELRKLQQQLERTHDFLEQGIYDTDTFLSRSRMLSDKIAAAKESVARCSRELTEEKLREASRREIIPKVKNLLDVYPLLETAEEKNALLKEVLEKVVYQKLNEKRKKSPDGFTIEIYPRIPKSEK

SEQ ID NO: 3273 - protein, 530 aa, Unknown
  Description of Unknown: Integrase B3274 sequence
  cd00338,SM00857,G3DSA:1.10.10.2600,IPR036162,PF13408, PS51737,G3DSA:3.40.50.1390,IPR025827,IPR006119,IPR038109, PF07508,IPR011109,SSF53041,PTHR30461,PS51736, Coil,PF00239
MNDQSTKGVLYCRYSSHAQRDVSIDQQIKECEKFAERNNIDIIKVYDDRAMSGTNDRRPMFQAMLAEAARLDYQYIIVYSLDRFARDRYDSAVYKRQLKSCGKKVLSATENISDDPSGVLMESLLEGLAEYYSKELSRKIRRGMDDNAERCMANGSLPYGYRRGKDGKYEIVPDQAAVVQEVFLRVSNGESMVSIYNSLNARGLRTKRGHIWNKNSFNRLLSNIRYTGVYVYRDKQIPGGIPAIIDKELFDAVQHHLHTKSNPRISGDMPTRRRRENSVYLLTGKLFCGKCKSPMVGISGKSGVPTPYYYYACKAHRQTKLCDMKAVRRDAIEREVAAAIKRYILVDDTISQLADYAVKAQNEMAKDTALDTLQEQLTATTASIGNIVSAIERGAFSEAMQLRLSELEAVKKSLEEEIAYSKLRRAPSFTRDDFVAMLHLYRDGDIDDKDYQEKLIDTFLIAAYVYSDHLHLVFDFGQNAMDHDIDIALVQNADRQADEQNLFKGCKAPPNEVRTNTYFFSGGFAVTCSL

SEQ ID NO: 3274 - protein, 530 aa, Unknown
  Description of Unknown: Integrase B3275 sequence
  cd00338,SM00857,G3DSA:1.10.10.2600,IPR036162,PS51737, G3DSA:3.40.50.1390,IPR006119,IPR038109,PF07508,SSF53041, IPR011109,PTHR30461,PS51736,Coil,PF00239
MEQYLIYLRKSRSDLEAEAHGEGETLSRHEHTLLELAKRQHLNVTDIYREVVSGDTIAARPMMQRVLSEVEQGVWSGVLVMEVERLARGDTIDQGIIAQTFKFSGTKIITPIKTYDPDNEFDEEYFEFGLFMSRREYKIINRRLQRGRLASAKEGKWPSGLAPFGYRRVKLKNEKGCSLEPIEEQAAIVRMIFDLYTVGLQDEDGSARPLSLGSIATRLNDMRIPSPSGSQWARITIRGIIKNPTYIGMVRWGSRETKKKVVDGKVVSVRGPADPEKECVFKGIHPPLISKETFELANDKLTRSENTSTHKEKVVRNPLAGLLVCSECGRQMMRMINPVNPDMPVVRCPRRGCPNCSSYLPIVEERVIQGLSEWMKGYELEWSSTAASSSVSSVGVREKALASAEAELRKLQQQLERTHDFLEQGIYDTDTFLSRSRMLSDKIAAAKDSVTRCSRELTEEKLRETSRRDIIPKVKNLLDVYPLLETAEEKNALLKEVLEKVVYQKLNEKRKKSPDGFIIEIYPRIPKSEK

SEQ ID NO: 3275 - protein, 530 aa, Unknown
  Description of Unknown: Integrase B3276 sequence
  PTHR30461:SF3,IPR036162,PS51737,IPR011109,PTHR30461, PF00239,G3DSA:1.10.10.2600,IPR006119,SSF53041,cd00338, SM00857,IPR025827,IPR038109,PS51736, mobidb-lite,PF13408,G3DSA:3.40.50.1390,PF07508,Coil
MYEEIKTACLYLRYSSSSQTEQSIEGQMHVCQDFCKRHNIRIVEMYIDRATSASKDIEKRVQFLKMIKDSEKGNFDAVIVYKLDRFARSRYDSANYKYRLKRNGVQLISATENISNDPEGIILESVLEGMAEFYSAELSQKINRGMRESAMKHNSIGGAIPLGYKTVDKKLVIDETTAPIVREAFQMYADGESVAEICRTFNNRGYKTSKGTRFGKSSFTKIFRNEKYIGVYKYHDYRAEDVIPPIIDKDLWDRVQVRIGKIKKAPARNKARHTYLLTGKLFCGHCGSAMNADGNSQGYLYYRCYGKKNLDKQCNKRNMEKNLIERLVAQDAMSFLTDEYIEKIATIACDRNKQEIESDSPIPVIRDRIRQVDVSLNNLLKAIETGSAPDMLVKRMGELETEKKDMEVQLKKEMAHQVYIDKEQVIFWLEKFREGDINDEEFCQTVIDLFVNSVTVWDEPDDKFRITIAYNLTSIPQKTYRLSKDGRLSDYASNTPALQCKPSDRRMHFCPGRPDDHDSEKCSAGLPDHY

SEQ ID NO: 3276 - protein, 530 aa, Unknown
  Description of Unknown: Integrase B3277 sequence
  cd00338,SM00857,G3DSA:1.10.10.2600,IPR036162,PS51737, G3DSA:3.40.50.1390,IPR006119,IPR038109,PF07508,SSF53041, IPR011109,PTHR30461,PS51736,Coil,PF00239
MEQYLIYLRKSRSDLEAEAHGEGETLSRHEHTLLELAKRQHLNVTDIYREVVSGDTIAARPMMQRVLSEVEQGVWSGVLVMEVERLARGGTIDQGIIAQTFKFSGTKIITPIKTYDPDNEFDEEYFEFGLFMSRREYKIINRRLQRGRLASAKEGKWPSGLAPFGYRRVKLKNEKGCSLEPIEEQAAIVRMIFDLYTVGLQDEDGSSRPLSLGSIATRLNDMHIPSPSGSQWARITIRGIIKNPTYIGMVRWGSRETKKKVVDGKVVSVRGPADPEKECVFKGIHPPLVPKETFELANDKLTRSENTSTRKEKVVRNPLAGLLVCSECGRQMMRMINPVHPDMPVVRCPRRGCPNCSSYLPIVEERVMQGLSEWMKGYELEWSSAAASSSVSSVGVREKALASAEAELRKLQQQLERTHDFLEQGIYDTDTFLSRSRMLSDKIAAAKDSVTRCSRELTEEKLRETSRRDIIPKVKNLLDVYPLLETAEEKNALLKEVLEKVVYQKLNEKRKKSPDGFTIEIYPRIPKSEK

SEQ ID NO: 3277 - protein, 530 aa, Unknown
  Description of Unknown: Integrase B3278 sequence
  cd00338,SM00857,G3DSA:1.10.10.2600,IPR036162, PS51737,G3DSA:3.40.50.1390,IPR006119,IPR038109, PF07508,IPR011109,SSF53041,PTHR30461, PS51736,Coil,PF00239
MEQYLIYLRKSRSDLEAEAHGEGETLSRHEHTLLELAKRQHLNVTDIYREVVSGDTIAARPMMQRVLSEVEQGVWSGVLVMEVERLARGDTIDQGIIAQTFKFSGTKIITPIKTYDPDNEFDEEYFEFGLFMSRREYKIINRRLQRGRLASAKEGKWPSGLAPFGYRRVKLKNEKGCSLEPIEEQAAIVRMIFDLYTVGLQDEDGSARPLSLGSIATRLNDMHIPSPSGSQWARITIRGIIKNPTYIGMVRWGSRETKKKVVDGKVVSVRGPADPEKECVFKGIHPPLIPKETFELANDKLTRSENTSTRKEKVVRNPLAGLLVCSECGRQMMRMINPVHPDMPVVRCPRRGCPNCSSYLPIVEERVIQGLSEWMKGYELEWSSAAASSSVSSVGVREKALTSAEAELRKLQQQLERTHDFLEQGIYDTDTFLSRSRMLSDKIASAKDSVTRCSRELTEEKLRETSRRDIIPKVKNLLDVYPLLETAEEKNALLKEVLEKVVYQKLNEKRKKSPDGFTIEIYPRIPKSEK

SEQ ID NO: 3278 - protein, 530 aa, Unknown
  Description of Unknown: Integrase B3279 sequence
  PTHR30461:SF3,cd00338,SM00857,G3DSA:1.10.10.2600,IPR036162, PF13408,IPR025827,PS51737,G3DSA:3.40.50.1390,IPR006119, IPR038109,PF07508,IPR011109,SSF53041,PTHR30461, PS51736,Coil,PF00239
MSSVDKTAVIYARYSSHGQTEQSIDGQIAAAQKYAEGKGYTIIHIYADRAMTGRNDDREQFQKMLSDTATHQFGVILLWKIDRFGRNREEIAFNRYRCKKNGVRVERVAEDVPDGPEGVILDSVLEGMAEYYSLQLAQNVRRGQRESAKKSQSNGGTRMIGYKVNPDTKRYEIDPDTAPFITEVFRRYAGGQTMAEIAAWLNAQGLRATRGGMFTVNSLHRLLKNEKYTGVYIFRDIRNEGGMPALIDRATFDKVQEMLKVNRRAPSRVWSRAEYLLTDKLFCGHCGAPMAGVSGHGHTGVKHNYYTCLNRKRKKSCTKKSVRQDVLEPLVLKSIRNLLQDDATLKYIADRVWAEYERSDTSGDTIRALDRQIADVDRALSNVMKAIEMGIINEMTKARMDELTEQKQALSAARADAGLARGFKLTRNMILYFLRKMAAMDISDRDSQKRLIKTFVNAIYLYDDHFDIAFNYTENGKVIVKMQEIDDASTGGAFGCCAQCPTINHQDEHTTFITMIGNVFVLFCPFPGLK

SEQ ID NO: 3279 - protein, 530 aa, Unknown
  Description of Unknown: Integrase B3280 sequence
  SM00857,G3DSA:1.10.10.2600,IPR036162,PS51737,G3DSA:3.40.50.1390, IPR006119,IPR038109,PF07508,IPR011109,SSF53041, PF00239,PTHR30461,PS51736,Coil,cd00338
MEQYLIYLRKSRSDLEAEAHGEGETLSRHEHTLLELAKRQHLNVTDIYREVVSGDTIAARPMMQRVLSEVEQGVWSGVLVMEVERLARGDTIDQGIIAQTFKFSGTKIITPIKTYDPDNEFDEEYFEFGLFMSRREYKIINRRLQRGRLASAKEGKWPSGLAPFGYRRVKLKNEKGCSLEPIEEQAAIVRMIFDLYTVGLQDEDGSARPLSLGSIATRLNDMRIPSPSGSQWARITIRGIIKNPTYIGMVRWGSRETKKKVVDGKVVSVRGPADPEKECVFKGIHPPLIPKETFELANDKLARSENTSTHKEKVVRNPLAGLLVCSECGRQMMRMINPVHPDMPVVRCPRRGCPNCSSYLPIVEERVIQGLSEWMKGYELEWSSAAESSSVSSVGVREKALASAEAELRKLQQQLERTHDFLEQGVYDTDTFLSRSRMLSDKIAVAKDSVARCSRELTEEKLRETSRRDIIPKVRNLLDVYPLLETAEEKNALLKEVLEKVVYQKLNEKRKKSPDGFTIEIYPRIPKSEK

SEQ ID NO: 3280 - protein, 530 aa, Unknown
  Description of Unknown: Integrase B3281 sequence
  cd00338,SM00857,G3DSA:1.10.10.2600,IPR036162, PS51737,G3DSA:3.40.50.1390,IPR006119,IPR038109, PF07508,IPR011109,SSF53041,PTHR30461, PS51736,Coil,PF00239
MEQYLIYLRKSRSDLEAEAHGEGETLSRHEHTLLELAKRQHLNVTDIYREVVSGDTIAARPMMQRVLSEVEQGVWSGVLVMEVERLARGDTIDQGIIAQTFKFSGTKIITPIKTYDPDNEFDEEYFEFGLFMSRREYKIINRRLQRGRLASAKEGKWPSGLAPFGYRRVKLKNEKGCSLEPIEEQAAIVRMIFDLYTVGLQDEDGSARPLSLGSIATRLNDMHIPSPSGSQWARITIRGIIKNPTYIGMVRWGSRETKKKVVDGKVVSVRGPADPEKECIFKGIHPPLIPKETFELANDKLTRSENTSTHKEKVVRNPLAGLLVCSECGRQMMRMINPVRPDMPVVRCPRRGCPNCSSYLPIVEERVIQGLSEWMKGYELEWSSAAASSSVSLVGVREKALASAEAELRKLQQQLERTHDFLEQGIYDTDTFLSRSRMLSDKIAAAKDSVARCSRELTEEKLRETSRRDIIPKVENLLDVYPLLETAEEKNALLKEVLEKVVYQKLNEKRKKSPDGFTIEIYPRIPKSEK

SEQ ID NO: 3281 - protein, 530 aa, Unknown
  Description of Unknown: Integrase B3282 sequence
  SM00857,G3DSA:1.10.10.2600,IPR036162,PS51737,G3DSA:3.40.50.1390, IPR006119,IPR038109,PF07508,SSF53041,IPR011109, PF00239,PTHR30461,PS51736,Coil,cd00338
MEQYLIYLRKSRSDLEAEAHGEGETLSRHEHTLLELAKRQHLNVTDIYREVVSGDTIAARPMMQRVLSEVEQGVWSGVLVMEVERLARGDTIDQGIIAQTFKFSGTKIITPIKTYDPDNEFDEEYFEFGLFMSRREYKIINRRLQRGRLASAKEGKWPSGLAPFGYRRVKLKNEKGCSLEPIEEQAAIVRMIFDLYTVGLQDEDGSARPLSLGSIATRLNDMHIPSPSGSQWARITIRGIIKNPTYIGMVRWGSRETKKKVVDGKVVSVRGPADPEKECVFKGIHPPLVPKETFELANDKLARSENTSTHKEKVVRNPLAGLLVCSECGRQMMRMINPVHPDMPVVRCPRRGCPNCSSYLPIVEERVIQGLSEWMKGYELEWSSAAASSSVSSVGVREKALASAEAELRKLQQQLERTHDFLEQGIYDTDTFLSRSRMLSDKIAAAKDSVARCSRELTEEKLRETSRRDIIPKVKNLLDVYPLLETAEEKNALLKEVLEKVVYQKLNEKRKKSPDGFTIEIYPRIPKSEK

SEQ ID NO: 3282 - protein, 530 aa, Unknown
  Description of Unknown: Integrase B3283 sequence
  SM00857,G3DSA:1.10.10.2600,IPR036162,PS51737, G3DSA:3.40.50.1390,IPR006119,IPR038109,PF07508, IPR011109,SSF53041,PF00239,PTHR30461, PS51736,Coil,cd00338
MEQYLIYLRKSRSDLEAEAHGEGETLSRHEHTLLELAKRQHLNVTDIYREVVSGDTIAARPMMQRVLSEVEQGVWSGVLVMEVERLARGDTIDQGIIAQTFKFSGTKIITPIKTYDPDNEFDEEYFEFGLFMSRREYKIINRRLQRGRLASAKEGKWPSGLAPFGYRRVKLKNEKGCSLEPIEEQAAIVRMIFDLYTVGLQDEDGSARPLSLGSIATRLNDMHIPSPSGSQWARITIRGIIKNPTYIGMVRWGSRETKKKVVDGKVVSVRGPADPEKECVFKGIHPPLIPKETFELANDNLTRSENTSTHKEKIVRNPLAGLLVCSECGRQMMRIINPVHPDMPVVRCPRRGCPNCSSYLPIVEERVIQGLSEWMKGYELEWSSAAASASVSSVGVREKALASAEAELRKLQQQLERTHDFLEQGIYGTDTFLSRSRMLSDKIAAAKDSVTRCSRELTEEKLRETSRRDIIPKVKNLLDVYPLLETAEEKNALLKEVLEKVVYQKLNEKRKKSPDSFTIEIYPRIPKSEK

SEQ ID NO: 3283 - protein, 530 aa, Unknown
  Description of Unknown: Integrase B3284 sequence
  SM00857,G3DSA:1.10.10.2600,IPR036162,PS51737,G3DSA:3.40.50.1390, IPR006119,IPR038109,PF07508,IPR011109,SSF53041, PF00239,PTHR30461,PS51736,Coil,cd00338
MKTAVTYARFSSARQHETSIEAQRDAMARWCAQRSVQIVQEYADRAASGTKTEGRDDFLQMLADLKRRRVDYVLVHKYDRFARNENDQYFYMAMIEQRGAKLVAVAQEFGDGPEARFMLGVITAYNAFYSANLGNEVKKGRSVIIQQGKHPGGPIPLGYVSDGNGSYMIDDFEAYYMCRLFRAVINRRESTQAIIAEMNDVGIHGRRGGDVSYDTVARLLRNPIYAGVYQRRLPNGEIYRIENHHPAIVAMAEFEEVQRIMSQRTNVGRPNKTTFLLTGIAYCGACGSKIYAVNNPQNGKPYSTYFCTHCSGFRRIPAAELEGAAVDYLNALFSPERRAQLADAVASYSRRLTQSAQKRQPSAERKIKKIQREIDALVANLATGALDADTVAVVGQQISTRRARIKVLQESVTPPAPVNAPDVAEYFAGVSSLSLDMDRKVLRQIMHRYIARVIVHTTEIEFQSTFEDWFAEQQKKLQIPANGPTNAVIYTISFLHRAPGGGRGASTRIVPKILISMDKMHKVKRHPGKR

SEQ ID NO: 3284 - protein, 530 aa, Unknown
  Description of Unknown: Integrase B3285 sequence
  cd00338,SM00857,G3DSA:1.10.10.2600,IPR036162, PS51737,G3DSA:3.40.50.1390,IPR006119,IPR038109, PF07508,IPR011109,SSF53041,PTHR30461, PS51736,Coil,PF00239
MEQYLIYLRKSRSDLEAEAHGEGETLSRHEHTLLELAKRQHLNVTDIYREVVSGDTIVARPMMQRVLSEVEQGVWSGVLVMEVERLARGDTIDQGIIAQTFKFSGTKIITPIKTYDPDNEFDEEYFEFGLFMSRREYKIINRRLQRGRLASAKEGKWPSGLAPFGYRRVKLKNEKGCSLEPIEEQAAIVRMIFDLYTVGLQDEDGSARPLSLGSIATRLNDMRIPSPSGSQWARITIRGIIKNPTYIGMVRWGSRETKKKVVDGKVVSVRGPADPEKECVFKGIHPPLIPKETFELANDKLTRSENTSTRKEKVVRNPLAGLLVCSECGRQMMRMINPVHPDMPVVRCPRRGCPNCSSYLPIVEERVIQGLSEWMKGYELEWSSAAASSSVSSVGVREKALASAEAELRKLQQQLERTHDFLEQGIYDTDTFLSRSRMLSDKIAAAKDSVTRCSRELTEEKLRETSRRDIIPKVKNLLDVYPLLETAEEKNALLKEVLEKVVYQKLNEKRKKSPDGFTIEIYPRIPKSEK

SEQ ID NO: 3285 - protein, 530 aa, Unknown
  Description of Unknown: Integrase B3286 sequence
  cd00338,SM00857,G3DSA:1.10.10.2600,IPR036162,PS51737, G3DSA:3.40.50.1390,IPR006119,IPR038109,PF07508,IPR011109, SSF53041,PTHR30461,PS51736,Coil,PF00239
MEQYLIYLRKSRSDLEAEAHGEGETLSRHEHTLLELAKRQHLNVTDIYREVVSGDTIAARPMMQRVLSEVEQGVWSGVLVMEVERLARGDTIDQGIIAQTFKFSGTKIITPIKTYDPDNEFDEEYFEFGLFMSRREYKIINRRLQRGRLASAKEGKWPSGLAPFGYRRVKLKNDKGCSLEPIEEQAAIVRMIFDLYTVGLQDEDGSARPLSLGSIATRLNDMRIPSPSGSHWARITIRGIIKHPTYIGMVRWGSRETKKKVVDGKVVSVRGPADPEKECVFKGIHPPLIPKETFELANDKLTRSENTSTHKEKVVRNPLAGLLVCSECGRQMMRMINPVNPDMPVVRCPRRGCPNCSSYLPIVEERVIQGLSEWMKGYELEWSSTAASSSVSSVGVREKALASAEAELRKLQQQLERTHDFLEQGIYDTDTFLSRSRMLSDKIAAAKDSVTRCSRELTEEKLRETSRRDIIPKVKNLLDVYPLLETAEEKNALLKEVLEKVVYQKLNEKRKKSPDGFIIEIYPRIPKSEK

SEQ ID NO: 3286 - protein, 530 aa, Unknown
  Description of Unknown: Integrase B3287 sequence
  cd00338,SM00857,G3DSA:1.10.10.2600,IPR036162, PS51737,G3DSA:3.40.50.1390,IPR006119,IPR038109, PF07508,IPR011109,SSF53041,PTHR30461, PS51736,Coil,PF00239
MEQYLIYLRKSRSDIEAEAHGEGETLSRHEHTLLELAKRQHLNVTDIYREVVSGDTIAARPMMQRVLSEVEQGVWSGVLVMEVERLARGDTIDQGIIAQTFKFSGTKIITPIKTYDPDNEFDEEYFEFGLFMSRREYKIINRRLQRGRLASAKEGKWPSGLAPFGYRRVKLKNEKGCSLEPIEEQAEIVRMIFDLYTVGLQDEDGSARSLSLGSIATRLNDMHIPSPSGSQWARITIRGIIKNPTYIGMVRWGSRETKKKVVDGKVVSVRGPADPEKECVFKGIHPPLIPKETFELANDKLTRSENTSTHKEKVVRNPLAGLLVCSECGRQMMRMINPVHPDMPVVRCPRRGCPNCSSYLPIVEERVIQGLSEWMKGYELEWSSAAASSSVSSVGVREKALASAEAELRKLQQQLERTHDFLEQGIYDTDTFLSRSRMLSDKIAAAKDSVARCSRELTEEKLRETSRRDIIPKVKNLLDVYPLLETAEEKNALLKEVLEKVVYQKLNEKRKKSPDGFTIEIYPRIPKSEK

SEQ ID NO: 3287 - protein, 530 aa, Unknown
  Description of Unknown: Integrase B3288 sequence
  SM00857,G3DSA:1.10.10.2600,IPR036162,PF13408,PS51737, IPR025827,G3DSA:3.40.50.1390,IPR006119,IPR038109,PF07508, IPR011109,SSF53041,PTHR30461,Coil,PS51736, cd00338,PF00239
MNAVIYARFSSHNQQEQSIEGQIRYCTEYAKKNDMTIINSYIDRAISGTSDNRPEFLQMIKDSNNHQFNVVLVWKLDRFARNRYDSAIYKNTLKKNNVKVVSVTEYLGEGSESVLLEAMLEAMAETYSRQLSENVRRGMRESALKCQVVGGSVPLGFDTVDKKYVINEKEAEIVRFIFDEYVSGTSKKEIVYKLNAKGWRTKNGSTFVFNSLNKILSNRKYIGEYKYEDIVIEHGIPAIIDEQTFELAQKQLAKNKRTAGRKKAKVEYLLSGKIFCGYCGENMLGESATNRHGKKYHYYICNSKKKYKNCKKKREGKETLEKYLVQQTILFFSDKNNIDKVAKKVVKLYNSELHNGHIDSMIANKKELEKQLDNLTNSLIKTSNDRVLNTINEKINSIDTQLSDLEIEIAREKSLASIEMTVSDVVCFINDIINGDINDVIFKKQIIDTLINAIYIYDDKIIVYFNGSEDAKTITYDDLCSDLEKIDNGGEFVFQPLTSTKQVLDEHLLFQRRICRQMCSLIQKQNAVSV

SEQ ID NO: 3288 - protein, 530 aa, Unknown
  Description of Unknown: Integrase B3289 sequence
  SM00857,G3DSA:1.10.10.2600,IPR036162,PS51737,G3DSA:3.40.50.1390, IPR006119,IPR038109,PF07508,IPR011109,SSF53041, PF00239,PTHR30461,PS51736,Coil,cd00338
MEQYLIYLRKSRSDLEAEAHGEGETLSRHEHTLLELAKRQHLNVTDIYREVVSGDTIAARPMMQRVLSEVEQGVWSGVLVMEVERLARGDTIDQGIIAQTFKFSGTKIITPIKTYDPDNEFDEEYFEFGLFMSRREYKIINRRLQRGRLASAKEGKWPSGLAPFGYRRVKLKNEKGCSLEPIEEQAAIVRMIFDLYTVGLQDEDGSARPLSLGSIATRLNDMHIPSPSGSQWARITIRGIIKNPTYIGMVRWGSRETKKKVVDGKVVSVRGPADPEKECIFKGIHPPLIPKETFELANDKLTRSENTSTHKEKVVRNPLAGLLVCSECGRQMMRMINPVHPDMPVVRCPRRGCPNCSSYLPIVEERVIQGLSEWMKGYELEWSSAAASSSVSSVGVREKALASAEAELRKLQQQLERTHDFLEQGIYGTDTFLSRSRMLSDKIAAAKDSVARCSRELTEEKLRETSRRDIIPKVKNLLDVYPLLETAEEKNALLKEVLEKVVYQKLNEKRKKSPDGFTIEIYPRIPKSEK

SEQ ID NO: 3289 - protein, 530 aa, Unknown
  Description of Unknown: Integrase B3290 sequence
  cd00338,SM00857,G3DSA:1.10.10.2600,IPR036162, PF13408,PS51737,IPR025827,G3DSA:3.40.50.1390, IPR006119,IPR038109,PF07508,IPR011109, SSF53041,PTHR30461,PS51736,Coil,PF00239
MNAVIYARFSSHNQQEQSIEGQIRYCTEYAKKNDLTIINSYIDRAISGTSDNRPEFLQMIKDSNNHQFNVVLVWKLDRFARNRYDSAIYKNALKKNSVKVVSVTEYLGEGSESVLLEAMLEAMAETYSRQLSENVRRGMRESALKCQVVGGSVPLGFDTVDKKYVINEKEAEIVRFIFDEYVSGTSKKEIVNKLNAKGWRTKNGSTFVFNSLNKILSNRKYIGEYKYEDIVIEHGIPAIIDEQTFELAQKQLAKNKRTAGRKKAKVEYLLSGKIFCGYCGENMLGESATNRHGKKYHYYICNSKKKYKNCKKKREGKETLEKYLVQQTILFFSDKNNIDKVAKKVVKLYNSELHNGHIDSMIANKKELEKQLDNLTNSLIKTSNDRVLNTINEKINSIDTQLNDLEIEIAREKSLASIEMTVSDVVCFINDIINGDINDVIFKKQIIDTLINAIYIYDDKIIVYFNGSEDAKTITYDDLCSDLEKIDNGGEFVFQPLTSTKQVLDEHLLFQRRICRQMCSLIQKQNAVSV

SEQ ID NO: 3290 - protein, 530 aa, Unknown
  Description of Unknown: Integrase B3291 sequence
  SM00857,G3DSA:1.10.10.2600,IPR036162,PS51737,G3DSA:3.40.50.1390, IPR006119,IPR038109,PF07508,SSF53041,IPR011109, PF00239,PTHR30461,PS51736,Coil,cd00338
MEQYLIYLRKSRSDLEAEAHGEGETLSRHEHTLLELAKRQHLNVTDIYREVVSGDTIAARPMMQRVLSEVEQGVWSGVLVMEVERLARGDTIDQGIIAQTFKFSGTKIITPIKTYDPDNEFDEEYFEFGLFMSRREYKIINRRLQRGRLASAKEGKWPSGLAPFGYRRVKLKNEKGCSLEPIEEQAAIVRMIFDLYTVGLQDEDGSARPLSLGSIATRLNDMHIPSPSGSQWARITIRGIIKNPTYIGMVRWGSRETKKKVVDGKVVSVRGPADQEKECVFKGIHPPLVPKETFELANDKLARSENTSTHKEKVVRNPLAGLLVCSECGRQMMRMINPVHPDMPVVRCPRRGCPNCSSYLPIVEERVIQGLSEWMKGYELEWSSAAASSSVSSVGVREKALASAEAELRKLQQQLERTHDFLEQGIYDTDTFLSRSRMLSDKIAAAKDSVARCSRELTEEKLRETSRRDIIPKVRNLLDVYPLLETAEEKNALLKEVLEKVVYQKLNEKRKKSPDGFTIEIYPRIPKSEK

SEQ ID NO: 3291 - protein, 530 aa, Unknown
  Description of Unknown: Integrase B3292 sequence
  cd00338,SM00857,G3DSA:1.10.10.2600,IPR036162, PS51737,G3DSA:3.40.50.1390,IPR006119,IPR038109, PF07508,IPR011109,SSF53041,PTHR30461, PS51736,Coil,PF00239
MEQYLIYLRKSRSDLEAEAHGEGETLSRHEHTLLELAKRQHLNVTDIYREVVSGDTIAARPMMQRVLSEVEQGVWSGVLVMEVERLARGDTIDQGIIAQTFKFSGTKIITPIKTYDPDNEFDEEYFEFGLFMSRREYKIINRRLQRGRLASAKEGKWPSGLAPFGYRRVKLKNEKGCSLEPIEEQAAIVRMIFDLYTVGLQDEDGSARPLSLGSIATRLNDMHIPSPSGSQWARITIRGIIKNPTYIGMVRWGSRETKKKVVDGKVVSVRGPADPEKECVFKGIHPPLIPKETFELANDKLTRSENTSTHKEKVVRNPLAGLLVCSECGRQMMRMINPVHPDMPVVRCPRRGCPNCSSYLPIVEERVIQGLSEWMKGYELEWNSAAASSSVSSVGVREKALAGAEAELRKLQQQLERTHDFLEQGIYDTDTFLSRSRMLSDKIAAAKESVARCSRELTEEKLRETSRRDIIPKVKNLLDVYPLLETAEEKNALLKEVLEKVVYQKLNEKRKKSPDGFTIEIYPRIPKSEK

SEQ ID NO: 3292 - protein, 530 aa, Unknown
  Description of Unknown: Integrase B3293 sequence
  SM00857,G3DSA:1.10.10.2600,IPR036162,PS51737,G3DSA:3.40.50.1390, IPR006119,IPR038109,PF07508,IPR011109,SSF53041, PF00239,PTHR30461,PS51736,Coil,cd00338
MEQYLIYLRKSRSDLEAEAHGEGETLSRHEHTLLELAKRQHLNVTEIYREVVSGDTIAARPMMQRVLSEVEQGVWSGVLVMEVERLARGDTIDQGIIAQTFKFSGTKIITPIKTYDPDNEFDEEYFEFGLFMSRREYKIINRRLQRGRLASAKEGKWPSGLAPFGYRRVKLKNEKGCSLEPIEEQAAIVRMIFDLYTVGLQDEDGSARPLSLGSIAARLNDMRVPSPSGSQWTRITIRGIIKNPTYIGMVRWGSRETKKKVVDGKVVSVRGPADPEKECVFKGIHPPLIPKETFELANDKLTRSENTSTHKEKVVRNPLAGLLVCSECGRQMMRMINPVHPDMPVVRCPRRGCPNCSSYLPIVEERVIQGLSEWMKGYELEWSSAAASSSVSSVGVREKALASAEAELRKLQQQLERTHDFLEQGIYDTDTFLSRSRMLSDKIAAAKDSVARCSRELTEEKLRETSRRDIIPKVKNLLDVYPLLETAEEKNALLKEVLEKVVYQKLNEKRKKSPDGFTIEIYPRIPKSEK

SEQ ID NO: 3293 - protein, 530 aa, Unknown
  Description of Unknown: Integrase B3294 sequence
  cd00338,SM00857,G3DSA:1.10.10.2600,IPR036162, PS51737,G3DSA:3.40.50.1390,IPR006119,IPR038109, PF07508,IPR011109,SSF53041,PTHR30461, PS51736,Coil,PF00239
MEQYLIYLRKSRSDLEAEAHGEGETLSRHEHTLLELAKRQHLNVTDIYREVVSGDTIAARPMMQRVLSEVEQGVWSGVLVMEVERLARGDTIDQGIIAQTFKFSGTKIITPIKTYDPDNEFDEEYFEFGLFMSRREYKIINRRLQRGRLASAKEGKWPSGLAPFGYRRVKLKNEKGCSLEPIEEQAAIVRMIFDLYTVGLQDEDGSARPLSLGSIATRLNDMHIPSPSGSQWARITIRGIIKNPTYIGMVRWGSRETKKKVVDGKVVSVRGPADPEKECIFKGIHPPLIPKETFELANDKLARSENTSTHKEKVVRNPLAGLLVCSECGRQMMRMINPVHPDMPVVRCPRRGCPNCSSYLPIVEERVIQGLSEWMKGYELEWSSATASSSVSSVGVREKALASAEAELRKLQQQLERTHDFLEQGIYDTDTFLSRSRMLSDKIAAAKDSVARCSRELTEEKLRETSRRDIIPKVKNLLDVYPLLETAEEKNALLKEVLEKVVYQKLNEKRKKSPDGFTIEIYPRIPKSEK

SEQ ID NO: 3294 - protein, 530 aa, Unknown
  Description of Unknown: Integrase B3295 sequence
  PTHR30461:SF3,SM00857,G3DSA:1.10.10.2600,IPR036162,PF13408, IPR025827,G3DSA:3.40.50.1390,PS51737,IPR006119,IPR038109, PF07508,IPR011109,SSF53041,PTHR30461,cd00338, PF00239
MPTNKNMARKYAAGGGSDNSCDVEPLRAVIYARYSSSGQREESIEGQLRDCYDFAKKHGIIVIGEYIDKAMTGRVDRRPDFQRMMKDSEKGRFNCVLLWKMDRFARNRYDSAMYKYKLKKNGIRIFYAKETIPDGPEGIILESVMEGYAEYYSENLAQNVKRGNYDSALELKTLGKTCLGLKTGPDGRYMIDQAEAAIVRRIFEEYAEGERAKDIYERLNSEGYRTSRGGKFNKNSLRRILSNKKYIGVYEYEDIYVENGIPAIITDRDLFERVQKMLKINHDAPARGKAQNFLLTTKLFCGLCGSPMIGDGGTSHTGKAYAYYSCTKRKRGRSCKKESVPKDWIEDLVVGELVKIVHNDELIEQIADRVMEYQKREKDQSGLHALEIRQKENEKAISNMLAAIEAGIITPSTKTRLMELEADRADIEKGIAHELLAEPEFERDQIIYFLERFRSGDINDEAYRIMLVDTFLNSVYLYDDDHLVLVMNYSGENCKVDLKLVEGAVSGDGCKGSAFAPSSALDDDPKLKET

SEQ ID NO: 3295 - protein, 530 aa, Unknown
  Description of Unknown: Integrase B3296 sequence
  cd00338,SM00857,G3DSA:1.10.10.2600,IPR036162,PS51737, G3DSA:3.40.50.1390,IPR006119,IPR038109,PF07508,IPR011109, SSF53041,PTHR30461,PS51736,Coil,PF00239
MEQYLIYLRKSRSDLEAEAHGEGETLSRHEHTLLELAKRQHLNVTDIYREVVSGDTIAARPMMQRVLSEVEQGVWSGVLVMEVERLARGDTIDQGIIAQTFKFSGTKIITPIKTYDPDNEFDEEYFEFGLFMSRREYKIINRRLQRGRLASAKEGKWPSGLAPFGYRRVKLKNEKGCSLEPIEEQAAIVRMIFDLYTVGLQDEDGSARPLSLGSIAARLNDMRVPSPSGSQWTRITIRGIIKNPTYIGMVRWGSRETKKKVVDGKVVSVRGPADPEKECVFKGIHPPLIPKETFELANDKLTRSENTSTHKEKVVRNPLAGLLVCSECGRQMMRMINPVHPDMPVVRCPRRGCPNCSSYLPIVEERVIQGLSEWMKGYELEWSSAAASSSVSSVGVREKALASAEAELRKLQQQLERTHDFLEQGIYDTDTFLSRSRMLSDKIAAAKDSVARCSRELTEEKLRETSRRDIIPKVKNLLDVYPLLETAEEKNALLKEVLERVVYQKLNEKRKKSPDGFTIEIYPRIPKSEK

SEQ ID NO: 3296 - protein, 530 aa, Unknown
  Description of Unknown: Integrase B3297 sequence
  PTHR30461:SF3,SM00857,G3DSA:1.10.10.2600,IPR036162,PF13408, IPR025827,G3DSA:3.40.50.1390,PS51737,IPR006119,IPR038109, PF07508,IPR011109,SSF53041,PTHR30461, Coil,PS51736,cd00338,PF00239
MTTLHHGAYILARYSTDRQDEDSIEVQVVKCSRWCDANGLPVLDVFADMAVSGMKDDRPEYSRMMRQLSLGSADTVVIYDQSRMFRKMTAWFDFREKVERLGVRVVSVTQPMVGGDLRDPTNFLTEGSMALFNQIWVLQTRQKVTEKMRFLAQQGRHTGGKPPLGYNVVDGRYVVCEAEAEIVRSIFKWYASGKTYREIIRALNEAGYTTKSGNSFGTNSLHDLLKNEKYIGVLTYGKVEKRPDGSRNSHASASSVIRVEDAVPAIIDRCTWERVQRKLQENKRSQAGRAPVVRSYPLKGKVFCGECKSAMVVSKAKGKYYYYACSAKQRKGKCDCMPIRVDDLEVRVLDTMRELFCLPANVEYLLAILRDERSKLQGSAGEKLQQLVTRRSAVDKRIAAAVDAVLSGLNSPALSAKLTELEAEKAKLEHDMLQLKAQVSGASVSEDKLREILNMFARSPETDDLLLSIVVRVEVHADFIKVWTLLDPTPRGDFDFSDDSETVIRIDGVGSPAPRILITQSLLCFCVPRK

SEQ ID NO: 3297 - protein, 530 aa, Unknown
  Description of Unknown: Integrase B3298 sequence
  cd00338,SM00857,G3DSA:1.10.10.2600,IPR036162,PS51737, G3DSA:3.40.50.1390,IPR006119,IPR038109,PF07508,IPR011109, SSF53041,PTHR30461,PS51736,Coil,PF00239
MEQYLIYLRKSRSDLEAEAHGEGETLSRHEHTLLELAKRQHLNVTDIYREVVSGDTIAARPMMQRVLSEVEQGVWSGVLVMEVERLARGDTIDQGIIAQTFKFSGTKIITPIKTYDPDNEFDEEYFEFGLFMSRREYKIINRRLQRGRLASAKEGKWPSGLAPFGYRRVKLKNEKGCSLEPIEEQAAIVRMIFDLYTVGLQDEDGSARPLSLGSIATRLNDMHIPSPSGSQWARITIRGIIKNPTYIGMVRWGSRETKKKVVDGKVVSVRGPADPEKECVFKGIHPPLIPKETFELANDKLTRSENTSTHKEKVVRNPLAGLLVCSECGRQMMRMINPVHPDMPVVRCPRRGCPNCSSYLPIVEERVIQGLSEWMKGYELEWSSAAASSSVSSVGVREKALASAEAELRKLQQQLERTHDFLEQGIYDTDTFLSRSRMLSDKIAAAKDSVARCSRELTEEKLRETSRRDIIPKVKNLLDVYPLLETAEEKNALLKEVLEKVVYQKLNEKRKKSPDGFTIEIYPRIPKSEK

SEQ ID NO: 3298 - protein, 530 aa, Unknown
  Description of Unknown: Integrase B3299 sequence
  SM00857,G3DSA:1.10.10.2600,IPR036162,PS51737, G3DSA:3.40.50.1390,IPR006119,IPR038109,PF07508, IPR011109,SSF53041,PF00239,PTHR30461, PS51736,Coil,cd00338
MEQYLIYLRKSRSDIEAEAHGEGETLSRHEHTLLELAKRQHLNVTDIYREVVSGDTIAARPMMQRVLSEVEQGVWSGVLVMEVERLARGDTIDQGIIAQTFKFSGTKIITPIKTYDPDNEFDEEYFEFGLFMSRREYKIINRRLQRGRLASAKEGKWPSGLAPFGYRRVKLKNEKGCSLEPIEEQAAIVRMIFDLYTVGLQDEDGSARPLSLGSIATRLNDMHIPSPSGSQWARITIRGIIKNPTYIGMVRWGSRETKKKVVDGKVVSVRGPADPEKECVFKGIHPPLIPKETFELANDKLTRSENTSTHKEKVVRNPLAGLLVCSECGRQMMRMINPVHPDMPVVRCPRRGCPNCSSYLPIVEERVIQGLSEWMKGYELEWSSAAASSSVSSVGVREKALASAEAELRKLQQQLERTHDFLEQGIYDTDTFLSRSRMLSDKIAAAKDSVARCSRELTEEKLRETSRRDIIPKVKNLLDVYPLLETAEEKNALLKEVLEKVVYQKLNEKRKKSPDGFIIEIYPRIPKSEK

SEQ ID NO: 3299 - protein, 530 aa, Unknown
  Description of Unknown: Integrase B3300 sequence
  cd00338,SM00857,G3DSA:1.10.10.2600,IPR036162,PS51737, G3DSA:3.40.50.1390,IPR006119,IPR038109,PF07508,IPR011109, SSF53041,PTHR30461,PS51736,Coil,PF00239
MEQYLIYLRKSRSDLEAEAHGEGETLSRHEHTLLELAKRQHLNVTDIYREVVSGDTIAARPMMQRVLSEVEQGVWSGVLVMEVERLARGDTIDQGIIAQTFKFSGTKIITPIKTYDPDNEFDEEYFEFGLFMSRREYKIINRRLQRGRLASAKEGKWPSGLAPFGYRRVKLKNEKGCSLEPIEEQAAIVRMIFDLYTVGLQDEDGSARPLSLGSIATRLNDMHIPSPSGSQWARITIRGIIKNPTYIGMVRWGSRETKKKVVDGKVVSVRGPADPEKECVFKGIHPPLIPKETFELANDKLTRSENTSTHTEKVVRNPLAGLLVCSECGRQMMRMINPVHPDMPVVRCPRRGCPNCSSYLPIVEERVIQGLSEWMKGYELEWSSAAASSSVSSVGVREKALASAEAELRKLQQQLERTHDFLEQGIYDTDTFLSRSRMLSDKIAAAKESVARCSRELTEEKLRETSRRDIIPKVKNLLDVYPLLETAEEKNALLKEVLEKVVYQKLNEKRKKSPDGFTIEIYPRIPKSEK

SEQ ID NO: 3300 - protein, 530 aa, Unknown
  Description of Unknown: Integrase B3301 sequence
  SM00857,G3DSA:1.10.10.2600,IPR036162,PS51737, G3DSA:3.40.50.1390,IPR006119,IPR038109,PF07508, IPR011109,SSF53041,PTHR30461,Coil, PS51736,cd00338,PF00239
MPYCLYVRKSRADAEAEARGEGETLTRHINALLDLAKRRHLDITQIYREIVSGETIAARPVMQQLLSEVEQGLWDGVLVMEVERLARGDTVDQGIVAQTFKFSDTKIITPIKDYDPNNEFDEEYFEFGLFMSRREYKTINRRLQRGRIASVKEGKYVGSQSPYGYQREKLVGDKGYTLAPLPAEADIVRLIFQLYTNGEEQEDGSYKRLGVSRIVRRLNDMRIPPRKSNHWSPATIRDILINPVYIGKIRWNWRKDSKKMVDGRVVIARPRSSIDDCVLADGKHPPLIDDATFALAQEYMAQNPPHPIGERNKVKNPLSGLVVCAKCGKKMVRRPYNDRNQADTLLCADTACDNISSALFYVEERVLQALSDWLAEYRLQWETADDTSDNASAVDLKEKALRRLATEYDTLNKQLDNAHDLLEQGVYTTEQFLDRSRKLSERIKKNEADRSTLGADIAADKKRERGRKQIIPKVEKLLDVYDSLPSAKAKNDMLKEVLEKVVYLKTKNGRWNNAPDDFEITLYPKIPKSD

SEQ ID NO: 3301 - protein, 530 aa, Unknown
  Description of Unknown: Integrase B3302 sequence
  cd00338,SM00857,G3DSA:1.10.10.2600,IPR036162,PS51737, G3DSA:3.40.50.1390,IPR006119,IPR038109,PF07508,IPR011109, SSF53041,PTHR30461,PS51736,Coil,PF00239
MEQYLIYLRKSRSDLEAEAHGEGETLSRHEHTLLELAKRQHLNVTDIYREVVSGDTIAARPMMQRVLSEVEQGVWSGVLVMEVERLARGDTIDQGIIAQTFKFSGTKIITPIKTYDPDNEFDEEYFEFGLFMSRREYKIINRRLQRGRLASAKEGKWPSGLAPFGYRRVKLKNEKGCSLEPIEEQAAIVRMIFDLYTVGLQDEDGSARPLSLGSIATRLNDMHIPSPSGSQWARITIRGIIKNPTYIGMVRWGSRETKKKVVDGKVVSVRGSADPEKECVFKGIHPPLVPKETFELANDKLARSENTSTHKEKVVRNPLAGLLVCSECGRQMMRMINPVHPDMPVVRCPRRGCPNCSSYLPIVEERVIQGLSEWMKGYELEWSSAAASSSVSSVGVREKALASAEAELRKLQQQLERTHDFLEQGIYDTDTFLSRSRMLSDKIAAAKDSVTRCSRELTEEKLRETSRRDIIPKVKNLLDVYPLLETAEEKNALLKEVLEKVVYQKLNEKRKKSPDGFTIEIYPRIPKSEK

SEQ ID NO: 3302 - protein, 530 aa, Unknown
  Description of Unknown: Integrase B3303 sequence
  SM00857,G3DSA:1.10.10.2600,IPR036162,PS51737, G3DSA:3.40.50.1390,IPR006119,IPR038109,PF07508, IPR011109,SSF53041,PTHR30461,Coil, PS51736,cd00338,PF00239
MPYCLYVRKSRADAEAEARGEGETLTRHINALLDLAKRRHLDITQIYREIVSGETIAARPVMQQLLSEVEQGLWDGVLVMEVERLARGDTVDQGIVAQTFKFSDTKIITPIKDYDPNNEFDEEYFEFGLFMSRREYKTINRRLQRGRIASVKEGKYVGSQSPYGYQREKLVGDKGYTLAPLPAEADIVRLIFQLYTKGEEQEDGSYKRLGVSRIVRRLNDMRIPPRKSTHWSPATIRDILINPVYIGKIRWNWRKDSKKMVDGRVVIARPRSSIDDCVLADGKHPPLIDDATFALAQEYMAQNPPHPIGERNKVKNPLSGLVVCAKCGKKMVRRPYNDRNQADTLLCADTACDNISSALFYVEERVLQALSDWLAEYRLQWEIADDTSDNASAVNLKEKALRRLDTEYDTLNKQLDNAHDLLEQGVYTTEQFLDRSRKLSERIKKNEADRFTLGADIAADKKREQGRKQIIPKVEKLLDVYDSLPSAKAKNDMLKEVLEKVVYLKTKNGRWNNAPDDFEITLYPKIPKSY

SEQ ID NO: 3303 - protein, 530 aa, Unknown
  Description of Unknown: Integrase B3304 sequence
  PTHR30461:SF3,cd00338,SM00857,G3DSA:1.10.10.2600,IPR036162, PF13408,PS51737,G3DSA:3.40.50.1390,IPR025827,IPR006119, IPR038109,PF07508,IPR011109,SSF53041,PTHR30461, PS51736,Coil,PF00239
MAKKKKPAGGIAVIYARYSSHNQRDVSIEQQIEACRKHAAELGLTIIATYEDRAISGRTDNRPAFQRLMHDAEKGKFSYVLAWKSNRMGRNMMQAMVNESRLMDCGIKVYYAEEDFDDSAAGRFALRSMMNVNQFYSDNLAEDVRRGLMDNANKCMVNGRQPLGYKRGKDGKVVVDEPAAAIVREVYARVASGELFTDIARDLNRRGIKTADKGEWNKNSFHRLCSNEKYRGIYIYGDVRIEGGIPTIIGDTLWYKVQEALRVKKLKRNGRHRPGDEDYLLTGKLRCGKCGGYMIGMSGRSKTGDIHYYYACQNRRVGRTCDKKNIRRDVIEPAVAQAIKEYCLTDDAIEWIADKTVEYWEKADRNLQLDSIEGDLAAVQSSISNVMKAIEMGVVTETTRDRLIELEKQRTDLKSKLALAKEEVVHVDRKKLISSLLLFRNGDIHDRQYQEDLFKTFLISVYVYDDDDNGHLKIVFNAFGDNNTVDLPIDFGETDNQSAFSDGAEKFDYSLHRSTRLKPSEEAQVAFLFV

SEQ ID NO: 3304 - protein, 530 aa, Unknown
  Description of Unknown: Integrase B3305 sequence
  PTHR30461:SF3,SM00857,G3DSA:1.10.10.2600,IPR036162,PF13408, IPR025827,PS51737,G3DSA:3.40.50.1390,IPR006119,IPR038109, PF07508,IPR011109,SSF53041,PF00239,PTHR30461, PS51736,Coil,cd00338
MAKKKKPAGGVAIIYARYSSHNQRDVSIEQQIEACRKHAAELGLTIIATYEDRAISGRTDNRPAFQRMMHDAENGKFSYVLAWKSNRMGRNMMQAMVNESRLMDCGIKVYYAEEDFDDSAAGRFALRSMMNVNQFYSDNLAEDVRRGLMDNASKCMANGKQPLGYKRGEDGKVVVDEPAAAIVREVYTRVASGELFTDIARDLNRRGIKTADKGEWNKNSFHRLCSNEKYRGIYIYGDVRIEGGIPAIIDDTLWYKVQEALRVKKLKRNGRHRPGDEDYLLTGKLRCGKCGGYMIGMSGRSKTGEIHYYYTCQNRRVGHTCDKKNIRRDVIEPAVAQAIKEYCLTDDAIEWIADKTVEYWEKADRNLQLDSIEGDLAAVQSSISNVMKAIEMGVVTETTRDRLIELEKQRTDLKSKLALAKEEVVHVDRKKLISSLLLFRNGDIHDRQYQEDLFKTFLISAYVYDDDDNGHLKIVFNAFGDNNTVDFPIDFGEADNQSAFFDGAEKFDYALHRSTRLKPSEEAQVAFLFV

SEQ ID NO: 3305 - protein, 530 aa, Unknown
  Description of Unknown: Integrase B3306 sequence
  SM00857,G3DSA:1.10.10.2600,IPR036162,PS51737,G3DSA:3.40.50.1390, IPR006119,IPR038109,PF07508,IPR011109,SSF53041, PF00239,PTHR30461,PS51736,Coil,cd00338
MEQYLIYLRKSRSDLEAEAHGEGETLSRHEHTLLELAKRQHLNVTDIYREVVSGDTIAARPMMQRVLSEVEQGVWSGVLVMEVERLARGDTIDQGIIAQTFKFSGTKIITPIKTYDPDNEFDEEYFEFGLFMSRREYKIINRRLQRGRLASAKEGKWPSGLAPFGYRRVKLKNEKGCSLEPIEEQAAIVRMIFDLYTVGLQDKDGSARPLSLGSIATRLNDMRIPSPSGSQWARITIRGIIKNPTYIGMVRWGSRETKKKVVDGKVVSVRGPADPEKECVFKGIHPPLIPKETFELANDKLARSENTSTHKEKVVRNPLAGLLVCSECGRQMMRMINPVHPDMPVVRCPRRGCPNCSSYLPIVEERVIQGLSEWMKGYELEWSSAAESSSVSSVGVREKALASAEAELRKLQQQLERTHDFLEQGVYDTDTFLSRSRMLSDKIAVAKDSVARCSRELTEEKLRETSRRDIIPKVRNLLDVYPLLETAEEKNALLKEVLEKVVYQKLNEKRKKSPDGFTIEIYPRIPKSEK

SEQ ID NO: 3306 - protein, 530 aa, Unknown
  Description of Unknown: Integrase B3307 sequence
  PTHR30461:SF3,SM00857,G3DSA:1.10.10.2600,IPR036162,PF13408, PS51737,G3DSA:3.40.50.1390,IPR025827,IPR006119,IPR038109, PF07508,IPR011109,SSF53041,PTHR30461, Coil,PS51736,cd00338,PF00239
MSKADILARYSTDNQNADSIEVQVEKCTEWCKQHGYAIVNVYADYAVSGMKDTRPQYNQMMQNLRAGEADTVVIYDQSRMFRKMTAWFAFRDELTEMGIKVISITQPMIGKDLRDPANFLVESNMAVFNQMWVLQTRQKVMEKMRYMAATQQHTGGKPALGYKVVLDGDKKRLAIDEAEAQIVHRIFDAYASGQSYREIIAGLNRDGIKTKRGSAYGVNSLHDLLKNKKYIGIVEYGAHPYSESGRRNTHGSVDENVIRVEIPDLAIIDRKTFDTVQQRMKENKKNQGGRPATRREYPLKGKIFCAECKSSMTVRISKGNLFYYVCAAQKRQHQCTARPIRCDYLEQRVADAVRAALGTPENKQFLIRILREQSEAIQGTAASSLLALIDEERNTTAQLNNAINAVLAGLMSDQLKAKIAELETRKSDIEKKITALKRQVDASRIPEENLTQMLDYIISSDSESAALFAIVARVEVGPDDITIWTIFDADPNGHIDFDSKEDVLITHGVPSGVPLVFITAFGMLKIQVRR

SEQ ID NO: 3307 - protein, 530 aa, Unknown
  Description of Unknown: Integrase B3308 sequence
  cd00338,SM00857,G3DSA:1.10.10.2600,IPR036162,PS51737, G3DSA:3.40.50.1390,IPR006119,IPR038109,PF07508,IPR011109, SSF53041,PTHR30461,PS51736,Coil,PF00239
MEQYLIYLRKSRSDIEAEAHGEGETLSRHEHTLLELAKRQHLNVTDIYREVVSGDTIAARPMMQRVLSEVEQGVWSGVLVMEVERLARGDTIDQGIIAQTFKFSGTKIITPIKTYDPDNEFDEEYFEFGLFMSRREYKIINRRLQRGRLASAKEGKWPSGLAPFGYRRVKLKNEKGCSLEPVEEQAAIVRMIFDLYTVGLQDEDGSARPLSLGSIATRLNDMHIPSPSGSQWARITIRGIIKNPTYIGMVRWGSRETKKKVVGGKVVSVRGPADPEKECVFKGIHPPLIPKETFELANDKLTRSENTSTHKEKVVRNPLAGLLVCSECGRQMMRMINPVHPDMPVVRCPRRGCPNCSSYLPIVEERVIQGLSEWMKGYELEWSSAAASSSVSSVGVREKALAGAEAELRKLQQQLERTHDFLEQGIYDTDTFLSRSRMLSDKIAAAKDSVARCSRELTEEKLRETSRRDIIPKVKNLLDVYPLLETAEEKNALLKEVLEKVVYQKLNEKRKKSPDGFTIEIYPRIPKSEK

SEQ ID NO: 3308 - protein, 530 aa, Unknown
  Description of Unknown: Integrase B3309 sequence
  SM00857,G3DSA:1.10.10.2600,IPR036162,PS51737, G3DSA:3.40.50.1390,IPR006119,IPR038109,PF07508, IPR011109,SSF53041,PF00239,PTHR30461, PS51736,Coil,cd00338
MEQYLIYLRKSRSDLEAEAHGEGETLSRHEHTLLELAKRQHLNVTDIYREVVSGDTIAARPMMQRVLSEVEQGVWSGVLVMEVERLARGDTIDQGIIAQTFKFSGTKIITPIKTYDPDNEFDEEYFEFGLFMSRREYKIINRRLQRGRLASAKEGKWPSGLAPFGYRRVKLKNEKGCSLEPIEEQAAIVRMIFDLYTVGLQDEDGSARPLSLGSIATRLNDMHIPSPSGSQWARITIRGIIKNPTYIGMVRWGSRETKKKVVDGKVVSVRGPADPEKECVFKGIHPPLIPKETFELANDKLTRSENTSTHKEKVVRNPLAGLLVCSECGRQMMRMINPVHPDMPVVRCPRRGCPNCSSYLPIVEERVIQGLSEWMKGYELEWSSAAASSSVSSVGVREKALASAEAELRKLQQQLERTHDFLEQGIYDTNTFLSRSRMLSDKIAAAKDSVARCSRELTEEKLRETSRREIIPKVKNLLDVYPLLETAEEKNALLKEVLEKVVYQKLNEKRKKSPDGFTIEIYPRIPKSEK

SEQ ID NO: 3309 - protein, 530 aa, Unknown
  Description of Unknown: Integrase B3310 sequence
  cd00338,SM00857,G3DSA:1.10.10.2600,IPR036162,PS51737, G3DSA:3.40.50.1390,IPR006119,IPR038109,PF07508,IPR011109, SSF53041,PTHR30461,PS51736,Coil,PF00239
MEQYLIYLRKSRSDLEAEAHGEGETLSRHEHTLLELAKRQHLNVTDIYREVVSGDTIAARPMMQRVLSEVEQGVWSGVLVMEVERLARGDTIDQGIIAQTFKFSGTKIITPIKTYDPDNEFDEEYFEFGLFMSRREYKIINRRLQRGRLASAKEGKWPSGLAPFGYRRVKLKNEKGCSLEPIEEQAAIVRMIFDLYTVGLQDEDGSARPLSLGSIATRLNDMHIPSPSGSQWARITIRGIIKNPTYIGMVRWGSRETKKKVVDGKVVSVRGPADPEKECVFKGIHPPLIPKETFELANDKLTRSENTSTHKEKVVRNPLAGLLVCSECGRQMMRMINPVHPDMPVVRCPRRGCPNCSSYLPIVEERVIQGLSEWMKGYELEWSSAAASSSVSSVGVREKALTSAEAELRKLQQQLERTHDFLEQGIYDTDTFLSRSRMLSDKIASAKDSVTRCSRELTEEKLRETSRRDIIPKVKNLLDVYPLLETAEEKNALLKEVLEKVVYQKLNEKRKKSPDGFTIEIYPRIPKSEK

SEQ ID NO: 3310 - protein, 530 aa, Unknown
  Description of Unknown: Integrase B3311 sequence
  SM00857,G3DSA:1.10.10.2600,IPR036162,PS51737, G3DSA:3.40.50.1390,IPR006119,IPR038109,PF07508, IPR011109,SSF53041,PF00239,PTHR30461, PS51736,Coil,cd00338
MEQYLIYLRKSRSDLEAEAHGEGETLSRHEHTLLELAKRQHLNVTDIYREVVSGDTIAARPMMQRVLSEVEQGVWSGVLVMEVERLARGDTIDQGIIAQTFKFSGTKIITPIKTYDPDNEFDEEYFEFGLFMSRREYKIINRRLQRGRLASAKEGKWPSGLAPFGYRRVKLKNEKGCSLEPIEEQAAIVRMIFDLYTVGLQDEDGSARPLSLGSIATRLNDMHIPSPSGSQWARITIRGIIKNPTYIGMVRWGSRETKKKVVDGKVVSVRGPADPEKECVFKGIHPPLIPKETFELANDKLTRSENTSTHKEKVVRNPLAGLLVCSECGRQMMRMINPVHPDMPVVRCPRRGCPNCSSYLPIVEERVIQGLSEWMKGYELEWSSAAASSSVSSVGVREKALASAEAELRKLQQQLERTHDFLEQGIYDTDTFLSRSRMLSDKIASAKDSVTRCSRELTEEKLRETSRRDIIPKVKNLLDVYPLLETAEEKNALLKEVLEKVVYQKLNEKRKKSPDGFTIEIYPRIPKSEK

SEQ ID NO: 3311 - protein, 530 aa, Unknown
  Description of Unknown: Integrase B3312 sequence
  PTHR30461:SF3,SM00857,G3DSA:1.10.10.2600,IPR036162,PF13408, IPR025827,PS51737,G3DSA:3.40.50.1390,IPR006119,IPR038109, PF07508,SSF53041,IPR011109,PTHR30461,Coil, PS51736,cd00338,PF00239
MIAAIYSRKSKFTGKGESIENQIQLCMDYAKNLGINEFLVYEDEGFSGKSMDRPKFKEMLKDAKDKKFDYLICYRLDRISRNVSDFSTLIEDLNKLNISFVSIKEQFDTSTPMGRAMMYISSVFAQLERETIAERVRDNMYELARTGRWLGGMPPYGFISTQINYYDENMNQRKMYKLKVDEDTIEIVKLIFDKYLELRSLSKLYKYMYENGIKGTRGGNLDPSALSLILKNPAYVKADKSVVDYLRKSNIDVMGDIDKIHGILTYAKNTDSPIAAVAKHKGVIDSDKWIEAQRLLNSNKAKAPRAGTGSKALLSGLLKCSKCGSNMRITYKNSKSGTIYYYICGTKKSLGVSACDCKNIRSDKAESKVIDELKNKSIKSIMSSYKDSKLENSKNSKNIKTEINSINNQIKEKETYIDNLVMQLAKVTESSASTFIINKLESLNNDLSNLKSQLESLNTMSMENKQVDININMLIDNLNKFNKEIDTSDINKKRLLLSTVVDYMTWDSDTDTIKVNLIGINPSNTIASDK

SEQ ID NO: 3312 - protein, 530 aa, Unknown
  Description of Unknown: Integrase B3313 sequence
  cd00338,SM00857,G3DSA:1.10.10.2600,IPR036162,PS51737, G3DSA:3.40.50.1390,IPR006119,IPR038109,PF07508,IPR011109, SSF53041,PTHR30461,PS51736,Coil,PF00239
MEQYLIYLRKSRSDLEAEAHGEGETLSRHEHTLLELAKRQHLNVTDIYREVVSGDTIAARPMMQRVLSEVEQGVWSGVLVMEVERLARGDTIDQGIIAQTFKFSGTKIITPIKTYDPDNEFDEEYFEFGLFMSRREYKIINRRLQRGRLASAKEGKWPSGLAPFGYRRVKLKNEKGCSLEPIEEQAAIVRMIFDLYTVGLQDEDGSARPLSLGSIATRLNDMHIPSPSGSQWARITIRGIIKNPTYIGMVRWGSRETKKKVVDGKVVSVRGPADPEKECIFKGIHPPLIPKETFELANDKLARSENTSTHKEKVVRNPLAGLLVCSECGRQMMRMINPVHPDMPVVRCPRRGCPNCSSYLPIVEERVIQGLSEWMKGYELEWSSATASSSVSSVGVREKALASAEAELRKLQQQLERTHDFLEQGIYDTDTFLSRSRMLSDKIAAAKDSVTRCSRELTEEKLRETSRRDIIPKVKNLLDVYPLLETAEEKNALLKEVLEKVVYQKLNEKRKKSPDGFTIEIYPRIPKSEK

SEQ ID NO: 3313 - protein, 530 aa, Unknown
  Description of Unknown: Integrase B3314 sequence
  SM00857,G3DSA:1.10.10.2600,IPR036162,PS51737, G3DSA:3.40.50.1390,IPR006119,IPR038109,PF07508, IPR011109,SSF53041,PF00239,PTHR30461, PS51736,Coil,cd00338
MEQYLIYLRKSRSDLEAEAHGEGETLSRHEHTLLELAKRQHLNVTDIYREVVSGDTIAARPMMQRVLSEVEQGVWSGVLVMEVERLARGDTIDQGIIAQTFKFSGTKIITPIKTYDPDNEFDEEYFEFGLFMSRREYKIINRRLQRGRLASAKEGKWPSGLAPFGYRRVKLKNEKGCSLEPIEEQAAIVRMIFDLYTVGLQDEDGSARPLSLGSIATRLNDMHIPSPSGSQWARITIRGIIKNPTYIGMVRWGSRETKKKVVDGKVVSVRGPADPEKECVFKGIHPPLIPKETFELANDKLTRSENTSTHKEKVVRNPLAGLLVCSECGRQMMRMMNPVHPDMPVVRCPRRGCPNCSSYLPIVEERVIQGLSEWMKGYELEWSSAAASSSVSSVGVREKALASAEAELRKLQQQLERTHDFLEQGIYDTDTFLSRSRMLSDKISAAKESVARCSRELTEEKLRETSRRDIIPKVKNLLDVYPLLETAEEKNALLKEVLEKVVYQKLNEKRKKSPDGFTIEIYPRIPKSEK

SEQ ID NO: 3314 - protein, 530 aa, Unknown
  Description of Unknown: Integrase B3315 sequence
  cd00338,SM00857,G3DSA:1.10.10.2600,IPR036162,PS51737, G3DSA:3.40.50.1390,IPR006119,IPR038109,PF07508,SSF53041, IPR011109,PTHR30461,PS51736,Coil,PF00239
MEQYLIYLRKSRSDLEAEAHGEGETLSRHEHTLLELAKRQHLNVTDIYREVVSGDTIAARPMMQRVLSEVEQSVWSGVLVMEVERLARGDTIDQGIIAQTFKFSGTKIITPIKTYDPDNEFDEEYFEFGLFMSRREYKIINRRLQRGRLASAKEGKWPSGLAPFGYRRVKLKNEKGCSLEPIEEQAAIVRMIFDLYTVGLQDEDGSARPLSLGSIATRLNDMHIPSPSGSQWARITIRGIIKNPTYIGMVRWGSRETKKKVVDGKVVSVRGPADPEKECVFKGIHPPLIPKETFELANDKLIRSENTSTHKEKVVRNPLAGLLVCSECGRQMMRMINPVHPDMPVVRCPRRGCPNCSSYLPIVEERVIQGLSEWMKGYELEWSSAAASSSVSSVGVREKALASAEAELRKLQQQLERTHDFLEQGIYDTDTFLSRSRMLSDKIAAAKDSVARCSRELTEEKLRETSRRDIIPKVKNLLDVYPLLETAEEKNALLKEALEKVVYQKLNEKRKKSPDGFTIEIYPRIPKSEK

SEQ ID NO: 3315 - protein, 530 aa, Unknown
  Description of Unknown: Integrase B3316 sequence
  cd00338,SM00857,G3DSA:1.10.10.2600,IPR036162, PS51737,G3DSA:3.40.50.1390,IPR006119,IPR038109, PF07508,IPR011109,SSF53041,PTHR30461, PS51736,Coil,PF00239
MYEDLSYTYGSGAYAIYLRKSRKDLDAEAMGEGETLSRHLDILKALAKRMELNVVKIYAEVVSGESIDARPQMQELLRDVETGIYDGVLVVEVERLARGDTSDQGRVAKTFKFSNTLIITPSKTYDPNNEFDEEYFEFGLFMSRREYKTIRRRLVAGSDASRREGKYTGNVPPYGYARKKLKKEKGWTLEIIPDQAQVVRMIFDWYRNGMQGIPVGYTAISDELNRLSIPSPSSTRWTPNGIQGILRNPVYAGYIKSGYRKEVKKIVDGKLTRSRPLNNDYTLYPGRHESIISQETWDAVHNRMLKRVLPSSSSRVKPQQNPLAGLVCCSQCGRIMQRRPYQSGRTATLICPTKGCSTVASDLSMVEQRLLDALDQWLVSGTLPDPDHLPDNSDRLDLLRQAVSSCSEDLSEADRQLQKQYDLLEKGIYDEVTFFERSAIMKKRKSELTSRLKDLQTELQTETERNEAVKNLLPTLQTIHDTYPKLTSAELKNRLLKEVIDHVEYSKSENGRWGHPDNFSLKIYPRVTPA

SEQ ID NO: 3316 - protein, 530 aa, Unknown
  Description of Unknown: Integrase B3317 sequence
  SM00857,G3DSA:1.10.10.2600,IPR036162,PS51737,G3DSA:3.40.50.1390, IPR006119,IPR038109,PF07508,SSF53041,IPR011109, PF00239,PTHR30461,PS51736,Coil,cd00338
MEQYLIYLRKSRSDLEAEAHGEGETLSRHEHTLLELAKRQHLNVTDIYREVVSGDTIAARPMMQRVLSEVEQGVWSGVLVMEVERLARGDTIDQGIIAQTFKFSGTKIITPIKTYDPDNEFDEEYFEFGLFMSRREYKIINRRLQRGRLASAKEGKWPSGLAPFGYRRVKLKNEKGCSLEPIEEQAAIVRMIFDLYTVGLQDEDGSARSLSLGSIATRLNDMHIPSPSGSQWARITIRGIIKNPTYIGMVRWGSRETKKKVVDGKVVSVRGPADPEKECIFKGIHPPLVPKETFELANDKLARSENTSTHKEKVVRNPLAGMLVCSECGRQMMRMINPVHPDMPVVRCPRRGCPNCSSYLPIVEERVIQGLSEWMKGYELEWSSAAASSSVSSVGVREKALASAEAELRKLQQQLERTHDFLEQGIYDTDTFLSRSRMLSDKIAAAKESVARCSRELTEEKLREASRREIIPKVKNLLDVYPLLETAEEKNALLKEVLEKVVYQKLNEKRKKSPDGFTIEIYPRIPKSEK

SEQ ID NO: 3317 - protein, 530 aa, Unknown
  Description of Unknown: Integrase B3318 sequence
  cd00338,SM00857,G3DSA:1.10.10.2600,IPR036162, PS51737,G3DSA:3.40.50.1390,IPR006119,IPR038109, PF07508,IPR011109,SSF53041,PTHR30461, PS51736,Coil,PF00239
MEQYLIYLRKSRSDLEAEAHGEGETLSRHEHTLLELAKRQHLNVTDIYREVVSGDTIAARPMMQRVLSEVEQGVWSGVLVMEVERLARGDTIDQGIIAQTFKFSGTKIITPIKTYDPDNEFDEEYFEFGLFMSRREYKIINRRLQRGRLASAKEGKWPSGLAPFGYRRVKLKNEKGCSLEPIEEQAAIVRMIFDLYTVGLQDEDGSARPLSLGSIATRLNDMHIPSPSGSQWARITIRGIIKNPTYIGMVRWGSRETKKKVVDGKVVSVRGPADPEKECIFKGIHPPLIPKETFELANDKLARSENTSTHKEKVVRNPLAGLLVCSECGRQMMRMINPVHPDMPVVRCPRRGCPNCSSYLPIVEERVIQGLSEWMKGYELEWSSAAASSSVSSVGVREKALASAEAELRKLQQQLERTHDFLEQGIYDTDTFLSRSRMLSDKIAAAKESVARCSRELTEEKLRETSRRDIIPKVKNLLDVYPLLETAEEKNALLKEVLEKVVYQKLNEKRKKSPDGFTIEIYPRIPKSEK

SEQ ID NO: 3318 - protein, 530 aa, Unknown
  Description of Unknown: Integrase B3319 sequence
  SM00857,G3DSA:1.10.10.2600,IPR036162,PS51737,G3DSA:3.40.50.1390, IPR006119,IPR038109,PF07508,IPR011109,SSF53041, PF00239,PTHR30461,PS51736,Coil,cd00338
MEQYLIYLRKSRSDLEAEAHGEGETLSRHEHTLLELAKRQHLNVTDIYREVVSGDTIAARPMMQRVLSEVEQGVWSGVLVMEVERLARGDTIDQGIIAQTFKFSGTKIITPIKTYDPDNEFDEEYFEFGLFMSRREYKIINRRLQRGRLASAKEGKWPSGLAPFGYRRVKLKNEKGCSLEPIEEQAAIVRMIFDLYTVGLQDEDGSARPLSLGSIAARLNDMRVPSPSGSQWTRITIRGIIKNPTYIGMVRWGSRETKKKVVDGKVVSVRGPADPEKECVFKGIHPPLIPKETFELANDKLTRSENTSTHTEKVVRNPLAGLLVCSECGRQMMRMMNPVHPDMPVVRCPRRGCPNCSSYLPIVEERVIQGLSEWMKGYELEWSSAAASSSVSSVGVREKALASAEAELRKLQQQLERTHDFLEQGIYDTDTFLSRSRMLSDKISAAKESVARCSRELTEEKLRETSRRDIIPKVKNLLDVYPLLETAEEKNALLKEVLEKVVYQKLNEKRKKSPDGFTIEIYPRIPKSEK

SEQ ID NO: 3319 - protein, 530 aa, Unknown
  Description of Unknown: Integrase B3320 sequence
  cd00338,SM00857,G3DSA:1.10.10.2600,IPR036162, PS51737,G3DSA:3.40.50.1390,IPR006119,IPR038109, PF07508,IPR011109,SSF53041,PTHR30461, PS51736,Coil,PF00239
MEQYLIYLRKSRSDLEAEAHGEGETLSRHEHTLLELAKRQHLNVTDIYREVVSGDTIAARPMMQRVLSEVEQGVWSGVLVMEVERLARGDTIDQGIIAQTFKFSGTKIITPIKTYDPDNEFDEEYFEFGLFMSRREYKIINRRLQRGRLASAKEGKWPSGLAPFGYRRVKLKNEKGCSLEPIEEQAAIVRMIFDLYTVGLQDEDGSARPLSLGSIATRLNDMHIPSPSGSQWARITIRGIIKNPTYIGMVRWGSRETKKKVVDGKVVSVRGPADPEKECVFKGIHPPLIPKETFELANDKLTRSENTSTHKEKVVRNPLAGLLVCSECGRQMMRMINPVHPDMPVVRCPRRGCPNRSSYLPIVEERVIQGLSEWMKGYELEWSSAAASSSVSSVGVREKALASAEAELRKLQQQLERTHDFLEQGIYDTDTFLSRSRMLSDKIAAAKDSVARCSRELTEEKLRETSRRDIIPKVKNLLDVYPLLETAEEKNALLKEVLEKVVYQKLNEKRKKSPDGFTIEIYPRIPKSEK

SEQ ID NO: 3320 - protein, 530 aa, Unknown
  Description of Unknown: Integrase B3321 sequence
  cd00338,SM00857,G3DSA:1.10.10.2600,IPR036162,PS51737, G3DSA:3.40.50.1390,IPR006119,IPR038109,PF07508,SSF53041, IPR011109,PTHR30461,PS51736,Coil,PF00239
MEQYLIYLRKSRSDLEAEAHGEGETLSRHEHTLLELAKRQHLNVTDIYREVVSGDTIAARPMMQRVLSEVEQGVWSGVLVMEVERLARGDTIDQGIIAQTFKFSGTKIITPIKTYDPDNEFDEEYFEFGLFMSRREYKIINRRLQRGRLASAKEGKWPSGLAPFGYRRVKLKNEKGCSLEPIEEKAAIVRMIFDLYTVGLQDEDGSARPLSLGSIATRLNDMHIPSPSGSQWARITIRGIIKNPTYIGMVRWGSRETKKKVVDGKVVSVRGPADPEKECVFKGIHPPLVPKETFELANDKLARSENTSTHKEKVVRNPLAGLLVCSECGRQMMRMINPVHPDMPVVRCPRRGCPNCSSYLPIVEERVIQGLSEWMKGYELEWSSAAASSSVSSVGVREKALASAEAELRKLQQQLERTHDFLEQGIYDTDTFLSRSRMLSDKIAAAKDSVARCSRELTEEKLRETSRRDIIPKVKNLLDVYPLLETAEEKNALLKEVLEKVVYQKLNEKRKKSPDGFTIEIYPRIPKSEK

SEQ ID NO: 3321 - protein, 530 aa, Unknown
  Description of Unknown: Integrase B3322 sequence
  SM00857,G3DSA:1.10.10.2600,IPR036162,PS51737, G3DSA:3.40.50.1390,IPR006119,IPR038109,PF07508, IPR011109,SSF53041,PF00239,PTHR30461, PS51736,Coil,cd00338
MEQYLIYLRKSRSDLEAEAHGEGETLSRHEHTLLELAKRQHLNVTDIYREVVSGDTIAARPMMQRVLSEVEQGVWSGVLVMEVERLARGDTIDQGIIAQTFKFSGTKIITPIKTYDPDNEFDEEYFEFGLFMSRREYKIINRRLQRGRLASAKEGKWPSGLAPFGYRRVKLKNEKGCSLEPIEEQAAIVRMIFDLYTVGLQDEDGSARPLSLGSIATRLNDMRIPSPSGSQWARITIRGIIKNPTYIGMVRWGSRETKKKVVDGKVVSVRGPADPEKECVFKGIHPPLIPKETFELANDKLTRSENTSTHKEKVVRNPLAGLLVCSECGRQMMRMINPVHPDMPVVRCPRRGCPNCSSYLPIVEERVIQGLSEWMKGYELEWSSAAASSSVSSVGVREKALASAEAELRKLQQQLERTHDFLEQGIYDTDTFLSRSRMLSDKIAAAKDSVTHCSRELTEEKLRETSRRDIIPKVKNLLDVYPLLETAEEKNALLKEVLEKVVYQKLNEKRKKSPDGFTIEIYPRIPKSEK

SEQ ID NO: 3322 - protein, 530 aa, Unknown
  Description of Unknown: Integrase B3323 sequence
  cd00338,SM00857,G3DSA:1.10.10.2600,IPR036162,PS51737, G3DSA:3.40.50.1390,IPR006119,IPR038109,PF07508,IPR011109, SSF53041,PTHR30461,PS51736,Coil,PF00239
MEQYLIYLRKSRSDLEAEAHGEGETLSRHEHTLLELAKRQHLNVTDIYREVVSGDTIAARPMMQRVLSEVEQGVWSGVLVMEVERLARGDTIDQGIIAQTFKFSGTKIITPIKTYDPDNEFDEEYFEFGLFMSRREYKIINRRLQRGRLASAKEGKWPSGLAPFGYRRVKLKNEKGCSLEPIEEQAAIVRMIFDLYTVGLQDEDGSARPLSLGSIAARLNDMHIPSPSGSQWARITIRGIIKNPTYIGMVRWGSRETKKKVVDGKVVSVRGPADPEKECIFKGIHPPLIPKETFELANDKLTRSENTSTHKEKVVRNPLAGLLVCSECGRQMMRMINPVHPDMPVVRCPRRGCPNCSSYLPIVEERVIQGLSEWMKGYELEWSSAAASSSVSSVGVREKALASAEAELRKLQQQLERTHDFLEQGIYDTDTFLSRSRMLSDKIAAAKDSVTRCSRELTEEKLRETSRRDIIPKVKNLLDAYPLLETAEEKNALLKEVLEKVVYQKLNEKRKKSPDGFIIEIYPRIPKSEK

SEQ ID NO: 3323 - protein, 530 aa, Unknown
  Description of Unknown: Integrase B3324 sequence
  cd00338,SM00857,G3DSA:1.10.10.2600,IPR036162, PS51737,G3DSA:3.40.50.1390,IPR006119,IPR038109, PF07508,IPR011109,SSF53041,PTHR30461, PS51736,Coil,PF00239
MEQYCIYLRKSRADAEAEARGEGETLARHEKMLLAVAKRDRYHISKIYREIVSGETIAARPQMQQLLQDVEQGLYAGVLVMEVERLARGDTIDQGIMAQTFRYSDTKIITPMKVYDPNNEFDEEYFEFGLFMSRREYKTINRRLQRGRAASAKEGKYAGNITPYGYTRVKLEHDKGFRLVPDPEEAKIVQLVYDWYLNGEPQEDGSRKRLGSTYIARKLNAAHVPTRHGGKWGVNSVRGILINPVYTGKIRWNYRPAKKSMENGAVVKTRSEAEEGDYILADGLHEALISEEAYHAVQEDMHHKAVSGTHDGKKLCNPLAGLAYCTCCKHVMVRRPHNKRFHTDTLMCNTLDCPNVSADLEAVERRVISGIRDWLKQYEVEWSKNHQEPSAMDAQIATKKAAIQAAEKEQDVLKKQLDKAYDFLEQGIYDTDVFLSRSQALNDRIQDTQNSIKSLQEELHREQMRKEGIEEIIPKAKHVLEVYGSLTDAKSKNELLKSVLERVEYYKGKSTRWSGNPDNFEVVLFPKLPK

SEQ ID NO: 3324 - protein, 530 aa, Unknown
  Description of Unknown: Integrase B3325 sequence
  SM00857,G3DSA:1.10.10.2600,IPR036162,PS51737,G3DSA:3.40.50.1390, IPR006119,IPR038109,PF07508,IPR011109,SSF53041, PF00239,PTHR30461,PS51736,Coil,cd00338
MEQYLIYLRKSRSDIEAEAHGEGETLSRHEHTLLELAKRQHLNVTDIYREVVSGDTIAARPMMQRVLSEVEQGVWSGVLVMEVERLARGDTIDQGIIAQTFKFSGTKIITPIKTYDPDNEFDEEYFEFGLFMSRREYKIINRRLQRGRLASAKEGKWPSGLAPFGYRRVKLKNEKGCSLEPIEEQAAIVRMIFDLYTVGLQDEDGSARPLSLGSIATRLNDMHIPSPSGSQWARITIRGIIKNPTYIGMVRWGSRETKKKVVDGKVVSVRGPADPEKECVFKGIHPPLIPKETFELANDKLTRSENTSTHKEKVVRNPLAGLLVCSECGRQMMRMINPVHPDMPVVRCPRRGCPNCSSYLPIVEERVIQGLSEWMKGYELEWSSAAASSSVSSVGVREKALASAEAELRKLQQQLERTHDFLEQGIYDTDTFLSRSRMLSDKIAAAKESVARCSRELTEEKLREASRRDIIPKVKNLLDVYPLLETAEEKNALLKEVLEKVVYQKLNEKRKKSPDGFTIEIYPRIPKSEK

SEQ ID NO: 3325 - protein, 530 aa, Unknown
  Description of Unknown: Integrase B3326 sequence
  cd00338,SM00857,G3DSA:1.10.10.2600,IPR036162, PS51737,G3DSA:3.40.50.1390,IPR006119,IPR038109, PF07508,IPR011109,SSF53041,PTHR30461, PS51736,Coil,PF00239
MEQYLIYLRKSRSDLEAEAHGEGETLSRHEHTLLELAKRQHLNVTDIYREVVSGDTIAARPMMQRVLSEVEQGVWSGVLVMEVERLARGDTIDQGIIAQTFKFSGTKIITPIKTYDPDNEFDEEYFEFGLFMSRREYKIINRRLQRGRLASAKEGKWPSGLAPFGYRRVKLKNEKGCSLEPIEEQAAIVRMIFDLYTVGLQDEDGSARPLSLGSIATRLNDMHIPSPSGSQWARITIRGIIKNPTYIGMVRWGSRETKKKVVDGKVVSVRGPADPEKECVFKGIHPPLVPKETFELANDKLTRSENTSTHKEKVVRNPLAGLLVCSECGRQMMRMINPVHPDMPVVRCPRRGCPNCSSYLPIVEERVIQGLSEWMKGYELEWSSTAASSSVSSVGVREKALASAEAELRKLQQQLERTHDFLEQGIYDTDTFLSRSRMLSDKIAAAKDSVTRCSRELTEEKLRETSRRDIIPKVKNLLDVYPLLETAEEKNALLKEVLEKVVYQKLNEKRKKSPDGFTIEIYPRIPKSEK

SEQ ID NO: 3326 - protein, 530 aa, Unknown
  Description of Unknown: Integrase B3327 sequence
  cd00338,SM00857,G3DSA:1.10.10.2600,IPR036162,PS51737, G3DSA:3.40.50.1390,IPR006119,IPR038109,PF07508,IPR011109, SSF53041,PTHR30461,PS51736,Coil,PF00239
MEQYLIYLRKSRSDLEAEAHGEGETLSRHEHTLLELAKRQHLNVTDIYREVVSGDTIAARPMMQRVLSEVEQGVWSGVLVMEVERLARGDTIDQGIIAQTFKFSGTKIITPIKTYDPDNEFDEEYFEFGLFMSRREYKIINRRLQRGRLASAKEGKWPSGLAPFGYRRVKLKNEKGCSLEPIEEQAAIVRMIFDLYTVGLQDEDGSARPLSLGSIAARLNDMRVPSPSGSQWTRITIRGIIKNPTYIGMVRWGSRETKKKVVDGKVVSVRGPADPEKECVFKGIHPPLIPKETFELANDKLTRSENTSTHKEKVVRNPLAGLLVCSECGRQMMRMINPVHPDMPVVRCPRRGCPNCSSYLPIVEERVIQGLSEWMKGYELEWSSAAASSSVSSVGVREKALAGAEAELRKLQQQLERTHDFLEQGIYDTDTFLSRSRMLSDKIAAAKDSVARCSRELTEEKLRETSRRDIIPKVKNLLDVYPLLETAEEKNALLKEVLEKVVYQKLNEKRKKSPDGFTIEIYPRIPKSEK

SEQ ID NO: 3327 - protein, 530 aa, Unknown
  Description of Unknown: Integrase B3328 sequence
  SM00857,G3DSA:1.10.10.2600,IPR036162,PS51737, G3DSA:3.40.50.1390,IPR006119,IPR038109,PF07508, IPR011109,SSF53041,PTHR30461,Coil, PS51736,cd00338,PF00239
MEQYLIYLRKSRSDIEAEAHGEGETLSRHEHTLLELAKRQHLNVTDIYREVVSGDTIAARPMMQRVLSEVEQGVWSGVLVMEVERLARGDTIDQGIIAQTFKFSGTKIITPIKTYDPDNEFDEEYFEFGLFMSRREYKIINRRLQRGRLASAKEGKWPSGLAPFGYRRVKLKNEKGCSLEPIEEQAAIVRMIFDLYTVGLQDEDGSARPLSLGSIATRLNDMHIPSPSGSQWARITIRGIIKNPTYIGMVRWGSRETKKKVVDGKVVSVRGPADPEKECVFKGIHPPLIPKETFELANDKLTRSENTSTHKEKVVRNPLAGLLVCSECGRQMMRMINPVHPDMPVVRCPRRGCPNCSSYLPIVEERVIQGLSEWMKGYELEWSSAAASSSVSSVGVREKALASAEAELRKLQQQLERTHDFLEQGIYDTDTFLSRSRMLSDKIAAAKDSVARCSRELTEEKLRETSRRDIIPKVKNLLDVYPLLETAEEKNALLKEVLEKVVYQKLNEKRKKSPDGFTIEIYPRIPKSEK

SEQ ID NO: 3328 - protein, 530 aa, Unknown
  Description of Unknown: Integrase B3329 sequence
  PTHR30461:SF3,cd00338,SM00857,G3DSA:1.10.10.2600,IPR036162, PF13408,PS51737,G3DSA:3.40.50.1390,IPR025827,IPR006119, IPR038109,PF07508,IPR011109,SSF53041,PTHR30461, PS51736,Coil,PF00239
MAKKKKPTGGVAIIYARYSSHNQRDVSIEQQIEACRKHAAELGLTIIATYEDWAISGRTDNRPAFQRMMHDAENGKFSYVLAWKSNRMGRNMMQAMVNESRLMDCGIKVYYAEEDFDDSAAGRFALRSMMNVNQFYSDNLAEDVRRGLMDNASKCMANGKQPLGYKRGEDGKVVVDEPAAAIVREVYVRVASGELFTDIARDLNRRGIKTADKGEWNKNSFHRLCSNEKYRGIYIYGDVRIEGGIPTIIDDTLWYKVQEALRVKKLKRNGRHRPGDEDYLLTGKLRCGKCGGYMIGMSGRSKTGDIHYYYACQNRRVGRTCDKKNIRRDVIEPAVAQAIKEYCLTDDAIEWIADKTVEYWEKADRNLQLDSIEGDLAAVQSSISNVMKAIEMGVVTETTRDRLIELEKQRTDLKSKLALAKEEVVHVDRKKLISSLLLFRNGDIHDRQYQEDLFKTFLISAYVYDDDDNGHLKIVFNAFGDNNTVDLPIDFGETDNQSAFFDRAEKFDYALHRSTRLKPSEEAQVAFLFV

SEQ ID NO: 3329 - protein, 530 aa, Unknown
  Description of Unknown: Integrase B3330 sequence
  cd00338,SM00857,G3DSA:1.10.10.2600,IPR036162,PS51737, G3DSA:3.40.50.1390,IPR006119,IPR038109,PF07508,IPR011109, SSF53041,PTHR30461,PS51736,Coil,PF00239
MEQYLIYLRKSRSDLEAEAHGEGETLSRHEHTLLELAKRQHLNVTDIYREVVSGDTIAARPMMQRVLSEVEQGVWSGVLVMEVERLARGDTIDQGIIAQTFKFSGTKIITPIKTYDPDNEFDEEYFEFGLFMSRREYKIINRRLQRGRLASAKEGKWPSGLAPFGYRRVKLKNEKGCSLEPVEEQAAIVRMIFDLYTVGLQDEDGSAHPLSLGSIATRLNDMHIPSPSGSQWARITIRGIIKNPTYIGMVRWGSRETKKKVVDGKVVSVRGPADPEKECVFKGIHPPLVPKETFELANDKLARSENTSTHKEKVVRNPLAGLLVCSECGRQMMRMINPVHPDMPVVRCPRRGCPNCSSYLPIVEERVIQGLSEWMKGYELEWSSAAASSSVSSVGVREKALASAEAELRKLQQQLERTHDFLEQGIYDTDTFLSRSRMLSDKIAAAKDSVARCSRELTEEKLRETSRRDIIPKVKNLLDVYPLLETAEEKNALLKEVLEKVVYQKLNEKRKKSPDGFTIEIYPRIPKSEK

SEQ ID NO: 3330 - protein, 530 aa, Unknown
  Description of Unknown: Integrase B3331 sequence
  PTHR30461:SF3,cd00338,SM00857,G3DSA:1.10.10.2600,IPR036162, PF13408,IPR025827,G3DSA:3.40.50.1390,PS51737,IPR006119, IPR038109,PF07508,IPR011109,SSF53041, PTHR30461,PS51736,Coil,PF00239
MYEEIKQVVLYVRYSSANQTEQSIEGQVRVCSDFCQRHGFRIIEIYADRATSASKDIEKRVEFLRMIKDAEKKNFQAVIVYKLDRFARSRYDSANYKYRLRKNGVQLISATENISNDPEGIILESVLEGMAEFYSAELSQKITRGLKESAYKHNSIGGAIPLGYKSEGKKLVIDEETAPIVRQAFEMYAEGHSVADICRLFNARGYKTSKGTNFGKSSFSKMFHNERYIGVYQFHDYRAEDAIPAIIDKKLFYQVQARMKSSGKSPGQFKARHIYLLSGKLYCGHCGSKMNANSNGTAGYSYYECYGKKNLHKDCHKRNLRKDFIEDIVINDAMSLLTDENINQIAEVTIRTNLHDIEHCTDIPAIKDKLHETKLSLSNITKAIENGLAPETLVKRMVELEKDKKTLEEELKKEEKKVSYLDKEQVIFWLNQFKNGNIEDEDFRRQLIDLFVNHVTVWDEDDNHFKVTIAYNLTSLHEKTYHLKRGGRLSDLSSMHQDSVSNPIIQGTLLYHTTHCHLKPHQWRKFNQEV

SEQ ID NO: 3331 - protein, 530 aa, Unknown
  Description of Unknown: Integrase B3332 sequence
  PTHR30461:SF3,SM00857,G3DSA:1.10.10.2600,IPR036162,PF13408, IPR025827,G3DSA:3.40.50.1390,PS51737,IPR006119,IPR038109, PF07508,IPR011109,SSF53041,PTHR30461,PS51736, cd00338,PF00239
MQIRNAVAYCRFSSDNQRSESIDAQIRAIKEYCKNNKYMLTHIYKDEALSGTSDKRDQFQQMITDSKDGLFDAVIVHKLDRFARNRYDSAIYKKKLKDNGVVVLSVLENLDDTPEAVILESVLEGMNEYYSKNLSREVRKGLNENAIKCIHNGGIPPLGYDVTPDKHYCINEKEAAAVRLIFNMYSENYGYRLIINKLNELGYKTKLGRSFSVSSLHDIIINEKYRGVYVWNKRKSKKAGNHAYKDDEEIVKIEGGMPRIISDDLFFKCQKIKKTKIKPRRHSSHEYILTGKIFCGKCGHSYCGSSAYRNKNNNMVYNYCCMNRKNKKGCDNKAINADKLEYAVLEAIRDTFLNDDAIKLIANKMDHYLKETVSTVDKDAVSKLNRDLENIDTKQERLIDLYLDEKLSIESLNKKSALLDQEKTIIKNKLNELSNIVKLDFNIDEIIVFLNDMKGKLNDTDSQTKRTLIEAFIYRISINEDDVDIMLYLDNLIDKNCDNIGGGEENRIVSQFMYEYKIKRQYINFPLTNS

SEQ ID NO: 3332 - protein, 530 aa, Unknown
  Description of Unknown: Integrase B3333 sequence
  cd00338,SM00857,G3DSA:1.10.10.2600,IPR036162,PS51737, G3DSA:3.40.50.1390,IPR006119,IPR038109,PF07508,IPR011109, SSF53041,PTHR30461,PS51736,Coil,PF00239
MEQYLIYLRKSRSDLEAEAHGEGETLSRHEHTLLELAKRQHLNVTDIYREVVSGDTIAARPMMQRVLSEVEQGVWSGVLVMEVERLARGDTIDQGIIAQTFKFSGTKIITPIKTYDPDNEFDEEYFEFGLFMSRREYKIINRRLQRGRLASAKEGKWPSGLAPFGYRRVKLKNEKGCSLEPIEEQAAIVRMIFDLYTVGLQDEDGSARPLSLGSIATRLNDMHIPSPSGSQWARITIRGIIKNPTYIGMVRWGSRETKKKVVDGKVVSVRGPADPEKECVFKGIHPPLIPKETFELANDKLTRSENTSTHKEKVVRNPLAGLLVCSECGRQMMRMINPVHPDMPVVRCPRRGCPNCSSYLPIVEERVIQGLSEWMKGYELEWSSAAASSSVSSVGVREKALASAEAELRKLQQQLERTHDFLEQGIYDTDTFLSRSRMLSDKIAAAKDSVTRCSRELTEEKLRETSRRDIIPKVKNLLDVYPLLETAEEKNALLKEVLEKVVYQKLNEKRKKSPDGFTIEIYPRIPKSEK

SEQ ID NO: 3333 - protein, 530 aa, Unknown
  Description of Unknown: Integrase B3334 sequence
  PTHR30461:SF3,cd00338,SM00857,G3DSA:1.10.10.2600,IPR036162, PF13408,PS51737,G3DSA:3.40.50.1390,IPR025827,IPR006119, IPR038109,PF07508,IPR011109,SSF53041, PTHR30461,PS51736,Coil,PF00239
MAKKKKPAGGIAVIYARYSSHNQRDVSIEQQIEACRKHAAELGLTIIATYEDRAISGRTDNRPAFQRLMHDAEKGKFSYVLAWKSNRMGRNMMQAMVNESRLMDCGIIVYYAEEDFDDSAAGRFALRSMMNVNQFYSDNLAEDVRRGLMDNANKCMVNGRQPLGYKRGKDGKVVVDEPAAAIVREVYARVASGELFTDIARDLNRRGIKTADKGEWNKNSFHRLCSNEKYRGIYIYGDVRIEGGIPTIIDDTLWYKVQEALRVKKLKRNGRHRPGDEDYLLTGKLRCGKCGGYMIGMSGRSKTGDIHYYYACQNRRVGRTCDKKNIRRDVIEPAVAQAIKEYCLTDDAIEWIADKTVEYWEKADRNLQLDSIEGDLAAVQSSISNVMKAIEMGVVTETTRDRLIELEKQRTDLKSKLSLAKEEVVHVDRKKLISSLLLFRNGDIHDRQYQEDLFKTFLISVYVYDDDDNGHLKIVFNAFGDNHTVDLPIDFGETDNQSAFSDGAEKFDYSLHRSTRLKPSEEAQVAFLFV

SEQ ID NO: 3334 - protein, 530 aa, Unknown
  Description of Unknown: Integrase B3335 sequence
  cd00338,SM00857,G3DSA:1.10.10.2600,IPR036162,PS51737, G3DSA:3.40.50.1390,IPR006119,IPR038109,PF07508,IPR011109, SSF53041,PTHR30461,PS51736,Coil,PF00239
MEQYLIYLRKSRSDLEAEAHGEGETLSRHEHTLLELAKRQHLNVTDIYREVVSGDTIAARPMMQRVLSEVEQGVWSGVLVMEVERLARGDTIDQGIIAQTFKFSGTKIITPIKTYDPDNEFDEEYFEFGLFMSRREYKIINRRLQRGRLASAKEGKWPSGLAPFGYRRVKLKNEKGCSLEPIEEQAAIVRMIFDLYTVGLQDEDGSARPLSLGSIATRLNDMHIPSPSGSQWARITIRGIIKNPTYIGMVRWGSRETKKKVVDGKVVSVRGPADPEKECVFKGIHPPLIPKETFELANDKLTRSENTSTHKEKVVRNPLAGLLVCSECGRQMIRMINPVHPDMPVVRCPRRGCPNCSSYLPIVEERVIQGLSEWMKGYELEWSSAAASSSVSSVGVREKALASAEAELRKLQQQLERTHDFLEQGIYDTDTFLSRSRMLSDKIAAAKDSVTRCSRELTEEKLRETSRRDIIPKVKNLLDVYPLLETAEEKNTLLKEVLEKVVYQKLNEKRKKSPDGFTIEIYPRIPKSEK

SEQ ID NO: 3335 - protein, 530 aa, Unknown
  Description of Unknown: Integrase B3336 sequence
  PTHR30461:SF3,SM00857,G3DSA:1.10.10.2600,IPR036162,PF13408, IPR025827,G3DSA:3.40.50.1390,PS51737,IPR006119,IPR038109, PF07508,SSF53041,IPR011109,PTHR30461, Coil,PS51736,cd00338,PF00239
MKITKFPIDLSMLTEEEIDQFRQDPSTLFEGDTDVCLYLRFSSERQREQSIEGQLRDCRTFCKLNSYRITAIYVDRATTARKDVEKRVHFQEMIRDSEKKPWEYVVVWKLDRFARNRTDSALFKFRLRKNGVKVISATENISEKPEGIILEAVLEGMAEFYSADLSQKITRGMRESALKCHSIGGHVPLGYKIEDHKLVINPATAHIVQEAFELYANGETVADICRIFNTKGYRTAKGVEFNRNSFKSMFRNKRYIGVYTYKDIEVEGGVPAIIDKELFETVGHRLSKNAEAPARGKAKVDYLLAGKLFCGHCGGSMNGESGTSKTGAIHNYYTCYTRKRKHACDKKPLKKDWIEYIVAQDAMELLTDDTIQELADMAISQTEQDLRENTRIPELTDRMKETESGITNITKAIEKGIASDALMNRLVELEKEKKNLLRLLAEEEKYVCKIERSQIVYWLTEFKGGRIEDERYRRIIIDLMINSVTVWDEPDGFRITTAYNLTSCKSKTLRIAPLNAPIRSEQMHVIVWIG

SEQ ID NO: 3336 - protein, 530 aa, Unknown
  Description of Unknown: Integrase B3337 sequence
  PTHR30461:SF3,cd00338,SM00857,G3DSA:1.10.10.2600,IPR036162, PF13408,PS51737,G3DSA:3.40.50.1390,IPR025827,IPR006119, IPR038109,PF07508,IPR011109,SSF53041,PTHR30461, PS51736,Coil,PF00239
MAKKKKPTGGVAIIYARYSSHNQRDVSIEQQIEACRKHAAELGLTIIATYEDRAISGRTDNRPAFQRMMHDAENGKFSYVLAWKSNRMGRNMMQAMVNESRLMDCGIKVYYAEEDFDDSAAGRFALRSMMNVNQFYSDNLAEDVRRGLMDNASKCMANGKQPLGYKRGEDGKVVVDEPAAAIVREVYVRVASGELFTDIARDLNRRGIKTADKGEWNKNSFHRLCSNEKYRGIYIYGDVRIEGGIPTIIDDTLWYKVQEALRVKKLKRNGRHRPGDEDYLLTGKLRCGKCGGYMIGMSGRSKTGDIHYYYACQNRRVGRTCDKKNIRRDVIEPAVAQAIKEYCLTDDAIEWIADKTVEYWEKADRNLQLDSIEGDLAAVQSSISNVMKAIEMGVVTETTRDRLIELEKQRTDLKSKLALAKEEVVHVDRKKLISSLLLFRNGDIHDRQYQEDLFKTFLISAYVYDDDDNGHLKIVFNAFGDNNTVDLPIDFGETDNQSAFFDRAEKFDYALHRSTRLKPSEEVQVAFLFV

SEQ ID NO: 3337 - protein, 530 aa, Unknown
  Description of Unknown: Integrase B3338 sequence
  cd00338,SM00857,G3DSA:1.10.10.2600,IPR036162,PS51737, G3DSA:3.40.50.1390,IPR006119,IPR038109,PF07508,IPR011109, SSF53041,PTHR30461,PS51736,Coil,PF00239
MEQYLIYLRKSRSDLEAEAHGEGETLSRHEHTLLELAKRQRLNVTDIYREVVSGDTIAARPMMQRVLSEVEQGVWSGVLVMEVERLARGDTIDQGIIAQTFKFSGTKIITPIKTYDPDNEFDEEYFEFGLFMSRREYKIINRRLQRGRLASAKEGKWPSGLAPFGYRRVKLKNEKGCSLEPIEEQAAIVRMIFDLYTVGLQDEDGSARPLSLGSIATRLNDMHIPSPSGSQWARITIRGIIKNPTYIGMVRWGSRETKKKVVDGKVVSVRGPADPEKECVFKGIHPPLIPKETFELANDKLIRSENTSTHKEKVVRNPLAGLLVCSECGRQMMRMINPVHPDMPVVRCPRRGCPNCSSYLPIVEERVIQGLSEWMKGYELEWSSAAASSSVSSVGVREKALASAEAELRKLQQQLERTHDFLEQGIYDTDTFLSRSRMLSDKIAAAKDSVARCSRELTEEKLRETSRRDIIPKVKNLLDVYPLLETAEEKNALLKEVLEKVVYQKLNEKRKKSPDGFTIEIYPRIPKSEK

SEQ ID NO: 3338 - protein, 530 aa, Unknown
  Description of Unknown: Integrase B3339 sequence
  cd00338,SM00857,G3DSA:1.10.10.2600,IPR036162, PS51737,G3DSA:3.40.50.1390,IPR006119,IPR038109, PF07508,IPR011109,SSF53041,PTHR30461, PS51736,Coil,PF00239
MEQYLIYLRKSRSDLEAEAHGEGETLSRHEHTLLELAKRQHLNVTDIYREVVSGDTIAARPMMQRVLSEVEQGVWSGVLVMEVERLARGDTIDQGIIAQTFKFSGTKIITPIKTYDPDNEFDEEYFEFGLFMSRREYKIINRRLQRGRLASAKEGKWPSGLAPFGYRRVKLKNEKGCSLEPIEEQAAIVRMIFDLYTVGLQDEDGSARPLSLGSIATRLNDMHIPSPSGSQWARITIRGIIKNPTYIGMVRWGSRETKKKVVDGKVVSVRGPADPEKECVFKGIHPPLIPKETFELANDKLTRSENTSTHKEKVVRNPLAGLLVCSECGRQMMRMINPVHPDMPVVRCPRRGCPNCSSYLPIVEERVIQGLSEWMKGYELEWSSAAASSSVSSVGVREKALASAEAELRKLQQQLERTHDFLEQGIYDTDTFLSRSRMLSDKISAAKDSVTRCSRELTEEKLRETSRRDIIPKVKNLLDVYPLLETAEEKNALLKEVLEKVVYQKLNEKRKKSPDGFTIEIYPRIPKSEK

SEQ ID NO: 3339 - protein, 530 aa, Unknown
  Description of Unknown: Integrase B3340 sequence
  PTHR30461:SF3,cd00338,SM00857,G3DSA:1.10.10.2600,IPR036162, PF13408,PS51737,IPR025827,G3DSA:3.40.50.1390,IPR006119, IPR038109,PF07508,SSF53041,IPR011109,PTHR30461, PS51736,Coil,PF00239
MSDKEKTNGSLAMAPRVITIPAANQETARKLRVAAYTRVSSNSKDQEHSFAAQNAYFSKLITDNPDWELADIYADQGITGTSIDKRDDFLRMMEDCRKGRIDRILVKSSSRFARNTKESLAAVRELKSLNISVYFEEQNIDTAQVSGEVLIAMFAALAQRESEAISERVRWSYRVRMSKGRFSTCKAPYGYRLVKDHLEIQEDEASIIRHIFDRYLAGVSMENIAKEITALGCPTRDGTQYWQLTSIQYILQNEKYAGDSLSQKKYTTRSFPRQQKINHGERKQYLVIDSHPAIISREIFQKVQELLTQRSAAIHPRSDVPHAFARKVVCGHCGTLCKRKNCGGSVNWACRRHDKSITACPNTQVPEEQMKNAFLHVYYNLKHYGTSILTQLISDLHAARTGSLLWSENIVEINKQISDIASQERLLAQLKQQGVVDPDIFISRSNQLAERLRELKLQKERILRSEEDHTIQQTQDLLDVLESGPDWQDDFDEQLFSDMIEKIVVVDNETLCFRLLNGLEVTEKIERTRR

SEQ ID NO: 3340 - protein, 530 aa, Unknown
  Description of Unknown: Integrase B3341 sequence
  PTHR30461:SF3,cd00338,SM00857,G3DSA:1.10.10.2600,IPR036162, PF13408,PS51737,G3DSA:3.40.50.1390,IPR025827,IPR006119, IPR038109,PF07508,IPR011109,SSF53041,PTHR30461, PS51736,Coil,PF00239
MAKKKKPAGGIAVIYARYSSHNQRDVSIEQQIEACRKHAAELGLTIIATYEDRAISGRTDNRPAFQRLMHDAEKGKFSYVLAWKSNRMGRNMMQAMVNESRLMDCGIKVYYAEEDFDDSAAGRFALRSMMNVNQFYSDNLAEDVRRGLMDNANKCMVNGRQPLGYKRGKDGKVVVDEPAAAIVREVYARVASGELFTDIARDLNRRGIKTADKGEWNKNSFHRLCSNEKYRGIYIYGDVRIEGGIPTIIDDTLWYKVQEALRVKKLKRNGRHRPGDEDYLLTGKLRCGKCGGYMIGMSGRSKTGDIHYYYACQNRRVGRTCDKKNIRRDVIEPAVAQAIKEYCLTDDAIEWIADKTVEYWEKADRNLQLDSIEGDLAAVQSSISNVMKAIEMGVVTETTRDRLIELEKQRTDLKSKLALAKEEVVHVDRKKLISSLLLFRNGDIHDRQYQEDLFKTFLISVYVYDDDDNGHLKIVFNAFGDNNTVDLPIDFGETDNQSAFSDGAEKFDYSLHRSTRLKPSEEAQVAFLFV

SEQ ID NO: 3341 - protein, 530 aa, Unknown
  Description of Unknown: Integrase B3342 sequence
  cd00338,SM00857,G3DSA:1.10.10.2600,IPR036162,PS51737, G3DSA:3.40.50.1390,IPR006119,IPR038109,PF07508,IPR011109, SSF53041,PTHR30461,PS51736,Coil,PF00239
MEQYLIYLRKSRSDLEAEAHGEGETLSRHEHTLLELAKRQHLNVTDIYREVVSGDTIAARPMMQRVLSEVEQGVWSGVLVMEVERLARGDTIDQGIIAQTFKFSGTKIITPIKTYDPDNEFDEEYFEFGLFMSRREYKIINRRLQRGRLASAKEGKWPSGLAPFGYRRVKLKNEKGCSLEPIEEQAEIVRMIFDLYTVGLQDEDGSARPLSLGSIATRLNDMHIPSPSGSQWARITIRGIIKNPTYIGMVRWGSRETKKKVVDGKVVSVRGPADPEKECVFKGIHHPLVPKETFELANDKLTRSENTSTHKEKVVRNPLAGLLVCSECGRQMMRIINPVHPDMPVVRCPRRGCPNCSSYLPIVEERVIQGLSEWMKGYELEWSSAAASSSVSSVGVREKALASAEAELRKLQQQLERTHDFLEQGIYDTDTFLSRSRMLSDKIAAAKDSVTRCSRELTKEKLRETSRRDIIPKVKNLLDVYPLLETAEEKNALLKEVLEKVVYQKLNEKRKKSPDGFTIEIYPRIPKSEK

SEQ ID NO: 3342 - protein, 530 aa, Unknown
  Description of Unknown: Integrase B3343 sequence
  PTHR30461:SF3,cd00338,SM00857,G3DSA:1.10.10.2600,IPR036162, PS51737,G3DSA:3.40.50.1390,IPR006119,IPR038109,PF07508, IPR011109,SSF53041,PTHR30461,PS51736, Coil,PF00239
MEQYLIYLRKSRSDLEAEAHGEGETLSRHEHTLLELAKRQHLNVTDIYREVVSGDTIAARPMMQRVLSEVEQGVWSGVLVMEVERLARGDTIDQGIIAQTFKFSGTKIITPIKTYDPDNEFDEEYFEFGLFMSRREYKIINRRLQRGRLASAKEGKWPSGLAPFGYRRVKLKNEKGCSLEPIEEQAAIVRMIFDLYTVGLQDEDGSARPLSLGSIATRLNDMRIPSPSGSQWARITIRGIIKNPTYIGMVRWGSRETKKKVVDGKVVSVRGPADPEKECVFKGIHPPLIPKETFELANDKLTRSENTSTHKEKVVRNPLAGLLVCSECGRQMMRMMNSVHPDMPVVRCPRRGCPNCSSYLPIVEERVIQGLSEWMKGYELEWSSAAASSSVSSVGVREKALASAEAELRKLQQQLERTHDFLEQGIYDTDTFLSRSRMLSDKIAAAKDSVTHCSRELTEEKLRETSRRDIIPKVKNLLDVYPLLETAEEKNALLKEVLEKVVYQKLNEKRKKSPDGFTIEIYPRIPKSEK

SEQ ID NO: 3343 - protein, 530 aa, Unknown
  Description of Unknown: Integrase B3344 sequence
  cd00338,SM00857,G3DSA:1.10.10.2600,IPR036162,PS51737, G3DSA:3.40.50.1390,IPR006119,IPR038109,PF07508,IPR011109, SSF53041,PTHR30461,PS51736,Coil,PF00239
MEQYLIYLRKSRSDLEAEAHGEGETLSRHEHTLLELAKRQHLNVTDIYREVVSGDTIAARPMMQRVLSEVEQGVWSGVLVMEVERLARGDTIDQGIIAQTFKFSGTKIITPIKTYDPDNEFDEEYFEFGLFMSRREYKIINRRLQRGRLASAKEGKWPSGLAPFGYRRVKLKNEKGCSLEPIEEQAAIVRMIFDLYTVGLQDEDGSARPLSLGSIATRLNDMHIPSPSGSQWARITIRGIIKNPTYIGMVRWGSRETKKKVVDGKVVSVRGPADPEKECVFKGIHPPLIPKETFELANDKLTRSENTSTHTEKVVRNPLAGLLVCSECGRQMMRMINPVHPDMPVVRCPRRGCPNCSSYLPIVEERVIQGLSEWMKGYELEWSSAAASSSVSSVGVREKALASAEAELRKLQQQLERTHDFLEQGIYDTDTFLSRSRMLSDKIAAAKESVARCSRELTEEKLRETSRRDIIPKVKNLLDVYPLLETAEEKNALLKEVLEKVVYQKLNEKRKKSPDGFIIEIYPRIPKSEK

SEQ ID NO: 3344 - protein, 530 aa, Unknown
  Description of Unknown: Integrase B3345 sequence
  PTHR30461:SF3,SM00857,G3DSA:1.10.10.2600,IPR036162,PF13408, IPR025827,G3DSA:3.40.50.1390,PS51737,IPR006119,IPR038109, PF07508,IPR011109,SSF53041,PTHR30461, Coil,PS51736,cd00338,PF00239
MIAAIYSRKSKFTGKGESIENQIQLCMDYAKNLGVNEFLVYEDEGFSGKSMDRPKFKEMLKDAKDKKFDYLICYRLDRISRNVSDFSTLIEDLNKLNISFVSIKEQFDTSTPMGRAMMYISSVFAQLERETIAERVRDNMYELARTGRWLGGMPPYGFISTQINYYDENMNQRKMYKLKVDEDTIEIVKLIFDKYLELRSLSKLYKYMYENGIKGTRGGNLDPSALSLILKNPAYVKADKSVVDYLRKSNIDVMGDIDNIHGILTYAKNTDSPIAAVAKHKGVIDSDKWIEAQRLLNANKAKAPRAGTGSKALLSCLLKCSKCGSNMRITYKNSKSGTIYYYICGTKKSLGVSACDCRNIRSDKAESKVIDELKNKSIKSIMSSYKDSKLENSKNSKNIKTEINSINNQIKEKETYIDNLVMQLAKVTESSASTFIINKLESLNNDLSNLKSQLESLNTMSMENNQVDININMLIDNLNKFNKEIDTSDINKKRLLLSTVVDYMTWDSDTDTIKVNLIGINSSNTIASGK

SEQ ID NO: 3345 - protein, 530 aa, Unknown
  Description of Unknown: Integrase B3346 sequence
  SM00857,G3DSA:1.10.10.2600,IPR036162,PS51737,G3DSA:3.40.50.1390, IPR006119,IPR038109,PF07508,IPR011109,SSF53041, PF00239,PTHR30461,PS51736,Coil,cd00338
MEQYLIYLRKSRSDLEAEAHGEGETLSRHEHTLLELAKRQHLNVTDIYREVVSGDTIAARPMMQRVLSEVEQGVWSGVLVMEVERLARGDTIDQGIIAQTFKFSGTKIITPIKTYDPDNEFDEEYFEFGLFMSRREYKIINRRLQRGRLASAKEGKWPSGLAPFGYRRVKLKNEKGCSLEPIEEQAAIVRMIFDLYTVGLQDEDGSTRPLSLGSIATRLNDMHIPSPSGSQWARITIRGIIKNPTYIGMVRWGSRETKKKVVDGKVVSVRGPADPEKECVFKGIHPPLIPKETFELANDKLTRSENTSTHKEKVVRNPLAGLLVCSECGRQMMRMINPVHPDMPVVRCPRRGCPNCSSYLPIVEERVIQGLSEWMKGYELEWSSAAASSSVSSVGVREKALASAEAELRKLQQQLERTHDFLEQGIYDTNTFLSRSRMLSDKIAAAKDSVARCSRELTEEKLRETSRREIIPKVKNLLDVYPLLETAEEKNALLKEVLEKVVYQKLNEKRKKSPDGFTIEIYPRIPKSEK

SEQ ID NO: 3346 - protein, 530 aa, Unknown
  Description of Unknown: Integrase B3347 sequence
  SM00857,G3DSA:1.10.10.2600,IPR036162,PS51737, G3DSA:3.40.50.1390,IPR006119,IPR038109,PF07508, IPR011109,SSF53041,PTHR30461,Coil, PS51736,cd00338,PF00239
MEQYLIYLRKSRSDLEAEAHGEGETLSRHEHTLLELAKRQHLNVTDIYREVVSGDTIAARPMMQRVLSEVEQGVWSGVLVMEVERLARGDTIDQGIIAQTFKFSGTKIITPIKTYDPDNEFDEEYFEFGLFMSRREYKIINRRLQRGRLASAKEGKWPSGLAPFGYRRVKLKNEKGCSLEPIEEQAAIVRMIFDLYTVGLQDEDGSARPLSLGSIAARLNDMRVPSPSGSQWTRITIRGIIKNPTYIGMVRWGSRETKKKVVDGKVFSVRGPADPEKECVFKGIHPPLIPKETFELANDKLTRSENTSTHKEKVVRNPLAGLLVCSECGRQMMRMINPVHPDMPVVRCPRRGCPNCSSYLPIVEERVIQGLSEWMKGYELEWSSAAASSSVSSVGVREKALASAEAELRKLQQQLERTHDFLEQGIYDTDTFLSRSRLLSDKIAAAKDSVARYSRELTEEKLRETSRRDIIPKVKNLLDVYPLLETAEEKNDLLKEVLEKVVYQKINEKRKKSPDGFTIEIYPRIPKSKK

SEQ ID NO: 3347 - protein, 530 aa, Unknown
  Description of Unknown: Integrase B3348 sequence
  SM00857,G3DSA:1.10.10.2600,IPR036162,PS51737,G3DSA:3.40.50.1390, IPR006119,IPR038109,PF07508,IPR011109,SSF53041, PTHR30461,Coil,PS51736,cd00338,PF00239
MPYCLYVRKSRADAEAEARGEGETLTRHINALLDLAKRRHLDITQIYREIVSGETIAARPVMQQLLSEVEQGLWDGVLVMEVERLARGDTVDQGIVAQTFKFSDTKIITPIKDYDPNNEFDEEYFEFGLFMSRREYKTINRRLQRGRIASVKEGKYVGSQSPYGYQREKLVGDKGYTLAPLPAEADIVRLIFQLYTKGEEQEDGSYKRLGVSRIVRRLNDMRIPPRKSTHWSPATIRDILINPVYIGKIRWNWRKDSKKMVDGRVVIARPRSSIDDCVLADGKHPPLIDDATFALAQEYMAQNPPHPIGERNKVKNPLSGLVVCAKCGKKMVRRPYNDRNQADTLLCADTACDNISSALFYVEERVLQALSDWLAEYRLQWETADDTADNASAVNLKEKALRRLATEYDTLNKQLDNAHDLLEQGVYTTEQFLDRSRKLSERIKKNEADRSTLGADIAADKKREQGRKQIIPKVEKLLDVYDSLPSAKSKNDMLKEVLEKVVYLKTKNGRWNNAPDDFEITLYPKIPKSD

SEQ ID NO: 3348 - protein, 530 aa, Unknown
  Description of Unknown: Integrase B3349 sequence
  cd00338,SM00857,G3DSA:1.10.10.2600,IPR036162, PS51737,G3DSA:3.40.50.1390,IPR006119,IPR038109, PF07508,IPR011109,SSF53041,PTHR30461, PS51736,Coil,PF00239
MEQYLIYLRKSRSDLEAEAHGEGETLSRHEHTLLELAKRQHLNVTDIYREVVSGDTIAARPMMQRVLSEVEQGVWSGVLVMEVERLARGDTIDQGIIAQTFKFSGTKIITPIKTYDPDNEFDEEYFEFGLFMSRREYKIINRRLQRGRLASAKEGKWPSGLAPFGYRRVKLKNEKGCSLEPIEEQAAIVRMIFDLYTVGLQDEDGSARPLSLGSIATRLNDMHIPSPSGSQWARITIRGIIKNPTYIGMVRWGSRETKKKVVDGKVVSVRGPADPEKECVFKGIHPPLIPKETFELANDKLTRSENTSTHKEKVVRNPLAGLLVCSECGRQMMRMINPVHPDMPVVRCPRRGCPNCSSYLPIVEERVIQGLSEWMKGYELEWSSAAVSSSVSSVGVREKALASAEAELRKLQQQLERTHDFLEQGIYDTDTFLSRSRMLSDKIAAAKDSVTRCSRELTEEKLRETSRRDIIPKVKNLLDVYPLLETAEEKNALLKEVLEKVVYQKLNEKRKKSPDGFTIEIYPRIPKSEK

SEQ ID NO: 3349 - protein, 530 aa, Unknown
  Description of Unknown: Integrase B3350 sequence
  SM00857,G3DSA:1.10.10.2600,IPR036162,PS51737,G3DSA:3.40.50.1390, IPR006119,IPR038109,PF07508,IPR011109,SSF53041, PTHR30461,Coil,PS51736,cd00338,PF00239
MEQYLIYLRKSRSDLEAEAHGEGETLSRHEHTLLELAKRQHLNVTDIYREVVSGDTIAARPMMQRVLSEVEQGVWSGVLVMEVERLARGDTIDQGIIAQTFKFSGTKIITPIKTYDPDNEFDEEYFEFGLFMSRREYKIINRRLQRGRLASAKEGKWPSGLAPFGYRRVKLKNEKGCSLEPIEEQAAIVRMIFDLYTVGLQDEDGSAHPLSLGSIATRLNDMRIPSPSGSQWSRITIRGIIKNPTYIGMVRWGSRETKKKVVDGKVVSVRGPADPEKECVFKGIHPPLIPKETFELANDKLARSENTSTHKEKAVRNPLAGLLVCSECGRQMMRMINPVHPDMPVVRCPRRGCPNCSSYLPIVEERVIQGLSEWMKGYELEWSSAAASSSVSSIGVREKALASAEAELRKLQQQLERTHDFLEQGIYDTDTFLSRSRMLSDKIAAAKDSVARCSRELTEEKLRETSRRDIIPKVKNLLDVYPLLETAEEKNALLKEVLEKVVYQKLNEKRKKSPDGFTIEIYPRIPKSEK

SEQ ID NO: 3350 - protein, 530 aa, Unknown
  Description of Unknown: Integrase B3351 sequence
  PTHR30461:SF3,SM00857,G3DSA:1.10.10.2600,IPR036162,PF13408, PS51737,IPR025827,G3DSA:3.40.50.1390,IPR006119,IPR038109, PF07508,IPR011109,SSF53041,PF00239, PTHR30461,PS51736,Coil,cd00338
MQTMPIDLSALTPEERQQFAENPSVLSTDCVATCCLYMRYSSDRQSEQSIEGQLRELISYCIRQEYRIAAVYVDRAISAHTSMAKRVAFQQMLADSKRAAWNTVLVWKLDRFARNRQDSAAARALLYKNGCGVESATEAISATKEGRLLESVLEGLNEYYSDELREKIIRGNRESALKGNALGGSVPLGYKIENKKWAIDPLTAPLVSEAFDRYASGDTVAAICDDFNARGYRTAKGAKFNKSSFKNIFRNEKYIGVYKYKDIRQEDSVPRIVTDDVWAKVKARLKVNEAAPARGKAKVPYLLAGKIFCGHCGSQMVGECGRSKNGHTYNYYSCAGRKIRRACNKKPVPKDWIEDIVVQDALEVLTDDVIDYVATVAARQSEEEIQQNTNIPAIREQIADIERKVRNLTKAIETSGMAPDTLVSRIAELESQRKGLSAQLLEEQHSVIHLTKEMVVYYLESVRKQAVPLETQKKMLIDLFVNSVTVYDDDPGYFKITTAYNLSAVPTKTYRVSTLFVEAGSSDTGPNGPP

SEQ ID NO: 3351 - protein, 530 aa, Unknown
  Description of Unknown: Integrase B3352 sequence
  PTHR30461:SF3,SM00857,G3DSA:1.10.10.2600,IPR036162,PS51737, G3DSA:3.40.50.1390,IPR006119,IPR038109,PF07508,SSF53041, IPR011109,PTHR30461,Coil,PS51736,cd00338, PF00239
MEKTIEKVCGKWEQDQYAMYLRKSRADMEMEALGEGETLARHKHMLEALAAKHDIHPGQITVYKEVVSGDSIDQRPEMQRLLSDIYQHKYKAVLVVEVERLARGNTKDQGEVADAFQASSTKIITPAKVYDPNNEFDQEYFEFGLFMSRREYKTIKRRLEAGKKQSVMEGNYLPPQRIFGFNIVKPSKKDRYLVENQEEGPILRMIFDWYTEEKRSQYWIARKLTEMGVKTTRNRDEWSKGTIRDMLSNVHYIGKVSWGAQQTVKVFDEKKGKLVKKRQKGQVEYYEGKHEGLISEEQFEKAQMILKQKKPKANMQKELANPLAGLLECCDCGRNMSLLDYNKYPSRQKYNYQPRFIHARMFSCKKKSCDVQTVMDAFVEALNAYIDDFTFKMENDNDQTDLIRHQDMIKAMEKELAKQEKKKRKLFDSWEADDGTYTRDEFIERKQMYAHQIDELNDRIKEAKENMPKPVNYSKKIVSLHKMIDCINNPKLSAKKKNDFLKQYIDKITYDIIDHGERKGGTPILEVFLK

SEQ ID NO: 3352 - protein, 530 aa, Unknown
  Description of Unknown: Integrase B3353 sequence
  SM00857,G3DSA:1.10.10.2600,IPR036162,PS51737,G3DSA:3.40.50.1390, IPR006119,IPR038109,PF07508,IPR011109,SSF53041, PTHR30461,Coil,PS51736,cd00338,PF00239
MEQYLIYLRKSRSDLEAEAHGEGETLSRHEHTLLELAKRQHLNVTDIYREVVSGDTIAARPMMQRVLSEVEQGVWSGVLVMEVERLARGDTIDQGIIAQTFKFSGTKIITPIKTYDPDNEFDEEYFEFGLFMSRREYKIINRRLQRGRLASAKEGKWPSGLAPFGYRRVKLKNEKGCSLEPIEEQAAIVRMIFDLYTVGLQDEDGSARPLSLGSIATRLNDMHIPSPSGSQWARITIRGIIKNPTYIGMVRWGSRETKKKVVDGKVVSVRGPADPEKECVFKGIHPPLVPKETFELANDKLARSENTSTHKEKVVRNPLAGLLVCSECGRQMMRMINPVHPDMPVVRCPRRGCPNCSSYLPIVEERVIQGLSEWMKGYELEWSSAAASSSVSSVGVREKALASVEAELRKLQQQLERTHDFLEQGIYDTDTFLSRSRMLSDKIAAAKDSVTRCSRELTEEKLRETSRRDIIPKVKNLLDVYPLLETAEEKNALLKEVLEKVVYQKLNEKRKKSPDGFTIEIYPRIPKSEK

SEQ ID NO: 3353 - protein, 530 aa, Unknown
  Description of Unknown: Integrase B3354 sequence
  SM00857,G3DSA:1.10.10.2600,IPR036162,PS51737, G3DSA:3.40.50.1390,IPR006119,IPR038109,PF07508, IPR011109,SSF53041,PTHR30461,PS51736, cd00338,PF00239
MEQYLIYLRKSRSDLEAEAHGEGETLSRHEHTLLELAKRQHLNVTDIYREVVSGDTIAARPMMQRVLSEVEQGVWSGVLVMEVERLARGDTIDQGIIAQTFKFSGTKIITPIKTYDPDNEFDEEYFEFGLFMSRREYKIINRRLQRGRLASAKEGKWPSGLAPFGYRRVKLKNEKGCSLEPIEEQAAIVRMIFDLYTVGLQDEDGSARPLSLGSIAARLNDMRVPSPSGSQWTRITIRGIIKNPTYIGMVRWGSRETKKKVVDGKVVSVRGPADPEKECVFKGIHPPLIPKETFELANDKLTRSENTSTHKEKVVRNPLAGLLVCSECGRQMMRMINPVHPDMPVVRCPRRGCPNCSSYLPIVEERVIQGLSEWMKGYELEWSSAAASSSVSSVGVREKALASADAELRKLQQQLERTHDFLEQGIYDTDTFLSRSRMLSDKIAAAKDSVARCSRELTEEKLRETSRRDIIPKVKNLLDVYPLLETAEEKNALLKEVLEKVVYQKLNEKRKKSPDGFTIEIYPRIPKSEK

SEQ ID NO: 3354 - protein, 530 aa, Unknown
  Description of Unknown: Integrase B3355 sequence
  SM00857,G3DSA:1.10.10.2600,IPR036162,PS51737,G3DSA:3.40.50.1390, IPR006119,IPR038109,PF07508,IPR011109,SSF53041, PF00239,PTHR30461,PS51736,Coil,cd00338
MEQYLIYLRKSRSDLEAEAHGEGETLSRHEHTLLELAKRQHLNVTDIYREVVSGDTIAARPMMQRVLSEVEQGVWSGVLVMEVERLARGDTIDQGIIAQTFKFSGTKIITPIKTYDPDNEFDEEYFEFGLFMSRREYKIINRRLQRGRLASAKEGKWPSGLAPFGYRRVKLKSEKGCSLEPIEEQAAIVRMIFDLYTVGLQDEDGSARPLSLGSIAARLNDMRVPSPSGSQWTRITIRGIIKNPTYIGMVRWGSRETKKKVVDGKVVSVRGPADPEKECVFKGIHPPLIPKETFEFANDKLTRSENTSTHKEKVVRNPLAGLLVCSECGRQMMRMINPVHPDMPVVRCPRRGCPNCSSYLPIVEERVIQGLSEWMKGYELEWSSAAASSSASSVGVREKALASAEAELRKLQQQLERTHDFLEQGIYDTDTFLSRSRMLSDKIAAAKDSVARCSRELTEEKLRETSRRDIIPKVKNLLDVYPLLETAEEKNALLKEVLEKVVYQKLNEKRKKSPDGFTIEIYPRIPKSEK

SEQ ID NO: 3355 - protein, 530 aa, Unknown
  Description of Unknown: Integrase B3356 sequence
  SM00857,G3DSA:1.10.10.2600,IPR036162,PF13408, IPR025827,PS51737,G3DSA:3.40.50.1390,IPR006119, IPR038109,PF07508,SSF53041,IPR011109, PF00239,PTHR30461,PS51736,Coil,cd00338
MAQENYIIYLRKSRADAEAEARGEGETLARHEKALLELARRQKLNVTDIYREIVSGETIAARPVMQRVLAEVEQGRWAGVLVMEVERLARGDTMDQGLVAQTFKFSGAKIITPMKTYDPSNEFDEEYFEFGLFMARREYKVINRRMQRGREASAREGKFLGNHPPYGYVRKKLEREKGYTLEPHPGQADVIRMIFDLYTIGYPLEDGAYRRLGVSLIARRLNEMAIPPQKGGAWSESSIRDILINPVYAGMIRWNTRPHVKRMVDGQITVTRPRARPEDRICVKGLHEPLISTDTFDAAQKLMSCNRPAPIGRAKGVKNPLAGIVVCGVCGRKLVRRPYPAGRGQPDTLMCPNASCSNVSSALHYVEEHILSALRDWLAEYKLKLLTQGETLSPSALASKKMTLRVVEAELSKLNKQMERLHDLLEQGVYDVDVFLNRSRILGEQIAKAKASIEALNEEIKLEEARSGAYKNIIPKVQHLLDSYHDLSNPKAQNDLLREVLDKAVYTKTIKGRWHAAPDDFEITIFPRLS

SEQ ID NO: 3356 - protein, 530 aa, Unknown
  Description of Unknown: Integrase B3357 sequence
  SM00857,G3DSA:1.10.10.2600,IPR036162,PS51737,G3DSA:3.40.50.1390, IPR006119,IPR038109,PF07508,IPR011109,SSF53041, PF00239,PTHR30461,PS51736,Coil,cd00338
MEQYLIYLRKSRSDLEAEAHGEGETLSRHEHTLLELAKRQHLNVTDIYREVVSGDTIAARPMMQRVLSEVEQGVWSGVLVMEVERLARGDTIDQGIIAQTFKFSGTKIITPIKTYDPDNEFDEEYFEFGLFMSRREYKIINRRLQRGRLASAKEGKWPSGLAPFGYRRVKLKNEKGCSLEPIEEQAAIVRMIFDLYTVGLQDEDGSARPLSLGSIATRLNDMRIPSPSGSQWARITIRGIIKNPTYIGMVRWGSRETKKKVVDGKVVSVRGPADPEKECIFKGIHPPLIPKETFELANDKLTRSENTSTHKERVVRNPLAGLLVCSECGRQMMRMINPVHPDMPVVRCPRRGCPNCSSYLPIVEERVIQGLSEWMKGYELEWSSAAASSSVSSVGVREKALASAEAELRKLQQQLERTHDFLEQGIYDTDTFLSRSRMLSDKIASAKDSVTRCSRELTEEKLRETSRRDIIPKVKNLLDVYPLLETAEEKNALLKEVLEKVVYQKLNEKRKKSPDGFTIEIYPRIPKSEK

SEQ ID NO: 3357 - protein, 530 aa, Unknown
  Description of Unknown: Integrase B3358 sequence
  SM00857,G3DSA:1.10.10.2600,IPR036162,PF13408, PS51737,IPR025827,G3DSA:3.40.50.1390,IPR006119, IPR038109,PF07508,IPR011109,SSF53041, PTHR30461,PS51736,cd00338,PF00239
MSKRESKSSQKCLAAEQIGVIYARYSSHNQKEESIEQQIAECSDFAAKNGIRIVGIYADKAVSGRSDRRPNFQRMMRDAEKRHFQIVVAYKSNRIARNMLNALQYEARLDLFGIKTLYAKEEFGNTAAGRFALRTMMNVNQFYSENMGEDIKRGMVDNANECKVNGMLPLGYVKSKEGKYAVAPDEAAVVREIFDSFLKDVPVAEIARSLNQRGIRTKLGREWNKNSFHIMLKNDNYIGVYRHSGVVVENGIPPILEREVFAAVQEKLANKKKAAGRRSANGEYLLTGKLFCGYCGSYMIGVSGTGENGTVHNYYQCQKRHAENRCEKKNVRRDFIEKLIARLTQDYILQDETIEWIADSTMSFQAVARRQSGITQLERDLADNRKIAKNIMAAIEQGIITETTKARLLEVEGTIRDLERSLSIAKAASQPIERERVVFSLEQMREGNVGSKEHQKKLIDTFVKAVTLWDDRIQIDYYHTPGKHKFSYSLEELTSKVENESNAADVRAESLEVHQTGIGRTHISSAAASP

SEQ ID NO: 3358 - protein, 530 aa, Unknown
  Description of Unknown: Integrase B3359 sequence
  cd00338,SM00857,G3DSA:1.10.10.2600,IPR036162,PS51737, G3DSA:3.40.50.1390,IPR006119,IPR038109,PF07508,IPR011109, SSF53041,PTHR30461,PS51736,Coil,PF00239
MEQYLIYLRKSRSDLEAEAHGEGETLSRHEHTLLELAKRQHLNVTDIYREVVSGDTIAARPMMQRVLSEVEQGVWSGVLVMEVERLARGDTIDQGIIAQTFKFSGTKIITPIKTYDPDNEFDEEYFEFGLFMSRREYKIINRRLQRGRLASAKEGKWPSGLAPFGYRRVKLKNEKGCSLEPIEEQAAIVRMIFDLYTVGLQDEDGSARPLSLGSIATRLNDMHIPSPSGSQWARITIRGIIKNPTYIGMVRWGSRETKKKVVDGKVVSVRGPADPEKECVFKGIHPPLIPKETFELANDKLTRSENTSTHKEKVVRNPLAGLLVCSECGRQMMRMINPVHPDMPVVRCPRRGCPNCSSYLPIVEERVIQGLSEWMKGYELEWSSAAASFSVSSVGVREKALASAEAELRKLQQQLERTHDFLEQGIYDTDTFLSRSRMLSDKIAAAKDSVTRCSRELTEEKLRETSRRDIIPKVKNLLDVYPLLETAEEKNALLKEVLEKVVYQKLNEKRKKSPDGFTIEIYPRIPKSEK

SEQ ID NO: 3359 - protein, 530 aa, Unknown
  Description of Unknown: Integrase B3360 sequence
  cd00338,SM00857,G3DSA:1.10.10.2600,IPR036162, PS51737,G3DSA:3.40.50.1390,IPR006119,IPR038109, PF07508,IPR011109,SSF53041,PTHR30461, PS51736,Coil,PF00239
MEQYLIYLRKSRSDLEAEAHGEGETLSRHEHTLLELAKRQHLNVTDIYREVVSGDTIAARPMMQRVLSEVEQGVWSGVLVMEVERLARGDTIDQGIIAQTFKFSGTKIITPIKTYDPDNEFDEEYFEFGLFMSRREYKIINRRLQRGRLASAKEGKWPSGLAPFGYRRVKLKNEKGCSLEPIEEQAAIVRMIFDLYTVGLQDEDGSARPLSLGSIATRLNDMRIPSPSGSQWARITIRGIIKNPTYIGMVRWGSRETKKKVVDGKVVSVRGPADPEKECVFKGIHPPLIPKETFELANDKLARSENTSTHKEKVVRNPLAGLLVCSECGRQMTRMINPVHPDMPVVRCPRRGCPNCSSYLPIVEERVIQGLSEWMKGYELEWSSAAASSSVSSVGVREKALASAEAELRKLQQQLERTHDFLEQGIYDTDTFLSRSRMLSDKIAAAKDSVTRCSRELTEEKLRETSRRDIIPKVKNLLDVYPLLETAEEKNALLKEVLEKVVYQKLNEKRKKSPDGFTIEIYPRIPKSEK

SEQ ID NO: 3360 - protein, 529 aa, Unknown
  Description of Unknown: Integrase B3361 sequence
  PTHR30461:SF3,SM00857,G3DSA:1.10.10.2600,IPR036162,PF13408, PS51737,IPR025827,G3DSA:3.40.50.1390,IPR006119,IPR038109, PF07508,SSF53041,IPR011109,PF00239,PTHR30461, PS51736,Coil,cd00338
MQRAVIYARYSPGPNQTEQSIEGQVRECTKYAELHDLRIVGTYVDRKISGKTDNRREFQRMIDDSEKHIFDVIILYHTDRFARNRYDSAIYKHKLKENGVELRYATTDIPNGPEGIILESIMEGWAEYYSAELSRKIKRGMRESALKCHSTGAGRCLGYRTAEDKSLVIEPEGAKAVQTVFDMYIKGKSHADICRYLNDCGFRTAQGKLFNKNSVTHIIRNKRYIGVYTYDDITIEDGIPAIISKDTFHLAQLEAARRKTAKRPKEPKAEYLLSGKAFCGHCQKPLVGVSGTGKSGNKWYYYYCQESRAKRGCTKKPVKRDWLEREVVKRTVAEVLQPKVIQHIAKKCYDLQMEYRQDNSDVLFYELKLKDVRKAIKNTMHAIESGVKTKTLPARLQELENEEEALEAELAIAKASDFVITADQIEFLLTQFAEPWECESEEEYHRRIIKCFVHKVFLFDDKLLIYYNVSRDGKTREQSEAELLEEALGEGFDKRSSGSTILIAGRTPECEIIVLRYGFWLALDLTVQV

SEQ ID NO: 3361 - protein, 529 aa, Unknown
  Description of Unknown: Integrase B3362 sequence
  SM00857,G3DSA:1.10.10.2600,IPR036162,PF13408,PS51737, G3DSA:3.40.50.1390,IPR025827,IPR006119,IPR038109,PF07508, IPR011109,SSF53041,PF00239,PTHR30461,PS51736, Coil,cd00338
MKFTSTWKISDPLAQYIIYLRKSRKDMEAEALGQTDTLKRHRAALLSLSESRGLNVVEICEEVVTGDSIAVRPEVQKVLQLVETGNYAGVIVMEVERLARGDTIDQGIIAQTFKYSNTKIITPNKIYDPNNEMDEEYFEFGLFMSRREYNTIKRRLSRGKEASLREGKWISGKTPFGWSREKLPNDKGYKLVPHPEQAPVLQQIYNWYTGEGCARIGAKAISTRLNSLGVPTNSGSLWRSDSVLDILRNPANAGWIKSGGRPETKRIVDGAVVVSRPRTRQEDLKLYKGLHDGLISQEQYDKAVALSYSSASPRGKGAWGTVTSLAGLVRCDQCGRVMVRRPSSGNRRDTLLCPSYGCTTVSAWYDDVEDAVLDALHGWLRELELGEAAAPDDTPMRTALESSIAADRKQLAKLEAQEARAYELVETGVYTPEIFLQRSQALAADKQVIVDRIEASQTTIHELARAKQARARLAPAVRRVLETYPLAASPQEKNALLKTVLQKVLYHKQIKSYTKSGSDMHVTLYPLAD

SEQ ID NO: 3362 - protein, 529 aa, Unknown
  Description of Unknown: Integrase B3363 sequence
  PTHR30461:SF3,IPR036162,PS51737,IPR011109,PTHR30461, PF00239,G3DSA:1.10.10.2600,IPR006119,SSF53041,cd00338, SM00857,IPR025827,IPR038109,PS51736,mobidb-lite, PF13408,G3DSA:3.40.50.1390,PF07508,Coil
MKKRINTNSAARAVIYARYSSANQRDCSIEQQVEKCRELAAREGVTVIEIYADRAISGKTDRRPNFQRMMKDASLRQFDVVLAWKSNRMGRNMLQAMMNEEQLRSNGIRTIYAEEDFDDTAAGRFALRNMMNVNQFYSENMAEDISRGLMDNASKCMSNGSLPLGYKTGKDQKVVLDEAEAAIVQEIFTRVSCYEPFIDIARDLNRRGIKTKKGAEWGRSSFHTICRNERYRGIYIYRDIRVEGGMPRIVSDELFYKVQEVLKVKKNPQGRRKRSGYEEYLLTGKLYCGHCGSPMTGIAGTSKTGAMHYYYTCQKRRTDHSCDKKAVRRDQIEKAVAIAIQQQLLTDENIQMMADETMAYNARTEIKYRLQSLQQQLYSNETSTANIMKAIEMGIITDTTKARLLALEQEHGQLLAKIDTAKAEMVPINREDFVSLLDIYRTGDVNNKKYLAALFDTFLVRVDLYDDHFKITFDPTGGKMPVDIPIGAEDSPESPGDSPESSDFEASPQDAEKFVLALHNRTKELQALA

SEQ ID NO: 3363 - protein, 529 aa, Unknown
  Description of Unknown: Integrase B3364 sequence
  cd00338,SM00857,G3DSA:1.10.10.2600,IPR036162,PS51737, G3DSA:3.40.50.1390,IPR006119,IPR038109,PF07508,IPR011109, SSF53041,PTHR30461,PS51736,Coil,PF00239
MYENLSFPYGSGTYAIYLRKSRKDLDAEALGEGETLARHLSILKALAQRMELNVVRVYAEVVSGESIDARPQMQELLRDVESGIYDGILVVEVERLARGDTSDQGRVAKTFKFSDTLIITPSKTYDPNNEYDEEYFEFGLFMSRREYKTIRRRLTAGHAASCREGKYTGNVPPYGYARKKLPKEKGWTLEIIPEQARAVRLIFDWYQNGLSGLPVGYTMIAEELNHLSIKSPAGGLWNRNSVQNVLRNPVYAGYIKAGYRKEVKKLVDGKMNRSRPLNTDYTLYPGRHEAIISQETWDAVHNRMLKRTAPSARKTRPQQNPLSGMIYCSQCHRIMQRRPYQNGRTAMLICTTAHCSTVSSDLPMVEQRILDALDSWLLSGTLPDPDQLPDHSGRIELLQHAATGCQEELHEADQQLQKQYDLLEKGIYDEETFFERSAIMKKKKSELTSRLKDLQAELQHEISQDASARNLLPTLQTIHDTYHTITDPAVQNSLLKEVIDHIEYTKSESGRWGRPDNFSLKIYPRVPPA

SEQ ID NO: 3364 - protein, 529 aa, Unknown
  Description of Unknown: Integrase B3365 sequence
  PTHR30461:SF3,SM00857,G3DSA:1.10.10.2600,IPR036162,PF13408, PS51737,G3DSA:3.40.50.1390,IPR025827,IPR006119,IPR038109, PF07508,IPR011109,SSF53041,PTHR30461, Coil,PS51736,cd00338,PF00239
MSRYCIYLRKSRADLEAEAHGEGETLSRHKTALLELARRMGITISATYEEIVSGETIAARPQMQRLLSEVGAGEWDGVLVMEIERLARGDTMDQGLVAQTFKYSGTKIITPLKTFDPQNEFDEEYFEFGLFMARREFTTTNRRLVRGREASAKEGKYVGSVPPYGYRKVKIPNDKGFTLEIIEEQAKVVRMIFEWYAEGAEVNSQKKRIGPYTIAVRLNELGIKSVAGKDYWTIYGVQHMLINPVYIGKIRWGYRKVKKTVTPEGMKKKSREFAQDGDYIVVDGLHEPILSEELFYKVQDLIAANPPTPIKYRHKNINPFAGLIFCAKCGHCMNYRRGYGRQPDYIGCYTAGCKNKASRFDLVEQRVLSILNSWVKDYSVDKAQIKHEADLNAELSNAISLAEKEIETLQDQLDKVYSFFERGTYTEKIFKQRSSAIEQQIMEIGEKIDRLKAEHQQVLERQNVQAEFVPSIKHLLEIYDTLEPVEKNKWLKQIIDRIVYEKNADGKYHNVDPGDFTIGILPRLPKRGS

SEQ ID NO: 3365 - protein, 529 aa, Unknown
  Description of Unknown: Integrase B3366 sequence
  cd00338,SM00857,G3DSA:1.10.10.2600,IPR036162,PF13408, PS51737,G3DSA:3.40.50.1390,IPR025827,IPR006119,IPR038109, PF07508,IPR011109,SSF53041,PTHR30461,PS51736, Coil,PF00239
MKFTSAWRIVDPLSQYIIYLRKSRKDMDAEALGQTDTLKRHRAALLSLAESRGLNVVEICEEVVTGDSIAVRPEVQKVLQLVETGAYAGVLVMEVERLARGDTIDQGIIAQTFKYSNTMIITPNKSYDPNNEMDEEYFEFGLFMSRREYNTIKRRLTRGKEASIREGKWISGKTPFGWLREKIPNDKGYMLVPHPEQAPILRQIYDWYTGDGCVRVGSSAIATRLNRLGVKTNTGSRWTASAILEVLRNPANAGWIKSKGRPEIKHIVDGSVVVSRPRARIEDLTLHKGLHNGLISQEQFDRAVALSYSTASPRGKGAWKTATSLAGLVRCDQCGRIMVRRATSGGRKDTFLCPSYGCSTVSAWYDEVETAVLDALRGWLHELEVGEAVSADDSSLLSALSSAISADQKQLAKLEAQETRAYEFVETGVYTPEVFLQRSQSLAADKLAILSRIDENQRAIDDIDRAKQTRARLAPAVRHVLETYPLAGSVQEQNDLLKTVLQKIVYHKQSKSYSKAGSDMRVTLYPLTD

SEQ ID NO: 3366 - protein, 529 aa, Unknown
  Description of Unknown: Integrase B3367 sequence
  SM00857,G3DSA:1.10.10.2600,IPR036162,PS51737,G3DSA:3.40.50.1390, mobidb-lite,IPR006119,IPR038109,PF07508,SSF53041, IPR011109,PTHR30461,Coil,PS51736,cd00338, PF00239
MPYCLYVRKSRADAEAEARGEGETLTRHINTLLELAKKRNFDVTQIYREIVSGETIAARPVMQQLLSEVEQGAWDGVLVMEVERLARGDTIDQGIVAQTFKYSDTKIITPIKDYNPNDEFDEEYFEFGLFMSRREYKTINRRLQRGRLASVKEGKYVASRPPYGYERVRIEHDKGFTLRPVEDEADIVRFIFQLYTTGEKQEDGSYHKLGMGAIAKRLNAMRVPAPNEAEHWQDGTIRVILKNPTYLGKVRWKTNQTRKKVIDGRVKKERVPAPASERVLSDGLHPALIDESVFYLAQEIMSSKGSVSIQEKRKIANPLAGVLTCGLCGRTMARHPTPLGAILYCPNNICKSVSSKYEIVEERLLEGIADWLKDYRLQWDDAPAEDLASPVEIKEKAIKKAESDIVTLEKQLARTHDLLEQGVYTTDTFLERSRSISARIEQAKSDVEVLRADIKDDRVREESKKTIIPKAERLLDVYASLPSAEEKNKVLKEVLEKAVYTKNKRSPRGSSGDNFELTLYPKLPYSSDK

SEQ ID NO: 3367 - protein, 529 aa, Unknown
  Description of Unknown: Integrase B3368 sequence
  SM00857,G3DSA:1.10.10.2600,IPR036162,PF13408,PS51737, G3DSA:3.40.50.1390,IPR025827,IPR006119,IPR038109,PF07508, SSF53041,IPR011109,PTHR30461,Coil,PS51736, cd00338,PF00239
MSNARIIEIPATRQIRSGKNNTMRKMRVAAYCRVSTEEEEQQGSFETQKLYYTEKINSTSEWELAGIYADDGISGIHTKKRDGFNQMIQDCKKKKIDLILTKSISRFARNTLDSIQYVRMLKAIGIAVIFEKENINTSTMNSEMILTVLSAFAQAESESISQNVARGKRMGFRQGKFPFPYGQILGYRKGLDGKPEVIPEEAEVIRMIFNSYLQGASLLTIKKKLEAGGVLTARGNKKWSSESVQRILQNEKYCGDVLLQKTFIEDVLTGVSKKNTGQLPQYYIENNHEGIVTKQMFREVQAEIARRNSKSAANQRKRHQGRYNSKYALSERLVCGDCGSPYKRVTWNIHGRKQIVWRCVNRLEYGTKFCSHSPSIPEEELHQAILKAVQNLAANFTDEVAAQLDGILRQMKAGENLKAQLQKQLEKAQQEFDRLLEMSLELDESTPFLDDKLRKLSGKIKILKANIAESTDGKGEDEEATKQLTAQDLLIKEYDDILTARIIEKVIVHSRQEIEIYFIGGYTQKIDLI

SEQ ID NO: 3368 - protein, 529 aa, Unknown
  Description of Unknown: Integrase B3369 sequence
  PTHR30461:SF3,cd00338,SM00857,G3DSA:1.10.10.2600,IPR036162, PF13408,PS51737,IPR025827,G3DSA:3.40.50.1390,IPR006119, IPR038109,PF07508,IPR011109,SSF53041,PTHR30461, PS51736,Coil,PF00239
MSSVDKIAVIYARYSSHGQTEQSIEGQIAAAQKYAEQHGYTIIHIYADRAMTGRNDDREQFQKMLSDTAMHQFGVILLWKIDRFGRNREEIAFNRYRCKKNGVRVERVAEDVPDGPEGVILDSVLEGMAEYYSLQLAQNVRRGQRESAKKSMSIGGNKMLGYVVNPETKRYESDPKTASYVTEIFKRYANGETISEIVTWLNAQGIRTTRGSEFTVNSLHRLLKNEKYTGVYIFHDIRNEGGMPALTDRATFDKVQEMLKVNRRAPVRVWSKTEYLLTDKLFCGHCGAIMVGESGHGRNGTKHSYYTCLNRKKKKSCDKKPVRQDVIEPLVLRAIGKLLENPATLENIADQVWAAYERSDTSGDTIKALDKQIADVDRALSNVMKAIEMGIINEMTKTRMDELTNQKQALSQSRAEAGLTEGFKLTRDMILFFLQEMAALDMADRDSQKRLIKTFVNAIYLYDDHFDIAFNYTDNGKVAVRMQEINDAASGEVFGCCAQSPTMLKATFNFTLDVAFIFCFVQCFPPCYS

SEQ ID NO: 3369 - protein, 529 aa, Unknown
  Description of Unknown: Integrase B3370 sequence
  PTHR30461:SF3,SM00857,G3DSA:1.10.10.2600,IPR036162,PF13408, PS51737,G3DSA:3.40.50.1390,IPR025827,IPR006119,IPR038109, PF07508,SSF53041,IPR011109,PTHR30461,Coil, PS51736,cd00338,PF00239
MKKFPIDLSCLTEEEISQFQEDPYTLYNGDQEVALYLRYSSTGQSDQSIEGQLRDCRAFCKANHYRIVAIYVDRATTARKDVGKRVHLMEMVADSAKQNWEYVIVWKLDRFARNRNDSAIMKMRLRKNGVKVLSATEHLTDSPESIILESVLEGMAEFFSAELSQKVTRGMRESALKCHSVGGHIPLGYKVENHKLVVDPDTAHIVQEAFSLYANGESVADICRKFNSAGYKTAKNTEFNRSSFKAMFRNTRYIGTYTYKDIVIENGIPAIIDKELFETVQRRLSKAATAPARGKAKVDYLLSGKLFCGHCGASMNGESGAGRHGKVYHYYSCYTKKRKLGCDKRPLKKDYIEGIVARDALNLLTDQLIDEIADMAIRQSEQDLINDTHIPQLTAQLSEVEKSITNITAAIEKGIASETLMNRLVQLEHEKKTLNKEIKAEEKFVYRIDRDQIVFWLSQFKYGNIEDEDFRRRLIDLLVNSVTVWDEPDGYKITTAYNLTSCKTKTFRVEKNPAAEEATGFDFGESECE

SEQ ID NO: 3370 - protein, 529 aa, Unknown
  Description of Unknown: Integrase B3371 sequence
  cd00338,SM00857,G3DSA:1.10.10.2600,IPR036162,PF13408, IPR025827,G3DSA:3.40.50.1390,PS51737,IPR006119,IPR038109, PF07508,SSF53041,IPR011109,PTHR30461,PS51736, Coil,PF00239
MKFTSTWKIADPLAQYIIYLRKSRKDMEAEALGQTDTLKRHRAALLSLSESRGLNVVEICEEVVTGDSIAVRPEVQKVLQLVETGNYAGVIVMEVERLARGDTIDQGIIAQTFKYSNTKIVTPNKVYDPNNEMDEEYFEFGLFMSRREYNTIKRRLSRGKEASLREGKWISGKTPFGWSREKLPNDKGYKLVPHPEQAPVLQQIYNWYTGDGCARIGAKAISTRLNSLGVPTNSGSLWRADSVLDILRNPANAGWIKSGGRPETKRIVDGSVVVSRPRTRQEDLKLYKGLHNGLISQEQYDKAVALSYSSASPRGKGAWGTVTSLAGLVRCDQCGRVMVRRPSSGTRRETLLCPSYGCTTVSAWYDDVEDAVLDALRGWLRELELGEAAAPDDTPMRTALESSIAADRKQLAKLEAQEARAYELVETGVYTPEIFLQRSQALAADKQVIVDRIEASQTTIHELARARQARARLAPAVRRVLETYPLAASPQEKNALLKTVLQKVLYHKQAKSYTKSGSDMHVTLYPLAD

SEQ ID NO: 3371 - protein, 529 aa, Unknown
  Description of Unknown: Integrase B3372 sequence
  PTHR30461:SF3,SM00857,G3DSA:1.10.10.2600,IPR036162,PF13408, IPR025827,PS51737,G3DSA:3.40.50.1390,IPR006119,IPR038109, PF07508,IPR011109,SSF53041,PTHR30461,Coil, PS51736,cd00338,PF00239
MSRYCIYLRKSRADLEAEAHGEGETLSRHKTALLELARRMGITISATYEEIVSGETIAARPQMQRLLSEVGAGEWDGVLVMEIERLARGDTMDQGLVAQTFKYSGTKIITPLKTFDPQNEFDEEYFEFGLFMARREFTTTNRRLVRGREASAKEGKYVGSVPPYGYRKVKIPNDKGFTLEIVEEQAKVVRMIFEWYAEGAEVNSQKKRIGPYTIAVRLNELGIKSAGKKDYWTIYGVQNMLINPVYIGKIRWGYRKVKKTVTPEGMKKKSREFAQDGDYIVVDGLHEPILSEELFYKVQDLIAANPPTPIKYRHKNINPFAGLIFCAKCGHCMNYRRGYGRQPDYIGCYTAGCKNKASRFDLVEQRVLSILNSWVKDYSVDKAQIKHEADLNAELSNAISLAEKEIETLQDQLDKVYSFFERGTYTEKIFKQRSSAIEQQIMEIGEKIDRLKAEHQQVLERQNVQAEFVPSIKHLLEIYDTLEPVEKNKWLKQIIDRIVYEKNADGKYHNVDPGDFTIGILPRLPKRGS

SEQ ID NO: 3372 - protein, 529 aa, Unknown
  Description of Unknown: Integrase B3373 sequence
  PTHR30461:SF3,SM00857,G3DSA:1.10.10.2600,IPR036162,PF13408, PS51737,G3DSA:3.40.50.1390,IPR025827,IPR006119,IPR038109, PF07508,SSF53041,IPR011109,PF00239,PTHR30461, PS51736,Coil,cd00338
MTIQKDNTALRAAVYVRYSSENQRDGYSIEYQLDECKKYIKEQQYEFLKAYVDEAVSGKSTNNRTAFFDLLADVKNGLYDVVVVYKYSRFARNLLEATLYRQQIEKNGAKLISAMERIDDSTPEGRMMRNIIMTMDEYYSDNLSTFVLSSMYTAAKSGKFLGGKYPYGYTVNDENKFIENKAEADIVRRVFDLRLAGMSPIDIVRTLHADGLRSRTGKRFTRSFISKMLTNERYIGTYKYEVSGYEPIIIENAFEGLISLDKWQAVQEIIKREKRAPYVKSRLRHRVYPLVGKIYCGKCGEPFRGNGRRIKDPETGELNREIVYYTCRGQHVHNNCDIGSVRKEVIEDFVFGKIKELILNENVINDIAEVVYKSVDNGENDLTEDISKLKKEKAQIERKLENLLDLFLDGEISKAILNKKSDELQTDLKDLNSRLQTMEFTAANEITVDRIHGFLLDMINQLETADDTVKKAIASQFIDKIIVYDTEVTVKLTVTPHFMTDKRSNGGALYSLSAIRKPSRQGTRPAPLR

SEQ ID NO: 3373 - protein, 529 aa, Unknown
  Description of Unknown: Integrase B3374 sequence
  PTHR30461:SF3,IPR036162,PS51737,IPR011109,PTHR30461, PF00239,G3DSA:1.10.10.2600,IPR006119,SSF53041,cd00338, SM00857,IPR025827,IPR038109,mobidb-lite,PS51736, PF13408,G3DSA:3.40.50.1390,PF07508,Coil
MKKRINTNSAARAVIYARYSSANQRDCSIEQQVEKCRELAAREGVTVIEIYADRAVSGKTDRRPNFQRMMKDASLRQFDVVLAWKSNRMGRNMLQAMMNEEQLRSNGIRTIYAEEDFDDTAAGRFALRNMMNVNQFYSENMAEDISRGLMDNASKCMSNGSLPLGYKTGKDQKVVLDEAEAAIVQEIFTRVSCYEPFIDIARDLNRRGIKTKKGAEWGRSSFHTICRNERYRGIYIYRDIRVEGGMPRIVSDELFYKVQEVLKVKKNPQGRRKRSGYEEYLLTGKLYCGHCGSPMTGIAGTSKTGAMHYYYTCQKRRTDHSCDKKAVRRDQIEKAVAIAIQQQLLTDENIQMMADETMAYNARTEIKYRLQSLQQQLYSNETSTANIMKAIEMGIITDTTKARLLALEQEHGQLLAKIDTAKAEMVPINREDFVSLLDIYRTGDVNNKKYLAALFDTFLVRVDLYDDHFKITFDPTGGKMPVDIPIGAEDSPESLGDSPESSDFEASPQDAEKFVLALHNRTKELQALA

SEQ ID NO: 3374 - protein, 529 aa, Unknown
  Description of Unknown: Integrase B3375 sequence
  PTHR30461:SF3,SM00857,G3DSA:1.10.10.2600,IPR036162,PF13408, PS51737,IPR025827,G3DSA:3.40.50.1390,IPR006119,IPR038109, PF07508,IPR011109,SSF53041,PTHR30461,Coil, PS51736,cd00338,PF00239
MSKYCIYLRKSRADLEAEAHGEGETLSRHKTALLELARRMGITISATYEEIVSGETIAARPQMQRLLSEVGAGEWDGVLVMEIERLARGDTMDQGLVAQTFKYSGTKIITPLKTFDPQNEFDEEYFEFGLFMARREFTTTNRRLVRGREASAKEGKYVGSIPPYGYRKVKIPNDKGFTLEIVEEQAKVVRMIFEWYAEGAEVNSQKKRIGPYTIAVRLNELGIKSAGKKDYWTIYGVQNMLINPVYIGKIRWGYRKVKKTVTPEGMKKKSREFAQDGDYIVVDGLHEPILSEELFYKVQDLIAANPPTPIKYRHKNINPFAGLIFCAKCGHCMNYRRGYGRQPDYIGCYTAGCKNKASRFDLVEQRVLSILNSWVKDYSVDKAQIKHEADLNAELSNAISLAEKEIETLQDQLDKVYSFFERGTYTEKIFKQRSSAIEQQIMEIGEKIDRLKAEHQQVLERQNVQAEFVPSIKHLLEIYDTLEPVEKNKWLKQIIDRIVYEKNADGKYHNVDPGDFTIGILPRLPKRGS

SEQ ID NO: 3375 - protein, 529 aa, Unknown
  Description of Unknown: Integrase B3376 sequence
  SM00857,G3DSA:1.10.10.2600,IPR036162,PS51737,G3DSA:3.40.50.1390, IPR006119,IPR038109,PF07508,IPR011109,SSF53041, PF00239,PTHR30461,PS51736,Coil,cd00338
MAYCIYLRKSRADRELENQGHGDTLKRHRDTLIELAKKKHLVIEEIYEEVVSGDSISARPQMQRLLNDVSEGKWQGVLVMEIERLARGDTSDQGIVTNTFTYSNTLIVTPLKTYNPADEFDQEYFEFGLYMSRREYKTIKRRLHAGMEASCREGNYIHHTPPFGYSRVKNEKSKGYHLEPKPGEAEIVKLIFQWYAKGELQPDGSCKPIGTSLIAHKLNTEYSIKPLNGVWTVSTLSSMLRNEHYLGYIVFGKSRRSKAVENGNVVNKWIRNEPGSYELYPGKHPALVSQDVFDMAQAKLSLNPRRPAKSITNPLAGVIKCGMCGRNMYRRPYVKRGQAASLICQEKTCHNVSSAFKLVEDALLSSIQEWIDGYELEEQHEKYNTDTLDSKIALLEESKKQIDKFKGQLEKIYESYESGIYDSATFLERQKLMSAKISDTEQSITNLNKEIQQEREFINNQEQIIPRAKKVLEIYRTCDDVQLKNDLIKSIVDKVVYVKTANGKFKDQKQEDFSLELFPKLPKNKGISD

SEQ ID NO: 3376 - protein, 529 aa, Unknown
  Description of Unknown: Integrase B3377 sequence
  cd00338,SM00857,G3DSA:1.10.10.2600,IPR036162, PF13408,IPR025827,G3DSA:3.40.50.1390,PS51737, IPR006119,IPR038109,PF07508,SSF53041, IPR011109,PTHR30461,PS51736,Coil,PF00239
MNFTSTWKIADPLAQYIIYLRKSRKDMEAEALGQTDTLKRHRAALLSLSESRGLNVVEICEEVVTGDSIAVRPEVQKVLQFVETGNYAGVIVMEVERLARGDTIDQGIIAQTFKYSNTKIITPNKIYDPNNEMDEEYFEFGLFMSRREYNTIKRRLSRGKEASLREGKWISGKTPFGWSREKLPNDKGYKLVPHPEQAPILQQIYNWYTGEGCARIGAKAISTRLNSLGVPTNSGSLWRADSVLDILRNPANSGWIKSGGRPETKRIVDGAVVVSRPRTRQEDLKLYKGLHDGLIPQEQYDKAVALSYSSASPRGKGSWGTVTSLAGLVRCEQCGRVMVRRPSSGNRRDTLLCPSYGCTTVSAWYDDVEDAVLDALRGWLRELELGEAAAPDDTPMRTALESSIAADRKQLAKLEAQEARAYELVETGVYTPEIFLQRSQALAADKQVIVDRIEASQTTITELARAKQARARLAPAVRRVLETYPLAASPQEKNALLKTVLQKVLYHKQTKSYTKSGSDMHVTLYPLAD

SEQ ID NO: 3377 - protein, 529 aa, Unknown
  Description of Unknown: Integrase B3378 sequence
  cd00338,SM00857,G3DSA:1.10.10.2600,IPR036162,PF13408, PS51737,G3DSA:3.40.50.1390,IPR025827,IPR006119,IPR038109, PF07508,SSF53041,IPR011109,PTHR30461,PS51736, Coil,PF00239
MNFTSTWKISDPLAQYIIYLRKSRKDMEAEALGQTDTLKRHRAALLSLSESRGLNIVEICEEVVTGDSIAVRPEVQKVLQLVETGNYAGVIVMEVERLARGDTIDQGIIAQTFKYSDTRIITPNKTYDPNNEMDEEYFEFGLFMSRREYNTIKRRLSRGKEASLREGKWISGKTPFGWSREKLPNDKGYKLVPHPEQAPVLQQIYNWYTGEGCARIGAKAISTRLNSLGVPTNSGSLWRADSVLDILRNPANAGWIKSGGRPETKRIVDGAVVVSRPRTRQEDLKLYKGLHDGLISQEQYDKAVALSYSSASPRGKGAWGTVTSLAGLVRCDQCGRVMVRRPSSGNRRDTLLCPSYGCTTVSAWYDDVEDAVLDALRGWLRELELGEAAAPDDTPMRTALESSIAADRKQLAKLEAQEARAYELVETGVYTPEIFLQRSQALAADKQVIVDRIEASQTTIHELARARQARARLAPAVRRVLETYPLAASPQEKNALLKTVLQKVLYHKQTKSYTKSGSDMHVTLYPLAD

SEQ ID NO: 3378 - protein, 529 aa, Unknown
  Description of Unknown: Integrase B3379 sequence
  cd00338,SM00857,G3DSA:1.10.10.2600,IPR036162,PF13408, IPR025827,G3DSA:3.40.50.1390,PS51737,IPR006119,IPR038109, PF07508,SSF53041,IPR011109,PTHR30461,PS51736, Coil,PF00239
MNFTSTWKIADPLAQYIIYLRKSRKDMEAEALGQTDTLKRHRAALLSLSESRGLNVVEICEEVVTGDSIAVRPEVQKVLQLVETGNYAGVIVMEVERLARGDTIDQGIIAQTFKYSNTKIVTPNKVYDPNNEMDEEYFEFGLFMSRREYNTIKRRLSRGKEASLREGKWISGKTPFGWSREKLPNDKGYKLVPHPEQAPILQQIYSWYTGEGCARIGSSAIATRLNNLGVKTNSGNAWTASAVLDTLRNPANAGWIKSGGRPETKRIVDGSVVVSRPRTRQEDLNLYKGLHDGLISQEQYDKAVALSYSSGSPRGKGAWQTMTSLAGLVRCDQCGRVMVRRPSSGGRRDAFMCPSPDCPTVSAWYEDVEDAVLDALRGWLHELEVGEAERSDEHSLLDALAASISADQKQLAKLEAQEARAYEFVETGVYTPEIFLQRSQALAADKQVIISRIEENQLAQDEITRAKQARTRLAPAVRHVLETYPLAATPQDKNDLLKTVLQKVLYHKQSKSYSKAGSDMRVTLYPLTD

SEQ ID NO: 3379 - protein, 529 aa, Unknown
  Description of Unknown: Integrase B3380 sequence
  SM00857,G3DSA:1.10.10.2600,IPR036162,PF13408,PS51737, G3DSA:3.40.50.1390,IPR025827,IPR006119,IPR038109,PF07508, IPR011109,SSF53041,PF00239,PTHR30461,PS51736, Coil,cd00338
MNFTSTWKIADPLAQYIIYLRKSRKDMEAEALGQTDTLKRHRAALLSLSESRGLNVVEICEEVVTGDSIAVRPEVQKVLQLVETGNYAGVIVMEVERLARGDTIDQGIIAQTFKYSNTKIITPNKIYDPNNEMDEEYFEFGLFMSRREYNTIKRRLSRGKEASLREGKWISGKTPFGWSREKLPNDKGYKLVPHPEQAPVLQQIYNWYTGEGCARIGAKAISTRLNSLGVPTNSGSLWRADSVLDILRNPANAGWIKSGGRPETKRIVDGSVVVSRPRTRQEDLRLYKGLHDGLISQEQYDKAVALSYSSASPRGKGAWGTVTSLAGLVRCDQCGRVMVRRPSSGGRRDTLLCPSYGCATVSAWYEDVEDAVLDALRGWLRELELGEAAAPDDTPMRTALESSIAADRKQLAKLEAQEARAYELVETGVYTPEVFLQRSQALAADKQVIVDRIEASQTTITELARAKQARARLAPAVRHVLETYPLAATPQDKNDLLKTVLQKVLYHKQSKSYSKAGSDMRVTLYPLTD

SEQ ID NO: 3380 - protein, 529 aa, Unknown
  Description of Unknown: Integrase B3381 sequence
  SM00857,G3DSA:1.10.10.2600,IPR036162,PF13408,PS51737, IPR025827,G3DSA:3.40.50.1390,IPR006119,IPR038109,PF07508, IPR011109,SSF53041,PTHR30461,Coil,PS51736, cd00338,PF00239
MPYCLYLRKSRADIDAEANGEMETLARHEKILLDLAKRMHLDVTEIYREVVSGETISSRPVVQHLLTEVENEMWDGVLVVEIERLARGDTIDQGIVSRAFKFSNTKIITPLKTYDPNNEYDEEYFEFGLFMSRREYKTIRRRLTQGRMSSAKEGKHTGSKAPYGYDRIHVESGKGYTLSPNEKETPIVKMIFDWFVNGQLQEDGSYRKLGAHAIAHRLTNLSIDSPTGNPTWNPRSVYWILHNPVYTGKIRWGYKKDKKIIVDGAVKRTRIIPPEEEQILVEGLHPAIISDEIFNQAQELFLRRGNPSVVIEKELKNPLAGVVVCGICGRPLRYRSNANRRDFGVECRTYGCPCKGSYIYIVEKRIIDALRDWVNEYKLSWDDMPREMHSLLIVKEQAYNAAIKELNTLTKQLDKTHDLLEQGIYDTETFLIRSKSLSEKIAESEKNIAKLSADINNEKLRENNRKNLIPKVENLIDIYWQLPNASAKNDMLKEVLEKVEYTKLHTVGRSKTKKLDDFDLVLYPKLPRT

SEQ ID NO: 3381 - protein, 529 aa, Unknown
  Description of Unknown: Integrase B3382 sequence
  cd00338,SM00857,G3DSA:1.10.10.2600,IPR036162,PF13408, IPR025827,G3DSA:3.40.50.1390,PS51737,IPR006119,IPR038109, PF07508,SSF53041,IPR011109,PTHR30461,PS51736, Coil,PF00239
MKFTSTWKIADPLAQYIIYLRKSRKDMEAEALGQTDTLKRHRAALLSLSESRGLNVVEICEEVVTGDSIAVRPEVQKVLQFVETGNYAGVIVMEVERLARGDTIDQGIIAQTFKYSNTKIITPNKIYDPNNEMDEEYFEFGLFMSRREYNTIKRRLSRGKEASLREGKWISGKTPFGWLREKLPNDKGYKLVPHPEQAPVLRQIYNWYTGEGCARIGAKAISTRLNSLGVPTNSGSLWRADSVLDILRNPANAGWIKSGGRPETKRIVDGAVVVSRPRTRQEDLKLYKGLHDGLISQEQYDKAVALSYSSASPRGKGAWGTVTSLAGLVRCDQCGRVMVRRPSSGNRRDTLLCPSYGCTTVSAWYDDVEDAVLDALRGWLRELELGEAAAPDDTTMRTALESSIAADRKQLAKLEAQEARAYELVETGVYTPEIFLQRSQALAADKQVIVDRIEASQTTIHELARARQARARLAPAVRRVLETYPLAASPQEKNALLKTVLQKVLYHKQTKSYTKSGSDMHVTLYPLAD

SEQ ID NO: 3382 - protein, 529 aa, Unknown
  Description of Unknown: Integrase B3383 sequence
  PTHR30461:SF3,SM00857,G3DSA:1.10.10.2600,IPR036162,PS51737, G3DSA:3.40.50.1390,IPR006119,IPR038109,PF07508,IPR011109, SSF53041,PTHR30461,Coil,PS51736,cd00338, PF00239
MSRYCIYLRKSRADLEAEAHGEGETLSRHKTALLELARRMGITISATYEEIVSGETIAARPQMQRLLSEVGAGEWDGVLVMEIERLARGDTMDQGLVAQTFKYSGTKIITPLKTFDPQNEFDEEYFEFGLFMARREFTTTNRRLVRGREASAKEGKYVGSVPPYGYRKVKIPNDKGFTLEIIEEQAKVVRMIFEWYAEGAEVNGQKKRIGPYTIAVRLNELGIKSVAGKDYWTIYGVQHMLINPVYIGKIRWGYRKVKKTVTPEGMKKKSREFAQDGDYIVVDGLHEPILSEELFYKVQDLIAANPPTPIKYRNNNVNPFAGLIFCAKCGHCLSYRKGYGRHPGYLGCNIAGCDNKAAPFELIEQRVLSILNSWVKDYSVDKAQIKHEADLNVELSNAISLAEKEIETLQDQLDKVYSFFERGTYTEKIFKQRSSAIEQQITDIGEKIDRLKAEHQQVLERQNVQAEFVPSIKHLLEIYDTLEPVEKNKWLKQIIDHMVYEKNADGKYRNVDPGDFTLGILPRLPKKGS

SEQ ID NO: 3383 - protein, 529 aa, Unknown
  Description of Unknown: Integrase B3384 sequence
  cd00338,SM00857,G3DSA:1.10.10.2600,IPR036162,PF13408, PS51737,G3DSA:3.40.50.1390,IPR025827,IPR006119,IPR038109, PF07508,IPR011109,SSF53041,PTHR30461,PS51736, Coil,PF00239
MKFTSTWKIADPLSQYIIYLRKSRKDMDAEALGQTDTLKRHRAALLSLAESRGLNIVEICEEVVTGDSIAVRPEVQKVLQLVETGAYAGVLVMEVERLARGDTIDQGIIAQTFKYSNTMIITPNKSYDPNNEMDEEYFEFGLFMSRREYNTIKRRLTRGKEASIREGKWISGKTPFGWLREKIPNDKGYMLVPHPEQAPILRQIYDWYTGDGCVRVGSSAIATRLNRLGVKTNTGSRWTASAILEVLRNPANAGWIKSKGRPEIKHIIDGSVVVSRPRTRIEDLTLHKGLHNGLISQEQFDRAVALSYSTASPRGKGAWKTATSLAGLVRCDQCGRIMVRRATSGGRKDTFLCPSYGCSTVSAWYDEVETAVLDALRGWLHELEVGEAVSADDSSLLSALSSAISADQKQLAKLEAQETRAYEFVETGVYTPEVFLQRSQSLAADKLAILSRIDENQRAIDDIDRAKQTRARLAPAVRHVLETYPLAGSVQEQNDLLKTVLQKIVYHKQSKSYSKAGSDMRVTLYPLTD

SEQ ID NO: 3384 - protein, 529 aa, Unknown
  Description of Unknown: Integrase B3385 sequence
  cd00338,SM00857,G3DSA:1.10.10.2600,IPR036162,PS51737, G3DSA:3.40.50.1390,IPR006119,IPR038109,PF07508,IPR011109, SSF53041,PTHR30461,PS51736,Coil,PF00239
MEQYCLYLRKSRSDIEAENHGEEETLARHEKILLELAKRREYNVTQIYREVVSGETIAARPVMQQLLSEVEHGLWSGVLVVEVERLARGDTIDQGIVAQTFKYSDTQIITPMKTYNPNNEFDEEYFEFGLFMSRREYKTINRRLQRGRLSSVKEGKYVNSIAPYGYERVKIKGEKGFTLAPDPNEANVIKMIFELYTRGELQPDGTYKRLGVSLLAGKLNSMKIPARKSEYWVPASIKDMLRNPVYAGKIRWNCRAVIKKMKSGNINISRPRSEESDCIIVKGLHPALVTQETFDLAQEYLAKNPPRPTKRNAPTKNPLSGVVVCAFCGRRLVRRPYTSATPPTLMCTVPQCPNISSFLHLVEERILKALEEWLRNYKLQWNLSDKSSELISEAEILRQSLKDINLQITKLNKQMIKAHELLEQDIYTTDVFLERSRAITEKQNQLSSDRAEIEKQLGIESTREKSTKEIIPKVEKLLDVYYDLPTAQEKNDMLKEVLEKVVYKKTQNTRWSGSPDDFEITIYPKLPKS

SEQ ID NO: 3385 - protein, 529 aa, Unknown
  Description of Unknown: Integrase B3386 sequence
  cd00338,SM00857,G3DSA:1.10.10.2600,IPR036162, PF13408,IPR025827,G3DSA:3.40.50.1390,PS51737, IPR006119,IPR038109,PF07508,SSF53041, IPR011109,PTHR30461,PS51736,Coil,PF00239
MKFTSAWRIVDPLSQYIIYLRKSRKDMDAEALGQTDTLKRHRAALLSLAESRGLNVVEICEEVVTGDSIAVRPEVQKVLQLVETGAYAGVLVMEVERLARGDTIDQGIIAQTFKYSNTMIITPNKIYDPNNEMDEEYFEFGLFMSRREYNTIKRRLSRGKEASLREGKWISGKTPFGWSREKLPNDKGYKLVPHPEQAPVLQQIYNWYTGEGCARIGAKAISTRLNSLGVPTNSGSLWRADSVLDILRNPANAGWIKSGGRPETKRIVDGAVVVSRPRTRQEDLKLYKGLHDGLISQEQYDKAVALSYSSASPRGKGAWGTVTSLAGLVRCDQCGHVMVRRPSSGNRRDTLLCPSYGCTTVSAWYDDVEAAVLDALRGWLRELELGEAAAPDDTPMRTALESSIAADRKQLAKLEAQEARAYELVETGVYTPEIFLQRSQALAADKQVIVDRIEASQTTIHELARARQARARLAPAVRRVLETYPLAASPQEKNALLKTVLQKVLYHKQTKSYTKSGSDMHVTLYPLAD

SEQ ID NO: 3386 - protein, 529 aa, Unknown
  Description of Unknown: Integrase B3387 sequence
  cd00338,SM00857,G3DSA:1.10.10.2600,IPR036162,PF13408, IPR025827,G3DSA:3.40.50.1390,PS51737,IPR006119,IPR038109, PF07508,IPR011109,SSF53041,PTHR30461,PS51736, Coil,PF00239
MKFTSTWKIADPLAQYIIYLRKSRKDMEAEALGQTDTLKRHRAALLSLSESLGLNVVEICEEVVTGDSIAVRPEVQKVLQLVETGNYAGVIVMEVERLARGDTIDQGIIAQTFKYSDTRIITPNKTYDPNNEMDEEYFEFGLFMSRREYNTIKRRLSRGKEASLREGKWISGKTPFGWLREKLPNDKGYKLVPHPEQAPILQQIYDWYTGDGCTRIGSFAIATRLNHLGVKTNSGSAWTASAVLDTLRNPANAGWIKSGGRPETKRIVDGSVVVSRPRTRQEDLRLYKGLHDGLISQEQYDKAVALSNSSGSPRGKGAWQTVTSLAGLIRCDQCGRVMVRRPSSGGRRDAFMCPSPDCPTVSAWYEDVEGAVLDALRGWLHELEVGNSESSDDHSLLDALAASISADQKQLAKLEVQEARAYEFVETGVYTPEIFLQRSQALAADKQVIISRIEENQRAQDEITRAKQARARLAPAVRHVLETYPLAATPQDKNELLKTVLQKVLYHKQSKSHSKSGSDMRVTLYPLTD

SEQ ID NO: 3387 - protein, 529 aa, Unknown
  Description of Unknown: Integrase B3388 sequence
  PTHR30461:SF3,SM00857,G3DSA:1.10.10.2600,IPR036162,PF13408, IPR025827,G3DSA:3.40.50.1390,PS51737,IPR006119,IPR038109, PF07508,IPR011109,SSF53041,PF00239,PTHR30461, PS51736,Coil,cd00338
MSSVETTAVVYARYSSHGQTEQSIEGQIAAAQKYAEQHGYTIIHIYADRAMTGRNDDREEFQKMLSDTATRQFGVILLWKIDRFGRNREEIAFNRYRCKKNGVRVERVAEDVPDGPEGVILDSVLEGMAEYYSLQLAQNVRRGQRESAKKSQTVGGCKIIGYNVNSDTKRYEVDPKTAPFVTEVFKRYANGETISEIVAWLNAQGVRTTRGGEFTVNSLHRLLKNEKYTGVYIFHDIRNEGGMPALIDRATFDKAQEMLKVNRRAPARVWSKTEYLLTDKLFCGHCGTMMVGESGHGRNGTKHNYYTCWNRKKKKTCDKKPIRQDVIEPLVLRAIGKLLENPATLENIADQVWAAYERSDTSGDTIKALDKQIADVDRALSNVMKAIEMGIINEMTKARMDELTDQKQALSAARAEAGLAGGFKLTRDMILFFLQDMAALDRSNRDSQKRLIKTFVNAIYLYDDHFNIAFNYTDNGKMTVRMQEIDDAASGDVFGRCAQSPAIVQTSEPLITIVVSCSVFVFSVKMPEA

SEQ ID NO: 3388 - protein, 529 aa, Unknown
  Description of Unknown: Integrase B3389 sequence
  cd00338,SM00857,G3DSA:1.10.10.2600,IPR036162,PF13408, IPR025827,G3DSA:3.40.50.1390,PS51737,IPR006119,IPR038109, PF07508,IPR011109,SSF53041,PTHR30461,PS51736, Coil,PF00239
MKFTSTWKISDPLAQYIIYLRKSRKDMEAEALGQTDTLKRHRAALLSLSESRELNVVEICEEVVTGDSIAVRPEVQKVLQLVETGNYAGVIVMEVERLARGDTIDQGIIAQTFKYSNTKIITPNKIYDPNNEMDEEYFEFGLFMSRREYNTIKRRLSRGKEASLREGKWISGKTPFGWLREKLPNDKGYKLVPHPEQAPVLQQIYNWYTGEGCVRIGAKAISTRLNSLGVPTNSGSLWRADSVLDILRNPANAGWIKSGGRPETKRIVDGAVVVSRPRTRQEDLKLYKGLHDGLISQEQYDKAVALSYSSASPRGKGAWGTVTSLAGLVRCDQCGRVMVRRPSSGNRRDTLLCPSYGCTTVSAWYDDVEDAVLDALRGWLRELELGEAAAPDDTPMRTALESSIAADRKQLAKLEAQEARAYELVETGVYTPEIFLQRSQALAADKQVIVDRIEASQTTIHELARARQARARLAPAVRRVLETYPLAASPQEKNALLKTVLQKVLYHKQTKSYTKSGSDMHVTLYPLAD

SEQ ID NO: 3389 - protein, 529 aa, Unknown
  Description of Unknown: Integrase B3390 sequence
  cd00338,SM00857,G3DSA:1.10.10.2600,IPR036162,PS51737, G3DSA:3.40.50.1390,IPR006119,IPR038109,PF07508,SSF53041, IPR011109,PTHR30461,PS51736,Coil,PF00239
MEQYLIYLRKSRSDLEAEAHGEGETLSRHEHTLLELAKRQHLNVTDIYREVVSGDTIAARPMMQRVLSEVEQGVWSGVLVMEVERLARGDTIDQGIIAQTFKFSGTKIITPIKTYDPDNEFDEEYFEFGLFMSRREYKIINRRLQRGRLASAKEGKWPSGLAPFGYRRVKLKNEKGCSLEPIEEQAAIVRMIFDLYTVGLQDEDSSARPLSLGSIATRLNDMHIPSPSGSQWARITIRGIIKNPTYIGMVRWGSRETKKKVVDGKVVSVRGPADPEKECVFKGIHPPLVPKETFELANDKLARSENTSTHKEKVVRNPLAGLLVCSECGRQMMRIINPVHPDMPVVRCPRRGCPNCSSYLPIVEERVIQGLSEWMKGYELEWSSAAASSSVSSVGVREKALASAEAELRKLQQQLERTHDFLEQGIYDTDTFLSRSRMLSDKIAAAKDSVTRCSRELTEEKLRETSRRDIIPKVKNLLDVYPLLETAEEKNALLKEVLEKVVYQKLNEKRKKSPDGFTIEIYPRIPKSE

SEQ ID NO: 3390 - protein, 529 aa, Unknown
  Description of Unknown: Integrase B3391 sequence
  cd00338,SM00857,G3DSA:1.10.10.2600,IPR036162, PF13408,PS51737,G3DSA:3.40.50.1390,IPR025827, IPR006119,IPR038109,PF07508,IPR011109, SSF53041,PTHR30461,PS51736,Coil,PF00239
MKFTSAWRIVDPLSQYIIYLRKSRKDMDAEALGQTDTLKRHRAALLSLAESRGLNVVEICEEVVTGDSIAVRPEVQKVLQLVETGAYAGVLVMEVERLARGDTIDQGIIAQTFKYSNTMIITPNKSYDPNNEMDEEYFEFGLFMSRREYNTIKRRLTRGKEASIREGKWISGKTPFGWLREKIPNDKGYMLVPHPEQAPILRQIYDWYTGDGCVRVGSSAIATRLNRLGVKTNTGSRWTASAILEVLRNPANAGWIKSKGRPEIKHIVDGSVVVSRPRARIEDLTLHKGLHNGLISQEQFDRAVALSYSTASPRGKGAWKTATSLAGLVRCDQCGRIMVRRATSGGRKDTFLCPSYGCSTVSAWYDEVETAVLDALRGWLHELEVGEAVSADDSSLLSALSSAISADQKQLAKLEAQETRAYEFVETGVYTPEVFLQRSQSLAADKLAILSRIDENQRAIDDIDRAKQARARLAPAVRHVLETYPLAGSVQEQNDLLKTVLQKIVYHKQSKSYSKAGSDMRVTLYPLTD

SEQ ID NO: 3391 - protein, 529 aa, Unknown
  Description of Unknown: Integrase B3392 sequence
  SM00857,G3DSA:1.10.10.2600,IPR036162,PF13408,PS51737, G3DSA:3.40.50.1390,IPR025827,IPR006119,IPR038109,PF07508, IPR011109,SSF53041,PF00239,PTHR30461,PS51736, Coil,cd00338
MKFTSTWKISDPLAQYIIYLRKSRKDMEAEALGQTDTLKRHRAALLSLSESRGLNVVEICEEVVTGDSIAVRPEVQKVLQLVETGNYAGVIVMEVERLARGDTIDQGIIAQTFKYSNTKIVTPNKVYDPNNEMDEEYFEFGLFMSRREYNTIKRRLSRGKEASLREGKWISGKTPFGWLREKLPNDKGYKLVPHPEQAPVLQQIYNWYTGEGCARIGVKAISTRLNSLGVPTNSGSLWRADSVLDVLRNPANAGWIKSGGRPETKRIVDGAVVVSRPRTRQEYLKLYKGLHDGLISQEQYDKAVALSYSSASPRGKGAWGTVTSLAGLVRCDQCGRVMVRRPSSGNRRDTLLCPSYGCTTVSAWYDDVEDAVLDALRGWLRELELGEAAAPDDTPMRTALESSIAADRKQLAKLEAQEARAYELVETGVYTPEIFLQRSQALAADKRVIVDRIEASQTTIHELARARQARARLAPAVRRVLETYPLAASPQEKNALLKTVLQKILYHKQTKSYTKSGSDMHVTLYPLAD

SEQ ID NO: 3392 - protein, 529 aa, Unknown
  Description of Unknown: Integrase B3393 sequence
  cd00338,SM00857,G3DSA:1.10.10.2600,IPR036162,PF13408, IPR025827,G3DSA:3.40.50.1390,PS51737,IPR006119,IPR038109, PF07508,SSF53041,IPR011109,PTHR30461,PS51736, Coil,PF00239
MKFTSTWKIADPLAQYIIYLRKSRKDMEAEALGQTDTLKRHRAALLSLSESRGLNVVEICEEVVTGDSIAVRPEVQKVLQLVETGNYAGVIVMEVERLARGDTIDQGIIAQTFKYSDTRIITPNKTYDPNNEMDEEYFEFGLFMSRREYNTIKRRLSRGKEASMREGKWISGKTPFGWSREKLPNDKGYKLVPHPEQAPVLQQIYNWYTGEGCARIGAKAISTRLNSLGVPTNSGSLWRADSVLDILRNPANAGWIKSGGRPETKRIVDGAVVVSRPRTRQEDLKLYKGLHNGLISQEQYDKAVALSYSSASPRGKGAWGTVTSLAGLVRCDQCGRVMVRRPSSGNRRDTLLCPSYGCTTVSAWYDDVEDAVLDALRGWLRELELGEAAAPDDTPMRTALESSIAADRKQLAKLEAQEARAYELVETGVYTPEIFLQRSQALAADKQVIVDRIEASQTTITELARAKQARARLAPAVRRVLETYPLAASPQEKNALLKTVLQKVLYHKQTKSYTKSGSDMHVTLYPLAD

SEQ ID NO: 3393 - protein, 529 aa, Unknown
  Description of Unknown: Integrase B3394 sequence
  PTHR30461:SF3,SM00857,G3DSA:1.10.10.2600,IPR036162,PF13408, PS51737,IPR025827,G3DSA:3.40.50.1390,IPR006119,IPR038109, PF07508,IPR011109,SSF53041,PTHR30461,Coil, PS51736,cd00338,PF00239
MSRYCIYLRKSRADLEAEAHGEGETLSRHKTALLELARRMGITISATYEEIVSGETIAARPQMQRLLSEVGAGEWDGVLVMEIERLARGDTMDQGLVAQTFKYSGTKIITPLKTFDPQNEFDEEYFEFGLFMARREFTTTNRRLVRGREASAKEGKYVGSVPPYGYRKVKIPNDKGFTLEIVEEQAKVVRMIFEWYAEGAEVNDQKKRIGPYTIAVRLNELGIKSAGKKDYWTIYGVQNMLINPVYIGKIRWGYRKVKKTVTPEGMKKKSREFAQDGDYIVVDGLHEPILSEELFYKVQNLIAANPPTPIKYRHKNINPFAGLIFCAKCGHCMNYRRGYGRQPDYIGCYTAGCKNKASRFDLVEQRVLSILNSWVKDYSVDKAQIKHEADLNAELSNAISLAEKEIETLQDQLDKVYSFFERGTYTEKIFKQRSSAIEQQIMEIGEKIDRLKAEHQQVLERQNVQAEFVPSIKHLLEIYDTLEPVEKNKWLKQIIDRIVYEKNADGKYHNVDPGDFTIGILPRLPKRGS

SEQ ID NO: 3394 - protein, 529 aa, Unknown
  Description of Unknown: Integrase B3395 sequence
  PTHR30461:SF3,cd00338,SM00857,G3DSA:1.10.10.2600,IPR036162, PS51737,G3DSA:3.40.50.1390,IPR006119,IPR038109,PF07508, SSF53041,IPR011109,PTHR30461,PS51736,Coil, PF00239
MSKYCIYLRKSRADLEAEAHGEGETLSRHKTALLELARRKGITISATYEEIVSGETIAARPQMQRLLSEVGAGEWDGVLVMEIERLARGDTMDQGLVAQTFKYSGTKIITPLKTFDPQNEFDEEYFEFGLFMARREFTTTNRRLVRGREASAKEGKYVGSVPPYGYRKVKIPNDKGFTLEIIEEQAKVVRMIFEWYAEGAEVNGQKKRIGPYTIAVRLNELGIKSVAGKDYWTIYGVQHMLINPVYIGKIRWGYRKVKKTVTPEGMKKKSREFAQDGNYIVVDGLHEPILSEELFYKVQDLIAANPPTPIKYRNNNINPFAGLIFCAKCGHCLSYRKGYGRHPGYLGCNIAGCNNKAAPFELIEQRVLSILNSWVKDYSVDKAQIKHEADLNAELSNAISLAEKEIETLQDQLDKVYSFFERGTYTEKIFKQRSSAIEQQITDISEKIDRLKSEHQQVLERQNVQAEFVPSIKHLLEIYDTLEPVEKNKWLKQIIDRMVYEKNANGKYRNVDPGDFTLGILPRLPKKGS

SEQ ID NO: 3395 - protein, 529 aa, Unknown
  Description of Unknown: Integrase B3396 sequence
  PTHR30461:SF3,SM00857,G3DSA:1.10.10.2600,IPR036162,PF13408, IPR025827,PS51737,G3DSA:3.40.50.1390,IPR006119,IPR038109, PF07508,SSF53041,IPR011109,PF00239,PTHR30461, PS51736,Coil,cd00338
MSSVDKIAVVYARYSSHGQTEQSIEGQIAAAQKYAEQHGYTIIHIYADRAMTGRNDDREEFQRMLSDTATHQFGVILLWKIDRFGRNREEIAFNRYRCKKNGVRVERVAEDVPDGPEGVILDSVLEGMAEYYSLQLAQNVRRGQRESAKKSQTVGGCKIIGYNVNPDTKRYEVDPKTAPFVTEVFKRYANGETISEIVAWLNAQGVRTTRGGEFTVNSLHRLLKNEKYTGVYIFHDIRNEGGMPALIDHATFDKVQEMLKVNRRAPARVWSKTEYLLTDKLFCGHCGAMMVGESGHGRNGTKHNYYTCWNRKKKKSCDKKPVRQDVIESLVLRSIGKLLENPATLENIADQVWAAYERSDTSGDTIKALDKQIADVDRALSNVMKAIEMGIINEMTKARMDELTDQKQALSAARAEAGLAGGFKLTRDMILFFLQEIAALDMADRDSQKRLIKTFVNAIYLYDDHFDIAFNYTDNGKVVVRMQEINDAACGEVFGRCAQSPAIVQTSEPLITVVVSCSVFVFSVKMPEA

SEQ ID NO: 3396 - protein, 529 aa, Unknown
  Description of Unknown: Integrase B3397 sequence
  cd00338,SM00857,G3DSA:1.10.10.2600,IPR036162,PF13408, IPR025827,G3DSA:3.40.50.1390,PS51737,IPR006119,IPR038109, PF07508,SSF53041,IPR011109,PTHR30461,PS51736, Coil,PF00239
MKFTSTWKIADPLAQYIIYLRKSRKDMEAEALGQTDTLKRHRAALLSLSESRGLNVVEICEEVVTGDSIAVRPEVQKVLQLVETGNYAGVIVMEVERLARGDTIDQGIIAQTFKYSDTRIITPNKTYDPNNEMDEEYFEFGLFMSRREYNTIKRRLSRGKEASLREGKWISGKTPFGWLREKLPNDKGYKLVPHPEQAPVLQQIYNWYTGEGCARIGAKAISTRLNSLGVPTNSGSLWRADSVLDILRNPANAGWIKSGGRPETKRIVDGAVVVSRPRTRQEDLKLYKGLHDGLISQEQYDKAVALSYSSASPRGKGAWGTVTSLAGLVRCDQCGRVMVRRPSSGNRRDTLLCPSYGCTTVSAWYDDVEDAVLDALRGWLRELELGEAAAPDDTPMRTALESSIAADRKQLAKLEAQEARAYELVETGVYTPEIFLQRSQALAADKQVIVDRIEASQTTIHELARARQARARLAPAVRRVLETYPLAASPQEKNDLLKTVLQKVLYHKQTKSYTKSGSDMHVTLYPLAD

SEQ ID NO: 3397 - protein, 529 aa, Unknown
  Description of Unknown: Integrase B3398 sequence
  PTHR30461:SF3,cd00338,SM00857,G3DSA:1.10.10.2600,IPR036162, PF13408,IPR025827,G3DSA:3.40.50.1390,PS51737,IPR006119, IPR038109,PF07508,IPR011109,SSF53041,PTHR30461, PS51736,Coil,PF00239
MQRAVIYARYSPGPNQTEQSIEGQVRECTKYAEQHDLRIVGTYVDRKISGKTDNRREFQRMIDDSEKHIFDVIILYHTDRFARNRYDSAIYKHKLKENGVELRYATTDIPKGPEGIILESIMEGWAEYYSAELSRKIKRGMRESALKCHSTGAGRCLGYRTAEDKSLVIEPEGAKAVQTVFDMYIKGKSHADICRYLNDCGFRTAQGKLFNKNSVTHIIRNKRYIGVYTYDDITIEDGIPAIISKDTFHLAQLEAARRKTVKRPKEPKAEYLLSGKAFCGHCQKPLVGVSGTGKSGNKWYYYYCQESRAKRGCTKRPVKRDWLEREVVKRTIAEVLQPEVIQHIAKKCYDLQMEYRQDNSDVLFYELKLKDVRKAIKNTMHAIESGVKTKTLPARLQELENEEEALEAELAIAKASDFVITADQIEFLLTQFAEPWECESEEEYHRRIIKCFVHKVFLFDDKLLIHYNVSRDGKTREQSEAELLEEALGEGFDKRSSGSTILIAGRTPECEIIVLRYGFWLALDLTVQA

SEQ ID NO: 3398 - protein, 529 aa, Unknown
  Description of Unknown: Integrase B3399 sequence
  PTHR30461:SF3,SM00857,G3DSA:1.10.10.2600,IPR036162,PF13408, IPR025827,G3DSA:3.40.50.1390,PS51737,IPR006119,IPR038109, PF07508,SSF53041,IPR011109,PF00239,PTHR30461, PS51736,Coil,cd00338
MKKIAIYSRKSVFTGKGESVENQIALCKDYCEKFLRYDNADYIVYEDEGFSGKNINRPQFKLLLDDIKKHKIDILVCYRLDRISRSVADFASTLEILNKYNVDFLSIREKFDTTSANGRAMLNISATFAQLERETIAERVKDNMLQMAKNGYWTGGQLPLGYDSIRYSTIDGTGKERSYSKLKENIKELDVVRLIYSEFLKNNSILDITKLLNENNLKGKNRCDFDRTQVKRILRNPLYVKSSDLTNLYLSNNYSVYGIANGNGYLTYNKSKAKDKWIVSVANHKGIIEDTNWLLVQKILDNNATKVSNRTGTGTGDNTSLFSGILKCSECGENMVIKYNNKNKYGNPNLYYICSSKTRKFTSKCKTKNLNVKATDIKILEDIKSYNKEVLIKKYEEYINELIANNNTGLKENLKEQIKHKEKQINNLVIKLSNIDTPEISDIILNQLATLTNEVKDLKTKLSNSDIQAANVEKAIGEFKNIKNLLLEFDSSIDSTEDIKVKRQLIRNIVKSVKYNEVDKTFFIEFYHP

SEQ ID NO: 3399 - protein, 529 aa, Unknown
  Description of Unknown: Integrase B3400 sequence
  SM00857,G3DSA:1.10.10.2600,IPR036162,PF13408,IPR025827, PS51737,G3DSA:3.40.50.1390,IPR006119,IPR038109,PF07508, SSF53041,IPR011109,PTHR30461,Coil,PS51736, cd00338,PF00239
MSNARIIEIPATRQIRGGKSNTIRKMRVAAYCRVSTEEEEQQGSFETQKLYYTEKINSTSEWELAGIYADDGISGIHTKKRDGFNQMIQDCKKKKIDLILTKSISRFARNTLDSIQYVRMLKAIGIAVIFEKENINTSTMNSEMILTVLSAFAQAESESISQNVARGKRMGFRQGKFPFPYGQILGYRKGLDGKPEVIPEEAEVIRMIFNSYLQGASLLTIKKKLEAGGVLTARGNKKWSSESVQRILQNEKYCGDVLLQKTFIEDVLTGVSKKNTGQLPQYYIENNHEGIVTKQMFREVQAEIARRNSKSAASQRKRHQGRYNSKYALSERLVCGDCGSPYKRVTWNIHGRKQIVWRCVNRLEYGTKFCSHSPSIPEEELHQAILKAVQNLAANFTDEVAAQLDGILRQMEAGENLKAQLQKQLEKAQQEFDRLLEMSLELDESTPFLDDKLRKLSGKIKILKANIAESTDGKGEDVEETKRLTAQDLLIKEYDDILTARIIEKVIVHSRQEIEIYFIGGYTQRIDLT

SEQ ID NO: 3400 - protein, 529 aa, Unknown
  Description of Unknown: Integrase B3401 sequence
  PTHR30461:SF3,SM00857,G3DSA:1.10.10.2600,IPR036162,PF13408, IPR025827,PS51737,G3DSA:3.40.50.1390,IPR006119,IPR038109, PF07508,IPR011109,SSF53041,PTHR30461,Coil, PS51736,cd00338,PF00239
MSKYCIYLRKSRADLEAEAHGEGETLSRHKTALLELARRKGITISATYEEIVSGETIAARPQMQRLLSEVGAGEWDGVLVMEIERLARGDTMDQGLVAQTFKYSGTKIITPLKTFDPQNEFDEEYFEFGLFMARREFTTTNRRLVRGREASAKEGKYVGSVPPYGYRKVKIPNDKGFTLEIIEEQAKVVRMIFEWYAEGAEVNSQKKRIGPYTIAVRLNELGIKSAGKKDYWTIYGVQNMLINPVYIGKIRWGYRKVKKTVTPEGMKKKSREFAQDGDYIVVDGLHEPILSEELFYKVQDLIAANPPTPIKYRHKNINPFAGLIFCAKCGHCMNYRRGYGRQPDYIGCYTAGCKNKASRFDLVEQRVLSILNSWVKDYSVDKAQIKHEADLNAELSNAISLAEKEIETLQDQLDKVYSFFERGTYTEKIFKQRSSAIEQQIMEIGEKIDRLKAEHQQVLERQNVQAEFVPSIKHLLEIYDTLEPVEKNKWLKQIIDRIVYEKNADGKYHNVDPGDFTIGILPRLPKRGS

SEQ ID NO: 3401 - protein, 529 aa, Unknown
  Description of Unknown: Integrase B3402 sequence
  PTHR30461:SF3,SM00857,G3DSA:1.10.10.2600,IPR036162,PS51737, G3DSA:3.40.50.1390,IPR006119,IPR038109,PF07508,SSF53041, IPR011109,PTHR30461,Coil,PS51736,cd00338, PF00239
MSRYCIYLRKSRADLEAEAHGEGETLSRHKTALLELARRMGITISATYEEIVSGETIAARPQMQRLLSEVGAGEWDGVLVMEIERLARGDTMDQGLVAQTFKYSGTKIITPLKTFDPQNEFDEEYFEFGLFMARREFTTTNRRLVRGREASAKEGKYVGSVPPYGYRKVKIPNDKGFTLEIIEEQAKVVRMIFEWYAEGAEVNGQKKRIGPYTIAVRLNELGIKSVAGKDYWTIYGVQHMLINPVYIGKIRWGYRKVKKTVTPEGMKKKSREFAQDGDYIVVDGLHEPILSEELFYKVQDLIAANPPTPIKYRNNNVNPFAGLIFCTKCGHCLSYRKGYGRHPGYLGCNIAGCDNKAAPFELIEQRVLSILNSWVKDYSVDKAQIKHEADLNAELTNAISLAEKEIETLQDQLDNVYSFFERGTYTEKIFKQRSSAIEQQITDIGEKIDRLKAEHQQVLERQNVQAEFVPSIKHLLEIYDTLEPVEKNKWLKQIIDRMVYEKNADGKYRNVDPGDFTLGILPRLPKKGS

SEQ ID NO: 3402 - protein, 529 aa, Unknown
  Description of Unknown: Integrase B3403 sequence
  PTHR30461:SF3,SM00857,G3DSA:1.10.10.2600,IPR036162,PF13408, PS51737,G3DSA:3.40.50.1390,IPR025827,IPR006119,IPR038109, PF07508,IPR011109,SSF53041,PF00239,PTHR30461, PS51736,Coil,cd00338
MQQAVIYARYSPGPNQTEQSIEGQVRECTKYAELHDLRIVGTYIDRKISGKTDNRREFQRMIDDSEKHIFDVIILYHTDRFARNRYDSAIYKHKLKENGVELRYATTDIPKGPEGIILESIMEGWAEYYSAELSRKIKRGMRESALKCHSTGAGRCLGYRTAEDKSLVIEPEGAKAVQTVFDMYIKGKSHADICRYLNDCGFRTAQGKLFNKNSVTHIIRNKRYIGVYTYDDITIEDGIPAIISKDTFHLAQLEAARRKTAKRPKEPKAEYLLSGKAFCGHCQKPLVGVSGTGKSGNKWYYYYCQESRAKRGCTKKPVKRDWLEREVVKRTVAEVLQPEVIQHIAKKCYDLQMEYRQDNSDVLFYELKLKDVRKAIKNTMHAIESGVKTKTLPARLQELENEEEALEAELAIAKASDFVITADQIEFLLTQFAEPWECESEEEYHRRIIKCFVHKVFLFDDKLLIYYNVSRDGKTREQSEAELLEEALGEGFDKRSSGSTILIAGRTPECEIIILRYGFWLALDLTVQV

SEQ ID NO: 3403 - protein, 529 aa, Unknown
  Description of Unknown: Integrase B3404 sequence
  SM00857,G3DSA:1.10.10.2600,IPR036162,PF13408,PS51737, G3DSA:3.40.50.1390,IPR025827,IPR006119,IPR038109,PF07508, IPR011109,SSF53041,PTHR30461,Coil,PS51736, cd00338,PF00239
MSNARIIEIPATRQIRSGKNNTMRKMRVAAYCRVSTEEEEQQGSFETQKLYYTEKINSTSEWELAGIYADDGISGIHTKKRDGFNQMIQDCKKKKIDLILTKSISRFARNTLDSIQYVRMLKAIGIAVIFEKENINTSTMNSEMILTVLSAFAQAESESISQNVARGKRMGFRQGKFPFPYGQILGYRKGLDGKPEVIPEEAEVIRMIFNSYLQGASLLTIKKKLEAGGVLTARGNKKWSSESVQRILQNEKYCGDVLLQKTFIEDVLTGVSKKNTGQLPQYYIENNHEGIVTKQMFREVQAEIARRNSKSAANQRKRHQGRYNSKYALSERLVCGDCGSPYKRVTWNIHGRKQIVWRCVNRLEYGTKFCSHSPSIQEEELHQAILKAVQNLAANFTDEVAAQLDGILRQMKAGENLKAQLQKQLEKAQQEFDRLLEMSLELDESTPFLDDKLRKLSGKIKILKANIAESTDGKGEDEEATKQLTAQDLLIKEYDDILTARIIEKVIVHSRQEIEIYFIGGYTQKIDLI

SEQ ID NO: 3404 - protein, 529 aa, Unknown
  Description of Unknown: Integrase B3405 sequence
  cd00338,SM00857,G3DSA:1.10.10.2600,IPR036162,PF13408, IPR025827,G3DSA:3.40.50.1390,PS51737,IPR006119,IPR038109, PF07508,IPR011109,SSF53041,PTHR30461,PS51736, Coil,PF00239
MKFTSTWKISDPLAQYIIYLRKSRKDMEAEALGQTDTLKRHRAALLSLSESRGLNVIEICEEVVTGDSIAVRPEVQKVLQLVETGNYAGVIVMEVERLARGDTIDQGIIAQTFKYSNTKIITPNKIYDPNNEMDEEYFEFGLFMSRREYNTIKRRLSRGKEASLREGKWISGKTPFGWSREKLPNDKGYKLVPHPEQAPVLQQIYNWYTGEGCARIGAKAISTRLNHLGVKTNSGNAWTASAVLDTLRNPANAGWIKSGGRPETKRIVDGSVVVSRPRTRQEDLNLYKGLHDGLISQEQYDKAVALSYSSGSPRGKGAWQTMTSLAGLVLCDQCGRVMVRRPSSGGRRDAFMCPSPDCPTVSAWYEDVEDAVLDALRGWLHELEVGEAERSDKHSLLDALAASISADQKQLAKLEAQEARAYEFVETGVYTPEIFLQRSQALAADKQVIISRIEENQLAQDEITRAKQARTRLAPAVRHVLETYPLAATPQDKNDLLKTVLQKVLYHKQSKSYSKAGSDMRVTLYPLTD

SEQ ID NO: 3405 - protein, 529 aa, Unknown
  Description of Unknown: Integrase B3406 sequence
  SM00857,G3DSA:1.10.10.2600,IPR036162,PF13408,PS51737, G3DSA:3.40.50.1390,IPR025827,IPR006119,IPR038109,PF07508, IPR011109,SSF53041,PF00239,PTHR30461,PS51736, Coil,cd00338
MNFTSTWKITDPFAQYIIYLRKSRKDMEAEALGQTDTLKRHRATLLSLAESSGLNVVEICEEVVTGDSIAVRPEVQKVLQLVETGSYAGVLVMEVERLARGDTIDQGIIAQTFKYSNTKIVTPNKVYDPNNEMDEEYFEFGLFMSRREYNTIKRRLSRGKEASLREGKWISGKTPFGWLREKLPNDKGYKLIPHPDQAPILRQIYDWYTGEGCARIGAKAISTRLNSLGVSTNSGSLWRTDSVLDILRNPANAGWIKSGGRPETKRIVDGAVVVSRPRTRQEDLKLYKGLHDGLISQEQYDKAVALSYSSASPRGKGAWQTVTSLAGLIRCDQCGRVMVRRPSSGGRRDTLLCPSYGCTTVSAWYEDVEGAVLDALRGWLHELEVGNSENSDDHSLLDALAASISADQKQLAKLEVQEARAYEFVETGVYTPEIFLQRSQALAADKQVIISRIEENQRAQDEITRAKQARARLAPAVRHVLETYPLAATSQDKNDLLKTVLQKVLYHKQSKSYSKAGSDMRVTLYPLTD

SEQ ID NO: 3406 - protein, 529 aa, Unknown
  Description of Unknown: Integrase B3407 sequence
  PTHR30461:SF3,cd00338,SM00857,G3DSA:1.10.10.2600,IPR036162, PF13408,IPR025827,G3DSA:3.40.50.1390,PS51737,IPR006119, IPR038109,PF07508,IPR011109,SSF53041,PTHR30461, PS51736,Coil,PF00239
MRAKKKPAMLEPDMQDAVIYTRYSSHNQRDCSIEQQVADCEIFARQNNLRVVKVYADRHLSGTTDNRPQFQQMLKDAAHGHWAYVICWKIDRFARNRYDSATYKFRLKKAGVRVLYAKESIPDGPEGILLESVLEGSAEYYSAALAQNIRRGMKYNAEQCKVNSGSIPFGYCKGPDGRFAIHEANAEVVREIFRKAAAGMPFVDIANDLNSRGLKTSRGGRWNKGSFRLLMNEAYIGVYHFSDTRIEGGMPALIDQGTFWAANERLKANSSVRGRHQDGGDYLLTGKLKCAHCGSYMIGFSGTGKSGELHYYYGCQKRRRERACKKANVPREWIERVVVKAALDYVLRPDVMEWIADAVMEYQEREAASAQLAALTAELEENQKATDNVMKAIEAGIITSTTKQRLLDLEAKAQDLKRAIELEKLSHVRLERDQVLFWLDRFRGGSLQSQEFRRKVIDAFVSVVYLSDDHLRIAFNYSGGSNAEADFDLVMDAEAAAGELSKKFALKGRGYLVLLFSDSIGYSRLYFCC

SEQ ID NO: 3407 - protein, 529 aa, Unknown
  Description of Unknown: Integrase B3408 sequence
  cd00338,SM00857,G3DSA:1.10.10.2600,IPR036162,PF13408, PS51737,G3DSA:3.40.50.1390,IPR025827,IPR006119,IPR038109, PF07508,IPR011109,SSF53041,PTHR30461,PS51736, Coil,PF00239
MNFTSTWKITDPFAQYIIYLRKSRKDMEAEALGQTDTLKRHRAALLSLAENNGLSVVEICEEVVTGDSIAVRPEVQKVLQLVETGSYAGVLVMEVERLARGDTIDQGIIAQTFKYSNTKIITPNKVYDPNNEMDEEYFEFGLFMSRREYNTIKRRLSRGKEASLREGKWISGKTPFGWLREKLPNDKGYKLIPHPEQAPILRQIYDWYTGEGCARIGAKAISTRLNSLGVPTNSGSLWRTDSVLDILRNPANAGWIKSGGRPETKRIVDGAVVVSRPRTRQEDLKLYKGLHDGLISQEQYDKAVALSYSSASPRGKGAWQTVTSLAGLIRCDQCGRVMVRRPSSGGRRDTLLCPSYGCTTVSAWYEDVEGAVLDALRGWLHELEVGNSENSDDHSLLDALAASISADQKQLAKLEVQEARAYEFVETGVYTPEIFLQRSQALAADKQVIISRIEENQRAQDEITRAKQARARLAPAVRHVLETYPLAATSQDKNDLLKTVLQKVLYHKQSKSYSKAGSDMRVTLYPLTD

SEQ ID NO: 3408 - protein, 529 aa, Unknown
  Description of Unknown: Integrase B3409 sequence
  PTHR30461:SF3,SM00857,G3DSA:1.10.10.2600,IPR036162,PS51737, G3DSA:3.40.50.1390,IPR006119,IPR038109,PF07508,IPR011109, SSF53041,PTHR30461,Coil,PS51736,cd00338, PF00239
MSSYCIYLRKSRADLEAEAHGEGETLSRHKTALLELARRMGITISATYEEIVSGETIAARPQMQRLLSEVGAGEWDGVLVMEIERLARGDTMDQGLVAQTFKYSGTKIITPLKTFDPQNEFDEEYFEFGLFMARREFTTTNRRLVRGREASAKEGKYVGSVPPYGYRKVKIPNDKGFTLEIVEEQAKVVRMIFEWYAEGAEVNSQKKRIGPYTIAVRLNELGIKSAGKKDYWTIYGVQNMLINPVYIGKIRWGYRKVKKTVTPEGMKKKSREFAQDGDYIVVDGLHEPILSEELFYKVQDLIAANPPTPIKYRNNNINPFAGLIFCAKCGHCLSYRKGYGRHPGYLGCNVAGCDNKAAPFELIEQRVLSILNSWVKDYSVDKAQIKHEADLNAELSNAISLAEKEIENLQGQLDNVYSFFERGTYTEKIFKQRSSAIEQQITDIGEKIDRLKAEHQQVLERQNVQAEFVPSIKHLLEIYDTLEPVEKNKWLKQIIDRMVYEKNADGKYRNVDPGDFTLGILPRLPKKGS

SEQ ID NO: 3409 - protein, 529 aa, Unknown
  Description of Unknown: Integrase B3410 sequence
  cd00338,SM00857,G3DSA:1.10.10.2600,IPR036162,PS51737, G3DSA:3.40.50.1390,IPR006119,IPR038109,PF07508,IPR011109, SSF53041,PTHR30461,PS51736,Coil,PF00239
MEQYCLYLRKSRSDVEAENHGEEETLARHEKILLELAKRREYNVTQIYREVVSGETIAARPVMQQLLSEVEHGLWSGVLVVEVERLARGDTIDQGIVAQTFKYSDTQIITPMKTYNPNNEFDEEYFEFGLFMSRREYKTINRRLQRGRLSSVKEGKYVNSIAPYGYERVKIKGEKGFTLAPDPNEANVIKMIFELYTRGELQPDGTYKRLGVSLLAGKLNSMKIPARKSEYWVPASIKDMLRNPVYAGKIRWNCRAVIKKMKSGNINISRPRSEESDCIIVKGLHPALVTQETFDLAQEYLAKNPPRPTKRNAPTKNPLSGVVVCAFCGRRLVRRPYTSATPPTLMCTVPQCPNISSFLHLVEERILKALEEWLRNYKLQWNLSDKSSELISEAEILRQSLKDINLQITKLNKQMIKAHELLEQDIYTTDVFLERSRAITEKQNQLSSDRAEIEKQLGIESTREKSTKEIIPKVEKLLDVYYDLPTAQEKNDMLKEVLEKVVYKKTQNTRWSGSPDDFEITIYPKLPKS

SEQ ID NO: 3410 - protein, 529 aa, Unknown
  Description of Unknown: Integrase B3411 sequence
  SM00857,G3DSA:1.10.10.2600,IPR036162,PF13408, IPR025827,G3DSA:3.40.50.1390,PS51737,IPR006119, IPR038109,PF07508,SSF53041,IPR011109, PF00239,PTHR30461,PS51736,Coil,cd00338
MKFTSTWKISDPLAQYIIYLRKSRKDMEAEALGQTDTLKRHRAALLSLSESRGLNVVEICEEVVTGDSIAVRPEVQKVLQLVETGSYAGVLVMEVERLARGDTIDQGIIAQTFKYSNTKIITPNKIYDPNNEMDEEYFEFGLFMSRREYNTIKRRLSRGKEASLREGKWISGKTPFGWLREKLPNDKGYKLIPHPEQAPILRQIYDWYTGEGCARIGAKAISTRLNSLGVPTNSGSLWRTDSVLDILRNPANAGWIKSGGRPETKRIVDGAVVVSRPRTRQEDLKLYKGLHDALISQAQYDKAVSLSYSVVAPRGKGAWKTVTSLAGLVRCDQCGRVMVRRASSGDRRPSFMCPTQGCPTVSSWYSEVEEALLDALRDWLRELEVGEADTNDDHSLLDALSASINADQKQLAKLEAQEARAYELVETGVYTPEVFLRRSQALAADKQVIVSRIEENQRAQDEITRAKQARARLAPAVRHVLEAYPLAATPQDKNDLLKTVLQKVLYHKRSKSYSKAGSDMCLTLYPLTD

SEQ ID NO: 3411 - protein, 529 aa, Unknown
  Description of Unknown: Integrase B3412 sequence
  cd00338,SM00857,G3DSA:1.10.10.2600,IPR036162,PF13408, PS51737,G3DSA:3.40.50.1390,IPR025827,IPR006119,IPR038109, PF07508,IPR011109,SSF53041,PTHR30461,PS51736, Coil,PF00239
MKFTSTWKIADPLAQYIIYLRKSRKDMEAEALGQTDTLKRHRAALLSLSESRGLNVVEICEEVVTGDSIAVRPEVQKVLQLVETGNYAGVIVMEVERLARGDTIDQGIIAQTFKYSNTKIITPNKIYDPNNEMDEEYFEFGLFMSRREYNTIKRRLSRGKEASLREGKWISGKTPFGWSREKLPNDKGYKLVPHPEQAPVLQQIYNWYTGEGCARIGAKAISTRLNSLGVPTNSGSLWRADSVLDILRNPANAGWIKSGGRPETKRIVDGAVVVSRPRTRQEDLKLYKGLHDGLISQEQYDKAVALSYSSASPRGKGAWGTVTSLAGLVRCDQCGRVMVRRPSSGNRRDTLLCPSYGCTTVSAWYDDVEDAVLDALRGWLRELELGEAAAPDDTPMRTALESSIVADRKQLAKLEAQEARAYELVETGIYTPEIFLQRSQALAADKQVIVDRIEASQTTIHELARARQARARLAPAVRRVLETYPLAASPQEKNALLKTVLQKVLYHKQTKSYTKSGSDMHVTLYPLAD

SEQ ID NO: 3412 - protein, 529 aa, Unknown
  Description of Unknown: Integrase B3413 sequence
  PTHR30461:SF3,SM00857,G3DSA:1.10.10.2600,IPR036162,PF13408, IPR025827,G3DSA:3.40.50.1390,PS51737,IPR006119,IPR038109, PF07508,SSF53041,IPR011109,PF00239,PTHR30461, PS51736,Coil,cd00338
MNAVIYARYSSERQTEASIEGQLKVCYDYAEKQGYTIIGEYIDRALTGRNTDRPQFLKMIKDSSKQEFQIVLVYQLDRFSRNRYDSATYKAKLKKNGVRVVSARENISDDASGILMESVLEGMAEYYSRELAQKVTRGMNLNAEKCLYNGGTVPFGYKIVDKKFVIDEHTAPYVKKIFEMYSTGNTIKEIITYLNARNIKTSTNTKFNYSSLHTMLHNRKYIGFYKFGDVEVKDGVPRLISDKLFEKVQGESLKNHKAPARAKAIEEYILTTKLFCGYCKEMMVGVSGTSGNKKKFCYYSCNKARRKLCNKKNVSKDYLEDLVVNQCRELLTDENILKIAKEVVKQSRKDDSYSEIEYLEKAINKLNKEKKNLMTTLKSCDIESVKQDIFSEIGNINEEIADFEKQMSEVKNNMVVVEETEVIFFLSKLKDGNINSLKYRKLLVNIFVNQIFLYDDKITFIFNTGKEPVTLPEKFLEEYEKEHKIRSDLQKTGSPRRNRLTNRAKRFLICFFEIFVLLSCSCGYICAIV

SEQ ID NO: 3413 - protein, 529 aa, Unknown
  Description of Unknown: Integrase B3414 sequence
  PTHR30461:SF3,IPR036162,PS51737,IPR011109,PTHR30461, PF00239,G3DSA:1.10.10.2600,IPR006119,SSF53041,cd00338, SM00857,IPR025827,IPR038109,PS51736,mobidb-lite, PF13408,G3DSA:3.40.50.1390,PF07508,Coil
MKKRINTNSAARAVIYARYSSANQRDCSIEQQVEKCRELAAREGVTVIEIYADRAVSGKTDRRPNFQRMMKDASLRQFDVVLAWKSNRMGRNMLQAMMNEEQLRGNGIRTIYAEEDFDDTAAGRFALRNMMNVNQFYSENMAEDISRGLMDNASKCMSNGSLPLGYKTGKDQKVVLDEAEAAIVQEIFTRVSCYEPFIDIARDLNRRGIKTKKGAEWGRSSFHTICRNERYRGIYIYRDIRVEGGMPRIVSDELFYKVQEVLKVKKNPQGRRKRSGYEEYLLTGKLYCGHCGSPMTGIAGTSKTGAMHYYYTCQKRRTDHSCDKKAVRRDQIEKAVAIAIQQQLLTDENIQMMADETMAYNARTEIKYRLQSLQQQLYSNETSTANIMKAIEMGIITDTTKARLLALEQEHGQLLAKIDTAKAEMVPINREDFVSLLDIYRTGDVNNKKYLAALFDTFLVRVDLYDDHFKITFDPTGGKMPVDIPIGAEDSPESPGDSPESSDFEASPQDAEKFVLALHNRTKELQALA

SEQ ID NO: 3414 - protein, 529 aa, Unknown
  Description of Unknown: Integrase B3415 sequence
  PTHR30461:SF3,SM00857,G3DSA:1.10.10.2600,IPR036162,PF13408, PS51737,G3DSA:3.40.50.1390,IPR025827,IPR006119,IPR038109, PF07508,IPR011109,SSF53041,PF00239,PTHR30461, PS51736,Coil,cd00338
MQQAVIYARYSPGPNQTEQSIEGQVRECTKYAELHDLRIVGTYIDRKISGKTDNRREFQRMIDDSEKHIFDVIILYHTDRFARNRYDSAIYKHKLKENGVELRYATTDIPKGPEGIILESIMEGWAEYYSAELSRKIKRGMRESALKCHSTGAGRCLGYRTAEDKSLVIEPEGAKAVQTVFDMYIKGKSHADICRYLNDCGFRTAQGKLFNKNSVTHIIRNKRYIGVYTYDDITIEDGIPAIISKDTFHLAQLEAARRKTAKRPKEPKAEYLLSGKAFCGHCQKPLVGVSGTGKSGNKWYYYYCQESRAKRGCTKKPVKRDWLEREVVKRTVAEVLQPEVIQHIAKKCYDLQMEYRQDNSDVLFYELKLKDVRKAIKNTMHAIESGVKTKTLPARLQELENEEEALEAELAIAKASDFVITADQIEFLLTQFAEPWECESEEEYHRRIIKCFVHKVFLFDDKLLIYYNVSRDGKTREQSEAELLEEALGEGFDKRSSGSTMLIAGRTPECEIIVLRYGFWLALDLTVQA

SEQ ID NO: 3415 - protein, 529 aa, Unknown
  Description of Unknown: Integrase B3416 sequence
  cd00338,SM00857,G3DSA:1.10.10.2600,IPR036162,PF13408, IPR025827,G3DSA:3.40.50.1390,PS51737,IPR006119,IPR038109, PF07508,SSF53041,IPR011109,PTHR30461,PS51736, Coil,PF00239
MKFTSTWKIADPLAQYIIYLRKSRKDMEAEALGQTDTLKRHRAALLSLSESRGLNVVEICEEVVTGDSIAVRPEVQKVLQLVETGNYAGVIVMEVERLARGDTIDQGIIAQTFKYSDTRIITPNKTYDPNNEMDEEYFEFGLFMSRREYNTIKRRLSRGKEASLREGKWISGKTPFGWLREKLPNDKGYKLVPHPEQAPVLQQIYNWYTGEGCARIGAKAISTRLNSLGVPTNSGSFWRADSVLDILRNPANAGWIKSGGRPETKRIVDGSVVVSRPRTRQEDLKLYKGLHDGLIPQEQYDKAVALSYSSASPRGKGAWGTVTSLAGLVRCDQCGRVMVRRPSSGNRRDTLLCPSYGCTTVSAWYDDVEDAVLDALRGWLRELELGEAAAPDDTPMRTALESSIAADRKQLAKLEAQEARAYELVETGVYTPEIFLQRSQALAADKQVIVDRIEASQTTITELARARQARARLAPAVRRVLETYPLAASPQEKNALLKTVLQKVLYHKQTKSYTKSGSDMHVTLYPLAD

SEQ ID NO: 3416 - protein, 529 aa, Unknown
  Description of Unknown: Integrase B3417 sequence
  cd00338,SM00857,G3DSA:1.10.10.2600,IPR036162,PF13408, IPR025827,G3DSA:3.40.50.1390,PS51737,IPR006119,IPR038109, PF07508,IPR011109,SSF53041,PTHR30461,PS51736, Coil,PF00239
MKFTSTWKISDPLAQYIIYLRKSRKDMEAEALGQTDTLKRHRAALLSLSESRGLNVVEIREEVVTGDSIAVRPEVQKVLQLVETGNYAGVIVMEVERLARGDTIDQGIIAQTFKYSDTRIITPNKTYDPNNEMDEEYFEFGLFMSRREYNTIKRRLSRGKEASLREGKWISGKTPFGWSREKLPNDKGYKLVPHPEQAPILQQIYNWYTGEGCARIGAKAISTRLNSLGVPTNSGSLWRADSVLDILRNPANAGWIKSGGRPETKRIVDGSVVVSRPRTRQEDLKLYKGLHDGLISQEQYDKAVALSYSSASPRGKGAWGTVTSLAGLVRCDQCGRVMVRRPSSGGRRDTLLCPSYGCTTVSAWYDDVEDAVLDALRGWLRELELGEAAAPDDTPMRTALESSIAADRKQLAKLEAQEARAYELVETGVYTPEIFLQRSQALAADKQVIVDRIEASQTTIHELARAKQARARLAPAVRRVLETYPLAASPQEKNALLKTVLQKVLYHKQTKSYTKSGSDMHVTLYPLAD

SEQ ID NO: 3417 - protein, 529 aa, Unknown
  Description of Unknown: Integrase B3418 sequence
  cd00338,SM00857,G3DSA:1.10.10.2600,IPR036162,PF13408, PS51737,G3DSA:3.40.50.1390,IPR025827,IPR006119,IPR038109, PF07508,IPR011109,SSF53041,PTHR30461,PS51736, Coil,PF00239
MKFTSTWKISDPLAQYIIYLRKSRKDMEAEALGQTDTLKRHRAALLSLSESRGLNVVEICEEVVTGDSIAVRPEVQKVLQLVETGSYAGVLVMEVERLARGDTIDQGIIAQTFKYSNTKIVTPNKVYDPNNEMDEEYFEFGLFMSRREYNTIKRRLSRGKEASLREGKWISGKTPFGWSREKLPNDKGYKLIPHPEQAPVLQQIYDWYTGDGCARIGAKAISTRLNHLGVKTNSGNSWTTSAILELLRNPANAGWIKSGGRPETKRIVDGSVVVSRPRTRQEDLKLYKGLHDALISQAQYDKAVSLSYSVVAPRGKGAWKTVTSLAGLVRCDQCGRVMVRRPSSGGRRDAFMCPSSDCPTVSAWYEDVEDAVLDALRGWLHELEVGEAERSDEHSLLDALAASISADQKQLAKLEVQEARAYEFVETGVYTPEIFLQRSQALAADKQVIISRIEENQRAQDEITRAKQARARLAPAVRHVLETYPLAATPQDKNELLKTVLQKVLYHKQSKSHSKSGSDMRVTLYPLTD

SEQ ID NO: 3418 - protein, 529 aa, Unknown
  Description of Unknown: Integrase B3419 sequence
  SM00857,G3DSA:1.10.10.2600,IPR036162,PF13408,IPR025827, G3DSA:3.40.50.1390,PS51737,IPR006119,IPR038109,PF07508, SSF53041,IPR011109,PF00239,PTHR30461,PS51736, Coil,cd00338
MNFTSTWKIADPLAQYIIYLRKSRKDMEAEALGQTDTLKRHRAALLSLSESRGLNVVEICEEVVTGDSIAVRPEVQKVLQLVETGNYAGVIVMEVERLARGDTIDQGIIAQTFKYSNTKIVTPNKVYDPNNEMDEEYFEFGLFMSRREYNTIKRRLSRGKEASLREGKWISGKTPFGWSREKLPNDKGYKLVPHPEQAPILQQIYNWYTGEGCARIGAKAISTRLNSLGVPTNSGSLWRADSVLDILRNPANAGWIKSGGRPETKRIVDGAVVVSRPRTRQEDLKLYKGLHDGLISQEQYDKAVALSYSSASPRGKGAWGTVTSLAGLVRCDQCGRVMVRRPSSGNRRDTLLCPSYGCTTVSAWYDDVEDAVLDALRGWLRELELGEAAAPDDTPMRTALESSIAADRRQLAKLEAQEARAYELVETGVYTPEVFLQRSQALAADKQVIVDRIEASQATIHELARAKQARARLAPAVRRVLETYPLAASPQEKNALLKTVLQKVLYHKQTKSYTKSGSDMHVTLYPLAD

SEQ ID NO: 3419 - protein, 529 aa, Unknown
  Description of Unknown: Integrase B3420 sequence
  cd00338,SM00857,G3DSA:1.10.10.2600,IPR036162,PF13408, PS51737,G3DSA:3.40.50.1390,IPR025827,IPR006119,IPR038109, PF07508,IPR011109,SSF53041,PTHR30461,PS51736, Coil,PF00239
MKFTSAWRIVDPLSQYIIYLRKSRKDMDAEALGQTDTLKRHRAALLSLAESRGLNVVEICEEVVTGDSIAVRPEVQKVLQLVETGAYAGVLVMEVERLARGDTIDQGIIAQTFKYSNTMIITPNKSYDPNNEMDEEYFEFGLFMSRREYNTIKRRLTRGKEASIREGKWISGKTPFGWLREKIPNDKGYMLVPHPEQAPILRQIYDWYTGDGCVRVGSSAIATRLNRLGVKTNTGSRWTASAILEVLRNPANAGWIKSKGRPEIKHIVDGSVVVSRPRARIEDLTLHKGLHNGLISQEQFDRAVALSYSTASPRGKGAWKTATSLAGLVRCDQCGRIMVRRATSGGRKDTFLCPSYGCSTVSAWYDEVETAVLDALRGWLHELEVGEAVSADDSSLLSALSSAISADQKQLAKLEAQEARAYEFVETGVYTPEVFLQRSQSLAADKQAVLSRIEENQRAIDDIDRAKQARARLAPAVRHVLETYPLAGSVQEQNDLLKTVLQKIVYHKQSKSYSKAGSDMRVTLYPLTD

SEQ ID NO: 3420 - protein, 529 aa, Unknown
  Description of Unknown: Integrase B3421 sequence
  PTHR30461:SF3,SM00857,G3DSA:1.10.10.2600,IPR036162,PF13408, PS51737,G3DSA:3.40.50.1390,IPR025827,IPR006119,IPR038109, PF07508,SSF53041,IPR011109,PF00239,PTHR30461, PS51736,Coil,cd00338
MQRAVIYARYSPGPNQTEQSIEGQVRECTKYAELHDLRIVGTYIDRKISGKTDNRREFQRMIDDSEKHIFDVIILYHTDRFARNRYDSAIYKHKLKENGVELRYATTDIPKGPEGIILESIMEGWAEYYSAELSRKIKRGMRESALKCHSTGAGRCLGYRTAEDKSLVIEPEGAKAVQTVFDMYIKGKSHADICRYLNDCGFRTAQGKLFNKNSVTHIIRNKRYIGVYTYDDITIEDGIPAIISKDTFHLAQLEAARRKTTKRPKEPKAEYLLSGKAFCGHCQKPLVGVSGTGKSGNKWYYYYCQESRAKRGCTKKPVKRDWLEREVVKRTVAEVLQPEIIQHIAKKCYDLQMEYRQDNSDVLFYELKLKDVRKAIKNTMHAIESGVKTKTLPARLQELENEEEALEAELAIAKASDFVITANQIEFLLTQFAEPWECESEEEYHRRIIKCFVHKVFLFDDKLLIYYNVSRDGKTREQSEAELLEEALGEGFDKRSSGSTILIAGRTPECEIIVLRYGFWLALDLTVQA

SEQ ID NO: 3421 - protein, 529 aa, Unknown
  Description of Unknown: Integrase B3422 sequence
  PTHR30461:SF3,cd00338,SM00857,G3DSA:1.10.10.2600,IPR036162, PF13408,PS51737,IPR025827,G3DSA:3.40.50.1390,IPR006119, IPR038109,PF07508,IPR011109,SSF53041,PTHR30461, PS51736,Coil,PF00239
MYEEIKTACLYLRYSSSNQTEQSIEGQMHVCQDFCKRHNIRIVEMYIDRATSASKDIEKRVEFLKMIKDSEKGNFNAVIVYKLDRFARSRYDSATYKYRLKRNGVQLISATENITQDPEGIILESVLEGMAEFYSAELSQKINRGMRESALKHNSIGGAIPLGYKTVDKKLVIDETTAPIVREAFQMYADGESVAEICRTFNNRGYKTSKGTRFGKSSFTKIFRNEKYIGVYKYHDYRAEDVIPPIIDKDLWDRVQVRVGKIKKAPARNKARHTYLLTGKLFCGHCGSAMNADGNSQGYLYYRCYGKKNLDKQCNKRNMEKNLIERLVAQDAMSFLTDEYIEKIATIACDRNKQEIESDSPIPVIRDRIRQVDVSLNNLLKAIETGSAPDMLVKRMGELETEKKDMEVQLKKEMAHQVYIDKEQVIFWLEKFREGDINDEEFCQTVIDLFVNSVTVWDEPDDKFKITIAYNLTSIPQKTYRLSKDGRLSDYASNTPQWTVRSRYRWYRSSAGRLWCCPKSCGTFGHILS

SEQ ID NO: 3422 - protein, 529 aa, Unknown
  Description of Unknown: Integrase B3423 sequence
  PTHR30461:SF3,cd00338,SM00857,G3DSA:1.10.10.2600,IPR036162, PF13408,PS51737,IPR025827,G3DSA:3.40.50.1390,IPR006119, IPR038109,PF07508,IPR011109,SSF53041,PTHR30461, PS51736,Coil,PF00239
MIPFSVSSSALPDGCSGFLRAVIYARFSPGKNQKEISIEGQLRECREFADRNNYEVVGEYIDRRISGRSDNRADFQRLMRDCEKRCFDVVIVWKFDRFFRNRQESAIYKKHLADFGVKLVSAKEFIPDGSGGIIMAGMIETVAEWYSANLSENVTRGMYETASKAQSTGHLPLGYVTGPDKRLKIQPVEAEAVQIAFQMYSDGANLKEIADALNESGHTTKTGRPFCVNSFGAILTNPKYIGVYKWHDDIEIRDGCPRIVSDELFFSVQRRLERTRRTSGRGRATTEYFLSTKIFCGHCGKPMCGESALKRGMRYYYYACSEKKRFHNCKKKNVPKDKIENLVFEKTLAMLTDDNIAYIAREVERIAADENINLAALRQLEGQLAEVNKRLSNIGNAIAQGIITETTKELLVSAEAERAAINKKIAQERLLMKGTVKAENVACWLHSFKTKKRSDLEFKRQLFASLVHSVYVYDDHLKVIFNVEKYGAVEISFDELSSATSSDVVGLAQPAKRPQRTLILCGLLAFVTH

SEQ ID NO: 3423 - protein, 529 aa, Unknown
  Description of Unknown: Integrase B3424 sequence
  PTHR30461:SF3,SM00857,G3DSA:1.10.10.2600,IPR036162,PF13408, PS51737,G3DSA:3.40.50.1390,IPR025827,IPR006119,IPR038109, PF07508,IPR011109,SSF53041,PF00239,PTHR30461, PS51736,Coil,cd00338
MSSVDKIAVVYARYSSHGQTEQSIEGQIAAAQKYAEQHGYTIIHIYADRAMTGRNDDREEFQRMLSDTATHQFGVILLWKIDRFGRNREEIAFNRYRCKKNGVRVERVAEDVPDGPEGVILDSVLEGMAEYYSLQLAQNVRRGQRESAKKSQTVGGCKIIGYNVDPDTKRYDVDPKTAPFVTEVFKRYANGKTISEIVVWLNAQGVRTTRGGEFTVNSLHRLLKNEKYTGVYIFHDIRNEGGMPALIDRATFDKAQEMLKVNRRAPARVWSKTEYLLTDKLFCGHCGAMMVGESGHGRNGTKHNYYTCWNRKKKKLCDKKPVRQDVIEPLVLRSIGKLLENPATLENIADQVWAAYERSDTSGDTIKALDKQIADVDRALSNVMKAIEMGIINEMTKARMDELTDQKQALSAARADAGLAGGFKLTRDMILFFLQGIAALDMADRDSQKRLIKTFVNAIYLYDDHFDIAFNYTDNGKVVVRIQEINDAACGEVFGRCAQSPAIVQTSEPLITIVVSCSVFVFTVKMPEA

SEQ ID NO: 3424 - protein, 529 aa, Unknown
  Description of Unknown: Integrase B3425 sequence
  cd00338,SM00857,G3DSA:1.10.10.2600,IPR036162,PF13408, IPR025827,G3DSA:3.40.50.1390,PS51737,IPR006119,IPR038109, PF07508,SSF53041,IPR011109,PTHR30461,PS51736, Coil,PF00239
MKFTSTWKIADPLAQYIIYLRKSRKDMEAEALGQTDTLKRHRAALLSLSESRGLNVVEICEEVVTGDSIAVRPEVQKVLQLVETGNYAGVIVMEVERLARGDTIDQGIIAQTFKYSDTRIITPNKTYDPNNEMDEEYFEFGLFMSRREYNTIKRRLSRGKEASLREGKWISGKTPFGWSREKLPNDKGYKLVPHPEQAPVLQQIYNWYTGEGCARIGAKAISTRLNSLGVPTNSGSLWRADSVLDILRNPANAGWIKSGGRPETKRIVDGSVVVSRPRTRQEDLKLYKGLHDGLISQEQYDKAVALSYSSASPRGKGAWGTVTSLAGLVRCDQCGRVMVRRPSSGNRRDTLLCPSYGCTTVSAWYDDVEDAVLDALRGWLRELELGEAAAPDDTPMRTALESSIAADRKQLAKLEAQEARAYELVETGVYTPEIFLQRSQALAADKQVIVDRIEASQTTIHELARARQARARLAPAVRRVLETYPLAASPQEKNALLKTVLQKVLYHKQTKSYTKSGSDMHVTLYPLAD

SEQ ID NO: 3425 - protein, 529 aa, Unknown
  Description of Unknown: Integrase B3426 sequence
  PTHR30461:SF3,SM00857,G3DSA:1.10.10.2600,IPR036162,PF13408, IPR025827,G3DSA:3.40.50.1390,PS51737,IPR006119,IPR038109, PF07508,SSF53041,IPR011109,PF00239,PTHR30461, PS51736,Coil,cd00338
MSSVDKTAVIYARYSSHGQTEQSIEGQIAAAQKYAEGKGYTIIHIYADRAMTGRNDDREQFQKMLSDTATHQFGVILLWKIDRFGRNREEIAFNRYRCKKNGVRVERVAEDVPDGPEGVILDSVLEGMAEYYSLQLAQNVRRGQRESAKKSQTVGGCNIIGYKVNPDTKRYEVDPKTAPFVTEVFKRYANGETISEIVAWLNVQGVRATRGGEFTVNSLHRLLKNEKYTGVYIFHDIRNEGGMPALTDRATFDKVQEMLKVNRRAPARVWSKTEYLLTDKLFCGHCGAMMVGESGHGRNGTKHSYYTCWNRKKKKSCSKKPVLQDVIEPMVLRVISKMLSDEATLEYIADQVWAVYERSDTSGDTIKALDKQIADVDRALSNVMKAIEMGIINEMTKARMDELTDQKQALSVARAEAGLAGGFKLTRDMILFFLHDMAATNMTDRDCQKRLIKTFVNAIYLYDDHFDIAFNYTSNGKMVVKMQEINDTTSGEVFGRCAQSPAIVRTSEPLITIVVSCSVFVFSVKMPEV

SEQ ID NO: 3426 - protein, 529 aa, Unknown
  Description of Unknown: Integrase B3427 sequence
  SM00857,G3DSA:1.10.10.2600,IPR036162,PS51737,G3DSA:3.40.50.1390, IPR006119,IPR038109,PF07508,IPR011109,SSF53041, PF00239,PTHR30461,PS51736,Coil,cd00338
MYEDLSFPYGSGTYAIYLRKSRKDLDAEALGEGETLARHLSVLKALAQRMELNVVRVYAEVVSGESIDARPQMQELLRDVESGIYDGVLVVEVERLARGDTSDQGRVAKTFKFSDTLIITPSKTYDPNDEFDEEYFEFGLFMSRREYKTIRRRLTAGHAASCREGKYTGNVPPYGYARKKLPKEKGWTLEIIPEQARAVRLIFDWYQNGLNGLPVGYTMIAEELNHLSIKSPAGTFWNRNSIQNVLRNPVYAGYIKAGYRKEVKKLVDGKMNRSRPLNTDYTLYPGRHEAIISQETWDAVHNRMLKRTAPSARKTRPQQNPLSGMIYCSQCHRVMQRRPYQSGRTATLICTTPHCSTVSSDLPMVEQRILDALDGWLLSGTLPDPDQLPDHSGRIELLQHAVTGCQEELHEADLQLQKQYDLLEKGIYDEETFFERSAIMKKKKSELTSRLKNLQAELQHEISQDASAKNLLPTLQTIHDTYHTITDPAVQNSLLKEVIDHIEYTKSESGRWGRPDNFSLKIYPRVPPA

SEQ ID NO: 3427 - protein, 529 aa, Unknown
  Description of Unknown: Integrase B3428 sequence
  PTHR30461:SF3,SM00857,G3DSA:1.10.10.2600,IPR036162,PS51737, G3DSA:3.40.50.1390,IPR006119,IPR038109,PF07508,SSF53041, IPR011109,PF00239,PTHR30461,PS51736, Coil,cd00338
MSRYCIYLRKSRADLEAEAHGEGETLSRHKTALLELARRKGITISATYEEIVSGETIAARPQMQRLLSEVGAGEWDGVLVMEIERLARGDTMDQGLVAQTFKYSGTKIITPLKTFDPQNEFDEEYFEFGLFMARREFTTTNRRLVRGREASAKEGKYVGSVPPYGYRKVKIPNDKGFTLEIIEEQAKVVRMIFEWYAEGAEVNGQKKRIGPYTIAVRLNELGIKSVAGKDYWTIYGVQHMLINPVYIGKIRWGYRKVKKTVTPEGMKKKSREFAQDGDYIVVDGLHEPILSEELFYKVQDLIAANPPTPIKYRNNNVNPFAGLIFCAKCGHCLSYRKGYGRHPGYLGCNIAGCDNKAAPFELIEQRVLSILNSWVKDYSVDKAQIKHEADLNAELTNAISLAEKEIETLQDQLDKVYSFFERGTYTEKIFKQRSSTIEQQITDIGEKIDRLKAEHQQVLERQNVQAEFVPSIKHLLEIYDTLEPVEKNKWLKQIIDRMVYEKNADGKYRNVDPGDFTLGILPRLPKKGS

SEQ ID NO: 3428 - protein, 529 aa, Unknown
  Description of Unknown: Integrase B3429 sequence
  PTHR30461:SF3,SM00857,G3DSA:1.10.10.2600,IPR036162,PF13408, PS51737,G3DSA:3.40.50.1390,IPR025827,IPR006119,IPR038109, PF07508,IPR011109,SSF53041,PF00239,PTHR30461, PS51736,Coil,cd00338
MQRAVIYARYSPGPNQTEQSIEGQVRECTKYAELHDLRIVGTYVDRKISGKTDNRREFQRMIDDSEKHIFDVIILYHTDRFARNRYDSAIYKHKLKENGVELRYATTDIPKGPEGIILESIMEGWAEYYSAELSRKIKRGMRESALKCHSTGAGRCLGYRTAEDKSLVVEPEGAKAVQTVFDMYIKGKSHADICRYLNDCGFRTAQGKLFNKNSVTHIIRNKRYIGVYTYDDITIEDGIPAIISKDTFHLAQLEAARRKTAKRPKEPKAEYLLSGKAFCGHCQKPLVGVSGTGKSGNKWYYYYCQESRAKRGCTKKPVKRDWLEREVVKRTVAEVLQPEVIQHIAKKCYDLQMEYRQDNSDVLFYELKLKDVRKAIKNTMHAIESGVKTKTLPTRLQELENEEEALEAELAIAKASDFVITVDQIEFLLTQFAEPWECESEEEYHRRIIKCFVHKVFLFDDKLLIYYNVSRDGKTREQSEAELLEEALGEGFDKRSSGSTILIAGRTPECEIIVLRYGFWLALDLTVQA

SEQ ID NO: 3429 - protein, 529 aa, Unknown
  Description of Unknown: Integrase B3430 sequence
  PTHR30461:SF3,IPR036162,PS51737,IPR011109,PTHR30461, PF00239,G3DSA:1.10.10.2600,IPR006119,SSF53041,cd00338, SM00857,IPR025827,IPR038109,PS51736,mobidb-lite, PF13408,G3DSA:3.40.50.1390,PF07508,Coil
MRKKSNLNAATRAVIYARYSSANQRDCSIEQQVAKCRELAARLGLTVIDVYEDRAISGKTDRRPNFQRMMKDADLRQFDVVLAWKSNRMGRNMLQAMTNEERLRDNGIRTVYAEEDFDDTAAGRFALRNMMNVNQFYSENMAEDITRGLMDNAAKCLSNGSLPLGYKPGDDRHVVLDEAEAAIVQEIFTRVSCYEPFIDIARDLNRRGIKTKKGSEWGRSSFHTICRNERYRGIYIYRDVRIEGGMPRIVSDELFYKVQEVLKVKKNPQGRRKRSGYEEYLLTGKLFCGHCGSPMTGIAGTSKTGAMHYYYTCQKRRTDHSCDKKAVRRDQIERAVGVAIQQQLLTDENIQMMADKLMEYNARTETKYRLQGLQDQLNANKTATANILKAIEMGIITDATKARLLELEKEQGQLLVKIDEAKAEMVPISRNDFVKLLYIYKEGEPTDKKYLAALFDNFLVRVDLYDDHLKITFDPTGGRQPIDMPIGAEESPESPGDSSESSNFEASSQDAEKFVLALHNCTKELQALA

SEQ ID NO: 3430 - protein, 529 aa, Unknown
  Description of Unknown: Integrase B3431 sequence
  cd00338,SM00857,G3DSA:1.10.10.2600,IPR036162,PF13408, IPR025827,G3DSA:3.40.50.1390,PS51737,IPR006119,IPR038109, PF07508,SSF53041,IPR011109,PTHR30461,PS51736, Coil,PF00239
MKCTSTWRISDPLAQYIVYLRKSRKDMEAEALGQTDTLKRHRATLLSLAENNGLNVVEICEEVVTGDSIAVRPEVQKVLQLVETGSYTGVLVMEVERLARGDTIDQGIIAQTFKYSNTKIVTPNKVYDPNNEMDEEYFEFGLFMSRREYNTIKRRLSRGKEASLREGKWISGKTPFGWLREKLPNDKGYKLIPHPDQAPILRQIYDWYTGEGCARIGSYAIASRLNTLGVKTNSGNSWTTSAILELLRNPANAGWIKSGGRPETKRIVDGSVVVSRPRTRQEDLKLYKGLHDALISQAQYDKAVSLSYSVVAPRGKGAWKTVTSLAGLVRCDQCGRVMVRRASSGDRRPSFMCPTQGCPTVSSWYSEVEEALLDALRDWLRELEVGEADTNDDHSLLDALSASINADQKQLSKLEAQEARAYELVETGVYTPEVFLQRSQALAADKQVIVSRIEENQRAQDEITRAKQARARLAPAVRHVLEAYPLAATPQDKNDLLKTVLQKVLYHKRSKSYSKAGSDMCLTLYPLTD

SEQ ID NO: 3431 - protein, 529 aa, Unknown
  Description of Unknown: Integrase B3432 sequence
  SM00857,G3DSA:1.10.10.2600,IPR036162,PF13408,PS51737, G3DSA:3.40.50.1390,IPR025827,IPR006119,IPR038109,PF07508, IPR011109,SSF53041,PTHR30461,Coil,PS51736, cd00338,PF00239
MPYCLYLRKSRADIDAEANGEMETLARHEKILLDLAKRMHLDVTEIYREVVSGETISSRPVVQHLLTEVENEMWDGVLVVEIERLARGDTIDQGIVSRAFKFSNTKIITPLKTYDPNNEYDEEYFEFGLFMSRREYKTIRRRLTQGRMSSAKEGKHTGSKAPYGYDRIHVESGKGYTLSPNEKETPIVKMIFDWFVNGQLQEDGSYRKLGAHAIAHRLTNLSIDSPTGNPTWNPRSVYWILHNPVYTGKIRWGYKKDKKIIVDGAVKRTRIIPPEEEQILVEGLHPAIISDEIFNRAQELFLRRGNPSVVIEKELKNPLAGVVVCGICGRPLRYRSNANRRDYGVECRTYGCPCKGSYIYIVEKRIIDALRDWVNEYKLSWDDMPRETHSLLIVKEQAYNAAIKELNTLTKQLDKTHDLLEQGIYDTETFLIRSKSLSEKIAESEKNIAKLSADINNEKLRENNRKNLIPKVENLIDIYWQLPNASAKNDMLKEVLEKVEYTKLHTVGRSKTKKLDDFDLVLYPKLPRT

SEQ ID NO: 3432 - protein, 529 aa, Unknown
  Description of Unknown: Integrase B3433 sequence
  PTHR30461:SF3,SM00857,G3DSA:1.10.10.2600,IPR036162,PF13408, PS51737,G3DSA:3.40.50.1390,IPR025827,IPR006119,IPR038109, PF07508,IPR011109,SSF53041,PTHR30461,Coil, PS51736,cd00338,PF00239
MQQAVIYARYSPGPNQTEQSIEGQVRECTKYAELHDLRIVGTYIDRKISGKTDNRREFQRMIDDSEKHIFDVIILYHTDRFARNRYDSAIYKHKLKENGVELRYATTDIPKGPEGIILESIMEGWAEYYSAELSRKIKRGMRESALKCHSTGAGRCLGYRTAEDKSLVIEPEGAKAVQTVFDMYIKGKSHVDICRYLNDCGFRTAQGKLFNKNSVTHIIRNKRYIGVYTYDDITIEDGIPAIISKDTFHLAQLEAARRKTAKRPKEPKAEYLLSGKAFCGHCQKPLVGVSGTGKSGNKWYYYYCQESRAKRGCTKKPVKRDWLEREVVKRTVAEVLQPEVIQHIAKKCYDLQMEYRQDNSDVLFYELKLKDVRKAIKNTMHAIESGVKTKTLPARLQELENEEEALEAELAIAKASDFVITADQIEFLLTQFAEPWECESEEEYHRRIIKCFVHKVFLFDDKLLIYYNVSRDGKTREQSEAELLEEALGEGFDKRSSGSTILIAGRTPECEIIILRYGFWLALDLTVQV

SEQ ID NO: 3433 - protein, 529 aa, Unknown
  Description of Unknown: Integrase B3434 sequence
  cd00338,SM00857,G3DSA:1.10.10.2600,IPR036162,PF13408, IPR025827,G3DSA:3.40.50.1390,PS51737,IPR006119,IPR038109, PF07508,SSF53041,IPR011109,PTHR30461,PS51736, Coil,PF00239
MNFTSTWKISDPLAQYIIYLRKSRKDMEAEALGQTDTLKRHRAALLSLSESRGLNVVEICEEVVTGDSIAVRPEVQKVLQLVETGNYAGVIVMEVERLARGDTIDQGIIAQTFKYSNTKIVTPNKVYDPNNEMDEEYFEFGLFMSRREYNTIKRRLSRGKEASLREGKWISGKTPFGWSREKLPNDKGYKLVPHPEQAPILQQIYNWYTGEGCARIGAKAISTRLNSLGVPTNSGSLWLADSVLDILRNPANAGWIKSGGRPETKRIVDGAVVVSRPRTRQEDLKLYKGLHDGLISQEQYDKAVALSYSSASPRGKGAWGTVTSLAGLVRCDQCGRVMVRRPSSGNRRDTLLCPSYGCTTVSAWYDDVEDAVLDALRGWLRELELGEAAAPDDTPMRTALESSIAADRKQLAKLEAQEARAYELVETGVYTPEIFLQRSQALAADKQVIVDRIEASQTTIHELSRARQARARLAPAVRRVLETYPLAASPQEKNDLLKTVLQKVLYHKQTKSYTKSGSDMHVTLYPLAD

SEQ ID NO: 3434 - protein, 529 aa, Unknown
  Description of Unknown: Integrase B3435 sequence
  SM00857,G3DSA:1.10.10.2600,IPR036162,PF13408,PS51737, G3DSA:3.40.50.1390,IPR025827,IPR006119,IPR038109,PF07508, IPR011109,SSF53041,PTHR30461,Coil,PS51736, cd00338,PF00239
MPYCLYLRKSRADIDAEANGEMETLARHEKILLDLAKRMHLDVTEIYREVVSGETISSRPVVQHLLTEVENEMWDGVLVVEIERLARGDTIDQGIVSRAFKFSNTKIITPLKTYDPNNEYDEEYFEFGLFMSRREYKTIRRRLTQGRMSSAKEGKHTGSKAPYGYDRIHVESGKGYTLSPNEKEAPIVKMIFDWFVNGQLQEDGSYRKLGAHAIAHRLTNLSIDSPTGNPTWNPRSVYWMLHNPVYTGKIRWGYKKDKKIIVDGAVKRTRIIPPEEEQILVEGLHPAIISDEIFNRAQELFLRRGNPSVVIEKELKNPLAGVVVCGICGRPLRYRSNANRRDFGVECRTYGCPCKGSYIYIVEKRIIDALRDWVNEYKLSWDDMPRETHSLLIVKEQAYNAAIKELNTLTKQLDKTHDLLEQGIYDTETFLIRSKSLSEKIAESEKNIAKLSADINNEKLRENNRKNLIPKVENLIDIYWQLPNASAKNDMLKEVLEKVEYTKLHTVGRSKTKKLDDFDLVLYPKLPRT

SEQ ID NO: 3435 - protein, 529 aa, Unknown
  Description of Unknown: Integrase B3436 sequence
  PTHR30461:SF3,SM00857,G3DSA:1.10.10.2600,IPR036162,PF13408, IPR025827,PS51737,G3DSA:3.40.50.1390,IPR006119,IPR038109, PF07508,IPR011109,SSF53041,PF00239,PTHR30461, Coil,cd00338
MKRAVIYARYSPGPNQTEQSIEGQVRECTKYAEQHDLRIIGTYIDRKISGKTDNRREFQRMIDDSDKHLFDAIILYHTDRFARNRYDSAIYKHRLKENGVELRYATTDIPKGPEGIILESIMEGWAEYYSAELSRKIKRGMRESALKCHSTGSGRCLGYRTAEDKSLVIEPEGAKAVQTVFDMYIKGKSHAEICKYLNDCGFRTAQGKLFNKNSVGHIIKNQRYIGVYTYDDITIEDGIPAIISKDTFHLAQLEAERRKRTKRPLEPKAEYLLSGKAFCGHCQKPLVGVSGTGKSGNKWYYYYCQESRAKRGCTKRPVKRDWLEAEVVRRTVDEILRPEVIQHIAQKCYDLQMEYRQDNSDVLFYELKLKDVRKAIKNTLHAIESGVKTKTLPARLQELENEEEALEAELAVAKASDFIITPSQIEFLLEQFAERWESESEEEYRRRIIKCFVHKVFLFDDKLLIYYNVSRDGKTREQSETELLSSALGEGFDKRSSGSTILIAGRTPECEIIVLRHGFWLALDLTAQV

SEQ ID NO: 3436 - protein, 529 aa, Unknown
  Description of Unknown: Integrase B3437 sequence
  cd00338,SM00857,G3DSA:1.10.10.2600,IPR036162,PF13408, IPR025827,G3DSA:3.40.50.1390,PS51737,IPR006119,IPR038109, PF07508,IPR011109,SSF53041,PTHR30461,PS51736, Coil,PF00239
MKFTSTWRISDPLAQYIVYLRKSRKDMEAEALGQTDTLKRHRATLLFLAENNGLNVVEICEEVVTGDSIAVRPEVQKVLQLVETGSYAGVLVMEVERLARGDTIDQGIIAQTFKYSNTKIVTPNKVYDPNNEMDEEYFEFGLFMSRREYNTIKRRLSRGKEASLREGKWISGKTPFGWLREKLPNDKGYKLIPHPDQAPILRQIYDWYTGEGCARIGSYAIASRLNTLGIKTNSGNSWTTSAILELLRNPANAGWIKSGGRPETKRIVDGSVVVSRPRTRQEDLKLYKGLHDALISQAQYDKAVSLSYSVVAPRGKGAWKTVTSLAGLVRCDQCGRVMVRRASSGDRRPAFICPTQGCPTVSSWYSEVEEALLDALRDWLRELEVGDADTNDDHSLLDALSASINADQKQLAKLEAQEARAYELVETGVYTPEVFLQRSQALAADKQVIVSRVEENQRAQDEITRAKQARARLAPAVRHVLEAYPLAATPQDKNDLLKTVLQKVLYHKRSKSYSKAGSDMCLTLYPLTD

SEQ ID NO: 3437 - protein, 529 aa, Unknown
  Description of Unknown: Integrase B3438 sequence
  PTHR30461:SF3,SM00857,G3DSA:1.10.10.2600,IPR036162,PF13408, PS51737,IPR025827,G3DSA:3.40.50.1390,IPR006119,IPR038109, PF07508,IPR011109,SSF53041,PTHR30461,Coil, PS51736,cd00338,PF00239
MSRYCIYLRKSRADLEAEAHGEGETLSRHKTALLELARRMGITISATYEEIVSGETIAARPQMQRLLSEVGAGEWDGVLVMEIERLARGDTMDQGLVAQTFKYSDTKIITPLKTFDPQNEFDEEYFEFGLFMARREFTTTNRRLVRGREASAKEGKYVGSVPPYGYRKVKIPNDKGFTLEIVEEQAKVVRMIFEWYAEGAEVNSQKKRIGPYTIAVRLNELGIKSAGKKDYWTIYGVQNMLINPVYIGKIRWGYRKVKKTVTPEGMKKKSREFAQDGDYIVVDGLHEPILSEELFYKVQDLIAANPPTPIKYRHKNINPFAGLIFCAKCGHCMNYRRGYGRQPDYIGCYTAGCKNKASRFDLVEQRVLSILNSWVKDYSVDKAQIKHEADLNAELSNAISLAEKEIETLQDQLDKVYSFFERGTYTEKIFKQRSSAIEQQIMEIGEKIDRLKAEHQQVLERQNVQAEFVPSIKHLLEIYDTLEPVEKNKWLKQIIDRIVYEKNADGKYHNVDPGDFTIGILPRLPKKGN

SEQ ID NO: 3438 - protein, 529 aa, Unknown
  Description of Unknown: Integrase B3439 sequence
  SM00857,G3DSA:1.10.10.2600,IPR036162,PF13408,PS51737, G3DSA:3.40.50.1390,IPR025827,IPR006119,IPR038109,PF07508, IPR011109,SSF53041,PF00239,PTHR30461,PS51736, Coil,cd00338
MNFTSTWKIADPLAQYIIYLRKSRKDMEAEALGQTDTLKRHRAALLSLSESRALNVVEICEEVVTGDSIAVRPEVQKVLQLVETGNYAGVIVMEVERLARGDTIDQGIIAQTFKYSDTRIITPNKTYDPNNEMDEEYFEFGLFMSRREYNTIKRRLSRGKEASLREGKWISGKTPFGWSREKLPNDKGYKLVPHPEQAPILQQIYNWYTGEGCARIGAKAISTRLNSLGVPTNSGSLWRADSVLDVLRNPANAGWIKSGGRPETKRIVDGAVVVSRPRTRQEDLKLYKGLHDGLISQEQYDKAVALSYSSASPRGKGAWGTVTSLAGLVRCDQCGRVMVRRPSSGNRRDTLLCPSYGCTTVSAWYDDVEDAVLDALRGWLRELELGEAAAPDDTPMRTALESSIAADRKQLAKLEAQEARAYELVETGVYTPEIFLQRSQALAADKQVIVDRIEASQTTIHELARARQARARLAPAVRRVLETYPLAASPQEKNALLKTVLQKVLYHKQTKSYTKSGSDMHVTLYPLAD

SEQ ID NO: 3439 - protein, 529 aa, Unknown
  Description of Unknown: Integrase B3440 sequence
  cd00338,SM00857,G3DSA:1.10.10.2600,IPR036162,PF13408, IPR025827,G3DSA:3.40.50.1390,PS51737,IPR006119,IPR038109, PF07508,SSF53041,IPR011109,PTHR30461,PS51736, Coil,PF00239
MKFTSTWKIADPLAQYIIYLRKSRKDMEAEALGQTDTLKRHRAALLSLSESRGLNVVEICEEVVTGDSIAVRPEVQKVLQLVETGNYAGVIVMEVERLARGDTIDQGIIAQTFKYSDTRIITPNKTYDPNNEMDEEYFEFGLFMSRREYNTIKRRLSRGKEASLREGKWISGKTPFGWSREKLPNDKGYKLVPHPEQAPVLQQIYNWYTGEGCARIGAKAISTRLNSLGVPTNSGSLWRADSVLDILRNPANAGWIKSGGRPETKRIVDGAVVVSRPRTRQEDLKLYKGLHDGLISQEQYDKAVALSYSSASPRGKGAWGTVTSLAGLVRCDQCGRVMVRRPSSGNRRDTLLCPSYGCTTVSAWYDDVEDAVLDALRGWLRELELGEAAAPDDTPMRTALESSIAADRKQLAKLEAQEARAYELVETGVYTPEIFLQRSQALAADKQVIVDRIEASQTTIHELARARQARARLAPAVRRVLETYPLAASPQEKNALLKTVLQKILYHKQAKSYTKSGSDMHVTLYPLAD

SEQ ID NO: 3440 - protein, 529 aa, Unknown
  Description of Unknown: Integrase B3441 sequence
  SM00857,G3DSA:1.10.10.2600,IPR036162,PF13408,PS51737, G3DSA:3.40.50.1390,IPR025827,IPR006119,IPR038109,PF07508, SSF53041,IPR011109,PTHR30461,Coil,PS51736, cd00338,PF00239
MGNMRIIEIPASMRESAGQKNTVRKLRVAAYCRVSTEEEEQQGSFEIQKLYYTEKINSTPEWEVAGIYADDGISGVHTKKRDGFNQMIQDCKKHRIDLILTKSISRFARNTLDSIQYVRMLKQMGIAVVFEKENINTATMNSEMILTVLSAFAQAESESISQNVARGKRMGYKHGKFAFPYGRIIGYRKGADGKPEIIPEQAEIIRLIFNRYLQGDSLQSIKAKLETAGALTARGNTAWSAQSIQRILQNEKYCGDVLLQKTFTEDVLTGVHKKNTGQLPQYYIENYHEGIVSKQMFREVQAEIARRNSKSAANQRKRRRGRYNSKYALSERLFCGDCGSPYKRVTWNIHGRKQIVWRCVNRIEYGTKFCGSSPSIPEEELHRAILKAVQDLAANFTDEVAAQINGILHDIQTGESAKPNLQEQLEQTQQEFDRLLEMSLDFDEDTPFLDDRLKKLNSKIKSLKKGIEDSAARQEKIGQPEMLLSAKDMQIQEYDDTLTARIIEKITVRSRNEIEIRFIGGYKKTMQLI

SEQ ID NO: 3441 - protein, 529 aa, Unknown
  Description of Unknown: Integrase B3442 sequence
  PTHR30461:SF3,SM00857,G3DSA:1.10.10.2600,IPR036162,PF13408, PS51737,G3DSA:3.40.50.1390,IPR025827,IPR006119,IPR038109, PF07508,IPR011109,SSF53041,PF00239,PTHR30461, PS51736,Coil,cd00338
MSSVDKTAVIYARYSSHGQTEQSIEGQIAAAQKYAEGKGYTIIHIYADRAMTGRNDDREQFQKMLSDTATHQFGVILLWKIDRFGRNREEIAFNRYRCKKNGVRVERVAEDVPDGPEGVILDSVLEGMAEYYSLQLAQNVRRGQRESAKKSQTVGGCNIIGYKVNPDTKRYEVDPKTAPFVTEVFKRYANGETISEIVAWLNVQGVRATRGGEFTVNSLHRLLKNEKYTGVYIFHDIRNEGGMPALTDRATFDKVQEMLKVNRRAPARVWSKTEYLLTDKLFCGHCGAMMVGESGHGRNGTKHSYYTCWNRKKKKSCSKKPVRQDVIEPMVLRVISKMLSDEATLEYIADQVWAVYERSDTSGDTIKALDKQIADVDRALSNVMKAIEMGIINEMTKARMDELTDQKQALSVARAEAGLAGGFKLTRDMILFFLHDMAATNMTDCDCQKRLIKTFVNAIYLYDDHFDIAFNYTSNGKMVVKMQEINDTTSGEVFGRCAQSPAIVRTSEPLITIVVSCSVFVFSVKMPEV

SEQ ID NO: 3442 - protein, 529 aa, Unknown
  Description of Unknown: Integrase B3443 sequence
  SM00857,G3DSA:1.10.10.2600,IPR036162,PF13408,IPR025827, G3DSA:3.40.50.1390,PS51737,IPR006119,IPR038109,PF07508, SSF53041,IPR011109,PF00239,PTHR30461,PS51736, Coil,cd00338
MNFTSTWKISDPLAQYIIYLRKSRKDMEAEALGQTDTLKRHRAALLSLSESRGLNVIEICEEVVTGDSIAVRPEVQKVLQLVETGNYAGVIVMEVERLARGDTIDQGIIAQTFKYSDTRIITPNKTYDPNNEMDEEYFEFGLFMSRREYNTIKRRLSRGKEASLREGKWISGKTPFGWSREKLPNDKGYKLVPHPEQAPVLRQIYNWYTGEGCARIGAKAISTRLNSLGVPTNSGSLWRADSVLDILRNPANAGWIKSGGRPETKRIVDGAVVVSRPRTRQEDLKLYKGLHDGLISQEQYDKAVALSYSSASPRGKGAWGTVTSLAGLVRCDQCGRVMVRRPSSGNRRDTLLCPSYGCTTVSAWYDDVEDAVLDALRGWLRELELGEAAAPDDTPMRTALESSIAADRKQLAKLEAQEARAYELVETGVYTPEIFLQRSQALAADKQVIVDRIDASQTTIHELARARQARARLAPAVRRVLETYPLAASPQEKNALLKTVLQKILYHKQAKSYTKSGSDMHVTLYPLAD

SEQ ID NO: 3443 - protein, 529 aa, Unknown
  Description of Unknown: Integrase B3444 sequence
  SM00857,G3DSA:1.10.10.2600,PS51736,IPR036162,PS51737, PF13408,IPR025827,G3DSA:3.40.50.1390,IPR006119,IPR038109, PF07508,IPR011109,SSF53041,PF00239,PTHR30461, mobidb-lite,Coil,cd00338
MKFTSTWRISDPIAQYIVYLRKSRKDIEAEALGQTDTLKRHRAALLSLAESSGLNVVEICEEVVTGDSIAVRPEVQKVLQLVETGSYAGVLVMEVERLARGDTIDQGIIAQTFKYSNTKIVTPNKVYDPNNEMDEEYFEFGLFMSRREYNTIKRRLSRGKEASLREGKWISGKTPFGWSREKLPNDKGYKLVPHPEQAQTLQQIYDWYTGEGCARIGSFAIATRLNHLGVKTNSGSAWTASAVLDTLRNPANAGWIKSGGRPETKRIVDGSVVVSRPRTRQEDLKLYKGLHDALISQAQYDKAVSLSYSVVAPRGKGAWKTVTSLAGLVRCDQCGRVMVRRASSGDRRPSFMCPTHGCPTVSSWYSEVEEALLDALRDWLRELEVGEADTNDDHSLLDALSASINADQKQLAKLEAQEARAYELVETGVYTPEVFLQRSQALAADKQVIVSRVEENQRAQDEITRAKQARARLAPAVRHVLETYPLAATPQDKNELLKTVLQKVLYHKQSKSHSKSGSDMRVTLYPLTD

SEQ ID NO: 3444 - protein, 529 aa, Unknown
  Description of Unknown: Integrase B3445 sequence
  PTHR30461:SF3,SM00857,G3DSA:1.10.10.2600,IPR036162,PS51737, G3DSA:3.40.50.1390,IPR006119,IPR038109,PF07508,IPR011109, SSF53041,PTHR30461,Coil,PS51736,cd00338, PF00239
MSRYCIYLRKSRADLEAEAHGEGETLSRHKTALLELARRMGITISATYEEIVSGETIAARPQMQRLLSEVGAGEWDGVLVMEIERLARGDTMDQGLVAQTFKYSGTKIITPLKTFDPQNEFDEEYFEFGLFMARREFTTTNRRLVRGREASAKEGKYVGSVPPYGYRKVKIPNDKGFTLEIVEEQAKVVRMIFEWYAEGAEVNGQKKRIGPYTIAVRLNELGIKSAGKKDYWTIYGVQNMLINPVYIGKIRWGYRKVKKTVTPEGMKKKSREFAQDGDYIVVDGLHEPILSEELFYKVQDLIAANPPTPIKYRNNNVNPFAGLIFCAKCGHCLSYRKGYGRHPGYLGCNIAGCDNKAAPFELIEQRVLSILNSWVKDYSVDKAQIKHEADLNAELTNAISLAEKEIETLQDQLDNVYSFFERGTYTEKIFKQRSSAIEQQITDIGEKIDRLKAEHQQVLERQNVQAEFVPSIKHLLEIYDTLEPVEKNKWLKQIIDRMVYEKNADGKYRNVDPGDFTLGILPRLPKKGS

SEQ ID NO: 3445 - protein, 529 aa, Unknown
  Description of Unknown: Integrase B3446 sequence
  PTHR30461:SF3,SM00857,G3DSA:1.10.10.2600,IPR036162,PF13408, PS51737,IPR025827,G3DSA:3.40.50.1390,IPR006119,IPR038109, PF07508,IPR011109,SSF53041,PF00239,PTHR30461, PS51736,Coil,cd00338
MAKVTVIPSTINPITKLPNNGLQKRKVAGYARVSTILDEQCSSYQAQVDYYTNLIKRNPEWEFVEVYADEGISGTNTKRRGGFNQMMQDALDGKIDLILTKSVSRFARNTVDSLTFIRKLKEKGVEVFFEKENIYTFDSKGELLITIMASLAQEESRSISENVTWGKRKAFSDGKVSMPYKHFLGYKKGEDGRPTIDEKESLVVKEIYSLFLKYGYSTTKIAKEFNERGICTPSGKGKWTLTTVESILSNEKYKGDALLQKKYVVDFLTHRSKPNEGEIPQYYVENSHPAIIDKVEWDLVQIELERRKKLCKTYSSKNIFSSKLVCEDCDSFFGRKIWHSNDEYKAIVYQCNGKFKNKDKRCNTPTLREEEIKSMFLEAYNKFVLDKTALVGDCKLMIETIADVSLLDEQISKQIEKLEELAKKVKELVSSNASTPELQIDYINDYDKLCTMHSIEETRYKLLLKEKSGRLAKAKSMELFIESIKDKADVIDSWNSDLWILLVDKAIVHHDKSITFVFKNMKEITIAAK

SEQ ID NO: 3446 - protein, 529 aa, Unknown
  Description of Unknown: Integrase B3447 sequence
  PTHR30461:SF3,IPR036162,PS51737,IPR011109,PTHR30461, PF00239,G3DSA:1.10.10.2600,IPR006119,SSF53041,cd00338, SM00857,IPR025827,IPR038109,PS51736,mobidb-lite, PF13408,G3DSA:3.40.50.1390,PF07508,Coil
MKKRINTNSAARAVIYARYSSANQRDCSIEQQVEKCRELAAREGVTVIEIYADRAISGKTDRRPNFQRMMKDSSLRQFDVVLAWKSNRMGRNMLQAMMNEEQLRSNGIRTIYAEEDFDDTAAGRFALRNMMNVNQFYSENMAEDISRGLMDNASKCMSNGSLPLGYKTGKDQKVVLDEAEAAIVQEIFTRVSCYEPFIDIARDLNRRGIKTKKGAEWGRSSFHTICRNERYRGIYIYRDIRVEGGMPRIVSDELFYKVQEVLKVKKNPQGRRKRSGYEEYLLTGKLYCGHCGSPMTGIAGTSKTGAMHYYYTCQKRRTDHSCDKKAVRRDQIEKAVAIAIQQQLLTDENIQMMADETMAYNARTEIKYRLQSLQQQLYSNETSTANIMKAIEMGIITDTTKARLLALEQEHGQLLAKIDTAKAEMVPINREDFVSLLDIYRTGDVNNKKYLAALFDTFLVRVDLYDDHFKITFDPTGGKMPVDIPIGAEDSPESPGDSPESSDFEASPQDAEKFVLALHNRTKEKHLET

SEQ ID NO: 3447 - protein, 529 aa, Unknown
  Description of Unknown: Integrase B3448 sequence
  PTHR30461:SF3,SM00857,G3DSA:1.10.10.2600,IPR036162,PF13408, IPR025827,G3DSA:3.40.50.1390,PS51737,IPR006119,IPR038109, PF07508,IPR011109,SSF53041,PTHR30461,cd00338, PF00239
MPTSKNTARKYAAGGSSDNSCGVEPLRAVIYARYSSSGQREESIEGQLRDCYEFAKKHGIIVIGEYIDKAMTGRVDRRPDFQRMMKDSEKGRFNCVLLWKMDRFARNRYDSAMYKYKLKKNGIRIFYAKETIPDGPEGIILESVMEGYAEYYSENLAQNVKRGNYDSALELKTLGKTCLGLKTGPDGRYMIDQAEAVIVRRIFEEYAEGERAKDIYERLNSEGYRTSRGGKFNKNSLRRILSNKKYIGVYEYEDIYVENGIPAIITDRDLFERVQKMLKINHDAPARGKAQNFLLTTKLFCGLCGSPMIGDGGTSHTGKAYAYYSCTKRKRGRSCKKESVPKDWIEDLVVGELVKIVHNDELIEQIADRVMEYQKREKDQSGLHALEIRQKENEKAISNMLAAIEAGIITPSTKTRLMELEADRADIEKGIAHELLAEPEFERDQIIYFLERFRSGDINDEAYRIMLVDTFLNSVYLYDDDHLVLVMNYSGENCKVDLKLVEGAVSGDGCKGSAFAPSSALYKPVREFL

SEQ ID NO: 3448 - protein, 529 aa, Unknown
  Description of Unknown: Integrase B3449 sequence
  PTHR30461:SF3,SM00857,G3DSA:1.10.10.2600,IPR036162,PF13408, IPR025827,G3DSA:3.40.50.1390,PS51737,IPR006119,IPR038109, PF07508,SSF53041,IPR011109,PF00239,PTHR30461, PS51736,Coil,cd00338
MQRAVIYARYSPGPNQTEQSIEGQVRECTKYAELHDLRIVGTYIDRKISGKTDNRREFQRMIDDSEKHIFDVIILYHTDRFARNRYDSAIYKHKLKENGVELRYATTDIPKGPEGIILESIMEGWAEYYSAELSRKIKRGMRESALKCHSTGAGRCLGYRTAEDKSLVIEPEGAKAVQTVFDMYIKGKSHADICRYLNDCSFRTAQGKLFNKNSVTHIIRNKRYIGVYTYDDITIEDGIPAIISKDTFHLAQLEAARRKTAKRPKEPKAEYLLSGKAFCGHCQKPLVGVSGTGKSGNKWYYYYCQESRAKRGCTKKPVKRDWLEREVVKRTIAEVLQPEVIQHIAKKCYDLQMEYRQDNSDVLFYELKLKDVRKAIKNTMHAIELGVKTKTLPARLQELENEEEALEAELAIAKASDFVITADQIEFLLTQFTEPWECESEEEYHRRIIKCFVHKVFLFDGKLLIYYNVSRDGKTREQSEAELLEEALGEGFDKRSSGSTILIAGRTPECEIIVLRYGFWLALDLTVQA

SEQ ID NO: 3449 - protein, 529 aa, Unknown
  Description of Unknown: Integrase B3450 sequence
  SM00857,G3DSA:1.10.10.2600,IPR036162,PF13408,IPR025827, G3DSA:3.40.50.1390,PS51737,IPR006119,IPR038109,PF07508, IPR011109,SSF53041,PF00239,PTHR30461,PS51736, Coil,cd00338
MNFTSTWKIADPLAQYIIYLRKSRKDMEAEALGQTDTLKRHRAALLSLSESRALNVVEICEEVVTGDSIAVRPEVQKVLQLVETGNYAGVIVMEVERLARGDTIDQGIIAQTFKYSDTRIITPNKTYDPNNEMDEEYFEFGLFMSRREYNTIKRRLSRGKEASLREGKWISGKTPFGWSREKLPNDKGYKLVPHPEQAPILQQIYNWYTGEGCARIGAKAISTRLNSLGVPTNSGSLWRTDSVLDILRNPANAGWIKSGGRPETKRIVDGAVIVSRPRTRQEDLKLYKGLHDGLISQEQYDKAVALSYSSASPRGKGAWGTVTSLAGLVRCDQCGRVMVRRPSSGNRRDTLLCPSYGCTTVSAWYDDVEDSVLDALRGWLRELELGEAAAPDDTPMRTALESSIAADRKQLAKLEAQEARAYELVETGVYTPEIFLQRSQALSADKQVIVDRIEASQTTITELARAKQARARLAPAVRRVLETYPLAASPQEKNALLKTVLQKVLYHKQTKSYTKSGSDMHVTLYPLAD

SEQ ID NO: 3450 - protein, 529 aa, Unknown
  Description of Unknown: Integrase B3451 sequence
  PTHR30461:SF3,SM00857,G3DSA:1.10.10.2600,IPR036162,PF13408, PS51737,G3DSA:3.40.50.1390,IPR025827,IPR006119,IPR038109, PF07508,IPR011109,SSF53041,PTHR30461,Coil, PS51736,cd00338,PF00239
MPKAKNVTVIPATLNIHTKTPTTERVRRRVAAYARVSTDSEEQLTSYEAQVDYYTKFIRENPDWDFVEVYTDEGISAVNTKHRDGFNRMIRDALAGKIDLIVTKSVSRFARNTVDSLTTIRKLKEAGCECFFQKENIMTFDSKGELLITIMSSLAQEESRSISENVTRGQRKRFSDGKVSIPYGQFLGYRKGADGLPEIVPEEAEVVRRIYRELLQGKSTNAIAAMLTEEGIPTPGKKTVWQRATVESILRNEKYKGSALLQKSFTVDFLTKKTKINEGEVPQYYVEDSHPAIIEPWEWEQVQAELERRKNSRTRHRQTSPFSGKIFCADCGEIFGSKTWHSTDRYRRIVWQCNGKFKREHKCETPHLTEERLKELFFAALGEYLSDRNAAIDRLRYAQRMLTDTDFIDADIQALEEELTTITGMLRLCIAENAANTMTEETYRTTHDELCSRFEETEAKLAVLQKQRDKMKADAIAIGGMMFKLGELESLPLTFDEKLWNGTVDHVTVHADERVVFRFKDGKEIVTRL

SEQ ID NO: 3451 - protein, 529 aa, Unknown
  Description of Unknown: Integrase B3452 sequence
  PTHR30461:SF3,SM00857,G3DSA:1.10.10.2600,IPR036162,PF13408, IPR025827,PS51737,G3DSA:3.40.50.1390,IPR006119,IPR038109, PF07508,SSF53041,IPR011109,PF00239,PTHR30461, PS51736,Coil,cd00338
MAKVRVIPSTLNPLTQSPISETKKKKVAAYARVSTDSDEQYTSYEMQVKYYKKFIQEHDGWIYVNVYADEGITGTNTKKRDSFNQMINDALDGKIDLIITKSISRFARNTLDTISITRKLKVSGVEVFFEKEGLWTFDSKSELILTIMASIAQEESRSISANVTMGKRWGMQEGKVSFAYKNFLGYKKENGKIVIDEEQAVIVRRIYSMFLKEGKTCSGIAVQLKKEGILTPSGNSSNWQKNTVLSILTNEKYKGDALLQKTFTANFLEHNVKRNNGQLPQYYVENSHPAIINRYEWEQVQTELARRQEIGRNYSGAGAFASKLVCEDCGGFYGMKVWHSNSKFKKMILQCNNKFKKGKSRCQTPHLTEDEVKEMFIRTYNETMKDKTKVIDDTEAVIAMLTNTDEIDKRIASLTSEIEIVSELVKKLIRENSSAAQSQDDYQTKYNELSSRYDKTKKALEKAMQDKAHKQGQRIKLQSFLESLKQKECIIDQWDEELWMIMVEKAIVHRDKSITFKFYNGKEITLTSA

SEQ ID NO: 3452 - protein, 529 aa, Unknown
  Description of Unknown: Integrase B3453 sequence
  PTHR30461:SF3,SM00857,G3DSA:1.10.10.2600,IPR036162,PF13408, IPR025827,G3DSA:3.40.50.1390,PS51737,IPR006119,IPR038109, PF07508,IPR011109,SSF53041,PF00239,PTHR30461, PS51736,Coil,cd00338
MSSVDKIAVVYARYSSHGQTEQSIEGQIAAAQKYAEQHGYTIIHIYADRAMTGRNDDREEFQKMLSDTATRQFGVILLWKIDRFGRNREEIAFNRYRCKKNGVRVERVAEDVPDGPEGVILDSVLEGMAEYYSLQLAQNVRRGQRESAKKSQTVGGCKIIGYNVNPDTKRYEVDPKTAPFVTEVFKRYANGETISEIVAWLNAQGVRTTRGGEFTVNSLHRLLKNEKYTGVYIFHDIRNEGGMPALIDRATFDKAQEMLKVNRRAPARVWSKTEYLLTDKLFCGHCGTMMVGESGHGRNGTKHNYYTCWNRKKKKTCDKKPIRQDVIEPLVLRAIGKLLENPATLENIADQVWAAYERSDTSGDTIKALDKQIADVDRALSNVMKAIEMGIINEMTKARMDELTDQKQALSAARAEAGLAGGFKLTRDMILFFLQEMASLDRSDRNCQKRLIKTFVNAIYLYDDHFDIAFNYTSNGKTVVKMQEINDTASGEVFGRCAQSPAIVQTSEPLITIVVSCSVFVFSVKMPEA

SEQ ID NO: 3453 - protein, 529 aa, Unknown
  Description of Unknown: Integrase B3454 sequence
  cd00338,SM00857,G3DSA:1.10.10.2600,IPR036162,PF13408, IPR025827,G3DSA:3.40.50.1390,PS51737,IPR006119,IPR038109, PF07508,IPR011109,SSF53041,PTHR30461,PS51736, Coil,PF00239
MNFTSTWKIADPLAQYIIYLRKSRKDMEAEALGQTDTLKRHRAALLSLSESRGLNVVEICEEVVTGDSIAVRPEVQKVLQLVETGNYAGVIVMEVERLARGDTIDQGIIAQTFKYSDTRIITPNKTYDPNNEMDEEYFEFGLFMSRREYNTIKRRLSRGKEASLREGKWISGKTPFGWSREKLPNDKGYKLVPHPEQAPVLRQIYNWYTGEGCARIGAKAISTRLNSLGVPTNSGSLWRADSVLDILRNPANAGWIKSGGRPETKRIVDGAVVVSRPRTRQEDLKLYKGLHDGLISQEQYDKAVALSYSSASPRGKGAWGTVTSLAGLVRCDQCGRVMVRRPSSGNRRDTLLCPSYGCTTVSAWYDDVEDAVLDALRGWLRELELGEAAAPDDTPMRTALESSISADRKQLAKLEAQEARAYELVETGVYTPEIFLQRSQALAADKQVIVDRIEASQTTITELARARQARARLAPAVRRVLETYPLAASPQEKNALLKTVLQKVLYHKQTKSYTKSGSDMHVTLYPLAD

SEQ ID NO: 3454 - protein, 529 aa, Unknown
  Description of Unknown: Integrase B3455 sequence
  cd00338,SM00857,G3DSA:1.10.10.2600,IPR036162,PF13408, IPR025827,G3DSA:3.40.50.1390,PS51737,IPR006119,IPR038109, PF07508,IPR011109,SSF53041,PTHR30461,PS51736, Coil,PF00239
MKFTSTWKIADPLAQYIIYLRKSRKDMEAEALGQTDTLKRHRAALLSLAESRKLNVVEICEEVVTGDSIAVRPAVQKVLQFVETGAYAGVLVMEVERLARGDTIDQGIIAQTFKYSNTMIITPNKSYDPNNEMDEEYFEFGLFMSRREYNTIKRRLTRGKEASIREGKWISGKTPFGWLREKIPNDKGYMLVPHPEQAPILQQIYDWYTGEGCVRVGSSAIATRLNRLGVKTNTGSRWTASAILEVLRNPANAGWIKSKGRPEIKHIVDGSVVVSRPRARIEDLTLHKGLHNGLISQEQFDRAVALSYSTASPRGKGAWKTATSLAGLVRCDQCGRIMVRRATSGGRKDTFLCPSYGCPTVSAWYDEVETAVLGALRGWLHELEVGEAVSADDSSLLSALSSAISADQKQLAKLEAQEARAYEFVETGVYTPEVFLQRSQSLAADKLAILSRIEENQRAIDDIDRAKQARARLAPAVRHVLETYPLAGSVQEQNDLLKTVLQKIVYHKRSKSYSKAGSDMRVTLYPLTD

SEQ ID NO: 3455 - protein, 529 aa, Unknown
  Description of Unknown: Integrase B3456 sequence
  PTHR30461:SF3,IPR036162,PS51737,IPR011109,PTHR30461, PF00239,G3DSA:1.10.10.2600,IPR006119,SSF53041,cd00338, SM00857,IPR025827,IPR038109,mobidb-lite,PS51736, PF13408,G3DSA:3.40.50.1390,PF07508,Coil
MKKRINTNSAARAVIYARYSSANQRDCSIEQQVEKCRELAAREGVTVIEIYADRAVSGKTDRRPNFQRMMKDASLRQFDVVLAWKSNRMGRNMLQAMMNEEQLRSNGIRTIYAEEDFDDTAAGRFALRNMMNVNQFYSENMAEDISRGLMDNASKCMSNGSLPLGYKTGKDQKVVLDEAEAAIVQEIFTRVSCYEPFIDIARDLNRRGIKTKKGAEWGRSSFHTICRNERYRGIYIYRDIRVEGGMPRIVSDELFYKVQEVLKVKKNPQGRRKRSGYEEYLLTGKLYCGHCGSTMTGIAGTSKTGAMHYYYTCQKRRTDHSCDKKAVRRDQIEKAVAIAIQQQLLTDENIQMMADETMAYNARTEIKYRLQSLQQQLYSNETSTANIMKAIEMGIITDTTKARLLALEQEHGQLLAKIDTVKAEMVPINREDFVSLLDIYRTGDVNNKKYLAALFDTFLVRVDLYDDHFKITFDPTGGKMPVDIPIGAEDSPESPGDSPESSDFEASPQDAEKFVLALHNRTKELQALA

SEQ ID NO: 3456 - protein, 529 aa, Unknown
  Description of Unknown: Integrase B3457 sequence
  PTHR30461:SF3,SM00857,G3DSA:1.10.10.2600,IPR036162,PF13408, PS51737,IPR025827,G3DSA:3.40.50.1390,IPR006119,IPR038109, PF07508,IPR011109,SSF53041,PTHR30461,Coil, PS51736,cd00338,PF00239
MSRYCIYLRKSRADLEAEAHGEGETLSRHKTALLELARRMGITISATYEEIVSGETIAARPQMQRLLSEVGAGEWDGVLVMEIERLARGDTMDQGLVAQTFKYSGTKIITPLKTFDPQNEFDEEYFEFGLFMARREFTTTNRRLVRGREASAKEGKYVGSVPPYGYRKVKIPNDKGFTLEIVEEQAKVVRMIFEWYAEGAEVNSQKKRIGPYTIAVRLNELGIKSAGKKDYWTIYGVQNMLINPVYIGKIRWGYRKVKKTVTPEGMKKKSREFAQDGDYIVVDGLHEPILSEELFYKVQDLIAANPPTPIKYRHKNINPFAGLIFCAKCGHCMNYRRGYGRQPDYIGCYTAGCKNKASRFDLVEQRVLSILNSWVKDYSVDKAQIKHEADLNVELSNAISLAEKEIETLQDQLDKVYSFFERGTYTEKIFKQRSSAIEQQITDIGEKIDRLKAEHQQVLERQNVQAEFVPSIKHLLEIYDTLEPVEKNKWLKQIIDHMVYEKNADGKYRNVDPGDFTLGILPRLPKKGS

SEQ ID NO: 3457 - protein, 529 aa, Unknown
  Description of Unknown: Integrase B3458 sequence
  SM00857,G3DSA:1.10.10.2600,IPR036162,PF13408,IPR025827, G3DSA:3.40.50.1390,PS51737,IPR006119,IPR038109,PF07508, IPR011109,SSF53041,PF00239,PTHR30461,PS51736, Coil,cd00338
MSNMRIIEIPASMRESAGRKNTVRKLRVAAYCRVSTEEEEQQGSFEIQKLYYTEKINSTPEWEVAGIYADDGISGVHTKKRDGFNQMIQDCKKRKIDLILTKSISRFARNTLDSIQYVRMLKQMGIAVVFEKENINTATMNSEMILTVLSAFAQAESESISQNVARGKRMGYKHGKFAFPYGRIIGYRKGADGKPEIIPDQAEVIRLIFNSYLQGDSLQSIKAKLETAGALTARGNTAWSAQSIQRILQNEKYCGDVLLQKTFTEDVLTGVHKKNTGQLPQYYIENYHEGIVSKQMFREVQAEIARRNSKSAANQRKRRRGRYNSKYALSERLFCGNCGSPYKRVTWNIHGRKQIVWRCVNRIEYGTKFCGSSPSVPEEKLHRAILKAVQDLAANFTDEVAAQINGILHDIQTGESTKPNLQEQLEQTQQEFDRLLEMSLDFDENTPFLDDKLKKLNNKIKSLKKAIEDSAARQEKTRQPEMLLSAKDLQIQEYDDALTARIIEKITVRSRNEIEIRFIGGYKKTMQLT

SEQ ID NO: 3458 - protein, 529 aa, Unknown
  Description of Unknown: Integrase B3459 sequence
  cd00338,SM00857,G3DSA:1.10.10.2600,IPR036162,PF13408, IPR025827,PS51737,G3DSA:3.40.50.1390,IPR006119,IPR038109, PF07508,IPR011109,SSF53041,PTHR30461,PS51736, Coil,PF00239
MKYTSTWRISDPLAQYIVYLRKSRKDMEAEALGQTDTLKRHRAALLSLAESRGLNVVEICEEVVTGDSIAVRPEVQKVLQLVETGSYAGVLVMEVERLARGDTIDQGIIAQTFKYSNTKIITPNKIYDPNNEMDEEYFEFGLFMSRREYNTIKRRLSRGKEASLREGKWISGKTPFGWLREKLPNDKGYKLIPHPEQAPILRQIYDWYTGEGCARIGSYAIASRLNALGVKTNSGNSWTTSAILELLRNPANAGWIKSGGRPETKRIVDGSVVVSRPRTRLEDLKLYKGLHDALISQAQYDKAVSLSYSVVAPRGKGAWKTVTSLAGLVRCDQCGRVMVRRASSGDRRPSFMCPTQGCPTVSSWYSEVEEALLDALRDWLRELEVGEADTNDDHSLLDALSASINADQKQLAKLEAQEARAYELVETGVYTPEVFLQRSQALAADKQVIVSRIEENQRAQDEITRAKQARARLAPAVRHVLEAYPLAATPQDKNDLLKTVLQKVLYHKRSKSYSKAGSDMCLTLYPLTD

SEQ ID NO: 3459 - protein, 529 aa, Unknown
  Description of Unknown: Integrase B3460 sequence
  PTHR30461:SF3,SM00857,G3DSA:1.10.10.2600,IPR036162,PF13408, PS51737,G3DSA:3.40.50.1390,IPR025827,IPR006119,IPR038109, PF07508,SSF53041,IPR011109,PF00239,PTHR30461, PS51736,Coil,cd00338
MSNEKDYSVLPEVTIIQESAKIESEEHKPKKLRVCAYARVSTEKEEQEYSFENQRDYYMDYISKRSDWEFVGIYSDFGLSGKNKKRPQFIKMIDDCHAGKIDRIITKSISRFARNTIDCIQTVRDLREKGIGVYFEREGIDSLSPQSALVLSIMAIVAEEESRSISNNIKWAIQKQFAQGHYLIHTKHFLGYSREEDNRIIIIPKQALAVRSIYQLYLDGKSIHQIALEMELREIESPEGNKNWGDSTILSILKNEKYKGDCLLQKTYSPDFLASKRYKNTGQLRSYYVKSHHAPIISSAMFDEVQNEMQRRKDLRTGSKAYPSKYSGKSCLSGLLICGQCGGVMRRHVQYRKGGGIGYWVCQRHDQGSCSMMQIKEKVIIDGLQMVIRQILFQKEPLYTEMTDTIINSARKAHKSSIKSVNAKIKRVQRQIQQIKDDYIEDAITYEEYCHLSRQFIHTEPFLELEREEMIQENKCLAPIEQRIEEISQRLKLQTLYEHFNEDLHMGVQKTRKQWSGILQEPTYQRRSP

SEQ ID NO: 3460 - protein, 529 aa, Unknown
  Description of Unknown: Integrase B3461 sequence
  PTHR30461:SF3,SM00857,G3DSA:1.10.10.2600,IPR036162,PF13408, PS51737,IPR025827,G3DSA:3.40.50.1390,IPR006119,IPR038109, PF07508,IPR011109,SSF53041,PF00239,PTHR30461, PS51736,Coil,cd00338
MSRYCIYLRKSRADLEAEAHGEGETLSRHKTALLELARRMGITISATYEEIVSGETIAARPQMQRLLSEVGAGEWDGVLVMEIERLARGDTMDQGLVAQTFKYSGTKIITPLKTFDPQNEFDEEYFEFGLFMARREFTTTNRRLVRGREASAKDGKYVGSVPPYGYRKVKIPNDKGFTLEIIEEQAKVVRMIFEWYAEGAEVNSQKKRIGPYTIAVRLNELGIKSVAGKDYWTIYGVQHMLINPVYIGKIRWGYRKVKKTVTPEGMKKKSREFAQDGDYIVVDGLHEPILSEELFYKVQDLIAANPPTPIKYRHKNINPFAGLIFCAKCGHCMNYRRGYGRQPDYIGCYTAGCKNKASRFDLVEQRVLSILNSWVKDYSVDKAQIKHEADLNAELSNAISLAEKEIETLQDQLDKVYSFFERGTYTEKIFKQRSSVIEQQIMEIGEKIDRLKAEHQQVLERQNVQAEFVPSIKHLLEIYDTLEPVEKNKWLKQIIDRIVYEKNADGKYHNVDPGDFTIGILPRLPKRGS

SEQ ID NO: 3461 - protein, 529 aa, Unknown
  Description of Unknown: Integrase B3462 sequence
  PTHR30461:SF3,SM00857,G3DSA:1.10.10.2600,IPR036162,PS51737, G3DSA:3.40.50.1390,IPR006119,IPR038109,PF07508,SSF53041, IPR011109,PF00239,PTHR30461,PS51736,Coil, cd00338
MSRYCIYLRKSRADLEAEAHGEGETLSRHKTALLELARRKGITISATYEEIVSGETIAARPQMQRLLSEVGAGEWDGVLVMEIERLARGDTMDQGLVAQTFKYSGTKIITPLKTFDPQNEFDEEYFEFGLFMARREFTTTNRRLVRGREASAKEGKYVGSVPPYGYRKVKIPNDKGFTLEVIEEQAKVVRMIFEWYAEGAEVNGQKKRIGPYTIAVRLNELGIKSVAGKDYWTIYGVQHMLINPVYIGKIRWGYRKVKKTVTPEGMKKKSREFAQDGDYIVVDGLHEPILSEELFYKVQDLIAANPPTPIKYRNNNVNPFAGLIFCAKCGHCLSYRKGYGRHPGYLGCNIAGCDNKAAPFELIEQRVLSILNSWVKDYSVDKAQIKHEADLNAELTNAISLAEKEIETLQDQLDKVYSFFERGTYTEKIFKQRSSTIEQQITDIGEKIDRLKAEHQQVLERQNVQAEFVPSIKHLLEIYDTLEPVEKNKWLKQIIDRMVYEKNADGKYRNVDPGDFTLGILPRLPKKGS

SEQ ID NO: 3462 - protein, 529 aa, Unknown
  Description of Unknown: Integrase B3463 sequence
  PTHR30461:SF3,cd00338,SM00857,G3DSA:1.10.10.2600,IPR036162, PF13408,IPR025827,PS51737,G3DSA:3.40.50.1390,IPR006119, IPR038109,PF07508,IPR011109,SSF53041,PTHR30461, PS51736,Coil,PF00239
MSSVDKTAVIYARYSSHGQTEQSIDGQIAAAQKYAEGKGYTIIHIYADRAMTGRNDDREQFQKMLSDTATHQFGVILLWKIDRFGRNREEIAFNRYRCKKNGVRVERVAEDVPDGPEGVILDSVLEGMAEYYSLQLAQNVRRGQRESAKKSQSNGGTRMIGYKVNPDTKRYEIDPDTAPFITEVFRRYAGGQTMAEIAAWLNAQGLRATRGGMFTVNSLHRLLKNEKYTGVYIFRDIRNEGGMPALIDRATFDKVQEMLKVNRRAPSRVWSRAEYLLTDKLFCGHCGAPMAGVSGHGHTGVKHNYYTCLNRKRKKSCTKKSVRQDVLEPLVLKSIRNLLQDDATLKYIADRVWAEYERSDTSGDTIRALDRQIADVDRALSNVMKAIEMGIINEMTKARMDELTEQKQALSAARADAGLARGFKLTRNMILYFLRKMAAMDISDRDSQKRLIKTFVNAIYLYDDHFDIAFNYTENGKVIVKMQEIDDASTGGAFGCCAQCPTIVRTSEPLIAIVVSCSVFVFSVKMPEA

SEQ ID NO: 3463 - protein, 529 aa, Unknown
  Description of Unknown: Integrase B3464 sequence
  cd00338,SM00857,G3DSA:1.10.10.2600,IPR036162,PS51737, G3DSA:3.40.50.1390,IPR006119,IPR038109,PF07508,IPR011109, SSF53041,PTHR30461,PS51736,Coil,PF00239
MYEDLSFPYGSGTYAIYLRKSRKDLDAEALGEGETLSRHLAILKALAQRMELNVIRIYAEVVSGESIDARPQMQELLRDVETGIYDGVLVVEVERLARGDTSDQGRVAKTFKFSDTLIITPSKTYDPNNEYDEEYFEFGLFMSRREYKTIRRRLTAGHAASCREGKYTGNIPPYGYARKKLPKEKGWTLEIIPEQARAVRLIFDWYQNGLNGLPVGYTMIAEELNHLSIKSPAGGLWNRNSVQNVLRNPVYAGYIKAGYRKEVKKLVDGKMNRSRPLNTDYTLYPGRHEAIISQETWDAVHNRMLKRTAPSARKTRPQQNPLSGMIYCSQCHRVMQRRPYQSGRTATLICTTPHCSTVSSDLPMVEQRILDALDGWLLSGTLPDPDQLPDHSGRIELLQHAVTGCQEELHEADLQLQKQYDLLEKGIYDEETFFERSAIMKKKKSELTSRLKDLQAELQHEISQDASAKNLLPTLQTIHDTYHTITDPAVQNSLLKEVIDHIEYTKSESGRWGRPDNFSLKIYPRVPPA

SEQ ID NO: 3464 - protein, 529 aa, Unknown
  Description of Unknown: Integrase B3465 sequence
  PTHR30461:SF3,SM00857,G3DSA:1.10.10.2600,IPR036162,PF13408, IPR025827,PS51737,G3DSA:3.40.50.1390,IPR006119,IPR038109, PF07508,SSF53041,IPR011109,PTHR30461, Coil,PS51736,cd00338,PF00239
MSSYCIYLRKSRADLEAEAHGEGETLSRHKTALLELARRMGITISATYEEIVSGETIAARPQMQRLLSEVGAGEWDGVLVMEIERLARGDTMDQGLVAQTFKYSGTKIITPLKTFDPQNEFDEEYFEFGLFMARREFTTTNRRLVRGRETSAKEGKYVGSVPPYGYRKVKIPNDKGFTLEIVEEQAKVVRMIFEWYAEGAEVNSQKKRIGPYTIAVRLNELGIKSAGKKDYWTIYGVQNMLINPVYIGKIRWGYRKVKKTVTPEGMKKKSREFAQDGDYIVVDGLHEPILSEELFYKVQDLIAANPPTPIKYRHKNINPFAGLIFCAKCGHCMNYRRGYGRQPDYIGCYTAGCKNKASRFDLVEQRVLSILNSWVKDYSVDKAQIKHEADLNAELSNAISLAEKEIETLQDQLDKVYSFFERGTYTEKIFKQRSSAIEQQIMEIGEKIDRLKAEHQQVLERQNVQAEFVPSIKHLLEIYDTLEPVEKNKWLKQIIDRIVYEKNADGKYHNVDPGDFTIGILPRLPKRGS

SEQ ID NO: 3465 - protein, 529 aa, Unknown
  Description of Unknown: Integrase B3466 sequence
  cd00338,SM00857,G3DSA:1.10.10.2600,IPR036162,PF13408, IPR025827,G3DSA:3.40.50.1390,PS51737,IPR006119,IPR038109, PF07508,IPR011109,SSF53041,PTHR30461,PS51736, Coil,PF00239
MNFTSTWKIADPLAQYIIYLRKSRKDMEAEALGQTDTLKRHRAALLSLSESRGLNVVEICEEVVTGDSIAVRPEVQKVLQLVETGNYAGVIVMEVERLARGDTIDQGIIAQTFKYSDTRIITPNKTYDPNNEMDEEYFEFGLFMSRREYNTIKRRLSRGKEASLREGKWISAKTPFGWLREKLPNDKGYKLVPHPEQAPILQQIYNWYTGEGCARIGAKAISTRLNSLGVPTNSGSLWRADSVLDILRNPANAGWIKSGGRPETKRIVDGAVVVSRPRTRQEDLKLYKGLHDGLISQEQYDKAVALSYSSASPRGKGAWGTVTSLAGLVRCDQCGRVMVRRPSSGNRRDTLLCPSYGCTTVSAWYDDVEDAVLDALRGWLRELELGEAAAPDDTPMRTALESSISADRKQLAKLEAQEARAYELVETGVYTPEIFLQRSQALSADKQVIVDRIEASQTTITELARAKQARARLAPAVRRVLETYPLAASPQEKNALLKTVLQKVLYHKQTKSYTKSGSDMHVTLYPLAD

SEQ ID NO: 3466 - protein, 529 aa, Unknown
  Description of Unknown: Integrase B3467 sequence
  SM00857,G3DSA:1.10.10.2600,IPR036162,PF13408,IPR025827, G3DSA:3.40.50.1390,PS51737,IPR006119,IPR038109,PF07508, SSF53041,IPR011109,PF00239,PTHR30461,PS51736, Coil,cd00338
MKFTSTWRISDPLAQYIVYLRKSRKDMEAEALGQTDTLKRHRATLLFLAENSGLNVVEICEEVVTGDSIAVRPEVQKILQLVETGSYAGVLVMEVERLARGDTIDQGIIAQTFKYSNTKIVTPNKVYDPNNEMDEEYFEFGLFMSRREYNTIKRRLSRGKEASLREGKWISGKTPFGWLREKLPNDKGYKLIPHPEQAPILRQIYDWYTGEGCARIGSYAIASRLNALGIKTNSGNTWTTSAILELLRNPANAGWIKSGGRPETKRIVDGSVVVSRPRTRQEDLKLYKGLHDALISQAQYDKAVSLSYSVVAPRGKGAWKTVTSLAGLVRCDQCGRVMVRRASSGDRRPSFMCPTQGCPTVSSWYSEVEEALLDALRDWLRELEVGEADTNDDHSLLDALSASINADQKQLAKLEAQEARAYELVETGVYTPEVFLQRSQALAADKQVIVSRVEENQRAQDEITRAKQARARLAPAVRHVLEAYPLAATPQDKNDLLKTVLQKVLYHKRSKSYSKAGSDMCLTLYPLTD

SEQ ID NO: 3467 - protein, 529 aa, Unknown
  Description of Unknown: Integrase B3468 sequence
  SM00857,G3DSA:1.10.10.2600,IPR036162,PF13408,PS51737, G3DSA:3.40.50.1390,IPR025827,IPR006119,IPR038109,PF07508, IPR011109,SSF53041,PTHR30461,Coil,PS51736, cd00338,PF00239
MPYCLYLRKSRADIDAEANGEMETLARHEKILLDLAKRMHLDVTEIYREVVSGETISSRPVVQHLLTEVENEMWDGVLVVEIERLARGDTIDQGIVSRAFKFSNTKIITPLKTYDPNNEYDEEYFEFGLFMSRREYKTIRRRLTQGRMSSAKEGKHTGSKAPYGYDRIHVESGKGYTLSPNEKEAPIVKMIFDWFVNGQLQEDGSYRKLGAHAIAHRLTNLCIDSPTGNPTWNPRSVYWMLHNPVYTGKIRWGYKKDKKIIVDGAVKRTRIIPPEEEQILVEGLHPAIISDEIFNRAQELFLRRGNPSVVIEKELKNPLAGVVVCGICGRPLRYRSNANRRDYGVECRTYGCPCKGSYIYIVEKRIIDALRDWVNEYKLSWDDMPRETHSLLIVKEQAYNAAIKELNTLTKQLDKTHDLLEQGIYDTETFLIRSKSLSEKIAESEKNIAKLSADINNEKLRENNRKNLIPKVENLIDIYWQLPNASAKNDMLKEVLEKVEYTKLHTVGRSKTKKLDDFDLVLYPKLPRT

SEQ ID NO: 3468 - protein, 529 aa, Unknown
  Description of Unknown: Integrase B3469 sequence
  SM00857,G3DSA:1.10.10.2600,IPR036162,PF13408,IPR025827, G3DSA:3.40.50.1390,PS51737,IPR006119,IPR038109,PF07508, IPR011109,SSF53041,PF00239,PTHR30461,PS51736, Coil,cd00338
MKFTSTWKISDPLAQYIIYLRKSRKDMEAEALGQTDTLKRHRAALLSLSESRGLNVVEICEEVVTGDSIAVRPEVQKVLQLVETGNYAGVIVMEVERLARGDTIDQGIIAQTFKYSNTKIITPNKIYDPNNEMDEEYFEFGLFMSRREYNTIKRRLSRGKEASLREGKWISGKTPFGWLREKLPNDKGYKLIPHPEQAPILQQIYNWYTGEGCARIGAKAISTRLNSLGVPTNSGSLWRADSVLDILRNPANAGWIKSGGRPETKRIVDGAVVVSRPRTRQEDLKLYKGLHDGLISQEQYDKAVALSYSSASPRGKGAWGTVTSLAGLVRCDQCGRVMVRRPSSGNRRDTLLCPSYGCTTVSAWYDDVEDAVLDALRGWLRELELGEAAAPDDTPMRTALESSIAADRKQLAKLEAQEARAYELVETGIYTPEIFLQRSQALAADKQVIVDRIEASQTTIHELARARQARARLAPAVRRVLETYPLAASPQEKNALLKTVLQKVLYHKQTKSYTKSGSDMHVTLYPLAD

SEQ ID NO: 3469 - protein, 529 aa, Unknown
  Description of Unknown: Integrase B3470 sequence
  PTHR30461:SF3,IPR036162,PS51737,IPR011109,PTHR30461, PF00239,G3DSA:1.10.10.2600,IPR006119,SSF53041,cd00338, SM00857,IPR025827,IPR038109,PS51736,mobidb-lite, PF13408,G3DSA:3.40.50.1390,PF07508,Coil
MRKKSNLNAATRAVIYARYSSANQRDCSIEQQVAKCRELAARLGLTVIDVYEDRAISGKTDRRPNFQRMMKDADLRQFDVVLAWKSNRMGRNMLQAMTNEERLRDNGIRTVYAEEDFDDTAAGRFALRNMMNVNQFYSENMAEDITRGLMDNAAKCLSNGSLPLGYKPGDDRHVVLDEAEAAIVQEIFTRVSCYEPFIDIARDLNRRGIKTKKGSEWGRSSFHTICCNERYRGIYIYRDVRIEGGMPRIVSDELFYKVQEVLKVKKNPQGRRKRSGYEEYLLTGKLFCGHCGSPMTGIAGTSKTGAMHYYYTCQKRRTDHSCDKKAVRRDQIERAVGVAIQQQLLTDENIQMMADKLMEYNARTETKYRLQGLQDQLNANKTATANILKAIEMGIITDATKARLLELEKEQGQLLVKIDEAKAEMVPISRNDFVKLLYIYKEGEPTDKKYLAALFDNFLVRVDLYDDHLKITFDPTGGRQPIDMPIGAEESPESPGDSPESSDFEASPQDAEKFVLALHNRTKELQALA

SEQ ID NO: 3470 - protein, 529 aa, Unknown
  Description of Unknown: Integrase B3471 sequence
  PTHR30461:SF3,SM00857,G3DSA:1.10.10.2600,IPR036162,PF13408, IPR025827,G3DSA:3.40.50.1390,PS51737,IPR006119,IPR038109, PF07508,SSF53041,IPR011109,PTHR30461,Coil, PS51736,cd00338,PF00239
MTKRKWGELMKTITKIEEIESVGPAKKIRVAAYCRVSSSSDDQLISLETQKAHYETYIRANPEWEFAGLYYDEGISGTKTSKREGLLSMLKDCGRGKIDYIVTKSISRFARNTADCLTMVRKLLELDIPVFFEKENINTASMESELMLSILSSMAESESVSISQNAKWSIQRRFKNGTFIIACPPYGYDNVDGELVVVPEQAVVVKRIFADALAGKGTHMIARELNSEGLPPIQGKKWHPGTIKFILKNEKYTGDVIFQKTYTDSSFNRHRNNGEYDQYFCENHHEPIISHEDFDKVNELLRQRGKEKGNGEDTAKYNNRYGFSGRIKCGECGSTFKRRMHYKPSGAYVAWCCGRHIDSVDACSMKYITDDALKAAFLTMMNKLVFSHKVVLKPLLNDLITTSDSERLQQISELENQIEKNVEQKQVLTDLMTSVKLSPALFHKVSNELNTEAEMLSKKKEGLLYSMSGEYSKVEELKLLMQFTAKNNMVTEFTEELFLAYVDRVTVVSRAEVMFELKCGLNLKERLVK

SEQ ID NO: 3471 - protein, 529 aa, Unknown
  Description of Unknown: Integrase B3472 sequence
  cd00338,SM00857,G3DSA:1.10.10.2600,IPR036162,PF13408, PS51737,IPR025827,G3DSA:3.40.50.1390,IPR006119,IPR038109, PF07508,IPR011109,SSF53041,PTHR30461,PS51736, Coil,PF00239
MKFTSTWRISDPLAQYIVYLRKSRKDMEAEALGQTDTLKRHRATLLSLAENNNLNVVEICEEVVTGDSIAVRPEVQKVLQLVETGSYAGVLVMEVERLARGDTIDQGIIAQTFKYSNTKIVTPSKVYDPNNEMDEEYFEFGLFMSRREYNTIKRRLSRGKEASLREGKWISGKTPFGWLREKLPNDKGYKLIPHPEQAPILQQIYDWYTGDGCTRIGAKAISTRLNSLGVPTNSGSLWRTDSVLDILRNPANAGWIKSGGRPETKRIVDGSVVVSRPRTRQEDLKLYKGLHDALISQAQYDKAVSLSYSVVAPRGKGAWKTVTSLAGLVRCDQCGRVMVRRASSGDRRPSFMCPTQGCPTVSSWYSEVEEALLDALRDWLRELEVGEADTNDDHSLLDALSASINADQKQLAKLEAQEARAYELVETGVYTPEVFLQRSQALAADKQVIVSRVEENQRAQDEITRAKQARARLAPAVRHVLEAYPLAATPQDKNDLLKTVLQKVLYHKRSKSYSKAGSDMCLTLYPLTD

SEQ ID NO: 3472 - protein, 529 aa, Unknown
  Description of Unknown: Integrase B3473 sequence
  PTHR30461:SF3,SM00857,G3DSA:1.10.10.2600,IPR036162,PF13408, IPR025827,G3DSA:3.40.50.1390,PS51737,IPR006119,IPR038109, PF07508,IPR011109,SSF53041,PF00239,PTHR30461, PS51736,Coil,cd00338
MANARKVQVIEATINPKTHLSTTSPRKRRVAAYARVSTDSDEQAGSYDAQIDYYTRYICNRPDWEFVKVYPDDGISGLSTKKREQFMAMINDALAGKIDYIITKSISRFARNTVDTLTYVRMLKDHGVGVYFEKENIDTMDAKGELLITIMSSLAQEESRSISENVIWGQRKRFADGKVTLPYKRFLGYDRGASKDDPPVVNEEQAVWVRYIYSEFMLGKTACAIAKALTASGVPSPSGKPKWSPSTVESILSNEKYKGDALLQKTFTVDFLSKKKKVNEGEHPQYYVEHSHEAIIDPREWQLVQLEMERRKSLGMRYSGNCVLATRIVCGDCGSYFGPKVWNSTSKYKRTIWQCNNKFKGETKCSTPHIEEQEIKSRFISVINFLLPDKQALLEDCRLMQDALTDCTKIDEQLNALTEELEVVAALTRKCIAENAAEVIDQVEYKKRYDGLNDRYNITREKIEAMEKKKTSRIGEADKIGAFMFEMLERDEPLDTFDDRLWIAVIDHATVFHDGRIVFTFVNGMEAEG

SEQ ID NO: 3473 - protein, 529 aa, Unknown
  Description of Unknown: Integrase B3474 sequence
  PTHR30461:SF3,SM00857,G3DSA:1.10.10.2600,IPR036162,PF13408, PS51737,G3DSA:3.40.50.1390,IPR025827,IPR006119,IPR038109, PF07508,IPR011109,SSF53041,PF00239,PTHR30461, PS51736,Coil,cd00338
MATAKNVTVIPATFNPQTRRPLKQVTRRRVAGYARVSTDSDEQFTSYEAQVDYYTNYINSNPEWSFVKVYTDEGISGTNTKHRDGFNEMIADALNGKIDLIVTKSVSRFARNTVDSLTTIRKLKEHGTEVYFEKEAIWTFDNKGELLLTIMSSLAQEESRSISENVTWGRRKQFSDGKVSLPYGQFLGYRKGPDGLPEIVPEEAKTVDLIYRMFRNGKTPSYIARHLTAQGIPTPGGKKVWQAQVIESILTNEKYKGDARLQKKFTTDFLTKKQKKNEGEVPQYYVENSHPAIIEPRAWAEVQRIMKRRKASGKRHECSSPFSGMVICGDCGSTYGSKVWHSNDPYRKVIWQCNSKFKSEEKCRTPHVTEERLKDGFLEALSILHENRETLLNDIRDVKHDLENCTEVNAKITETAQEMEVIAGLIQKAIEDNAVHAQDQEEYNRRYNELADHYEKLKKKLEALEQERDDREYKSTVLSGFLFEMMEFEYLDAEFTDARCIAMLDHVSIYADGRMVYSFLNGSDITVML

SEQ ID NO: 3474 - protein, 529 aa, Unknown
  Description of Unknown: Integrase B3475 sequence
  SM00857,G3DSA:1.10.10.2600,IPR036162,PF13408,IPR025827, G3DSA:3.40.50.1390,PS51737,IPR006119,IPR038109,PF07508, IPR011109,SSF53041,PF00239,PTHR30461,PS51736, Coil,cd00338
MNFTSTWKIADPLAQYIIYLRKSRKDMEAEALGQTDTLKRHRAALLSLSESRALNVVEICEEVVTGDSIAVRPEVQKVLQLVETGNYAGVIVMEVERLARGDTIDQGIIAQTFKYSNTKIVTPNKVYDPNNEMDEEYFEFGLFMSRREYNTIKRRLSRGKEASLREGKWISGKTPFGWSREKLPNDKGYKLVPHPEQAPVLQQIYNWYTGDGCARIGAKAISTRLNSLGVPTNSGSLWRADSVLDILRNPANAGWIKSGGRPETKRIVDGSVVVSRPRTRQEDLKLYKGLHNGLISQEQYDKAVALSYSSASPRGKGAWGTVTSLAGLVRCDQCGRVMVRRPSSGNRRDTLLCPSYGCTTVSAWYDDVEDAVLDALRGWLRELELGEAAAPDDTPMRTALESSIAADRKQLAKLEAQEARAYELVETGVYTPEVFLQRSQALAADKQVIVDRIEASQTTIHELALAKQARARLAPAVRRVLETYPLAASPQEKNALLKTVLQKVLYHKQTKSYTKSGSDMHVTLYPLAD

SEQ ID NO: 3475 - protein, 529 aa, Unknown
  Description of Unknown: Integrase B3476 sequence
  PTHR30461:SF3,IPR036162,PS51737,IPR011109,PTHR30461, PF00239,G3DSA:1.10.10.2600,IPR006119,SSF53041,cd00338, SM00857,IPR025827,IPR038109,PS51736,mobidb-lite, PF13408,G3DSA:3.40.50.1390,PF07508,Coil
MKKRINTNSAARAVIYARYSSANQRDCSIEQQVEKCRELAAREGVTVIEIYADRAVSGKTDRRPNFQRMMKDASLRQFDVVLAWKSNRMGRNMLQAMMNEEQLRSNGIRTIYAEEDFDDTAAGRFALRNMMNVNQFYSENMAEDISRGLMDNASKCMSNGSLPLGYKTGKDQKVVLDEAEAAIVQEIFTRVSCYEPFIDIARDLNRRGIKTKKGAEWGRSSFHTICRNERYRGIYIYRDIRVEGGMPRIVSDELFYKVQEVLKVKKNPQGRRKRSGYEEYLLTGKLYCGHCGSPMTGIAGTSKTGAMHYYYTCQKRRTDHSCDKKAVRRDQIEKAVAIAIQQQLLTDENIQMMADETMAYNARTEIKYRLQSLQQQLYSNETSTANIMKAIEMGIITDTTKARLLALEQEHGQLLAKIDTAKAEMVPINREDFVSLLDIYRTGDVNNKKYLAALFDTFLVRVDLYDDHFKITFDPTGGKMPVDIPIGAEDSPESPGDSPESSDFEASPQDAEKFVLALHSRTKELQALA

SEQ ID NO: 3476 - protein, 529 aa, Unknown
  Description of Unknown: Integrase B3477 sequence
  PTHR30461:SF3,IPR036162,PS51737,IPR011109,PTHR30461, PF00239,G3DSA:1.10.10.2600,IPR006119,SSF53041,cd00338, SM00857,IPR025827,IPR038109,PS51736,mobidb-lite, PF13408,G3DSA:3.40.50.1390,PF07508,Coil
MKKRINTNSAARAVIYARYSSANQRDCSIEQQVEKCRELAAREGVTVIEIYADRAVSGKTDRRPNFQRMMKDASLRQFDVVLAWKSNRMGRNMLQAMMNEEQLRSNGIRTIYAEEDFDDTAAGRFALRNMMNVNQFYSENMAEDISRGLMDNASKCMSNGSLPLGYKTGKDQKVVLDEAEAAIVQEIFTRVSCYEPFIDIARDLNRRGIKTKKGAEWGRSSFHTICRNERYRGIYIYRDIRVEGGMPRIVSDELFYKVQEVLKVKKNPQGRRKRSGYEEYLLTGKLYCGHCGSTMTGIAGTSKTGAMHYYYTCQKRRTDHSCDKKAVRRDQIEKAVAIAIQQQLLTDENIQMMADETMAYNARTEIKYRLQSLQQQLYSNETSTANIMKAIEMGIITDTTKARLLALEQEHGQLLAKIDTAKAEMVPINREDFVSLLDIYRTGDVNNKKYLAALFDTFLVRVDLYDDHFKITFDPTGGKMPVDIPIGAEDSPESPGDSPESSDFEASPQDAEKFVLALHNRTKELQALA

SEQ ID NO: 3477 - protein, 529 aa, Unknown
  Description of Unknown: Integrase B3478 sequence
  PTHR30461:SF3,cd00338,SM00857,G3DSA:1.10.10.2600,IPR036162, PF13408,PS51737,G3DSA:3.40.50.1390,IPR025827,IPR006119, IPR038109,PF07508,IPR011109,SSF53041,PTHR30461, PS51736,Coil,PF00239
MQRAVIYARYSPGPNQTEQSIEGQVRECTKYAELHDLRIVGTYVDRKISGKTDNRREFQRMIDDSEKHIFDVIILYHTDRFARNRYDSAIYKHKLKENGVELRYATTDIPKGPEGIILESIMEGWAEYYSAELSRKIKRGMRESALKCHSTGAGRCLGYRTAEDKSLVIEPEGAKAVQTVFDMYIKGKSHADICRYLNVCGFRTAQGKLFNKNSVTHIIRNKRYIGVYTYDDITIEDGIPAIISKDTFHLAQLEAARRKTAKRPKEPKAEHLLSGKAFCGHCQKPLVGVSGTGKSGNKWYYYYCQESRAKRGCTKKPVKRDWLEREVVKRTVAEVLQPEVIQHIAKKCYDLQMEYRQDNSDVLFYELKLKDVRKAIKNTMHAIESGVKTKTLPARLQELENEEEALEAELAIAKAADFVITTDQIEFLLTQFAEPWECESEEEYHRRIIKCFVHKVFLFDDKLLIYYNVSRDGKTREQSEAELLEGALGEGFDKRSSGSTILIAGRTPECEIIVLRYGFWLALDLTVQV

SEQ ID NO: 3478 - protein, 529 aa, Unknown
  Description of Unknown: Integrase B3479 sequence
  cd00338,SM00857,G3DSA:1.10.10.2600,IPR036162,PF13408, PS51737,G3DSA:3.40.50.1390,IPR025827,IPR006119,IPR038109, PF07508,IPR011109,SSF53041,PTHR30461,PS51736, Coil,PF00239
MKFTSTWRISDPIAQYIIYLRKSRKDMEAEALGQTDTLKRHRAALLSLAESRGLNIVEICEEVVTGDSIAVRPEVQKVLQLVETGSYAGVLVMEVERLARGDTIDQGIIAQTFKYSNTKIVTPNKVYDPNNEMDEEYFEFGLFMSRREYNTIKRRLSRGKEASLREGKWISGKTPFGWLREKLPNDKGYKLIPHPEQAPILRQIYDWYTGEGCARIGAKAISTRLNSLGVPTNSGSLWRTDSVLDILRNPANAGWIKSGGRPETKRIVDGAVVVSRPRTRQEDLKFYKGLHDGLISQEQYDKAVALSYSSASPRGKGAWQTVTSLAGLIRCDQCGRVMVRRASSGGRRDTLLCPSYGCTTVSAWYEDVEGAVLDALRGWLHELEVGNSENSDDHSLLDALAASISADQKQLAKLEAQEARAYEFVETGVYTPEIFLQRSQALAADKQVIISRIEENQRAQDEITRAKQARSRLAPAVRHVLETYPLAATPQDKNELLKTVLQKVLYHKQSKSHSKSGSDMRVTLYPLTD

SEQ ID NO: 3479 - protein, 529 aa, Unknown
  Description of Unknown: Integrase B3480 sequence
  PTHR30461:SF3,SM00857,G3DSA:1.10.10.2600,IPR036162,PF13408, PS51737,G3DSA:3.40.50.1390,IPR025827,IPR006119,IPR038109, PF07508,IPR011109,SSF53041,PF00239,PTHR30461, PS51736,Coil,cd00338
MQRAVIYARYSPGPNQTEQSIEGQVRECTKYAELHDLRIVGTYVDRKISGKTDNRREFQRMIDDSEKHIFDVIILYHTDRFARNRYDSAIYKHKLKENGVELRYATTDIPKGPEGIILESIMEGWAEYYSAELSRKIKRGMRESALKCHSTGAGRCLGYRTAEDKSLVIEPEGAKAVQTVFDMYIKGKSHADICRYLNDCGFRTAQGKLFNKNSVTHIIRNKRYIGVYTYDDITIEDGIPAIISKDTFHLAQLEAARRKTAKRPKEPKAEYLLSGKAFCGHCQKPLVGVSGTGKSGNKWYYYYCQESRAKRGCTKKPVKRDWLEREVVKRTVAEVLQPEVIQHIAKKCYNLQMEYRQDNSDVLFYELKLKDVRKAIKNTMHAIESGVKTKTLPARLQELENEEEALEAELAIAKAADFVITTDQIEFLLTQFAEPWECESEEEYHRRIIKCFVHKVFLFDDKLLIYYNVSRDGKTREQSEAELLEEALGEGFDKRSSGSTILIAGRTPECEIIVLRYGFWLALDLTVQA

SEQ ID NO: 3480 - protein, 529 aa, Unknown
  Description of Unknown: Integrase B3481 sequence
  cd00338,SM00857,G3DSA:1.10.10.2600,IPR036162,PF13408, IPR025827,G3DSA:3.40.50.1390,PS51737,IPR006119,IPR038109, PF07508,IPR011109,SSF53041,PTHR30461,PS51736, Coil,PF00239
MKFTSTWKIADPLSQYIIYLRKSRKDMEAEALGQTDTLNRHRAALLSLSESRGLNVVEICEEVVTGDSIAVRPEVQKVLQLVETGNYAGVIVMEVERLARGDTIDQGIIAQTFKYSNTKIITPNKIYDPNNEMDEEYFEFGLFMSRREYNTIKRRLSRGKEASLREGKWISGKTPFGWLREKLPNDKGYKLVPHPEQAPILQQIYNWYTGEGCARIGAKAISTRLNSLGVPTNSGSLWRADSVLDILRNPANAGWIKSGGRPETKRIVDGAVVVSRPRTRQEDLKLYKGLHDGLISQEQYDKAVALSYSSASPRGKGAWGTVTSLAGLVRCDQCGRVMVRRPSSGNRRDTLLCPSYGCTTVSAWYDDVEDAVLDALRGWLRELELGEAAAPDDTPMRTALESSIAADRKQLAKLEAQEARAYELVETGVYTPEIFLQRSQALAADKQVIVDRIEASQTTITELARARQARARLAPAVRRVLETYPLAASPQERNALLKTVLQKVLYHKQTKSYTKSGSDMHVTLYPLAD

SEQ ID NO: 3481 - protein, 529 aa, Unknown
  Description of Unknown: Integrase B3482 sequence
  PTHR30461:SF3,SM00857,G3DSA:1.10.10.2600,IPR036162,PF13408, IPR025827,PS51737,G3DSA:3.40.50.1390,IPR006119,IPR038109, PF07508,IPR011109,SSF53041,PTHR30461,Coil, PS51736,cd00338,PF00239
MSRYCIYLRKSRADLEAEAHGEGETLSRHKTALLELARRMGITISATYEEIVSGETIAARPQMQRLLSEVGAGEWDGVLVMEIERLARGDTMDQGLVAQTFKYSGTKIITPLKTFDPQNEFDEEYFEFGLFMARREFTTTNRRLVRGREASAKEGKYVGSVPPYGYRKVKIPNDKGFTLEIVEEQAKVVRMIFEWYAEGAEVNSQKKRIGPYTIAVRLNELGIKSAGKKDYWTIYGVQNMLINPVYIGKIRWGYRKVKKTVTPEGMKKKSREFAQDGDYIVVDGLHEPILSEELFYKVQDLIAANPPTPIKYRHKNINPFAGLIFCAKCGHCMNYRRGYGRQPDYIGCYTAGCKNKASRFDLVEQRVLSILNSWVKDYSVDKAQIKHEADLNAELSNAISLAEKEIETLQDQLDKVYSFFERGTYTEKIFKQRSSAIEQQIMEIGEKIDRLKAEHQQVLERQNVQAEFVPSIKHLLEIYDTLEPVEKNKWLKQIIDRIVYEKNADGKYHNVDPGDFTIGILPRLPKKGN

SEQ ID NO: 3482 - protein, 529 aa, Unknown
  Description of Unknown: Integrase B3483 sequence
  SM00857,G3DSA:1.10.10.2600,IPR036162,PF13408,IPR025827, G3DSA:3.40.50.1390,PS51737,IPR006119,IPR038109,PF07508, SSF53041,IPR011109,PF00239,PTHR30461,PS51736, Coil,cd00338
MKFTSTWKISDPLAQYIIYLRKSRKDMEAEALGQTDTLKRHRAALLSLSESRGLNVVEICEEVVTGDSIAVRPEVQKVLQLVETGNYAGVIVMEVERLARGDTIDQGIIAQTFKYSNTRIITPNKTYDPNNEMDEEYFEFGLFMSRREYNTIKRRLSRGKEASLREGKWISGKTPFGWSREKLPNDKGYKLVPHPEQAPVLQQIYNWYTGEGCARIGAKAISTRLNSLGVPTNSGSLWRADSVLDILRNPANAGWIKSGGRPETKRIVDGAVVVSRPRTRQEDLKLYKGLHDGLISQEQYDKAVALSYSSASPRGKGAWGTVTSLAGLVRCDQCGRVMVRRPSSGGRRDTLLCPSYGCTTVSAWYDDVEDAVLDALRGWLRELELGEAAAPDDTPMRTALESSIAADRKQLAKLEAQEARAYELVETGVYTPEIFLQRSQALAADKQVIVDRIDASQTTIHELARARQARARLAPAVRRVLETYPLAASPQEKNALLKTVLQKVLYHKQTKSYTKSGSDMHVTLYPLAD

SEQ ID NO: 3483 - protein, 529 aa, Unknown
  Description of Unknown: Integrase B3484 sequence
  PTHR30461:SF3,SM00857,G3DSA:1.10.10.2600,IPR036162,PF13408, IPR025827,G3DSA:3.40.50.1390,PS51737,IPR006119,IPR038109, PF07508,SSF53041,IPR011109,PTHR30461,Coil, PS51736,cd00338,PF00239
MKKAVIYARYSSDSQTEQSIEGQLRVVNQFASNNDYIIIDTYIDRATTGTNTNRPGFQKMIADSARRDFDYVLVYKLDRFARNRFDSAFNKKALKKNGVKVVSATENISDSPEGIILESMLEGMAEYYSAELSQKVKRGQFESLEKGTFLGGTMLYGYKVNNKIIEINEEQAYIVRKIFTAYANGKTALQIADMLKNDNILNNQGRLFCANSIMNLLKNKKYTGLLEYGDYVKENYYPRIIDDNTFEIVSKRIEDNKRSPARMKAYCLYRLSGKLYCGHCKSLMTGESGTSKQGKIHYYYKCFGKKKHNGCDKKSVKKEELENLVVALVLQHILAEDKILDTIEGVTSAYNESVKQSTELSILKQEQAQNEKYINNILTAIKNGIFSETTQKELIKLESRQTELKEAILVQEALQQNKLSKEQVLFFFKQFIQEELSDEEAKTSIIDTLVYKVILYDDKIRIILKNKDNITKDGSLEELEKMCSNLAQLSPPNPKPLYSVVFFFYFLHFIQNIGHNSHYLASNPQRNHT

SEQ ID NO: 3484 - protein, 529 aa, Unknown
  Description of Unknown: Integrase B3485 sequence
  PTHR30461:SF3,IPR036162,PS51737,IPR011109,PTHR30461, PF00239,G3DSA:1.10.10.2600,IPR006119,SSF53041,cd00338, SM00857,IPR025827,IPR038109,PS51736,mobidb-lite, PF13408,G3DSA:3.40.50.1390,PF07508,Coil
MKKRINTNSAARAVIYARYSSANQRDCSIEQQVEKCRELAAREGVTVIEIYADRAVSGKTDRRPNFQRMMKDASLRQFDVVLAWKSNRMGRNMLQAMMNEEQLRSNGIRTIYAEEDFDDTAAGRFALRNMMNVNQFYSENMAEDISRGLMDNASKCMSNGSLPLGYKTGKDQKVVLDEAEAAIVQEIFTRVSCYEPFIDIARDLNRRGIKTKKGAEWGRSSFHTICRNERYRGIYIYRDIRVEGGMPRIVSDELFYKVQEVLKVKKNPQGRRKRSGYEEYLLTGKLYCGHCGSPMTGIAGTSKTGAMHYYYTCQKRRTDHSCDKKAVRRDQIEKAVAIAIQQQLLTDENIQMMADETMAYNARTEIKYRLQSLQQQLYSNETSTANIMKAIEMGIITDTTKARLLALEQEHGQLLAKIDTAKAEMVPINREDFVSLLDIYRTGDVNNKKYLAALFDTFLVRVDLYDDHFKITFDPTGGKMPVDIPIGAEDSPESPGDSPESSDFEASPQDAEKFVLALHNRTKEKHLET

SEQ ID NO: 3485 - protein, 529 aa, Unknown
  Description of Unknown: Integrase B3486 sequence
  PTHR30461:SF3,cd00338,SM00857,G3DSA:1.10.10.2600,IPR036162, PF13408,IPR025827,G3DSA:3.40.50.1390,PS51737,IPR006119, IPR038109,PF07508,SSF53041,IPR011109,PTHR30461, PS51736,Coil,PF00239
MTETNISTARVPQVTVIDPRIPEKAKLRVAAYARVSSDSEDQVNSYIAQVDFYSKYIAGKEEWEMVDIYADEGISGLEARNRDDFNRMMTDCREGKIDRVLCKSISRFARNTQEYIQFVRELLRLGISIHFEKENIDTGKMTSEQVAQIYGAFAQMESTNHSSNMRFSVRMRMEKGLFVPSSVPYGYRLAGRDLEIIPEEAEVVRRIFSAYLSGQGKDDIARELNQLGVDRGRNREKWHPSTVAYILTNISYTGDMIWQKSCATDTIPFRQVRNLGQKPRYFVEHSHPAIVSCADFQRVQELMSSRKGQFHGTHRISKGSLYDKHIYCGGCGSLCRKKITVGKTYWVCRRHDGNKADCPTPQIPEPEITAAVLRLYHKLKLGQETVLRPVLSQLQELRERELRSNRKISDIDNEIARISEQNLVLVRLKSKGYVDSALYLSQMDEIDRKLRELRKLRRRLLEAAGEDRQIHDTERMMEYLEDGPEWLDEVPAELFGELIERIIIISPERLKFRLLNGMELAENIERTVR

SEQ ID NO: 3486 - protein, 529 aa, Unknown
  Description of Unknown: Integrase B3487 sequence
  PTHR30461:SF3,SM00857,G3DSA:1.10.10.2600,IPR036162,PF13408, PS51737,IPR025827,G3DSA:3.40.50.1390,IPR006119,IPR038109, PF07508,IPR011109,SSF53041,PTHR30461,PS51736, cd00338,PF00239
MSSVDKIAVVYARYSSHGQTEQSIEGQIAAAQKYAEQHGYTIIHIYADRAMTGRNDDREEFQKMLSDTATHQFGVILLWKIDRFGRNREEIAFNRYRCKKNGVRVERVAEDVPDGPEGVILDSVLEGMAEYYSLQLAQNVRRGQRESAKKSQTVGGCKIIGYNVNPDTKKYEVDPKTAPFVTEVFKRYANGETISEIVAWLNVQGVRTTRGGEFTVNSLHRLLKNEKYTGVYIFHDVRNEGGMPALIDRATFDKAQEMLKVNRRAPARVWSKTEYLLTDKLFCGHCGAMMVGESGHGRNGTKHSYYTCWNRKKKKSCDKKPVRQDVIEPMVLRAISKMLGDEATLEYITDQVWAVYERSDTSGDTIKALDKQIADVDRALSNVMKAIEMGIINEMTKTRMDELTDQKQALSVARAEAGLAGGFKLTRDMILFFLHDMAAMDMTDRDCQKRLIKTFVNAIYLYDDHFDIAFNYTDNGKVVVRMQEINDATRGEVFGRCAQSPAIVQTSEPLITIVVSCSVFVFTVKMPEA

SEQ ID NO: 3487 - protein, 529 aa, Unknown
  Description of Unknown: Integrase B3488 sequence
  cd00338,SM00857,G3DSA:1.10.10.2600,IPR036162,PF13408, IPR025827,G3DSA:3.40.50.1390,PS51737,IPR006119,IPR038109, PF07508,IPR011109,SSF53041,PTHR30461,PS51736, Coil,PF00239
MNFTSTWKIADPLAQYIIYLRKSRKDMEAEALGQTDTLKRHRAALLSLSESRGLNVVEICEEVVTGDSIAVRPEVQKVLQLVETGNYAGVIVMEVERLARGDTIDQGIIAQTFKYSDTRIVTPNKTYDPNNEMDEEYFEFGLFMSRREYNTIKRRLSRGKEASLREGKWISGKTPFGWLREKLPNDKGYKLVPHPEQAPVLQQIYNWYTGEGCARIGAKAISTRLNSLGVPTNSGSPWRADSVLDILRNPANAGWIKSGGRPETKRIVDGAVVVSRPRTRQEDLKLYKGLHDGLISQEQYDKAVALSYSSASPRGKGAWGTVTSLAGLVRCDQCGRVMVRRPSSGGRRDTLLCPSYGCTTVSAWYDDVEDAVLDALRGWLRELELGEAAAPDDTPMRTALESSIAADRKQLAKLEAQEARAYELVETGVYTPEIFLQRSQALAADKQVIVDRIEASQTTIHELARARQARARLAPAVRRVLETYPLAASPQEKNALLKTVLQKVLYHKQTKSYTKSGSDMHVTLYPLAD

SEQ ID NO: 3488 - protein, 529 aa, Unknown
  Description of Unknown: Integrase B3489 sequence
  cd00338,SM00857,G3DSA:1.10.10.2600,IPR036162,PF13408, IPR025827,G3DSA:3.40.50.1390,PS51737,IPR006119,IPR038109, PF07508,SSF53041,IPR011109,PTHR30461,PS51736, Coil,PF00239
MKFTSTWKIADPLAQYIIYLRKSRKDMEAEALGQTDTLKRHRAALLSLSESRGLNVVEICEEVVTGDSIAVRPEVQKVLQLVETGNYAGVIVMEVERLARGDTIDQGIIAQTFKYSDTRIITPNKTYDPNNEMDEEYFEFGLFMSRREYNTIKRRLSRGKEASLREGKWISGKTPFGWSREKLPNDKGYKLVPHPEQAPVLRQIYNWYTGEGCARIGAKAISTRLNSLGVPTNSGSLWRADSVLDILRNPANAGWIKSGGRPETKRIVDGAVVVSRPRTRQEDLKLYKGLHDGLISQEQYDKAVALSYSSASPRGKGAWGTVTSLAGLVHCDQCGRVMVRRPSSGNRRDTLLCPSYGCTTVSAWYDDVEDAVLDALRGWLRELELGEAAAPDDTPMRTVLESSIAADRKQLAKLEAQEARAYELVETGVYTPEVFLQRSQALAADKQVIVDRIEASQTTIHELARSRQARARLAPAVRRVLETYPLAASPQEKNALLKTVLQKILYHKQAKSYTKSGSDMHVTLYPLAD

SEQ ID NO: 3489 - protein, 529 aa, Unknown
  Description of Unknown: Integrase B3490 sequence
  cd00338,SM00857,G3DSA:1.10.10.2600,IPR036162,PF13408, IPR025827,G3DSA:3.40.50.1390,PS51737,IPR006119,IPR038109, PF07508,IPR011109,SSF53041,PTHR30461,PS51736, Coil,PF00239
MKFTSTWKIADPLAQYIIYLRKSRKDMEAEALGQTDTLKRHRAALLSLSESRGLNVVEICEEVVTGDSIAVRPEVQKVLQLVETGNYAGVIVMEVERLARGDTIDQGIIAQTFKYSDTRIITPNKTYDPNNEMDEEYFEFGLFMSRREYNTIKRRLSRGKEASLREGKWISAKTPFGWLREKLPNDKGYKLVPHPEQAPILQQIYNWYTGEGCARIGAKAISTRLNSLGVPTNSGSLWRADSVLDILRNPANAGWIKSGGRPETKRIVDGAVVVSRPRTRQEDLKLYKGLHDGLISQEQYDKAVALSYSSASPRGKGAWGTVTSLAGLVRCDQCGRVMVRRPSSGNRRDTLLCPSYGCTTVSAWYDDVEDAVLDALRGWLRELELGEAAAPDDTPMRTALESSISADRKQLAKLEAQEARAYELVETGVYTPEIFLQRSQALSADKQVIVDRIEASQTTITELARAKQARARLAPAVRRVLETYPLAASPQEKNALLKTVLQKVLYHKQTKSYTKSGSDMHVTLYPLAD

SEQ ID NO: 3490 - protein, 529 aa, Unknown
  Description of Unknown: Integrase B3491 sequence
  SM00857,G3DSA:1.10.10.2600,IPR036162,PF13408,IPR025827, G3DSA:3.40.50.1390,PS51737,IPR006119,IPR038109,PF07508, IPR011109,SSF53041,PF00239,PTHR30461,PS51736, Coil,cd00338
MKFTSTWKISDPLAQYIIYLRKSRKDMEAESLGQTDTLKRHRATLLSLAESSGLNVVEICEEVVTGDSIAVRPEVQKVLQLVETGSYAGVLVMEVERLARGDTIDQGIIAQTFKYSNTKIVTPNKVYDPNNEMDEEYFEFGLFMSRREYNTIKRRLSRGKEASLREGKWISGKTPFGWLREKLPNDKGYKLIPHPDQAPILRQIYDWYTGEGCARIGSYAIASRLNALGVKTNSGNSWTTSAILELLRNPANAGWIKSGGRPETKRIVDGSVVVSRPRTRQEDLKLYKGLHDALISQAQYDKAVSLSYSVVAPRGKGAWKTVTSLAGLVRCDQCGRVMVRRASSGDRRPSFMCPTQGCPTVSSWYSEVEEALLNALRDWLRELEVGEVDTNDDHSLLDALSASINADQKQLAKLEAQEARAYELVETGVYTPEVFLRRSQALAADKQVIVSRVEENQRAQDEITRAKQARARLAPAVRHVLEAYPLAATPQDKNDLLKTVLQKVLYHKRSKSYSKAGSDMCLTLYPLTD

SEQ ID NO: 3491 - protein, 529 aa, Unknown
  Description of Unknown: Integrase B3492 sequence
  PTHR30461:SF3,IPR036162,PS51737,IPR011109,PTHR30461, PF00239,G3DSA:1.10.10.2600,IPR006119,SSF53041,cd00338, SM00857,IPR025827,IPR038109,PS51736,mobidb-lite, PF13408,G3DSA:3.40.50.1390,PF07508,Coil
MRKKSNLNAATRAVIYARYSSANQRDCSIEQQVAKCRELAARLGLTVIDVYEDRAISGKTDRRPNFQRMMKDADLRQFDVVLAWKSNRMGRNMLQAMTNEERLRDNGIRTVYAEEDFDDTAAGRFALRNMMNVNQFYSENMAEDITRGLMDNAAKCLSNGSLPLGYKPGDDRHVVLDEAEAAIVQEIFTRVSCYEPFIDIARDLNRRGIKTKKGSEWGRSSFHTICRNERYRGIYIYRDVRIEGGMPRIVSDELFYKVQEVLKVKKNPQGRRKRSGYEEYLLTGKLFCGHCGSPMTGIAGTSKTGAMHYYYTCQKRRTDHSCDKKAVRRDQIERAVGVAIQQQLLTDENIQMMADKLMEYNARTETKYRLQGLQDQLNANKTATANILKAIEMGIITDATKARLLELEKEQGQLLVKIDEAKAEMVPISRNDFVKLLYIYKEGEPTDKKYLAALFDNFLVRVDLYDDHLKITFDPTGGRQPIDMPIGAEESPESPGDSPESSDFEASPQDAEKFVLALHNRTKEKHLRT

SEQ ID NO: 3492 - protein, 529 aa, Unknown
  Description of Unknown: Integrase B3493 sequence
  cd00338,SM00857,G3DSA:1.10.10.2600,IPR036162,PF13408, PS51737,G3DSA:3.40.50.1390,IPR025827,IPR006119,IPR038109, PF07508,IPR011109,SSF53041,PTHR30461,PS51736, Coil,PF00239
MNFTSTWKIADPLAQYIIYLRKSRKDMEAEALGQTDTLKRHRAALLSLSESRGLNVVEICEEVVTGDSIAVRPEVQKVLQLVETGNYAGVIVMEVERLARGDTIDQGIIAQTFKYSDTRIITPNKTYDPNNEMDEEYFEFGLFMSRREYNTIKRRLSRGKEASLREGKWISGKTPFGWSREKLPNDKGYKLVPHPEQAPVLQQIYNWYTGEGCARIGAKAISTRLNSLGVPTNSGSLWRTDSVLDILRNPANAGWIKSGGRPETKRIVDGAVVVSRPRTRQEDLKLYKGLHDGLISQEQYDKAVALSYSSASPRGKGAWGTVTSLAGLVRCDQCGRVMVRRPSSGNRRDTLLCPSYGCTTVSAWYDDVEDAVLDALRGWLRELELGEAAAPDDTPMRTALESSIAADRKQLAKLEAQEARAYELVETGVYTPEIFLQRSQALAADKQVIVDRIEASQTTITELARAKQARARLAPAVRRVLETYPLAASPQEKNALLKTVLQKVLYHKQTKSYTKSGSDMHVTLYPLAD

SEQ ID NO: 3493 - protein, 529 aa, Unknown
  Description of Unknown: Integrase B3494 sequence
  PTHR30461:SF3,SM00857,G3DSA:1.10.10.2600,IPR036162,PF13408, IPR025827,PS51737,G3DSA:3.40.50.1390,IPR006119,IPR038109, PF07508,SSF53041,IPR011109,PF00239,PTHR30461, PS51736,Coil,cd00338
MSSVDKIAVVYARYSSHGQTEQSIEGQIAAAQKYAEQHGYTIIHIYADRAMTGRNDDREEFQRMLSDTATHQFGVILLWKIDRFGRNREEIAFNRYRCKKNGVRVERVAEDVPDGPEGVILDSVLEGMAEYYSLQLAQNVRRGQRESAKKSQTVGGCKIIGYNVNPDTKRYEVDPKTAPFVTEVFKRYANGETISEIVAWLNAQGVRTTRGGEFTVNSLHRLLKNEKYTGVYIFHDIRNEGGMPALIDHATFDKVQEMLKVNRRAPARVWSKTEYLLTDKLFCGHCGAMMVGESGHGRNGTKHNYYTCWNRKKKKSCDKKPVRQDVIESLVLRSIGKLLENPATLENIADQVWAAYERSDTSGDTIKALDKQIADVDRALSNVMKAIEMGIINEMTKARMDELTDQKQALSAARAEAGLAGGFKLTRDMILFFLQEIAALDMADRDSQKRLIKTFVNAIYLYDDHFDIAFNYTDNGKVVVRMQEINDAACGEVFGRCAQSPAIVQTSEPLITIVVSCSVFVFSVKMPEA

SEQ ID NO: 3494 - protein, 529 aa, Unknown
  Description of Unknown: Integrase B3495 sequence
  cd00338,SM00857,G3DSA:1.10.10.2600,IPR036162,PF13408, PS51737,G3DSA:3.40.50.1390,IPR025827,IPR006119,IPR038109, PF07508,IPR011109,SSF53041,PTHR30461,PS51736, Coil,PF00239
MKFTSTWRISDPLAQYIVYLRKSRKDMEAEALGQTDTLKRHRAALLSLAESSGLNVVEICEEVVTGDSIAVRPEVQKVLQLVETGSYAGVLVMEVERLARGDTIDQGIIAQTFKYSNTKIVTPNKVYDPNNEMDEEYFEFGLFMSRREYNTIKRRLSRGKEASLREGKWISGKTPFGWLREKLPNDKGYKLIPHPEQAPILRQIYDWYTGEGCARIGSYAIASRLNTLGIKTNSGNSWTTSAILELLRNPANAGWIKSGGRPETKRIVDGSVVVSRPRTRQEDLKLYKGLHDALISQAQYDKAVSLSYSVVAPRGKGAWKTVTSLAGLVRCDQCGRVMVRRASSGDRRPSFMCPTQGCPTVSSWYSEVEEALLDALRDWLRELEVGEADTNDDHSLLDALSASINADQKQLAKLESQEARAYELVETGVYTPEVFLQRSQALAADKQVIVSRVEENQRAQDEITRAKQARARLAPAVRHVLEAYPLAATPQDKNDLLKTVLQKVLYHKRSKSYSKAGSDMCLTLYPLTD

SEQ ID NO: 3495 - protein, 529 aa, Unknown
  Description of Unknown: Integrase B3496 sequence
  PTHR30461:SF3,IPR036162,PS51737,IPR011109,PTHR30461, PF00239,G3DSA:1.10.10.2600,IPR006119,SSF53041,cd00338, SM00857,IPR025827,IPR038109,mobidb-lite,PS51736, PF13408,G3DSA:3.40.50.1390,PF07508,Coil
MRKKSNLNVATRAVIYARYSSANQRDCSIEQQVAKCRELAARLGLTVIDVYEDRAISGKTDRRPNFQRMMKDADLRQFDVVLAWKSNRMGRNMLQAMTNEERLRDNGIRTVYAEEDFDDTAAGRFALRNMMNVNQFYSENMAEDITRGLMDNAAKCLSNGSLPLGYKPGDDRHVVLDEAEAAIVQEIFTRVSCYEPFIDIARDLNRRGIKTKKGSEWGRSSFHTICRNERYRGIYIYRDVRIEGGMPRIVSDELFYKVQEVLKVKKNPQGRRKRSGYEEYLLTGKLFCGHCGSPMTGIAGTSKTGAMHYYYTCQKRRTDHSCDKKAVRRDQIERAVGVAIQQQLLTDENIQMMADKLMEYNARTETKYRLQGLQDQLNANKTATANILKAIEMGIITDATKARLLELEKEQGQLLVKIDEAKAEMVPISRNDFVKLLYIYKEGEPTDKKYLAALFDNFLVRVDLYDDHLKITFDPTGGRQPIDMPIGAEDSPESPGDSSESSDFEASSQDAEKFVLALHNCTKEKHLET

SEQ ID NO: 3496 - protein, 529 aa, Unknown
  Description of Unknown: Integrase B3497 sequence
  PTHR30461:SF3,cd00338,SM00857,G3DSA:1.10.10.2600,IPR036162, PF13408,PS51737,IPR025827,G3DSA:3.40.50.1390,IPR006119, IPR038109,PF07508,IPR011109,SSF53041,PTHR30461, PS51736,Coil,PF00239
MSSVDKTAVIYARYSSHGQTEQSIDGQIAAAQKYAEGKGYTIIHIYADRAMTGRNDDREQFQKMLSDTATHQFGVILLWKIDRFGRNREEIAFNRYRCKKNGVRVERVAEDVPDGPEGVILDSVLEGMAEYYSLQLAQNVRRGQRESAKKSQSNGGTRMIGYKVNPDTKRYEVDPDTAPFITEVFRRYAGGQTMAEIAAWLNAQGLRATRGGMFTVNSLHRLLKNEKYTGVYIFRDIRNEGGMPALIDRATFDKVQEMLKVNRRAPSRVWSRAEYLLTDKLFCGHCGAPMAGVSGHGHTGVKHNYYTCLNRKRKKSCTKKSVRQDVLEPLVLKSIRNLLQDDATLKYIADRVWAEYERSDTSGDTIRALDRQIADVDRALSNVMKAIEMGIINEMTKARMDELTEQKQALSAARADAGLARGFKLTRNMVLYFLRKMAAMDISDRDSQKRLIKTFVNAIYLYDDHFDIAFNYTENGKVIVKMQEIDDASTGGAFGCCAQCPTIVRTSEPLIAIVVSCSVFVFSVKMPEA

SEQ ID NO: 3497 - protein, 529 aa, Unknown
  Description of Unknown: Integrase B3498 sequence
  SM00857,G3DSA:1.10.10.2600,IPR036162,PF13408,PS51737, G3DSA:3.40.50.1390,IPR025827,IPR006119,IPR038109,PF07508, SSF53041,IPR011109,PTHR30461,Coil,PS51736, cd00338,PF00239
MSNARIIEIPATRQIRSGKNNTMRKMRVAAYCRVSTEEEEQQGSFETQKLYYTEKINSTSEWELAGIYADDGISGIHTKKRDGFNQMIQDCKKKKIDLILTKSISRFARNTLDSIQYVRMLKAIGIAVIFEKENINTSTMNSEMILTVLSAFAQAESESISQNVARGKRMGFRQGKFPFPYGQILGYRKGLDGKPEVIPEEAEVIRMIFNSYLQGASLLTIKKKLEAGGVLTARGNKKWSSESVQRILQNEKYCGDVLLQKTFIEDVLTGVSKKNMGQLPQYYIENNHEGIVTKQMFREVQAEIARRNSKSAANQRKRHQGRYNSKYALSERLVCGDCGSPYKRVTWNIHGRKQIVWRCVNRLEYGTKFCSHSPSIPEEELHQAILKAVQNLAANFTDEVAAQLDGILRQMKAGENLKAQLQKQLEKAQQEFDRLLEMSLELDESTPFLDDKLRKLSGKIKILKANIAESTDGKGEDEEATKQLTAQDLLIKEYDDILTARIIEKVIVHSRQEIEIYFIGGYTQKIDLI

SEQ ID NO: 3498 - protein, 529 aa, Unknown
  Description of Unknown: Integrase B3499 sequence
  PTHR30461:SF3,IPR036162,PS51737,IPR011109,PTHR30461, PF00239,G3DSA:1.10.10.2600,IPR006119,SSF53041,cd00338, SM00857,IPR025827,IPR038109,PS51736,mobidb-lite, PF13408,G3DSA:3.40.50.1390,PF07508,Coil
MRKKSNLNAATRAVIYARYSSANQRDCSIEQQVAKCRELAARLGLTVIDVYEDRAISGKTDRRPNFQRMMKDADLRQFDVVLAWKSNRMGRNMLQAMTNEERLRDNGIRTVYAEEDFDDTAAGRFALRNMMNVNQFYSENMAEDITRGLMDNAAKCLSNGSLPLGYKPGDDRHVVLDEAEAAIVQEIFTRVSCYEPFIDIARDLNRRGIKTKKGSEWGRSSFHTICRNERYRGIYIYRDVRIEGGMPRIVSDELFYKVQEVLKVKKNPQGRRKRSGYEEYLLTGKLFCGHCGSPMTGIAGTSKTGAMHYYYTCQKRRTDHSCDKKAVRRDQIERAVGVAIQQQLLTDENIQMMADKLMEYNARTETKYRLQGLQDQLNANKTATANILKAIEMGIITDATKARLLELEKEQGQLLVKIDEAKAEMVPISRNDFVKLLYIYKEGEPTDKKYLAALFDNFLVRVDLYDDHLKITFDPTGGRQPIDMPIGAEKSPESPGDSSESSNFEASSHDAEKFVLALHNCTKELQALA

SEQ ID NO: 3499 - protein, 529 aa, Unknown
  Description of Unknown: Integrase B3500 sequence
  PTHR30461:SF3,SM00857,G3DSA:1.10.10.2600,IPR036162,PF13408, PS51737,G3DSA:3.40.50.1390,IPR025827,IPR006119,IPR038109, PF07508,SSF53041,IPR011109,PTHR30461,Coil, cd00338,PF00239
MKKFKFPIDLSMLTEEEINQFREDPSTLFQGDTDVCLYLRFSSERQKEQSIEGQLRDCIAYCKRKNYRIVAIYVDRATTARKDVEKRVHFQEMITTSVHQTWKLVIVWKLDRFARNREDSAVFKMRLRKNGVKVESATEGISKNPEGIILEAVLEGIAEYYSADLSQKITRGMRESALKCHSIGGHVPLGYKIEDHRLVINPNTAHIVQEAFELYANGETVADICRMFNTKGYRTAKGAEFNRNSFKSMFRNKRYIGVYTYKEIEKEGGVPAIIDKELFETVQRRLSANAEAPARGKAKVDYLLAGKLFCGHCGGSMNGESGTSKTGAIHHYYSCYSRKRHHSCDKKPLRKEWIEQIVAQDVMELLTDDAIQEMADMAISQTEKDLRENTRIPELSERMKETESGIANITKAVEKGIASDALMSRLVELEKEKKNLLRLIAEEEKYVCKIDRDQIVYWLTKFKDGNIEDENFKRIIIDLMVNSVTVWDEPDGFRITTAYNLTSCKNKTFRIPSSSDKGFGFEGLESTKK

SEQ ID NO: 3500 - protein, 529 aa, Unknown
  Description of Unknown: Integrase B3501 sequence
  SM00857,G3DSA:1.10.10.2600,IPR036162,PF13408,IPR025827, PS51737,G3DSA:3.40.50.1390,IPR006119,IPR038109,PF07508, SSF53041,IPR011109,PF00239,PTHR30461,PS51736, Coil,cd00338
MKFTSTWRISDPLAQYIVYLRKSRKDMEAEALGQTDTLKRHRAALLSLSESRGLNVVEICEEVVTGDSIAVRPEVQKVLQLVETGSYAGVLVMEVERLARGDTIDQGIIAQTFKYSNTKIVTPNKVYDPNNEMDEEYFEFGLFMSRREYNTIKRRLSRGKEASLREGKWISGKTPFGWLREKLPNDKGYKLIPHPEQAPILRQIYDWYTGEGCARIGSSAIATRLNNLGVKTNSGNAWTASAVLDTLRNPANAGWIKSGGRPETKRIVDGSVVVSRPRTRQEDLNLYKGLHDGLISQEQYDKAVALSYSSSSPRGKGAWQTTTSLAGLVRCDQCGRVMVRRPSSGGRRDAFMCPSPDCPTVSAWYEDVEDAVLDALRGWLHELEVGEAERSDEHSLLDALSASISADQKQLAKLEAQEARAYEFVETGVYTPEIFLQRSQALAADKQVIISRIEDNQLAQDEITRAKQARTRLAPAVRHVLETYPLAATPQDKNDLLKTVLQKVLYHKQSKSYSKAGSDMRVTLYPLTD

SEQ ID NO: 3501 - protein, 529 aa, Unknown
  Description of Unknown: Integrase B3502 sequence
  SM00857,G3DSA:1.10.10.2600,IPR036162,PF13408,PS51737, IPR025827,G3DSA:3.40.50.1390,IPR006119,IPR038109,PF07508, IPR011109,SSF53041,PF00239,PTHR30461,PS51736, Coil,cd00338
MKFTSTWKISDPLAQYIIYLRKSRKDMEAEALGQTDTLKRHRAALLSLSESRELNVVEICEEVVTGDSIAVRPEVQKVLQLVETGNYAGVIVMEVERLARGDTIDQGIIAQTFKYSDTRIITPNKTYDPNNEMDEEYFEFGLFMSRREYNTIKRRLSRGKEASLREGKWISGKTPFGWLREKLPNDKGYKLVPHPEQAPVLQQIYNWYTGDGCARIGAKAISTRLNSLGVPTNSGSLWRADSVLDILRNPANAGWIKSGGRPETKRIVDGSVVVSRPRTRQEDLKLYKGLHNGLISQEQYDKAVALSYSSASPRGKGAWGTVTSLAGLVRCDQCGRVMVRRPSSGNRRDTLLCPSYGCTTVSAWYDDVEDAVLDALRGWLRELELGEAAAPDDTPMRTALESSIAADRKQLAKLEAQEARAYELVETGVYTPEIFLQRSQALAADKQVIVDRIEASQTTIHELARARQARARLAPAVRRVLETYPLAASPQEKNALLKTVLQKVLYHKQTKSYTKSGSDMHVTLYPLAD

SEQ ID NO: 3502 - protein, 529 aa, Unknown
  Description of Unknown: Integrase B3503 sequence
  PTHR30461:SF3,SM00857,G3DSA:1.10.10.2600,IPR036162,PF13408, PS51737,G3DSA:3.40.50.1390,IPR025827,IPR006119,IPR038109, PF07508,IPR011109,SSF53041,PTHR30461,Coil, PS51736,cd00338,PF00239
MTNAVIYARYSPGPNQTDQSIEGQIHECTRFCEDNDLRIVGTYIDRKQTGRNDNRADFQKMLRDSSRHGFSTVVVWKIDRFGRNREEIAKNKAVLRMNGVRVLSAKEHIPDGPEGIILESVLEGLAEYYSANLSQNIKRGMRESALKCQFNGSGLSTGYTVDADHKYRIDPDGAAVVRTIFEMYDGGKKIADILRYLQQSNIKTMRGKEYTHYGISRILRNRVYIGEYHWHDIVVPGGVPQIIDNDLFDRVQKRLEVNKHAPAARRGDVDFLLTSKLICGNCKSTMIGDCGTGKNGARWYYYTCRAKKTKSSKCRKKSVPKEALEREVTALTAAYVLRDDVIDYIANKVVEIQKSEHDDKSMLRYFESQLKDTNKAIANIMRAIEAGIITETTRSRLEELEDTKRDLETEIIKEKVARPTIEREQVIFFLEKFRGGNVDDKEYQRKIIDTFVHKVILYDDKITITYNYSTDSTKNAENTVESIESAASAAECKCSNKPSSSPPIFEKSNTILFFVGSLFGISCKIADRR

SEQ ID NO: 3503 - protein, 529 aa, Unknown
  Description of Unknown: Integrase B3504 sequence
  PTHR30461:SF3,SM00857,G3DSA:1.10.10.2600,IPR036162,PF13408, IPR025827,G3DSA:3.40.50.1390,PS51737,IPR006119,IPR038109, PF07508,IPR011109,SSF53041,PF00239,PTHR30461, PS51736,Coil,cd00338
MSKYCIYLRKSRADLEAEAHGEGETLSRHKTALLELARRKGITISATYEEIVSGETIAARPQMQRLLSEVGAGEWDGVLVMEIERLARGDTMDQGLVAQTFKYSGTKIITPLKTFDPQNEFDEEYFEFGLFMARREFTTTNRRLVRGREASAKEGKYVGSVPPYGYRKVKIPNDKGFTLEIVEEQAKVVRMIFEWYAEGAEVNSQKKRIGPYTIAVRLNELGIKSAGKKDYWTIYGVQNMLINPVYIGKIRWGYRKVKKTVTPEGMKKKSREFAQDGDYIVVDGLHEPILSEELFYKVQDLIAANPPTPIKYRHKNINPFAGLIFCAKCGHCMNYRRGYGRQPDYIGCYTAGCKNKASRFDLVEQRVLSILNSWVKDYSVDKAQIKHEADLNAELSNAISLAEKEIETLQDQLDKVYSFFERGTYTEKIFKQRSSVIEQQIMEIGEKIDRLKAEHQQVLERQNVQAEFVPSIKHLLEIYDTLEPVEKNKWLKQIIDRIVYEKNADGKYHNVDPGDFTIGILPRLPKRGS

SEQ ID NO: 3504 - protein, 529 aa, Unknown
  Description of Unknown: Integrase B3505 sequence
  PTHR30461:SF3,SM00857,G3DSA:1.10.10.2600,IPR036162,PF13408, IPR025827,PS51737,G3DSA:3.40.50.1390,IPR006119,IPR038109, PF07508,IPR011109,SSF53041,PTHR30461,Coil, PS51736,cd00338,PF00239
MSKYCIYLRKSRADLEAEAHGEGETLSRHKTALLELARRMGITISATYEEIVSGETIAARPQMQRLLSEVGAGEWDGVLVMEIERLARGDTMDQGLVAQTFKYSGTKIITPLKTFDPQNEFDEEYFEFGLFMARREFTTTNRRLVRGREASAKEGKYVGSVPPYGYRKVKIPNDKGFTLEIIEEQAKVVRMIFEWYAEGAEVNGQKKRIGPYSIAVRLNELGIKSVAGKDYWTIYGVQHMLINPVYIGKIRWGYRKVKKTVTPEGTKKKSREFAQDGDYIVVDGLHEPILSEELFYKVQDLIAANPPTPIKYRHKNINPFAGLIFCAKCGHCMNYRRGYGRQPDYIGCYTAGCDNKASRFDLIEQRVLSILNSWVKDYSVDKAQIKHEVDLNAELSNAISLAEKEIEALQGQLDNVYSFFERGTYTEKIFKQRSSAIEQQIMEIGEKIDRLKAEHQQVLERQNVQAEFVPSIKHLLEIYDTLEPVEKNKWLKQIIDRIVYEKNADGKYHNVDPGDFTIGILPRLPKKGS

SEQ ID NO: 3505 - protein, 529 aa, Unknown
  Description of Unknown: Integrase B3506 sequence
  PTHR30461:SF3,IPR036162,PS51737,IPR011109,PTHR30461, PF00239,G3DSA:1.10.10.2600,IPR006119,SSF53041,cd00338, SM00857,IPR025827,IPR038109,PS51736,mobidb-lite, PF13408,G3DSA:3.40.50.1390,PF07508,Coil
MAKKKKPAGGNAIIYARYSSHNQRDVSIEQQIEACRKHAAELGLTITDTYEDRAISGRTDNRPAFQRMMRDAEDGKFQYVLAWKSNRMGRNMMQAMVNESRLMDCGVKVFYAEEDFDDSAAGRFALRSMMNVNQFYSDNLAEDVRRGLMDNASKCMANGRQPLGYKRGEGGKVVVDEPAAAIVREIYTRIASGEMFMDIARDLNRRGIKTQSGSEWNKSSFKVLCRNERYRGIYIYGDTRIEGGIPPIVDDVLWYKVQEVLKVKKSKNRHHCPSDEDYLLTGKLRCGKCGGYMIGMSGRSKTGDVHHYYACQNRRVGHTCDKKNIRRDVVEPAVAQAIKQYCLTDDAIEWITDQTIAYWEDEDRKLQIDSIENDLSAVQSSISNVMKAIEMGVITETTRDRLIELERQQTDLKSKLALAKEEIVHVDRKDLISSLLAFRHGNVHDRAYQEKLFNAFLIAVYVYDDDHLKLVFNSFGKDDTVNIALDLGENDDNSGLSDVSKSSPILSNGQPKRTSRTCSAGSFFSLFPL

SEQ ID NO: 3506 - protein, 529 aa, Unknown
  Description of Unknown: Integrase B3507 sequence
  PTHR30461:SF3,SM00857,G3DSA:1.10.10.2600,IPR036162,PF13408, IPR025827,G3DSA:3.40.50.1390,PS51737,IPR006119,IPR038109, PF07508,IPR011109,SSF53041,PF00239,PTHR30461, PS51736,Coil,cd00338
MKKIAIYSRKSVFTGKGESVENQIALCKDYCEKFLRYDNADYIVYEDEGFSGKNINRPQFKLLLDDIKKHKIDILVCYRLDRISRSVADFASTLEILNKYNVDFLSIREKFDTTSANGRAMLNISATFAQLERETIAERVKDNMLQMAKNGYWTGGQLPLGYDSIRYSTIDGTGKERSYSKLKENIKELDVVRLIYSEFLKNNSILDITKLLNENNLKGKNRCDFDRTQVKRILRNPLYVKSSDLTNLYLSNNYSVYGIANGNGYLTYNKSKAKDKWIVSVANHKGIIEDTNWLLVQKILDNNATKVSNRTGTGTGDNTSLFSGILKCSECGENMVIKYNNKNKYGNPNLYYICSSKTRKFTSKCKTKNLNVKATDIKILEDIKSYNKEVLIKKYEEYINELIANNNTGLKEDLKEQIKHKEKQINNLVIKLSNIDTPEISDVILNQLATLTNEVKDLKTKLSNSDIQAANVEKAIGEFKNIKNLLLEFDSSIDSTEDIKVKRQLIRNIVKSVKYNEVDKTFFIEFYHP

SEQ ID NO: 3507 - protein, 529 aa, Unknown
  Description of Unknown: Integrase B3508 sequence
  cd00338,SM00857,G3DSA:1.10.10.2600,IPR036162,PF13408, PS51737,G3DSA:3.40.50.1390,IPR025827,IPR006119,IPR038109, PF07508,SSF53041,IPR011109,PTHR30461,PS51736, Coil,PF00239
MKFTSTWKIADPLAQYIIYLRKSRKDMEAEALGQTDTLKRHRAALLSLSESRGLNVVEICEEVVTGDSIAVRPEVQKVLQFVETGNYAGVIVMEVERLARGDTIDQGIIAQTFKYSNTKIITPNKIYDPNNEMDEEYFEFGLFMSRREYNTIKRRLSRGKEASLREGKWISGKTPFGWSREKLPNDKGYKLVPHPEQAPVLQQIYNWYTGEGCARIGAKAISTRLNSLGVPTNSGSLWRADSVLDILRNPANAGWIKSGGRPETKRIVDGAVVVSRPRTRQEDLKLYKGLHDGLISQEQYDKAVALSYSSASPRGKGAWGTVTSLAGLVRCDQCGRVMVRRPSSGNRRDTLLCPSYGCTTVSAWYDDVEEAVLDALRGWLRELELGEAAAPDDTPMRTALESSIAADRKQLAKLEAQEARAYELVETGVYTPEIFLQRSQALAADKQVIVDRIEASQTTIHDLARARQARARLAPAVRRVLETYPLAASPQEKNALLKTVLQKVLYHKQTKSYTKSGSDMHVTLYPLAD

SEQ ID NO: 3508 - protein, 529 aa, Unknown
  Description of Unknown: Integrase B3509 sequence
  SM00857,G3DSA:1.10.10.2600,IPR036162,PF13408,PS51737, IPR025827,G3DSA:3.40.50.1390,IPR006119,IPR038109,PF07508, IPR011109,SSF53041,PF00239,PTHR30461,PS51736, Coil,cd00338
MNNMRIVEIPASMRENAGRKNTVRKLRVAAYCRVSTEEEEQQGSFEIQKLYYTEKINSTPEWEVAGIYADDGISGVHTKKRDGFNQMIQDCKKRKIDLILTKSISRFARNTLDSIQYVRMLKQMGIAVVFEKENINTATMNSEMILTVLSAFAQAESESISQNVARGKRMGYKHGKFAFPYGRIIGYRKGADGKPEIIPEQAEIIRLIFNSYLQGDSLQSIKAKLETAGALTARGNTAWSAQSIQRILQNEKYCGDVLLQKTFTEDVLTGVHKKNTGQLPQYYIENYHEGIVSKQIFREVQAEIARRNSKSAANQRKRRRGRYNSKYALTERLVCGDCGSPYKRVTWNIHGRKQIVWRCVNRIEYGTKFCGSSPSVPEEKLHRAILKAVQDLAANFTDEVAAQINGILHSIQTGESIKPNLQEQLEQTQQEFDRLLEMSLDFDEDTPFLDDRLKKLNSKIKRLKKAIDDSAAQQEKASQPEMLLSAKNLQIQEYDDALTARIIEKITVRSRNEIEIWFIGGYEKAMPLE

SEQ ID NO: 3509 - protein, 529 aa, Unknown
  Description of Unknown: Integrase B3510 sequence
  PTHR30461:SF3,SM00857,G3DSA:1.10.10.2600,IPR036162,PF13408, IPR025827,G3DSA:3.40.50.1390,PS51737,IPR006119,IPR038109, PF07508,IPR011109,SSF53041,PTHR30461,Coil, PS51736,cd00338,PF00239
MANARKVQVIEATINPKTHLSTTSPRKRRVAAYARVSTDSDEQAGSYDAQIDYYTRYICNRPDWEFVKVYPDDGISGLSTKKREQFMAMINDALAGKIDYIITKSISRFARNTVDTLTYVRMLKDHGVGVYFEKENIDTMDAKGELLITIMSSLAQEESRSISENVIWGQRKRFADGKVTLPYKRFLGYDRGASKDDPPVVNEEQAVWVRYIYSEYMLGKTACAIAKALTASGVPSPSGKPKWSPSTVESILSNEKYKGDALLQKTFTVDFLSKKKKINEGEHPQYYVEHSHEAIIDPREWKLVQLEMERRKSLGMRYSGNCVLATRIVCGDCGSYFGPKVWNSTSKYKRTIWQCNDKFKGETKCRTPHIEEQEIKSRFVSVINSLLPDKQALLEDCRLMQDALTDCTKIDEQLDALVQELEVIAGLTRKCIAENAAEVIDQDEYKKRYDGLNARYDTTREKIEALEKKKAARIGEADKIGAFMFEMLECDEPLDTFDERLWIAVIDHATVYHDGRIVFTFVNGMEAEG

SEQ ID NO: 3510 - protein, 528 aa, Unknown
  Description of Unknown: Integrase B3511 sequence
  SM00857,G3DSA:1.10.10.2600,IPR036162,PS51737,G3DSA:3.40.50.1390, IPR006119,IPR038109,PF07508,IPR011109,SSF53041, PTHR30461,Coil,PS51736,cd00338,PF00239
MQETNISINEIIMYLRKSRSDDPYMTVEEVLARHERQLQEYALSSFGSIIPEERIFREVVSGETIADRPVMQSVMKYLESGQIKGVLVIEPQRLSRGDLEDCGRIINAFRYTNTLVLTPPKTYDLSDEYDRKFFEMELTRGNDYLEYTKKILNRGRLASVKQGNYIGSIAPYGYRKIKTGSGKDTAHTLEIVPEQADAVRMMAQLYLAGNGFTRIAVHLDSLGIKPLKSDHWSSAAISDILSNPVYIGMIRWNHFKTIKTMQNGQIVKSRPTNHDTDYILVPGKHPAILDQGTFDAIAQRRGKSPKIKRGHELRNPFAGLVYCGTAGCGRSMTFKQFTNYRSKVPRRSESMICPNQRICHTKSVQYSAFVERVKEILSKTVDDFEIKLQNDDGNIVRIHENIIRNLEQDLVKLKDKDLRQKDAYEDGIYTKEEYASRNAKLQEQICEVQLSIQRAKDTMPPEVDYQERVSRFSDCLSKFEDTDISASEMNLLLKSCIEKIIYHNSSESKPGIGRFVANPFELDIYLRL

SEQ ID NO: 3511 - protein, 528 aa, Unknown
  Description of Unknown: Integrase B3512 sequence
  PTHR30461:SF3,SM00857,G3DSA:1.10.10.2600,IPR036162,PS51737, G3DSA:3.40.50.1390,IPR006119,IPR038109,PF07508,IPR011109, SSF53041,PF00239,PTHR30461,PS51736, Coil,cd00338
MRYVIYLRKSRADLEAEAHGEGETLSRHKTALLELARRMGITISATYEEIVSGETIAARPQMQRLLSEVGAGEWDGVLVMEIERLARGDTMDQGLVAQTFKYSGTKIITPLKTFDPQNEFDEEYFEFGLFMARREFTTTNRRLVRGREASAKEGKYVGSVPPYGYRKVKIPNDKGFTLEIVEEQAKVVRMIFEWYAEGAEVNDQKKRIGPYTIAVRLNELGIKSVAGKDYWTIYGVQHMLINPVYIGKIRWGYRKVKKTVTPEGMKKKSREFAQDGDYIVVDGLHEPILSEELFYKVQDLIAANPPTPIKYRNNNVNPFAGLIFCAKCGHCLSYRKGYGRHPGYLGCNIAGCDNKAAPFELIEQRVLSILNSWVKDYSVDKAQIKHEADLNVELSNAISLAEKEIETLQDQLDKVYSFFERGTYTEKIFKQRSSAIEQQITDIGEKIDRLKAEHQQVLERQNVQAEFVPSIKHLLEIYDTLEPVEKNKWLKQIIDHMVYEKNADGKYRNVDPGDFTLGILPRLPKKGS

SEQ ID NO: 3512 - protein, 528 aa, Unknown
  Description of Unknown: Integrase B3513 sequence
  cd00338,SM00857,G3DSA:1.10.10.2600,IPR036162,PS51737, G3DSA:3.40.50.1390,IPR006119,IPR038109,PF07508,SSF53041, IPR011109,PTHR30461,PS51736,Coil,PF00239
MQETNISINEIIMYLRKSRSDDPYMTVEEVLARHERQLQEYALSSFGSIIPEERIFREVVSGETIADRPVMQSVMKYLESGQIKGVLVIEPQRLSRGDLEDCGRIINAFRYTNTLVLTPPKTYDLSDEYDRKFFEMELTRGNDYLEYTKKILNRGRLASVKQGNYIGSIAPYGYRKIKTGSGKDTAHTLEIVPEQADAVRMMAQLYLAGNGFTRIAVHLDSLGIKPLKSDHWSPAAISDILSNPVYIGMIRWNHFKTIKTMQNGQIVKSRPTNRGTDYILVPGKHPAILDQGTFDAIAQRRGKSPKIKRGHELRNPFAGLVFCGTAGCGRSMTFKQFTNYRSKVPRRSESMICPNQRICHTKSVQYSAFVERVKEILSKTVDDFEIKLQNDDGNIVRIHENIIRNLEQDLVKLKDKDLRQKDAYEDGIYTKEEYASRNAKLQEQICEVQLSIQRAKDTMPPEVDYQERVSRFSDCLSKFEDTDISASEMNLLLKSCIEKIIYHNSSESKPGIGRFVANPFELDIYLRL

SEQ ID NO: 3513 - protein, 528 aa, Unknown
  Description of Unknown: Integrase B3514 sequence
  SM00857,G3DSA:1.10.10.2600,IPR036162,PS51737, G3DSA:3.40.50.1390,IPR006119,IPR038109,PF07508, IPR011109,SSF53041,PTHR30461,Coil, PS51736,cd00338,PF00239
MAYCIYLRKSRADRELELQGFGETLKRHRDTLIELAKKKNLPIGEIYEEVVSGDSIAARPQMQRLLNDVSDGKWEGVLVMEIERLARGDTSDQGIVTKTFTYSNTLIITPMKTFNPTDEFDQEYFEFGLYMSRREYKTIKRRLHAGMEASCKEGNYIHHTPPFGYSIVKNKKSKGYRLEPKPGEAEIVKLIFQWYTKGILKEDGSYELLGTARIADKLNSEYSIKPLGGVWTIPTISTMLRNEHYLGYIVFGKKKRKKVVENGIIVDKWTRNESYGLYKGKHPALVSQDTFNLAQERLSRNPRRPSKTITNPLAGVIKCGMCGRSMYRRPYQKRCQSASLICSEKTCHNVSSAFYLVEDALLTAIKEWIDGYEIKEEANKYDTSVLESKTKLLEEQQKQLITYKNQLTKVFEAYENGIYDSDTFLNRQKTVSESISSTEEAIVKLNKEIANEREIISHQEEIIPKARKILEIYKTSDDVQLKNDLMKSILDKVVYTKTANGHFKDQRQDDFKLELFPKLPKNKGNSSK

SEQ ID NO: 3514 - protein, 528 aa, Unknown
  Description of Unknown: Integrase B3515 sequence
  SM00857,G3DSA:1.10.10.2600,IPR036162,PF13408,PS51737, G3DSA:3.40.50.1390,IPR025827,IPR006119,IPR038109,PF07508, IPR011109,SSF53041,PTHR30461,Coil,PS51736, cd00338,PF00239
MAYCIYLRKSRADRELELQGFGETLKRHRDTLIELAKKKNLPIGEIYEEVVSGDSIAARPQMQRLLNDVSDGKWEGVLVMEIERLARGDTSDQGIVTKTFTYSNTLIITPMKTFNPTDEFDQEYFEFGLYMSRREYKTIKRRLHAGMEASCKEGNYIHHTPPFGYSIVKNKKSKGYRLEPKPGEAEIVKLIFQWYTKGILKEDGSYELLGTARIADKLNSEYSINPLGGVWTIPTISTMLRNEHYLGYIVFGKKKRKKVVENGIIVDKWTRNESYGLYKGKHPALVSQDTFNLAQERLSRNPRRPSKTITNPLAGVIKCGMCGRSMYRRPYQKRGQSASLICSEKTCHNVSSAFYLVEDALLTAIKEWIDGYEIKEEANKYDTSVLESKTKLLEEQQKQLITYKNQLTKVFEAYENGIYDSDTFLNRQKTVSESISSTEEAIVKLNKEIANEREIISHQEEIIPKARKILEIYKTSDDVQLKNDLMKSILDKVVYTKTANGHFKDQRQDDFKLELFPKLPKNKGNSSE

SEQ ID NO: 3515 - protein, 528 aa, Unknown
  Description of Unknown: Integrase B3516 sequence
  PTHR30461:SF3,IPR036162,PS51737,IPR011109,PTHR30461, PF00239,G3DSA:1.10.10.2600,IPR006119,PF14287,SSF53041, IPR025378,SM00857,IPR025827,cd03770,IPR038109, PF13408,G3DSA:3.40.50.1390,PF07508,Coil
MNTNIKHTALLSRLSREDENIGTSESILTQKTMLTQYAKSHHFKNIIHYVDDGYSGTNFERPDFQRLMQDIKLGKIGVVITKDLSRLGRDYIKIGNLLEEYFPKYQVRYIAINDDIDTINGIPEYVPFKNIINEWYARDISRKIRSAYQTKALNGEFTASYAPYGYKKDENNKHQLIVDEETSWVVKEIFELIANKNSLYQVARILKDKKILKPRAQIMKKEGKYYNELWEKYPYDWSPQTIHRIITNEEYLGHLVCNRNSTISYKSKKLKQNPREKWIIKKHTHQAIIEEELFYLANKALEGSIKKKVIKPRNMFSQLLRCDCCGKALSLYHSDRRVASFCCVTYRSFGKKYCTAHYTRYDTLYRYVLEDIRKHAKKAIKNKEELLQEIINHRTKTNEEEHKNKIKENQRIEKRLKEIKEIMIKLYEDKALNRIKEEMYEELLESYEKEKAEKVLKRNENNIFINESKIKEKEVKKFLECINKYEDLKELNEEILHQLINKIVVYEREIIDGKRIQKIEIEYNFIND

SEQ ID NO: 3516 - protein, 528 aa, Unknown
  Description of Unknown: Integrase B3517 sequence
  SM00857,G3DSA:1.10.10.2600,IPR036162,PS51737,G3DSA:3.40.50.1390, IPR006119,IPR038109,PF07508,IPR011109,SSF53041, PTHR30461,Coil,PS51736,cd00338,PF00239
MQETNISINEIIMYLRKSRSDDPYMTVEEVLARHERQLQEYALSSFGSIIPEERIFREVVSGETIADRPVMQSVMKYLESGQIKGVLVIEPQRLSRGDLEDCGRIINAFRYTNTLVLTPPKTYDLSDEYDRKFFEMELTRGNDYLEYTKKILNRGRLASVKQGNYIGSIAPYGYRKIKTGSGKDTAHTLEIVPEQADAVRMMAQLYLAGNGFTRIAAHLDSLGIKPLKSDHWSPAAISDILSNPVYIGMIRWNHFKTIKTMQNGQIVKSRPTNHDTDYILVPGKHPAILDQGTFDAIAQRRGKSPKIKRGHELRNPFAGLVFCGTTGCGRSMTFKQFTNYRSKVPRRSESMICPNQRICHTKSVQYSAFVERVKEILSKTVDDFEIKLQNDDGNIVRIHENIIRNLEQDLVKLKDKDLRQKDAYEDGIYTKEEYASRNAKLQEQICEVQLSIQRAKDTMLPEVDYQERVSRFSDCLSKFEDTDISASEMNLLLKSCIEKIIYHNSSESKPGIGRFVANPFELDIYLRL

SEQ ID NO: 3517 - protein, 528 aa, Unknown
  Description of Unknown: Integrase B3518 sequence
  SM00857,G3DSA:1.10.10.2600,IPR036162,PF13408, IPR025827,G3DSA:3.40.50.1390,PS51737,IPR006119, IPR038109,PF07508,IPR011109,SSF53041, PF00239,PTHR30461,PS51736,Coil,cd00338
MAYCIYLRKSRADRELELQGFGETLKRHRDTLIELAKKKNLPIGEIYEEVVSGDSIAARPQMQRLLNDVSDGKWEGVLVMEIERLARGDTSDQGIVTKTFTYSNTLIITPMKTFNPTDEFDQEYFEFGLYMSRREYKTIKRRLHAGMEASCKEGNYIHHTPPFGYSIVKNKKSKGYRLEPKPGEAEIVKLIFQWYTKGILKEDGSYELLGTARIADKLNSEYSIKPLGGVWTIPTISTMLRNEHYLGYIVFGKKKRKKVVENGIIVDKWTRNESYGLYKGKHPALVSQETFNLAQERLSRNPRRPSKTITNPLAGVIKCGMCGRSMYRRPYQKRGQSASLICSEKTCHNVSSAFYLVEDALLTAIKEWIDGYEIKEEANKYDTSVLESKTKLLEEQQKQLITYKNQLTKVFEAYENGIYDSDTFLNRQKTVSESISSTEEAIVRLNKEIANEREIISHQEEIIPKAKKILEIYKTSDDVQLKNDLMKSILDKVVYTKTANGHFKDQRQDDFKLELFPKLPKNKGNSSE

SEQ ID NO: 3518 - protein, 528 aa, Unknown
  Description of Unknown: Integrase B3519 sequence
  PTHR30461:SF3,SM00857,G3DSA:1.10.10.2600,IPR036162,PF13408, PS51737,G3DSA:3.40.50.1390,IPR025827,IPR006119,IPR038109, PF07508,IPR011109,SSF53041,PF00239,PTHR30461, PS51736,Coil,cd00338
MKAVIYARFSSHNQREESIEGQVRACQRFAKEHDMTVIEIYADRGLSGLHADNRPEFQRMIADSDRHKFQALIMWNLDRFSRDKYDTAVYKSRLKKNGVTLYYSDQNIPDTPEGIILESLLEGFAQYYSANLSRNAKRGLQENARKCLWNGGGLPLGYTIDETKHFVIDPAGAACVRLIFQMYADNHSIKEIVSALNEKGYRTVKGNKFRLGSIQGVLRNRKYIGEYHASGITVPNGVPAIVDVELFNAVQEKIGVVSAAKARNKAEIPYLLTTKVFCGHCGSPMIGESGTGKGGSTYRYYKCSCRKNRKGQCDKRTEQKEWLEETVVAQTVEKFLHPDVIEDVSNACAAVLEQDCQNNALLKALNAQLADVEKSSRNLIKAIEAGVFTASMRERLAELEQQKEDITVQIAREQLRKPQLSAEQIAFFLRSFLDGDAHDPNFQERIIESLVRRVDVYDEGPGNRKLTVFYNLKKNNHSSVSVKCSDSESVGLPKRSVAKAADFFIRFLQKDENRTAVNTVPFGTVEPS

SEQ ID NO: 3519 - protein, 528 aa, Unknown
  Description of Unknown: Integrase B3520 sequence
  SM00857,G3DSA:1.10.10.2600,IPR036162,PF13408,PS51737, G3DSA:3.40.50.1390,IPR025827,IPR006119,IPR038109,PF07508, IPR011109,SSF53041,PTHR30461,Coil,PS51736, cd00338,PF00239
MAYCIYLRKSRADRELELQGFGETLKRHRDTLIELAKKKNLPIGEIYEEVVSGDSIAARPQMQRLLNDVSDGKWEGVLVMEIERLARGDTSDQGIVTKTFTYSNTLIITPMKTFNPTDEFDQEYFEFGLYMSRREYKTIKRRLHAGMEASCKEGNYIHHTPPFGYSIIKNKKSKGYRLEPKPGEAEIVKLIFQWYTKGILKEDGSYELLGTARIADKLNSEYSIKPLGGVWTIPTISTMLRNEHYLGYIVFGKKKRKKVVENGIIVDKWTRNESYGLYKGKHPALVSQDTFNLAQERLSRNPRRPSKTITNPLAGVIKCGMCGRSMYRRPYQKRGQSASLICSEKTCHNVSSAFYLVEDALLTAIKEWIDGYEIKEEANKYDTSVLESKTKLLEEQQKQLIAYKNQLTKVFEAYENGIYDSDTFLNRQKTVSESISSTEEAIVKLNKEIANEREIISHQEEIIPKAKKILEIYKTSDDVQLKNDLMKSILDKVVYTKTANGHFKDQRQDDFKLELFPKLPKNKGNSSE

SEQ ID NO: 3520 - protein, 528 aa, Unknown
  Description of Unknown: Integrase B3521 sequence
  PTHR30461:SF3,SM00857,G3DSA:1.10.10.2600,IPR036162,PF13408, IPR025827,G3DSA:3.40.50.1390,PS51737,IPR006119,IPR038109, PF07508,IPR011109,SSF53041,PTHR30461,Coil, PS51736,cd00338,PF00239
MRYVIYLRKSRADLEAEAHGEGETLSRHKTALLELARRMGITISATYEEIVSGETIAARPQMQRLLSEVGAGEWDGVLVMEIERLARGDTMDQGLVAQTFKYSGTKIITPLKTFDPQNEFDEEYFEFGLFMARREFTTTNRRLVRGREASAKEGKYVGSVPPYGYRKVKIPNDKGFTLEIIEEQAKVVRMIFEWYAEGAEVNSQKKRIGPYTIAVRLNELGIKSAGKKDYWTIYGVQNMLINPVYIGKIRWGYRKVKKTVTPEGMKKKSREFAQDGDYIVVDGLHEPILSEELFYKVQDLIAANPPTPIKYRHKNINPFAGLIFCAKCGHCMNYRRGYGRQPDYIGCYTAGCKNKASRFDLVEQRVLSILNSWVKDYSVDKAQIKHEADLNAELSNAISLAEKEIETLQDQLDKVYSFFERGTYTEKIFKQRSSAIEQQIMEIGEKIDRLKAEHQQVLERQNVQAEFVPSIKHLLEIYDTLEPVEKNKWLKQIIDRIVYEKNADGKYHNVDPGDFTIGILPRLPKRGS

SEQ ID NO: 3521 - protein, 528 aa, Unknown
  Description of Unknown: Integrase B3522 sequence
  SM00857,G3DSA:1.10.10.2600,IPR036162,PF13408,IPR025827, G3DSA:3.40.50.1390,PS51737,IPR006119,IPR038109,PF07508, SSF53041,IPR011109,PF00239,PTHR30461,PS51736, Coil,cd00338
MAYCIYLRKSRADRELELQGFGETLKRHRDTLIELAKKKNLPIGEIYEEVVSGDSIAARPQMQRLLNDVSDGKWEGVLVMEIERLARGDTSDQGIVTKTFTYSNTLIITPMKTFNPTDEFDQEYFEFGLYMSRREYKTIKRRLHAGMEASCKEGNYIHHTPPFGYSIVKNKKSKGYRLEPKPGEAEIVKLIFQWYTKGILKEDGSYELLGTARIADKLNSEYSIKPLGGVWTIPTISTMLRNEHYLGYIVFGKKKRKKVVENGIIVDKWTRNESYGLYKGKHPALVSQDTFNLAQERLSRNPRRPSKTITNPLAGVIKCGMCGRSMYRRPYQKRGQSASLICSEKTCHNVSSAFYLVEDALLTAIKEWIDGYEIKEEANKYDTSVLESKTKLLEEQQKQLITYKNQLTKVFEAYENGIYDSDTFLNRQKTVSESISSTEEAIVKLNKEIANEREIISHQEEIIPKARKILEIYKTSDDVQLKNYLMKSILDKVVYTKTANGHFKDQRQDDFKLELFPKLPKNKGNSSE

SEQ ID NO: 3522 - protein, 528 aa, Unknown
  Description of Unknown: Integrase B3523 sequence
  PTHR30461:SF3,cd00338,SM00857,G3DSA:1.10.10.2600,IPR036162, PF13408,PS51737,G3DSA:3.40.50.1390,IPR025827,IPR006119, IPR038109,PF07508,IPR011109,SSF53041,PTHR30461, PS51736,Coil,PF00239
MCAKKKPAMLEPDMQDAVIYTRYSSHNQRDCSIEQQVADCEIFARQNNLRVVKVYADRHLSGTTDNRPQFQQMLKDAAHGHWAYVICWKIDRFARNRYDSATYKFRLKKSGVRVLYAKESIPDGPEGILLESVLEGSAEYYSAALAQNIRRGMKYNAEQCKVNSGSIPFGYCKGPDGRFAIHEANAEVVREIFCKAAAGMPFVDIANDLNSRGLKTSRGGRWNKGSFRLLMNEAYIGVYHFSDTRIEGGMPALIDQGTFWAANERLKANSSVRGRHQDGGDYLLTGKLKCAHCGSYMIGFSGTGKSGELHYYYGCQKRRRERACKKANVPREWIERVVVKAALDYVLRPDVMEWIADAVMEYQEREAASAQLAALTAELEENQKATDNVMKAIEAGIITSTTKQRLLDLEAKAQDLKRAIELEKLSHVRLERDQVLFWLDRFRGGSLQSQEFRRKVIDAFVSVVYLSDDHLRIAFNYSGGSNAEADFDLVMDAEAAAGELSKKFAQGHVTSTNKKHLDSLKSRRFSFC

SEQ ID NO: 3523 - protein, 528 aa, Unknown
  Description of Unknown: Integrase B3524 sequence
  SM00857,G3DSA:1.10.10.2600,IPR036162,PS51737,G3DSA:3.40.50.1390, IPR006119,IPR038109,PF07508,IPR011109,SSF53041, PTHR30461,Coil,PS51736,cd00338,PF00239
MQETNISINEIIMYLRKSRSDDPYMTMEEVLARHERQLQEYALSSFGSIIPEERIFREVVSGETIADRPVMQSVMKYLESGQIKGVLVIEPQRLSRGDLEDCGRIINAFRYTNTLVLTPPKTYDLSDEYDRKFFEMELTRGNDYLEYTKKILNRGRLASIKQGNYIGSIAPYGYRKIKTGSGKDTTHTLEIIPEQADAVRMMAQLYLAGNGFTRIAAHLDSLGIKPLKSDHWSPAAISDILSNPVYIGMIRWNHFKTIKTMQNGQIVKSRPTNHGTDYILVPGKHPAILDQETFYAIAERRGKSPKVKRDHELRNPFAGLVYCGTAGCGRSMALKQFTNYRSKVPRRSESMICPNQRICHTKSVQYRAFVERVKEILSKTVDDFEIKLQNDDGNIVRIHENIIRNLEQDLLKLKDKDLRQKDAYEDGIYTKEEYASRNAKLQEQICEVQLSIQRAKDTMPPEVDYQERVSRFSDCLSKFEDTDISASEMNILLKSCIEKIIYHNSSESKPGIGRFVANPFELDIYLRL

SEQ ID NO: 3524 - protein, 528 aa, Unknown
  Description of Unknown: Integrase B3525 sequence
  SM00857,G3DSA:1.10.10.2600,IPR036162,PS51737, G3DSA:3.40.50.1390,IPR006119,IPR038109,PF07508, IPR011109,SSF53041,PF00239,PTHR30461, PS51736,Coil,cd00338
MQETNISINEIIMYLRKSRSDDPYMTVEEVLARHERQLQEYALSSFGSIIPEERIFREVVSGETIADRPVMQSVMKYLESGQIKGVLVIEPQRLSRGDLEDCGRIINAFRYTNTLVLTPPKTYDLSDEYDRKFFEMELTRGNDYLEYTKKILNRGRLASVKQGNYIGSIAPYGYRKIKTGSGKDTAHTLEIVPEQADAVRMMAQLYLAGNGFTRIAAHLDSLGIKPLKSDHWSSAAISDILSNPVYIGMIRWNHFKTIKTMQNGQIVKSRPTNRGTDYILVPGKHPAILDQGTFDAIAQRRGKSPKIKRGHELRNPFAGLVFCGTAGCGRSMTFKQFTNYRSKVPRRSESMICPNQRICHTKSVQYSAFVERVKEILSKTVDDFEIKLQNDDGNIVRIHENIIRNLEQDLVKLKDKDLRQKDAYEDGIYTKEEYASRNAKLQEQICEVQLSIQRAKDTMPPEVDYQERVSRFSDCLSKFEDTDISASEMNLLLKSCIEKIIYHNSSESKPGIGRFVANPFELDIYLRL

SEQ ID NO: 3525 - protein, 528 aa, Unknown
  Description of Unknown: Integrase B3526 sequence
  PTHR30461:SF3,SM00857,G3DSA:1.10.10.2600,IPR036162,PF13408, PS51737,IPR025827,G3DSA:3.40.50.1390,IPR006119,IPR038109, PF07508,IPR011109,SSF53041,PF00239,PTHR30461, Coil,cd00338
MSNYRSALYARVSTQNEEQDTSYHNQQKIKVEGYDIVKTYADRGSGTQVYNRENFKKLLYDCGIDLEKIRNTKTYNFIASDREPLYEAIVVSHTSRFLRNQVMMKTCINALRKKNVEIYFADLGKSSLDKDIDFVMNILFLLDEQESLNTSQKVRRGLERARREKQYIQVASIFGYNYIKEENRLIINEPEAEVVRKIYSMYLEGNGYRKIYDYLQEYYPQYPKKLSHIAYILRNEKYAGYNAYGKWSVNKIEGYKKRNKEYEIFKSDRIEPIVSYEDWCKVQEIISGKKLHTRGLKANTYPLSRKIVCDVCGSTYYRQLEVKGNYSRVYWICREKKQYGAKNCHSAPISEKKLIELIMSEDYGIKSFIRTIELQVNCVLNNMEEVDTSEIEEKLKQVKVKQERMFDSYIEGVTPKDIYNRKQLQLNSEENILNEQLSSLKDKNRAIEDIKNISETYKEKLDNYYKLMQEGKYDEVYNDINKIVIGVWLKQINDDGEVKVIPMLKELKFKGFESLDKLFEGSILIKNF

SEQ ID NO: 3526 - protein, 528 aa, Unknown
  Description of Unknown: Integrase B3527 sequence
  SM00857,G3DSA:1.10.10.2600,IPR036162,PS51737,G3DSA:3.40.50.1390, IPR006119,IPR038109,PF07508,IPR011109,SSF53041, PTHR30461,Coil,PS51736,cd00338,PF00239
MQETNISINEIIMYLRKSRSDDPYMTMEEVLARHERQLQEYALSSFGSIIPEERIFREVVSGETIADRPVMQSVMKYLESGQIKGVLVIEPQRLSRGDLEDCGRIINAFRYTNTLVLTPPKTYDLSDEYDRKFFEMELTRGNDYLEYTKKILNRGRLASVKQGNYIGSIAPYGYRKIKTGSGKDTAHTLEIVPEQADAVRMMAQLYLAGNGFTRIATHLDSLGIKPLKSDHWSPAAISDILSNPVYIGMIRWNHFKTIKTMQNGQIVKSRPTNHGTDYILVPGKHLAILDQETFYAIAERRGKSPKVKRDHELRNPFAGLVYCGTAGCGRSMTFKQFTNYRSKVPRRSESMICSNQRICHTKSVQYSAFVERVKEILSKTVDDFEIKLQNDDGNIVRIHENIIRNLEQDLVKLKDKDLRQKDAYEDGIYTKEEYASRNAKLQEQICEVQLSIQRAKDTMPPEVDYQERVSRFSDCLSKFEDTDISASEMNLLLKSCIEKIIYHNSSESKPGIGRFVSNPFELDIYLRL

SEQ ID NO: 3527 - protein, 528 aa, Unknown
  Description of Unknown: Integrase B3528 sequence
  PTHR30461:SF3,cd00338,SM00857,G3DSA:1.10.10.2600,IPR036162, PF13408,IPR025827,G3DSA:3.40.50.1390,PS51737,IPR006119, IPR038109,PF07508,IPR011109,SSF53041, PTHR30461,Coil,PF00239
MKKFKFPIDLSMLTEEEIDQFKEDPFTLFHGETDVCLYLRFSSERQKEQSIEGQLRDCIAYCKRKNYRIVAIYVDRATTARKDVEKRIHFQEMITASVHQTWKLVIVWKLDRFARNREDSAVFKMRLRRNGVKVESATEGISKNPEGIILEAVLEGMAEYYSADLSQKITRGMRESALKCHSIGGHVPLGYKIEDHKLVINPNTAHIVQEAFELYANGETVADICRMFNNKGYRTAKGAEFNRNSFKSMFRNKRYIGVYTYKEIEKEGGVPAIIDKELFETVQRRLSANAEAPARGKAKVDYLLAGKLFCGHCGGSMNGESGTSKTGTVHNYYTCYTRKRQHSCDKKPLRKEWIEQVVAQDAMNLLTDDAIQEMADMAISQTERDLRENTRIPELSEKMKETENGIANITKAVEKGIASDALMSRLVELEKEKKNLLRLLAEEEKYICKIDRDQIIYWLTKFKDGNIEDEKFKRIIIDLMVNSVTVWDEPDGVRITTAYNLTSCKNKTFRIPSSSDKGFGFEGLESTK

SEQ ID NO: 3528 - protein, 528 aa, Unknown
  Description of Unknown: Integrase B3529 sequence
  SM00857,G3DSA:1.10.10.2600,IPR036162,PF13408,IPR025827, G3DSA:3.40.50.1390,PS51737,IPR006119,IPR038109,PF07508, SSF53041,IPR011109,PF00239,PTHR30461,PS51736, Coil,cd00338
MAYCIYLRKSRADRELELQGFGETLKRHRDTLIELAKKKNLPIGEIYEEVVSGDSIAARPQMQRLLNDVSDGKWEGVLVMEIERLARGDTSDQGIVTKTFTYSNTLIITPMKTFNPTDEFDQEYFEFGLYMSRREYKTIKRRLHAGMEASCKEGNYIHHTPPFGYSIVKNKKSKGYRLEPKPGEAEIVKLIFQWYTKGILKEDGSYELLGTARIADKLNSEYSIKPLGGVWTIPTISTMLRNEHYLGYIVFGKKKRKKVVENGIIVDKWTRNESYGLYKGKHPALVSQDTFNLAQERLSRNPRRPSKTITNPLAGVIKCGMCGRSMYRRPYQKRGQSASLICSEKTCHNVSSAFYLVEDALLTAIKEWIDGYEIKEEANKYDTSVLESKTKLLEEQQKQLITYKNQLTKVFEAYENGIYDSDTFLNRQKTVSESISSTEEAIVRLNKEIANEREIISHQEEIIPKAKKILEIYKTSDDVQLKNDLMKSILDKVVYTKTANGHFKDQRQDDFKLELFPKLPKNKGNSSE

SEQ ID NO: 3529 - protein, 528 aa, Unknown
  Description of Unknown: Integrase B3530 sequence
  SM00857,G3DSA:1.10.10.2600,IPR036162,PS51737,G3DSA:3.40.50.1390, IPR006119,IPR038109,PF07508,IPR011109,SSF53041, PF00239,PTHR30461,PS51736,Coil,cd00338
MQETNISINEIIMYLRKSRSDDPYMTVEEVLARHERQLQEYALSSFGSIIPEERIFREVVSGETIADRPVMQSVMKYLESGQIKGVLVIEPQRLSRGDLEDCGRIINAFRYTNTLVLTPPKTYNLSDEYDRKFFEMELTRGNDYLEYTKKILNRGRLASVKQGNYIGSIAPYGYRKIKTGSGKDTAHTLEIVPEQADAVRMMAQLYLAGNGFTRIAAHLDSLGIKPLKSDHWSSAAISDILSNPVYIGMIRWNHFKTIKTMQNGQIVKSRPTNRGTDYILVPGKHPAILDQGTFDAIAQRRGKSPKIKRGHELRNPFAGLVFCGTAGCGRSMTFKQFTNYRSKVPRRSESMICPNQRICHTKSVQYSAFVERVKEILSKTVDDFEIKLQNDDGNIVRIHENIIRNLEQDLVKLKDKDLRQKDAYEDGIYTKEEYASRNAKLQEQICEVQLSIQRAKDTMPPEVDYQERVSRFSDCLSKFEDTDISASEMNLLLKSCIEKIIYHNSSESKPGIGRFVANPFELDIYLRL

SEQ ID NO: 3530 - protein, 528 aa, Unknown
  Description of Unknown: Integrase B3531 sequence
  PTHR30461:SF3,SM00857,G3DSA:1.10.10.2600,IPR036162,PF13408, IPR025827,PS51737,G3DSA:3.40.50.1390,IPR006119,IPR038109, PF07508,IPR011109,SSF53041,PF00239, PTHR30461,PS51736,Coil,cd00338
MSRTAARSVTVIPPTINPLTHLSGVAKQKRRVAGYARVSTDSDEQFTSYEAQVDYYTQYIQRNPEWEFIKVYTDEGISGTNTKHRVGFNEMIEDALAGKIDLIVTKSVSRFARNTVDSLVTIRKLKEKGVEVYFEKENIYTFDGKGELLLTIMSSLAQEESRSISENVTWGQRKRFADGKVNLPYKQFLGYRKGADGFPEVVPEEAVIVRRIYTRFMEGLTPGAIAKELTADTIPTPSGKQRWQTSTVESILQNEKYKGAALLQKCFTVDFLTKKKKANEGEVPQYYVEHSHEPIITPDEFNKVQVEFERRKRISRQYSGKSIFASRIICGDCGSFFGSKVWNSTSKYRRVIWQCNNKFKGEHKCETPHLDEKTIKARFVAAFNAILDSKDNILEDCRLMQATLTDCTGIDEEIQTLLEEIEVVTELTKRCIAENSQTAQNQEEYAARYNGFVERYEKTKAQLEQLRTTKAAREAQAEAIGAFMFEVQELDALTEFDEKLWLTIIDTATVHADGRMTFKFQGGTEIDV

SEQ ID NO: 3531 - protein, 528 aa, Unknown
  Description of Unknown: Integrase B3532 sequence
  PTHR30461:SF3,cd00338,SM00857,G3DSA:1.10.10.2600,IPR036162, PF13408,IPR025827,PS51737,G3DSA:3.40.50.1390,IPR006119, IPR038109,PF07508,IPR011109,SSF53041,PTHR30461, PS51736,Coil,PF00239
MARKTDKPLSNIAVIYARFSSHNQREESIEQQVAECKVFAAQQGLEVTEIYSDAAQSGRTENRSQFLRLQRDAKKGKFTNIVAYKSNRIARNMVNALTFENDMEKLGVKLYYAKEEFGNNAAGRFALRMMMNVNQFYSENMAEDIRRGMEDNAMKCKVNGPAPYGYKSGKSGTYEIDEPAAAVVREIFTRVACGDSFVDIYTDLNNRGLKTRKGNKWGRSSFQSILKCEKYTGVYIYDNIRVEGGMPEIISKEMFLKVQRILGTKGNPQGRHRINGDYLLTGKLFCGECGHHMMGLSGTGKNGLLHYYYGCSGKKEKPRCSKKNVRRDELEYEVARLVQTYILQDDVITWLADTLIKYQEEHSSDGDMTILNTQLSETEKSIKNLMAAIEQGIITPSTKERLMELESEKSKIENNITLLKADTITVSKEQIGGWLDSFRDGNIKDKRFQKRLFDSFLSAVYVYDDNRVRIVFNLCGLNKGDIDTKLMLGDTEAIEKVSDCSYKRCYGSPNQNPHSWLNKADCGDFSFC

SEQ ID NO: 3532 - protein, 528 aa, Unknown
  Description of Unknown: Integrase B3533 sequence
  SM00857,G3DSA:1.10.10.2600,IPR036162,PS51737,G3DSA:3.40.50.1390, IPR006119,IPR038109,PF07508,IPR011109,SSF53041, PTHR30461,Coil,PS51736,cd00338,PF00239
MQETNISINEIIMYLRKSRSDDPYMTVEEVLARHERQLQEYALSSFGSIIPEERIFREVVSGETIADRPVMQSVMKYLESGQIKGVLVIEPQRLSRGDLEDCGRIINAFRYTNTLVLTPPKTYDLSDEYDRKFFEMELTRGNDYLEYTKKILNRGRLASVKQGNYIGSIAPYGYRKIKTGSGKDTAHTLEIVPEQADAVRMMAQLYLAGNGFTRIAAHLDSLGIKPLKSDHWSPAAISDILSNPVYIGMIRWNHFKTIKTMQNGQIVKSRPTNHDTDYILVPGKHPAILDQGTFDAIAQRRGKSPKIKRGHELRNPFAGLVYCGTAGCRRSMTFKQFTNYRSKVPRRSESMICPNQRICHTKSVQYSAFVERVKEILSKTVDDFEIKLQNDDGNIVRIHENIIRNLEQDLLKLKDKDLRQKDAYEDGIYTKEEYASRNAKLQEQICEVQLSIQRAKDTMPPEVDYQERVSRFSDCLSKFEDTDISASEMNLLLKSCIEKIIYHNSSESKPGIGRFVANPFELDIYLRL

SEQ ID NO: 3533 - protein, 528 aa, Unknown
  Description of Unknown: Integrase B3534 sequence
  PTHR30461:SF3,SM00857,IPR036162,G3DSA:3.40.50.1390,IPR006119, PF07508,IPR011109,SSF53041,PTHR30461,PS51736, cd00338,PF00239
MHFGIYGRKSYFKDTSDSTQMQFSEGDKYITEHFSPDEIESVTYYEDDGWIRSDMDRPDLNRLKDDILAGLINVVVIYKIDRLCCDMADFVPFYAFLKDHGVKFITIKDGIDTTTPIGEAMMYLAVIFSGLEVQTDSLRITDNMNHLAAEGFWCGGKPPIGYNIQEISLGAKSHKTLVFNEDEIRYKNTLIDIFLENHFSLQSMETYCKNHGITSLKGSFLSTTQLYSMFGSPMCVANTPAMYDYFADKGCQMSEGSPRDAWDGKHGIIVYGRTMEKKVSGKKKHIQAPPENWRVSIGYHEPYMTDERFFAIQAQFGHNVFSKQTKYDLPLLKGSLRCKCGRLMSMSRKKKADGSISTWYYCPRRMRSGVEACDMSQVKSDLLDNRVISIFQEIEHDPAALKKYLKEEKKQPQDNAAALRAAMEKCQAKIGKLTATLGLNSESAAAKYIVNEIEKLDIEYNSLRKRMLSANAVDRKNALNMKNAMEKREEIIRLLNDFDNFTPNERNEIAKDVLKECVWDGDTLFLTL

SEQ ID NO: 3534 - protein, 528 aa, Unknown
  Description of Unknown: Integrase B3535 sequence
  SM00857,G3DSA:1.10.10.2600,IPR036162,PS51737,G3DSA:3.40.50.1390, IPR006119,IPR038109,PF07508,IPR011109,SSF53041, PTHR30461,Coil,PS51736,cd00338,PF00239
MQETNISINEIIMYLRKSRSDDPYMTVEKVLARHERQLQDYALSSFGSIIPEERIFREVVSGETIADRPVMQSVMKYLESGQIKGVLVIEPQRLSRGDLEDCGRIINAFRYTNTLVLTPPKTYDLSDEYDRKFFEMELTRGNDYLEYTKKILNRGRLASVKQGNYIGSIAPYGYRKIKTGSGKDTSHTLEIVPEQADAVRMMAQLYLAGNGFTRIAAHLDSLGIKPLKSDHWSSAAISDILSNPVYIGMIRWNHFKTIKTMQNGQIVKSRPTNRGTDYILVPGKHPAILDQGTFDAIAQRRGKSPKIKRGHELRNPFAGLVFCGTAGCGRSMTFKQFTNYRSKVPRRSESMICPNQRICHTKSVQYSAFVERVKEILSKTVDDFEIKLQNDDGNIVRIHENIIRNLEQDLVKLKDKDLRQKDAYEDGIYTKEEYASRNAKLQEQICEVQLSIQRAKDTMPPEVDYQERVSRFSDCLSKFEDTDISASEMNLLLKSCIEKIIYHNSSESKPGIGRFVANPFELDIYLRL

SEQ ID NO: 3535 - protein, 528 aa, Unknown
  Description of Unknown: Integrase B3536 sequence
  SM00857,G3DSA:1.10.10.2600,IPR036162,PF13408, PS51737,IPR025827,G3DSA:3.40.50.1390,IPR006119, IPR038109,PF07508,IPR011109,SSF53041, PF00239,PTHR30461,PS51736,Coil,cd00338
MAYCIYLRKSRADRELELQGFGETLKRHRDTLIELAKKKNLPIGEIYEEVVSGDSIAARPQMQRLLNDVSDGKWEGVLVMEIERLARGDTSDQGIVTKTFTYSNTLIITPMKTFNPTDEFDQEYFEFGLYMSRREYKTIKRRLHAGMEASCKEGNYIHHTPPFGYSIVKNKKSKGYRLEPKPGEAEIVKLIFQWYTKGILKEDGSYELLGTARIADKLNSEYSIKPLGGVWTIPTISTMLRNEHYLGYIVFGKKKRKKVVENGIIVDKWTRNESYGLYKGKHPALVSQDTFNLARERLSRNPRRPSKTITNPLAGVIKCGMCGRSMYRRPYQKRGQSASLICSEKTCHNVSSAFYLVEDALLTAIKEWIDGYEIKEEANKYDTSVLESKTKLLEEQQKQLITYKNQLTKVFEAYENEIYDSDTFLNRQKTVSESISSTEEAIVKLNKEIANEREIISHQEEIIPKAKKILEIYKTSDDVQLKNDLMKSILDKVVYTKTANGHFKDQRQDDFKLELFPKLPKNKGDSSE

SEQ ID NO: 3536 - protein, 528 aa, Unknown
  Description of Unknown: Integrase B3537 sequence
  PTHR30461:SF3,SM00857,G3DSA:1.10.10.2600,IPR036162,PS51737, G3DSA:3.40.50.1390,IPR006119,IPR038109,PF07508,SSF53041, IPR011109,PTHR30461,Coil,PS51736,cd00338, PF00239
MAKVRIIPAQVKQGNRNRQIEESEAKLKVAAYCRVSTLYEDQASSYETQVAHYKEFITKNPKWELAGIYADDGISGTDTKKRNQFNQMIDDAKQGKIDLIVTKSISRFARNTIDCLQYIRELKELHVAVFFEKENINTMDAKGEVLITIMASLAQQESESISRNIKIGLQYRYQRGQVIVNTARFLGYDKDDDGNLVINPEQAKVVKRIFYECLTGKSAIEIARELTKEGIKNGIGRTQWHSSGIIKILRNEKYIGDALLQKTYTVDFLTKKRVKNDGQVPQYYVENNHPAIISRAVFYQVQKLLDMRREGFTTEGGHHHGYTNAYCFSSIVYCGRCKDIYTRCVWYRPRIGEVEKVNVWRCYSRLHWNHKGKRCMGRTITEADLEEASLKAMNELIQQHQLADKQIAANILKVTKGTTGPSLDELDQQLEDQQLLLLNMSTHNKNVEQLTEQVQALRKQREQLIQQEIDHDIKRSNLKNIQSFFQTYQGGLTKFDEKLVRLLIEKITIFKSKIDFTFKDGEVITVKM

SEQ ID NO: 3537 - protein, 528 aa, Unknown
  Description of Unknown: Integrase B3538 sequence
  SM00857,G3DSA:1.10.10.2600,IPR036162,PS51737,G3DSA:3.40.50.1390, IPR006119,IPR038109,PF07508,IPR011109,SSF53041, PTHR30461,Coil,PS51736,cd00338,PF00239
MQETNISINEIIMYLRKSRSDDPYMTVEEVLARHERQLQEYALSSFGSIIPEERIFREVVSGETIADRPVMQSVMKYLESGQIKGVLVIEPQRLSRGDLEDCGRIINAFRYTNTLVLTPPKTYDLSDEYDRKFFEMELTRGNDYLEYTKKILNRGRLASVKQGNYIGSIAPYGYRKIKTGSGKDTAHTLEIVPEQADAVRMMAQLYLAGNGFTRIAVHLDSLGIKPLKSDHWSPAAISDILSNPVYIGMIRWNHFKTIKTMQNGQIVKSRPTNHDTDYILVPGKHPAILDQGTFDAIAQRRGKSPKIKRGHELRNPFAGLVYCGTAGCGRSMTFKQFTNYRSKVPRRSESMICPNQRICHTKSVQYSAFVERVKEILSKTVDDFEIKLQNDDGNIVRIHENIIRNLEQDLLKLKDKDLRQKDAYEDGIYTKEEYASRNAKLQEQICEVQLSIQRAKDTMPPEVDYQERVSRFSDCLSKFEDTDISASEMNLLLKSCIEKIIYHNSSESKPGIGRFVANPFELDIYLRL

SEQ ID NO: 3538 - protein, 528 aa, Unknown
  Description of Unknown: Integrase B3539 sequence
  SM00857,G3DSA:1.10.10.2600,IPR036162,PS51737, G3DSA:3.40.50.1390,IPR006119,IPR038109,PF07508, IPR011109,SSF53041,PTHR30461,Coil, PS51736,cd00338,PF00239
MQETNISINEIIMYLRKSRSDDPYMTVEEVLARHERQLQEYALSSFGSIIPEERIFREVVSGETIADRPVMQSVMKYLESGQIKGVLVIEPQRLSRGDLEDCGRIINAFRYTNTLVLTPPKTYDLSDEYDRKFFEMELTRGNDYLEYTKKILNRGRLASVKQGNYIGSIAPYGYRKIKTGSGKDTAHTLEIVPEQADAVRMMAQLYLAGNGFTRIAVHLDSLGIKPLKSDHWSPAAISDILSNPVYIGMIRWNHFKTIKTMQNGQIVKSRPTNHDTDYILVPGKHPAILDQGTFDAIAQRRGKSPKIKRGHELRNPFAGLVFCGTAGCGRSMTFKQFTNYRSKVPRRSESMICPNQRICHTKSVQYSAFVERVKEILSKTVDDFEIKLQNDDGNIVRIHENIIRNLEQDLLKLKDKDLRQKDAYEDGIYTKEEYASRNAKLQEQICEVQLSIQRAKDTMPPEVDYQERVSRFSDCLSKFEDTDISASEMNLLLKSCIEKIIYHNSSESKPGIGRFVANPFELDIYLRL

SEQ ID NO: 3539 - protein, 528 aa, Unknown
  Description of Unknown: Integrase B3540 sequence
  SM00857,G3DSA:1.10.10.2600,IPR036162,PF13408,IPR025827, G3DSA:3.40.50.1390,PS51737,IPR006119,IPR038109,PF07508, SSF53041,IPR011109,PTHR30461,Coil,PS51736, cd00338,PF00239
MAYCIYLRKSRADRELELQGFGETLKRHRDTLIELAKKKNLPIGEIYEEVVSGDSIAARPQMQRLLNDVSDGKWEGVLVMEIERLARGDTSDQGIVTKTFTYSNTLIITPMKTFNPTDEFDQEYFEFGLYMSRREYKTIKRRLHAGMEASCKEGNYIHHTPPFGYSIVKNKKSKGYRLEPKPGEAEIVKLIFQWYTKGILKEDGSYELLGTARIADKLNSEYSIKPLGGVWTIPTISTMLRNEHYLGYIVFGKKKRKKVVENGIIVDKWTRNESYGLYKGKHPALVSQDTFNLAQERLSRNPRRPSKTITNPLAGVIKCGMCGRSMYRRPYQKRGQSASLICSEKTCHNVSSAFYLVEDALLTAIKEWIDGYEIKEEANKYDTSVLESKTKLLEEQQKQLIAYKNQLTKVFEAYENGIYDSDTFLNRQKTVSESISSTEEAIVKLNKEIANEREIISHQEEIIPKAKKILEIYKTSDDVQLKNDLMKSILDKVVYTKTANGHFKDQRQDDFKLELFPKLPKNKGNSSE

SEQ ID NO: 3540 - protein, 528 aa, Unknown
  Description of Unknown: Integrase B3541 sequence
  PTHR30461:SF3,cd00338,SM00857,G3DSA:1.10.10.2600,IPR036162, PF13408,IPR025827,PS51737,G3DSA:3.40.50.1390,IPR006119, IPR038109,PF07508,IPR011109,SSF53041,PTHR30461, PS51736,Coil,PF00239
MKVVGYCRFSSEGQKDGYSIEAQTEAIRSYCEINNHTLLRFYIDEAKTGTQDDREGFLDMIDDTKSGEFEAIVVHKLDRFARNRYDSAIYGRILEDRKVRLLSVLEPIIADDSPESLLFRGIVETMNEYYSRNLSRETLKGQRIAARNAQHLGGAVPFGYDLTKDKHYTPNPTEAPIVLEIYTRLDAGQSSIAVARWLNTRGLLTRHHKQFTGSSVLNLVKSPIYIGRYVWGATSKRKGVTPIVVENACEPLVPKDLFDRVNAVISARKTGPVGRNRDVEYLLTGVLYCEYCGRHLYGFKSHAHYTLKSTGEVRDYTVYKYRCSHDNRQSFNRKTDDGYVKEVCPLKMLPKDDIESFVGDAVRSVIFAPDSAAWISGVLQERMKTIMPGNPDAVKKVDANIRATSTKQQRLLDLYLDGGIDKAAYNQKSRELNEQMQYLSAERAKMQTPPPDVSIEAIKSAIAKYSESASVKSVESTKMLIDTFVDHIDVSNEHIVIFFNVEFPFLPECSTFDFVRSGKNALTQLFAK

SEQ ID NO: 3541 - protein, 528 aa, Unknown
  Description of Unknown: Integrase B3542 sequence
  cd03768,PTHR30461:SF3,SM00857,IPR036162,PF13408, PS51737,G3DSA:3.40.50.1390,IPR025827,IPR006119,PF07508, SSF53041,IPR011109,PTHR30461,PS51736,Coil, PF00239
MKIAIYSRKSKFTGKGESIQNQIEMCKEYCNKHFGQCEFIIYEDEGFSGGNTDRPQYKRMMEDVGKKKFQAVACYRLDRISRNVSDFSQTLEELNNKNIAFISINEQFDTSTPMGRAMTYIASVFAQLERETIAERVRDNMLQLARSGRWLGGIAPTGYKSEPITYLDSNMKEKKMYKLSPVKQELEVVKLIYKKYLEFQSLSQLETYCLQNNIRTVNNRDFQKYTLRTILTNPVYSKADQSVYNYFYSREAQICNNKNEFTGKYGIMAYNKNLVKKGQSVKTKNMDEWIIAIGKHKGIIEGSEWVMVQNTLNKNKSLAPRQGTSAAAMLSGLLYCKNCGNFMRVKYGQKKKNSDERHYYYVCSMKDNSRGSRCNMKNLKGEDTDQYVIEKLKEMIESGILKDIDNAKKNIEDKKKINKNVYDKITANEKAIENLLKQLSQNENETVAKYIFSEIEKLDKENKELKSKLDKYDSETNITNLELFKEAVVRFYESIDGVPYEQKRNLIQGIVKRIEWDGKDLHIDIFDI

SEQ ID NO: 3542 - protein, 528 aa, Unknown
  Description of Unknown: Integrase B3543 sequence
  SM00857,G3DSA:1.10.10.2600,IPR036162,PF13408,IPR025827, G3DSA:3.40.50.1390,PS51737,IPR006119,IPR038109,PF07508, SSF53041,IPR011109,PF00239,PTHR30461,PS51736, Coil,cd00338
MAYCIYLRKSRADRELELQGFGETLKRHRDTLIELAKKKNLPIGEIYEEVVSGDSIAARPQMQRLLNDVSDGKWEGVLVMEIERLARGDTSDQGIVTKTFTYSNTLIITPMKTFNPTDEFDQEYFEFGLYMSRREYKTIKRRLHAGMEASCKEGNYIHHTPPFGYSIVKNKKSKGYRLEPKPGEAEIVKLIFQWYTKGILKEDGSYELLGTARIADKLNSEYSIKPLGGVWTIPTISTMLRNEHYLGYIVFGKKKRKKVVENGIIVDKWTRNESYGLYKGKHPALVSQDTFNLAQERLSRNPRRPSKTITNPLAGVIKCGMCGRSMYRRPYQKRGQSASLICSEKTCHNVSSAFYLVEDALLTAIKEWIDGYEIKEEANKYDTSVLESKTKLLEEQQKQLITYKNQLTKVFEAYENGIYDSDTFLNRQKTVSESISSTEEAIVKLNKEIANEREIISHQEEIIPKAKKILEIYKTSDDVQLKNDLMKSILDKVVYTKTANGHFKDQRQDDFKLELFPKLPKNKGDSSE

SEQ ID NO: 3543 - protein, 528 aa, Unknown
  Description of Unknown: Integrase B3544 sequence
  SM00857,G3DSA:1.10.10.2600,IPR036162,PF13408,IPR025827, G3DSA:3.40.50.1390,PS51737,IPR006119,IPR038109,PF07508, IPR011109,SSF53041,PF00239,PTHR30461,PS51736, Coil,cd00338
MAYCIYLRKSRADRELELQGFGETLKRHRDTLIELAKKKNLPIGEIYEEVVSGDSIAARPQMQRLLNDVSDGKWEGVLVMEIERLARGDTSDQGIVTKTFTYSNTLIITPMKTFNPTDEFDQEYFEFGLYMSRREYKTIKRRLHAGMEASCKEGNYIHHTPPFGYSIVKNKKSKGYRLEPKPGEAEIVKLIFQWYTKGILKEDGSYELLGTARIADKLNSEYSIKPLGGVWTIPTISTMLRNEHYLGYIVFGKKKRKKVVENGIIVDKWTRNESYGLYKGKHPALVSQDTFNLAQERLSRNPRRPSKTITNPLAGVIKCGMCGRSMYRRPYQKRGQSASLICSEKTCHNVSSAFYLVEDALLTAIKEWIDGYEIKEEANKYDTSVLESKTKLLEEQQKQLITYKNQLTKVFEAYENGIYDSDTFLNRQKTVSESISSTEEAIVKLNKEIANEREIISHQEEIIPKARKILEIYKTSDDVQLKNDLMKSILDKVVYTKTANGHFKDQRQDDFKLELFPKLPKNKGNSSE

SEQ ID NO: 3544 - protein, 528 aa, Unknown
  Description of Unknown: Integrase B3545 sequence
  PTHR30461:SF3,SM00857,G3DSA:1.10.10.2600,IPR036162,PF13408, PS51737,IPR025827,G3DSA:3.40.50.1390,IPR006119,IPR038109, PF07508,IPR011109,SSF53041,PF00239,PTHR30461, PS51736,Coil,cd00338
MKAVIYARFSSHNQREESIEGQVRACQRFAKEHDMTVIEIYADRGLSGLHADNRPEFQRMIADSDRHKFQALIRWNLDRFSRDKYDTAVYKSRLKKNGVTLYYSDQNIPDTPEGIILESLLEGFAQYYSANLSRNAKRGLQENARKCLWNGGGLPLGYTIDETKHFVIDPAGAACVQLIFQMYADNHSIKEIVSALNEKGYRTVKGNKFRLGSIQGVLRNRKYIGEYHASGITVPNGVPAIVDVELFNAVQEKIGVVSAAKARNKAEIPYLLTTKVFCGHCGSPMIGESGTGKGGSTYRYYKCSCRKNRKGQCDKRTEQKEWLEETVVAQTVEKFLHPDVIEDVSNACAAVLEQDCQNNALLKALNAQLADVEKSSRNLIKAIEAGVFTASMRERLAELEQQKEDITVQIAREQLRKPQLSAEQIAFFLRSFLDGDAHDPNFQERIIESLVRRVDVYDEGPGNRKLTVFYNLKKNNHSSVSVKCSDSESVGLPKRSVAKAADFFLCFLQKDENRTAVNTVPFGTVEPS

SEQ ID NO: 3545 - protein, 528 aa, Unknown
  Description of Unknown: Integrase B3546 sequence
  PTHR30461:SF3,SM00857,G3DSA:1.10.10.2600,IPR036162,PF13408, IPR025827,PS51737,G3DSA:3.40.50.1390,IPR006119,IPR038109, PF07508,IPR011109,SSF53041,PF00239,PTHR30461, PS51736,Coil,cd00338
MSTATVRSVTIIPPTINPLTHISMAATRKRRVAGYARVSTDSDEQFTSYEAQIDYYTQYIQRNSEWAFVKVYTDEGISGTSTKNRTGFNEMIDDAMSGKIDLIVTKSVSRFARNTVDSLVTIRKLKEKGVEVYFEKENIYTFDSKGELLLTIMSSLAQEESRSISENVTWGQRKRFADGKVNLPYKQFLGYRKGADGLPEIVPEEAAIVRRIYARFMEGLTPHTIAKELTADGIPTPSGKQCWQTSTVESILQNEKYKGAALLQKCFTVDFLTKKQKVNEGEVPQYYVEHSHEPIIVPEEFDKVQAEFVRRKQFGLQYSGKSIFASRIVCGDCGSFYGAKVWNSNNKYRRVVWQCNNKFKGGHRCETPHLDEKNIKARFVDAFNAVLGGKDGILADCRLMQTTLTDCTGIDAEIERLLTEVDVVTELTHRCISENAQSAQNQQEYTARYNSLVERYEKAKTQLEQLRATKTAREAQAKAIGAFMFEVQELDAFTEFDEKLWLAVIDKVTVHTNGRMTFHFRSGTEIDA

SEQ ID NO: 3546 - protein, 528 aa, Unknown
  Description of Unknown: Integrase B3547 sequence
  PTHR30461:SF3,SM00857,G3DSA:1.10.10.2600,IPR036162,PF13408, PS51737,IPR025827,G3DSA:3.40.50.1390,IPR006119,IPR038109, PF07508,IPR011109,SSF53041,PTHR30461,Coil, PS51736,cd00338,PF00239
MKMMQNDNRTAITYYRYSSHRQGEQSIEGQRAEAERWAKANGYTIVKEYADRAMTGTNDDREQFQLMLRELERLRPAVLILWKVDRMGRNKEEIAFNKYRCKKNGVKVIYTAESIPDTPEGVILESVLEGMAEYYSLQLSQNVRRGHRVSASKCQSTGGACPLGYRVGPDKRLEIDPEKAAIVRQVFERYANGETQPEIIQSLNEQGLRTLRGKPFSRNSLRTLLKNEKYIGVYTYNHGEVRVEGGVPAIIDVEMFQKAQKMLKFNKRSSSHKWTKANYLLTGKLFCGCCGEQMCGVSGYSSTKVKYHYYACSGHHNYKKARSTCRKKNVKKEWIEGLVLREAKLLLLNEDLLDFIAENTYQYYVEANTDTAYTDALQANLREIERSLENIMRAVEAGIFNDTTKARMEELEAQKQQIQHALDLTKLDRGLQLTKDHILYFLKRFRDLDFENAACQRQIIDTFINSVFVYDDHITLTFNYSGDDRTITLAETDAAAGGESFVFAPSCGTKKFRSRFGFGTFFVTCFVL

SEQ ID NO: 3547 - protein, 528 aa, Unknown
  Description of Unknown: Integrase B3548 sequence
  PTHR30461:SF3,SM00857,G3DSA:1.10.10.2600,IPR036162,PF13408, IPR025827,G3DSA:3.40.50.1390,PS51737,IPR006119,IPR038109, PF07508,IPR011109,SSF53041,PTHR30461,Coil, PS51736,cd00338,PF00239
MNTVIYARYSAGPRQTDQSIEGQLRVCTDFCKQRGLTVIDTYCDRHISGRTDERPEFQRLIADAKRKKFEAVVVYKTDRFARNKYDSAVYKRELKRNGIQIFYAAEAIPDGPEGIILESLMEGLAEYYSAELAQKIKRGMHESALKCQSTGSGRPLGYRVDEQKHFQIDPESAQTVQTIFEQYIKGESNAAICELLNSRGLRTAQGKPFNKNSINRIIKNRKYIGEYRYHDIVVEGGMPAIISKDTFNLAQAEMERRRTRKAPKSPKAEYLLAGRLFCGHCKGPMQGVSGTGKSGNKWYYYYCGNTRGKNKTCDKKQVSRDRLERAVVDFTVRYILQEEVLEELARKVHAAQERQNDTASEIAFYEKKLADNKKSIANVLRAIESGTATQTLPARLQELENEQAVILGEISFLKGKRLAFTEDQIFFALMKHLEPYPGESEQDYRRRIISDFVSEVYLYDGRLLIYFNISSEDGKLKSADLSNIEGGEFDEGLVGSTKQVLDEHLFLQRRLRREVFALIHNRKAPSWK

SEQ ID NO: 3548 - protein, 528 aa, Unknown
  Description of Unknown: Integrase B3549 sequence
  SM00857,G3DSA:1.10.10.2600,IPR036162,PF13408,IPR025827, G3DSA:3.40.50.1390,PS51737,IPR006119,IPR038109,PF07508, SSF53041,IPR011109,PF00239,PTHR30461,PS51736, Coil,cd00338
MAYCIYLRKSRADRELELQGFGETLKRHRDTLIELAKKKNLPIGEIYEEVVSGDSIAARPQMQRLLNDVSDGKWEGVLVMEIERLARGDTSDQGIVTKTFTYSNTLIITPMKTFNPTDEFDQEYFEFGLYMSRREYKTIKRRLHAGMEASCKEGNYIHHTPPFGYSIVKNKKSKGYRLEPKPGEAEIVKLIFQWYTKGILKEDGSYELLGTARIADKLNSEYSIKPLGGVWTIPTISTMLRNEHYLGYIVFGKKKRKKVVENGIIVDKWTRNESYGLYKGKHPALVSQDTFNLAQERLSRNPRRPSKTITNPLAGVIKCGMCGRSMYRRPYQKRGQSASLICSEKTCHNVSSAFYLVEDALLTAIKEWIDGYEIKEEANKYDTSVLESKTKLLEEQQKQLITYKNQLTKVFEAYENGIYDSDTFLNRQKTVSESISSTEEAIVKLNKEIANEREIISHQEEIIPKAKKILEIYKTSDDVQLKNDLMKSILDKVVYTKTANGHFKDQRQDDFKLELFPKLPKNKGNSSE

SEQ ID NO: 3549 - protein, 528 aa, Unknown
  Description of Unknown: Integrase B3550 sequence
  SM00857,G3DSA:1.10.10.2600,IPR036162,PS51737,G3DSA:3.40.50.1390, IPR006119,IPR038109,PF07508,IPR011109,SSF53041, PTHR30461,Coil,PS51736,cd00338,PF00239
MKFLDVAKLLNVCIYLRKSRADREAEARGEGETLARHERILLDLAKKRGYNVGAIYREVVSGETISARPVMQQLLQEVEAGKWDGVLVVEVERLARGDTIDQGVVSRAFQFSNTLIITPMKTYDPNNEFDEEYFEFGLFMSRREYKTIKRRLTAGRESSAKEGKYCGSKPPYGYSRVKLEGEKGWTLRPLPEQAEVVRYIFNLYVNGDCGQRVGMSKICRKLNDTGIKTMDGGLWTVPRVQAILRNPVYAGMIRWNSRKAIRHIQNGEIVISRPFTQDHILVEGRHPELVSKDLFRQAQEIVNKNPARPVTSLHVLRNPLAGIICCGKCGHIMTRKAPSKRQGDLLQCAYSSCDNISSKLPLVEKALVDGIQELVNGYKLNSNTSEQGHLCSISEKEKMVQKKQDEIENLRKKKERQYDLLEQGIYSTEEFLERSQNTAREIADCANSINTLQQEIQYEQALYLQQSSFIPKCENLLANYWSWDVLTRNQFLRELIEKAVYTKNTKNTWKNGDNISFSLDIYPKIQRK

SEQ ID NO: 3550 - protein, 528 aa, Unknown
  Description of Unknown: Integrase B3551 sequence
  SM00857,G3DSA:1.10.10.2600,IPR036162,PS51737, G3DSA:3.40.50.1390,IPR006119,IPR038109,PF07508, IPR011109,SSF53041,PTHR30461,Coil, PS51736,cd00338,PF00239
MEQYCMYLRKSRADREAEQRGEMETLSRHEAALLALAARNHHPITKIYREVVSGETIAARPCMQELLSEVEAGIWTGVYVMEVERLARGDTIDQGVVSRAFRLSSTLIITPIKTYHPDNEFDEEYFEFGLFMSRREYATIKRRLQRGRDASVREGKYIGNRTPYGYYREKIPHDKGFRLVPDPDQADVVRNIYKWYCNGIPADGVSPTTFGMAKIRDRLNGLGIPAATGGPWTISSVSGILQNPVYTGKIRHNYRPAEKSLSGGVITVRRPRNGSGDLYDGLHEAIISQESFDMVQDFMKNRKLPSIPYKKKMANPLSGIVRCSVCGKVMIRRPYQSGRQCTLMCQTAHCATVASDLDDVEREILNGLAEWLKDYKLQWNIPDSADSSPAVSMLQTQLVQKRKEEERLQSQLDNTYDLLEQGIYTKDVFLTRNKMVVEKLEDVHISINSLEKEIVLEQKRLQAKIDVIPKVENILDVYWTLPDAKSKNDLLKSVLDKVIYTKSGRNGPHRKVHYTFALDLYPRLPKSP

SEQ ID NO: 3551 - protein, 528 aa, Unknown
  Description of Unknown: Integrase B3552 sequence
  SM00857,G3DSA:1.10.10.2600,IPR036162,PS51737,G3DSA:3.40.50.1390, IPR006119,IPR038109,PF07508,SSF53041,IPR011109, PTHR30461,Coil,PS51736,cd00338,PF00239
MQETNISINEIIMYLRKSRSDDPYMTVEEVLARHERQLQDYALSSFGSIIPEERIFREVVSGETIADRPVMQSVMKYLESGQIKGVLVIEPQRLSRGDLEDCGRIINAFRYTNTLVLTPPKTYDLSDEYDRKFFEMELTRGNDYLEYTKKILNRGRLASVKQGNYIGSIAPYGYRKIKTGSGKDTAHTLEIVPEQADAVRMMAQLYLAGNGFTRIAAHLDSLGIKPLKSDHWSPAAISDILSNPVYIGMIRWNHFKTIKTMQNGQIVKSRPTNRGTDYILVPGKHPAILDQGTFDAIAQRRGKSPKIKRGHELRNPFAGLVFCGTAGCGRSMTFKQFTNYRSKVPRRSESMICPNQRICHTKSVQYSAFVERVKEILSKTVDDFEIKLQNDDGNIVRIHENIIRNLEQDLVKLKDKDLRQKDAYEDGIYTKEEYASRNAKLQEQICEVQLSIQRAKDTMPPEVDYQERVSRFSDCLSKFEDTDISASEMNLLLKSCIEKIIYHNSSESKPGIGRFVANPFELDIYLRL

SEQ ID NO: 3552 - protein, 528 aa, Unknown
  Description of Unknown: Integrase B3553 sequence
  SM00857,G3DSA:1.10.10.2600,IPR036162,PS51737, G3DSA:3.40.50.1390,IPR006119,IPR038109,PF07508, IPR011109,SSF53041,PTHR30461,Coil, PS51736,cd00338,PF00239
MAYCIYLRKSRADRELELQGFGETLKRHRDTLIELAKKKNLPIGEIYEEVVSGDSIAARPQMQRLLNDVSDGKWEGVLVMEIERLARGDTSDQGIVTKTFTYSNTLIITPMKTFNPTDEFDQEYFEFGLYMSRREYKTIKRRLHAGMEASCKEGNYIHHTPPFGYSIVKNKKSKGYRLEPKPGEAEIVKLIFQWYTKGILKEDGSYELLGTARIADKLNSEYSIKPLGGVWTIPTISTMLRNEHYLGYIVFGKKKRKKVVENGIIVDKWTRNESYGLYKGKHPALVSQETFNLAQERLSRNPRRPSKTITNPLAGVIKCGMCGRSMYRRPYQKRGQSASLICPEKTCHNVSSAFYLVEDALLTAIKEWIDGYEIKEEANKYDTSVLESKTKLLEEQQKQLITYKNQLTKVFEAYENGIYDSDTFLNRQKTVSESISSTEEAIVKLNKEIANEREIISHQEDIIPKAKKILEIYKTSDDVQLKNDLMKSILDKVVYTKTANGHFKDQRQDDFKLELFPKLPKNKGNSSE

SEQ ID NO: 3553 - protein, 528 aa, Unknown
  Description of Unknown: Integrase B3554 sequence
  cd00338,SM00857,IPR006118,IPR036162,PF13408, PS51737,IPR025827,G3DSA:3.40.50.1390,IPR006119,IPR011109, SSF53041,PTHR30461,PS00397,Coil,PF00239
MKVPVWSYARVSTLNQVDGFGIQRQVNTINQFIQYLVLDHRLPYVLDTDNITQMVAEGRSAFKGKNWNPKTKLGQYRKMVMDGVVPDSVLIVENIDRLTRLDPFQAVEIISGLINRGTTILEIETGMTYSRYIPESITVLTMQINRANGESKRKSVMMKKSHQNRYGNVSKVRPRWFDVVEVDGIKQYRTNNTAKAIQRMYNDYVNGIGAAQIVRTYGDTDNGKPWTLVTVLRALSDKRVADDARYPSIIDKALYERVQAMKLSPSKGNTHQKYMLNLFAGMSRCPLCGQAIITKRNSHGGLFTVCLGKRTDKTCTARSIAYNALERPLLNAIVGLDFSEVYGQEESNVLTLRDQWIQNERDIAAFRERLTKASRHEKFAILDELEVMNREQDELTIRLKSVDAPKDITLTYDDDKLDMNVEYRIELNNRMKKLIQRIDIVREDVSKTNYKIFCSIKYWTELLTHLVIIDVDVQRIGRGGTNQLTTTLRSVSSLDLEGNIKGNPDMEALEYWQSVVSKATQKAIESLT

SEQ ID NO: 3554 - protein, 528 aa, Unknown
  Description of Unknown: Integrase B3555 sequence
  SM00857,G3DSA:1.10.10.2600,IPR036162,PF13408, IPR025827,G3DSA:3.40.50.1390,PS51737,IPR006119, IPR038109,PF07508,IPR011109,SSF53041, PTHR30461,Coil,PS51736,cd00338,PF00239
MAYCIYLRKSRADRELELQGFGETLKRHRDTLIELAKKKNLPIGEIYEEVVSGDSIAARPQMQRLLNDVSDGKWEGVLVMEIERLARGDTSDQGIVTKTFTYSNTLIITPMKTFNPTDEFDQEYFEFGLYMSRREYKTIKRRLHAGMEASCKEGNYIHHTPPFGYSIVKNKKSKGYRLEPKPGEAEIVKLIFQWYTKGILKEDGSYELLGTARIADKLNSEYSIKPLGGVWTIPTISTMLRNEHYLGYIVFGKKKRKKVVENGIIVDKWTRNESYGLYKGKHPALVSQETFDLAQERLAKNPRRPSKTITNPLAGVIKCGMCGRSMYRRPYQKRGQSASLICSEKTCHNVSSAFYLVEDALLTAIKEWIDGYEIKEEANKYDTSVLESKTKLLEEQQKQLITYKNQLTKVFEAYENGIYDSDTFLSRQKTVSESISSTEDAIIKLNKEIANEREIISHQEEIIPKAKKILEIYKTSDDVQLKNDLMKSILDKVVYTKTANGHFKGQRQDDFKLELFPKLPKNKGDSSE

SEQ ID NO: 3555 - protein, 528 aa, Unknown
  Description of Unknown: Integrase B3556 sequence
  cd03768,PTHR30461:SF3,SM00857,G3DSA:1.10.10.2600,IPR036162, PF13408,IPR025827,G3DSA:3.40.50.1390,PS51737,IPR006119, IPR038109,PF07508,IPR011109,SSF53041,PTHR30461, PS51736,Coil,PF00239
MRIAIYSRKSVFTGKGDSIENQIQLCKEYVNLHYPGENSIEIYEDEGFSGGNINRPKFQELLKDAREKKFDCLICYRLDRISRNVSDFSTLIEELNDLKISFVSIKEQFDTSTPMGRAMMYISSVFAQLERETIAERVRDNMIELAKHGRWLGGTPPLGFDSEAMVYIDEEMKERKMSKLKVNKEEIELVKTIYRKFLELGSIHQATVFLQQNRLCGKRGKLLSASAVSKIITNPVYVKSNDDVLDYLRSIDIQVFGRKDGYGILTYNKRDSKFNKRDKEEWIAAVSKHKGIIEPNDWLLAQRLLDKNREKSKTFRLGTSSKGLFSGLVRCAKCGSPMRITYGRNNKHYYTCTRRVQSKNALCNNPTASGPDFDKAVLDNIMTVDTSKFLNGLNSNSKIIEDDKEKINKINTEINNKKKQLDKLIENMALFDSDVTDILADKINALSREIKELQLQVNEVACTVEDATLENNNYELVINTLDKFKDNFNSIEEIKTKKALLSMLIDEIRWNGDTTEIEIDFWGSKKKV

SEQ ID NO: 3556 - protein, 528 aa, Unknown
  Description of Unknown: Integrase B3557 sequence
  cd00338,SM00857,G3DSA:1.10.10.2600,IPR036162,PS51737, G3DSA:3.40.50.1390,IPR006119,IPR038109,PF07508,IPR011109, SSF53041,PTHR30461,PS51736,Coil,PF00239
MQETNISINEIIMYLRKSRSDDPYMTVEEVLARHERQLQDYALSSFGSIIPEERIFREVVSGETIADRPVMQSVMKYLESGQIKGVLVIEPQRLSRGDLEDCGRIINAFRYTNTLVLTPPKTYDLSDEYDRKFFEMELTRGNDYLEYTKKILNRGRLASVKQGNYIGSIAPYGYRKIKTGSGKDTAHTLEIVPEQADAVRMMAQLYLAGNGFTRIAAHLDSLGIKPLKSDHWSSAAISDILSNPVYIGMIRWNHFKTIKTMQNGQIVKSRPTNRGTDYILVPGKHPAILDQGTFDAIAQRRGKSPKIKRGHELRNPFAGLVFCGTAGCGRSMTFKQFTNYRSKVPRRSESMICPNQRICHTKSVQYSAFVGRVKEILSKTVDDFEIKLQNDEGNIVRIHENIIRNLEQDLVKLKDKDLRQKDAYEDGIYTKEEYASRNAKLQEQICEVQLSIQRAKDTMPPEVDYQERVSRFSDCLSKFEDTDISASEMNLLLKSCIEKIIYHNSSESKPGIGRFVANPFELDIYLRL

SEQ ID NO: 3557 - protein, 528 aa, Unknown
  Description of Unknown: Integrase B3558 sequence
  SM00857,G3DSA:1.10.10.2600,IPR036162,PS51737, G3DSA:3.40.50.1390,IPR006119,IPR038109,PF07508, SSF53041,IPR011109,PF00239,PTHR30461, PS51736,Coil,cd00338
MQETNISINEIIMYLRKSRSDDPYMTVEEVLARHERQLQDYARSSFGSTIPEERIFREVVSGETIADRPVMQSVMKYLESGQIKGVLVIEPQRLSRGDLEDCGRIINAFRYTNTLVLTPPKTYDLSDEYDRKFFEMELTRGNDYLEYTKKILSRGRLTSVKQGNYIGSIAPYGYRKIKTGSGKDTAHTLEIVPEQADAVRMMAQLYLAGNGFTRIAAHLDSLGIKPLKSDHWSPAAISDILSNPVYIGMIRWNHFKTIKTMQNGQIVKSRPTNHGTDYILVPGKHPAILDQETFYAIAERRGKSPKVKRDHELRNPFAGLVYCGTAGCGRSMALKQFTNYRSKVPRRSESMICPNQRICHTKSVQYSTFVKRVKEILSKTVDDFEIKLQNDEGNIVRIHENIIRNLEQDLLKLKDKDLRQKDAYEDGIYTKEEYASRNAKLQEQICEVQLSIQRAKDTMPPEVDYQERVSRFSDCLSKFEDTDISASEMNLLLKSCIEKIIYHNSSESKPGIGRFVANPFELDIYLRL

SEQ ID NO: 3558 - protein, 528 aa, Unknown
  Description of Unknown: Integrase B3559 sequence
  PTHR30461:SF3,SM00857,G3DSA:1.10.10.2600,IPR036162,PS51737, G3DSA:3.40.50.1390,IPR006119,IPR038109,PF07508,SSF53041, IPR011109,PTHR30461,Coil,PS51736,cd00338, PF00239
MPYLIYLRKSRADMDAEARGEGETLARHEKTLIELAKKMNLNVTGIYKEIVSGETIAARPKMQQVIREVEEGLWEGVLVMEVERLARGDTKDQGTVAEAFKFSNTKIITPVKIYDPSNEFDEEYFEFGLFMSRREYKTINRRIQRGRIASVEEGKYIASSAPYGYERVRIKNDKGYTLKIVPSEADIVRLIYDLYTRGELQENGEFKRLGMYLISKRLDSLHIQPRNSTMWSRSTIKDILTNPTYTGKVRWRWRKVEKKIVNGELVEKRPKDYDNCMKIKALHDPIIDEDIFELAQAIMREKKNISISSNQVLQNPFTGLVYCGKCGALMTRAASNTKVNYPVMKCPNRYCDNISSPIFLIEEQLLVALQDWLDRYELPFRQKESPLVSALSLRVSAIKNTEARIETLKKQLLSTYDLLEQGIYTSEVFLERNRSLSDQITEATESLQELQEQYERELLQEQARTKFLPAVRHIIDVYDSMEDASAKNALLKNVIDRIVYVKNERNKKGDLHNINFELTVYPKIPLRP

SEQ ID NO: 3559 - protein, 528 aa, Unknown
  Description of Unknown: Integrase B3560 sequence
  PTHR30461:SF3,cd00338,SM00857,G3DSA:1.10.10.2600,IPR036162, PF13408,IPR025827,PS51737,G3DSA:3.40.50.1390,IPR006119, IPR038109,PF07508,SSF53041,IPR011109,PTHR30461, PS51736,Coil,PF00239
MQKRRTKYANSQGDNAVIYARYSSHNQKDTSIEQQIEVCTKYARDNGYRITNIYADRAISGKTDARPQFRLMMQDAREHKFDVVISWKSSRLGRDMLDAMTNDIILRNLGIKCFYTEENFDDTAAGRFALRNMMNVNQFYIENMAEDILRGMRDNAKKCRVNNGSPPLGYRRGADGKYEIVPEEAETVREIFTKVLAGMAFVDIANELNARGIKTKKGAPWGRSSFSRLLSNERYIGTYKWSDIVIENGMPAIIDREVFEMAQKKIKGERPLRRRHNENGDYLLTGKLFCGKCDSPMTGMSGTSKSGAKHHYYACYSARKDGSCDKKAVKRDWVEKTVALFIKEHVLRDEVIEWMVDQYMVYQKATFESQRIMEMRNQLKDVQSQLDNLVDAIARGMYTDSTKDKLLKLEADKKEIEQDIRLATYNLKEYDREHVRCYFLSFKEGSVESKDYLKRLFDQFVTKIYLYDDEIRIAFSGTKDDSPVSFKIIDEAEELAVSSVRLSSASSHQNNIIRTLYRLVMGSDLLFL

SEQ ID NO: 3560 - protein, 528 aa, Unknown
  Description of Unknown: Integrase B3561 sequence
  SM00857,G3DSA:1.10.10.2600,IPR036162,PS51737,G3DSA:3.40.50.1390, IPR006119,IPR038109,PF07508,IPR011109,SSF53041, PTHR30461,Coil,PS51736,cd00338,PF00239
MAYCIYLRKSRADRELELQGFGETLKRHRDTLIELAKKKNLPIGEIYEEVVSGDSIAARPQMQRLLNDVSDGKWEGVLVMEIERLARGDTSDQGIVTKTFTYSNTLIITPMKTFNPTDEFDQEYFEFGLYMSRREYKTIKRRLHAGMEASCKEGNYIHHTPPFGYSIVKNKKSKGYRLEPKPGEAEIVKLIFQWYTKGILKEDGSYELLGTARIADKLNSEYSIKPLGGVWTIPTISTMLRNEHYLGYIVFGKKKRKKVVENGIIVDKWTRNESYGLYKGKHPALVSQDTFNLAQERLSRNPRRPSKTITNPLAGVIKCGMCGRSMYRRPYQKRCQSASLICSEKTCHNVSSAFYLVEDALLTAIKEWIDGYEIKEEANKYDTSVLESKTKLLEEQQKQLITYKNQLTKVFEAYENGIYDSDTFLNRQKTVSESISSTEEAIVKLNKEIANEREIISHQEEIIPKARKILEIYKTSDDVQLKNDLMKSILDKVVYTKTANGHFKDQRQDDFKLELFPKLPKNKGNSSE

SEQ ID NO: 3561 - protein, 528 aa, Unknown
  Description of Unknown: Integrase B3562 sequence
  SM00857,G3DSA:1.10.10.2600,IPR036162,PF13408, IPR025827,G3DSA:3.40.50.1390,PS51737,IPR006119, IPR038109,PF07508,SSF53041,IPR011109, PF00239,PTHR30461,PS51736,Coil,cd00338
MAYCIYLRKSRADRELELQGFGETLKRHRDTLIELAKKKNLPIGEIYEEVVSGDSIAARPQMQRLLNDVSDGKWEGVLVMEIERLARGDTSDQGIVTKTFTYSNTLIITPMKTFNPTDEFDQEYFEFGLYMSRREYKTIKRRLHAGMEASCKEGNYIHHTPPFGYSIVKNKKSKGYRLEPKPGEAEIVKLIFQWYTKGILKEDGSYELLGTARIADKLNSEYSIKPLGGVWTIPTISTMLRNEHYLGYIVFGKKKRKKVVENGIIVDKWTRNESYGLYKGKHPALVSQDTFNLAQERLSRNPRRPSKTITNPLAGVIKCGMCGRSMYRRPYQKRGQSASLICSEKTCHNVSSAFYLVEDALLTAIKEWIDGYEIKEEANKYDTSVLESKAKLLEEQQKQLITYKNQLTKVFEAYENGIYDSDTFLNRQKTVSESISSTEKAIVKLNKEIANEREIISHQEEIIPKAKKILEIYKTSDDVQLKNDLMKSILDKVVYTKTANGHFKDQRQDDFKLELFPKLPKNKGDSSE

SEQ ID NO: 3562 - protein, 528 aa, Unknown
  Description of Unknown: Integrase B3563 sequence
  PTHR30461:SF3,SM00857,G3DSA:1.10.10.2600,IPR036162,PF13408, IPR025827,G3DSA:3.40.50.1390,PS51737,IPR006119,IPR038109, PF07508,IPR011109,SSF53041,PTHR30461,Coil, PS51736,cd00338,PF00239
MAKKQTNGNLALEQQRVIVIPAHDEIVARKLRVAAYARVSSSSEDQLNSYRVQNQYYSELISSNPDWEMVDIYADEGITGTSVEKREDFQRMMQDCRKGKIDRILVKSISRFARNTKDCLAAVRELKELGVSVQFEEQGIDTSKVSSEMVTAIMASLAQKGSESISGNVQWGYQKRMESGKFNTCKAPYGFTLHEGKLSIKEDEATVVRFIFQLYLNGLNGYEIANTLSQQEIPPGREMGTWKDSSIYYILKNERYAGKAMVGKSYSTTTFPHKKVRNHGEREMYLLSDSNPPIVSPEVFDRVQTLLQSRKNAHIGSTNQTFSRKLYCANCGRSLKRKFTNDKMYWVCNTHFQNAASCPTPPYHTPDIEQAFCRMYYKLKHHGDPIFTQMLSNLQKIRYSRMLWSEDVISLNKKISDILSQVQFLTQLQQAGGVDPDTFISSNNKLSEQLRRLKQEKARLLDTDSDDLADRTRDLMDALEDGPDFLDSFDAELFDALVEKIIVDSNERLRFRLKNGLELLEQIERTRR

SEQ ID NO: 3563 - protein, 528 aa, Unknown
  Description of Unknown: Integrase B3564 sequence
  SM00857,G3DSA:1.10.10.2600,IPR036162,PF13408,IPR025827, G3DSA:3.40.50.1390,PS51737,IPR006119,IPR038109,PF07508, IPR011109,SSF53041,PTHR30461,Coil,PS51736, cd00338,PF00239
MAYCIYLRKSRADRELELQGFGETLKRHRDTLIELAKKKNLPIGEIYEEVVSGDSIAARPQMQRLLNDVSDGKWEGVLVMEIERLARGDTSDQGIVTKTFTYSNTLIITPMKTFNPTDEFDQEYFEFGLYMSRREYKTIKRRLHAGMEASCKEGNYIHHTPPFGYSIVKNKKSKGYRLEPKPGEAEIVKLIFQWYTKGILKEDGSYELLGTARIADKLNSEYSIKPLGGVWTIPTISTMLRNEHYLGYIVFGKKKRKKVVENGIIVDKWTRNESYGLYKGKHPALVSQETFDLAQERLAKNPRRPSKTITNPLAGVIKCGMCGRSMYRRPYQKRGQSASLICSEKTCHNVSSAFYLVEDALLTAIKEWIDGYEIKEEANKYDTSVLESKTKLLEEQQKQLITYKNQLTKVFEAYENGIYDSDTFLSRQKTVSESISSTEDAIIKLNKEIANEREIISHQEEIIPKAKKILEIYKTSDDVQLKNDLMKSILDKVVYTKTANGHFKDQRQDDFKLELFPKLPKNKGDSSE

SEQ ID NO: 3564 - protein, 528 aa, Unknown
  Description of Unknown: Integrase B3565 sequence
  SM00857,G3DSA:1.10.10.2600,IPR036162,PS51737,G3DSA:3.40.50.1390, IPR006119,IPR038109,PF07508,IPR011109,SSF53041, PTHR30461,Coil,PS51736,cd00338,PF00239
MQETNISINEIIMYLRKSRSDDPYMTVEEVLARHERQLQEYALSSFGSIIPEERIFREVVSGETIADRPVMQSVMKYLESGQIKGVLVIEPQRLSRGDLEDCGRIINAFRYTNTLVLTPPKTYDLSDEYDRKFFEMELTRGNDYLEYTKKILNRGRLASVKQGNYIGSIAPYGYRKIKTGSGKDTAHTLEIVPEQADAVRMMAQLYLAGNGFTRIAAHLDSLGIKPLKSDHWSSAAISDILSNPVYIGMIRWNHFKTIKTMQNGQIVKSRPTNRGTDYILVPGKHPAILDQGTFDAIAQRRGKSPKIKRGHELRNPFAGLVFCGTTGCGRSMTFKQFTNYRSKVPRRSESMICPNQRICHTKSVQYSAFVERVKEILSKTVDDFEIKLQNDDGNIVRIHENIIRNLEQDLLKLKDKDLRQKDAYEDGIYTKEEYASRNAKLQEQICEVQLSIQRAKDTMPPEVDYQERVSRFSDCLSKFEDTDISASEMNLLLKSCIEKIIYHNSSESKPGIGRFVANPFELDIYLRL

SEQ ID NO: 3565 - protein, 528 aa, Unknown
  Description of Unknown: Integrase B3566 sequence
  PTHR30461:SF3,SM00857,IPR036162,G3DSA:3.40.50.1390,IPR006119, PF07508,IPR011109,SSF53041,PTHR30461,PS51736, cd00338,PF00239
MHFGIYGRKSYFKDTSDSTQMQFSEGDKYIAEHFSPDEIESVTYYEDDGWIRSDMDRPDLNRLKDDILAGLINVVVIYKIDRLCCDMADFVPFYAFLKDHGVKFITIKDGIDTTTPIGEAMMYLAVIFSGLEVQTDSLRITDNMNHLAAEGFWCGGKPPIGYNIQEISLGAKSHKTLVFNEDEIRYKNTLIDIFLENHFSLQSMETYCKNHGITSLKGSFLSTTQLYSMFGSPMCVANTPAMYDYFADKGCQMSEGSPRDAWDGRHGIIVYGRTMEKKVSGKKKHIQAPPENWRVSIGYHEPYMTDERFFAIQAQFGHNVFSKQSKYDLPLLKGSLRCKCGRLMSMSRKKKADGSISTWYYCPRRMRNGVDACDMIQTKADLLDNRVISIFLEIEHDPAALKKYLKEEKRQPQDNAAALRAAMEKCQAKIGKLTATLSLNSESAAAKYIVNEIEKLDIEYNSLRKRMLSANAVDRKNALNMKNAMEKREEIIRLLNDFDNFTPNERNEIAKDVLKECVWDGDTLFLTL

SEQ ID NO: 3566 - protein, 528 aa, Unknown
  Description of Unknown: Integrase B3567 sequence
  SM00857,G3DSA:1.10.10.2600,IPR036162,PS51737,G3DSA:3.40.50.1390, IPR006119,IPR038109,PF07508,IPR011109,SSF53041, PTHR30461,Coil,PS51736,cd00338,PF00239
MEQYCMYLRKSRADREAEQRGEMETLSRHEAALLALAARNHHPITKIYREVVSGETIAARPCMQELLSEVEAGIWTGVYVMEVERLARGDTIDQGVVSRAFRLSSTLIITPIKTYHPDNEFDEEYFEFGLFMSRREYATIKRRLQRGRDASVREGKYIGNRSPYGYYREKIPHDKGFRLVPDPDQADVVRNIYKWYCNGIPADGVSPTTFGMAKIRDRLNALGVPAATGGPWTISSISGILQNPVYTGKIRHNYRPAEKSLSGGVITVRRPRNGSGDLYDGLHEAIISQESFDMVQDFMKNRKLPSIPYKKKMANPLSGIVRCSVCGKVMIRRPYQSGRQCTLMCQTAHCATVASDLDDVEREILNGLAEWLKDYKLQWNIPDSADSSPAVSMLQTQLVQKRKEEERLRSQLDNTYDLLEQGIYTKDVFLTRNKMVVEKLEEVHISIDSLEKEIALEQKRLQAKIDVIPKVENILDVYWTLPDVKSKNDLLKSVLDKVVYTKSGRNGPHKKVHYAFTLDLYPKLPKSP

SEQ ID NO: 3567 - protein, 528 aa, Unknown
  Description of Unknown: Integrase B3568 sequence
  PTHR30461:SF3,SM00857,G3DSA:1.10.10.2600,IPR036162,PF13408, PS51737,IPR025827,G3DSA:3.40.50.1390,IPR006119,IPR038109, PF07508,IPR011109,SSF53041,PF00239, PTHR30461,PS51736,Coil,cd00338
MSTAAVRSVTIIPPTINILTHLSTATTQKRRVAGYARVSTDSDEQFTSYEAQIDYYTQYIRCNPEWEFVKVYADEGISGTSTKHRTGFNEMIDDAMSGKIDLIVTKSVSRFARNTVDGLVTIRKLKEKGVEVYFEKENIYTFDSKGELLLTIMSSLAQEESRSISENVTWGQRKRFADGKVNLPYKQFLGYRKGADGLPEIVPEEAAIVRRIYARFMEGLTPHTIAKELTTDGIPTPSGKTNWPTSTVESILQNEKYKGAALLQKCFTVDFLTKKKKLNEGEVPQYYVEHSHEPIITPEEFDKVQTELARRKRISRQYSGKSIFSSRIVCGDCGSYFGSKVWNSTSKYRRVIWQCNCKFKGEHKCETPHLDEKTIKAQFVAALNAIIDSKDNILEDCRLVQATLTDCTGVDAEIDSLLTEVDVVTELTRRCISENAQSSQNQQEYTARYNGLAERYEKVKAQLEQLRATKTAREAQADAIGAFMFEVQELDVLTEFDEKLWLAVIDKVTVHTNGRMTFRFRSGTEIDV

SEQ ID NO: 3568 - protein, 528 aa, Unknown
  Description of Unknown: Integrase B3569 sequence
  PTHR30461:SF3,SM00857,G3DSA:1.10.10.2600,IPR036162,PS51737, G3DSA:3.40.50.1390,IPR006119,IPR038109,PF07508,SSF53041, IPR011109,PF00239,PTHR30461,PS51736,Coil, cd00338
MLKVAAYARVSTDKDDQINSLTNQREYFESYIKSNGDWEFVEVYFDEGITGTQTKKRKGFNRMINDCKNGKIDLILTKEVSRFARNTVDTLNYTRMLKEYDVGVFFINDNIDTRQNDGEFRLAIMASVAQEESRKISERVKWGQRRAMENGVVFGNNSIVGFDINDGVLSVNESEAEVVKLIFHKYVNEGKGTHIVARELYEDGIKPPKSSKDFWSSTMILNILRNEKYVGDLLQKKYVTKDYLTHHKVINESEDKIYIENHHEGIISRKMWNMAQAELQRRSVDKSTKKKYSNRYWCSGKIICSECGSRFVIRKSKKKSGIYITWACHERTAHGNKKLDKNNNQIGCNMRTVNNKSLLTCMKFITEQIDVDINNIADDILNEINNSADTSEDNTQNLTLQIQDIQNKKMRMLDSYYSGDINKDEMTALKDKYDKEIEKINAILQKQQNNQTAIQERQNNTDELRNIIINAVCSENVYGEIVDKIIVYDDYMLVKLKYIDFAFKIKYSTHGYMEKYTTVIESCEIVSF

SEQ ID NO: 3569 - protein, 528 aa, Unknown
  Description of Unknown: Integrase B3570 sequence
  SM00857,G3DSA:1.10.10.2600,IPR036162,PF13408,IPR025827, G3DSA:3.40.50.1390,PS51737,IPR006119,IPR038109,PF07508, IPR011109,SSF53041,PF00239,PTHR30461,PS51736, Coil,cd00338
MAYCIYLRKSRADRELELQGFGETLKRHRDTLIELAKKKNLPIGEIYEEVVSGDSIAARPQMQRLLNDVSDGKWEGVLVMEIERLARGDTSDQGIVTKTFTYSNTLIITPMKTFNPTDEFDQEYFEFGLYMSRREYKTIKRRLHAGMEASCKEGNYIHHTPPFGYSIVKNKKSKGYRLEPKPGEAEIVKLIFQWYTKGILKEDGSYELLGTARIADKLNSEYSIKPLGGVWTIPTISTMLRNEHYLGYIVFGKKKRKKVVENGIIVDKWTRNESYGLYKGKHPALVSQDTFNLAQERLSRNPRRPSKTITNPLAGVIKCGMCGRSMYRRPYQKRGQSASLICSEKTCHNVSSAFYLVEDALLTAIKEWIDGYEIKEEANKYDTSVLESKTKLLEEQQKQLITYKNQLTKVFEAYENRIYDSDTFLNRQKTVSESISSTEEAIVKLNKEIANEREIISHQEEIIPKARKILEIYKTSDDVQLKNDLMKSILDKVVYTKTANGHFKDQRQDDFKLELFPKLPKNKGNSSE

SEQ ID NO: 3570 - protein, 528 aa, Unknown
  Description of Unknown: Integrase B3571 sequence
  SM00857,G3DSA:1.10.10.2600,IPR036162,PS51737,G3DSA:3.40.50.1390, IPR006119,IPR038109,PF07508,IPR011109,SSF53041, PF00239,PTHR30461,PS51736,Coil,cd00338
METYCIYLRKSRADADAEARGEGETLARHEHILSELAKKQKYHISKVYREIVSGETIAARPQMQQLLQDVESGIYAGVLVMEVERLARGDTIDQGIVAQAFKYSDTKIITPVKTYDPNNEYDEEYFEFSLFMSRREYKTIKRRMQAGRFAAAKEGKYVGNVPPYGYDRQKLDHDSGFTLVPNPEEAKIVKMIFEWYVHGAIMEDGTKQRLGSTLIAYRLHDMGFTTRKGERWSLNTVRSILTNPVYAGMIRWGYRSQKKIMKNGAVINSRPNATTDDYVLVKGLHEPLVSQEDYDTAQELAHGKRTIPKVNMGKTLQNPLAGILICKKCGRSMTRRPYGVKLRQDTILCKTPDCDNVASDLYLVEQRILDSLQAWLHQYEVQWQEHQPSTGIDNSEQIAAIDALKKEQAKAKQQLEKAYDLLEQGIYDTNTFVERSTTLKAKISDTQKKIEKLEHNMQEQSSRDREMQELIPKVRHLLAVYDTLPDATAKNQMLCQVIEKAEYYKAHSARWHGSVDDFDVVVYPKLPR

SEQ ID NO: 3571 - protein, 528 aa, Unknown
  Description of Unknown: Integrase B3572 sequence
  SM00857,G3DSA:1.10.10.2600,IPR036162,PS51737, G3DSA:3.40.50.1390,IPR006119,IPR038109,PF07508, SSF53041,IPR011109,PTHR30461,Coil, PS51736,cd00338,PF00239
MPYCLYLRKSRTDLDAEANGETETLARHEKILLDLAKRMHLDVTEIYREVVSGETISSRPVVQRVLNEVENGLWDGVLVVEVERLARGDTIDQGIVSRAFKFSNTKIITPLKTYDPNNEYDEEYFEFGLFMSRREYKTIRRRLTQGRISSAKEGKHTASTPPYGYDRVHVESGKGYTLIPNEKEAPVVEMMFDWFVNGELLEDGSCKNLGTMAIANRLTSLQLPTPRGGNVWSQRTVYWILHNPVYTGRIRWGYKKDKKMIVDGVVKRKRVISSEKDQVLVEGLHPAIISEDLFEQAQSIFAEGGTPSVTANRELKNPLSGIVVCGICGAPLRYKIGYNRCSNMLHCRTRGCECKGSYFDLVEKRLLEALQEWVDHYKMSWDDMPEETHSLLTLKKQAYDTSIKELNTLTKQLDKTHDLLEQGVYDTDTFLSRSKSLSEKIATAEKNIQKLSADIQNERLRENNRKNLIPMAENLIDVYWQLPTATAKNEMLKEVLERVEYTKLQAGNRSGKGKDDFELILYPKLPKS

SEQ ID NO: 3572 - protein, 528 aa, Unknown
  Description of Unknown: Integrase B3573 sequence
  SM00857,G3DSA:1.10.10.2600,IPR036162,PS51737,G3DSA:3.40.50.1390, IPR006119,IPR038109,PF07508,SSF53041,IPR011109, PF00239,PTHR30461,PS51736,Coil,cd00338
MLETNISINEIIMYLRKSRSDDPYMTVEEVLARHERQLQDYALSSFGSIIPEERIFREVVSGETIADRPVMQSVMKYLESGQIKGVLVIEPQRLSRGDLEDCGRIINAFRYTNTLVLTPPKTYDLSDEYDRKFFEMELTRGNDYLEYTKKILNRGRLASVKQGNYIGSIAPYGYRKIKTGSGKDTAHTLEIVPEQADAVRMMAELYLAGNGFTRIAAHLDSLGIKPLKSDHWSPAAISDILSNPVYIGMIRWNHFKTIKTMQNGQIVKSRPTNHGTDYILVPGKHPAILDQETFYAIAQRRGKSPKIKRGHELRNPFAGLVFCGTAGCGRSMTFKQFTNYRSKVPRRSESMICPNQRICHTKSVQYSAFVERVKEILSKTVDDFEIKLQNDDGNIVRIHENIIRNLEQDLVKLKDKDLRQKDAYEDGIYTKEEYASRNAKLQEQICEVQLSIQRAKDTMPPEVDYQERVSRFSDCLSKFEDTDISASEMNILLKSCIEKIIYHNSSESKPGIGRFVANPFELDIYLRL

SEQ ID NO: 3573 - protein, 528 aa, Unknown
  Description of Unknown: Integrase B3574 sequence
  SM00857,G3DSA:1.10.10.2600,IPR036162,PS51737, G3DSA:3.40.50.1390,IPR006119,IPR038109,PF07508, IPR011109,SSF53041,PTHR30461,Coil, PS51736,cd00338,PF00239
MQETNISINEIIMYLRKSRSDDPYMTVEEVLARHERQLQDYALSSFGSIIPEERIFREVVSGETIADRPVMQSVMKYLESGQIKGVLVIEPQRLSRGDLEDCGRIINAFRYTNTLVLTPPKTYNLSDEYDRKFFEMELTRGNDYLEYTKKILNRGRLASVKQGNYIGSIAPYGYRKIKTGSGKDTSHTLEIVPEQADAVRMMAQLYLAGNGFTRIAAHLDSLGIKPLKSDHWSPAAISDILSNPVYIGMIRWNHFKTIKTMQNGQIVKSRPTNHDTDYILVPGKHPAILDQGTFDAIAQRRGKSPKIKRGHELRNPFAGLVFCGTTGCGRSMTFKQFTNYRSKVPRRSESMICPNQRICHTKSVQYSDFVERVKEILSKTVDDFEIKLQNDDGNIVRIHENIIRNLEQDLVKLKDKDLRQKDAYEDGIYTKEEYASRNAKLQEQICEVQLSIQRAKDTMPPEVDYKERVSRFSDCLSKFEDTDISASEMNLLLKSCIEKIIYHNSSESKPGIGRFVANLFELDIYLRL

SEQ ID NO: 3574 - protein, 528 aa, Unknown
  Description of Unknown: Integrase B3575 sequence
  SM00857,G3DSA:1.10.10.2600,IPR036162,PS51737,G3DSA:3.40.50.1390, IPR006119,IPR038109,PF07508,IPR011109,SSF53041, PTHR30461,Coil,PS51736,cd00338,PF00239
MQETNISINEIIMYLRKSRSDDPYMTVEEVLARHERQLQEYALSSFGSIIPEERIFREVVSGETIADRPVMQSVMKYLESGQIKGVLVIEPQRLSRGDLEDCGRIINAFRYTNTLVLTPPKTYDLSDEYDRKFFEMELTRGNDYLEYTKKILNRGRLASVKQGNYIGSIAPYGYRKIKTGSGKDTAHTLEIVPEQADTVRMMAQLYLAGNGFTRIAAHLDSLGIKPLKSDHWSSAAISDILSNPVYIGMIRWNHFKTIKTMQNGQIVKSRPTNRGTDYILVPGKHPAILDQGTFDAIAQRRGKSPKIKRGHELRNPFAGLVYCGTAGCGRSMTFKQFTNYRSKVPRRSESMICPNQRICHTKSVQYSAFVERVKEILSKTVDDFEIKLQNDDGNIVRIHENIIRNLEQDLVKLKDKDLRQKDAYEDGIYTKEEYASRNAKLQEQICEVQLSIQRAKDTMPPEVDYQERVSRFSDCLSKFEDTDISASEMNLLLKSCIEKIIYHNSSESKPGIGRFVANPFELDIYLRL

SEQ ID NO: 3575 - protein, 528 aa, Unknown
  Description of Unknown: Integrase B3576 sequence
  cd00338,SM00857,G3DSA:1.10.10.2600,IPR036162, PS51737,G3DSA:3.40.50.1390,IPR006119,IPR038109, PF07508,IPR011109,SSF53041,PTHR30461, PS51736,Coil,PF00239
MQETNISINEIIMYLRKSRSDDPYMTVEEVLARHERQLQDYALSSFGSIIPEERIFREVVSGETIADRPVMQSVMKYLESGQIKGVLVIEPQRLSRGDLEDCGRIINAFRYTNTLVLTPPKTYNLSDEYDRKFFEMELTRGNDYLEYTKKILNRGRLASVKQGNYIGSIAPYGYRKIKTGSGKDTAHTLEIVPEQADAVRMMAQLYLAGNGFTRIAAHLDSLGIKPLKSDHWSSAAISDILSNPVYIGMIRWNHFKTIKTMQNGQIVKSRPTNRGTDYILVPGKHPAILDQGTFDAIAQRRGKSPKIKRGHELRNPFAGLVFCGTAGCGRSMTFKQFTNYRSKVPRRSESMICPNQRICHTKSVQYSAFVERVKEILSKTVDDFEIKLQNDDGNIVRIHENIIRNLEQDLVKLKDKDLRQKDAYEDGIYTKEEYASRNAKLQEQICEVQLSIQRAKDTMPPEVDYQERVSRFSDCLSKFEDTDISASEMNLLLKSCIEKIIYHNSSESKPGIGRFVANPFELDIYLRL

SEQ ID NO: 3576 - protein, 528 aa, Unknown
  Description of Unknown: Integrase B3577 sequence
  SM00857,G3DSA:1.10.10.2600,IPR036162,PF13408,PS51737, G3DSA:3.40.50.1390,IPR025827,IPR006119,IPR038109,PF07508, IPR011109,SSF53041,PTHR30461,Coil,PS51736, cd00338,PF00239
MAYCIYLRKSRADRELELQGFGETLKRHRDTLIELAKKKNLPIGEIYEEVVSGDSIAARPQMQRLLNDVSDGKWEGVLVMEIERLARGDTSDQGIVTKTFTYSNTLIITPMKTFNPTDEFDQEYFEFGLYMSRREYKTIKRRLHAGMEASCKEGNYIHHTPPFGYSIVKNKKSKGYRLEPKPGEAEIVKLIFQWYTKGILKEDGSYELLGTARIADKLNSEYSIKPLGGVWTIPTISTMLRNEHYLGYVVFGKKKRKKVVENGIIVDKWTRNESYGLYKGKHPALVSQETFNLAQERLSRNPRRPSKTITNPLAGVIKCGMCGRSMYRRPYQKRGQSASLICSEKTCHNVSSAFYLVEDALLTAIKEWIDGYEIKEEANKYDTSVLESKTKLLEEQQKQLITYKNQLTKVFEAYENGIYDSDTFLNRQKTVSESISSTEEAIVRLNKEIANEREIISHQEEIIPKAKKILEIYKTSDDVQLKNDLMKSILDKVVYTKTANGHFKDQRQDDFKLELFPKLPKNKGNSSE

SEQ ID NO: 3577 - protein, 528 aa, Unknown
  Description of Unknown: Integrase B3578 sequence
  SM00857,G3DSA:1.10.10.2600,IPR036162,PS51737,G3DSA:3.40.50.1390, IPR006119,IPR038109,PF07508,IPR011109,SSF53041, PTHR30461,Coil,PS51736,cd00338,PF00239
MQETNISINEIIMYLRKSRSDDPYMTVEEVLARHERQLQDYARSSFGSTIPEERIFREVVSGETIADRPVMQSVMKYLESGQIKGVLVIEPQRLSRGDLEDCGRIINAFRYTNTLVLTPPKTYDLSDEYDRKFFEMELTRGNDYLEYTKKILSRGRLTSVKQGNYIGSIAPYGYRKIKTGSGKDTAHTLEIVPEQADAVRMMAQLYLAGNGFTRIAAHLDSLGIKPLKSDHWSPAAISDILSNPVYIGMIRWNHFKTIKTMQNGQIVKSRPTNHGTDYILVPGKHPAILDQETFYAIAERRGKSPKVKRDHELRNPFAGLVYCGTVGCGRSMALKQFTNYRSKVPRRSESMICPNQRICHTKSVQYSAFVERVKEILSKTVDDFEIKLQNDDGNIVRIHENIIRNLEQDLVKLKDKDLRQKDAYEDGIYTKEEYASRNAKLQEQICEVQLSIQRAKDTMPPEVDYQERVSRFSDCLSKFEDTDISASEMNILLKSCIEKIIYHNSSESKPGIGRFVANPFELDIYLRL

SEQ ID NO: 3578 - protein, 528 aa, Unknown
  Description of Unknown: Integrase B3579 sequence
  SM00857,G3DSA:1.10.10.2600,IPR036162,PF13408, IPR025827,G3DSA:3.40.50.1390,PS51737,IPR006119, IPR038109,PF07508,SSF53041,IPR011109, PTHR30461,Coil,PS51736,cd00338,PF00239
MKMMQNDNRTAITYYRYSSHRQGEQSIEGQRAEAERWAKANGYTIVKEYADRAMTGTNDDRDQFQLMLRELERLRPAVLILWKVDRMGRNKEEIAFNKYRCKKNGTRVIYTAESIPDTPEGVILESVLEGMAEYYSLQLSQNVRRGHRVSASKCQSTGGACPLGYRVGPDKHLEIDPEKAAIVRQVFERYANGETQPEIIQSLNEQGLRTLRGKPFSRNSLRTVLKNEKYIGVYTYNHGEVRVEGGVPAIIDVEMFQKAQKMLKFNKRSSSHKWTKANYLLTGKLFCGCCGEQMCGVSGYSSTKVKYHYYACSGHHNYKKARSTCRKKNVKKEWIEGLVLREAKLLLLNEDLLDFIAENTYQYYVEANTDTAYTDALQANLREIERSLENIMRAVEAGIFNDTTKARMEELEAQKQQIQHALDLTKLDRGLQLTKDHILYFLKRFRDLDFENAACQRQIIDTFINSVFVYDDHITLTFNYSGDDRTITLAETDAAAGGESFVFAPSCGTKKGLSQNDFSKSYEAVPFF

SEQ ID NO: 3579 - protein, 528 aa, Unknown
  Description of Unknown: Integrase B3580 sequence
  cd00338,SM00857,G3DSA:1.10.10.2600,IPR036162,PS51737, G3DSA:3.40.50.1390,IPR006119,IPR038109,PF07508,SSF53041, IPR011109,PTHR30461,PS51736,Coil,PF00239
METYCIYLRKSRADADAEARGEGETLARHEHILSELAKKQKYHISKVYREIVSGETIAARPQMQQLLQDVESGIYAGVLVMEVERLARGDTIDQGIVAQAFKYSDTKIITPVKTYDPNNEYDEEYFEFSLFMSRREYKTIKRRMQAGRFAAAKEGKYVGNVPPYGYDRQKLDHDSGFTLVPNPEEAKIVKMIFEWYVHGAIMEDGTKQRLGSTLIAYRLHDMGFTTRKGERWSLHTVRSILTNPVYAGMIRWGYRPQKKIMKNGAVTRSRPNITTDDYVLVRGLHEPLISQEDYDAAQELAHDKRTIPKVNVDKTLKNPLAGIVICKKCGRSMTRRPYGAKLRQDTILCKTPDCDNVASDLYLVEQRILDSLQAWLHQYEMQWQEHQPSTGIDNSEQIAAIDALKKEQEKAKQQLEKAYDLLEQGIYDTNTFVERSTTLKAKIADTQKRIEKLEHNMQEQSSREREMQELIPKVRHLLAVYDTLPDAAAKNQMLCQVIEKAEYYKAHSARWHGSVDDFDVVVYPKLPR

SEQ ID NO: 3580 - protein, 528 aa, Unknown
  Description of Unknown: Integrase B3581 sequence
  SM00857,G3DSA:1.10.10.2600,IPR036162,PF13408, IPR025827,G3DSA:3.40.50.1390,PS51737,IPR006119, IPR038109,PF07508,IPR011109,SSF53041, PF00239,PTHR30461,PS51736,Coil,cd00338
MAYCIYLRKSRADRELELQGFGETLKRHRDTLIELAKKKNLPIGEIYEEVVSGDSIAARPQMQRLLNDVSDGKWEGVLVMEIERLARGDTSDQGIVTKTFTYSNTLIITPMKTFNPTDEFDQEYFEFGLYMSRREYKTIKRRLHAGMEASCKEGNYIHHTPPFGYSIVKNKKSKGYRLEPKPGEAEIVKLIFQWYTKGILKEDGSYELLGTARIADKLNSEYSIKPLGGVWTIPTISTMLRNEHYLGYIVFGKKKRKKVVENGIIVDKWTRNESYGLYKGKHPALVSQETFNLAQERLSRNPRRPSKTITNPLAGVIKCGMCGRSMYRRPYQKRGQSASLICSEKTCHNVSSAFYLVEDALLTAIKEWIDGYEIKEEANKYDTSVLESKTKLLEEQQKQLITYKNQLTKVFEAYENGIYDSDTFLNRQKTVSESISSTEEAIVRLNKEIANEREIISHQEEIIPKAKKILEIYKTSDDVQLKNDLMKSILDKVVYTKTANGHFKDQRLDDFKLELFPKLPKNKGNSSE

SEQ ID NO: 3581 - protein, 528 aa, Unknown
  Description of Unknown: Integrase B3582 sequence
  PTHR30461:SF3,cd00338,SM00857,G3DSA:1.10.10.2600,IPR036162, PF13408,IPR025827,G3DSA:3.40.50.1390,PS51737,IPR006119, IPR038109,PF07508,SSF53041,IPR011109,PTHR30461, PS51736,Coil,PF00239
MDSSPFLMQERMGIELMAKNKKAGFEPDMQDAVIYTRYSSHNQRDCSIEQQVADCEIFARQNNLRVVKVYADRHLSGTTDNRPQFQQMLKDATHGHWAYVICWKIDRFARNRYDSATYKFRLKKAGVRVLYAKESIPDGPEGILLESVLEGSAEYYSAALAQNIRRGMKYNAEQCKVNSGSIPFGYCKGADGRFAIHEANAEVVREIFRKAAGGMPFVDIANDLNSRGLKTSRGGRWNKGSFRLLMNEAYIGVYHFSDTRIEGGMPALIDQGTFWAANERLKANSSVRGRHQDGGDYLLTGKLKCAHCGSYMIGFSGTGKNGELHYYYGCQKRRRERACKKANVPREWIERVVVKAALDYVLRPDVMEWIADAVMEYQERGAASAQLAALTAELEENQKATDNVMKAIEAGIITSTTKQRLLDLEAKAQDLKRAIELEKLSHVRLERDQVLFWLDRFRGGSLQSQEFRRKVIDAFVSVVYLSDDHLRIAFNYSGGSNAEADFDLVMDAEAAAGELSKKFAQGHVASTN

SEQ ID NO: 3582 - protein, 528 aa, Unknown
  Description of Unknown: Integrase B3583 sequence
  SM00857,G3DSA:1.10.10.2600,IPR036162,PF13408,PS51737, IPR025827,G3DSA:3.40.50.1390,IPR006119,IPR038109,PF07508, IPR011109,SSF53041,PTHR30461,Coil,PS51736, cd00338,PF00239
MAYCIYLRKSRADRELELQGFGETLKRHRDTLIELAKKKNLPIGEIYEEVVSGDSIAARPQMQRLLNDVSDGKWEGVLVMEIERLARGDTSDQGIVTKTFTYSNTLIITPMKTFNPTDEFDQEYFEFGLYMSRREYKTIKRRLHAGMEASCKEGNYIHHTPPFGYSIVKNKKSKGYRLEPKPGEAEIVKLIFQWYTKGIVKEDGSYELLGTARIADKLNSEYSIKPLGGVWTIPTISTMLRNEHYLGYIVFGKKKRKKVVENGIIVDKWTRNESYGLYKGKHPALVSQDTFNLAQERLSRNPRRPSKTITNPLAGVIKCGMCGRSMYRRPYQKRGQSASLICSEKTCHNVSSAFYLVEDALLTAIKEWIDGYEIKEEANKYDTSVLESKTKLLEEQQKQLITYKNQLTKVFEAYENGIYDSDTFLNRQKTVSESISSTEEAIVKLNKEIANEREIISHQEEIIPKAKKILEIYKTSDDVQLKNDLMKSILDKVVYTKTANGHFKGQRQDDFKLELFPKLPNNKGDSSE

SEQ ID NO: 3583 - protein, 528 aa, Unknown
  Description of Unknown: Integrase B3584 sequence
  PTHR30461:SF3,SM00857,G3DSA:1.10.10.2600,IPR036162,PF13408, IPR025827,PS51737,G3DSA:3.40.50.1390,IPR006119,IPR038109, PF07508,IPR011109,SSF53041,PF00239,PTHR30461, PS51736,Coil,cd00338
MKAVIYARFSSHNQREESIEGQVRACQRFAKEHDMTVIEIYADRGLSGLHADNRPEFQRMIADSDRHKFQALIMWNLDRFSRDKYDTAVYKSRLKKNGVTLYYSDQNIPDTPEGIILESLLEGFAQYYSANLSRNAKRGLQENARKCLWNGGGLPLGYTIDETKHFVIDPAGAACVRLIFQMYADNHSIKEIVSTLNEKGYRTVKGNKFRLGSIQGVLRNRKYIGEYHASGITVPNGVPAIVDVELFNAVQEKIGVVSTAKARNKAEIPYLLTTKVFCGHCGSPMIGESGTGKGGSTYRYYKCSCRKNRKGQCDKRTEQKEWLEETVVAQTVEKFLHPNVIEDVSNACAAVLEQDCQNNALLKALNAQLADVEKSSRNLIKAIEAGVFTASMRERLAELEQQKEDITVQIAREQLRKPQLSAEQIAFFLRSFLDGDAHDPNFQERIIESLVRRVDVYDEGSGNRKLTVFYNLKKNNHSSVSVKCSDSESVGLPKRSVAKAADFFIRFLQKDENRTAVNTVPFGTVEPP

SEQ ID NO: 3584 - protein, 528 aa, Unknown
  Description of Unknown: Integrase B3585 sequence
  SM00857,G3DSA:1.10.10.2600,IPR036162,PF13408,IPR025827, G3DSA:3.40.50.1390,PS51737,IPR006119,IPR038109,PF07508, SSF53041,IPR011109,PF00239,PTHR30461,PS51736, Coil,cd00338
MAYCIYLRKSRADRELELQGFGETLKRHRDTLIELAKKKNLPIGEIYEEVVSGDSIAARPQMQRLLNDVSDGKWEGVLVMEIERLARGDTSDQGIVTKTFTYSNTLIITPMKTFNPTDEFDQEYFEFGLYMSRREYKTIKRRLHAGMEASCKEGNYIHHTPPFGYSIVKNKKSKGYRLEPKPGEAEIVKLIFQWYTKGILKEDGSYELLGTARIADKLNSEYSIKPLGGVWTIPTISTMLRNEHYLGYIVFGKKKRKKVVENGIIVDKWTRNESYGLYKGKHPALVSQETFNLAQERLSRNPRRPSKTITNPLAGVIKCGMCGRSMYRRPYQKRGQSASLICSEKTCHNVSSAFYLVEDALLTAIKEWIDGYEIKEEANKYDTSVLESKTKLLEEQQKQLITYKNQLTKVFEAYENGIYDSDTFLNRQKTVSESISSTEEAIVKLNKEIANEREIISHQEEIIPKAKKILEIYKTSDDVQLKNDLMKSILDKVVYTKTANGHFKDQRQDDFKLELFPKLPKNKGDSSE

SEQ ID NO: 3585 - protein, 528 aa, Unknown
  Description of Unknown: Integrase B3586 sequence
  PTHR30461:SF3,cd00338,SM00857,G3DSA:1.10.10.2600,IPR036162, PF13408,IPR025827,G3DSA:3.40.50.1390,PS51737,IPR006119, IPR038109,PF07508,IPR011109,SSF53041,PTHR30461, PS51736,Coil,PF00239
MKVVGYCRFSSEGQKDGYSIEAQTEAIRSYCEINNHTLLRFYIDEAKTGTQDDREGFLDMIDDTKSGEFEAIVVHKLDRFARNRYDSAIYGRILEDRKVRLLSVLEPIIADDSPESLLFRGIVETMNEYYSRNLSRETLKGQRIAARNAQHLGGAVPFGYDLTKDKHYTPNPTEAPIVLEIYTRLDAGQSSIAVARWLNTRGLLTRHHKQFTGSSVLNLVKSPIYIGRYVWGATSKRKGVTPIVVENACEPLVPKDLFDRVNAVISARKTGPVGRNRDVDYLLTGVLYCEYCGRHLYGFKSHAHYTLKSTGEVRDYTVYKYRCSHDNRQSFNRKTDDGYVKEVCPLKMLPKDDIESFVGDAVRSVIFAPDSAAWISGVLQERMKTIIPGNPDAVKKVDANIRATSTKQQRLLDLYLDGGIDKAAYNQKSRELNEQMQYLSAERAKMQTPPPDVSIEAIKSAIAKYSESASVKSVESTKMLIDTFVDHIDVSNEHIVIFFNVEFPFLPECSTFDFVRSGKNALPKLFAK

SEQ ID NO: 3586 - protein, 528 aa, Unknown
  Description of Unknown: Integrase B3587 sequence
  SM00857,G3DSA:1.10.10.2600,IPR036162,PS51737,G3DSA:3.40.50.1390, IPR006119,IPR038109,PF07508,IPR011109,SSF53041, PTHR30461,Coil,PS51736,cd00338,PF00239
MQETNISINEIIMYLRKSRSDDPYMTVEKVLARHERQLQDYALSSFGSIIPEERIFREVVSGETIADRPVMQSVMKYLESGQIKGVLVIEPQRLSRGDLEDCGRIINAFRYTNTLVLTPPKTYDLSDEYDRKFFEMELTRGNDYLEYTKKILNRGRLASVKQGNYIGSIAPYGYRKIKTGSGKDTSHTLEIVPEQADAVRMMAQLYLAGNGFTRIAAHLDSLGIKPLKSDHWSPAAISDILSNPVYIGMIRWNHFKTIKTMQNGQIVKSRPTNHDTDYILVPGKHPAILDQGTFDAIAQRRGKSPKIKRGHELRNPFAGLVFCGTTGCGRSMTFKQFTNYRSKVPRRSESMICPNQRICHTKSVQYSAFVERVKEILSKTVDDFEIKLQNDDGNIVRIHENIIRNLEQDLVKLKDKDLRQKDAYEDGIYTKEEYASRNAKLQEQICEMQLSIQRAKDTMPPEVDYQERVSRFSDCLSKFEDTDISASEMNLLLKSCIEKIIYHNSSESKPGIGRFVANPFELDIYLRL

SEQ ID NO: 3587 - protein, 528 aa, Unknown
  Description of Unknown: Integrase B3588 sequence
  SM00857,G3DSA:1.10.10.2600,IPR036162,PS51737, G3DSA:3.40.50.1390,IPR006119,IPR038109,PF07508, IPR011109,SSF53041,PTHR30461,Coil, PS51736,cd00338,PF00239
MQETNISINEIIMYLRKSRSDDPYMTVEEVLARHERQLQEYALSSFGSIIPEERIFREVVSGETIADRPVMQSVMKYLESGQIKGVLVIEPQRLSRGDLEDCGRIINAFRYTNTLVLTPPKTYDLSDEYDRKFFEMELTRGNDYLEYTKKILNRGRLASVKQGNYIGSIAPYGYRKIKTGSGKDTAHTLEIVPEQADAVRMMAQLYLAGNGFTRIAAHLDSLGIKPLKSDHWSPAAISDILSNPVYIGMIRWNHFKTIKTMQNGQIVKSRPTNHDTDYILVPGKHPAILDQGTFDAIAQRRGKSPKIKRGHELRNPFAGLVYCGTAGCGRSMTFKQFTNYRSKVPRRSESMICPNQRICHTKSVQYSAFVERVKEILSKTVDDFEIKLQNDDGNIVRIHENIIRNLEQDLLKLKDKDLRQKDAYEDGIYTKEEYASRNAKLQEQICEVQLSIQRAKDTMPPEVDYQERVSRFSDCLSKFEDTDISASEMNLLLKSCIEKIIYHNSSESKPGIGRFVANPFELDIYLRL

SEQ ID NO: 3588 - protein, 528 aa, Unknown
  Description of Unknown: Integrase B3589 sequence
  SM00857,G3DSA:1.10.10.2600,IPR036162,PS51737,G3DSA:3.40.50.1390, IPR006119,IPR038109,PF07508,IPR011109,SSF53041, PTHR30461,Coil,PS51736,cd00338,PF00239
MQETNISINEIIMYLRKSRSDDPYMTVEKVLARHERQLQDYALSSFGSIIPEERIFREVVSGETIADRPVMQSVMKYLESGQIKGVLVIEPQRLSRGDLEDCGRIINAFRYTNTLVLTPPKTYDLSDEYDRKFFEMELTRGNDYLEYTKKILNRGRLASVKQGNYIGSIAPYGYRKIKTGSGKDTSHTLEIVPEQADAVRMMAQLYLAGNGFTRIAAHLDSLGIKPLKSDHWSPAAISDILSNPVYIGMIRWNHFKTIKTMQNGQIVKSRPTNHDTDYILVPGKHPAILDQGTFDAIAQRRGKSPKIKRGHELRNPFAGLVFCGTTGCGRSMTFKQFTNYRSKVPRRSESMICPNQRICHTKSVQYSAFVERVKEILSKTVDDFEIKLQNDDGNIVRIHENIIRNLEQDLVKLKDKDLRQKDAYEDGIYTKEEYASRNAKLQEQICEVQLSIQRAKDTMPPEVDYQERVSRFSDCLSKFEDTDISASEMNLLLKSCIEKIIYHNSSESKPGIGRFVANPFELDIYLRL

SEQ ID NO: 3589 - protein, 527 aa, Unknown
  Description of Unknown: Integrase B3590 sequence
  cd00338,SM00857,G3DSA:1.10.10.2600,IPR036162, PF13408,IPR025827,PS51737,G3DSA:3.40.50.1390, IPR006119,IPR038109,PF07508,IPR011109, SSF53041,PTHR30461,PS51736,Coil,PF00239
MYYLMYLRKSRADLEAEARGEGETLARHRRALRELAARNGHEIRREYAEIVSGETIASRPQMQHLLMDIADPECEGVYVMEVERLARGDTMDQGRVAQAFLYSNTKIITPAKTYDPRNEFDQEYFEFGLFMSRREYKTINRRIQAGRIQSVQEGKFPSSVAAYGYRKVRVPGGKGYTLEVNPEEAAVVRQIYQWYVHGIDGKPAGVARIVRQLEKLSIPSGERSPGWRAARINRMLHNEVYIGKVRWGHISVQRTLTPDGVQAKRAVSHNYRLYEGLHPAIVEEELFQAAQRKLTGTRVPLRNGMALANPLAGLVFCKHCGHQMTGQTASGKRAAQIFCKMHGCPTVANARGPVEDAILGELRAWLDDYQAHIDPFRKLTQGDNEERSLLEKALAQQEEQKKKLLKQKSSLHDLLEEGVYDVTTFQERLAALQIRLRETDAAMEAAKAQLGTLGPQYRPAEQLMPAVQHVLDVYHTTASAQEKNDLLKSVISRIVYDKTVRGTTSPKSNPNSFQLDIFPALLTDLRP

SEQ ID NO: 3590 - protein, 527 aa, Unknown
  Description of Unknown: Integrase B3591 sequence
  PTHR30461:SF3,SM00857,G3DSA:1.10.10.2600,IPR036162,PS51737, G3DSA:3.40.50.1390,IPR006119,IPR038109,PF07508,IPR011109, SSF53041,PTHR30461,Coil,PS51736,cd00338, PF00239
MYELTQSMESLSVDEIIVYLRKSRSDSPEMSVEDVLKKHEEMIQDYANTHFGSPIPEKNIYREVVSGETIDSRPQVKIVLQKIESPQIKAVLIVEPQRLSRGDLEDCGRLINILRYTNTMVLTLTHSFNLQEEYERKFFEMEITRGNDYLEYTKRILRRGRESSAAKGHYIGSVDPYGYRKIVIKKDGVNCHTLEIVPEEANVVKLIHELYAYTPGGIGFTNIAHKLDSMNLKPKKAAHWTPAIISSILCNPLYLGLIRWDTRKVVKYINNGQLEKSRPRSSDAKYYKGLHEPIISQELYDACMARRGTNPSLRRNKALCNPFAGLLYCGTCGHAMSLKIYKNHNSVSQIILCNHQSYCHTKSVLYSAFLERFISSMENTIHDFELALLADDGNAQAVNQSIVANLETRLKKLQEKDMRQKDAYEDGIYSKEEFLERNIKTQQEIASTITALTAAKETKENYVDYGEKIRRFRDCINALNDPELSATEKNQFLKSCVSKIIYYNNMESKAGVGRYVENVFSLEIQYI

SEQ ID NO: 3591 - protein, 527 aa, Unknown
  Description of Unknown: Integrase B3592 sequence
  PTHR30461:SF3,cd00338,SM00857,G3DSA:1.10.10.2600,IPR036162, PF13408,PS51737,G3DSA:3.40.50.1390,IPR025827,IPR006119, IPR038109,PF07508,IPR011109,SSF53041,PTHR30461, PS51736,Coil,PF00239
MARKKNIAAGQNAVIYARYSSHNQREVSIEQQVRECMKHAAELGLHVVGTYEDRAISGKTDKRPNFQRMMRDAEKGKFQAVVAWKSNRIGRNMLQAMVNEAKLEDCGVKVFYAEEDFDDTAAGRFALRNMMNVNQFYSENMAEDITRGLYDNASKCMANGRQPLGYKRGEDGRVVLDEANAAVVREIFTRVAAGDLFVDIARDLNAQGIKTSKGANWNKGSFQSICQNERYRGIYIYGDVRVADGIPRIVSDDLWYRVQEAMRMKKNPVGTRHRVGAEDYLLTGKLRCGHCGSYMTGVSGTSRNGELHYYYTCQKRRTEHACDKKNIRRDVIEPAVAQAIKMYCLTDDVIAWIADRTVEYWEKHDNDLQIEALEQQLEENKKATSNMLKAIEMGIITEATRTRMVELETEQSRLSVQLNVAKEDVVKIDREQIISYLELLQQGDIHDRDFQMELFKNFLVAVYVYDDNRMKLVFSCMGDQNSVEIPLETGEDPPDGGLSPDAKMFVLTPDSSTRNESTTQKCVVLFC

SEQ ID NO: 3592 - protein, 527 aa, Unknown
  Description of Unknown: Integrase B3593 sequence
  PTHR30461:SF3,SM00857,G3DSA:1.10.10.2600,IPR036162,PF13408, PS51737,G3DSA:3.40.50.1390,IPR025827,IPR006119,IPR038109, PF07508,SSF53041,IPR011109,PTHR30461,Coil, cd00338,PF00239
MPKKTAKHPAKPKRGKKLEIEEPGVLYGRYSSHNQKDISVEQQFEKGYELAAEYGIRIIDTYADRAVSGRTDKRKDFQRMMSEAAKGKFRYVIAWKSNRMGRNMLEALINEARLQELGVRVLYVEEDFDDTAAGRFAARSMMNVNQFYSENMAEDIKRGLYDNASNCMVANGHLPYGYKRDETLHYVIDEPKAAVIREIFTRVAAGEPFVDIMNSLNARGIKTSYNRPWGRSSFQKILSNERYRGIYIYGDVRKEDGIPRIISDELFFKVQEVITTKKNPQGRHRVNGDYLLTGKLFCGKCKSPMVGISGTGRSGKLHYYYVCQKHRTEKTCGKKNVRRDEIELQVAQAIKDYALKDDVIEWIADSTVAYNERKEAESKVGILEDQLTGTERSIKNIMSAIEQGIITETTKSRLVELESERATIKAKIAAARADIVTVSRDDIISGLEMFRDGDVYDKKYQARLFDTFLVAVYVYDDDLRLVFSFSGNKNTIQIPIESAVNAVENNAAECSFKLCSAPPEHRKPAIH

SEQ ID NO: 3593 - protein, 527 aa, Unknown
  Description of Unknown: Integrase B3594 sequence
  PTHR30461:SF3,SM00857,G3DSA:1.10.10.2600,IPR036162,PS51737, G3DSA:3.40.50.1390,IPR006119,IPR038109,PF07508,IPR011109, SSF53041,PTHR30461,Coil,PS51736,cd00338, PF00239
MYELTQSMESLSVDEIIVYLRKSRSDSPEMSVEDVLKKHEEMIQDYANTHFGSPIPEKNIYREVVSGETIDSRPQVKIVLQKIESPQIKAVLIVEPQRLSRGDLEDCGRLINILRYTNTMVLTLTHSFNLQEEYERKFFEMEITRGNDYLEYTKRILRRGRESSAAKGHYIGSVDPYGYRKIVIKKDGVNCHTLEIVPEEANVVKLIHELYAYTPGGIGFTNIAHKLDSMNLKPKKAAHWTPAIISSILCNPLYLGLIRWDTRKVVKYINDGRLEKSRPRSSDAKYYKGLHEPIISQELYDACMARRGTNPRLRRNKELCNPFAGLLYCGTCDHAMSLKIYKNHNSVSQIMLCNHQSYCHTKSVLYSAFLERFISSMENTIHDFELALLADNGNAQAVNQSIVANLETRLKKLQEKDMRQKDAYEDGIYSKEEFLERNIKTQQEIASTITALTAAKETKENYVDYGEKIRRFRDCINALNDPELSATEKNQFLKSCVSKIIYYNNMESKAGVGRYVENVFSLEIQYI

SEQ ID NO: 3594 - protein, 527 aa, Unknown
  Description of Unknown: Integrase B3595 sequence
  PTHR30461:SF3,SM00857,G3DSA:1.10.10.2600,IPR036162,PF13408, IPR025827,G3DSA:3.40.50.1390,PS51737,IPR006119,IPR038109, PF07508,SSF53041,IPR011109,PTHR30461,Coil, PS51736,cd00338,PF00239
MNIVIYARYSSHSQTEQSIEGQLQTCYEFAKNNGHIVIGEYIDRAQSGTTDSRAEFQRMIADSDRHTFEAVLVYQLDRFARNRYDSAINKAKLKKNGVRVISARENISDDASGILVEGVLESMAEYYSAELSQKIRRGMDINAEKCLSNGSNPGLGYYVDEERRFYVDPEGAAVVREIFEMYASGKTVADITKYLNAKQVKTSLGKEFNKNSLHRLLRNKRYIGYYIYKDTETPDGMPRIIEDELFERVQHILDRNKKAPARSRGKEEYLLTTKLFCGYCREMMTGYGGTGKSGKTYHYYACNNFKRRKCKKKVVNKQRIEDRVVLECRKLLTESNIEKIAISVSAACEADYDSSAIKRIKAAIQEADTAIENLWKALERGQSVDMITERIEKRKREKDELQGQLAIEMGKQITFTAPQIKAFLYSLKRGNINDEHNRRGIINIFLRAIYLFDDRFTLILNGGDRQITIDNILIDEIEEHFEDAVSSHAECSPLVADAPLHDVNPNLFVLTKNASHYGFGVLFGKEV

SEQ ID NO: 3595 - protein, 527 aa, Unknown
  Description of Unknown: Integrase B3596 sequence
  PTHR30461:SF3,cd00338,SM00857,G3DSA:1.10.10.2600,IPR036162, PF13408,IPR025827,G3DSA:3.40.50.1390,PS51737,IPR006119, IPR038109,PF07508,SSF53041,IPR011109,PTHR30461, PS51736,Coil,PF00239
MAKKKKPAGGNAIIYARYSSHNQRDVSIEQQIEACRKHAAELGLTITDTYEDRAISGRTDNRPAFQRMMRDAEDGKFQYVLAWKSNRMGRNMMQAMVNESRLMDCGVKVFYAEEDFDDSAAGRFALRSMMNVNQFYSDNLAEDVRRGLMDNASKCMANGRQPLGYKRGEDGKVVVDEPAAAIVREIYTRIASGEMFMDIARDLNRRGIKTQSGSEWNKSSFKVLCRNERYRGIYIYGDTRIEGGIPPIVDDVLWYKVQEVLKVKKSKNRHHCPSDEDYLLTGKLRCGKCGGYMIGMSGRSKTGDVHHYYACQNRRVGHTCDKKNIRRDVVEPAVAQAIKQYCLTDDAIEWITDQTIAYWEDEDRKLQIDSIENDLSAVQSSISNVMKAIEMGVITETTRDRLIELERQQTDLKSKLALAKEEIVHVDRKDLISSLLAFRHGNVHDRAYQEKLFNAFLIAVYVYDDDHLKLVFNSFGKDDTVNIALDLGENDDNSGLSDVSKSSPILSNGQPKDIRTFRMSFFVLFYL

SEQ ID NO: 3596 - protein, 527 aa, Unknown
  Description of Unknown: Integrase B3597 sequence
  PTHR30461:SF3,cd00338,SM00857,G3DSA:1.10.10.2600,IPR036162, PF13408,PS51737,G3DSA:3.40.50.1390,IPR025827,IPR006119, IPR038109,PF07508,IPR011109,SSF53041,PTHR30461, PS51736,Coil,PF00239
MYEEIKTACLYLRYSSSNQTEQSIEGQMHVCQDFCKRHNIRIVEMYIDRATSASKDIEKRVEFLKMIKDSEKGNFDAVIVYKLDRFARSRYDSATYKYRLKRNGVQLVSATENITQDPEGIILESVLEGMAEFYSAELSQKINRGMRESAMKHNSIGGAIPLGYKTVDKKLIVDETTAPIVREAFQMYADGESVAEICRTFNNRGYKTSKGTRFGKSSFTKIFRNEKYIGVYKYHDYRAEDVIPPIIDKALWDRVQVRIGKIKKAPARNKARHTYLLTGKLFCGHCGSAMNADGNSNGYLYYRCYGKKNLDKQCNKRNMEKNLIERLVAQDAMSFLTDEYIEKIATIACDRNRQEIESDSPIPVIRDRIRQVDVSLNNLLKAIETGSAPDMLVKRMGELETEKKDMEVQLKKEMAHQVYIDKEQVIFWLEKFREGDINDEEFCQTVIDLFVNSVTVWDEPDDKFRITIAYNLTSIPQKTYRLSKDGRLSDYASNTPPLSANPMISGSIMIHTFTVTVHPQKRGRKTL

SEQ ID NO: 3597 - protein, 527 aa, Unknown
  Description of Unknown: Integrase B3598 sequence
  PTHR30461:SF3,SM00857,G3DSA:1.10.10.2600,IPR036162,PS51737, G3DSA:3.40.50.1390,IPR006119,IPR038109,PF07508,SSF53041, IPR011109,PTHR30461,Coil,PS51736,cd00338, PF00239
MYELTQSMESLSVDEIIVYLRKSRSDSPEMSVEDVLKKHEEMIQDYANTHFGSPIPEKNIYREVVSGETIDSRPQVKIVLQKIESPQIKAVLIVEPQRLSRGDLEDCGRLINILRYTNTMVLTLTHSFNLTEEYERKFFEMEITRGNDYLEYTKRILRRGRESSAAKGHYIGSVDPYGYRKIVIKKDGVNCHTLEIVPEEANVVKLIHELYAYTPGGIGFTNIAHKLDSMNLKPKKAAHWTPAIISSILCNPLYLGLIRWDTRKVVKYISDGRLEKSRPRSSDAKYYKGLHEPIISQELYDACMARRGTNPRLRRNKELCNPFAGLLYCGTCDHAMSLKIYKNHNSVSQIMLCNHQSYCHTKSVLYSAFLERFISSMENTIHDFELALLADNGNAQAVNQSIVANLETRLKKLQEKDMRQKDAYEDGIYSKEEFLERNIKTQQEIASTITALTAAKETKENYVDYGEKIRRFRDCINALNDPELSATEKNQFLKSCVSKIIYYNNMESKAGVGRYVENVFSLEIQYI

SEQ ID NO: 3598 - protein, 527 aa, Unknown
  Description of Unknown: Integrase B3599 sequence
  SM00857,G3DSA:1.10.10.2600,IPR036162,PS51737,G3DSA:3.40.50.1390, IPR006119,IPR038109,PF07508,IPR011109,SSF53041, PTHR30461,Coil,PS51736,cd00338,PF00239
MQENISINQIIMYLRKSRSDDPCMTVEEVLARHERQLQDYAVASFGSPVPEHHIFREVVSGETIADRPVMRQLMHLLESGSVRGVLVIEPQRLSRGDLEDCGRIINAFRYTNTLVLTPPKTYDLSDEYDRKFFEMELTRGNDYLEYTKKILNRGRLASVKQGNYIGSVAPYGYRKVKIGSGKDTAHTLEIVPEQADAVRMMFQLYLAGNGFTRIAAELDALGIKPLKSDHWSPAAISDILSNPVYIGMIRWNHFKTIKTMQNGQIVKSRPTNHGTDYILVPGKHPAILDQETFYAIAERRGKSPKVKRDHELRNPFAGLVYCGTVGCGRSMALKQFTNYRSKVPRRSESMICPNQRICHTKSVQYSAFVERVKEILSKTVDDFEIKLQNDDGNIVRIHENIIRNLEQDLVKLKDKDLRQKDAYEDGIYTKEEYASRNAKLQEQICEVQLSIQRAKDTMPPEVDYQERVSRFSDCLSKFEDTDISASEMNILLKSCIEKIIYHNSSESKPGIGRFVANPFELDIYLRL

SEQ ID NO: 3599 - protein, 527 aa, Unknown
  Description of Unknown: Integrase B3600 sequence
  SM00857,G3DSA:1.10.10.2600,IPR036162,PS51737, G3DSA:3.40.50.1390,IPR006119,IPR038109,PF07508, IPR011109,SSF53041,PF00239,PTHR30461, PS51736,Coil,cd00338
MAYCLYLRKSRADIEAEAHGEGETLARHEKLLLEVAKRGHYNITQIYREIVSGETIAARPVVQKLLQEVEDGKWEGVLVVEVERLARGDTIDQGVMAQAFKYSGTKIITPLKVYDPANEFDEEYFEFGLFMSRREYKTIKRRLVRGRNASAKEGKWVSGLAPYGYERVRIKGDKGWTLRPVEEQADIVRFIFKLYTSGEEDDNGEVRRLGTYTISKRLDSLGVAPPSSAQYWNDRTVQCILQNPAYIGKVRWGVNKSKKRIVNNSIEVERYKAPADEVIYVDGLHSAIVDEAIFQKAQDLLKRSGPPPVPKRNSVVNPLAGILVCGKCGRSIVLRRGRIDILICHNRICDNVGSKYEYVEERLLQALSSWLDGYRLEWSDKLPADEQAILDLKQKALRKTVAELETLHKQLDRTHDLLEQGVYDTDTFLVRSRSLTERIAAAEEDISTLTAEVQADKERAASRLNVIPKVEKLLEVYPVLPSAQAKNEMLKEVLEKVEYAKNERSGRNGPFDNFELVLYPKLPPKIE

SEQ ID NO: 3600 - protein, 527 aa, Unknown
  Description of Unknown: Integrase B3601 sequence
  PTHR30461:SF3,SM00857,G3DSA:1.10.10.2600,IPR036162,PF13408, PS51737,IPR025827,G3DSA:3.40.50.1390,IPR006119,IPR038109, PF07508,IPR011109,SSF53041,PTHR30461,Coil, PS51736,cd00338,PF00239
MNVYRTREILKTCSIFDLKLKVAFYARVSTESEDQQVSIHHQDEYYRNFIAQNKNWVFVGAYIDNGISGIRTEKRDEFQRMMADAKTGKIDMIVTKEITRFARNTLDSIRYTRELLMYGVCVWFQNDNINTIDEDSELRLTIMSGIAQDESRKLSNRIKFGHAQSIKNGVVLGTRIYGYIKKDGKLTIDPKTAPMVKEIFEKYSTGEWSTSTIEKYLYKKGYRNYKGGKLSRDNIKKIIKNPKYKGYYCGGKVKIVDMFTKKQEFLPEDEWTMYKDDGNHVPQIVDESVWDKANVIMQTRSDAIKSHRTSFKQNNLFTGYIFCGNDGAPYWMKQHTIRGREDARWVCSYRIKNGAQSCNSFGIRERELRVMLADLINKSGDIQTAIEKYISLVEKNIDFSNDGTEISRLKNMILQIEKKKDKLLDLNLDGIITNSEYIEKSEKFKDEIESINNKLSELESKEEASKDFHLKLKEIGMILNDLQGVGPEDITKTVLGEFLDKIVINPKHPQECEILFFLKTGDVKKSQ

SEQ ID NO: 3601 - protein, 527 aa, Unknown
  Description of Unknown: Integrase B3602 sequence
  PTHR30461:SF3,cd00338,SM00857,G3DSA:1.10.10.2600,IPR036162, PF13408,IPR025827,G3DSA:3.40.50.1390,PS51737,IPR006119, IPR038109,PF07508,SSF53041,IPR011109,PTHR30461, PS51736,Coil,PF00239
MNTAVRTVTVIPPSINPMTHLTDTPLYKLRVAAYARVSTDSDEQFTSYEAQIDYYTQYIQRNQEWTFVKVYTDEGISGTNTKHRAGFNEMIEDALAGKIDLIVTKSVSRFARNTVDSLVTIRKLKEKGVQVYFEKENIYTFDGKGELLLTIMSSLAQEESRSISENVTWGQRKRFADGKVNLPYKQFLGYRKGADGFPEVVPEEAVIVRRIYTRFMEGLTPGAIAKELTADGIPTPSGKQRWQTSTVESILQNEKYKGAALLQKCFTVDFLTKKRKVNEGEVPQYYVEHSHEPIITPEEFDKVQTELARRKRISRQYSGKSIFSSRIVCGDCGSYFGSKVWNSTSKYRRVIWQCNGKFKGEHKCETPHLDEETIKARFVAATNAIIDSKDNILEDCRLMQTTLTDCTGIDAEIESLLEEIDVVAELTKRCIAENSQTAQNQNEYAARYNGFLERYEKAKAQLEQLRATKVAREAQAEAIGAFMFEVQELDALTNFDEKLWLTVIDTVTVHADGRMTFKFQGGTEIEA

SEQ ID NO: 3602 - protein, 527 aa, Unknown
  Description of Unknown: Integrase B3603 sequence
  PTHR30461:SF3,cd00338,SM00857,G3DSA:1.10.10.2600,IPR036162, PF13408,PS51737,G3DSA:3.40.50.1390,IPR025827,IPR006119, IPR038109,PF07508,IPR011109,SSF53041,PTHR30461, PS51736,Coil,PF00239
MSSVDKIAVIYARYSSHGQTEQSIEGQIAAAQKYAEQHGYTIIHIYADRAMTGRNDDREQFQKMLSDTAMHQFGVILLWKIDRFGRNREEIAFNRYRCKKNGVRVERVAEDVPDGPEGVILDSVLEGMAEYYSLQLAQNVRRGQRESAKKSMSIGGNKMLGYVVNPETKRYESDPKTASYVTEIFKRYANGETISEIVAWLNAQGIRTTRGSEFTVNSLHRLLKNEKYTGVYIFHDIRNEGGMPALTDRATFDKVQEMLKVNRRAPVRVWSKTEYLLTDKLFCGHCGAIMVGESGHGRNGTKHSYYTCLNRKKKKSCDKKPVRQDVIEPLVLRAIGKLLENPATLENIADQVWAAYERSDTSGDTIKALDKQIADVDRALSNVMKAIEMGIINEMTKTRMDELTNQKQALSQSRAEAGLTGGFKLTRDMILFFLQEMAALDMADRDSQKRLIKTFVNAIYLYDDHFDIAFNYTDNGKVAVRMQEINDAASGEVFGCCAQSPTKFKATFNENLNVAFTLYMRTKSLML

SEQ ID NO: 3603 - protein, 527 aa, Unknown
  Description of Unknown: Integrase B3604 sequence
  PTHR30461:SF3,cd00338,SM00857,G3DSA:1.10.10.2600,IPR036162, PF13408,IPR025827,G3DSA:3.40.50.1390,PS51737,IPR006119, IPR038109,PF07508,IPR011109,SSF53041,PTHR30461, PS51736,Coil,PF00239
MARKKNIAAGLDAVIYARYSSHNQREVSIEQQIAECTKHAAALGLRIVGTYEDRAISGKTDNRPRFQQMMRDAEKGKFQAVVAWKSNRIGRNMLQAMVNEAKLDDYGVKVFYAEEDFDDTAAGRFALRNMMNVNQFYSENMAEDITRGLYDNANKCMANGRQPLGYKRGEDGKVMLDEPAAAVVREIFTRVAAGDLFVDIARDLNAKGIKTSKGAAWNKGSFQSICQNERYKGIYIYGNVRIVDGIPRIVSDELWYRVQEAMRMKKNPVGTRHRVGAEDYLLTGKLRCGHCGSYMTGVSGTSRNGELHYYYTCQKRRTEHACNKKNVRRDVIEPAIAQAIKMYCLTDDVIEWMADQTVQYWEKHDNDLQIEALEQQLAENKKATSNMLKAIEMGIITEATRSRMVELETENSKLTAQLSAAKRDVVKINREDLIDELHILRSKDIHDREVQAELFKDFLVAAYIYDDNRLKLVFSFMGKDNSVEIPLETGEDPPDGEDSPDAKMFVLTPDCSTRNESTTQKCVVLFC

SEQ ID NO: 3604 - protein, 527 aa, Unknown
  Description of Unknown: Integrase B3605 sequence
  PTHR30461:SF3,IPR036162,PS51737,IPR011109,PTHR30461, PF00239,G3DSA:1.10.10.2600,IPR006119,PF14287,SSF53041, IPR025378,SM00857,IPR025827,cd03770,IPR038109, PS51736,PF13408,G3DSA:3.40.50.1390,PF07508
MIYNAALYCRLSKDDNNVGDSSSIVTQKDMLTRYAHEQNFCIYDVYIDDGYSGTNFDRPAFQKMKQDIENGKVNLVITKDLSRLGRDYIISGQLIEEYFPKHNVRYIAITDGFDSINKYNDIAPFKNVVNELYARDISKKIRSAFETKMKEGKFIGNFAPYGYKKDSEDKNKLIINEEIAPIVQYIFKLAEEGYRPIDIARALNEKHILPPALYRCSKNPKLNVDNYSKRKEWTSPNIQKMLKNITYIGHTAQHKTTKISFKSKVTLANQKKDWIIVENTHEPIIDKQTFEIVQKMIVSRKNPPKSDFKNIFSGIAICADCGSNMSTTGTRKKDSKYNLVCGKYKLYGSKECTNHFIDYDVLYKLVLTNINKHLKITPELRKKILSQLEQTKNNSTGADKRFIELNKRKTEIQTIIQKLYEDNYLGRINEDHFNMVLNSLTKEETQIDAEMSILTHKSNESEYDNYNRFFKLLDNFSDLTELNQDVIRRLIDVIYIYQGSYRTINGIKSKEQKIVIKYKYIGKSIIA

SEQ ID NO: 3605 - protein, 527 aa, Unknown
  Description of Unknown: Integrase B3606 sequence
  PTHR30461:SF3,SM00857,G3DSA:1.10.10.2600,IPR036162,PF13408, PS51737,G3DSA:3.40.50.1390,IPR025827,IPR006119,IPR038109, PF07508,IPR011109,SSF53041,PF00239,PTHR30461, PS51736,Coil,cd00338
MAREVRVIPASVHKFTTVPFGSTVRKKVAGYARVSTDLEEQLTSYEAQVDYYTKYIQNNPDWDFVEVYTDEGISATSTKRRDGFNRMIQDALDGKIDLIITKSVSRFARNTVDTLTTVRQLKEKGIEVYFEKENIHTLDSKGELLITIMSSLAQEESRSISENVTWGQRKRFADGKVSMPYKQFLGYDKGPGKHGTPVINEEQAEIVRLIYRLFLEGKTPSGIARYLTEQQIPTPGGKTKWQSGTVLSILTNEKYKGDAILQKCFTVDFLTKKQKVNEGEVPQYYVENSHPAIISPEVFDMVQTEVERRRSLPTRHSGVGLFASRIFCGDCGAAFGAKVWHSNDKYRKVIYQCNHKFKGKEKCSTPKLEEEQIKELFVKAVNLLITDAKEIIRNYEEVRPLIFDTACFDAEITELQEEMTVTAELIQKCVDENAHTAINQDKYKKKYDALVKRFEKAKKRLQEIHDTKRDREARRLQTDHFMRELKKQECIITEFDEVLWYTMVDRITVYNETDIRFTFKDGTEYRV

SEQ ID NO: 3606 - protein, 527 aa, Unknown
  Description of Unknown: Integrase B3607 sequence
  SM00857,G3DSA:1.10.10.2600,IPR036162,PF13408,IPR025827, G3DSA:3.40.50.1390,PS51737,IPR006119,IPR038109,PF07508, IPR011109,SSF53041,PTHR30461,Coil,PS51736, cd00338,PF00239
MAKKKKSLGGNAIVYARYSSHSQRDVSIEQQIDACKKHAEELGLTVIATYEDRAVSGRTDNRPAFQRMMRDAEAGKFRYVLAWKSNRIGRNMMQAMVNESRLMDCGVKVFYAEEDFDDSAAGRFALRSMMNVNQFYVENMVEDVKRGLYDNAKKGLVNGALPLGYKRGTDGKAEIDEPKAAIVREIYTRVAAGELFADIAADLNARGIRTARGREWSKGSFHVLCHNERYRGIYIYGDVRIPGGMPRIISDELFYDAQEAYNMKKDNRYGRTRVGADNYLLTGKLRCGHCGSYMVGVSGTSKTGDAHYYYSCQKHRLEHACNKKPIRRDIIESAVAQAIMTHCLNDDTIRFIVDSTISYFKQKEHELHIEEMENELASVNLSISNLMKAIEAGIITPTTRTRLMDLEDQQSRLSAKINTAKTNRVRINRNDLIAGLQLFRKGNIKDKKFLAKLFNTFLIAVYLYDDNRLKIVFSFAGNNSRVELPLELDQSYPEEDFDCIPLDMDVGRSSIKQVRTSPLLPHHKKRR

SEQ ID NO: 3607 - protein, 527 aa, Unknown
  Description of Unknown: Integrase B3608 sequence
  cd00338,SM00857,G3DSA:1.10.10.2600,IPR036162,PS51737, G3DSA:3.40.50.1390,IPR006119,IPR038109,PF07508,IPR011109, SSF53041,PTHR30461,PS51736,Coil,PF00239
MDAIDSTKSYAMYLRKSRKDDYNEDISEVLARHKTTLTALAKNMHLHVTKIYQEVVSGENISNRPEVQNLLRDVEKGLYAGVLVMEVERLARGDAIDQGIIQRTFFVTGTKIVTPMKTYDPLNEFDEEYFEYGLYRSRSEYKTIRRRINAGRMHSVKEGKWIASTAPYGYERKKLEKERGYTLIKVPEEAEIVELIFDLYINGMNGEIFGAGKISNYLDAMGIKPRISKHWSSATIRDMLKNPAYIGKVAWGREKDVKFVENGKIITKRIKQDDYMLYDAVWDDIISCESFEKAQQIMKSHVKPAVKKTDKLANPLSGIVYCEKCGRLMTRLGPNKHCKFDTLRCMTKGCDNISAPIYAIEDEIVSFLKSWITEQAITFQGNESISDKKNTELLTKQLALANQELFELNKQLEKTYDLLEREIYTEELFTQRNKTISENIKTIQKQVRHYESELKQLSENEKKRTLWLPKSIKLINAYDVTDSAELRNNLLKQLIYRVTYLKTERNHRGTVDNRNFKLSITPKIPQV

SEQ ID NO: 3608 - protein, 527 aa, Unknown
  Description of Unknown: Integrase B3609 sequence
  PTHR30461:SF3,SM00857,G3DSA:1.10.10.2600,IPR036162,PS51737, G3DSA:3.40.50.1390,IPR006119,IPR038109,PF07508,IPR011109, SSF53041,PTHR30461,Coil,PS51736, cd00338,PF00239
MYELTQSMESLNVDEIIVYLRKSRSDSPEMSVEDVLKKHEEMIQDYANTHFGSPIPEKNIYREVVSGETIDSRPQVKIVLQKIESPQIKAVLIVEPQRLSRGDLEDCGRLINILRYTNTMVLTLTHSFNLQEEYERKFFEMEITRGNDYLEYTKRILRRGRESSAAKGHYIGSVDPYGYRKIVIKKDGVNCHTLEIVPEEANVVKLIHELYAYTPGSIGFTNIAHKLDSMNLKPKKAAHWTPAIISSILCNPLYLGLIRWDTRKVVKYINDGQLEKSRPRSSDAKYYKGLHEPIISQDLYDACMARRGTNPSLRRNKELCNPFAGLLYCGTCDHAMSLKIYKNPNSVSQIMLCNHQSYCHTKSVLYSAFLERFISSMENTIHDFELALLADDGNAQAVNQSIVANLETRLKKLQEKDMRQKDAYEDGIYSKEEFLERNIKTQQEIASTITALTAAKETKENYVDYGEKIRRFRDCINALNDPELSATEKNQFLKSCVSKIIYYNNMESKAGVGRYVENVFSLEIQYI

SEQ ID NO: 3609 - protein, 527 aa, Unknown
  Description of Unknown: Integrase B3610 sequence
  SM00857,G3DSA:1.10.10.2600,IPR036162,PF13408,PS51737, G3DSA:3.40.50.1390,IPR025827,IPR006119,IPR038109,PF07508, IPR011109,SSF53041,PTHR30461,Coil,PS51736, cd00338,PF00239
MPEQYCLYLRKSRADMDAEKSGDEDTLLRHEKLLMQVAKSKNLNITDIYREVVSGETISARPQMQRLLSAVGQGVYTGVLVVEVERLARGDTIDQGLVAQAFKFSNTLIITPTKTYDPNNEFDEEYFEFGLFMSRREYKTINRRLQRGRIASVQEGKFVGSITPYGYDKVKLEHDKGYMLVPNPDEAPTVRLIFSLYVNGLPQEDGTTRRLGVTMICRYLNEHSIPNRTGNVWVNATVRDMIRNIVYDGKTRWNWRPTHKKMVDGIVKLERPRTKPDTWIISDGMHEPLIDHDTFVKAQVLIDSNPPRPIGERETVRNPLAGIVICGKCGRRMVRRPKGSRQPEDVIMCGCAACHNVSVYSRYLEGAIIDGLKSWVDTYKLQCSDDDVGTETIAALSEQRAAINKQIQDYKRQRENVYTLLEQGVYTTETFLQRLKIISDKIGVATSSLADLEQVVADEERRLRGKKSIIPKIENLLAAYWSLDSAAAKNDMLKEVIEKVVYEKDKGGRWADPTDFRIKIYPRLPRN

SEQ ID NO: 3610 - protein, 527 aa, Unknown
  Description of Unknown: Integrase B3611 sequence
  SM00857,G3DSA:1.10.10.2600,IPR036162,PS51737,G3DSA:3.40.50.1390, IPR006119,IPR038109,PF07508,IPR011109,SSF53041, PTHR30461,Coil,PS51736,cd00338,PF00239
MAYCLYLRKSRADIEAEAHGEGETLARHEKLLLEVAKRGHYNITQIYREIVSGETIAARPVVQKLLQEVEDGKWEGVLVVEVERLARGDTIDQGVMAQAFKYSGTKIITPLKVYDPANEFDEEYFEFGLFMSRREYKTINRRLVRGRNASAKEGKWVSGLAPYGYERVRIKGDKGWTLRPVEEQADIVRFIFKLYTSGEEGESGEVRQLGTYTISKRLDSLGVAPPSSAQYWNDRTVQCILQNPAYIGKVRWGVNKSKKRIVNNSIEIERYKAPADEVIYVDGLHPAIVDEAVFQKAQNLLKRSGPPPVPKRNSVVNPLAGILVCGKCGRSIVLRRGRIDILICHNRICDNVGSKYEYVEERLLQALSSWLDGYRLEWSDKLPADEQAILDLKQKALRKTVTELETLHKQLERTHDLLEQGVYDTDTFLVRSRSLTERIAAAEEDISALTAEVQADKERAASRLNVIPKVEKLLEVYPVLPSAQAKNEMLKEVLEKVEYTKNERSGRNGPFDNFELVLYPKLPPKIE

SEQ ID NO: 3611 - protein, 527 aa, Unknown
  Description of Unknown: Integrase B3612 sequence
  PTHR30461:SF3,SM00857,G3DSA:1.10.10.2600,IPR036162,PF13408, PS51737,IPR025827,G3DSA:3.40.50.1390,IPR006119,IPR038109, PF07508,IPR011109,SSF53041,PTHR30461, Coil,cd00338,PF00239
MKAVIYARYSPGPNQKDKSVEEQIADCRQFARENDIMIVGDYADRKKTGRNDNRAEFQKMLKDSAKGLFDAVIVWKIDRFGRNREEIAINKVKLRRNGVRVMYAKEHIPDGPEGIILESTLEGLAEYYSANLSQNIMRGMRGVAMKGQSTGGGGHSLGYYVDQDKYFQIDEHGAQIVRQIFEMYSSGKQASEIIKELNGRGLKTANGKPFNHNSIARILSNRRYIGEYRWHDILIPDGMPRIIDDETFERVQKRLEKNKKAPARKIQAGSEEEFLLTTKLFCGHCGATMIGDSGTGKSGKKYSYYTCSTRKRRKDGRKCDKKSVRKDELERYIVEQTVAHVLVDDVIEYIADKVVELQRKELQDTSMLDYYKSSLRDTEKSLKNIVTAIEQGIFTPTTKDRLLELEAEKADLEECIQKEEIARPTFSKEQIIFFLERFKGGDVNDQSYQRQIIDTFVSRIWIYDDKTVITYNYSGEGNTITLEAAEKAADEAAGGCSAQLPPSPPNANSANTILFFTGRVFGIVLRE

SEQ ID NO: 3612 - protein, 527 aa, Unknown
  Description of Unknown: Integrase B3613 sequence
  PTHR30461:SF3,cd00338,SM00857,G3DSA:1.10.10.2600,IPR036162, PF13408,PS51737,G3DSA:3.40.50.1390,IPR025827,IPR006119, IPR038109,PF07508,IPR011109,SSF53041,PTHR30461, PS51736,Coil,PF00239
MYEEIKTACLYLRYSSSNQTEQSIEGQMHVCQDFCKRHNIRIVEMYIDRATSASKDIEKRVEFLKMIKDSEKGNFDAVIVYKLDRFARSRYDSATYKYRLKRNGVQLVSATENITQDPEGIILESVLEGMAEFYSAELSQKINRGMRESAMKHNSIGGAIPLGYKTVDKKLIVDETTAPIVREAFQMYADGESVAEICRTFNNRGYKTSKGTRFGKSSFTKIFRNEKYIGVYKYHDYRAEDVIPPIIDKALWDRVQVRIGKIKKAPARNKARHTYLLTGKLFCGHCGSAMNADGNSNGYLYYRCYGKKNLDKQCNKRNMEKNLIERLVAQDAMSFLTDEYIEKIATIACDRNRQEIESDSPIPVIRDRIRQVDVSLNNLLKAIETGSAPDMLVKRMGELETEKKDMEVQLKKEMAHQVYIDKEQVIFWLEKFREGDINDEEFCQTVIDLFVNSVTVWDEPDNKFRITIAYNLTSIPQKTYRLSKDGRLSDYASNTPPLSANPMISGSLMIHTFTVTVHPQKRGRKTL

SEQ ID NO: 3613 - protein, 527 aa, Unknown
  Description of Unknown: Integrase B3614 sequence
  PTHR30461:SF3,cd00338,SM00857,G3DSA:1.10.10.2600,IPR036162, PF13408,IPR025827,G3DSA:3.40.50.1390,PS51737,IPR006119, IPR038109,PF07508,IPR011109,SSF53041,PTHR30461, PS51736,Coil,PF00239
MARKKNIAAGLDAVIYARYSSHNQREVSIEQQIAECTKHAAALGLRIVGTYEDRAISGKTDNRPRFQQMMRDAEKGKFQAVVAWKSNRIGRNMLQAMVNEAKLDDYGVKVFYAEEDFDDTAAGRFALRNMMNVNQFYSENMAEDITRGLYDNANKCMANGRQPLGYKRGADGKVMLDEPAAAVVREIFTRVAAGDLFVDIARDLNAKGIKTSKGATWNKGSFQSICQNERYKGIYIYGNVRIVDGIPRIVSDELWYKVQEAMRMKKNPVGTRHRVGAEDYLLTGKLRCGHCGSYMTGVSGTSRNGELHYYYTCQKRRTEHACNKKNVRRDVIEPAIAQAIKMYCLTDDVIEWVANRTVEYWEKHDNDLHIEALEQQLEENKKATSNMLKAIEMGIITDATRSRMIELETEQSKLAVQLNAAKADVVKIDRDDLIDELQIFRDMDVNNRSVQAELFKDFLVAAYIYDDNRLKLVFSFMGKDNSIEIPLETGEDPPDGEDSPDAKMFVLTPDCSTRKKSIAQKCAVLFY

SEQ ID NO: 3614 - protein, 527 aa, Unknown
  Description of Unknown: Integrase B3615 sequence
  PTHR30461:SF3,SM00857,G3DSA:1.10.10.2600,IPR036162,PF13408, IPR025827,G3DSA:3.40.50.1390,PS51737,IPR006119,IPR038109, PF07508,IPR011109,SSF53041,PTHR30461,Coil, PS51736,cd00338,PF00239
MNVYRTREILKTCSIFDLKLKVAFYARVSTESEDQQVSIHHQDEYYRNFIAQNKNWVFVGAYIDNGISGIRTEKRDEFQRMMADAKTGKIDMIVTKEITRFARNTLDSIKYTRELLMYGVCVWFQNDNINTIDEDSELRLTIMSGIAQDESRKLSNRIKFGHAQSIKNGVVLGSRIYGYIKKDGKLTIDPKTAPMVKEIFEKYSTGEWSTSAIEKYLYKKGYRNYKGGKLSRDNIKKIIKNPKYKGYYCGGKVKIVDMFTKKQEFLPEDEWTMYKDDGNHVPQIVDESVWNKANAIMQTRSDAIKSHRTSFKQNNLFTGYIFCGNDGAPYWMKQHTIRGREDARWVCSYRIKNGAQSCNSFGIREKELRVMLADLINKSGDIQTAIEKYISLVEKNIDFSNDGAEISRLKNMILQIEKKKDKLLDLNLDGIITNSEYIEKSEKFKDEIEIINNKLSELESKEEASKDFHLKLKEIGMILNDLQGVGPEDITKTVLGEFLDKIVINPKHPQECEILFFLKTGDVKKSQ

SEQ ID NO: 3615 - protein, 527 aa, Unknown
  Description of Unknown: Integrase B3616 sequence
  PTHR30461:SF3,SM00857,G3DSA:1.10.10.2600,IPR036162,PS51737, G3DSA:3.40.50.1390,IPR006119,IPR038109,PF07508,IPR011109, SSF53041,PTHR30461,Coil,PS51736,cd00338, PF00239
MYELTQSMESLSVDEIIVYLRKSRSDSPEMSVEDVLKKHEEMIQDYANAHFGSPIPEKNIYREVVSGETIDSRPQVKIVLQKIESPQIKAVLIVEPQRLSRGDLEDCGRLINILRYTNTMVLTLTHSFNLQEEYERKFFEMEITRGNDYLEYTKRILRRGRESSAAKGHYIGSVDPYGYRKIVIKKDGVNCHTLEIVPEEANVVKLIHELYAYTPGGIGFTNIAHKLDSMNLKPKKATHWTPAIISSILCNPLYLGLIRWDTRKVVKYINNGQLEKSRPRSSDAKYYKGLHEPIISQELYDACMARRGTNPSLRRNKALCNPFAGLLYCGTCGHAMSLKIYKNHNSVSQIMLCNHQSYCHTKSVLYSAFLERFISSMENTIHDFELALLADNGNAQAVNQSIVANLETRLKKLQEKDMRQKDAYEDGIYSKEEFLERNIKTQQEIASTITALTAAKETKENYVDYGEKIRRFRDCINALNDPELSATEKNQFLKSCVSKIIYYNNMESKAGVGRYVENVFSLEIQYI

SEQ ID NO: 3616 - protein, 527 aa, Unknown
  Description of Unknown: Integrase B3617 sequence
  PTHR30461:SF3,IPR036162,PS51737,IPR011109,PTHR30461, PF00239,G3DSA:1.10.10.2600,PF14287,IPR006119,SSF53041, IPR025378,SM00857,IPR025827,cd03770,IPR038109, PF13408,G3DSA:3.40.50.1390,PF07508,Coil
MNIQQNRITALYCRLSRDDDFGGDSASIQTQKTMLSQYARDNGFTVTEFYVDDGYSGTNFDRPDFCRMIDDIERGKIGAVIVKDLSRLGREYLKTGYYTEIFFPEHDVRFIAVNDNVDSDHGENEFAPFKNIINEWYAKDCSRKIKSALHLKARNGEFLGGYPAYGYRRSNGDRHSIVPDENAPIVKQIFELLLEGKSCYEVAKYLEQNLILTPRAFLAEKYGVYKNSASAKHPYAWEDRSVYSIATNPVYVGDLVNGRRKCKSFKSKKVCKTSEDEWIVVRDNHEPLVSREDFEAVGQRLAVKQHRKVENPDNIFRGLMVCGECGRKMVFSKSGKSGRYSCAIYKRYGKSECSRHSITLKQIKQVVLTSIQRNAALSSEGKDRFVEQMLSASSSKKSAELSALKKEAEKLTARKLALAKIFQSLYEDKALGKLSEEVYSELSGNVERERTEIQERLRQISEQLGKSQLLTENAEKFAELIRRYTDITELSEELVHLLIEKIVVHERDCVTNTMRVEIYYRFIGKVD

SEQ ID NO: 3617 - protein, 527 aa, Unknown
  Description of Unknown: Integrase B3618 sequence
  PTHR30461:SF3,SM00857,G3DSA:1.10.10.2600,IPR036162,PF13408, PS51737,G3DSA:3.40.50.1390,IPR025827,IPR006119,IPR038109, PF07508,IPR011109,SSF53041,PF00239,PTHR30461, Coil,cd00338
MYEEIKTACLYLRYSSSNQTEQSIEGQMHVCQDFCKRHNIRIVEMYIDRATSASKDIEKRVEFLKMIKDSEKGNFNAVIVYKLDRFARSRYDSATYKYRLKRNGVQLISATENITQDPEGIILESVLEGMAEFYSAELSQKINRGMRESAMKHNSIGGAIPLGYKTVDKKLVIDETTAPIVREAFQMYADGESVAEICRTFNNRGYKTSKGTHFGKSSFTKIFRNEKYIGVYKYHDYRAEDVIPPIIDKDLWDRVQVRVGKIKKAPARNKARHTYLLTGKLFCGHCGSAMNADGNSQGYLYYRCYGKKNLDKQCNKRNMEKNLIERLVAQDAMSFLTDEYIEKIATIACDRNKQEIESDSPIPVIRDRIRQVDVSLNNLLKAIETGSAPDMLVKRMGELETEKKDMEVQLKKEMAHQVYIDKEQVIFWLEKFREGDINDEEFCQTVIDLFVNSVTVWDEPDDKFKITIAYNLTSIPQKTYRLSKDGRLSDYASNTPPLSANPMILGSLMIHTFTVTVHPQKRGKKTV

SEQ ID NO: 3618 - protein, 527 aa, Unknown
  Description of Unknown: Integrase B3619 sequence
  PTHR30461:SF3,cd00338,SM00857,G3DSA:1.10.10.2600,IPR036162, PF13408,IPR025827,PS51737,G3DSA:3.40.50.1390,IPR006119, IPR038109,PF07508,IPR011109,SSF53041,PTHR30461, PS51736,Coil,PF00239
MARKKNIAAGLDAVIYARYSSHNQREVSIEQQIAECTKHAAALGLRIVGTYEDRAISGKTDNRPRFQQMMRDAEKGKFQAVVAWKSNRIGRNMLQAMVNEAKLDDYGVKVFYAEEDFDDTAAGRFALRNMMNVNQFYSENMAEDITRGLYDNANKCMANGRQPLGYKRGADGKVMLDEPAAAVVREIFTRVAAGDLFVDIARDLNAKGIKTSKGAAWNKGSFQSICQNERYKGIYIYGNVRIVDGIPRIVSDELWYKVQEAMRVKKNPVGTRHRVGAEDYLLTGKLRCGHCGSYMTGVSGTSRNGELHYYYTCQKRRTEHACNKKNVRRDVIEPAIAQAIKMYCLTDDVIEWMADQTVQYWEKHDNDLQIEALEQQLAENKKATSNMLKAIEMGIITEATRSRMVELETENSKLTAQLSAAKRDVVKINREDLIDELHVLRSKDIHDREVQAELFKDFLVAAYIYDDNRLKLVFSFMGKDNSVEIPLETGEDPPDGEDSPDAKMFVLTPDCSTRTKAPHGNVWCFFR

SEQ ID NO: 3619 - protein, 527 aa, Unknown
  Description of Unknown: Integrase B3620 sequence
  PTHR30461:SF3,SM00857,G3DSA:1.10.10.2600,IPR036162,PF13408, PS51737,IPR025827,G3DSA:3.40.50.1390,IPR006119,IPR038109, PF07508,IPR011109,SSF53041,PF00239,PTHR30461, mobidb-lite,Coil,cd00338
MPKKPTKHPAKPKRGKKLETEEPGVLYGRYSSHNQKDISVEQQFEKGYELAAEYGIKIIDTYADRAVSGRTDKRKDFQRMMSDAAKGKFRYVIAWKSNRMGRNMLEALINEARLQELGVRVLYVEEDFDDTAAGRFAARSMMNVNQFYSENMAEDIRRGLYDNASNCMVANGHLPYGYKRDDTLHYVIDEPKAAVIREIFTRVAAGEPFVDIMSSLNARGIKTSYNRPWGRSSFQKILSNERYRGIYIYGDVRKEDGIPRIISDELFFKVQEVITTKKNPQGRHRVNGDYLLTGKLFCGKCKSPMVGISGTGRSGKLHYYYVCQKHRTEKTCDKKNVRRDEIEMQVAQAIKDYALKDDVIEWIADSTVAYNERKEAESKVGILEDQLAGTERGIKNIMSAIEQGIITETTKSRLVELESERATIKAKIAAARADIVTVSRDDIISGLEMFRDGDVHDKKYQARLFDTFLVAVYVYDNDLRLVFSFSGNKNTVQIPIESAVNAVENNEAECSFKLCSAPPKIPITLLG

SEQ ID NO: 3620 - protein, 527 aa, Unknown
  Description of Unknown: Integrase B3621 sequence
  PTHR30461:SF3,SM00857,G3DSA:1.10.10.2600,IPR036162,PF13408, PS51737,G3DSA:3.40.50.1390,IPR025827,IPR006119,IPR038109, PF07508,SSF53041,IPR011109,PF00239,PTHR30461, PS51736,Coil,cd00338
MVVQKKVTTIPASLTRFTATPITELKKRRVAGYARVSTDHDDQFTSYAAQIDYYTNYIKSRDDWEFVEVYTDEGITGTSVKHREGFKRMVADALAGKIDLIVTKSVSRFARNTVDSLTTIRQLKEKGIEVYFEKENIWTFDGKGELLLTIMSSLAQEESRSISENCTWGQRKRFADGKVTVPFNRFLGYDRGPDGNLVVNPEQAVIVQQIYAMFLQGMSYHGIAKKLTADGIPTPGGKEKWSISTVRSILSNEKYKGDALLQKSYTVDFLTKKTKINEGEIPQYYVEDNHEAIISPEIFAMVQREMTKRGRGKNYHSSVHAFSSKIKCGHCGSWYGSKVWHSNSQYRKTIWQCNHKFDGDERCDTPHLCDEDIQRLFLSAANKLLVDKAEVIANCREMMDLLFNTTELEAEQATLLEETQLISDMVQQTIYENAHVALDQTEYQKRYDNLTQRFETAKQRLETVMAELDRMQTQRADIEAFVESFEALPDTLTEFKLENWHSLVDFATVYSTDDIRFTFKHGQEVQA

SEQ ID NO: 3621 - protein, 527 aa, Unknown
  Description of Unknown: Integrase B3622 sequence
  SM00857,G3DSA:1.10.10.2600,IPR036162,PS51737,G3DSA:3.40.50.1390, IPR006119,IPR038109,PF07508,IPR011109,SSF53041, PF00239,PTHR30461,PS51736,Coil,cd00338
MAYCLYLRKSRADIEAEAHGEGETLARHEKLLLEVAKRGHYNITQIYREIVSGETIAARPVVQKLLQEVEDGKWEGVLVVEVERLARGDTIDQGVMAQAFKYSGTKIITPLKVYDPANEFDEEYFEFGLFMSRREYKTIKRRLVRGRNASAKEGKWVSGLAPYGYERVRIKGDKGWTLRPVEEQADIVRFIFKLYTSGEEDDNGEVRRLGTYTISKRLDSLGVAPPSSAQYWNDRTVQCILQNPAYIGKVRWGVNKSKKRIVNNSIEVERYKAPAEEVIYVDGLHSAIVDEAIFQKAQDLLQRSGPPPVPKRNSVVNPLAGILVCGKCGRSIVLRRGRIDILICHNRICDNVGSKYEYVEERLLQALSSWLDGYRLEWSDKLPADEQAILDLKQKALRKTVAELETLHKQLDRTHDLLEQGVYDTDTFLVRSRSLTERIAAAEEDISTLTAEVQADKERAASRLNVIPKVEKLLEVYPVLPSAQAKNEMLKEVLEKVEYTKNERSGRNGPFDNFELVLYPKLPPKIE

SEQ ID NO: 3622 - protein, 527 aa, Unknown
  Description of Unknown: Integrase B3623 sequence
  PTHR30461:SF3,SM00857,G3DSA:1.10.10.2600,IPR036162,PF13408, IPR025827,G3DSA:3.40.50.1390,PS51737,IPR006119,IPR038109, PF07508,IPR011109,SSF53041,PF00239, PTHR30461,PS51736,Coil,cd00338
MESTALADVVVYARYSSAGQNDQSIEGQVKTCREFAAQRGFRVVYEYADRAISGRHAETRPAFQQMIVDAKKRTFQYILVWKLDRFARNRYDSAIYKKELRKYGVRVLSVTEGIDEGNESILLEAILEAMAEEYSRQLSQNVRRGMRQNAEKNLSIGGVTPLGYKLENRTYVIDEKEAQIVRYIHEAYANGKPSREIVEECKKRGYRSRKGAEINMDAIARMIANDKYAGTYAYNGEIQVDSLYPAIVSSQLKEKAKKRLALKARAPAHEKAKVEYLLHGKLFCGYCGKTMVGESGRSASGAIYNYYACAEKKKRRGCKKKNERKDFLEWYLAEQITEFVLTDDRIDEISDAVVAEYQRSFDASGIKQLEKNIRETDAELDRLVDALIKTDAEAALKRINDRISELEQYRAQMQGDLASLRIASRAEVNREDVVRWLKFMRRGDLMDEEYRKKIIELFINAVYLYDDRVAIFFNVKDCKQVSYIDMIDATGWGACSDLKAYGSPVTDLSEHGKIIVLNGAIGFLLRR

SEQ ID NO: 3623 - protein, 527 aa, Unknown
  Description of Unknown: Integrase B3624 sequence
  PTHR30461:SF3,SM00857,G3DSA:1.10.10.2600,IPR036162,PF13408, PS51737,G3DSA:3.40.50.1390,IPR025827,PS51736,IPR006119, IPR038109,PF07508,IPR011109,SSF53041,PTHR30461, mobidb-lite,cd00338,PF00239
MSKRESKSGQKCLAAEQIGVIYARYSSHNQKEESIEQQIAECSDFAAKNGIRIVGIYADKAVSGRSDRRPNFQRMMRDAEKRQFQIVVAYKSNRIARNMLNALQYEARLDLLGIKTLYAKEEFGNTAAGRFALRTMMNVNQFYSENMGEDIKRGMVDNANECKVNGMLPLGYVKSKEGKYAIAPDEAAVVREIFDSVLKDVPVAEIARSLNQRGIRTKLGREWNKNSFHIMLKNDNYIGVYRHSGVVVEDGIPPILEKEVFTAVQEKLANKKKTAGRRSANGEYLLTGKLFCGYCGSYMIGVSGTGENGTVHNYYQCQKRHAEGRCEKKNVRRDFIEKLIARLTQDYILQDDTIEWIADSTMSFQAMARRESGVAQLERDLADNRKVAKNIMAAIEQGIITETTKARLLEVEGTIHDLERSLSIAKAASQPIERERVVFSLEQMREGNVGSKEHQKKLIDTFVKSVTLWDDRIQIDYYHTPGKHKFSYSLEELTSKAENESNASDVRTDSLELHHQAAPKKMPLRKA

SEQ ID NO: 3624 - protein, 527 aa, Unknown
  Description of Unknown: Integrase B3625 sequence
  SM00857,G3DSA:1.10.10.2600,IPR036162,PF13408,IPR025827, G3DSA:3.40.50.1390,PS51737,IPR006119,IPR038109,PF07508, IPR011109,SSF53041,PF00239,PTHR30461,PS51736, Coil,cd00338
MGKFIKNKADIKRVVAYARFSSNNQRDESIDAQLRAIRNYCEDNDIKLVAIYTDEAQSAKTDNRDDFRIMIDDILKGKHDIDGVLVHKFNRFARNKYDSALYKKRLRDIDIKVVSVTQPIDDSPEGRILESLIEAMDEYYSENLALEVKKGMLENALKGKHTGGGKLLGLSVDDEGYYYPDENAPIIYRIFKEYADGVPKTQIVKRLNSEGYRNQYGRKFNTRTITDLLQNEKYIGNFIYNHTQTEVIRLEGIIKNPIVDEDLWERVQKLRKDANKPKHRKRKYLMTGKLRCGICGFTYCGSGAKKKNKNGDMSAYYKCQGKIKNQNGCTNTSLNKDYYEKLVIDNITENVLTDNAIDEIAVSVTTQLENERKAPLIPTAKLRKQLEKVKDKQARLMELYLDGGMERKVLDEKNNALKEERKHIEEQIERNLYLEQLNIIDIQDIKDMILEFREELKDNPDFDFAQVVFNTFVDSIVVYPDTLEVNLRVDFSTLGGDKRKNRGASHPINPLLINKSIKRKTHQQPLK

SEQ ID NO: 3625 - protein, 527 aa, Unknown
  Description of Unknown: Integrase B3626 sequence
  PTHR30461:SF3,SM00857,G3DSA:1.10.10.2600,IPR036162,PF13408, PS51737,G3DSA:3.40.50.1390,IPR025827,IPR006119,IPR038109, PF07508,IPR011109,SSF53041,PF00239,PTHR30461, Coil,cd00338
MYEEIKTACLYLRYSSSNQTEQSIEGQMHVCQDFCKRHNIRIVEMYIDRATSASKDIEKRVEFLKMIKDSEKGNFNAVIVYKLDRFARSRYDSATYKYRLKRNGVQLISATENITQDPEGIILESVLEGMAEFYSAELSQKINRGMRESAMKHNSIGGAIPLGYKTVDKKLVIDETTAPIVREAFQMYADGESVAEICRTFNNRGYKTSKGTRFGKSSFTKIFRNEKYIGVYKYHDYRAEDVIPPIIDKDLWDRVQVRVGKIKKAPARNKARHTYLLTGKLFCGHCGSAMNADGNSQGYLYYRCYGKKNLDKQCNKRNMEKNLIERLVAQDAMSFLTDEYIEKIATIACDRNKQEIESDSPIPVIRDRIRQVDVSLNNLLKAIETGSAPDMLVKRMGELETEKKDMEVQLKKEMAHQVYIDKEQVIFWLEKFREGDINDEEFCQTVIDLFVNSVTVWDEQDDKFKITIAYNLTSIPQKTYRLSKDGRLSDYASNTPPLSANPMILGSLMIHTFTVTVHPQKRGKKTV

SEQ ID NO: 3626 - protein, 527 aa, Unknown
  Description of Unknown: Integrase B3627 sequence
  PTHR30461:SF3,cd00338,SM00857,G3DSA:1.10.10.2600,IPR036162, PF13408,PS51737,G3DSA:3.40.50.1390,IPR025827,IPR006119, IPR038109,PF07508,IPR011109,SSF53041,PTHR30461, PS51736,Coil,PF00239
MARKKNIAAGLDAVIYARYSSHNQREVSIEQQIAECTKHAAALGLRIVGTYEDRAISGKTDNRPRFQQMMRDAEKGKFQAVVAWKSNRIGRNMLQAMVNEAKLDDYGVKVFYAEEDFDDTAAGRFALRNMMNVNQFYSENMAEDITRGLYDNANKCMANGRQPLGYKRGADGKVEMDEPAAAVVREIFTRVAAGDLFVDIARDLNAKGIKTSKGATWNKGSFQSICQNERYKGIYIYGNVRIVDGIPRIVSDELWYKVQEAMRMKKNPVGTRHRVGAEDYLLTGKLRCGHCGSYMTGISGTSRNGELHYYYTCQKRRTEHACSKKNVRRDIIEPAIAQAIRMYCLTDDVIEWMADRTVQYWEKHDNDLQIEALEQQLAENKKATSNMLKAIEMGIITAATRSRMVELETENSKLTAQLSAAKRDVVKINREDLIDELHILRSKDIHDREVQAELFKDFLVAAYIYDDSRLKLVFSFMGKDNSVEIPLETGEDPPDGEDSPDAKMFVLTPDCSTRTKSTAQKCVVLFY

SEQ ID NO: 3627 - protein, 527 aa, Unknown
  Description of Unknown: Integrase B3628 sequence
  PTHR30461:SF3,SM00857,G3DSA:1.10.10.2600,IPR036162,PS51737, G3DSA:3.40.50.1390,IPR006119,IPR038109,PF07508,IPR011109, SSF53041,PTHR30461,Coil,PS51736,cd00338, PF00239
MYELTQSMESISVDEIIVYLRKSRSDSPEMSVEDVLKKHEEMIQDYANTHFGSPIPEKNIYREVVSGETIDSRPQVKIVLQKIESPQIKAVLIVEPQRLSRGDLEDCGRLINILRYTNTMVLTLTHSFNLQEEYERKFFEMEITRGNDYLEYTKRILRRGRESSAAKGHYIGSVDPYGYRKIVIKKDGVNCHTLEIVPEEANVVKLIHELYAYTPGGIGFTNIAHKLDSMNLKPKKAAHWTPAIISSILCNPLYLGLIRWDTRKVVKYINDGQLEKSRPRSSDAKYYKGLHEPIISQELYDACMARRGTNPSLRRNKALCNPFAGLLYCGTCGHAMSLKIYKNHNSVSQIMLCNHQSYCHTKSVLYSAFLERFISSMENTIHDFELALLADNGNAQAVNQSIVANLETRLKKLQEKDMRQKDAYEDGIYSKEEFLERNIKTQQEIASTITALTAAKETKENYVDYGEKIRRFRDCINALNDPELSATEKNQFLKSCVSKIIYYNNMESKAGVGRYVENVFSLEIQYI

SEQ ID NO: 3628 - protein, 527 aa, Unknown
  Description of Unknown: Integrase B3629 sequence
  PTHR30461:SF3,SM00857,G3DSA:1.10.10.2600,IPR036162,PS51737, G3DSA:3.40.50.1390,IPR006119,IPR038109,PF07508,IPR011109, SSF53041,PTHR30461,Coil,PS51736,cd00338, PF00239
MYELTQSMESLSVDEIIVYLRKSRSDSPEMSVEDVLKKHEEMIQDYANTHFGSPIPEKNIYREVVSGETIDSRPQIKIVLQKIESPQIKAVLIVEPQRLSRGDLEDCGRLINILRYTNTMVLTLTHSFNLQEEYERKFFEMEITRGNDYLEYTKRILRRGRESSAAKGHYIGSVDPYGYRKIVIKKDGVNCHTLEIVPEEANVVKLIHELYAYTPDGIGFTNIAHKLDSMNLKPKRAAHWTPAIISSILCNPLYLGLIRWDTRKVVKYINDGRLEKSRPRSSDAKYYKGLHEPIISQELYDACMARRGTNPSLRRNKELCNPFAGLLYCGTCDHAMSLKIYKNHNSVSQIMLCNHQSYCHTKSVLYSAFLERFISSMENTIHDFELALLADNGNAQAVNQSIVANLETRLKKLQEKDMRQKDAYEDGIYSKEEFLERNIKTQQEIASTITALTAAKETKENYVDYGEKIRRFRDCINALNDPELSATEKNQFLKSCVSKIIYYNNMESKAGVGRYVENVFSLEIQYI

SEQ ID NO: 3629 - protein, 527 aa, Unknown
  Description of Unknown: Integrase B3630 sequence
  PTHR30461:SF3,SM00857,G3DSA:1.10.10.2600,IPR036162,PS51737, G3DSA:3.40.50.1390,IPR006119,IPR038109,PF07508,IPR011109, SSF53041,PTHR30461,Coil,PS51736,cd00338, PF00239
MYELTQSMESLSVDEIIVYLRKSRSDSPEMSVEDVLKKHEEMIQDYANTHFGCPIPEKNIYREVVSGETIDSRPQVKIVLQKIESPQIKAVLIVEPQRLSRGDLEDCGRLINLLRYTNTMVLTLTHSFNLQEEYERKFFEMEITRGNDYLEYTKRILRRGRESSAAKGHYIGSVDPYGYRKTVIKKDGVNCHTLEIVPEEANVVKLIHELYAYTPGGIGFTNIAHKLDSMNLKPKKAAHWTPAIISSILCNPLYLGLIRWDTRKVVKYINDGRLEKSRPRSSDAKYYKGLHEPIISQELYDACMARRGTNPSLRRNKELCNPFAGLLYCGTCDHAMSLKIYKNHNSVSQIMLCNHQSYCHTKSVLYSAFLERFISSMENTIHDFELALLADNGNAQAVNQSIVANLEIRLKKLQEKDMRQKDAYEDGIYSKEEFLERNIKTQQEIASTITALTAAKETKENYVDYGEKIRRFRDCINALNDPELSATEKNQFLKSCVSKIIYYNNMESKAGVGRYVENVFSLEIQYI

SEQ ID NO: 3630 - protein, 527 aa, Unknown
  Description of Unknown: Integrase B3631 sequence
  PTHR30461:SF3,SM00857,G3DSA:1.10.10.2600,IPR036162,PS51737, G3DSA:3.40.50.1390,IPR006119,IPR038109,PF07508,IPR011109, SSF53041,PTHR30461,Coil,PS51736,cd00338, PF00239
MYELTQSMESLSVDEIIVYLRKSRSDSPEMSVEDVLKKHEEMIQDYANTHFGSPIPEKNIYREVVSGETIDSRPQVKIVLQKIESPQIKAVLIVEPQRLSRGDLEDCGRLINILRYTNTMVLTLTHSFNLQEEYERKFFEMEITRGNDYLEYTKRILRRGRESSAAKGHYIGSVDPYGYRKIVIKKDGVNCHTLEIVPEEANVVKLIHELYAYTPGGIGFTNIAHKLDSMNLKPKKAAHWTPAIISSILCNPLYLGLIRWDTRKVVKYINDGRLEKSRPRSSDAKYYKGLHEPIISQDLYDACMARRGTNPSLRRNKELSNPFAGLLYCGTCDHAMSLKIYKNHNSVSQIMLCNHQSYCHTKSVLYSAFLERFISSMENTIHDFELALLADNGNAQAVNQSIVANLEIRLKKLQEKDMRQKDAYEDGIYSKEEFLERNIKTQQEIASTITALTAAKETKENYVDYGEKIRRFRDCINALNDPELSATEKNQFLKSCVSKIIYYNNMESKAGVGRYVENVFSLEIQYI

SEQ ID NO: 3631 - protein, 527 aa, Unknown
  Description of Unknown: Integrase B3632 sequence
  SM00857,G3DSA:1.10.10.2600,IPR036162,PS51737,G3DSA:3.40.50.1390, IPR006119,IPR038109,PF07508,IPR011109,SSF53041, PTHR30461,Coil,PS51736,cd00338,PF00239
MAYCLYLRKSRADIEAEAHGEGETLARHEKLLLEVAKRGHYNITQIYREIVSGETIAARPVVQKLLQEVEDGKWEGVLVVEVERLARGDTIDQGVMAQAFKYSGTKIITPLKVYDPANEFDEEYFEFGLFMSRREYKTINRRLVRGRNASAKEGKWVSGLAPYGYERVRIKGDKGWTLRPVEEQADIVRFIFKLYTSGEEGESGEVRQLGTYTISKQLDSLGVAPPSSAQYWNDRTVQCILQNPAYIGKVRWGVNKSKKRIVNNSIEVERYKAPADEVIYVDGLHPAIVDEAVFQKAQDLLKRSGPPPVPKRNSVVNPLAGILVCGKCGRSIVLRRGRLDMLICHNRLCDNVGSKYEYVEERLLQALSSWLEGYRLEWSDKLPADEQSLLDLKQKALRKTVTELETLHKQLDRTHDLLEQSVYDTDTFLVRSRSLTERIAAAKEDISALTAEVQADKERAASRLNVIPKVEKLLEVYPVLPSAQAKNEMLKEVLEKVEYTKNERSGRNGPFDNFELVLYPKLPPKIE

SEQ ID NO: 3632 - protein, 527 aa, Unknown
  Description of Unknown: Integrase B3633 sequence
  SM00857,G3DSA:1.10.10.2600,IPR036162,PS51737, G3DSA:3.40.50.1390,IPR006119,IPR038109,PF07508, SSF53041,IPR011109,PTHR30461,Coil, PS51736,cd00338,PF00239
MQENISINQIIMYLRKSRSDDPCMTVEEVLARHERQLQDYAVASFGSPVPEHHIFREVVSGETIADRPVMRQLMHLLESGSVRGVLVIEPQRLSRGDLEDCGRIINAFRYTNTLVLTPPKTYDLSDEYDRKFFEMELTRGNDYLEYTKKILNRGRLASVKQGNYIGSVAPYGYRKIKTGSGKDTAHTLEIVPEQADAVRMMAQLYLAGNGFTRIAAHLDSLGIKPLKSDHWSPAAISDILSNPVYIGMIRWNHFKTIKTMQNGQIVKSRPTNHGTDYILVPGKHPAILDQETFYAIAERRGKSPKVKRDHELRNPFAGLVYCGTAGCGRSMALKQFTNYRSKVPRRSESMICPNQRICHTKSVQYSAFVERVKEILSKTVDDFEIKLQNDDGNIVRIHENIIRNLEQDLVKLKDKDLRQKDAYEDGIYTKEEYASRNAKLQEQICEVQLSIQRAKDTMPPEVDYQERVSRFSDCLSKFEDTDISASEMNLLLKSCIEKIIYHNSSESKPGIGRFVANPFELDIYLRL

SEQ ID NO: 3633 - protein, 527 aa, Unknown
  Description of Unknown: Integrase B3634 sequence
  PTHR30461:SF3,SM00857,G3DSA:1.10.10.2600,IPR036162,PS51737, G3DSA:3.40.50.1390,IPR006119,IPR038109,PF07508,IPR011109, SSF53041,PTHR30461,Coil,PS51736,cd00338, PF00239
MYELTQSMESLSVDEIIVYLRKSRSDSPEMSVEDVLKKHEEMIQDYANTNFGSPIPEKNIYREVVSGETIDSRPQVKIVLQKIESPQIKAVLIVEPQRLSRGDLEDCGRLINILRYTNTMVLTLTHSFNLQEEYERKFFEMEITRGNDYLEYTKRILRRGRESSAAKGHYIGSVDPYGYRKIVIKKDGVNCHTLEIVPEEANVVKLIHELYAYTPGGIGFTNIAHKLDSMNLKPKKATHWTPAIISSILCNPLYLGLIRWDTRKVVKYINDGRLEKSRPRSSDAKYYKGLHEPIISQELYDACMARRGTNPSLRRNKELCNPFAGLLYCGTCDHAMSLKIYKNHNSVSQIMLCNHQSYCHTKSVLYSAFLERFISSMENTIHDFELALLADDGNAQAVNQSIVANLETRLKKLQEKDMRQKDAYEDGIYSKEEFLERNIKTQQEIASTITALTAAKETKENYVDYGEKIRRFRDCINALNDPELSATEKNQFLKSCVSKIIYYNNMESKAGVGRYVENVFSLEIQYI

SEQ ID NO: 3634 - protein, 527 aa, Unknown
  Description of Unknown: Integrase B3635 sequence
  PTHR30461:SF3,SM00857,G3DSA:1.10.10.2600,IPR036162,PF13408, PS51737,IPR025827,G3DSA:3.40.50.1390,IPR006119,IPR038109, PF07508,IPR011109,SSF53041,PTHR30461,Coil, PS51736,cd00338,PF00239
MEMRETMKAVIYARYSSEKQQEISIEGQLRICREFAAREGYEIVGTYADRALSASHNVERREDFQRMIRDSAHRNFDVVIVYKFSRFARNRYDSAVYKARLRQNGVKVLSACEPISANPEGALIEGIFESLDEFYSKSLAQDVSRGMHENATKALSTGGTIPLGYVSVDKRLQIDPATAPAVRTAFEMYAEGYSCARIADTLNAKGYRTRTGKPFNRSSFSTLFSNPKYIGTYHYNGEVELAGQVPAIVDPGTYRQVQTRLRKNSMAPSRSKATVDYLLSTKVSCGECGRPMAGESGHSHTGARYYYYACSGKKRRLGCNLPSLRKDDLEKLVVEHARALLAPDCIKGLAHAAAEEYTRQANDHSAAVALKQQLAEVTRSIDNLILMVERGAASATLVNRLNDLEARKASLTDELSAELRGVPELTEVDILRWLSCFADGSADDPDYRRNMIDMLINSVTVQKNPNRKGFLILIAYNLSGRSEELSGSDLSGLVHQARPKPNFCTIPAMPCNTFILYHACAIFQLAA

SEQ ID NO: 3635 - protein, 527 aa, Unknown
  Description of Unknown: Integrase B3636 sequence
  SM00857,G3DSA:1.10.10.2600,IPR036162,PS51737,G3DSA:3.40.50.1390, IPR006119,IPR038109,PF07508,IPR011109,SSF53041, PTHR30461,Coil,PS51736,cd00338,PF00239
MAHCLYLRKSRADIEAEAHGEGETLARHEKLLLEVAKRGHYNITQIYREIVSGETIAARPVVQKLLQEVEDGKWEGVLVVEVERLARGDTIDQGVMAQAFKYSGTKIITPLKVYDPANEFDEEYFEFGLFMSRREYKTINRRLVRGRNASAKEGKWVSGLAPYGYERVRIKGDKGWTLRPVEEQADIVRFIFKLYTSGEEDENGEVRRLGTYTISKRLDSLGVAPPSSAQYWNDRTVQCILQNPAYIGKVRWGVNKSKKRIVNNSIEVERYKAPADEVIYVDGLHPAIVDEAIFRKAQDLLKRSGPPPVPKRNSVVNPLAGILVCGKCGRSIVLRRGRLDMLICHNRLCDNVGSKYEYVEERLLQALSSWLEGYRLEWSDKLPADEQTLLDLKQKALRKTVTELETLHKQLDRTHDLLEQGVYDTNTFLVRSRSLTERIAAAKEDISALTAEVQEDKERAASRLNVIPKVEKLLEVYPVLPSAQAKNEMLKEVLEKVEYTKNERSGRNGPFDNFELVLYPKLPPKIE

SEQ ID NO: 3636 - protein, 527 aa, Unknown
  Description of Unknown: Integrase B3637 sequence
  SM00857,G3DSA:1.10.10.2600,IPR036162,PF13408, IPR025827,G3DSA:3.40.50.1390,PS51737,IPR006119, IPR038109,PF07508,SSF53041,IPR011109, PF00239,PTHR30461,PS51736,Coil,cd00338
MPEQYCLYLRKSRADMDAEKAGDEDTLLRHEKLLMQVAKSKNLNITDIYREVVSGETISARPQMQRLLSAVGQGVYTGVLVVEVERLARGDTIDQGLVAQAFKFSSTLIITPTKTYDPNNEFDEEYFEFGLFMSRREYKTINRRLQRGRIASVQEGKFVGSITPYGYDKVKLEHDKGYMLVPNPDEAPTVRLIFSLYVNGLPQEDGTTRRLGVAMICRYLNEHSIPNRTGNVWVNATVRDMIRNIVYDGKTRWNWRPTHKKMVDGIVKLERPRTKPDTWIISDGMHEPLIDHDTFVKAQVLIDSNPPRPIGERGTVRNPLAGIVICGKCGRRMVRRPKGSRQPEDVIMCGCAACHNVSVYSRYLEGAIIDGLKSWVDTYKLQCSDDDVGTETIAALSEQRAAINKQIQDYKRQRENVYTLLEQGVYTTETFLQRLKIISDKIGVATSSLADLEQVVADEERRLRGKKSIIPKIENLLAAYWSLDSAAAKNDMLKEVIEKVVYEKDKGGRWADPTDFRIKIYPRLPKN

SEQ ID NO: 3637 - protein, 527 aa, Unknown
  Description of Unknown: Integrase B3638 sequence
  cd03768,SM00857,IPR006118,IPR036162,PS51737, G3DSA:3.40.50.1390,IPR006119,IPR011109,SSF53041,PTHR30461, PS00397,PS51736,Coil,PF00239
MEDIVVYLRVSTEEQDYNRQLIDLENWASGRFNIIKVFAEKLSGLDDERPQLILLKQYLISNPNIKIIATWELSRVSRKKSFLFTFFEWCAEREINLFLYKQNLWLLDSDKKINSQIDLQLTLLSYFAQSEVMMMRERIKSKMNQLKSEGKFLGGQIAFGYKLDKNNRYIKDEVNAEIVADLFQFYNRQGESLITTAQYILMKYNINITKSRLRNILRRDYYRGIKAERIVSDELFNSVQLKLTANQTKAKGAKKKQGRLLDYLIKCPYCGGNFSSKTTTDMYCCSHSPGYGIYEPNNICHQSVGISCNHIDSIIWRLLKYILYNNDDFFEKLNQESDKIIETLSNECFTITDNINKLKNQIKKENIKLDAESIDIETFKSNIKKLNEGIKSFESEIKARNEKIDAITKNKNIHSQSYSRYEYIDSIKEYNSIKDLIKDYIEEINIYKVGNKRSERKIKVKFYNIEQPYYLYRNMCSRSIENDKYAFYAKYDFTDFEFNEEDTIPMMVIQYKLLNFTSLKIAKNKSD

SEQ ID NO: 3638 - protein, 527 aa, Unknown
  Description of Unknown: Integrase B3639 sequence
  SM00857,G3DSA:1.10.10.2600,IPR036162,PS51737, G3DSA:3.40.50.1390,IPR006119,IPR038109,PF07508, IPR011109,SSF53041,PTHR30461,Coil, PS51736,cd00338,PF00239
MAYCLYLRKSRADIEAEAHGEGETLARHEKLLLEVAKRGHYNITQIYREIVSGETIAARPVVQKLLQEVEDGKWEGVLVVEVERLARGDTIDQGVMAQAFKYSGTKIITPLKVYDPANEFDEEYFEFGLFMSRREYKTIKRRLVRGRNASAKEGKWVSGLAPYGYERVRIKGDKGWTLRPVEEQADIVRFIFKLYTSGEEDDNGEVRRLGTYTISKRLDSLGVAPPSSAQYWNDRTVQCILQNPAYIGKVRWGVNKSKKRIVNNSIEVERYKAPADEVIYVDGLHSAIVDEAIFQKAQDLLKRSGPPPVPKRNSVVNPLAGILVCGKCGRSIVLRRGRIDILICHNRICDNVGSKYEYVEERLLQALSSWLDGYRLEWSDKLPADEQAILDLKQKALRKTVTELETLHKQLERTHDLLEQGVYDTDTFLVRSRSLTERIAAAEEDISTLTAEVQADKERAASRLNVIPKVEKLLEVYPVLPSAQAKNEMLKEVLEKVEYTKNERSGRNGPFDNFELVLYPKLPPKIE

SEQ ID NO: 3639 - protein, 527 aa, Unknown
  Description of Unknown: Integrase B3640 sequence
  PTHR30461:SF3,cd00338,SM00857,G3DSA:1.10.10.2600,IPR036162, PF13408,IPR025827,G3DSA:3.40.50.1390,PS51737,IPR006119, IPR038109,PF07508,SSF53041,IPR011109,PTHR30461, PS51736,Coil,PF00239
MKKENEIRAVVYARYSSHSQTEQSIEGQISAAQVYAKAKGYTIVKEYVDRAKTGKNDNREAFQQMLSDTAKHEFSVIIVWKVDRFGRNREEITFNKYRCKKNDVRVEYIAEAVPDSPEGVILESVLEGMAEYYSLQLAQNIRRGIRASAEKCQAIGGHCSLGYAIDPKTKKYVIDPDTAPTVQLVFEKYAEGYTGMDIVRLLNEKGLRTVRGKPFTKNSLWTILKNERYAGVYLFKDEVRVEGGIPALVSRETFDKVQEMLEINHRSPVNTWNRATYLLTDKLFCGHCGSKMVGECGTSRTGATYNYYICAGKKRERNCSKKAVRQDWIEKVVLQQIRRVLFDQEFLEFIAHKAYTYYLEEKKKLDQSAAIKAQLSSVESSIDNLIRAMEAGIFSASTKSRLDDLENQKAALTRTLAEIKLSEESFDLTEDRILFFLESMRGLDMDDVDSRKRLVKTFVNAVYLYDDKITLAFNFTDSCEKPEIIELTDIADGVVEKFVHRASCSTKKALYFVGSMVLFFLLSWRSH

SEQ ID NO: 3640 - protein, 527 aa, Unknown
  Description of Unknown: Integrase B3641 sequence
  PTHR30461:SF3,SM00857,G3DSA:1.10.10.2600,IPR036162,PS51737, G3DSA:3.40.50.1390,IPR006119,IPR038109,PF07508,IPR011109, SSF53041,PTHR30461,Coil,PS51736,cd00338, PF00239
MYELTQSMESLSVDEIIVYLRKSRSDSPEMSVEDVLKKHEEMIQDYANTHFGSPIPENNIYREVVSGETIDSRPQVKIVLQKIESPQIKAVLIVEPQRLSRGDLEDCGRLINLLRYTNTMVLTLTHSFNLQEEYERKFFEMEITRGNDYLEYTKRILRRGRESSAAKGHYIGSVDPYGYRKIVIKKDGVNCHTLEIVPEEANVVKLIHELYAYTPGGIGFTNIAHKLDSMNLKPKKATHWTPAIISSILCNPLYLGLIRWDTRKVVKYINDGRLEKSRPRSSDAKYYKGLHEPIISQDLYDACMARRGTNPSLRRNKELCNPFAGLLYCGTCGHAMSLKIYKNHNSVSQIMLCNHQSYCHTKSVLYSAFLERFISSMENTIHDFELALLADDGNAQAVNQSIVANLETRLKKLQEKDMRQKDAYEDGIYSKEEFLERNIKTQQEIASTITALTAAKETKENYVDYGEKIRRFRDCINALNDPELSATEKNQFLKSCVSKIIYYNNMESKAGVGRYVENVFSLEIQYI

SEQ ID NO: 3641 - protein, 527 aa, Unknown
  Description of Unknown: Integrase B3642 sequence
  PTHR30461:SF3,cd00338,SM00857,G3DSA:1.10.10.2600,IPR036162, PF13408,IPR025827,G3DSA:3.40.50.1390,PS51737,IPR006119, IPR038109,PF07508,IPR011109,SSF53041,PTHR30461, PS51736,Coil,PF00239
MYEEIKEVALYVRYSSANQTEQSIEGQIRVCTDFCQRHGFRIVEIYADRATSASKDIEKRVEFLRMIKDSEKKNFQAVIVYKLDRFARSRYDSANYKYRLRKNGVQLISATENISNDPEGIILESVLEGMAEFYSAELSQKINRGMKESAYKHNSIGGVIPLGYKSEGKKLVIDEETAPIVRQAFEMYAEGHSVAEICRLFNARGYKTSKGTRFGKSSFSRMFHNERYIGVYQYHDYRAEDAIPAIIDKKLFYQVQARMKSNNRSPGQHKAKHFYLLSGKLYCGHCGSKMNASSNTTSGYTYYECYGKKNLHVDCHKRNLRQDFIEDVVIRDAMSLLTDENIEQIAEVAIRTNLHDVEGNTDIPAIKDRLHETTLSLSNLVKAIESGLAPETLVKRMVELEKDKKTLEEELKREEKKVIYLDKEQVIFWLEQFKGGDIEDDDFRRLLVNLFVNSVTVWDEEDDHFKVTIAYNLSSLNEKTYHLKRGGRQSDFNLNAPAFGTNPTIHGTLLYHTTTCCMKRRNINQEV

SEQ ID NO: 3642 - protein, 527 aa, Unknown
  Description of Unknown: Integrase B3643 sequence
  PTHR30461:SF3,SM00857,G3DSA:1.10.10.2600,IPR036162,PF13408, PS51737,G3DSA:3.40.50.1390,IPR025827,IPR006119,IPR038109, PF07508,SSF53041,IPR011109,PF00239,PTHR30461, PS51736,Coil,cd00338
MRVSVNLNAQKPDTTTNAVIYARYSSHGQTEQSIEGQLAKGHEYAAAQGYTVVHEYIDRAMTGRNDNREAFQKMLSDTGKHQFQVVIVWKVDRFGRNREEIAFNKHTCKKNGVRVEYVAESLPNSPEAVILESVLEGMAEYYSIQLSQNIRRGQLESAKKCQCVGGSVPLGYTLDSDKHFVIDPQTAPVVKKIFDLYAEGATISEITGQLNEQGIRTIRKQLFTKNSLTKLLKNEKYIGIYAYKDVVRVEGGVPAIVDKSTFDRVQELLKINRRAPSHTWTKVEYLLTDKLFCGHCGSPMVGESGFSHTGAKYSYYGCIKRRREKACDKKPVRQDWIEALVLDETVKLLHDDELMEYIIDRTWEYYQITDKVQEEKAVLEAQLAEVDKAINNLVRAIEAGIFNAATKSRMDELDAQKAALTASLADLELTSGIRITRDHIEYFLLRLRDLDVKDRECQKRLVQTFVNAVFVYDDGRVKITYNYSGQSSTITLNQIASAEKGKGFVCCLPCSTSSPRFPRGVAAFFVF

SEQ ID NO: 3643 - protein, 527 aa, Unknown
  Description of Unknown: Integrase B3644 sequence
  PTHR30461:SF3,SM00857,G3DSA:1.10.10.2600,IPR036162,PS51737, G3DSA:3.40.50.1390,IPR006119,IPR038109,PF07508,IPR011109, SSF53041,PTHR30461,Coil,PS51736,cd00338, PF00239
MYELTQSMESLSVDEIIVYLRKSRSDSPEMSVEDVLKKHEEMIQDYANTHFGSPIPEKNIYREVVSGETIDSRPQVKIVLQKIESPQIKAVLIVEPQRLSRGDLEDCGRLINILRYTNTMVLTLTHSFNLQEEYERKFFEMEITRGNDYLEYTKRILRRGRESSAAKGHYIGSVDPYGYRKIVIKKDGVNCHTLEIVPEEANVVKLIHELYAYTPGGIGFTNIAHKLDSMNLKPKKAAHWTPAIISSILCNPLYLGLIRWDTRKVVKYINDGQLEKSRPRSSDAKYYKGLHEPIISQDLYDACMARRGTNPSLRCNKELCNPFAGLLYCGTCNHAMSLKIYKNHNSVSQIMLCNHQSYCHTKSVLYSAFLERFISSMENTIHDFELALLADNGNAQAVNQSIVANLETRLKKLQEKDMRQKDAYEDGIYSKEEFLERNIKTQQEIASTITALTAAKETKENYVDYGEKIRRFRDCINALNDPELSATEKNQFLKSCVSKIIYYNNMESKAGVGRYVENVFSLEIQYI

SEQ ID NO: 3644 - protein, 527 aa, Unknown
  Description of Unknown: Integrase B3645 sequence
  PTHR30461:SF3,SM00857,G3DSA:1.10.10.2600,IPR036162,PF13408, IPR025827,G3DSA:3.40.50.1390,PS51737,IPR006119,IPR038109, PF07508,SSF53041,IPR011109,PTHR30461,Coil, PS51736,cd00338,PF00239
MSRVTVIPAKLDRATFMPLDKPIKRRVAGYARVSTDSEEQQTSYEAQVSYYTEYIQKRDDWEFAGVYTDQGISATNTKHRDGFNRMIADALDGKIDLIVTKSVSRFARNTVDSLTTVRKLKEKGVEVYFEKENIYTLDSKGELFITIMSSLAQEESRSISENVTWGQRKRMADGKVTMPYGRFLGYRKGEDGLPEIVPEEAEVVKLIYKSFMEGLSYYKIAKMLMEREIPAPAGGEKWHRRTVESILTNEKYKGSALLQKKFTMDFLTKKQKVNEGEVPQYFVEHSHDAIIDPEEFELVQAEIERRKGLGKEYSGSSIFSAKLVCSCCGGFFGSKVWHSTSKYRRIIWQCNHKFSKSSGNKKCKTPHLYEDEIKKRFIEVCNRIASDKEDFLISCQQIVEILSNTAALDRKIEAQYIYLNGLAVSMQEFIKENAMQPQGEDFYDTKLAEYEKQRAEGETRLKGLQSQKATKLSRKELLDGLVNVLEENGILIDKFDERLWRLMVEKVVVGIEGELTFTLRNGMEIEV

SEQ ID NO: 3645 - protein, 527 aa, Unknown
  Description of Unknown: Integrase B3646 sequence
  PTHR30461:SF3,SM00857,G3DSA:1.10.10.2600,IPR036162,PS51737, G3DSA:3.40.50.1390,IPR006119,IPR038109,PF07508,SSF53041, IPR011109,PTHR30461,Coil,PS51736,cd00338, PF00239
MYELTQSMESLSVDEIIVYLRKSRSDSPEMSVEDVLKKHEEMIQDYANTHFGSPIPEKNIYREVVSGETIDSRPQVKIVLQKIESPQIKAVLIVEPQRLSRGDLEDCGRLINILRYTNTMVLTLTHSFNLQEEYERKFFEIEITRGNDYLEYTKRILRRGRESSAAKGHYIGSVDPYGYRKIVMKKDGVNCHTLEIVPEEANVVKLIHELYAYTPGGIGFTNIAHKLDSMNLKPKKAAHWTPAIISSILCNPLYLGLIRWDTRKVVKYINDGRLEKSRPRSSDAKYYKGLHEPIISQELYDACMARRGTNPRLRRNKELCNPFAGLLYCGTCDHAMSLKIYKNHNSVSQIMLCNHQSYCHTKSVLYSAFLERFISSMENTIHDFELALLADNGNAQTVNQSIVANLEIRLKKLQEKDMRQKDAYEDGIYSKEEFLERNIKTQQEIASTITALTAAKETKENYVDYGEKIRRFRDCINALNDPELSATEKNQFLKSCVSKIIYYNNMESKAGVGRYVENVFSLEIQYI

SEQ ID NO: 3646 - protein, 527 aa, Unknown
  Description of Unknown: Integrase B3647 sequence
  PTHR30461:SF3,cd00338,SM00857,G3DSA:1.10.10.2600,IPR036162, PF13408,IPR025827,G3DSA:3.40.50.1390,PS51737,IPR006119, IPR038109,PF07508,IPR011109,SSF53041,PTHR30461, PS51736,Coil,PF00239
MYEEIKTACLYLRYSSSNQTEQSIEGQMHVCQDFCKRHNIRIVEMYIDRATSASKDIEKRVEFLKMIKDSEKGNFDAVIVYKLDRFARSRYDSATYKYRLKRNGVQLVSATENITQDPEGIILESVLEGMAEFYSAELSQKINRGMRESAMKHNSIGGAIPLGYKTVDKKLIVDETTAPIVREAFQMYADGESVAEICRTFNNRGYKTSKGTRFGKSSFTKIFRNEKYIGVYKYHDYRAEDVIPPIIDKALWDRVQVRVGKIKKAPARNKARHTYLLTGKLFCGHCGSAMNADGNSNGYLYYRCYGKKNLDKQCNKRNMEKNLIERLVAQDAMSFLTDEYIEKIATIACDRNKQEIESDSPIPVIRDRIRQVDVSLNNLLKAIETGSAPDMLVKRMGELETEKKDMEVQLKKEMAHQVYIDKEQVIFWLEKFREGDINDEEFCQTVIDLFVNSVTVWDEPDDKFKITIAYNLTSIPQKTYRLSKDGRLSDYASNTPVLLSHSDCRTVFSVICVHLCQRFICLISCIF

SEQ ID NO: 3647 - protein, 527 aa, Unknown
  Description of Unknown: Integrase B3648 sequence
  PTHR30461:SF3,cd00338,SM00857,G3DSA:1.10.10.2600,IPR036162, PF13408,PS51737,G3DSA:3.40.50.1390,IPR025827,IPR006119, IPR038109,PF07508,IPR011109,SSF53041,PTHR30461, PS51736,Coil,PF00239
MYEEIKTACLYLRYSSSNQTEQSIEGQMHVCQDFCKRHNIRIVEMYIDRATSASKDIEKRVEFLKMIKDSEKGNFNAVIVYKLDRFARSRYDSATYKYRLKRNGVQLISATENITQDPEGIILESVLEGMAEFYSAELSQKINRGMRESALKHNSIGGAIPLGYKTVDKKLVIDETTAPIVREAFQMYADGESVAEICRTFNNRGYKTSKGTRFGKSSFTKIFRNEKYIGVYKYHDYRAEDVIPPIIDKDLWDRVQVRVGKIKKAPARNKARHTYLLTGKLFCGHCGSAMNADGNSQGYLYYRCYGKKNLDKQCNKRNMEKNLIERLVAQDAMSFLTDEYIEKIATIACDRNKQEIESDSPIPVIRDRIRQVDVSLNNLLKAIETGSAPDMLVKRMGELETEKKDMEVQLKKEMAHQVYIDKEQVIFWLEKFREGDINDEEFCQTVIDLFVNSVTVWDEPDDKFKITIAYNLTSIPQKTYRLSKDGRLSDYASNTPPLSANPMILGSLMIHTFTVTVHPQKRGKKTV

SEQ ID NO: 3648 - protein, 526 aa, Unknown
  Description of Unknown: Integrase B3649 sequence
  SM00857,G3DSA:1.10.10.2600,IPR036162,PF13408,IPR025827, PS51737,G3DSA:3.40.50.1390,IPR006119,IPR038109,PF07508, SSF53041,IPR011109,PTHR30461,Coil,PS51736, cd00338,PF00239
MQYCLYLRKSRADSEAEARGEGETLSRHEKALLDLAKKLNLNITAIYREIVSGETIAARPVMQQLLQEVEQGIWDGVLVMEVERLARGDTIDQGIVAQTFKFSDTKIITPIKTYNPNNEFDEEYFEFGLFMSRREYKTINRRLQRGRMASVKDGKYVANKAPYGYNRIRIENDKGWTLEINKEEADVVRLIFELYTVGEKQSDNTFNRLGTGFIAKRLNAMKVPPKRGKVWVVASIRDILINPVYIGMIRWNWRPQQKKMIDGQLHISRPRATDYVLCNGLHPPIISKETFDMAQELMRHNPARPIGEKNTVKNSLSGIVICGNCGRHMVRRPHTKYPDMLICSEPTCNNVGAQLRVVEERILQSLKEWLGEYKISWDITSPPVERISQVSINKKALQKEQHELDTLNKQISKTHDLLEQGIYTTDVFLERSRALSLRINEVKEHIAILDKELKTEITREDSAVNIIPKVEKLLEVYHDLPSPKAKNDMLKDVLEKVVYTKKERSKKGNLDNFNITIYPKIPKYIT

SEQ ID NO: 3649 - protein, 526 aa, Unknown
  Description of Unknown: Integrase B3650 sequence
  SM00857,G3DSA:1.10.10.2600,IPR036162,PF13408,IPR025827, PS51737,G3DSA:3.40.50.1390,IPR006119,IPR038109,PF07508, IPR011109,SSF53041,PF00239,PTHR30461,PS51736, Coil,cd00338
MAKPEVSELAVVYARYSSHSQGEQSIEGQLSNARDYAAAHGYTIVHEYVDRAKSGRTDNRAEFQQMLKDTAKRQFSVIILWKVDRFGRNREEIAINKMKCRKNGVRVEYVAETIPDSPEGVILESVLEGFAEYYSLQLSQNIRRGRAESAEKCQSLGGNRPLGYKTGPDKKFIIDENTAPTVKMIFTMYADGKTVTEIVDKLNEMGLRTLRGGPFTKNSLHSILKNKKYIGIYEYQGREIMDGVPRIIEDDVFNKVQEMLKINKRAPAKTWSRADYILTDKLFCGKCGALMFGESGTSHTGAKHNYYICSNKKRFRSCDKKAVRQADIEDTVLNATHELLQDDELLDYIVDRTWEYYLAQDNSQEELRNLQRQLAQTDTAISNLIRAIEAGILTEETKKRMDELTQQKADLKASIADREIARGFHLQKSHIAFYLRSLRDADWSDKEAQKRLIQTFVNAVFVYDDHITLTYNFSGDKSTITLRDMQRFEDGEEFGCRASRSTIGRISEPYIAWGTVFVQTKRHSLP

SEQ ID NO: 3650 - protein, 526 aa, Unknown
  Description of Unknown: Integrase B3651 sequence
  SM00857,G3DSA:1.10.10.2600,IPR036162,PF13408,IPR025827, G3DSA:3.40.50.1390,PS51737,IPR006119,IPR038109,PF07508, SSF53041,IPR011109,PTHR30461,Coil,PS51736, cd00338,PF00239
MQYCLYLRKSRADSEAEARGEGETLARHEKALLDLAKKLNLNITAIYREIVSGETIAARPVMQQLLQEVEQGIWDGVLVMEVERLARGDTIDQGIVAQTFKFSDTKIITPIKTYNPNNEFDEEYFEFGLFMSRREYKTINRRLQRGRMASVKDGKYVANKAPYGYNRIRIENDKGWTLEINKEEADVVRLIFELYTVGEKQSDNTFNRLGTGFIAKRLNTMKVSPKRGKVWVVASIRDILINPVYIGMIRWNWRPQQKKMIDGQLHISRPRATDYVLCNGLHPPIISKETFDMAQELMRHNPARPIGEKNTVKNSLSGIVICGNCGRHMVRRPHTKYPDMLICSEPTCNNVGAQLRVVEERILQSLKEWLGEYKISWDITSPPVERISQVSIKKKALQKEQHELDTLNKQISKTHDLLEQGIYTTDVFLERSRALSLRIDEVKEHIAILDKELKTEITREDSAVNIIPKVEKLLEVYHDLPSPKAKNDMLKDVLEKVVYTKKERSKKGNLDNFNITIYPKIPKYIT

SEQ ID NO: 3651 - protein, 526 aa, Unknown
  Description of Unknown: Integrase B3652 sequence
  SM00857,G3DSA:1.10.10.2600,IPR036162,PF13408,PS51737, IPR025827,G3DSA:3.40.50.1390,IPR006119,IPR038109,PF07508, IPR011109,SSF53041,PTHR30461,Coil,PS51736, cd00338,PF00239
MQYCLYLRKSRADSEAEARGEGETLARHEKALLDLAKKLNLNITAIYREIVSGETIAARPVMQQLLQEVEQGIWDGVLVMEVERLARGDTIDQGIVAQTFKFSDTKIITPIKTYNPNNEFDEEYFEFGLFMSRREYKTINRRLQRGRMASVKDGKYVANKAPYGYNRIRIENDKGWTLEINKEEADVVRLIFELYTVGEKQSDSTFNRLGTGFIAKRLNAMKVPPKRGKVWVVASIRDILINPVYIGMIRWNWRPQQKKMIDGQLHISRPRATDYMLCKGLHPPIISKETFDIAQDLMRHNPARPIGEKNTVKNSLSGIVICGNCGRHMVRRPHTKYPDMLICSEPTCNNVGSQLRVVEERILQSLKEWLGEYKISWDITSPQIERISQVSIKKKALQKEQHELDTLNKQISKTHDLLEQGIYTTDVFLERSRALSLRMDEVKEHIAILDKELKTEITREDSAVNIIPKVEKLLEVYHDLPSPKAKNDMLKDVLEKVVYTKKERSKKGNLDNFNITIYPKIPKYIT

SEQ ID NO: 3652 - protein, 526 aa, Unknown
  Description of Unknown: Integrase B3653 sequence
  PTHR30461:SF3,SM00857,G3DSA:1.10.10.2600,IPR036162,PS51737, G3DSA:3.40.50.1390,IPR006119,IPR038109,PF07508,IPR011109, SSF53041,PTHR30461,Coil,PS51736,cd00338, PF00239
MINMVSFDNIIIYLRKSRSDDPAQTVEEVLAKHERILQDYCIKEYGKVIPEKRIYREVVSGETIQDRPVMQKLLKELETNNIYGVLIVEPQRLSRGDLQDCGQIINSFRYTNTAVITPGKTYNLQDEYDRKFFEMELTRGNDYLEYTKKILNRGRVASVKQGNYICSVRPYGYKKVVIGTGKDKCHTLEIIPEEAETIKLMYHLYLDENMGFTNIARTLDSMHIKPLKSSNWSAATIRDMIDNPIYIGKIVWNNRKVVKKWENEQIIKVRPRNKGDDVICVDGKHEAIIDEETFNAARQKRGLTPKVRKFKELRNPLAGILFCSTCGHSMSMKKYVDNRSHTGKVTTIMLCNKQAVCHTKSAQYEQIVAKIKESLADAIANFEIKMKEQENNNIDIHKQRITSLKDELNRLYNKDVRQKDAFEDGIYTKEEYIERNSKLQSQILNIKAEIENEKNNTPVIIDYQNKITTFTECLTSLDDDSISAADKNSLLKNCIDKIIYHNDMPSLPGIGRYIENSFRLEIFLKM

SEQ ID NO: 3653 - protein, 526 aa, Unknown
  Description of Unknown: Integrase B3654 sequence
  PTHR30461:SF3,SM00857,G3DSA:1.10.10.2600,IPR036162,PS51737, G3DSA:3.40.50.1390,IPR006119,IPR038109,PF07508,IPR011109, SSF53041,PF00239,PTHR30461,PS51736,Coil, cd00338
MPYCIYLRKSRADAEAELAGEGETLARHEKTLLALAKKLKLPITKIYKEILSGETIAGRPVMQQLLQDVEAGIWQGVLVMEVERLGRGNTLDQGIILNAFKYSSTKIITPMKSYDPNDEFDEEYFEFSQFMSRREYKTILRRMQRGREASVKEGKFAGSIAPFGYRRVKLPQEKGFTLEIDDIEATAVKLAYELYAYGDPQPDGTFADIGRATIAKRLDQMGIRNRKGGTWATASVTRMLQNPVYIGKVHWNRRPEKKHTENGKIKKTRPLAENYLLVDGLHEPIISEELWNLAQAKMKQHYRPTGVNGIMQNPLAGLVHCSYCGNAMQRRPYLKTGQPASLICHTHFCPQISSPLYMVEGKILEALSLWMKQHEPTWEDESSINVFSTKIMALEHTIADMEQELQGLQFQFEKIFEFLETGIYTPEVFTARNKTLSEKMAEIRSAIEETQAELSNLKAARKNQVSMIPKIKNILDTYETLTPAEKNKLLKEVLDHVEYHKKIKGKKNVSADNFEIILFPKISPEN

SEQ ID NO: 3654 - protein, 526 aa, Unknown
  Description of Unknown: Integrase B3655 sequence
  SM00857,G3DSA:1.10.10.2600,IPR036162,PF13408,PS51737, G3DSA:3.40.50.1390,IPR025827,IPR006119,IPR038109,PF07508, IPR011109,SSF53041,PTHR30461,Coil,PS51736, cd00338,PF00239
MQYCLYLRKSRADSEAEALGEGETLARHEKALLDLAKKLNLNITAIYREIVSGETIAARPVMQQLLQEVEQGIWDGVLVMEVERLARGDTIDQGIVAQTFKFSDTKIITPIKTYNPNNEFDEEYFEFGLFMSRREYKTINRRLQRGRMASVKDGKYVANKAPYGYNRIRIENDKGWTLEINKEEADVVRLIFELYTVGEKQSDNTFNRLGTGFIAKRLNTMKVSPKRGKVWVVASIRDILINPVYIGMIRWNWRPQQKKMIDGQLHISRPRATDYMLCKGLHPPIISKETFDIAQDLMQHNPARPIGEKNTVKNSLSGIVVCGDCGRHMVRRPHTKYPDMLICSEPTCNNVGSQLRVVEERILQSLKEWLGEYKISWDITSPPVERISQVSIKKKALQKEQHELDTLNKQISKTHDLLEQGIYTTDVFLERSRALSLRIDEVKEHIAILDKELKTEITREDSAVNIIPKVEKLLEVYHDLPSPKAKNDMLKDVLEKVVYTKKERSKKGNLDNFNITIYPKIPKYIT

SEQ ID NO: 3655 - protein, 526 aa, Unknown
  Description of Unknown: Integrase B3656 sequence
  PTHR30461:SF3,SM00857,G3DSA:1.10.10.2600,IPR036162,PF13408, IPR025827,G3DSA:3.40.50.1390,PS51737,IPR006119,IPR038109, PF07508,IPR011109,SSF53041,PTHR30461,Coil, PS51736,cd00338,PF00239
MNTVIYARYSAGPRQTDQSIEGQLRVCTDFCKQRGLTVIDTYCDRHISGRTDERPEFQRLITDAKRKKFEAVVVYKTDRFARNKYDSAVYKRELKRNGIQIFYAAEAIPDGPEGIILESLMEGLAEYYSAELAQKIKRGMHESALKCQSTGSGRPLGYRVDEQKHFQIDPESAQTVQTIFEQYIKGESNAAICELLNSRGLRTAQGKPFNKNSINRIIKNRKYIGEYRYHDIIVEGGMPAIISKDTFNLAQAEMERRRTRKAPKSPKAEYLLAGRLFCGHCKGPMQGVSGTGKSGNKWYYYYCGNTRGKNKTCDKKQVSRDRLERAVVDFTVRYILQEEVLEELARKVHAAQERQNDTASEIAFYEKKLADNKKSIANVLRAIESGTATQTLPARLQELENEQAVILGEISFLKGKRLAFTEDQIFFALMKHLKPYPGESEQDYRRRIISDFVSEVYLYDGRLLIYFNISSEDGKLKSADLSNIEGGEFDEGLVGSTNLIAGRTPKVTIVVLPYGFVLAAQIKDRP

SEQ ID NO: 3656 - protein, 526 aa, Unknown
  Description of Unknown: Integrase B3657 sequence
  PTHR30461:SF3,SM00857,G3DSA:1.10.10.2600,IPR036162,PS51737, G3DSA:3.40.50.1390,IPR006119,IPR038109,PF07508,SSF53041, IPR011109,PTHR30461,Coil,PS51736,cd00338, PF00239
MPYCIYLRKSRADAEAELAGEGETLARHEKTLLALAKKLKLPITKIYKEILSGETIAGRPVMQQLLQDVEAGIWQGVLVMEVERLGRGNTLDQGIILNAFKYSSTKIITPMKSYDPNDEFDEEYFEFSQFMSRREYKTILRRMQRGREASVKEGKFAGSIAPFGYRRVKLPQEKGFTLEIEDAEAAAVRLAYELYAYGDPQPDGTFADIGRATIAKRLDQMGIRNRKGGTWATASVTRMLQNPVYIGKVHWNRRPEKKHTENGKIKKARPLAENYLLVDGLHEPIIPEELWNLAQAKMKQHYRPTGVNGIMQNPLAGLVHCSYCGNAMQRRPYLKTGQPASLICTTHFCPQISSPLYMVEGKILEALSLWMKQHEPTWEEESSADVFSTKIMALEHAIADMEQELQGLQSQFEKIFEFLETGIYTPEVFTARNKTLSEKMAEIRSAIEETQAELSKLKAARKNQVSMIPKIKNILDTYETLTPAEKNKLLKEVLDHVEYHKKIKGKKNVPADNFEIILFPKISPEN

SEQ ID NO: 3657 - protein, 526 aa, Unknown
  Description of Unknown: Integrase B3658 sequence
  PTHR30461:SF3,SM00857,G3DSA:1.10.10.2600,IPR036162,PS51737, G3DSA:3.40.50.1390,IPR006119,IPR038109,PF07508,IPR011109, SSF53041,PTHR30461,Coil,PS51736,cd00338, PF00239
MDEYCLYLRKSRIDLEAEANGQGDTLARHRAALLKLAQKRGFNITGCYEEVRSGESIAARPEMQRLLNDVEDGRWAGVLVMEVERLARGNTTDQGIVADTFKYSDTKIVTPNKIYDPGDEFDEEYFEFGLFMSRREYKTINRRLQRGRRASLSEGKYIAGKATYGYERYKLSGEKGYSLRIIPEQAEIVRQIYNWYVNGELLPDGTLRPLGSYTIAKRLDARGIPSPTGGKWPPCTVKDILTNPTYIGKLRWSYRPTVKRMVDGELVKTRPVDRSVHLSDGRHEPILDEVLWHRAQLMLKNRSHAPVPKSTNIRNPLAGLLICSKCGRSMERRKFKHGRDTVACPNKDCTCKSSVLEEVEAGMPDSLRIWLSDYKVKLAQSQETISHTGPTAEQEITSLQRTLGTLQAQMENLYNLVEQGVYSTDLFLQRSQALTARMAEVNQQIESTQAALTASRRIARNRFEIIPRIERVLALYPTLTDPREKNTILKEVLEKILYTKTTGSRWEASDMNLYVFPRVETDGEQL

SEQ ID NO: 3658 - protein, 526 aa, Unknown
  Description of Unknown: Integrase B3659 sequence
  SM00857,G3DSA:1.10.10.2600,IPR036162,PF13408,PS51737, IPR025827,G3DSA:3.40.50.1390,IPR006119,IPR038109,PF07508, IPR011109,SSF53041,PTHR30461,Coil,PS51736, cd00338,PF00239
MQYCLYLRKSRADSEAEALGEGETLARHEKALLDLAKKLNLNITAIYREIVSGETIAARPVMQQLLQEVEQGIWDGVLVMEVERLARGDTIDQGIVAQTFKFSDTKIITPIKTYNPNNEFDEEYFEFGLFMSRREYKTINRRLQRGRMASVKDGKYVANKAPYGYNRIRIENDKGWTLEINKEEADVVRLIFELYTVGEKQSDNTFNRLGTGFIAKRLNAMKVPPKRGKVWVVASIRDILINPVYIGMIRWNWRPQQKKMIDGQLHISRPRATDYLLCKGLHPPIISKETFNIAQDLMRHNPARPIGEKNTVKNSLSGIVVCGNCGRHMVRRPHTKYPDMLICSEPTCNNVGSQLRVVEERILQSLKEWLGEYKISWDITSPPVERISQVSIKKKALQKEQHELDTLNKQISKTHDLLEQGIYTTDVFLERSRALSLRMDEVKEHIAILDKELKTEITREDSAVNIIPKVEKLLEVYHDLPSPKAKNDMLKDVLEKVVYTKKERSKKGNLDNFNITIYPKIPKYIT

SEQ ID NO: 3659 - protein, 526 aa, Unknown
  Description of Unknown: Integrase B3660 sequence
  SM00857,G3DSA:1.10.10.2600,IPR036162,PF13408,PS51737, IPR025827,G3DSA:3.40.50.1390,IPR006119,IPR038109,PF07508, IPR011109,SSF53041,PF00239,PTHR30461,PS51736, Coil,cd00338
MAKVTIIPSKINPITLTPVGQVAKRKVAAYARVSTDSDEQYTSYDAQVTYYTNFINGKPNWEFVKVYADEGISGTSTKRRDEFKEMIESALNGKIDLIITKSISRFARNTLDTISITRQLKAKGIEVYFEKENLWSLDDKTEFLLTIMASIAQEESRSISQNITIGKRWGMKEGKVSFAYKNFLGYKKVDGKIVIDEAQAETVRLIYMMFLKEGKTCTGIAEFLKSKGIPTPSGKSCNWTKNTVYSILTNEKYKGDALLQKKYTADYLEHRVVPNNGELPQYYVENNHPAIIEREVWEMVQTEMMRRSMLGAAYSGNSIFASKLICGDCGKPYGKKKWHSTSKYAREIYRCNAKYNKGQTQCQTPSLTEEDIKARFIKAYNLVMCDKQQVIEDTLAVIELLADTTDLDAEIANLQTEIERISSDVSLMVRENARTQQDQIKFAARYEELTKEYETQKAALEKAVKEKAYKTGKATKMRAYLETMKQADDFLEEWSDEAWILMVETATVNRDKTITFKFANGKEIAV

SEQ ID NO: 3660 - protein, 526 aa, Unknown
  Description of Unknown: Integrase B3661 sequence
  PTHR30461:SF3,SM00857,G3DSA:1.10.10.2600,IPR036162,PF13408, IPR025827,G3DSA:3.40.50.1390,PS51737,IPR006119,IPR038109, PF07508,IPR011109,SSF53041,PF00239,PTHR30461, PS51736,Coil,cd00338
MKKKPIEPEMQDAVIYTRYSSHNQRDCSIEQQVADCEIFARQNNLRVVKVYADRHLSGTTDNRPQFQQMLKDASHGHWAYVICWKIDRFARNRYDSATYKFRLKKAGVRVLYAKESIPDGPEGILLESVLEGSAEYYSAALAQNIRRGMKFNAEQCKVNSGSIPFGYCKGPDGRFAVHEANAEVVREIFRKAAAGMPFVDIANDLNSRGLKTSRGGRWNKGSFRLLMNEAYIGVYHFSDTRIEGGMPALIDQGTFWAANERLKANSSVRGRHQDGGDYLLTGKLKCAHCGSYMIGFSGTGKSGELHYYYGCQKRRRERACKKANVPREWIERVVVKAALDYVLRPEVMEWIADAVMEYQEREAASAQLAALTAELEENRKATDNVMKAIEAGIITSTTKQRLLDLEAKAQDLKRAIELEKLSHVRLERDQILFWLDRFRGGSLQSQEFRRKVIDAFVSVVYLFDDHLRIAFNYSGGSNAEADFDLVMDAEAAAGELSKKFAQVKGRGYLVLLFSDSIGYSRLYFCC

SEQ ID NO: 3661 - protein, 526 aa, Unknown
  Description of Unknown: Integrase B3662 sequence
  PTHR30461:SF3,SM00857,G3DSA:1.10.10.2600,IPR036162,PF13408, PS51737,IPR025827,G3DSA:3.40.50.1390,IPR006119,IPR038109, PF07508,IPR011109,SSF53041,PF00239,PTHR30461, PS51736,Coil,cd00338
MARKKKFAPNDNNLAIAYYRFSSHSQNEASIDQQRELAHEWADAHGFKIVQEYEDAAISGTTDARPGFQQMLSEVAKIRPHTLIMWKTDRLGRDKYVLAMAKKKIRDAGCEIHLLAEHIPTEGPEGVLIEGLMEAMAEYYSRQLSQNIQRGMDYNAQHALYNGHKLFGYDVDRSTKKYIPDPNTAPFVQWAFGEYASGKPLKTIAEEMNAQGLRTPRNAKFSVNMLNKMLKNRAYIGEYHHGDITVASGMPVLVDEATFDRAQRRFAENKRKGSQRAHGMDDAEAPRYWLTGKLYCGECGSTMQGVSGTSKTGRTYYYYYCSAQRRKECHLHKARKRDLEDMVLFALHNIVDDEENVTALALDAAEYYEKNHNDTAYLEALEAKRREVEKSLANLVKVIERGVVSDTVTERLTQLEEQKSALNDAIETENVRASLCEDRHSIQAYFDKFLHADVNDPEIRDQVFEYFVDKVYLYDDKLVVSMWFSEDDKQEITWRDWFSLDEYWTDESPFVKGEAAEFDCFPLGST

SEQ ID NO: 3662 - protein, 526 aa, Unknown
  Description of Unknown: Integrase B3663 sequence
  PTHR30461:SF3,SM00857,G3DSA:1.10.10.2600,IPR036162,PS51737, G3DSA:3.40.50.1390,IPR006119,IPR038109,PF07508,IPR011109, SSF53041,PTHR30461,Coil,PS51736,cd00338, PF00239
MPYCIYLRKSRADAEAELAGEGETLARHEKTLLALAKKLKLPITKIYKEILSGETIAGRPVMQQLLQDVEAGIWQGVLVMEVERLGRGNTLDQGIILNAFKYSSTKIITPMKSYDPNDEFDEEYFEFSQFMSRREYKTILRRMQRGREASVKEGKFAGSIAPFGYRRVKLPQEKGFTLEIEDAEAAAVRLAYELYAYGDPQPDGTFADIGRATIAKRLDQMGIRNRKGGTWATASVTRMLQNPVYIGKVHWNRRPEKKHTENGKIKKTRPLAENYLLVDGLHEPIISEELWNLAQAKMKQHYRPTGVNGIIQNPLAGLVHCSYCGNAMQRRPYLKTGQPASLICHTHFCPQISSPLYMVEGKILEALSLWMKQHEPTWEEESSADVFSTKIMALEHAIADMEQELQGLQSQFEKIFEFLETGIYTPEVFTARNKTLSEKIAEIRSAIEETQAELSKLKAARKNQVSMIPKIKNILDTYETLTPAEKNKLLKEVLDHVEYHKKIKGKKNVPADNFEIILFPKISPEN

SEQ ID NO: 3663 - protein, 526 aa, Unknown
  Description of Unknown: Integrase B3664 sequence
  PTHR30461:SF3,SM00857,G3DSA:1.10.10.2600,IPR036162,PF13408, IPR025827,G3DSA:3.40.50.1390,PS51737,IPR006119,IPR038109, PF07508,IPR011109,SSF53041,PTHR30461,Coil, PS51736,cd00338,PF00239
MNTVIYARYSAGPRQTDQSIEGQLRVCTDFCKQRGLTVIDTYCDRHISGRTDERPEFQRLIADAKRKKFEAVVVYKTDRFARNKYDSAVYKRELKRNGIQIFYAAEAIPDGPEGIILESLMEGLAEYYSAELAQKIKRGMHESALKCQSTGSGRPLGYRVDEQKHFQIDPESAQTVQTIFEQYIKGESNAAICELLNSRGLRTAQGKPFNKNSINRIIKNRKYIGEYRYHDIVVEGGIPAIISKDTFNLAQAEMERRRTRKAPKSPKAEYLLAGRLFCGHCKGPMQGVSGTGKSGNKWYYYYCGNTRGKNKTCDKKQVSRDRLERAVVDFTVRYILQEEVLEELARKVHAAQERQNDTASEIAFYEKKLADNKKSIANVLRAIESGAATQTLPARLQELENEQAVILGELSFLKGKRLAFTEDQILFALMKHLEPYPGEPEQDYRRRIISDFVSEVYLYDDQLLIYFNISSEDGKLKSADLSNIECGEFDEGLISSTNLIAGRTPEVTIVVLPYGFVLATQIKDRL

SEQ ID NO: 3664 - protein, 526 aa, Unknown
  Description of Unknown: Integrase B3665 sequence
  SM00857,G3DSA:1.10.10.2600,IPR036162,PF13408,PS51737, G3DSA:3.40.50.1390,IPR025827,IPR006119,IPR038109,PF07508, IPR011109,SSF53041,PTHR30461,Coil,PS51736, cd00338,PF00239
MQYCLYLRKSRADSEAEARGEGETLARHEKALLDIAKKLNLNITAIYREIVSGETIAARPVMQQLLQEVEQGIWDGVLVMEVERLARGDTIDQGIVAQTFKFSDTKIITPIKTYNPNNEFDEEYFEFGLFMSRREYKTINRRLQRGRMASVKDGKYVANKAPYGYNRIRIENDKGWTLEINKEEADVVRLIFELYTVGEKQSDNTFNRLGTGFIAKRLNAMKVPPKRGKVWVVASIRDILINPVYIGMIRWNWRPQQKKMIDGQLHISRPRATDYLLCKGLHPPIISKETFNIAQDLMRHNPARPIGEKNTVKNSLSGIVVCGNCGRHMVRRPHTKYPDMLICSEPTCNNVGSQLRVVEERILQSLKEWLGEYKISWDITSPPVERISQVSIKKKALQKEQHELDTLNKQISKTHDLLEQGIYTTDVFLERSRALSLRMDEVKEHIAILDKELKTEITREDSAVNIIPKVEKLLEVYHDLPSPKAKNDMLKDVLEKVVYTKKERSKKGNLDNFNIAIYPKIPKYIT

SEQ ID NO: 3665 - protein, 526 aa, Unknown
  Description of Unknown: Integrase B3666 sequence
  PTHR30461:SF3,cd00338,SM00857,G3DSA:1.10.10.2600,IPR036162, PF13408,IPR025827,PS51737,G3DSA:3.40.50.1390,IPR006119, IPR038109,PF07508,IPR011109,SSF53041,PTHR30461, PS51736,Coil,PF00239
MKKKPIEPEMQDAVIYTRYSSHNQRDCSIEQQVADCEIFARQNNLRVVKVYADRHLSGTTDNRPQFQQMLKDASHGHWAYVICWKIDRFARNRYDSATYKFRLKKAGVRVLYAKESIPDGPEGILLESVLEGSAEYYSAALAQNIRRGMKFNAEQCKVNSGSIPFGYCKGPDGRFAIHEANAEVVREIFRKAAAGMPFVDIANDLNSRGLKTSRGGRWNKGSFRLLMNEAYIGVYHFSDTRIEGGMPALIDQGTFWAANERLKANSSVRGRHQDGGDYLLTGKLKCAHCGSYMIGFSGTGKSGELHYYYGCQKRRLERACKKANVPREWIERVVVKAALDYVLRPEVMEWIADAVMEYQEREAASAQLAALTAELEENRKATDNVMKAIEAGIITSTTKQRLLDLEAKAQDLKRAIELEKLSHVRLERDQILFWLDRFRGGSLQSQEFRRKVIDAFVSVVYLFDDHLRIAFNYSGGSNAEADFDLVMDAEAAAGELSKKFAQGHVASTKQQPEINVVLLISGCFSL

SEQ ID NO: 3666 - protein, 526 aa, Unknown
  Description of Unknown: Integrase B3667 sequence
  PTHR30461:SF3,cd00338,SM00857,G3DSA:1.10.10.2600,IPR036162, PF13408,PS51737,G3DSA:3.40.50.1390,IPR025827,IPR006119, IPR038109,PF07508,IPR011109,SSF53041,PTHR30461, Coil,PF00239
MKRVLCLYRVSTIGQVDHDDIPMQRVACREFIDRQKDWTLVDEVLEKGVSGYKTKTADRDALTEIKAKATAKKFDILLVFMFDRLGRREDETPFVVQWFVENGIEVWSVKEGQQRFDTHVDKLLNYIRFWQASGESEKTSLRIRTKHLQMIQEGLYRGGLVPFGYRLEHLGRTNKKNQSVRDLVIDETESAIVKEIYYKIISEGWGTNRIANWLNERGIQTKRGKPGAFWRATSIRAIVRNPIYIGKIRFGDELSESFEHLRIIDDFSFNLCEQILEERIPAASRDRTRSLRSTSPALLTGILFCGSCGGRMCFNHNSTVKYLADGTKRAYERDVYRCYRKVSHHGGCSGRSTYPLEKIEEAVLKIVHQYFENIRSVPTVQMLAAARQRSDSVDEIALANAEEALQKAQAEMSALEDEAVKALTGESKLDISFINGLIPKRRATLEKATEELARLRGVIAETEKKNASINQELKIILSWADAFDSASTDVKRSIISALIDRITVYDDCSLDIHFRISAEQFLGKAA

SEQ ID NO: 3667 - protein, 526 aa, Unknown
  Description of Unknown: Integrase B3668 sequence
  SM00857,G3DSA:1.10.10.2600,IPR036162,PF13408,IPR025827, PS51737,G3DSA:3.40.50.1390,IPR006119,IPR038109,PF07508, IPR011109,SSF53041,PTHR30461,Coil,PS51736, cd00338,PF00239
MQYCLYLRKSRADSEAEALGEGETLARHEKALLDLAKKLNLNITAIYREIVSGETIAARPVMQQLLQEVEQGIWDGVLVMEVERLARGDTIDQGIVAQTFKFSDTKIITPIKTYNPNNEFDEEYFEFGLFMSRREYKTINRRLQRGRMASVKDGKYVANKAPYGYNRIRIENDKGWTLEINKEEADVVRLIFELYTVGEKQSDNTFNRLGTGFIAKRLNAMKVPPKRGKVWVVASIRDILINPVYIGMIRWNWRPQQKKMIDGQLHISRPRATDYLLCKGLHPPIISKETFNIAQDLMRHNPARPIGEKNTVKNSLSGIVVCGDCGRHMVRRPHTKYPDMLICSEPTCNNVGSQLRVVEERILQSLKEWLGEYKISWDITSPPVERISQVSIKKKALQKEQHELDTLNKQISKTHDLLEQGIYTTDVFLERSRALSLRMDEVKEHIAILDKELKTEITREDSAVNIIPKVEKLLEVYYDLPSPKAKNDMLKDVLEKVVYTKKERSKKGNLDNFDIAIYPKIPKYIT

SEQ ID NO: 3668 - protein, 526 aa, Unknown
  Description of Unknown: Integrase B3669 sequence
  SM00857,G3DSA:1.10.10.2600,IPR036162,PF13408,PS51737, IPR025827,G3DSA:3.40.50.1390,IPR006119,IPR038109,PF07508, IPR011109,SSF53041,PTHR30461,Coil,PS51736, cd00338,PF00239
MQYCLYLRKSRADSEAEALGEGETLARHEKALLDLAKKLNLNVTAIYREIVSGETIAARPVMQQLLQEVEQGIWDGVLVMEVERLARGDTIDQGIVAQTFKFSDTKIITPIKTYNPNNEFDEEYFEFGLFMSRREYKTINRRLQRGRMASVKDGKYVANKAPYGYNRIRIENDKGWTLEINKEEADVVRLIFELYTVGEKQSDNTFNRLGTGFIAKRLNTMKVSPKRGKVWVVASIRDILINPVYIGMIRWNWRPQQKKMIDGQLHISRPRATDYMLCKGLHPPIISKETFDIAQDLMQHNPARPIGEKNTVKNSLSGIVVCGDCGRHMVRRPHTKYPDMLICSEPTCNNVGSQLRVVEERILQSLKEWLGEYKISWDITSPPVERISQVSIKKKALQKEQHELDTLNKQISKTHDLLEQGIYTTDVFLERSRALSLRMDEVKEHIAILDKELKTEITREDSAVNIIPKVEKLLEVYHDLPSPKAKNDMLKDVLEKVVYTKKERSKKGNLDNFNITIYPKIPKYIT

SEQ ID NO: 3669 - protein, 526 aa, Unknown
  Description of Unknown: Integrase B3670 sequence
  SM00857,G3DSA:1.10.10.2600,IPR036162,PF13408,PS51737, G3DSA:3.40.50.1390,IPR025827,IPR006119,IPR038109,PF07508, SSF53041,IPR011109,PTHR30461,Coil,PS51736, cd00338,PF00239
MQYCLYLRKSRADSEAEARGEGETLARHEKALLDLAKKLNLNITAIYREIVSGETIAARPVMQQLLQEVEQGIWDGVLVMEVERLARGDTIDQGIVAQTFKFSDTKIITPIKTYNPNNEFDEEYFEFGLFMSRREYKTINRRLQRGRMASVKDGKYVANKAPYGYNRIRIENDKGWTLEINKEEADVVRLIFELYTVGEKQSDNTFNRLGTGFIAKRLNAMKVPPKRGKVWVVASIRDILINPVYIGMIRWNWRPQQKKMIDGQLHISRPRATDYLLCKGLHPPIISKETFNIAQDLMRHNPARPIGEKNTVKNSLSGIVVCGNCGRHMVRRPHTKYPDMLICSEPTCNNVGSQLRVVEERILQSLKEWLGEYKISWDITSPPVERISQVSIKKKALQKEQHELDTLNKQISKTHDLLEQGIYTTDVFLERSRALSLRMDEVKEHIAILAKELKTEITREDSAVNIIPKVEKLLEVYHDLPSPKAKNDMLKDVLEKVVYTKKERSKKGNLDNFNITIYPKIPKYIT

SEQ ID NO: 3670 - protein, 526 aa, Unknown
  Description of Unknown: Integrase B3671 sequence
  PTHR30461:SF3,SM00857,G3DSA:1.10.10.2600,IPR036162,PF13408, PS51737,G3DSA:3.40.50.1390,IPR025827,IPR006119,IPR038109, PF07508,IPR011109,SSF53041,PTHR30461,PS51736, cd00338,PF00239
MSTNAVIYARFSSDKQREESIDGQIRECKAFAKANQLNVIAIYIDRAMSARTDHRPDFLRMIKDSRSGAFDYVLVYQLDRFSRSRYDSAIYKHELKKNGVKVLSAKENITDSPTGIMLEAMLEGYAEYYSAELSQKVRRGMTENLLEHKWNGSPVPLGYALDANHRLVIDPDMAPHVKALFEMFLAGKSYAELARYLDEKHIRTVTGRKYTGPTVHNLMSRQLYTGTYTWGGQVIEDFCPAIISKSDFSRAALRMANRKRTAKDGIPMSVRRSPEYVLTGIIYCGECGRTMTGYSGRGQNGDRYYYYRCNSNNNRCRQTEKIKCKNHPIRRNRLEDLVLQTTVNILSDKEAVAAIAEQVSRIKLENPYASELSNIKSRLADLKKRHDNSVKAIEAGVMSQAIMDNVCKYEAEMDNLKARQEKIKLATPSLRIDPVAVEYFLKNLLLNKKQHDKYRLDFFEVFIHRVVVYHDKVEIQYNYLPGHKLENPITTPLPGCSNLNKVVVRNVINSKPIYFTDDYFYILCSA

SEQ ID NO: 3671 - protein, 526 aa, Unknown
  Description of Unknown: Integrase B3672 sequence
  PTHR30461:SF3,cd00338,SM00857,G3DSA:1.10.10.2600,IPR036162, PF13408,PS51737,G3DSA:3.40.50.1390,IPR025827,IPR006119, IPR038109,PF07508,IPR011109,SSF53041,PTHR30461, PS51736,Coil,PF00239
MAQRKVTAIPATISRYTATPINSTKKRRVAGYARVSTDHEDQTTSYEAQVDYYTNYIRSRDDWEFVAIYTDEGISATNTKKREGFKTMIADALAGKIDLIVTKSVSRFARNTVDSLTTVRKLKDKGIEIYFEKENIWTLDSKGELLITIMSSLAQEESRSISENVTWGQRKRMADGKVSFAYSRFLGLDKDKETGKIVVNPEQAETVRLIFHLFLEGMTPHSIAAELTSRGIKTPAGKDVWNQQTVRRMLSNEKYKGDALLQKEFTVDFLQKKMKKNEGEVPQYYVEGNHEAIISPAVFDLVQAELAKRTKGGSRYSGVSIFSNKIKCGDCGGWYGSKVWHSTDRYRKVIYRCNRKYNGEKCGTPHVTEDEVKAAFISAYNQLVTEKKEIIANAELIRRTLCVTDSLQEEKSKLEEEIAVLVEMTQNIVAENARVAQDQDEYQKRYDSLVERYDTAKARYDEVVEAIAAKEAQSERLSNFIKVLKSQDGTIREFDGKLWGSVVEFVTVGRDKAITVTFRDGSEIQA

SEQ ID NO: 3672 - protein, 526 aa, Unknown
  Description of Unknown: Integrase B3673 sequence
  PTHR30461:SF3,SM00857,G3DSA:1.10.10.2600,IPR036162,PS51737, G3DSA:3.40.50.1390,IPR006119,IPR038109,PF07508,IPR011109, SSF53041,PF00239,PTHR30461,PS51736,Coil, cd00338
MINMVSFDNIIIYLRKSRSDDPAQTVEEVLAKHERILQDYCIKEYGKVIPEKRIYREVVSGETIQDRPVMQKLLKELETNNIYGVLIVEPQRLSRGDLQDCGQIINSFRYTNTAVITPGKTYNLQDEYDRKFFEMELTRGNDYLEYTKKILNRGRVASVKQGNYICSVRPYGYKKVVIGTGKDKCHTLEIIPEEAEAIKLMYHLYLDENMGFTNIARTLDSMHIKPLKSSNWSAATIRDMIDNPIYIGKIVWNNRKVVKKWENEQIIKVRPRNKGDDVICVDGKHEAIIDEETFNAARQKRGLTPKVRKFKELRNPLAGILFCSTCGHSMSMKKYVDNRSHTGKVTTIMLCNKQAVCHTKSAQYEQIVAKIKESLADAIANFEIKMKEQENNNIDIHKQRITSLKDELNRLYNKDVRQKDAFEDGIYTKEEYIERNSKLQSQILNIKAEIENEKNNTPVIIDYQNKITTFTECLTSLDDDSISAADKNSLLKNCIDKIIYHNDMPSLPGIGRYIENSFRLEIFLKM

SEQ ID NO: 3673 - protein, 526 aa, Unknown
  Description of Unknown: Integrase B3674 sequence
  PTHR30461:SF3,cd00338,SM00857,G3DSA:1.10.10.2600,IPR036162, PF13408,PS51737,G3DSA:3.40.50.1390,IPR025827,IPR006119, IPR038109,PF07508,IPR011109,SSF53041,PTHR30461, PS51736,Coil,PF00239
MYEDIKTACLYVRFSSHNQTEQSIEGQTRVCRDFCKRHNIRIVEIYADRATSASKDIEKRVQFLKMIKDSEKGLFDAVIVYKLDRFARSRYDSATYKYRLKRNGVQLISATENISNDPEGIILESVLEGMAEFYSAELSQKINRGMRESAYKHNSIGGAVPLGYKIEDKKLVIDPKTAPIVKEAFEKYADGETVAEICRQFNARGYKTSKGTAFGKSSFTKIFRNERYIGVYTFHDYRAEDAIPAIIDKDLWDRVQLRVGKIKNAPARNKAKVVYLLSGKIFCGHCGSKMNGNCNAGNYYYYQCYGKKNGNVDCKKKNIRKEFIERLVAQDALSLLTDEYIEQIATIACEKNQHEIELDSALPTIRDRIHQVDLSLNNLLKAIESGSAPDMLVKRMGELEKEKKDLQVQAKKESEDIVELDKAQVIYWLEQFRGGSIEDEEFCRMLIDLFVNSVTVWDEDDNTYKVTVAYNLTSLPTKTYRLNKGGTLSDFASNAPDRESNKDGVVFVHVITLGGDDRARGRDNVQ

SEQ ID NO: 3674 - protein, 526 aa, Unknown
  Description of Unknown: Integrase B3675 sequence
  SM00857,G3DSA:1.10.10.2600,IPR036162,PF13408,PS51737, IPR025827,G3DSA:3.40.50.1390,IPR006119,IPR038109,PF07508, IPR011109,SSF53041,PTHR30461,Coil,PS51736, cd00338,PF00239
MQYCLYLRKSRADSEAEARGEGETLARHEKALLDLAKKLNLNITAIYREIVSGETIAARPVMQQLLQEVEQGIWDGVLVMEVERLARGDTIDQGIVAQTFKFSDTKIITPIKTYNPNNEFDEEYFEFGLFMSRREYKTINRRLQRGRMASVKDGKYVANKAPYGYNRIRIENDKGWTLEINKEEADVVRLIFELYTVGEKQSDNTFNRLGTGFIAKRLNAMKVPPKRGKVWVVASIRDILINPVYIGMIRWNWRPQQKKMIDGQLHISRPRATDYVLCNGLHPPIISKETFDMAQELMRHNPARPIGEKNTVKNSLSGIVVCGDCGRHMVRRPHTKYPDMLICSEPTCNNVGAQLRVVEERILQSLKEWLGEYKISWDITSPPVERISQVSIKKKALQKEQHELDTLNKQISKTHDLLEQGIYTTDVFLERSRALSLRMDEVKEHIAILDKELKTEITREDSAVNIIPKVEKLLEVYHDLPSPKAKNDMLKDVLEKVVYTKKERSKKGNLDNFNITIYPKIPKYIT

SEQ ID NO: 3675 - protein, 526 aa, Unknown
  Description of Unknown: Integrase B3676 sequence
  SM00857,G3DSA:1.10.10.2600,IPR036162,PF13408,IPR025827, G3DSA:3.40.50.1390,PS51737,IPR006119,IPR038109,PF07508, IPR011109,SSF53041,PTHR30461,Coil,PS51736, cd00338,PF00239
MQYCLYLRKSRADSEAEALGEGETLARHEKALLDLAKKLNLNITAIYREIVSGETIAARPVMQQLLQEVEQGIWDGVLVMEVERLARGDTIDQGIVAQTFKFSDTKIITPIKTYNPNNEFDEEYFEFGLFMSRREYKTINRRLQRGRMASVKDGKYVANKAPYGYNRIRIENDKGWTLEINKEEADVVRLIFELYTVGEKQSDNTFNRLGTGFIAKRLNTMKVSPKRGKVWVVASIRDILINPVYIGMIRWNWRPQQKKMIDGQLHISRPRATDYMLCKGLHPPIISKETFDIAQDLMQHNPARPIGEKNTVKNSLSGIVVCGDCGRHMVRRPHTKYPDMLICSEPTCNNVGSQLRVVEERILQSLKEWLGEYKISWDITSPPVERISQVSIKKKALQKEQHELDTLNKQISKTHDLLEQGIYTTDVFLERSRALSLRMDEVKEHIAILDKELKTEITREDSAVNIIPKVEKLLEVYHDLPSPKAKNDMLKDVLEKVVYTKKERSKKGNLDNFNITIYPKIPKYIT

SEQ ID NO: 3676 - protein, 526 aa, Unknown
  Description of Unknown: Integrase B3677 sequence
  SM00857,G3DSA:1.10.10.2600,IPR036162,PF13408,PS51737, IPR025827,G3DSA:3.40.50.1390,IPR006119,IPR038109,PF07508, IPR011109,SSF53041,PTHR30461,Coil,PS51736, cd00338,PF00239
MQYCLYLRKSRADSEAEARGEGETLARHEKALLDLAKKLNLNITAIYREIVSGETIAARPVMQQLLQEVEQGIWDGVLVMEVERLARGDTIDQGIVAQTFKFSDTKIITPIKTYNPNNEFDEEYFEFGLFMSRREYKTINRRLQRGRMASVKDGKYVANKAPYGYNRIRIENDKGWTLEINKEEADVVRLIFELYTVGEKQSDSTFNRLGTGFIAKRLNAMKVPPKRGKVWVVASIRDILINPVYIGMIRWNWRPQQKKMIDGQLHISRPRATDYMLCKGLHPPIISKETFDIAQDLMRHNPARPIGEKNTVKNSLSGIVICGNCGRHMVRRPHTKYPDMLICSEPTCNNVGSQLRVVEERILQSLKEWLGEYKISWDITSPQIERISQVSIKKKALQKEQHELDTLNKQISKTHDLLEQGIYTTDVFLERSRALSLRMDEVKEHIAILDKELKTEITREDSAVNIIPKVEKLLEVYYDLPSPKAKNDMLKDVLEKVVYTKKERSKKGNLDNFDIAIYPKIPKYIT

SEQ ID NO: 3677 - protein, 526 aa, Unknown
  Description of Unknown: Integrase B3678 sequence
  SM00857,G3DSA:1.10.10.2600,IPR036162,PF13408,IPR025827, PS51737,G3DSA:3.40.50.1390,IPR006119,IPR038109,PF07508, IPR011109,SSF53041,PTHR30461,Coil,PS51736, cd00338,PF00239
MQYCLYLRKSRADSEAEARGEGETLARHEKALLDLAKKLNINITAIYREIVSGETIAARPVMQQLLQEVEQGIWDGVLVMEVERLARGDTIDQGIVAQTFKFSDTKIITPIKTYNPNNEFDEEYFEFGLFMSRREYKTINRRLQRGRMASVKDGKYVANKAPYGYNRIRIENDKGWTLEINKEEADVVRLIFELYTVGEKQSDNTFNRLGTGFIAKRLNAMKVPPKRGKVWVVASIRDILINPVYIGMIRWNWRPQQKKMIDGQLHISRPRATDYMLCKGLHPPIISKETFDIAQDLMRHNPARPIGEKNTVKNSLSGIVVCGDCGRHMVRRPHTKYPDMLICSEPTCNNVGSQLRVVEERILQSLKEWLGEYKISWDITSPPVERISQVSIKKKALQKEQHELDTLNKQISKTHDLLEQGIYTTDVFLERSRALSLRMDEVKEHIAILDKELKTEITREDSAVNIIPKVEKLLEVYHDLPSPKAKNDMLKDVLEKVVYTKKERSKKGNIDNFNITIYPKIPKYIT

SEQ ID NO: 3678 - protein, 526 aa, Unknown
  Description of Unknown: Integrase B3679 sequence
  SM00857,G3DSA:1.10.10.2600,IPR036162,PF13408,IPR025827, G3DSA:3.40.50.1390,PS51737,IPR006119,IPR038109,PF07508, IPR011109,SSF53041,PTHR30461,Coil,PS51736, cd00338,PF00239
MQYCLYLRKSRADSEAEALGEGETLARHEKALLDLAKKLNLNITAIYREIVSGETIAARPVMQQLLQEVEQGIWDGVLVMEVERLARGDTIDQGIVAQTFKFSDTKIITPIKTYNPNNEFDEEYFEFGLFMSRREYKTINRRLQRGRMASVKDGKYVANKAPYGYNRIRIENDKGWTLEINKEEADVVRLIFELYTVGEKQSDNTFNRLGTGFIAKRLNTMKVSPKRGKVWVVASIRDILINPVYIGMIRWNWRPQQKKMIDGQLHISRPRATDYVLCNGLHPPIISKETFDMAQELMRHNPARPIGEKNTVKNSLSGIVICGNCGRHMVRRPHTKYPDMLICSEPTCNNVGSQLRVVEERILQSLKEWLGEYKISWDITSPPVERISQVSIKKKALQKEQHELDTLNKQISKTHDLLEQGIYTTDVFLERSRALSLRMDEVKEHIAILDKELKTEITREDSAVNIIPKVEKLLEVYHDLPSPKAKNDMLKDVLEKVVYTKKERSKKGNLDNFNITIYPKIPKYIT

SEQ ID NO: 3679 - protein, 526 aa, Unknown
  Description of Unknown: Integrase B3680 sequence
  PTHR30461:SF3,SM00857,G3DSA:1.10.10.2600,IPR036162,PF13408, IPR025827,G3DSA:3.40.50.1390,PS51737,IPR006119,IPR038109, PF07508,IPR011109,SSF53041,PF00239,PTHR30461,PS5173 6,Coil,cd00338
MNTVIYARYSAGPRQTDQSIEGQLRVCTDFCKQRGLTVIDTYCDRHISGRTDERPEFQRLIADAKRKKFEAVVVYKTDRFARNKYDSAVYKRELKRNGIQIFYAAEAIPDGPEGIILESLMEGLAEYYSAELAQKIKRGMHESALKCQSTGSGRPLGYRVDEQKRFQIDPESAQTVQTIFEQYIKGESNAAICELLNSRGLRTAQGKPFNKNSINRIIKNRKYIGEYRYHDIVVEGGMPAIISKDTFNLAQAEMERRRTRKAPKSPKAEYLLAGRLFCGHCKGPMQGVSGTGKSGNKWYYYYCGNTRGKNKTCDKKQVSRDRLERAVVDFTVRYILQEDVLEELARKVHAAQERQNDTASEIAFYEKKLADNKKSIANVLRAIESGAATQTLPARLQELENEQAVILGELSFLKGKHLAFTEDQILFALMKRLEPYPGESEQDYRRRIISDFVSEVYLYDDRLLIYFNISSEDGKLKSADLSNIEGSEFDEGLVSSTNLIAGRTPEVTIVVLPYGFVLAAQIKDRL

SEQ ID NO: 3680 - protein, 526 aa, Unknown
  Description of Unknown: Integrase B3681 sequence
  PTHR30461:SF3,SM00857,G3DSA:1.10.10.2600,IPR036162,PS51737, G3DSA:3.40.50.1390,IPR006119,IPR038109,PF07508,IPR011109, SSF53041,PTHR30461,Coil,PS51736,cd00338, PF00239
MINMVSFDNIIIYLRKSRSDDPAQTVEEVLAKHEHILQDYCLKEYNKVIPEKRIYREVVSGETIQDRPVMQKLLKELETDNISGVLIVEPQRLSRGDLQDCGQIINSFRYTNTAVITPTKTYNLSDEYDRKFFEMELTRGNDYLEYTKKILNRGRVASVKQGNYICPVRPYGYKKIVKGTGKDKCHTLEIIPEEAEAIKLMYHLYLDENMGFTNIARTLDSLHIKPLKSNNWSAATIRDMIDNPIYIGKVVWNNRKVVKKWENEQIIKVRPRNKGDDVICVDGKHEAIIDEETFNAARQKRGLTPKVRKFKELRNPLAGILFCSTCGHSMSMKKYVDKRSHTGKVTTIMLCNKQAICHTKSAQYEQIVAKIKESLADAIADFEIKMKEQENNNIDIHKQRITSLKDELNKLYNKDVRQKDAYEDGVYTKEEYIERNAKLQSQILTIKSEIEDEQNNTPVRIDYQNKITTFTECLTSLDDDSISAADKNSLLKNCIDKIIYHNDMPSLPGIGRYIENSFRLEIFLKM

SEQ ID NO: 3681 - protein, 526 aa, Unknown
  Description of Unknown: Integrase B3682 sequence
  PTHR30461:SF3,SM00857,G3DSA:1.10.10.2600,IPR036162,PF13408, IPR025827,PS51737,G3DSA:3.40.50.1390,IPR006119,IPR038109, PF07508,SSF53041,IPR011109,PTHR30461,Coil, PS51736,cd00338,PF00239
MNTVIYARYSAGPRQTDQSIEGQLRVCTDFCKQRGLTVIDTYCDRHISGRTDERPEFQRLITDAKRKKFEAVVVYKTDRFARNKYDSAVYKRELKRNGIQIFYAAEAIPDGPEGIILESLMEGLAEYYSAELAQKIKRGMHESALKCQSTGSGRPLGYRVDEQKHFQIDPESAQTVQTIFEQYIKGESNAVICELLNSRGLRTAQGKPFNKNSINRIIKNRKYIGEYRYHDIVVEGGMPAIISKDTFNLAQAEMERRRTRKAPKSPKAEYLLAGRLFCGHCKGPMQGVSGTGKSGNKWYYYYCGNTRGKNKTCDKKQVSRDRLERAVVDFTVRYILQEEVLEELARKVHAAQERQNDTASEIAFYEKKLADNKKSIANVLRAIESGTATQTLPARLQELENEQAVILGEISFLKGKRLAFTEDQIFFALMKHLEPYPGESEQDYRRRIISDFVSEVYLYDGRLLIYFNISSEDGKLKSADLSNIEGGEFDEGLVGSTNLIAGRTPEVTIVVLPYGFVLATQIKDRL

SEQ ID NO: 3682 - protein, 526 aa, Unknown
  Description of Unknown: Integrase B3683 sequence
  SM00857,G3DSA:1.10.10.2600,IPR036162,PF13408,IPR025827, G3DSA:3.40.50.1390,PS51737,IPR006119,IPR038109,PF07508, IPR011109,SSF53041,PTHR30461,Coil,PS51736, cd00338,PF00239
MNTTNAVIYARYSSDKQTEQSIEGQLRYCTEYAKRCGYTIVDSYIDRAASGTTDRRPQFQQMIEDSKKGQFNFILVWKLDRFARNRYDSAIYKTKLKKNGVRVVSATETLGNGDESIILEAMLEAMAEVYSRQISQNASRGMRESALKGQTTGGNIPLGYKIDNKFLVEDTKTSAVVKFIFNQFAAGKSQTEICKMCNEKGYRTKNGKLFYTNCLPSILRNKMYIGDYTYKGEIERSCPALIDIDTFKRCQARLEQSRRTRGQKKSEDIDFLLTGKLFCGMCGTTMVGDSGTSRNGSKHYYYTCRNKRKRKGCKKKSEKKDFIEWYIVEQTVKYVLTAERRHYIAEKIVLQYNSEFSAEQVAELERRLVNIDIEINNCAEALINARSAAVIDKINNKADCLQLQKEDTEIELAKLKIACDISLTVEEVELWLQSFCGGDLMDLDFRKKIIDVFINSIYLYDDKVVIYYNVKDSRQISYMEMLADLEQLDDSLKCSDSSVQGEPKLNQSELLFVFVDGVFGVVIPRV

SEQ ID NO: 3683 - protein, 526 aa, Unknown
  Description of Unknown: Integrase B3684 sequence
  PTHR30461:SF3,SM00857,G3DSA:1.10.10.2600,IPR036162,PF13408, PS51737,G3DSA:3.40.50.1390,IPR025827,IPR006119,IPR038109, PF07508,IPR011109,SSF53041,PTHR30461,Coil, PS51736,cd00338,PF00239
MDEYCLYLRKSRIDLEAEANGQGDTLARHRAALLKLAQKRGFNITGCYEEVRSGESIAARPEMQRLLNDVEDGRWAGVLVMEVERLARGNTTDQGIVADTFKYSDTKIVTPNKIYDPGDEFDEEYFEFGLFMSRREYKTINRRLQRGRRASLSEGKYIAGKATYGYERYKLSGEKGYSLRIIPEQAEIVRQIYNWYVNGELLPDGPLRPLGSYTIAKRLDARGIPSPTGGKWPPCTVKDILTNPTYIGKLRWSYRPTVKRMVDGELVKTRPVDRSVHLSDGRHEPILDEVLWHRAQLMLKNRSHAPVPKSTNIRNPLAGLLICSKCGRSMERRKFKHGRDTVACPNKDCTCKSSVLEEVEAGMLDSLRIWLSDYKVKLAQSQENISHTGPTAEQEITSLQRTLGTLQAQMENLYNLVEQGVYSTDLFLQRSQALTARMAEVNQQIESTQAALTASRRIARNRFEIIPRIERVLALYPTLTDPREKNTILKEVLEKILYTKTTGSRWEASDMNLYVFPRVETDGEQL

SEQ ID NO: 3684 - protein, 526 aa, Unknown
  Description of Unknown: Integrase B3685 sequence
  cd00338,SM00857,G3DSA:1.10.10.2600,IPR036162,PF13408, IPR025827,G3DSA:3.40.50.1390,PS51737,IPR006119,IPR038109, PF07508,IPR011109,SSF53041,PTHR30461,PS51736, Coil,PF00239
MQYCLYLRKSRADSEAEARGEGETLARHEKALLDLAKKLNINITAIYREIVSGETIAARPVMQQLLQEVEQGIWDGVLVMEVERLARGDTIDQGIVAQTFKFSDTKIITPIKTYNPNNEFDEEYFEFGLFMSRREYKTINRRLQRGRMASVKDGKYVANKAPYGYNRIRIENDKGWTLEINKEEADVVRLIFELYTVGEKQSDNTFNRLGTGFIAKRLNTMKVSPKRGKVWVVASIRDILINPVYIGMIRWNWRPQQKKMIDGQLHISRPRATDYMLCKGLHPPIISKETFDIAQDLMRHNPARPIGEKNTVKNSLSGIVVCGDCGRHMVRRPHTKYPDMLICSEPTCNNVGSQLRVVEERILQSLKEWLGEYKISWDITSPPVERISQVSIKKKALQKEQHELDTLNKQISKTYDLLEQGIYTTDVFLERSRALSLRIDEVKEHIALLDKELKTEITREDNAVNIIPKVEKLLEVYHDLPSPKAKNDMLKDVLEKVVYTKKERSKKGNLDNFNITIYPKIPKYIT

SEQ ID NO: 3685 - protein, 526 aa, Unknown
  Description of Unknown: Integrase B3686 sequence
  PTHR30461:SF3,SM00857,G3DSA:1.10.10.2600,IPR036162,PS51737, G3DSA:3.40.50.1390,IPR006119,IPR038109,PF07508,IPR011109, SSF53041,PF00239,PTHR30461,PS51736,Coil, cd00338
MTATDEMIEKACNKYKKTRYAMYLRKSRADLELEAMGEEETLARHKAMLFSLAAKHEIHPDQITIYHELVSGDSIDERPEMQRLLADVYAKTYAGVLVVEVERLARGNTKDQGEVADAFQASNTHIITPAKVYDPNNEFDQEYFEFGLFMSRREYKTIKRRLEAGKKQSVMEGNYILPQRVFGYDILRTTKKDRTLIIRPEEAKYVKMIFDWHIKEKRATGWMARQMTLMGIPTTKGRPEWNRGTIRDMLANPIYAGKVTWGKRRTVKEYDPELGKLVKVIKEDGQMEIYEGKHEGIISEEEFAEAQRVTETMKNPSAKVSTGLKNPFAGLMECCTCGRNIIAMTYNDGRRARLSHARDTICTKKSLPIDEVSEVFISTLQAYIEDFRTKMEIDDNKDEMEAFKARLNAMETELEKLERKRKNLFADYEDGIYTRDEFLERKLHYNEKIDNTKKQIQEARKSTPEPVDYSEQISNLHAMIDCMKDDGLSVKQKNDFLKQFISKITYDSISYGQRRGGKAILEVFLK

SEQ ID NO: 3686 - protein, 526 aa, Unknown
  Description of Unknown: Integrase B3687 sequence
  PTHR30461:SF3,IPR036162,PS51737,IPR011109,PTHR30461, PF00239,G3DSA:1.10.10.2600,IPR006119,SSF53041,cd00338, SM00857,IPR025827,IPR038109,PS51736,mobidb-lite, PF13408,G3DSA:3.40.50.1390,PF07508,Coil
MHGAYILARYSTDRQNEDSIEVQVSACRKWCDERSLPVLDVFADEATSGMKATRPEYARMMWQLEHGGADTVVIYDQSRMFRKLTAWFDFRDQLARLGVDVVSVTQPMIGGDLRDPANFLTEGSMALFNQMWVLQTRQKVVAKMRYMAEQGLHTGGTPPLGYKVVDGRLVIDAAEAETVRLIFGLYASGMTYREIIRRLNAEERRTKRGGNFGVNSLHDLLKNPKYVGDLVYGKVAKRPDGSRNSHAVAEDAIVVKDVLPAIVDRETWEKVQLKMQENKRSAAGRPASARAYPLKGKVFCRECKSAMLVTAAKRRGKRYYYYTCGAKHRKGLCDNSQIPVSALEGIVANAVRQRLSEPESVGGLIRILRDERAKLSEAAVQRLRAMQKRDREIAKQLDAAVNAVLGGLHSPILTAKVNALEAERAKISHDMQQLRAQVSGAEIDEPRLRELLALAMQDDAAVLSIVVRVEVGKDEIAVWTLLDADPNGDFDFAEDGVPITPSEVAPSYNNSGCPRWSTKKEASFVR

SEQ ID NO: 3687 - protein, 526 aa, Unknown
  Description of Unknown: Integrase B3688 sequence
  PTHR30461:SF3,SM00857,G3DSA:1.10.10.2600,IPR036162,PS51737, G3DSA:3.40.50.1390,IPR006119,IPR038109,PF07508,SSF53041, IPR011109,PF00239,PTHR30461,PS51736,Coil, cd00338
MINMVSFDNIIIYLRKSRSDDPAQTVEEVLAKHERILQDYCIKEYGKVIPEKRIYREVVSGETIQDRSVMQKLLKELETNNIYGVLIVEPQRLSRGDLQDCGQIINSFRYTNTAVITPGKTYNLQDEYDRKFFEMELTRGNDYLEYTKKILNRGRVASVKQGNYICSVRPYGYKKVVIGTGKDKCHTLEIIPEEAEAIKLMYHLYLDENMGFTNIARTLDSMHIKPLKSSNWSAATIRDMIDNPIYIGKIVWNNRKVVKKWENEQIIKVRPRNKGDDVICVDGKHEAIIDEETFNAARQKRGLTPKVRKFKELRNPLAGILFCSTCGHSMSMKKYVDKRSHTGKVTTIMLCNKQAVCHTKSAQYEQIVAKIKESLADAIANFEIKMKEQENNNIDIHKQRITSLKDELNRLYNKDVRQKDAFEDGIYTKEEYIERNSKLQSQILNIKAEIENEKNNTPVIIDYQNKITTFTECLTSLDDDSISAADKNSLLKNCIDKIIYHNDMPSLPGIGRYIENSFRLEIFLKM

SEQ ID NO: 3688 - protein, 526 aa, Unknown
  Description of Unknown: Integrase B3689 sequence
  PTHR30461:SF3,SM00857,G3DSA:1.10.10.2600,IPR036162,PF13408, IPR025827,G3DSA:3.40.50.1390,PS51737,IPR006119,IPR038109, PF07508,IPR011109,SSF53041,PTHR30461,Coil, PS51736,cd00338,PF00239
MNAVIYARFSSHSQREQSIEGQLRDCYEYAKRYDINIVGEYIDRAISGMTDDRPDFQRMIADAPKKQFERIIVWKLDRFARNRYDSALYKHKLKQYGIRVISAMENVGEGDESILLEALLEASAEYYSLDLKKKILRGQRETIAKGRWCGGPIPYGYKAVDGKLVADEKTAPIIRYVFEQYAQGVPMKEIIDELKRRGVRSSRGGELTYTTFSRALTNPVYIGNFMYKGELVPGVADALIDEDTYNKVQIIVKANAHAPAANKAKVEYLLQGKAFCGHCGSHMVGESGKSRNGDVYYYYSCAARKKAHKCRKKNEKKDFIEWYVVEQTLQYVLTPARMRDIAKAVVAEYDKEFAGSRVEEYEKAIKQYERELDKLVDALVDAPKVAHKRIYEKMETLETQKASMENELVKLRIASEIRFTEEEVRAWLRRFCTGDLFDPEFRRNIIDTFINCIYLYDDRIIIFYNIKGGKQVSFVDLAESLDNESESSGSDLNANAPLHRRNPNLIPVGNGFGFLYFVKKAENMQG

SEQ ID NO: 3689 - protein, 526 aa, Unknown
  Description of Unknown: Integrase B3690 sequence
  PTHR30461:SF3,cd00338,SM00857,G3DSA:1.10.10.2600,IPR036162, PF13408,PS51737,G3DSA:3.40.50.1390,IPR025827,IPR006119, IPR038109,PF07508,IPR011109,SSF53041,PTHR30461, PS51736,Coil,PF00239
MYEDIKTACLYVRFSSHNQTEQSIEGQTRVCRDFCKRHNIRIVEIYADRATSASKDIEKRVQFLKMIKDSEKGLFDAVIVYKLDRFARSRYDSATYKYRLKRNGVQLISATENISNDPEGIILESVLEGMAEFYSAELSQKINRGMRESAYKHNSIGGAVPLGYKIEDKKLVIDPKTAPIVKEAFEKYADGETVAEICRQFNARGYKTSKGTAFGKSSFTKIFRNERYIGVYTFHDYRAEDAIPAIIDKDLWDRVQLRVGKIKNAPARNKAKVVYLLSGKLFCGHCGSKMNGNCNAGNYCYYQCYGKKNGNVDCKKKNIRKEFIERLVAQDALSLLTDEYIEQIATIACEKNQNEIELDSALPTIRDRIHQVDLSLNNLLKAIESGSAPDMLVKRMGELEKEKKDLQAQAKKESEDIIELDKAQVIYWLEQFRGGSIEDEEFCRMLIDLFVNSVTVWDEDDDTYKVTVAYNLTSLPTKTYRLNKGGTLSDFASNAPQYQSPHRSAHWYLRKQSAALPEFLFHSDGQ

SEQ ID NO: 3690 - protein, 526 aa, Unknown
  Description of Unknown: Integrase B3691 sequence
  PTHR30461:SF3,SM00857,G3DSA:1.10.10.2600,IPR036162,PF13408, IPR025827,G3DSA:3.40.50.1390,PS51737,IPR006119,IPR038109, PF07508,IPR011109,SSF53041,PTHR30461,Coil, PS51736,cd00338,PF00239
MPKVTMIPATVNSLTHLPKASVQKRRVAGYARVSTDSDEQFTSYEAQVDYYTRYIQSKPEWDFVRVYTDEGISGTNTKRREGFKEMIADALAGKIDLIVTKSVSRFARNTVDSLVTIRKLKENGVECYFEKEGIYTFDGKGELLITIMSSLAQEESRSISENITWGQRKSFADGKIHLAYKHFLGYKKGEDGRPAIVEEEAVVVRLIYRLFLDGKTQAGICRYLEDLEIPSPSGKAKWSKTTVTSILTNEKYKGDALLQKSFTVDFLQKKTKLNEGEVPQYYVEGSHPAIIEPDEWNHVQAEFARRKALGNAYSGKSVLSAKLVCEDCGGFFGSKVWHSTDRYRRTVWQCNNKFKGGERCLTPTVDTETVQQLFIKAYNQMMGNRKQIIEDCELMRKKLTDFKSLDADIERHLEETQIVAELVKAAVKDNAVTAQSQEAYLKKYESLTKRYETAAAELARLQNLRTLRSQKDKAVALYIRTLKKQPTVLSEWNDTLWTVMVEKAIVHRNSEITFAFYNGTKVKVRQ

SEQ ID NO: 3691 - protein, 526 aa, Unknown
  Description of Unknown: Integrase B3692 sequence
  PTHR30461:SF3,SM00857,G3DSA:1.10.10.2600,IPR036162,PF13408, PS51737,IPR025827,G3DSA:3.40.50.1390,IPR006119,IPR038109, PF07508,IPR011109,SSF53041,PTHR30461,Coil, PS51736,cd00338,PF00239
MSEKSAVIYARYSSHNQREESIEGQIRECKRYARDNDITIIAEYADRATSGRTDNRAEFQKMIRDAEKGSFSLVIVYKLDRFARNRYDSAMYKAKLKKCGVKVISATEGLTDTPESIILEAMLEGMAEYYSANLSQNVKRGMVENAMKCLATGGGRCLGYYTGSDKRYYIDEAGASTVRMIYEMYDQGHTYADIVNALNEQGRKTLRGSPFNKNSLGKILHNRRYIGDYVWDEIVIEGGMPQIIDRDLWERVQKKLSRKEKASARARGEYDYILSGKLFCGHCGKPMIGDSGTSRNGTKHYYYTCSTKKHGGGCSKQSVRAAAIEDEVIRTTIQTVLTDDMLEHIADKVMEYQSRDTDSAILIEQYKNQLKETETAIAGILRAVEAGMFSPSMKDRMDELECQKAELNADIEREEINQQKVSRDEVLFFLSQFKGGDPDDPEYKQRLVDIFVNSVWLYDDKLVLTYNYSGEDNKVTLDLVDKALSGAASGCSDSACQAPPIETKANTMIICSGVFALVKTNAGSTQ

SEQ ID NO: 3692 - protein, 526 aa, Unknown
  Description of Unknown: Integrase B3693 sequence
  PTHR30461:SF3,SM00857,G3DSA:1.10.10.2600,IPR036162,PF13408, PS51737,G3DSA:3.40.50.1390,IPR025827,IPR006119,IPR038109, PF07508,IPR011109,SSF53041,PTHR30461,Coil, PS51736,cd00338,PF00239
MDEYCLYLRKSRIDLEAEANGQGDTLARHRAALLKLAQKRGFNITGCYEEVRSGESIAARPEMQRLLNDVEDGRWAGVLVMEVERLARGNTTDQGIVADTFKYSDTKIVTPNKIYDPGDEFDEEYFEFGLFMSRREYKTINRRLQRGRRASLSEGKYIAGKATYGYERYKLSGEKGYSLRIIPEQAEIVRQIYNWYVNGELLPDGTLRPLGSYTIAKRLDARGIPSPTGGKWPPCTVKDILTNPTYIGKLRWSYRPTVKRMVDGELVKTRPVDRSVHLSDGRHEPILDEVLWHRAQLMLKNRSHAPVPKSTNIRNPLAGLLICSKCGRSMERRKFKHGRDTVACPNKDCTCKSSVLEEVEAGMLDSLRIWLSDYKVKLAQSQETISHTGPTAEQEITSLQRTLGTLQAQMENLYNLVEQGVYSTDLFLQRSQALTARMAEVNQQIESTQAALTASRRIARNRFEIIPRIERVLALYPTLTDPREKNTILKEVLEKILYTKTTGSRWEASDMNLYVFPRVETDGEQL

SEQ ID NO: 3693 - protein, 526 aa, Unknown
  Description of Unknown: Integrase B3694 sequence
  PTHR30461:SF3,cd00338,SM00857,G3DSA:1.10.10.2600,IPR036162, PF13408,PS51737,G3DSA:3.40.50.1390,IPR025827,IPR006119, IPR038109,PF07508,IPR011109,SSF53041,PTHR30461, PS51736,Coil,PF00239
MATVLKIPAKFHPITHLPEIKVQKRRVAAYARVSTDSEEQQTSYAAQVDCYTKYIQERADWEFVAVYTDEGISALNTKHRDGFNRMVADALDGKIDLIVTKSVSRFARNTVDSLTTVRKLKEKGVEVFFEKENIYTLDSKGELLITIMSSLAQEESRSISENVTWGQRKRMADGKVSLPYKHFLGYRKGADGLPEIVPEEAEIVRNIYRWFMEGKTPTGIARTLTEQGVPTPAGKEQWCSSTVKSILINEKYKGSALLQKRFTVDFLTKKSKVNEGEVPQYYIEESHPAIIVPEEFELVQAELLRRQNLRRQYNGKSVFAARLVCGDCGNFFGAKVWHSNSKYRQVIWQCNHKFQGVCKCQTPHLQESVIQQRFQAAVQELLQKRKAILENCQVMLELLTDCTDLEYQLQELETQKMRISEQVQGYVRENSEIVQDQEKYEERYQALVGQYEPLQKQETALQEQRAERLARREQIQGFQRALSGQNGMLPEFDTQLWLAAVEKAVVHRDGKIVFVLKDGTELVQKI

SEQ ID NO: 3694 - protein, 526 aa, Unknown
  Description of Unknown: Integrase B3695 sequence
  PTHR30461:SF3,SM00857,G3DSA:1.10.10.2600,IPR036162,PS51736, PS51737,G3DSA:3.40.50.1390,PF13408,IPR025827,IPR006119, IPR038109,PF07508,IPR011109,SSF53041,PTHR30461, mobidb-lite,cd00338,PF00239
MAKRSAKKNEYQSAEQVGVIYARYSSHNQKEESIEQQISECSDFAAKNGIRIVGIYADKAVSGRSDRRPNFQRMMRDAEKRQFQIVIAYKSNRIARNMLNALQYEARLDLLGIKTLYAKEEFGNTAAGRFALRTMMNVNQFYSENMGEDIKRGMVDNANECKVNGMLPLGYVKSKEGKYAIAPDEAAVVREIFDSVLKDVPVAEIARSLNQRGIHTKLGREWNKNSFHIMLKNDNYIGVYRHSGVVVEDGIPPILEKEVFTAVQEKLANKKKTAGRRSANGEYLLTGKLFCGYCGSYMIGVSGTGENGTVHNYYQCQKRHAEGRCEKKNVRRDFIEKLIARLTQDYILQDDTIEWIADSTMSFQAMARRESGVAQLERDLADNRKVAKNIMAAIEQGIITETTKARLLEVEGTIHDLERSLSIAKAASQPIERERVVFSLEQMREGNVGSKDHQKKLIDTFVKSVTLWDDRIQIDYYHTPGKHKFSYSLEELTSKAENESNASDVRTDSLELHHQAAPKKMPLRKA

SEQ ID NO: 3695 - protein, 526 aa, Unknown
  Description of Unknown: Integrase B3696 sequence
  SM00857,G3DSA:1.10.10.2600,IPR036162,PF13408,IPR025827, G3DSA:3.40.50.1390,PS51737,IPR006119,IPR038109,PF07508, IPR011109,SSF53041,PTHR30461,Coil,PS51736, cd00338,PF00239
MQYCLYLRKSRADSEAEARGEGETLARHEKALLDLAKKLNLNITAIYREIVSGETIAARPVMQQLLQEVEQGIWDGVLVMEVERLARGDTIDQGIVAQTFKFSDTKIITPIKTYNPNNEFDEEYFEFGLFMSRREYKTINRRLQRGRMASVKDGKYVANKAPYGYNRIRIENDKGWTLEINKEEADVVRLIFELYTVGEKQSDNTFNRLGTGFIAKRLNTMKVSPKRGKVWVVASIRDILINPVYIGMIRWNWRPQQKKMIDGQLHISRPRATDYMLCKGLHPPIISKETFDIAQDLMRHNPARPIGEKNTVKNSLSGIVVCGDCGRHMVRRPHTKYPDMLICSEPTCNNVGSQLRVVEERILQSLKEWLGEYKISWDITSPPVERISQVSIKKKALQKEQHELDTLNKQISKTHDLLEQGIYTTDVFLERSRALSLRMDEVKEHIAILDKELKIEITREDSTVNIIPKVEKLLEVYHDLPSPKAKNDMLKDVLEKVVYTKKERSKKGNLDNFNITIYPKIPKYIT

SEQ ID NO: 3696 - protein, 526 aa, Unknown
  Description of Unknown: Integrase B3697 sequence
  PTHR30461:SF3,SM00857,G3DSA:1.10.10.2600,IPR036162,PF13408, PS51737,IPR025827,G3DSA:3.40.50.1390,IPR006119,IPR038109, PF07508,IPR011109,SSF53041,PF00239,PTHR30461, PS51736,Coil,cd00338
MNTVIYARYSAGPRQTDQSIEGQLRVCTDFCKQRGLTVIDTYCDRHISGRTDERPEFQRLIADAKRKKFEAVVVYKTDRFARNKYDSAVYKRELKRNGIQIFYAAEAIPDGPEGIILESLMEGLAEYYSAELAQKIKRGMHESALKCQSTGSGRPLGYRVDEQKHFQIDPEAAQTVQTIFEQYIKGESNAAICELLNSRGLRTAQGKPFNKNSINRIIKNRKYIGEYRYHDIVVEGGMPAIISKDTFNLAQAEMERRRTRKAPKSPKAEYLLAGRLFCGHCKGPMQGVSGTGKSGNKWYYYYCGNTRGKNKTCDKKQVSRDRLERAVVDFTVRYILQEDVLEELARKVHAAQERQNDTTSEIVFYEKKLADNKKSIANVLRAIESGAATQTLPARLQELENEQAVILGELSFLKGKRLAFTEDQILFALMKHLEPYPGEPEQDYRRRIISDFVSEVYLYDDRLLIYFNISSEDGKLKSADLSNIEGGEFDEGLVGSTNLIAGRTPEVTIVVLPYGFVLAAQIKDRL

SEQ ID NO: 3697 - protein, 526 aa, Unknown
  Description of Unknown: Integrase B3698 sequence
  PTHR30461:SF3,SM00857,G3DSA:1.10.10.2600,IPR036162,PF13408, PS51737,G3DSA:3.40.50.1390,IPR025827,IPR006119,IPR038109, PF07508,SSF53041,IPR011109,PTHR30461,Coil, PS51736,cd00338,PF00239
MQEMNISINDLIMYLRKSRSDDPYMTVEEVLARHEQQLQDYALSSFGAVLPEEKIFREVVSGETISDRPVMQNVMKYLETGLIKGVLVIEPQRLSRGDLEDCGRIINTFRYTDTLVITPPKIYNLSDEYDRKFFEMELTRGNDYLEYTKKILNRGRIASVKQGNFIGTIPPYGYRKVMIGSGKNTRHTLEIIPEQAEAVRLMFHLFVDEGYGFTRIARYLDRVGIRPLHSECWNPASLKDILENPVYIGKIRWNWRKTQKKMVNGQIIKTRPKTKDSSAWIYVDGIHEPIIDEKTYQAALDRRTDNPRIRKGTELKNPYAGLLFCGTCGRAMNYKRTHNKKYGSICENMLCSNQANCHTHSVKFSTFQERVITSLKETIADFEIKLEEDNGSSLRFHMAQVNRLRSELDKLKEKDERQKNAYENGIYTMEEFAPRNAKLQEQICQMQQKIRNMEHAVPEAIDYKEKIMRFRDCLDALQDPNISAEEKNNFLKSCIDKIMYYNDLESRSGIGRYIQNEFRLDIFLRL

SEQ ID NO: 3698 - protein, 526 aa, Unknown
  Description of Unknown: Integrase B3699 sequence
  SM00857,G3DSA:1.10.10.2600,IPR036162,PF13408,IPR025827, G3DSA:3.40.50.1390,PS51737,IPR006119,IPR038109,PF07508, IPR011109,SSF53041,PTHR30461,Coil,PS51736, cd00338,PF00239
MQYCLYLRKSRADSEAEARGEGETLARHEKALLDLAKKLNLNITAIYREIVSGETIAARPVMQQLLQEVEQGIWDGVLVMEVERLARGDTIDQGIVAQTFKFSDTKIITPIKTYNPNNEFDEEYFEFGLFMSRREYKTINRRLQRGRMASVKDGKYVANKAPYGYNRIRIENDKGWTLEINKEEADVVRLIFELYTVGEKQSDSTFNRLGTGFIAKRLNAMKVPPKRGKVWVVASIRDILINPVYIGMIRWNWRPQQKKMIDGQLHISRPRATDYLLCKGLHPPIISKETFNIAQDLMRHNPARPIGEKNTVKNSLSGIVVCGNCGRHMVRRPHTKYPDMLICSEPTCNNVGSQLRVVEERILQSLKEWLGEYKISWDITSPPVERISQVSIKKKALQKEQHELDTLNKQISKTHDLLEQGIYTTDVFLERSRALSLRMDEVKEHIAILDKELKTEITREDSAVNIIPKVEKLLEVYHDLPSPKAKNDMLKDVLEKVVYTKKERSKKGNLDNFNIAIYPKIPKYIT

SEQ ID NO: 3699 - protein, 526 aa, Unknown
  Description of Unknown: Integrase B3700 sequence
  SM00857,G3DSA:1.10.10.2600,IPR036162,PF13408,PS51737, IPR025827,G3DSA:3.40.50.1390,IPR006119,IPR038109,PF07508, SSF53041,IPR011109,PTHR30461,Coil,PS51736, cd00338,PF00239
MQYCLYLRKSRADSEAEARGEGETLARHEKALLDLAKKLNLNITAIYREIVSGETIAARPVMQQLLQEVEQGIWDGVLVMEVERLARGDTIDQGIVAQTFKFSDTKIITPIKTYNPNNEFDEEYFEFGLFMSRREYKTINRRLQRGRMASVKDGKYVANKAPYGYNRIRIENDKGWTLEINKEEADVVRLIFELYTVGEKQSDNTFNRLGTGFIAKRLNAMKVPPKRGKVWVVASIRDILINPVYIGMIRWNWRPQQKKMIDGQLHISRPRATDYLLCKGLHPPIISKETFNIAQDLMRHNPARPIGEKNTVKNSLSGIVVCGNCGRHMVRRPHTKYPDMLICSEPTCNNVGSQLRVVEERILQSLKEWLGEYKISWDITSPPVERISQVSIKKKALQKEQHELDTLNKQISKTHDLLEQGIYTTDVFLERSRALSLRMDEVKEHIAILDKELKTEITREDSAVNIIPKVEKLLEVYHDLPSPKAKNDMLKDVLEKVVYTKKERSKKGNLDNFNIAIYPKIPKYIT

SEQ ID NO: 3700 - protein, 526 aa, Unknown
  Description of Unknown: Integrase B3701 sequence
  PTHR30461:SF3,SM00857,G3DSA:1.10.10.2600,IPR036162,PF13408, IPR025827,G3DSA:3.40.50.1390,PS51737,IPR006119,IPR038109, PF07508,IPR011109,SSF53041,PTHR30461,Coil, PS51736,cd00338,PF00239
MNTVIYARYSAGPRQTDQSIEGQLRVCTDFCKQRGLTVIDTYCDRHISGRTDERPEFQRLITDAKRKKFEAVVVYKTDRFARNKYDSAVYKRELKRNGIQIFYAAEAIPDGPEGIILESLMEGLAEYYSAELAQKIKRGMHESALKCQSTGSGRPLGYRVDEQKHFQIDPESAQTVQTIFEQYIKGESNAAICELLNSRGLRTAQGKPFNKNSINRIIKNRKYIGEYRYHDIVVEGGMPAIISKDTFNLAQAEMERRRTRKAPKSPKAEYLLAGRLFCGHCKGPMQGVSGTGKSGNKWYYYYCGNTRGENKTCDKKQVSRDRLERAVVDFTVRYILQEEVLEELARKVHAAQERQNDTASEIAFYEKKLADNKKSIANVLRAIESGAMTQTLPARLQELENEQAVILGEISFLKGKRLAFTEDQIFFALMKHLEPYPGESEQDYRRRIISDFVSEVYLYDDRLLIYFNISSEDGKLKSTDLSNIEGGEFDEGLVSSTNLIAGRTPEVTIVVLPYGFVLATQIKDRL

SEQ ID NO: 3701 - protein, 526 aa, Unknown
  Description of Unknown: Integrase B3702 sequence
  SM00857,G3DSA:1.10.10.2600,IPR036162,PF13408,PS51737, G3DSA:3.40.50.1390,IPR025827,IPR006119,IPR038109,PF07508, IPR011109,SSF53041,PTHR30461,Coil,PS51736, cd00338,PF00239
MAKPEVSELAVVYARYSSHSQGEQSIEGQLSNARDYAAAHGYTIVHEYVDRAKSGRTDNRAEFQQMLKDTAKRQFSVIILWKVDRFGRNREEIAINKMKCRKNGVRVEYVAETIPDSPEGVILESVLEGFAEYYSLQLSQNIRRGRAESAEKCQSLGGNRPLGYKTGPDKKFVIDENTAPTVKMIFTMYADGKTVTEIVDKLNEMGLRTLRGGPFTKNSLHSILKNKKYIGVYEYQGREIKDGVPRIIEDDVFSKVQEMLKINKRAPAKTWSRADYILTDKLFCGKCGALMFGESGTSKTGVKHNYYICSNKKRFRSCDKKAVRQADIEDTVLNATHELLQDDELLDYIVDRTWEYYLAQDNSQEELRNLQRQLAQTDTAISNLIRAIEAGILTEETKKRMDELTQQKADLKASIADREIARGFHLQKSHIAFYLRSLRDADWSDKEAQKRLIQTFVNAVFVYDDHITLTYNFSGDKSTITLHDMQRFEDGEEFGCRASRSTIGRISEPYIAWGTVFVQTKRHSLP

SEQ ID NO: 3702 - protein, 526 aa, Unknown
  Description of Unknown: Integrase B3703 sequence
  PTHR30461:SF3,SM00857,G3DSA:1.10.10.2600,IPR036162,PF13408, IPR025827,G3DSA:3.40.50.1390,PS51737,IPR006119,IPR038109, PF07508,SSF53041,IPR011109,PTHR30461,Coil, PS51736,cd00338,PF00239
MNTVIYARYSAGPRQTDQSIEGQLRVCTDFCKQRGLTVIDTYCDRHISGRTDERPEFQRLIADAKRKKFEAVVVYKTDRFARNKFVSAVYKRELKRNGIQIFYAAEAIPDGPEGIILESLMEGLAEYYSAELAQKIKRGMHESALKCQSTGSGRPLGYRVDEQKRFQIDPESAQTVQTIFEQYIKGESNAAICELLNSRGLRTAQGKPFNKNSINRIIKNRKYIGEYRYHDIVVEGGMPAIISKDTFNLAQAEMERRRTRKAPKSPKAEYILAGRLFCGHCKGPMQGVSGTGKSGNKWYYYYCGNTRGKNKTCDKKQVSRDRFERAVVDFTVRYILQEEVLEELARKVHAAQERQNDTASEIAFYEKKLADNKKSIANVLRAIESGAATQTLPARLQELENEQAVILGELNFLKGKRLAFTEDQILFALMKHLEPYPGESEQDYRRRIISDFVSEVYLYDDRLLIYFNISSEDGKLKSADLSNIEGGEFDEGLISSTNLIASRTPEVTIVVLPYGFVLATQIKDRL

SEQ ID NO: 3703 - protein, 526 aa, Unknown
  Description of Unknown: Integrase B3704 sequence
  PTHR30461:SF3,cd00338,SM00857,G3DSA:1.10.10.2600,IPR036162, PS51737,G3DSA:3.40.50.1390,IPR006119,IPR038109,PF07508, IPR011109,SSF53041,PTHR30461,PS51736,Coil, PF00239
MTAFEKNNIVESSIPTHMDKYVIYLRKSRADVEAEKLGEGETLARHKKILTELAARKGLYVEKIYEEIVSGETIEARPEIQKMIQECYDGKYKGIIIVEVTRLSRGNQGDAQIILDCLKYSNRNNGVLVITPTKTYDVAHSQEDEEYMEFELFMSRREYKMIQKRMDRGRKQAVVEGNFMGSYRPYGYNILKTKTSRTLIPNPDEAPYVKKIYEWAVVENLSPYKIAKRLDNMGVPTYYGDVEWSKDTIKTILTNPTYIGKVRWNDRMQVKTMSNGELVTSRPRSNHTDHYMEYDGKHLKDALIDEETFHKAKSRFATDSTKSNLKLANPLAGILKCKNCGRVLAYQSYKSRKTYTPPRYNHVPSQRCKVKSVVVDDVLKAVIHALKLYIEDFELKLDNIPDSNENEISKQIELMRKEIQKIERKLSKLFDSWEDERITDNEFVKRKTVHNRRIESIKEEIENLEYSIPEKEEYQEKIVLLSEALQAINDDTLDAEIKNEYLKRIINTIEFSRENNSEFILDINLH

SEQ ID NO: 3704 - protein, 526 aa, Unknown
  Description of Unknown: Integrase B3705 sequence
  PTHR30461:SF3,SM00857,G3DSA:1.10.10.2600,IPR036162,PS51737, G3DSA:3.40.50.1390,IPR006119,IPR038109,PF07508,SSF53041, IPR011109,PF00239,PTHR30461,PS51736,Coil, cd00338
MPYCIYLRKSRADAEAELAGEGETLARHEKTLLALAKKLKLPITKIYKEILSGETIAGRPVMQQLLQDVEAGIWQGVLVMEVERLGRGNTLDQGIILNAFKYSSTKIITPMKSYDPNDEFDEEYFEFSQFMSRREYKTILRRMQRGREASVKEGKFAGSIAPFGYRRVKLPQEKGFTLEIEDTEAAAVKLAYELYAYGDPQPDGTFADIGRATIAKRLDQMGIRNRKGGTWATASVTRMLQNPVYIGKVHWNRRPEKKHTENGKIKKTRPLAENYLLVDGLHEPIISEELWNLAQAKMKQHYRPTGVNGIMQNPLAGLVHCSYCGNAMQRRPYLKTGQPASLICHTHFCPQISSPLYMVEGKILEALSLWMKQHEPTWEDESSINVFSTKIMALEHTIADMEQELQGLQFQFEKIFEFLETGIYTPEVFTARNKTLSEKMAEIRSAIEETQAELSKLKAARKNQVSMIPKIKNILDTYETLTPAEKNKLLKEVLDHVEYHKKIKGKKNVPADNFEIILFPKISPEN

SEQ ID NO: 3705 - protein, 526 aa, Unknown
  Description of Unknown: Integrase B3706 sequence
  PTHR30461:SF3,SM00857,G3DSA:1.10.10.2600,IPR036162,PS51737, G3DSA:3.40.50.1390,IPR006119,IPR038109,PF07508,SSF53041, IPR011109,PTHR30461,Coil,PS51736,cd00338, PF00239
MPYCIYLRKSRADAEAELLGEGETLARHEKTLLALAKKLKLPITKIYKEILSGETIAGRPVMQQLLQDVEAGIWQGVLVMEVERLGRGNTLDQGIILNAFKYSSTKIITPMKSYDPNDEFDEEYFEFSQFMSRREYKTILRRMQRGREASVKEGKFAGSIAPFGYRRVKLPQEKGFTLEIEDTEAAAVKLAYELYAYGDPQPDGTFADIGRATIAKRLDQMGIRNRKGGTWATASVTRMLQNPVYIGKVHWNRRPEKKHTENGKIKKTRPLAENYLLVDGLHEPIISEELWNLAQAKMKQHYRPTGVNGIMQNPLAGLVHCSYCGNAMQRRPYLKTGQPASLICHTHFCPQISSPLYMVEGKILEALSLWMKQHEPTWEEESSINVFSTKIMALEHTIADMEQELQGLQFQFEKIFEFLETGIYTPEVFTARNKTLSEKMAEIRSAIEETQAELSKLKAARKNQVSMIPKIKNILDTYETLTPAEKNKLLKEVLDHVEYHKKIKGKKNVSADNFEIILFPKISPEN

SEQ ID NO: 3706 - protein, 526 aa, Unknown
  Description of Unknown: Integrase B3707 sequence
  PTHR30461:SF3,SM00857,G3DSA:1.10.10.2600,IPR036162,PS51737, G3DSA:3.40.50.1390,IPR006119,IPR038109,PF07508,IPR011109, SSF53041,PTHR30461,Coil,PS51736,cd00338, PF00239
MINMVSFDNIIIYLRKSRSDDPAQTVEEVLAKHERILQDYCIKEYGKVIPEKRIYREVVSGETIQDRPVMQKLLKELETNNIYGVLIVEPQRLSRGDLQDCGQIINSFRYTNTAVITPGKTYNLQDEYDRKFFEMELTRGNDYLEYTKKILNRGRVASVKQGNYICSVRPYGYKKVVIGTGKDKCHTLEIIPEEAEAIKLMYHLYLDENMGFTNIARTLDSMHIKPLKSSNWSAATIRDMIDNPIYIGKIVWNNRKVVKKWENEQIIKVRPRNKGDDVICVDGKHEAIIDEETFNAARQKRGLTPKVRKFKELRNPLAGILFCSTCGHSMSMKKYVDKRSHTGKVTTIMLCNKQAVCHTKSAQYEQIVAKIKESLADAIANFEIKMKEQENNNIDIHKQRITSLKDELNRLYNKDVRQKDAFEDGIYTKEEYIERNSKLQSQILNIKAEIENEKNNTPVIIDYQNKITTFTECLTSLDDDSISAADKNSLLKNCIDKIIYHNDMPSLPGIGRYIENSFRLEIFLKM

SEQ ID NO: 3707 - protein, 526 aa, Unknown
  Description of Unknown: Integrase B3708 sequence
  PTHR30461:SF3,cd00338,SM00857,G3DSA:1.10.10.2600,IPR036162, PF13408,IPR025827,PS51737,G3DSA:3.40.50.1390,IPR006119, IPR038109,PF07508,IPR011109,SSF53041,PTHR30461, PS51736,Coil,PF00239
MCAKKKPAMLEPDMQDAVIYTRYSSHNQRDCSIEQQVADCEIFARQNNLRVVKVYADRHLSGTTDNRPQFQQMLKDASHGHWAYVICWKIDRFARNRYDSATYKFRLKKAGVRVLYAKESIPDGPEGILLESVLEGSAEYYSAALAQNIRRGMKFNAEQCKVNSGSIPFGYCKGPDGRFAIHEANAEVVREIFRKAAAGMPFVDIANDLNSRGLKTSRGGRWNKGSFRLLMNEAYIGVYHFSDTRIEGGMPALIDQGTFWAANERLKANSSVRGRHQDGGDYLLTGKLKCAHCGSYMIGFSGTGKSGELHYYYGCQKRRRERACKKANVPREWIERVVVKAALDYVLRPDVMEWIADAVMEYQEREAASAQLAALTAELEENQKATDNVMKAIEAGIITSTTKQRLLDLEAKAQDLKRAIELEKLSHVRLERDQVLFWLDRFRVGSLQSQEFRRKVIDAFVSVVYLSDDHLRIAFNYSGGSNAEADFDLVMDAEAAAGELSKKFAQGHVASTNLPHRFVRCGVFYA

SEQ ID NO: 3708 - protein, 526 aa, Unknown
  Description of Unknown: Integrase B3709 sequence
  PTHR30461:SF3,SM00857,G3DSA:1.10.10.2600,IPR036162,PF13408, IPR025827,G3DSA:3.40.50.1390,PS51737,IPR006119,IPR038109, PF07508,SSF53041,IPR011109,PTHR30461,Coil, PS51736,cd00338,PF00239
MNTVIYARYSAGPRQTDQSIEGQLRVCTDFCKQRGLTVIDTYCDRHISGRTDERPEFQRLITDAKRKKFEAVVVYKTDRFARNKYDSAVYKRELKRNGIQIFYAAEAIPDGPEGIILESLMEGLAEYYSAELAQKIKRGMHESALKCQSTGSGRPLGYRVDEQKHFQIDPESAQTVQTIFEQYIKGESNAAICELLNSRGLRTAQGKPFNKNSINRIIKNRKYIGEYRYHDIVVEGGMPAIISKDTFNLAQAEMERRRTRKAPKSPKAEYLLAGRLFCGHCKGPMQGVSGTGKSGNKWYYYYCGNTRGENKTCDKKQVSRDRLERAVVDFTVRYILQEEVLEELARKVHAAQERQNDTASEIAFYEKKLADNKKSIANVLRAIESGAATQTLPARLQELENEQAVILGEISFLKGKRLAFTEDQILFALMKHLEPYPGESEQDYRRRIISDFVSEVYLYDDRLLIYFNISSEDGKLKSADLSNIEGGEFDEGLVSSTNLIAGRTPEVTIVVLPYGFVLATQIKDRL

SEQ ID NO: 3709 - protein, 526 aa, Unknown
  Description of Unknown: Integrase B3710 sequence
  SM00857,G3DSA:1.10.10.2600,IPR036162,PF13408,IPR025827, PS51737,G3DSA:3.40.50.1390,IPR006119,IPR038109,PF07508, SSF53041,IPR011109,PTHR30461,Coil,PS51736, cd00338,PF00239
MQYCLYLRKSRADSEAEARGEGETLARHEKALLDLAKKLNLNITAIYREIVSGETIAARPVMQQLLQEVEQGIWDGVLVMEVERLARGDTIDQGIVAQTFKFSDTKIITPIKTYNPNNEFDEEYFEFGLFMSRREYKTINRRLQRGRMASVKDGKYVANKAPYGYNRIRIENDKGWTLEINKEEADVVRLIFELYTVGEKQSDNTFNRLGTGFIAKRLNTMKVSPKRGKVWVVASIRDILINPVYIGMIRWNWRPQQKKMIDGQLHISRPRATDYMLCKGLHPPIISKETFDIAQDLMRHNPARPIGEKNTVKNSLSGIVVCGDCGRHMVRRPHTKYPDMLICSEPTCNNVGSQLRVVEERILQSLKEWLGEYKISWDITSPPVERISQVSIKKKALQKEQHELDTLNKQISKTHDLLEQGIYTTDVFLERSRALSLRMDEVKEHIAILDKELKTEITREDSAVNIIPKVEKLLEVYHDLPSPKAKNDMLKDVLEKVVYTKKERSKKGNLDNFNITIYPKIPKYIT

SEQ ID NO: 3710 - protein, 526 aa, Unknown
  Description of Unknown: Integrase B3711 sequence
  PTHR30461:SF3,SM00857,G3DSA:1.10.10.2600,IPR036162,PS51737, G3DSA:3.40.50.1390,IPR006119,IPR038109,PF07508,SSF53041, IPR011109,PF00239,PTHR30461,PS51736,Coil, cd00338
MPYCIYLRKSRADAEAELLGEGETLARHEKTLLALAKKLKLPITKIYKEILSGETIAGRPVMQQLLQDVEAGIWQGVLVMEVERLGRGNTLDQGIILNAFKYSSTKIITPMKSYDPNDEFDEEYFEFSQFMSRREYKTILRRMQRGREASVKEGKFAGSIAPFGYRRVKLPQEKGFTLEIEDTEAAAVKLAYELYAYGDPQPDGTFADIGRATIAKRLDQMGIRNRKGGTWATASVTRMLQNPVYIGKVHWNRRPEKKHTENGKIKKTRPLAENYLLVDGLHEPIISEELWNLAQAKMKQHYRPTGVNGIMQNPLAGLVHCSYCGNAMQRRPYLKTGQPASLICHTHFCPQISSPLYMVEGKILEALSLWMKQHEPTWEDESSINVFSTKIMALEHTIADMEQELQGLQFQFEKIFEFLETGIYTPEVFTARNKTLSEKMAEIRSAIEETQAELSNLKAARKNQVSMIPKIKNILDTYETLTPAEKNKLLKEVLDHVEYHKKIKGKKNVSADNFEIILFPKISPEN

SEQ ID NO: 3711 - protein, 526 aa, Unknown
  Description of Unknown: Integrase B3712 sequence
  SM00857,G3DSA:1.10.10.2600,IPR036162,PF13408,IPR025827, G3DSA:3.40.50.1390,PS51737,IPR006119,IPR038109,PF07508, IPR011109,SSF53041,PTHR30461,Coil,PS51736, cd00338,PF00239
MQYCLYLRKSRADSEAEARGEGETLARHEKALLDLAKKLNLNITAIYREIVSGETIAARPVMQQLLQEVEQGIWDGVLVMEVERLARGDTIDQGIVAQTFKFSDTKIITPIKTYNPNNEFDEEYFEFGLFMSRREYKTINRRLQRGRMASVKDGKYVANKAPYGYNRIRIENDKGWTLEINKEEADVIRLIFELYTVGEKQSDNTFNRLGTGFIAKRLNAMKVPPKRGKVWVVASIRDILINPVYIGMIRWNWRPQQKKMIDGQLHISRPRATDYMLCKGLHPPIISKETFDIAQDLMRHNPARPIGEKNTVKNSLSGIVVCGDCGRHMVRRPHTKYPDMLICSEPTCNNVGSQLRVVEERILQSLKEWLGEYKISWDITSPPVERISQVSIKKKALQKEQHELDTLNKQISKTHDLLEQGIYTTDVFLERSRALSLRIDEVKEHIAILDKELKTEITREDSAVNIIPKVEKLLEVYHDLPSPKAKNDMLKDVLEKVVYTKKERSKKGNLDNFNITIYPKIPKYIT

SEQ ID NO: 3712 - protein, 526 aa, Unknown
  Description of Unknown: Integrase B3713 sequence
  PTHR30461:SF3,SM00857,G3DSA:1.10.10.2600,IPR036162,PS51737, G3DSA:3.40.50.1390,IPR006119,IPR038109,PF07508,IPR011109, SSF53041,PTHR30461,Coil,PS51736,cd00338, PF00239
MPYCIYLRKSRADAEAELLGEGETLARHEKTLLALAKKLKLPITKIYKEILSGETIAGRPVMQQLLQDVEAGIWQGVLVMEVERLGRGNTLDQGIILNAFKYSSTKIITPMKSYDPNDEFDEEYFEFSQFMSRREYKTILRRMQRGREASVKEGKFAGSIAPFGYRRVKLPQEKGFTLEIEDAEAAAVRLAYELYAYGDPQPDGTFADIGRATIAKRLDQMGIRNRKGGTWATASVTRMLQNPVYIGKVHWNRRPEKKHTENGKIKKTRPLAENYLLVDGLHEPIISEELWNLAQAKMKQHYRPTGVNRIMQNPLAGLVHCSYCGNAMQRRPYLKTGQPASLICHTHFCPQISSPLYMVEGKILEALSLWMKQHEPTWEDESSINVFSTKIMALEHTIADMEQELQGLQFQFEKIFEFLETGIYTPEVFTARNKTLSEKMAEIRSAIEETQAELSNLKAARKNQVSMIPKIKNILDTYETLTPAEKNKLLKEVLDHVEYHKKIKGKKNVSADNFEIILFPKISPEN

SEQ ID NO: 3713 - protein, 526 aa, Unknown
  Description of Unknown: Integrase B3714 sequence
  PTHR30461:SF3,SM00857,G3DSA:1.10.10.2600,IPR036162,PF13408, IPR025827,PS51737,G3DSA:3.40.50.1390,IPR006119,IPR038109, PF07508,SSF53041,IPR011109,PF00239,PTHR30461, PS51736,Coil,cd00338
MDYTNLNLANVVIYARYSSDRQNEQSIDGQLDKCHEYAQQRGFRVVGEYCDRALSGRYAETRPEFQRMIADSAKHAFEYVLVWKLDRFSRDRYDSAIYKKKLRANGVRVLSVTEGIDESSESVLLEAILEAMAEEYSRQLAQNVKRGMRQNAEKGLSLGGIAPLGYRVVNKRYEINEDAAKIVRFIHEQYADGVGQKQIVADCERLGYRNQRGNPIDLHAVKRILSNERYVGTYDYLGEVVIEDAFPAIVSKALKKKVRDRLKANAKAPGHAKAKVEYLLHGKLFCGVCGSPMVGECGRSSTGVVHYYYACAAKKKQHTCKKRSERKDKLEQYITDYIGAHILTDKWIDAAADRVVAEYQKSYDASGIKPLEKQIREADKEIDKLVDTLISATADTARRRINERIEAAEVKKKALEEQLASLRIASRVILKKEDIVAWLNQFRTGNSADLEYRKKVIELFVNAIYIYDNKIKMFFNVTDSAQITYPEMLALEEPESSDLGSSGVPDVALSERTVFVNGVIGIIVHR

SEQ ID NO: 3714 - protein, 526 aa, Unknown
  Description of Unknown: Integrase B3715 sequence
  SM00857,G3DSA:1.10.10.2600,IPR036162,PF13408,IPR025827, G3DSA:3.40.50.1390,PS51737,IPR006119,IPR038109,PF07508, IPR011109,SSF53041,PF00239,PTHR30461,PS51736, Coil,cd00338
MQYCLYLRKSRADSEAEALGEGETLARHEKALLDLAKKLNLNITAIYREIVSGETIAARPVMQQLLQEVEQGIWDGVLVMEVERLARGDTIDQGIVAQTFKFSDTKIITPIKTYNPNNEFDEEYFEFGLFMSRREYKTINRRLQRGRMASVKDGKYVANKAPYGYNRIRIENDKGWTLEINKEEADVVRLIFELYTVGEKQSDNTFNRLGTGFIAKRLNTMKVSPKRGKVWVVASIRDILINPVYIGMIRWNWRPQQKKMIDGQLHISRPRATDYVLCNGLHPPIISKETFDMAQELMRHNPARPIGEKNTVKNSLSGIVICGNCGRHMVRRPHTKYPDMLICSEPTCNNVGAQLRVVEERILQSLKEWLGEYKISWDITSPPVERISQVSIKKKALQKEQHELDTLNKQISKTHDLLEQGIYTTDVFLERSRALSLRMDEVKEHIAILDKELKTEITREDSAVNIIPKVEKLLEVYYDLPSPKAKNDMLKDVLEKVVYTKKERSKKGNLDNFDIAIYPKIPKYIT

SEQ ID NO: 3715 - protein, 526 aa, Unknown
  Description of Unknown: Integrase B3716 sequence
  PTHR30461:SF3,SM00857,G3DSA:1.10.10.2600,IPR036162,PF13408, PS51737,G3DSA:3.40.50.1390,IPR025827,IPR006119,IPR038109, PF07508,IPR011109,SSF53041,PTHR30461,Coil, PS51736,cd00338,PF00239
MDEYCLYLRKSRIDLEAEANGQGDTLARHRAALLKLAQKRGFNITGCYEEVRSGESIAARPEMQRLLNDVEDGRWAGVLVMEVERLARGNTTDQGIVADTFKYSDTKIVTPNKIYDPGDEFDEEYFEFGLFMSRREYKTINRRLQRGRRASLSEGKYIAGKATYGYERYKLSGEKGYSLRIIPEQAEIVRQIYDWYVNGELLPDGTLRPLGSYTIAKRLDARGIPSPTGGKWPPCTVKDILTNPTYIGKLRWSYRPTVKRMVDGELVKTRPVDRSVHLSDGRHEPILDEVLWHRAQLMLKNRSHAPVPKSTNIRNPLAGLLICSKCGRSMERRKFKHGRDTVACPNKDCTCKSSVLEEVEAGMLDSLRIWLSDYKVKLAQSQETISHTGPTAEQEITSLQRTLGTLQAQMENLYNLVEQGVYSTDLFLQRSQALTARMAEVNQQIESTQAALTASRRIARNRFEIIPRIERVLALYPTLTDPREKNTILKEVLEKILYTKTTGSRWEASDMNLYVFPRVETDGEQL

SEQ ID NO: 3716 - protein, 526 aa, Unknown
  Description of Unknown: Integrase B3717 sequence
  cd00338,SM00857,G3DSA:1.10.10.2600,IPR036162,PF13408, PS51737,IPR025827,G3DSA:3.40.50.1390,IPR006119,IPR038109, PF07508,IPR011109,SSF53041,PTHR30461,PS51736, Coil,PF00239
MELRKDGLYFAYLRKSREDRDAEQHGEVETLERHRKMLCDMASRYGITVATWYKEVVSGETIAARPEMLKMLEAIEDMRPDGVLVVELERLARGDTRDQGLIMETFKYAGTQIITPLKIYNPNNESDEEYAEFGLFMSRREYKTINRRLQRGRNISTSEGKWIGNKPPYGYERVKIPNDKGFTLRPIPEEATVVRLIYNMYVHGTPESGNIPVGTATIGHILDDMGVKPPNGSYWPTCTVRRIVENPVYIGKLQHGYRPQQKRTVNGKITVSRPINKNCELYNGLHTPIIDQEIFALAGQKRKESYRKPFFHGIKNPLAGLIYCTECGKSMYRRPASPTCRDDTIMCSTRGCKTSASYYYLIEDRLLRALNQWLDEYRGQIEDTSLELNRAQLERYKTQLASAQEVETTAQKQLEKAMDLLEKEVYSIEMFQQRATALNEKIALARRETKELSEKIRKLEKLTADKQTIVARWEHVLEEYPNVDSPVVKNTMLKEIIERVEYSKPYKGNRKSGGMDKFTLKIFPRL

SEQ ID NO: 3717 - protein, 526 aa, Unknown
  Description of Unknown: Integrase B3718 sequence
  SM00857,G3DSA:1.10.10.2600,IPR036162,PF13408,PS51737, IPR025827,G3DSA:3.40.50.1390,IPR006119,IPR038109,PF07508, IPR011109,SSF53041,PF00239,PTHR30461,PS51736, Coil,cd00338
MPTLSSAGNYCMYLRRSRADEDAERMGAGETLTRHQTMLQELAQRLIGHEIPGPAIYREIVSGDTVANRPEMRRLLADVERGQWDGVLVADIDRLARGDTMDQGLVAQTFLYSHTLILTPMKTYDPADPADSEFFEIRLFFARREYQLIKRRMQAGRANAAREGLYPGGRNPYGYERYKLPDRRGWSLRIVPEQAAVVRMIYDWYLHGIDGETVGCGRIASRLNDIGARQQAGGLWEDGNVLHVLKNPIYTGYVTWNAHVQKTEMVDGQKQKKRVRGTDPIRVKGLHPPIISEHDFDAVQHRIASRHAVPAPANRATVNVLAGLARCGVCGRAMRYFSPKNRPEKWAVLKCSNPNPCGNHSAAYRIVLAAVLDTLRDWATYDQGKLPTPAEDPDPSAELRATQEKQLSTLQRQLARLRDLLEQGVYDVDTYLSRQRDIRERMDACATAIAQLQPPPKSRAETLAELAPAVRNVLDAYSTAGTPGEQNALLKSVISRIVYYKRDNVAPGQSPADAITLEIFPLLPSE

SEQ ID NO: 3718 - protein, 526 aa, Unknown
  Description of Unknown: Integrase B3719 sequence
  PTHR30461:SF3,SM00857,G3DSA:1.10.10.2600,IPR036162,PF13408, IPR025827,PS51737,G3DSA:3.40.50.1390,IPR006119,IPR038109, PF07508,IPR011109,SSF53041,PF00239,PTHR30461, PS51736,Coil,cd00338
MDYINLNLANVVIYARYSSDRQNEQSIDGQLDKCHEYAQQRGFRVVGEYCDRALSGRYAETRPEFQRMIADSAKHAFEYVLVWKLDRFSRDRYDSAIYKKKLRANGVRVLSVTEGIDESSESVLLEAILEAMAEEYSRQLAQNVKRGMRQNAEKGLSLGGIAPLGYRVVNKRYEIDEDAAKIVRFIHEQYADGLGQKQIVADCERLGYRNQRGKPIDLYAVKRILSNERYVGTYDYLGEVVIEDAFPAIVSKELKMKVRDRLKANAKAPGHAKAKVEYLLHGKLFCGVCGSPMVGECGRSSTGVVHYYYACAAKKKHHTCKKRSERKDKLEQYITDYIGAHILTDKWIDAAADRVVAEYQKSYDASGIKPLEKQIREADKEIDKLVDTLISATADTARRRINERIEAAEVKKKALEEQLASLRIASRVILKKEDIVAWLNQFRTGNSADLEYRKKVIELFVNAIYIYDNKIKMFFNVTDSAQITYPEMLALEESESSDLGSSGVPDVALSERTVFVNGVIGIIVHR

SEQ ID NO: 3719 - protein, 526 aa, Unknown
  Description of Unknown: Integrase B3720 sequence
  SM00857,G3DSA:1.10.10.2600,IPR036162,PF13408,PS51737, IPR025827,G3DSA:3.40.50.1390,IPR006119,IPR038109,PF07508, IPR011109,SSF53041,PTHR30461,Coil,PS51736, cd00338,PF00239
MQYCLYLRKSRADSEAEARGEGETLARHEKALLDLAKKLNLNITAIYREIVSGETIAARPVMQQLLQEVEQGIWDGVLVMEVERLARGDTIDQGIVAQTFKFSDTKIITPIKTYNPNNEFDEEYFEFGLFMSRREYKTINRRLQRGRMASVKDGKYVANKAPYGYNRIRIENDKGWTLEINKEEADVVRLIFELYTVGEKQSDNTFNRLGTGFIAKRLNAMKVPPKRGKVWVVASIRDILINPVYIGMIRWNWRPQQKKMIDGQLHISRPRATDYLLCKGLHPPIISKETFNIAQDLMRHNPARPIGEKNTVKNSLSGIIVCGNCGRHMVRRPHTKYPDMLICSEPTCNNVGSQLRVVEERILQSLKEWLGEYKISWDITSPPVERISQVSIKKKALQKEQHELDTLNKQISKTHDLLEQGIYTTDVFLERSRALSLRMDEVKEHIAILDKELKTEITREDSAVNIIPKVEKLLEVYHDLPSPKAKNDMLKDVLEKVVYTKKERSKKGNLDNFNIAIYPKIPKYIT

SEQ ID NO: 3720 - protein, 526 aa, Unknown
  Description of Unknown: Integrase B3721 sequence
  PTHR30461:SF3,SM00857,G3DSA:1.10.10.2600,IPR036162,PF13408, PS51737,G3DSA:3.40.50.1390,IPR025827,IPR006119,IPR038109, PF07508,IPR011109,SSF53041,PTHR30461,PS51736, cd00338,PF00239
MAKRSAKKNEYQSAEQVGVIYARYSSHNQKEESIEQQIAECSDFAAKNGIRIVGIYADKAVSGRSDRRPNFQRMMRDAEKRQFQIVVAYKSNRIARNMLNALQYEARLDLLGIKTLYAKEEFGNTAAGRFALRTMMNVNQFYSENMGEDIKRGMVDNANECKVNGMLPLGYVKSKEGKYAIAPDEAAVVREIFDSVLKDVPVAEIARSLNQRGIHTKLGREWNKNSFHIMLKNDNYIGVYRHSGVVVEDGIPPILKKEVFAAVQEKLANKKKTAGRRSANGEYLLTGKLFCGYCGSYMIGVSGTGENGTVHNYYQCQKRHAEGRCEKKNVRRDFIEKLIARLTQDYILQDDTIEWIADSTMSFQAMARRESGVAQLERDLADNRKVAKNIMAAIEQGIITETTKARLLEVEGTIHDLERSLSIAKAASQPIERERVVFSLEQMREGNVVSKEHQKKLIDTFVKSVTLWDDRIQIDYYHTPGKHKFSYSLEELTSKAENESNASDVRTGSLELHHKRTLILIEWLSR

SEQ ID NO: 3721 - protein, 526 aa, Unknown
  Description of Unknown: Integrase B3722 sequence
  PTHR30461:SF3,IPR036162,PS51737,IPR011109,PTHR30461, PF00239,G3DSA:1.10.10.2600,IPR006119,SSF53041,cd00338, SM00857,IPR025827,IPR038109,PS51736,mobidb-lite, PF13408,G3DSA:3.40.50.1390,PF07508,Coil
MHGAYILARYSTDRQNEDSIEVQVSACRKWCDERSLPVLDVFADEATSGMKATRPEYARMMWQLEHGGADTVVIYDQSRMFRKLTAWFDFRDQLARLGVDVVSVTQPMIGGDLRDPANFLTEGSMALFNQMWVLQTRQKVVEKMRFMARQGLHTGGTPPLGYKVVDGRLVIDAAEAETVRLIFGLYASGMTYREIIRRLNAEERRTKRGGNFGVNSLHDLLKNPKYVGDLVYGKVAKRPDGSRNSHAVAEDAIVVKDVLPAIVDRETWEKVQLKMQENKRSAAGRPASARAYPLKGKVFCRECKSAMLVTAAKRRGKRYYYYTCGAKHRKGLCDNSQIPVSALEGIVANAVRQRLSEPESVGGLIRILRDERAKLSEAAVQRLRAMQKRDREIAKQLDAAVNAVLGGLHSPILTAKVNALEAERAKISHDMQQLRAQVSGAEIDEPRLRELLALAMQDDAAVLSIVVRVEVGKDEIAVWTLLDADPNGDFDFAEDGVPITPSEVAPSYNNSGCPRWSTKKEASFVR

SEQ ID NO: 3722 - protein, 526 aa, Unknown
  Description of Unknown: Integrase B3723 sequence
  PTHR30461:SF3,SM00857,IPR036162,PF13408,IPR025827, G3DSA:3.40.50.1390,IPR006119,PF07508,IPR011109,SSF53041, PTHR30461,Coil,PS51736,cd00338,PF00239
MNFGIYGRKSYFVDTSESTQMQFDVCKEHIRLHFPEEEISSITLYEDDGYVRSDMDRPGMNQLKEDIAAGLIDCVIIYKIDRICCDMMDFCVFYSFLKEHEIKFITVKDGIDTTTPLGEAMMYLAVIFSGLEVRTDSLRITDNMNHLAESGFWCGGRAPIGYNITTVDLGPKSHKTLEFNQEEIDYKNNLIRIFLDNNFSLQNMETYCKNNGLTTLNGKFLSTTQLYSMFTSPHCVEDTAAMYDYFEAKGCQMTSPREEWDGSHGIIIYGRTMEKKVNGKKKHQLAPPENWRVSIGYHLPYMKAETYFQLQAQFGHNIFSKKPKYDLPLLKGSLRCKCGRMMSMSRKKKVDGSVSTWYYCPKRMRSGVDACDMGHIKSDLLDEKVLDVFREIKHDPAAIRKYVKGIDKKPKDNSVALRTKMQQCQDKIEKLTAALAANSESAAAKYIVNEIEKLDCEYNNLKRKAASQSAEERRAAVKYKNAMEKRDEIIRLLDDFDNFSADERNAIARDVLKECKWDGETLFIML

SEQ ID NO: 3723 - protein, 526 aa, Unknown
  Description of Unknown: Integrase B3724 sequence
  PTHR30461:SF3,SM00857,IPR036162,PF13408,IPR025827, G3DSA:3.40.50.1390,IPR006119,PF07508,IPR011109,SSF53041, PTHR30461,Coil,PS51736,cd00338, PF00239
MNFGIYGRKSYFVDTSESTQMQFDVCKEHIRLHFPEEEISSITLYEDDGYVRSDMDRPGMNQLKEDIAAGLIDCVIIYKIDRICCDMMDFCVFYSFLKEHEIKFITVKDGIDTTTPLGEAMMYLAVIFSGLEVRTDSLRITDNMNHLAESGFWCGGRPPIGYSITTVDLGPKSHKTLEFNQEEIDYKNNLVRIFLDNNFSLQNMETYCKNNGLTTLNGKFLSTTQLYSMFTSPHCVEDTAAMYDYFEAKGCQMTSPREEWDGSHGIIIYGRTMEKKVNGKKKHQLAPPENWRVSIGYHLPYMKAETYFQLQAQFGHNIFSKKPKYDLPLLKGSLRCKCGRMMSMSRKKKVDGSVSTWYYCPKRMRSGVDACDMGHIKSDLLDEKVLDVFREIKHDPAAIRKYVKGIDKKPKDNSVTLRTKMQQCQDKIEKLTAALAANSESAAAKYIVNEIEKLDCEYNNLKRKAASQSAEERRAAVKYKNAMEKRDEIIRLLDDFDNFSADERNAIARDVLKECKWDGETLFIML

SEQ ID NO: 3724 - protein, 526 aa, Unknown
  Description of Unknown: Integrase B3725 sequence
  PTHR30461:SF3,cd00338,SM00857,G3DSA:1.10.10.2600,IPR036162, PS51737,G3DSA:3.40.50.1390,IPR006119,IPR038109,PF07508, SSF53041,IPR011109,PTHR30461,PS51736,Coil, PF00239
MTATDEIIKKACNKYKKTRYAMYLRKSRADLELEAMGEEETLARHKAMLFSLAAKHEIHPDQITIYHELVSGDSIDERPEMQRLLADVYAKTFAGVLVVEVERLARGNTKDQGEVADAFQASNTHIITPAKVYDPNNEFDQEYFEFGLFMSRREYKTIKRRLEAGKKQSVMEGNYILPQRVFGYDILRTTKKDRTLIIRPEEAKYVKMIFDWHIKEKRATGWMARQMTLMGIPTTKGRPEWNRGTIRDMLANPIYAGKVTWGKRRTVKEYDPELGKLVKVIKEDGKMEIYEGKHEGIISEEEFAEAQRVTETMKNPSAKVSTELKNPFAGLMECCTCGRNIIAMTYNDGRRARLSHARDTICTKKSLPIDEVSEVFISTLQAYIEDFRTKMEIDDNKDEMEAFKARLNAMETELEKLEWKRKNLFADYEDGIYTRDEFLERKLHYNEKIDNTKKQIQEARKSTPEPVDYSEQISNLHAMIDCMKDDGLSVKQKNDFLKQFISKITYDSISYGQRRGGKAILEVFLK

SEQ ID NO: 3725 - protein, 526 aa, Unknown
  Description of Unknown: Integrase B3726 sequence
  PTHR30461:SF3,cd00338,SM00857,G3DSA:1.10.10.2600,IPR036162, PF13408,PS51737,G3DSA:3.40.50.1390,IPR025827,IPR006119, IPR038109,PF07508,IPR011109,SSF53041,PTHR30461, PS51736,Coil,PF00239
MGKVRVIPSTINPLTHQSIVANVKRKVAAYARVSTDSDEQYTSYEAQVNYYTGYIQSRVDWEYINVYADEGISGTNTKKRVQFNKMIEDALEGKINLIITKSISRFARNTLDTISYIRKLKAAGVEVFFEKENLWTFDSKSEMVLSMLAAIAQEESRSISENVKIGKRWGFKEGKVSMPYKIFLGYDKVDGKIVINEEQAKVVRLIYRLYAREGYSRAAIADYLNEMKVPKPSNPEGKWSINNITAILTNEKYKGDALLQKGYVDNYLDHTVKKNKGVLPQYYVENSHPAIIDKDEWNMVQEELKKRDKFRYAYSKNNPFSSKLICGCCGHFYGLKVWHSNTQYRKEIMQCNKKYSTKDDKCDTPSVLREDVNKRFIEAYNAIMINKEEVIKSAKELIGLLTDTTKIDKRIEELNGNISDTKTLVENLIHDNALKAQDQDAYIKKCNSMTAQYDILKQQLDEAISERDSREIKSKSMNLFITDIKEAPIMINEFDLTLWNIMLDEAIVNKDGSITFKFKNGMEYKN

SEQ ID NO: 3726 - protein, 526 aa, Unknown
  Description of Unknown: Integrase B3727 sequence
  PTHR30461:SF3,cd00338,SM00857,G3DSA:1.10.10.2600,IPR036162, PF13408,IPR025827,PS51737,G3DSA:3.40.50.1390,IPR006119, IPR038109,PF07508,SSF53041,IPR011109,PTHR30461, PS51736,Coil,PF00239
MAKKKKPAGGNAIIYARYSSHNQRDVSIEQQIEACRKHAAELGLTITDTYEDRAISGRTDNRPAFQRMMRDAEDGKFQYVLAWKSNRMGRNMMQAMVNESRLMDCGVKVFYAEEDFDDSAAGRFALRSMMNVNQFYSDNLAEDVRRGLMDNASKCMANGRQPLGYKRGEGGKVVVDEPAAAIVREIYTRIASGEMFMDIARDLNRRGIKTQSGSEWNKSSFKVLCRNERYRGIYIYGDTRIEGGIPPIVDDVLWYKVQEVLKVKKSKNRHHCPSDEDYLLTGKLRCGKCGGYMIGMSGRSKTGDVHHYYACQNRRVGHTCDKKNIRRDVVEPAVAQAIKQYCLTDDAIEWITDQTIAYWEDEDRKLQIDSIENDLSAVQSSISNVMKAIEMGVITETTRDRLIELERQQTDLKSKLALAKEEIVHVDRKDLISSLLAFRHGNVHDRAYQEKLFNAFLIAVYVYDDDHLKLVFNSFGKDDTVNIALDLGENDDNSGLSDVSKSSPILSNGQPVWPSGNNRVVFLFVL

SEQ ID NO: 3727 - protein, 526 aa, Unknown
  Description of Unknown: Integrase B3728 sequence
  PTHR30461:SF3,SM00857,G3DSA:1.10.10.2600,IPR036162,PS51737, G3DSA:3.40.50.1390,IPR006119,IPR038109,PF07508,SSF53041, IPR011109,PTHR30461,Coil,PS51736,cd00338, PF00239
MPYCIYLRKSRADAEAELLGEGETLARHEKTLLALAKKLKLPITKIYKEILSGETIAGRPVMQQLLQDVEAGIWQGVLVMEVERLGRGNTLDQGIILNAFKYSSTKIITPMKSYDPNDEFDEEYFEFSQFMSRREYKTILRRMQRGREASVKEGKFAGSIAPFGYRRVKLPQEKGFTLEVDDTEAAAVKLAYELYAYGDPQPDGTFADIGRATIAKRLDQMGIRNRKGGTWATASVTRMLQNPVYIGKVHWNRRPEKKHTENGKIKKTRPLAENYLLIDGLHEPIISEELWNLAQAKMKQHYRPTGVNGIIQNPLAGLVHCSYCGNAMQRRPYLKTGQPASLICHTHFCPQISSPLYMVEGKILEALSLWMKQHEPTWEEESSADVFSTKIMALEHAIAEMEQELQGLQFQFEKIFEFLETGIYTPEVFTARNKTLSEKMAEIRSAIEETQAELSKLKAARKNQVSMIPKIKNILDTYETLTPAEKNKLLKEVLDHVEYHKKIKGKKNVPADNFEIILFPKISPEN

SEQ ID NO: 3728 - protein, 526 aa, Unknown
  Description of Unknown: Integrase B3729 sequence
  SM00857,G3DSA:1.10.10.2600,IPR036162,PF13408,PS51737, IPR025827,G3DSA:3.40.50.1390,IPR006119,IPR038109,PF07508, IPR011109,SSF53041,PTHR30461,Coil,PS51736, cd00338,PF00239
MQYCLYLRKSRADSEAEALGEGETLARHEKALLDLAKKLNLNITAIYREIVSGETIAARPVMQQLLQEVEQGIWDGVLVMEVERLARGDTIDQGIVAQTFKFSDTKIITPIKTYNPNNEFDEEYFEFGLFMSRREYKTINRRLQRGRMASVKDGKYVANKAPYGYNRIRIENDKGWTLEINKEEADVVRLIFELYTVGEKQSDNTFNRLGTGFIAKRLNTMKVSPKRGKVWVVASIRDILINPVYIGMIRWNWRPQQKKMIDGQLHISRPRATDYMLCKGLHPPIISKETFDIAQDLMQHNPARPIGEKNTVKNSLSGIVVCGDCGRHMVRRPHTKYPDMLICSEPTCNNVGSQLRVVEERILQSLKEWLGEYKISWDITSPPVERISQVSIKKKALQKEQHELDTLNKQISKTHDLLEQGIYTTDVFLERSRALSLRMDEVKEHIAILDKELKTEITREDSAVNIIPKVEKLLEVYYDLPSPKAKNDMLKDVLEKVVYTKKERSKKGNLDNFDIAIYPKIPKYIT

SEQ ID NO: 3729 - protein, 526 aa, Unknown
  Description of Unknown: Integrase B3730 sequence
  PTHR30461:SF3,cd00338,SM00857,G3DSA:1.10.10.2600,IPR036162, PS51737,G3DSA:3.40.50.1390,IPR006119,IPR038109,PF07508, SSF53041,IPR011109,PTHR30461,PS51736,Coil, PF00239
MLYELSPSDISHIIIYLRKSRSDDPYMSVEEVLSKHETQLQEHAVSVFGQRIPEEHIFREVVSGETIADRPVMKQVMKLLETGSIKGVLVIEPQRLSRGDLEDCGRIINAFRYTNTLVLTPPKNYNLADEYDRKFFEMELTRGNDYLEYTKKILNRGRIASVKQGNFIGSVPPYGYRKVQIGTGKSTYHSLEVIPEQADAVKLMFKLYLAGNGFTNIAKKLDELGIKPLKSSVWSPAAISDMLENPVYIGKIRWNWRKTEKKIVNGQIVKTRPKTSDVSEWVYVDGRHEPIIDLATFEAAQERRGKTPKVKKNNELKNPFAGLLFCGTCGKAMSLKIYTQKNGSKCEMMLCNKQSWCNTKSVKYDVFVDRIIETLENTIADFELKLENDDSSTADLQESMISNLQNELKRLKEKDIRQKDAYEDGIYTKEEYASRNAKLQEEIAKASAALEQARTSIPATIDYREKIARFTDCLAALKNPDMSATEKNILLKSCIDKIVYHNHMESKPGIGRYVENVFTIDVFLRL

SEQ ID NO: 3730 - protein, 525 aa, Unknown
  Description of Unknown: Integrase B3731 sequence
  PTHR30461:SF3,cd00338,SM00857,G3DSA:1.10.10.2600,IPR036162, PF13408,IPR025827,G3DSA:3.40.50.1390,PS51737,IPR006119, IPR038109,PF07508,IPR011109,SSF53041,PTHR30461, PS51736,Coil,PF00239
MSSVDKTAVIYARYSSHGQTEQSIEGQIAAAQKYAEGKGYTIIHIYADRAMTGRNDDREQFQKMLSDTATHQFGVILLWKIDRFGRNREEIAFNRYRCKKNGVRVERVAEDVPDGPEGVILDSVLEGMAEYYSLQLAQNVRRGQRESAKKSQTVGGCNIIGYKVNPDTKRYEVDPKTAPFVTEVFKRYANGETISEIVAWLNVQGVRATRGGEFTVNSLHRLLKNEKYTGVYIFHDIRNEGGMPALTDRATFDKVQEMLKVNRRAPARVWSKTEYLLTDKLFCGHCGAMMVGESGHGRNGTKHSYYTCWNRKKKKSCSKKPVRQDVIEPMVLRVISKMLSDEATLEYIADQVWAVYERSDTSGDTIKALDKQIADVDRALSNVMKAIEMGIINEMTKARMDELTDQKQALSVARAEAGLAGGFKLTRDMILFFLHDMAATNMTDRDCQKRLIKTFVNAIYLYDDHFDIAFNYTSNGKMVVKMQEINDTTSGEVFGRCAQSPAKSTAVVIQMYRKTAVFFVCGSIR

SEQ ID NO: 3731 - protein, 525 aa, Unknown
  Description of Unknown: Integrase B3732 sequence
  SM00857,G3DSA:1.10.10.2600,IPR036162,PF13408,IPR025827, G3DSA:3.40.50.1390,PS51737,IPR006119,IPR038109,PF07508, IPR011109,SSF53041,PTHR30461,Coil,PS51736, cd00338,PF00239
MVKNRAAIYARFSSHNQRSESIEIQVENSRTYCEREGLQVVREYCDYAQTGRNVNRAEFQRMMNDAKLGLFDYVVIYKVTRIMRNRDEMALARIMLRKAGVEILYAGEEIASGSSGVLQLGMLEVLAEWESAIDSERIRDGIQKNAARCLANGHSLYGWDIVDGRYSVNEREAALMRKMKNMLFSGHSVADIVRALEGEKTRNGKPFNQDKVTKLLRRVQNGGTYSYAGHVVEGGMPGLWPQVEQDMIESVLNDRHRPRRKVDSSKEFPLSGKLYCTKCGMPMAGMSGTSKTGKAYHYYRCRKCRRTVRRDLIEDAVVDMTLQAVARDDVRQRIAQGMALYQSEQEETKPESYYLKKELRRIDAAFERIWQAIEDGIAPPGGKERTDELKRRKAEIEAQLRIAERGESMSFGVDELMLWLDEIATELTPLDILNKFVRFAEIDGKSNRIRVYFAFDKHGDGFSPNSADKGEHLYEERCSPNSTLVELMRKTANSTGTANRSAIQLDTCIVRVSKNWFVVVGTCQK

SEQ ID NO: 3732 - protein, 525 aa, Unknown
  Description of Unknown: Integrase B3733 sequence
  PTHR30461:SF3,cd00338,SM00857,G3DSA:1.10.10.2600,IPR036162, PF13408,IPR025827,G3DSA:3.40.50.1390,PS51737,IPR006119, IPR038109,PF07508,SSF53041,IPR011109,PTHR30461, PS51736,Coil,PF00239
MPTVKVIPATRDFHTGIEKTTTRKKRVGAYARVSTDSDDQLSSYEAQCDYYTRYIKSRPDWEFVGLYADEGISGTNTKHRDRFNAMIADALNGKIDLIITKSVSRFARNTVDSLTTVRKLKEKGVEVYFEKENIYTLDSKGELLITIMSSLAQEESRSISENVTWGKRKLFADGKVTLPYSSFVGYRKGANGLPEIEPEGAKIVRRIYTEFLNGRTARQIADGLSADGIPTPRRAKKWRCTTIISILTNEKYKGAALLQKSFTVNFLTKKMKPNEGEVPQYYIENSHPAIIDPVEFDLVQAEMQRRRKLGKIYSGNSIFASKIICGDCGEFYGEKVWHSNDRYRKTIFRCNHKYNNEKGKCQTPVISEQQIKETFVVAYNALMADKAGVIADCRALQHMLTDATAMEQEIADLSKQLGDSTAELRQHVEGNMRSAMNQEQFWKRYNTLEEQCNCLSDRLAKLQSSVKERKQRADVIGGFMFEIKERDGIIDEFDEELWTALLESVTITRDGKWQFKFKNERVIEV

SEQ ID NO: 3733 - protein, 525 aa, Unknown
  Description of Unknown: Integrase B3734 sequence
  PTHR30461:SF3,cd00338,SM00857,G3DSA:1.10.10.2600,IPR036162, PF13408,IPR025827,G3DSA:3.40.50.1390,PS51737,IPR006119, IPR038109,PF07508,SSF53041,IPR011109,PTHR30461, PS51736,Coil,PF00239
MYEEVKTACIYARYSSNNQTEQSIEGQLRVCREFCNRYNIKIVEIYTDRATSASKDIEKRVSFLKMIKDSEKGNFDAVIVYKLDRFARSRYDSATYKYRLRKNGVQLISATENISNDPEGIILESVLEGMAEFYSAELSQKIHRGLRESAYKHNSIGGQIPLGYKTEGKKLVIDEETAPIVREAFEMYAEGHSVADICRTFNARGYKTSKGTRFGKSSFSKIFRNEKYIGVYQFHDYRAEDAIPALIDRKTFNLVQARLKAVGKTPGQFKAKRMYLLSGKLYCGHCGCKMNGNCNTNDYSYYECYGKKNLHKDCHKRNLRKDFIEDIVVRDALSLLTPERIEEIATVAIQTNTYEVETTTDIPAIRGRLHETKLSLENITKAIEGGLAPETLVKRMVELEKEKKVLEGELKKEEKGVTYLDREQVVYWLNQFKDGDIEDEDFRRQLIDLFVNSVTVWDEPDDFFKITIAYNLTSLQEKTYRLPKGGTLSDLELNAPALKSNPIIEGNLLFHTTFQQYIPYKRYGK

SEQ ID NO: 3734 - protein, 525 aa, Unknown
  Description of Unknown: Integrase B3735 sequence
  SM00857,G3DSA:1.10.10.2600,IPR036162,PS51737,G3DSA:3.40.50.1390, IPR006119,IPR038109,PF07508,SSF53041,IPR011109, PF00239,PTHR30461,PS51736,Coil,cd00338
MAYCLYLRKSRSDIEAEAHGEEETLARHERILLDLAKRCEYNVTQIYREVVSGETIASRPVMQQVLQEVEQGMWDGVLVVEVERLARGDTIDQGIVAQAFKYSDTKIITPIKVYDPTNEFDEEYFEFGLFMSRREYKTINRRLQRGRLAASQEGKFVSGSKPYGYERVRCSDGKGWTLRPVEDEADIVRYIFKLYAYGIESESGEVHYPGTASIATMLDKLGVKTPSGGDTWQSHTVYKILQNPVYIGKVRWGERQTKRISENGVIKKKRVHVPESEWLLVDGLHPAIIDVATFNRAADMMKQKGPVPLPGTYSLSNPLAGIVVCAKCGRNLTQRNSQSYPMLCCPNKRCTNVGAKLSLIEERILQGLSGWLADYRLKWDDGSAAPDTQIPETEKAITRAKSEVATLRKQLSRTHDLLEQSVYDTDTFLLRSRDVNERITAAEKKVSKLTELLAELKRREDSKKNIVPKVEKLLEVYETFPNAQAKNDMLKGILEKVVYLRENRSNKGGPLDNFELTLFPKIPRS

SEQ ID NO: 3735 - protein, 525 aa, Unknown
  Description of Unknown: Integrase B3736 sequence
  SM00857,G3DSA:1.10.10.2600,IPR036162,PF13408, IPR025827,G3DSA:3.40.50.1390,PS51737,IPR006119, IPR038109,PF07508,IPR011109,SSF53041, PTHR30461,Coil,PS51736,cd00338,PF00239
MVKNRAAIYARFSSHNQRSESIEIQVENSRAYCEREGLQVVREYCDYAQTGRNVNRAEFQRMMNDAKLGLFDFVVIYKVTRIMRNRDEMALARIMLRKAGVEILYAGEEIASGSSGVLQLGMLEVLAEWESAIDSERIRDGIQKNAARCLANGHSLYGWDIVDGRYSVNEREAALMRKMKNMLFSGHSVADIVRALEGEKTRNGKPFNQDKVTKLLRRVQNGGTYSYAGHVVEGGMPGLWPQVEQDMIESVLNDRHRPRRKVDSSKEFPLSGKLYCTKCGMPMAGMSGTSKTGKAYHYYRCRKCRRTVRRDLIEDAVVDMTLQAVARDDVRQRIAQGMALYQSEQEEMKPESYYLKKELRRIDAAFERIWQAIEDGIAPPGGKERTDELKRRKAEIEAQLRIAERGESMSFGVDELMLWLDEIATELTPLDILNKFVRFAEIDNKNNRIRVYFAFDNHGDGFTPNDADKGEHLYEERCSPNSTLVELMRKTANSTNTATRAAIQLDTCIVRVSKNWFVVVGTYQK

SEQ ID NO: 3736 - protein, 525 aa, Unknown
  Description of Unknown: Integrase B3737 sequence
  PTHR30461:SF3,IPR036162,PS51737,IPR011109,PTHR30461, PF00239,G3DSA:1.10.10.2600,IPR006119,SSF53041,cd00338, SM00857,IPR025827,IPR038109,PS51736,PF13408, G3DSA:3.40.50.1390,PF07508,cd09005,Coil
MGRKVTVIPPTISLQTHLPTTQKVKRKVAGYARVSTDFEEQLTSYEAQVDYYTKYIQEREDWEFVKVYTDEGISATSTVHRDGFNQMVADALDGKIDLIVTKSVSRFARNTVDSLTTVRKLKEKGVEVFFEKEDIYTLDSKGELLITIMSSLAQEESRSISENVTWGQRKRFADGKVSLPYKHFLGYRKGADGLPEIVPEEAEIVRSIYRWFMEGMTPYKIACILIEKGIPTPSGKEQWHLSTVKSILTNEKYKGSALLQKKFTVDFLTKKTKVNEGEVPQYYVEESHPAIISPEEFELVQAEMARRKELGKRYHSGNIFTAKIVCGECGGFYGPKIWHSNSRYRRVIWRCNKKYTNACYCKTPHIDEDTIKQGFLKAYNQLLTDKGSVLSLCEMLLRAFSDCSDLDAKMSVLDDEEKQITKNIREMVVINSRTVQKQPEYTLEYQSYEREYEALKAKYQKLQAEKLDRINKTTVIQDFMEQIKKRKEPIKVFSSDVWLAAIETVTICEKGELQFRFKNGTEITV

SEQ ID NO: 3737 - protein, 525 aa, Unknown
  Description of Unknown: Integrase B3738 sequence
  SM00857,G3DSA:1.10.10.2600,IPR036162,PF13408,IPR025827, G3DSA:3.40.50.1390,PS51737,IPR006119,IPR038109,PF07508, SSF53041,IPR011109,PTHR30461,Coil,PS51736, cd00338,PF00239
MAKNRAAIYARFSSHNQRSESIEIQVENSREYCEREGLQVVREYCDYAQTGRNVNRAEFQRMMNDAKLGLFDYVVIYKVTRIMRNRDEMALARIMLRKAGVEILYAGEEIASGSSGVLQLGMLEVLAEWESAIDSERIRDGIQKNAARCLANGHALYGWDIVDGRYSVNEREASLMRKMKNMLFSGRSVADIVRALEGEKTRNGKPFNQDKVTKLLRRVQNGGTYSYAGHVVDGGMPGLWPQVEQDMIESILNDRHRPRRKVDSAKEFPLSGKLYCSKCGMPMAGMSGTSKTGRAYHYYRCRKCRRTVRRDLIEDAVVDMTLQAVAREDVRKRIAQGMALYQSEQEETKPESYYLKKELRRIDAAFERIWQAIEDGIAPPGGKERTDELKRRKSEIEAQLRIAERGESLTFGVDELMLWLGEIATELTPLDILNKFVRFAEIDSKNNRVRVYFAFDKHGDGFTPNDVDKGEHLYEERCSPNSTLVELMRKTANSTSTASRAAIQLDTCVVRVSKNWFVVVGTCQK

SEQ ID NO: 3738 - protein, 525 aa, Unknown
  Description of Unknown: Integrase B3739 sequence
  PTHR30461:SF3,SM00857,G3DSA:1.10.10.2600,IPR036162,PF13408, PS51737,IPR025827,G3DSA:3.40.50.1390,IPR006119,IPR038109, PF07508,SSF53041,IPR011109,PTHR30461,cd00338, PF00239
MPRKPAKHPAKPKRGKKLEIEEPGVLYGRYSSHNQKDISIEQQFEKCYELAAEYGIRIIDTYADRAVSGRTDKRVDFQRMMADAAKGKFRYVLAWKSNRIGRNMLEALVNEARFQELGVRVLYVEEDFDDTAAGRFAARSMMNVNQFYSENMAEDIKRGLYDNAANCMVTNGHLPYGYKADETLHYAIDEPRAAVIREIFTRVSCGEAFVDIMSSLNARGITTSYGRPWGRSSFQKILSNERYRGIYIYGDVRIEGGIPRIVSDELYFKVQEAITTKKNPQGRHRVNGDYLLTGKLFCGHCKSPMTGISGTGRAGKLHFYYVCQKRRTEKTCHKKNVRRDVIELKIAQAIRDYALKDDIIEWIADSCVEDHDRRVSESHLSVFEDQLAEVNRSIKNVMSAIEKGIITETTKGRLMELEAERTAIEGKICAAKAAIVPTNRERLVEWLRSLREGDVHDKKYQAGLFDTFLVAAYLYDDNRVKIVFSFAGDKNTIEIPLEDIIDSIDDEASCVRLSSTLSHQNQKSC

SEQ ID NO: 3739 - protein, 525 aa, Unknown
  Description of Unknown: Integrase B3740 sequence
  SM00857,G3DSA:1.10.10.2600,IPR036162,PS51737,G3DSA:3.40.50.1390, IPR006119,IPR038109,PF07508,SSF53041,IPR011109, PTHR30461,Coil,PS51736,cd00338,PF00239
MNESVCIYLRKSRADREAEAHGEGETLARHERILLDLAKKKEYIVGAIYREVVSGETIADRPVMQQLLREVESGIWDGVLVVEVERLARGDTIDQGVVSRAFQYSDTKIITPTKIYDPNNEFDEEYFEFGLFMSRREYKTIKRRLNAGRISSVKEGKYCGNKPPYGYERVKLEKEKGYTLRPVPTQAEIVKMIYTWYAGDGCEQIGVAKIVRKLNEMGIESALGDDWTPASIQGILTNPVYIGKIRWNGRKTVKTIQNGQVIKARPRSKDTLICDGLHPAIISEDLYNSVQEIRKKNPPRPVSIANSIRNPLAGIVYCSKCGRAMVRRPYQKRGQEDTLMCPYTSCPTVSSKLSLVEKSVIDGIREIVEEYKLNNDINASSQAIDLTIISKQNLIHEKENELESLNAQKAKQYDLLEQGIYTTEVFLERAKTISASIQSCSDTIEKLKEEIKHDENIIKQQSDFIPRCEELLDNYWSLDTESKNKMLKSLIEKVAYSKDTKNAYGKGNEIGFQLDIFPKIQKNNQ

SEQ ID NO: 3740 - protein, 525 aa, Unknown
  Description of Unknown: Integrase B3741 sequence
  PTHR30461:SF3,SM00857,G3DSA:1.10.10.2600,IPR036162,PF13408, PS51737,G3DSA:3.40.50.1390,mobidb-lite,IPR025827,IPR006119, IPR038109,PF07508,SSF53041,IPR011109, PTHR30461,PS51736,cd00338,PF00239
MARSAKKIEYALAEQIGVIYARYSSHNQKEESIEQQIAECTEFAEKNGIRIIGIYADKAVSGRSDRRPNFQRMMRDAEKRHFQIVVAYKSNRIARNMLNALQYEAKLDLFGIKTLYAKEEFGNTAAGRFALRTMMNVNQFYSENMGEDIKRGMVDNANECKVNGMLPLGYVKSKEGKYAIAPDEAAVVREIFDSVLKDVPVAEIARSLNQRGIHTKLGREWNKNSFHIMLKNDNYIGVYRHSGVVVEDGIPPILEKEVFAAVQEKLANKKKTAGRRSANGEYLLTGKLFCGYCGSYMIGVSGTGENGTVHNYYQCQKRHAEGRCEKKNVRRDFIEKLIARLTQDYILQDDTIEWIADSTMSFQAMARRESGVAQLERDLADNRKVAKNIMAAIEQGIITETTKARLLEVEGTIHDLERSLSIAKAASQPIERERVVFSLEQMREGNVGSKDHQKKLIDTFVKSVTLWDDRIQIDYYHTPGKHKFSYSLEELTSKAENESNASDVRTDSLELHHQAAPKKMPLRKA

SEQ ID NO: 3741 - protein, 525 aa, Unknown
  Description of Unknown: Integrase B3742 sequence
  SM00857,G3DSA:1.10.10.2600,IPR036162,PF13408,PS51737, G3DSA:3.40.50.1390,IPR025827,IPR006119,IPR038109,PF07508, IPR011109,SSF53041,PTHR30461,Coil,PS51736, cd00338,PF00239
MAKPEVSELAVVYARYSSHSQGEQSIEGQLSNARDYAAAHGYTIVHEYVDRAKSGRTDNRAEFQQMLKDTAKRQFSVIILWKVDRFGRNREEIAINKMKCRKNGVRVEYVAETIPDSPEGVILESVLEGFAEYYSLQLSQNIRRGRAESAEKCQSLGGNRPLGYKTGPDKKFVIDENTAPTVKMIFTMYADGKTVTEIVDKLNEMGLRTLRGGPFTKNSLHSILKNKKYIGVYEYQGREIKDGVPRIIEDDVFNKVQEMLKINKRAPAKTWSRADYILTDKLFCGKCGALMFGESGTSKTGVKHNYYICSNKKRFRSCDKKAVRQADIEDAVLNATHELLQDDELLDYIVDRTWEYYLAQDNSQEELRNLQRQLAQTDTAISNLIRAIEAGILTEETKKRMDELTQQKADLKASIADREIARGFHLQKSHIAFYLRSLRDADWSDKETQKRLIQTFVNAVFVYDDHITLTYNFSGDKSTITLRDVQRFEDGEEFGCRASRSTKTHRYELFWFRNVFGLTRKLPQR

SEQ ID NO: 3742 - protein, 525 aa, Unknown
  Description of Unknown: Integrase B3743 sequence
  PTHR30461:SF3,cd00338,SM00857,G3DSA:1.10.10.2600,IPR036162, PF13408,PS51737,G3DSA:3.40.50.1390,IPR025827,IPR006119, IPR038109,PF07508,SSF53041,IPR011109,PTHR30461, PS51736,Coil,PF00239
MPTVKVIPATRDFHTGIEKTTTRKKRVGAYARVSTDSDDQLSSYEAQCDYYTRYIKSRPDWEFVGLYADEGISGTNTKHRDRFNAMIADALNGKIDLIITKSVSRFARNTVDSLTTVRKLKEKGVEVYFEKENIYTLDSKGELLITIMSSLAQEESRSISENVTWGKRKLFADGKVTLPYSSFVGYRKGANGLPEIEPEGAKIVRRIYTEFLNGRTARQIADGLSADGVPTPRRAKMWRCTTIISILTNEKYKGAALLQKSFTVDFLTKKMKPNEGEVPQYYIENSHPAIIDPVEFDLVQAEMQRRRKLGKIYSGNSIFASKIICGDCGEFYGEKVWHSNDRFRKTIFRCNHKYNNEKGKCQTPVISEQQIKETFVVAYNALMADKAGVIADCRALQHMLTDTTAMEQEIADLSKQLGDSTAELRQHVEGNMRSAMNQEQFWKRYNTLEEQCNCLSDRLAKLQSSVKERKQRADVIGGFMFEIKERDGIIDEFDEELWTALLESVTITRDGKWQFKFKNERVIEV

SEQ ID NO: 3743 - protein, 525 aa, Unknown
  Description of Unknown: Integrase B3744 sequence
  PTHR30461:SF3,SM00857,G3DSA:1.10.10.2600,IPR036162,PF13408, PS51737,IPR025827,G3DSA:3.40.50.1390,IPR006119,IPR038109, PF07508,SSF53041,IPR011109,PTHR30461,Coil, PS51736,cd00338,PF00239
MDTLADVVVYARYSSAGQNDQSIEGQVKTCREFAAQRGFRVVQEYADRAISGRHAETRPAFQQMIADAKKKTFQYILVWKLDRFARNRYDSAIYKKELRKYGVRVLSVTEGIDEGNESILLEAILEAMAEEYSRQLSQNVRRGMRQNAEKGLSLGGGTPYGYRLQGKRYVIVDREAEVVRFIHEAYAEGRPSREIINECKSRGYHTRKGADFTMNAIARMIANDKYAGAFLFKDELVVADLYPPIVPPELKERAKKRLALKARAPGHEKAKVEYILHGKLFCGHCGAPMVGESGKSKSGTVYNYYACAEKKKRHGCKKKNERKDFLEWYIAEQITEYVLTDSRIEEIAGAVVAEYKKSFDASGIKRLEKKIKDADAELDKLVDALIKTSADAAVKRINARIEEAEQYRAQLEDDLSSLRIASRVEIKKDDVAKWLRSMRRGDLMDDEYRKKIVEIFVNAVYLYDDRVAIFFNVKDCKQVSYIDMIDATGWAACSDLSSNALPITDLSEHGKLIILNGAIGFLLRR

SEQ ID NO: 3744 - protein, 525 aa, Unknown
  Description of Unknown: Integrase B3745 sequence
  SM00857,G3DSA:1.10.10.2600,IPR036162,PF13408,PS51737, G3DSA:3.40.50.1390,IPR025827,IPR006119,IPR038109,PF07508, IPR011109,SSF53041,PTHR30461,Coil,PS51736, cd00338,PF00239
MAKPEVSELAVVYARYSSHSQGEQSIEGQLSNARDYAAAHGYTIVHEYVDRAKSGRTDNRAEFQQMLKDTAKRQFSVIILWKVDRFGRNREEIAINKMKCRKNGVRVEYVAETIPDSPEGVILESVLEGFAEYYSLQLSQNIRRGRAESAEKCQSLGGNRPLGYKTGPDKKFVIDENTAPTVKMIFTMYADGKTVTEIVDKLNEMGLRTLRGGPFTKNSLHSILKNKKYIGVYEYQGREIKDGVPRIIEDDVFNKVQEMLKINKRAPAKTWSRADYILTDKLFCGKCGALMFGESGTSKTGVKHNYYICSNKKRFRSCDKKAVRQADIEDAVLNATHELLQDDELLDYIVDRTWEYYLAQDNSQEELRNLQRQLAQTDTAISNLIRAIEAGILTEETKKRMDELTQQKADLKASIADREIARGFHLQKSHIAFYLRSLRDADWSDKETQKRLIQTFVNAVFVYDDHITLTYNFSGDKSTITLRDMQRFEDGEEFGCRASRSTKTHRYELFWFRNVFGLTIKLPQR

SEQ ID NO: 3745 - protein, 525 aa, Unknown
  Description of Unknown: Integrase B3746 sequence
  PTHR30461:SF3,SM00857,G3DSA:1.10.10.2600,IPR036162,PF13408, PS51737,IPR025827,G3DSA:3.40.50.1390,PS51736,IPR006119, IPR038109,PF07508,SSF53041,IPR011109,PTHR30461, mobidb-lite,cd00338,PF00239
MARSAKKIEYAPAEQIGVIYARYSSHNQKEESIEQQIAECSDFAAKNGIRIVGIYADKAVSGRSDRRPNFQRMMRDAEKRQFQIVIAYKSNRIARNMLNALQYEARLDLLGIKTLYAKEEFGNTAAGRFALRTMMNVNQFYSENMGEDIKRGMVDNANECKVNGMLPLGYVKSKEGKYAIAPDEAAVVREIFDSVLKDVPVAEIARSLNQRGIRTKLGREWNKNSFHIMLKNDNYIGVYRHSGVVVEGGIPSILEKEVFAAVQEKLANKKKTAGRRSANGEYLLTGKLFCGYCGSYMIGVSGTGENGTVHNYYQCQKRHAEGRCEKKNVRRDFIEKLIARLTQDYILQDDTIEWIADSTMSFQAMARRESGVAQLERDLADNRKVAKNIMAAIEQGIITETTKARLLEVEGTIHDLERSLSIAKAASQPIERERVVFSLEQMREGNVGSKEHQKKLIDTFVKSVTLWDDRIQIDYYHTPGKHKFSYSLEELTSKAENESNASDVRTDSLELHHQAAPKKMPLRKA

SEQ ID NO: 3746 - protein, 525 aa, Unknown
  Description of Unknown: Integrase B3747 sequence
  PTHR30461:SF3,SM00857,G3DSA:1.10.10.2600,IPR036162,PF13408, IPR025827,G3DSA:3.40.50.1390,PS51737,IPR006119,IPR038109, PF07508,IPR011109,SSF53041,PTHR30461,Coil, PS51736,cd00338,PF00239
MQTAENRSKYHQLRVAAYCRVSTEQEEQQNSYQVQIAYYTDLINRKKEWTLAGIFADEGISGTQTKKRTEFNRMIRMCRNKKIDLVITKSISRFARNTVDCLEYVRQLKDLGIGVIFEKENINTMTMTSEFMIALYGSFAQAESESISKNVSWGKEKAYREGKVQFQYKYLLGYKKGADGKPEIVPEEAETVKLIFNMYLDGYTLLNIADTLMAQGRRTATGKNIWSKGEVQRILKNEKYVGDALLQKSFTVDCITHKVVKNNGERPMYLVTDHHTPIVDRDTFNRVQQELARRTSKRKISDKTKTEQGKYSGKYALSELLICGHCGTPYRRRVWSRNGKKQVVWRCISRLEHGKKYCPDSPTIKEEQLHKAIIRAINNYYSCRNDIARILKANIGSVLECQGQEEILAAGKRLREIDQARNDLVNLIASGGCDEDKLDSEFEKLYAEEQQLSERLENLKLQNKTSEGTQAKLDEIMDMIEHEKFELETFDNVLIRKLIECIKVLSKTEILVIFKGGYEVRTEIE

SEQ ID NO: 3747 - protein, 525 aa, Unknown
  Description of Unknown: Integrase B3748 sequence
  PTHR30461:SF3,IPR036162,PS51737,IPR011109,PTHR30461, PF00239,G3DSA:1.10.10.2600,IPR006119,SSF53041,cd00338, SM00857,IPR025827,IPR038109,PS51736,mobidb-lite, PF13408,G3DSA:3.40.50.1390,PF07508,Coil
MRKKSNLNAATRAVIYARYSSANQRDCSIEQQVAKCRELAARLGLTVIDVYEDRAISGKTDRRPNFQRMMKDADLRQFDVVLAWKSNRMGRNMLQAMTNEERLRDNGIRTVYAEEDFDDTAAGRFALRNMMNVNQFYSENMAEDITRGLMDNAAKCLSNGSLPLGYKPGDDRHVVLDEAEAAIVQEIFTRVSCYEPFIDIARDLNRRGIKTKKGSEWGRSSFHTICRNERYRGIYIYRDVRIEGGMPRIVSDELFYKVQEVLKVKKNPQGRRKRSGYEEYLLTGKLFCGHCGSPMTGIAGTSKTGAMHYYYTCQKRRTDHSCDKKAVRRDQIERAVGVAIQQQLLTDENIQMMADKLMEYNARTETKYRLQGLQDQLNANKTATANILKAIEMGIITDATKARLLELEKEQGQLLVKIDEAKAEMVPISRNDFVKLLYIYKEGEPTDKKYLAALFDNFLVRVDLYDDHLKITFDPTGGRQPIDMPIGAEESPESPGDSSESSDFEASSQDAEKFVLALHNCTISL

SEQ ID NO: 3748 - protein, 525 aa, Unknown
  Description of Unknown: Integrase B3749 sequence
  PTHR30461:SF3,SM00857,G3DSA:1.10.10.2600,IPR036162,PF13408, IPR025827,PS51737,G3DSA:3.40.50.1390,IPR006119,IPR038109, PF07508,SSF53041,IPR011109,PTHR30461,Coil, PS51736,cd00338,PF00239
MNVVIYARFSSHSQTEQSIEGQLKACYEYAERNSYTVIGEYIDRALTGTNDNRPEFLRMIEDSGKKTFQGILVYQLDRFARNRYDSAVYKKKLKKNGVRVLSARENISEDASGILIESVLEGMAEYYSAELSQKIRRGLDINASKCLCTGGGVALGFKVDKDRHFQVDEDTAPVVREIFEMYANGKTVTEIITMMNARNIVTSRGSAFNKNSLRKMLQNKRYIGTYTYKGTEIPNGIPRIIDDDLFMQVQEMMKKNRKAPARARAKEEYLLTTKLFCGHCKEMMTGYSGTSHTSAVHHYYICNNRKKKLCKKKNVQKDFIEKLVISECRKLLTPENIERISREVVAASQKDQDMTNVKRLSKQLTDIERKRKNLMSAIMECDSDLIRKTLYEQIPLLEKEKSDTELQLTLEKAKQVKLTVSEVRFFLNALRKGDPDSIKYQKALISVLVNAVYLYDDKITLIFNSGDNAVTLDTALLEKIEQQADSVPVEDRFVYEQLSSTIGRISEPYIAWGTVFVQTKRHSLP

SEQ ID NO: 3749 - protein, 525 aa, Unknown
  Description of Unknown: Integrase B3750 sequence
  PTHR30461:SF3,cd00338,SM00857,G3DSA:1.10.10.2600,IPR036162, PF13408,IPR025827,PS51737,G3DSA:3.40.50.1390,IPR006119, IPR038109,PF07508,IPR011109,SSF53041,PTHR30461, PS51736,Coil,PF00239
MPTVKVIPATRDFHTGIEKTTTRKKRVGAYARVSTDSDDQLSSYEAQCDYYTRYIKSRPDWEFVGLYADEGISGTNTKHRDRFNAMIADALNGKIDLIITKSVSRFARNTVDSLTTVRKLKEKGVEVYFEKENIYTLDSKGELLITIMSSLAQEESRSISENVTWGKRKLFADGKVTLPYSSFVGYRKGANGLPEIEPEGAKIVRRIYTEFLNGRTARQIADGLSADGIPTPRRAKKWRCTTIISILTNEKYKGAALLQKSFTVDFLTKKMKPNEGEVPQYYIENSHPAIIDPVEFDLVQAEMQRRRKLGKIYSGNSIFASKIICGDCGEFYGEKVWHSNDRYRKTIFRCNHKYNNEKGKCQTPVISEQQIKETFVVAYNALMADKAGVIADCRALQHMLTDTTAMEQEIADLSKLLGDSTAELRQHVEGNMRSAMNQEQFWKRYNTLEEQCNCLSDRLAKLQSSVKERKQRADVIGGFMFEIKERDGIIDEFDEELWTALLESVTITRDGKWQFKFKNERVIEV

SEQ ID NO: 3750 - protein, 525 aa, Unknown
  Description of Unknown: Integrase B3751 sequence
  PTHR30461:SF3,SM00857,G3DSA:1.10.10.2600,IPR036162,PF13408, IPR025827,G3DSA:3.40.50.1390,PS51737,IPR006119,IPR038109, PF07508,SSF53041,IPR011109,PF00239,PTHR30461, PS51736,Coil,cd00338
MRAFIYCRFSSHKQQELSIEGQRDICQEYADKHNITVVGQYADRARSGKTENRADFRRLMRDAATGVVDCVLVWRYDRFFRNRAESALYRKQLEAAGVHLISVTEYIPEGSAGIITQGMIETVAEYFSAKLSEDVSRGMNKAAQHCQIVGRAPLGYRAGPNKRWQIDPVGAELVRRIFEWYASGKAMGQLAAQLNEEGHRTTSGTLYTRSSFNSILRNEKYIGVYSYGGEVRIEGGCPRIIEDELFFTVQRRLSANRHRPGAYKAEVPYLLSGKLFCGLCGAPMTGTAGTSHTGARHYYYICNNRRAKTCKKKNVRLDLIEEAVLQSALDILTDENIAYISAEVERRCAENSDSAALLASLNAQLEEVQRRLKNIGNAIAQGIITETTKELLEEAEADRTALRQQIDRAKVQAALVVKAEAVACWLDGFRRGDRTDPDFRRQVFGALVHSVFVYDDYLKIIFNVDSAGAAVVPYEAAQAATPSEAPPGSYLDTLGAPNTANTNPAALVFFLCGTFGICVARGSHW

SEQ ID NO: 3751 - protein, 525 aa, Unknown
  Description of Unknown: Integrase B3752 sequence
  cd00338,SM00857,G3DSA:1.10.10.2600,IPR036162,PS51737, G3DSA:3.40.50.1390,IPR006119,IPR038109,PF07508,IPR011109, SSF53041,PTHR30461,PS51736,Coil,PF00239
MLDPNGIYFAYLRKSREDREAELHGYGETLKRHQRMLEDLAKYHKIKIAKFYSEVVSGETIASRPQMLAMLDDIESLSPDGVLVVEIERLARGDTRDQGLVLETFKYSGTRIITPMKIYDPTDERDEEYAEFGLFMSRREYKTINRRLRDGKIASFNEGKWTGNKAPFGYERVKLAGEKGFTLKIVPEDADVVRLIFQLFIYGSNASNNIPVGTSKICRILDNLHISPPIGETWQPCTIRQILSNPTYIGKVHMGRRSTQKKTLNGVVKISRPINKNAKIADGLHPAIIDDALFLKAQEKRKANYQKPFFEGIKNPLAGLIYCSVCGKSMYRRPAGKRCKEDMIQCTTHGCPTSASYYHYIEEKLLVSLNKWLEDYRIQVKDISPENYAQQLNLLQSQLNAAQNESETSKKQLSKAMDLLEKDIYSVEMFQQRASELNEKIALSSRSISDLSVKIDSIRTKAVQKEEVIARWERILSLYPQVDDPAVKNALMKELLTRIEYSKPHKGNRQNGGMDQFTLKLFPRL

SEQ ID NO: 3752 - protein, 525 aa, Unknown
  Description of Unknown: Integrase B3753 sequence
  PTHR30461:SF3,SM00857,G3DSA:1.10.10.2600,IPR036162,PS51737, G3DSA:3.40.50.1390,IPR006119,IPR038109,PF07508,IPR011109, SSF53041,PTHR30461,Coil,PS51736, cd00338,PF00239
MWMLPQMSVDDIIMYLRKSRTDDPALTVQEVLSKHEQMLDDWVARNIPDDGRRIPESNRYREVVSGETIESRPCVQEVLRRVESPRVKAVLVVEPQRLSRGDLEDIGRLVKLLRYSNTIVITLQYTYDLRDERDRDMFERELKRGNEFLEYQKRIMGNGRLLSVQNGNFIGQKPPYGYNKVVIKEGKRKCHTLEPDPERAPIVKMVFEMYAGGTSASQIAKTLRTMGVTTADGGKWVTSSVKQMLTNDHYIGMVHWNKRKTVKVVEDGEVVATRPRNSDFLVYPGKHQPIIEKELWDAVQAIKGNIPPIKNRAKYANPFAGLAVCQCGGKMVRQQYVRDGVERCAPRLVCPNQSECHTASCSLPEFTEAVIEALEKGIKNFELMMADAPEDDATQQERLIAQLEKRLAELDRLELAQWDKYTQEAMPKHVFDALNKKVVQEKEETLQALKTAMETVPIRVDYEKKRETFAAAVRTLQDPNARVKEKNLLLKQCIERINYNRKPKESDNRRFGNPEPLELEFQFKV

SEQ ID NO: 3753 - protein, 525 aa, Unknown
  Description of Unknown: Integrase B3754 sequence
  PTHR30461:SF3,cd00338,SM00857,G3DSA:1.10.10.2600,IPR036162, PF13408,IPR025827,PS51737,G3DSA:3.40.50.1390,IPR006119, IPR038109,PF07508,IPR011109,SSF53041,PTHR30461, PS51736,Coil,PF00239
MNESVCIYLRKSRADREAEAHGEGETLARHERILLDLAKKKEYIVGAIYREVVSGETIADRPVMQQLLHEVESGMWDGVLVVEVERLARGDTIDQGVVSRAFQYSDTKIITPTKIYDPNNEFDEEYFEFGLFMSRREYKTIKRRLNAGRISSVKEGKYCGNKPPYGYERVKLEKEKGYTLRPVPTQAEIVKMIYTWYSGDGCEQIGVAKIARKLNEMGIESALGGDWTSASIQGILTNPVYIGKIRWNGRKTVKTIQNGQVVKTRPRSRDILICEGLHPAIISDDLYNSAQEIRQKNPPRPISIKNTVRNPLAGIVYCSKCGRAMVRRPYQKSGQEDTLMCPYTSCSTVSSKLSLVEKAVLDGIKEIAEKYKLNNDINVPSNAINSGIVSKQNLIREKESELESLNTQKAKQYDLLEQGIYTTEIFLERAKTISASIQSCSDTIEKLKEEIKHDENIIKQQSDFIPRCEELLDNYWSLDTESKNKMLKSLIEKVTYSKDTKNAYGKGNEIGFQLDIFPKIQKENQ

SEQ ID NO: 3754 - protein, 525 aa, Unknown
  Description of Unknown: Integrase B3755 sequence
  PTHR30461:SF3,SM00857,G3DSA:1.10.10.2600,IPR036162,PF13408, PS51737,G3DSA:3.40.50.1390,IPR025827,IPR006119,IPR038109, PF07508,IPR011109,SSF53041,PTHR30461,Coil, PS51736,cd00338,PF00239
MDTVNKFGSYCMYLRRSRADDDAERMGAGETLARHYMMLQELAGRMLGHPIPESAVYREIVSGDTIADRPEMRRLMQDVELGRWNGVFVADIDRLARGDTMDQGLVAQTFLYSQTLIVTPLKVYDPEDPADNEFFEIRLFFARREYQMIKRRMQTGRVNAVKEGYYVSSRPIYGYERYKLPDRRGWSLRIVEDQAAVVRKIYDWYLHGENGETLGCQRIANRLNSMGVKTLQGLPWQSDRVLNVLKNPTYKGCVQWYQRREQVHMQDGQKVKKRPLSDDHIVVPGYHEAIIDEALFDRAQELIVDRRNAPIPGKRKCVNPLTGLIRCGHCGYAVRMSNAGRGLDGAYLKCTYINTCTSFGIRFRPVEQVVLNTLQSWVDYDVSRLPEEQKQQTENNDALRAAQEKQIATLNKQLSRLRDLLEQGVYTVDVYLERERDLRARIEACQNALEQLRPKEKPMEQVLAEFAPLVKNVLEAYAATDDPAEKNALLKTVIDHIVYFKIAKTLRGHSPLESLTLEIYPRLPK

SEQ ID NO: 3755 - protein, 525 aa, Unknown
  Description of Unknown: Integrase B3756 sequence
  PTHR30461:SF3,SM00857,G3DSA:1.10.10.2600,IPR036162,PF13408, IPR025827,G3DSA:3.40.50.1390,PS51737,IPR006119,IPR038109, PF07508,IPR011109,SSF53041,PTHR30461,Coil, PS51736,cd00338,PF00239
MAKRVTTIMPTLVRFTEAPIAEHRKRKVAAYARVSTDSDEQFTSYEAQIDYYTQYIKARDDWEFVQVYTDEGITGTSTKHREGFKQMVADALEGKIDLIVTKSVSRFARNTVDSLTTIRQLKDKGVECFFEKENIWTFDGKGELLITIMSSLAQEESRSISENCTWGQRKRMADGRVSVPFDHFLGYERGENGELVINEEQAKTVRLIYDLFLQGLTPHTIANRLTAMGILTPRRKAKWNQGTVRSILTNEKYKGDALMQKCYTADFLTKKQVPNNGVLPQYYVEGDHEAIIPPETFELVQQEMLRRNNRDNRYSGVDIFASRIVCGECGSYYGAKVWHSNSKYRRIIYRCNHKYHDGKTCSTPNLTEDEIKSSFVAAVNKLIANKGEVIANLEAMSQTLFGTEVLECAREKLSAEMDLLQNMIQAAIAENAHIALDQAAYQKRFDKMREKYEDAKRQHDDIKQQIADKTSARVAASRFIGTLKKMDGLITEFDPSLWGSLLDHVAVYSKEDMRYTFKDGTEIKL

SEQ ID NO: 3756 - protein, 525 aa, Unknown
  Description of Unknown: Integrase B3757 sequence
  PTHR30461:SF3,IPR036162,PS51737,IPR011109,PTHR30461, PF00239,G3DSA:1.10.10.2600,IPR006119,SSF53041,cd00338, SM00857,IPR025827,IPR038109,PS51736,PF13408, G3DSA:3.40.50.1390,PF07508,cd09005,Coil
MGRKVTVIPPTISLQTHLPTTQKVKRKVAGYARVSTDFEEQLTSYEAQVDYYTKYIQEREDWEFVKVYTDEGISATSTVHRDGFNQMVADALDGKIDLIVTKSVSRFARNTVDSLTTVRKLKEKGVEVFFEKEDIYTLDSKGELLITIMSSLAQEESRSISENVTWGQRKRFADGKVSLPYKHFLGYRKGADGLPEIVPEEAEIVRSIYRWFMEGMTPYKIACILIEKGIPTPSGKEQWHLSTVKSILTNEKYKGSALLQKKFTVDFLTKKTKVNEGEVPQYYVEESHPAIISPEEFELVQAEMARRKELGKRYHSGNIFTAKIVCGECGGFYGPKIWHSNSHYRRVIWRCNKKYTNDCYCKTPHIDEDTIKQGFLKAYNQLLTDKGSVLSLCEMLLHAFSDCSDLDAKMSVLGDEEKQITKNIREMVVINSRTVQKQPEYTLEYQSYEREYEALKAKYQKLQAEKLDRINKTTVIQDFMEQIKKRKEPIKVFSSDVWLTAIETVTICEKGELQFRFKNGTEITV

SEQ ID NO: 3757 - protein, 525 aa, Unknown
  Description of Unknown: Integrase B3758 sequence
  PTHR30461:SF3,SM00857,G3DSA:1.10.10.2600,IPR036162,PS51737, G3DSA:3.40.50.1390,IPR006119,IPR038109,PF07508,IPR011109, SSF53041,PTHR30461,Coil,PS51736,cd00338, PF00239
MWMLPPMSVDDIIMYLRKSRTDDPALTVQEVLSKHEQMLDDWVARNIPDDGRRIPEANRYREVVSGETIESRPCVQEVLRRVESPRVKAVLVVEPQRLSRGDLEDIGRLVKLLRYSNTIVITLQYTYDLRDERDRDMFERELKRGNEFLEYQKRIMGNGRLLSVQNGNFIGQKPPYGYNKVVIKEGKRKCHTLEPDPERAPIVKMVFEMYAGGTSASQIAKILRTMGVTTADGGKWVTSSVKQMLTNDHYIGMVHWNKRKTVKVVEDGEVVATRPRNSDFLVYPGKHQPIIEKELWDAVQAIKGNIPPIKNRAKYANPFAGLVVCRCGGKMVRQQYIRDGVERCAPRLVCPNQAECHTASCSLPEFTEAVIEALEKGIKNFELMMADAPEDDATQQERLIAQLEKRLAELDRLELAQWDKYTQEAMPKHVFDALNKKVVQEKEETLQALKTAMETVPIRVDYEKKRETFAAAVRTLQDPDASVKEKNLLLKQCIERINYNRKPKESDNRRFGNPEPLELEFQFKV

SEQ ID NO: 3758 - protein, 525 aa, Unknown
  Description of Unknown: Integrase B3759 sequence
  SM00857,G3DSA:1.10.10.2600,IPR036162,PF13408,IPR025827, G3DSA:3.40.50.1390,PS51737,IPR006119,IPR038109,PF07508, IPR011109,SSF53041,PTHR30461,Coil,PS51736, cd00338,PF00239
MAKPEVSELAVVYARYSSHSQGEQSIEGQLSNARDYAAAHGYTIVHEYVDRAKSGRTDNRAEFQQMLKDTAKRQFSVIILWKVDRFGRNREEIAINKMKCRKNGVRVEYVAETIPDSPEGVILESVLEGFAEYYSLQLSQNIRRGRAESAEKCQSLGGNRPLGYKTGPDKKFIIDENTAPTVKMIFTMYADGKTVTEIVDKLNEMGLRTLRGGPFTKNSLHSILKNKKYIGIYEYQGREIKNGVPRIIEDDVFNKVQEMLKINKRAPAKTWSRADYILTDKLFCGKCGALMFGESGTSKTGAKHNYYICSNKKRFRSCDKKAVRQADIEDTVLNATHELLQDDELLDYIVDRTWEYYLAQDNSQEELRNLQRQLAQTDTAISNLIRAIEAGILTEETKKRMDELTQQKADLKASIADREIARGFHLQKSHIAFYLRSLRDADWSDKEAQKRLIQTFVNAVFVYDDHITLTYNFSGDKSTVTLRDMQRFEDGEEFGCRASRSTILEKSELDSDREWVRISCFYQGH

SEQ ID NO: 3759 - protein, 525 aa, Unknown
  Description of Unknown: Integrase B3760 sequence
  cd00338,SM00857,G3DSA:1.10.10.2600,IPR036162,PS51737, G3DSA:3.40.50.1390,IPR006119,IPR038109,PF07508,IPR011109, SSF53041,PTHR30461,PS51736,Coil,PF00239
MLDPNGIYFAYLRKSREDREAELHGYGETLKRHQRMLEDLAKYHKIKIAKFYSEVVSGETIASRPQMLAMLDDIESLSPDGVLVVEIERLARGDTRDQGLVLETFKYSGTRIITPMKIYDPTDERDEEYAEFGLFMSRREYKTINRRLRDGKIASFNEGKWTGNKAPFGYERVKLAGEKGFTLKIVPEDADVVRLIFQLFIYGSNASNNIPVGTSKICRILDNLHISPPIGETWQPCTIRQILSNPTYIGKVHMGRRSTQKKTLNGVVKISRPINKNAKIADGLHPAIIDDALFLKAQEKRKANYQKPFFEGIKNPLAGLIYCSVCGKSMYRRPAGKRCKEDMIQCTTHGCPTSASYYHYIEEKLLVSLNKWLEDYRIQVKDISPESYAQQLNLLQSQLNAAQNESETSKKQLSKAMDLLEKDIYSVEMFQQRASELNEKIALSSRSISDLSVKIDSIRTKAVQKEEVIARWERILSLYPQVDDPAVKNALMKELLTRIEYSKPHKGNRQNGGMDQFTLKLFPRL

SEQ ID NO: 3760 - protein, 525 aa, Unknown
  Description of Unknown: Integrase B3761 sequence
  PTHR30461:SF3,IPR036162,PS51737,IPR011109,PTHR30461, PF00239,G3DSA:1.10.10.2600,IPR006119,SSF53041,cd00338, SM00857,IPR025827,IPR038109,PS51736, mobidb-lite,PF13408,G3DSA:3.40.50.1390,PF07508,Coil
MKKRINTNSAARAVIYARYSSANQRDCSIEQQVEKCRELAAREGVTVIEIYADRAVSGKTDRRPNFQRMMKDASLRQFDVVLAWKSNRMGRNMLQAMMNEEQLRSNGIRTIYAEEDFDDTAAGRFALRNMMNVNQFYSENMAEDISRGLMDNASKCMSNGSLPLGYKTGKDQKVVLDEAEAAIVQEIFTRVSCYEPFIDIARDLNRRGIKTKKGAEWGRSSFHTICRNERYRGIYIYRDIRVEGGMPRIVSDELFYKVQEVLKVKKNPQGRRKRSGYEEYLLTGKLYCGHCGSPMTGIAGTSKTGAMHYYYTCQKRRTDHSCDKKAVRRDQIEKAVAIAIQQQLLTDENIQMMADETMSYNARTEIKYRLQSLQQQLYSNETSTANIMKAIEMGIITDTTKARLLALEQEHGQLLAKIDTAKAEMVPINREDFVSLLDIYRTGDVNNKKYLAALFDTFLVRVDLYDDHFKITFDPTGGKMPVDIPIGAEDSPESPGDSPESSDFEASPQDAEKFVLALHNRTIRL

SEQ ID NO: 3761 - protein, 525 aa, Unknown
  Description of Unknown: Integrase B3762 sequence
  PTHR30461:SF3,SM00857,G3DSA:1.10.10.2600,IPR036162,PF13408, PS51737,G3DSA:3.40.50.1390,IPR025827,IPR006119,IPR038109, PF07508,IPR011109,SSF53041,PTHR30461,Coil, PS51736,cd00338,PF00239
MAKVTIIPSKKNPITLTPINEIIKKKVAAYARVSTDSDEQFTSFDSQCKVYEDYIKSKPDWEFVKVYADDGISGTNTKNRVQFNQMIEDALAGKIDLIITKSISRFARNTLDTISYTRKLKASGIEVYFEKENLWTFDDKAEFLLAIMSSIAQEESRSISQNVTMGKRWKMQEGKVQFAYKNFLGYKKEDGQIKIDDDQAVIVKLIYKMFLVDGKTCSYIANYLNSNNVLTPARRHNWSKQNILSILKNEKYKGDAILQKSYIKDFLEHKAVKNNGELPKYYVENSHPAIIEKDMWEMVQAELKRRELIGASYSSCNVFSSKLICGDCGAFYGKKVWHSNDAWRKEIFQCNKKFAKGKTRCKTPSFSEQVIKDKFIKAYNLMMVDKNTVVNDAKDVINKLTDTTTLDVQISKYENEMEIVSELVKKLVKDNSIHLQDQNDYEVKYQELVNRHNKAKELYEKLSEEKKYKQAKAITLKSYLSTLENADTEILEWNDALWMTVLDKAIVNRDETITFKFINGKEITL

SEQ ID NO: 3762 - protein, 525 aa, Unknown
  Description of Unknown: Integrase B3763 sequence
  PTHR30461:SF3,SM00857,G3DSA:1.10.10.2600,IPR036162,PF13408, PS51737,G3DSA:3.40.50.1390,IPR025827,IPR006119,IPR038109, PF07508,IPR011109,SSF53041,PTHR30461,Coil, PS51736,cd00338,PF00239
MDTVNKFGSYCMYLRRSRADDDAERMGAGETLARHYMMLQELAGRMLGHPIPESAVYREIVSGDTIADRPEMRRLMQDVELGRWNGVFVADIDRLARGDTMDQGLVAQTFLYSQTLIVTPLKVYDPEDPADNEFFEIRLFFARREYQMIKRRMQTGRVNAVKEGYYVSSRPIYGYERYKLPDRRGWSLRIVEDQAAVVRKIYDWYLHGENGETLGCQRIANRLNSMGVKTLQGLPWQSDRVLNVLKNPTYKGCVQWYQRREQVHMQDGQKVKKRPLSDDHIVVPGYHEAIIDEALFDRAQELIVDRRNAPIPGKRKCVNPLTGLIRCGHCGYAVRMSNAGRGLDGAYLKCTYINTCTSFGIRFRPVEQVVLNTLQSWVDYDVSRLPEEQKQQTENNDALRAAQEKQIATLNKQLSRLRDLLEQGVYTVDVYLERERDLRARIEACQNALEQLRPKEKPMEQVLAEFAPLVKNVLEAYAATDDPAEKNALLKTVIDHIVYFKTAKTLRGHSPLESLTLEIYPRLPK

SEQ ID NO: 3763 - protein, 525 aa, Unknown
  Description of Unknown: Integrase B3764 sequence
  cd03768,PTHR30461:SF3,SM00857,G3DSA:1.10.10.2600,IPR036162, PF13408,IPR025827,G3DSA:3.40.50.1390,PS51737,IPR006119, IPR038109,PF07508,SSF53041,IPR011109,PTHR30461, PS51736,Coil,PF00239
MKKVAIYSRKSKFTGKGESIENQILKCKQFIQFKFDIDTKNTEIFIDEGFSGKNENRPRYQDMIKKVKNKEIDHIIIYQLNRLGRNARDIHNTMQMCEDLGCVIYSATEGFDSSTSFGRALIGILASLAQLEREQLAERVKDNMYTLAKMGRWLGGQSPLGFDGTREYYIDESGKERSVTRLKANNEELKIVKLIYEKYLEEKSISQVSKWTLTNNFKGKNGGNIDKSAINVILKNPVYVKSDTDVFKFLENNGYEVYGEANGNGLLRYGKNNKDNSTGIIATGNHKGVIDSSNWLKIQEILQENTEKAPALGKSKACLLTGLLKCSCGSNMQMRYGPKRKDGTRPYYYVCTMKINSGGTRCNSKNLNGQLFEEKLINHFKKYSEERLIKQLESTLNASKNLEKNINIESIDRDIESAEKSVKSLLNNLKQTTDTNIVNIIFSEISELQNTIKDLKYKKDTLLEDQSEIVLSQSEIISMINTFNDFISLYDTLSIDEKQKRLKTLFKEILYDGNKIHVKFNLKKN

SEQ ID NO: 3764 - protein, 525 aa, Unknown
  Description of Unknown: Integrase B3765 sequence
  PTHR30461:SF3,IPR036162,PS51737,IPR011109,PTHR30461, PF00239,G3DSA:1.10.10.2600,IPR006119,SSF53041,cd00338, SM00857,IPR025827,IPR038109,mobidb-lite,PS51736, PF13408,G3DSA:3.40.50.1390,PF07508,Coil
MRKKSNLNAATRAVIYARYSSANQRDCSIEQQVAKCRELAARLGLTVIDVYEDRAISGKTDRRPSFQRMMKDADRGIFDIVLAWKSNRMGRDMLQAMTNEERLRDNGIRTVYAEEDFDDTAAGRFALRNMMNVNQFYSENMAEDITRGLMDNAAKCLSNGSLPLGYKPGDDRHVVLDEAEAAIVQEIFTRVSCYEPFIDIARDLNRRGIKTKKGSEWGRSSFHTICRNERYRGIYIYRDVRIEGGMPRIVSDELFYKVQEVLKVKKNPQGRRKRSGYEEYLLTGKLFCGHCGSPMTGIAGTSKTGAMHYYYTCQKRRTDHSCDKKAVRRDQIERAVGVAIQQQLLTDENIQMMADKLMEYNARTETKYRLQGLQDQLNANKTATANILKAIEMGIITDATKARLLELEKEQGQLLVKIDEAKAEMVPISRNDFVKLLYIYKEGEPTDKKYLAALFDNFLVRVDLYDDHLKITFDPTGGRQPIDMPIGAEESPESPGDSSESSNFEASSQDAEKFVLALHNCTISL

SEQ ID NO: 3765 - protein, 525 aa, Unknown
  Description of Unknown: Integrase B3766 sequence
  PTHR30461:SF3,SM00857,G3DSA:1.10.10.2600,IPR036162,PF13408, PS51737,G3DSA:3.40.50.1390,IPR025827,IPR006119,IPR038109, PF07508,IPR011109,SSF53041,PF00239,PTHR30461, PS51736,Coil,cd00338
MKKTKNSVQRAVIYARYSCSNQTEQSIEGQLADCEKFAEKYNYYIVDTYIDRAMSATTDRRPQFQQMIADSATGGFDVIIVWKLDRFARNRYDSAVNKQKLNSNGVKVVSVMEHIEDTPEGALMESVLEGFAEYFSKDLSQKVSRGMRETALKFKATGLIPYGYKKTSDNICVPDEHTAPVVKKIFEMYSGGMINKDICDWLNSHGYRTSNGNLFKNQYLRKILNRRRYTGSYTYGDLELHDENQRIISDELFDRVQIQLQAKKRTGRIAREQYVLVGKLFCGYCRNPIRGESGRNHQNRIYTYYKCSVNKTGGKCPKTTVQRDIIENNTIKFILKNFLNDEIINSIVDTIQASETAENNSAELIALRTQIEDTDRKINNLLSAIENGIFTPSTKQRLNDLENAKEKLKYELIVKQSEKNNFNATAFKRFLKNIDVDDFKTTEQRQKLINLVLYREYLWNDKVLYIFNLTPSKPNDSVDIDSYVDALLASTGSTGSTSPTDGVPQVAISELLFGYFFVMVFFPIS

SEQ ID NO: 3766 - protein, 525 aa, Unknown
  Description of Unknown: Integrase B3767 sequence
  PTHR30461:SF3,IPR036162,PS51737,IPR011109,PTHR30461, PF00239,G3DSA:1.10.10.2600,IPR006119,SSF53041,cd00338, SM00857,IPR025827,IPR038109,mobidb-lite,PS51736, PF13408,G3DSA:3.40.50.1390,PF07508,Coil
MPRKKKLQEVGGLRLVAYYRYSNGGQQTEQSIEGQRRDCEAYAKAHGYKIVHEYIDRHISGKSDSRPAFQQMISDSDSHLFDAVICWKTDRLARSRYDSIIYKTRLRRNGVKILYAAETVVDGPEGIIIEGLMESLAEYYSAELAQKLRRGQRESALKCIALGGNRSFGYDIGPDKHYCINEKQAPAVRYIFEQYAAGATAADIVRELTARGYRTSRGNPFNKNSICRIITNEMYLGVYKYADIRIEGGVPAMIDRELFNRCQTQLAFNRAHGGGKGAPRADYVLVGKLDCGLCGHAMKGASATGHTGSKHYYYTCTQHVEKKCPKTSIEKNYLEQIIVDGVAKYVLTPEKISQIVDCMMELQAKEQEPKGNPEKDALEAELAECRRKQNNILEAIEEGGSARLAARLRALEEQEAQLTFALGEINNAPAPPQFSREALTFMFEQFRREEDEVDEEYRRRILDTFVSSILLYEDRAEVKFNITDQKTGDFERVILPISANKKPPEDDDIPSNSEGSTALRLVEAT

SEQ ID NO: 3767 - protein, 525 aa, Unknown
  Description of Unknown: Integrase B3768 sequence
  cd00338,SM00857,G3DSA:1.10.10.2600,IPR036162,PF13408, IPR025827,G3DSA:3.40.50.1390,PS51737,IPR006119,IPR038109, PF07508,IPR011109,SSF53041,PTHR30461,PS51736, Coil,PF00239
MNESVCIYLRKSRADREAEAHGEGETLARHERILLDLAKKKEYIVGAIYREVVSGETIADRPVMQQLLHEVESGMWDGVLVVEVERLARGDTIDQGIVSRAFQYSDTKIITPTKIYDPNNEFDEEYFEFGLFMSRREYKTIKRRLNAGRISSVKEGKYCGNRPPYGYARTKLEKEKGFTLRPVPNQAEIVKMIYAWYAGDGCEQIGIAKIARKLNEMGIESALGGDWTPATIQGILTNPVYIGKIRWNGRKTVKTIQNGQVIKTRPRSKDTLICDGLHPAIISEDLYNSVQEIRKKNPPHPVSIANSIRNPLAGIVYCSKCGRAMVRRPYQKRGQEDTLMCPYTSCPTVSSKLSLVEKAVLDGIREIVEEYKLNNDINASSKDIDCVITSKQNLINEKENELKSLDSQKAKQYDLLEQGIYTTEVFLERAKTIATSIKSCSDTIEKLKEEIKHDENIIKQQSDFIPRCEELLDNYWSLDTESKNKMLKSLIEKVTYSKDTKNAYGKGNEIGFQLDIFPKIQKNNQ

SEQ ID NO: 3768 - protein, 525 aa, Unknown
  Description of Unknown: Integrase B3769 sequence
  PTHR30461:SF3,SM00857,G3DSA:1.10.10.2600,IPR036162,PS51737, G3DSA:3.40.50.1390,IPR006119,IPR038109,PF07508,IPR011109, SSF53041,PTHR30461,Coil,PS51736,cd00338, PF00239
MWMLPPMSVDDIIMYLRKSRTDDPALTVQEVLSKHEQMLDDWVARNIPDDGRRIPEANRYREVVSGETIESRPCVQEVLRRVESPRVKAVLVVEPQRLSRGDLEDIGRLVKLLRYSNTIVITLQYTYDLRDERDRDMFERELKRGNEFLEYQKRIMGNGRLLSVQNGNFIGQKPPYGYNKVVIKEGKRKCHTLEPDPERAPIVKMVFEMYAGGTSASQIAKTLRTMGVTTADGGKWVTSSVKQMLTNDHYIGMVHWNKRKTVKVVEDGEVVATRPRNSDFLVYPGKHQPIIEKELWDAVQAIKGNIPPIKNRAKYANPFAGLVVCQCGGKMVRQQYVRNGVERCAPRLVCPNQAECHTASCSLPEFTEAVIEALEKGIKNFELMMADAPEDDATQQERLIAQLEKRLAELDRLELAQWDKYTQEAMPKHIFDALNKKVVQEKDETLQALKTAMETVPIRVDYEKKRETFAAAVRTLQDPNASVKEKNLLLKQCIERINYNRKPKESDNRRFGNPEPLELEFQFKV

SEQ ID NO: 3769 - protein, 525 aa, Unknown
  Description of Unknown: Integrase B3770 sequence
  PTHR30461:SF3,SM00857,G3DSA:1.10.10.2600,IPR036162,PF13408, PS51737,G3DSA:3.40.50.1390,IPR025827,IPR006119,IPR038109, PF07508,IPR011109,SSF53041,PF00239,PTHR30461, PS51736,Coil,cd00338
MARSKKTECLPLERIGVIYARYSSHNQKEESIEQQVEECTSFALLNGIKIVHVYADKALSGRTDKRPQFQRLMRDAEKRSFSVVVAYKSNRIARDMLNALKYEDRLGKYGIETLYAKEEFGNTAAGRFALRTMMNVNQFYSENMAEDIKRGMLDNAENCKVNGALPLGYVSGPDKRYAIEPKEAEIVRGIYDKVLEGVSFADIANDLNACGVRTKHGSLWNKCSFHRILTNDVYIGVYRHSGVVKEGGVPPILEREVFIAMQKYLETKKNPRGRHRENGDYLLTGKLRCGYCESFMVGVSGTSKTGDKHYYYTCNSRHAGSGCKKENVRRDTIEYTVAALTQQVVFKEDIIEWIATAAVKLAKEASGQNEIDAMEAELAEDRKATKNIMAAIEQGIFTATTKSRLLELEADIASLEQSIRDAKAISEGKLLEKERVVYFLTSLREGNLHSKTYQKRLIDTFVRAVYLWDDRIGIDYYYAGKDSMVKYSLSEIEADIGENIREVLKDSLTGHQIIRTLWINGPKAQ

SEQ ID NO: 3770 - protein, 525 aa, Unknown
  Description of Unknown: Integrase B3771 sequence
  PTHR30461:SF3,SM00857,G3DSA:1.10.10.2600,IPR036162,PF13408, IPR025827,G3DSA:3.40.50.1390,PS51737,IPR006119,IPR038109, PF07508,IPR011109,SSF53041,PF00239,PTHR30461, PS51736,Coil,cd00338
MTTFDMNNAVDNAFGMDVYAIYLRKSRADVEAEKLGEGETLARHRKILTELAARKGLYIGKIYEEIVSGETIEARPEIQKLIEDCYKGKYRGILIVEVTRLSRGNQGDAQKILDCLKYSNRNNGVLVITPTKTYDVAHSQEDEEYMEFELFMSRREYKMIQKRMDRGRKQAVVEGNFMGSYRPYGYDILKTKTGRTLIPNEDEAPIVKMIYEWTVNDNLSPFKIAERLTNMGVPTYYGEKDWSKETVKTILTNQTYMGKVRWNDRMTVKTMVDGELKATRPRSNHSDHFMLYDGKHMKHALVDEETFKAASSRFHNDRTRSNLKLVNPLAGLLFCKKCGKSMGYQSYRHKKNGPMDRYNHRQSANGCKVKSAVAEDVIKAVIHALKLYIEDFEFKLDNTPDVDENSINTQLEALQKEIRKSERKLAKLFDSWEDEKITDNEFVQRKAVHNQKIENIKRQMEELEYSIPEREEYEDKIILLSEALVAITDESLDADIKNEYLKRIIDRIEFSRENNSEFILDIDLC

SEQ ID NO: 3771 - protein, 525 aa, Unknown
  Description of Unknown: Integrase B3772 sequence
  SM00857,G3DSA:1.10.10.2600,IPR036162,PF13408,PS51737, G3DSA:3.40.50.1390,IPR025827,IPR006119,IPR038109,PF07508, IPR011109,SSF53041,PTHR30461,Coil,PS51736, cd00338,PF00239
MAKPEVSELAVVYARYSSHSQGEQSIEGQLSNARDYAAAHGYTIVHEYVDRAKSGRTDNRAEFQQMLKDTAKRQFSVIILWKVDRFGRNREEIAINKMKCRKNGVRVEYVAETIPDSPEGVILESVLEGFAEYYSLQLSQNIRRGRAESAEKCQSLGGNRPLGYKTGPDKKFVIDENTAPTVKMIFTMYADGKTVTEIVDKLNEMGLRTLRGGPFTKNSLHSILKNKKYIGIYEYQGREIKDGVPRIIEDDVFNKVQEMLKINKRAPAKTWSRADYILTDKLFCGKCGALMFGESGTSKTGVKHNYYICSNKKRFRSCDKKAVRQADIEDTVLNATHELLQDDELLDYIVDRTWEYYLAQDNSQEELRNLQRQLAQTDTAISNLIRAIEAGILTEETKKRMDELTQQKADLKASIADREIARGFHLQKSHIAFYLRSLRDADWSDKEAQKRLIQTFVNAVFVYDDHITLTYNFSGDKSTITLHDMQRFEDGEEFGCRASRSTKTHRYELFWFRNVFGLTRKLPQR

SEQ ID NO: 3772 - protein, 525 aa, Unknown
  Description of Unknown: Integrase B3773 sequence
  PTHR30461:SF3,cd00338,SM00857,G3DSA:1.10.10.2600,IPR036162, PF13408,IPR025827,G3DSA:3.40.50.1390,PS51737,IPR006119, IPR038109,PF07508,IPR011109,SSF53041,PTHR30461, PS51736,Coil,PF00239
MNVVIYARFSSHSQTEQSIKGQLKVCYEYAESHNYTVVGEYIDRAQSGKFDNRAKFQRMIADSDKHTFDEKLVYQLDRFARNRYDSAIYKAKLKKNGVRVLSAKENITDDASGILIEGVLESMAEYYSVELAQKIHRGMSINAEKCLSNGSNPGLGFKVNKADRTFYVDEEEAAIVREIFERYASGETKAEIVKDLQRRKVKTSIGNEFTYNSLSRLLKNKCYIGIYLYKGVETPGGMPRILDDDLFYRVQELMNKNKSAPARTRGENEYLLTTKLFCGHCKEMMVGYGGTGKSGKQYHYYMCKKARKKKCDKKIIGKQYIEDRVVSECLKMLTDDKIRYIAKRVAEECNKSPDNISVREIKKAIKEVDAAIENLWKGIEQGQSVPMLTERLNKRQAEKEVLEEQLAIEQNKRICLSEAQILAFLDYVCEMPFDDFNKRRAIINIFVQSIYLYDDHFTLIIKASKKPLSIDNIPLDDIEKAFEGENTETEGCSSLMTPAPPNKNRNFDTKRILIAVHFLSLKNGL

SEQ ID NO: 3773 - protein, 525 aa, Unknown
  Description of Unknown: Integrase B3774 sequence
  PTHR30461:SF3,SM00857,G3DSA:1.10.10.2600,IPR036162,PF13408, IPR025827,G3DSA:3.40.50.1390,PS51737,IPR006119,IPR038109, PF07508,SSF53041,IPR011109,PTHR30461,Coil, PS51736,cd00338,PF00239
MATKKKTATQRADGVYNRAVIYARYSPGPNQRDESIEGQVRECKEIAQKHGLMVIHEYIDKRLSGTNDERPDFQRMLRDADRGLFDVVITWKNDRFARNRYDSAIYKQRLKRNGIKIIYAKEHIPEGPEGIILESMLEGMAEYYSANLSQNIRRGQRENALEGKFIGGTIPLGYKLDAEKRYILDPDSASIVREIFERYVAGESVTDICNDLNARGYLTARKKKFNRSSLHRIFTNEKYIGVYKFEDIECPGAVPRIVSDELFKAASIRAARNKKSRRTMPEARVEYMLTGKIFCGHCGEPMGGSWGTSKRGTRYNYYVCNGHKNKKSSCHKKPERKEKLEKLVINIVINNILRNQNVVNYIVDRCMVIQEREIDKSPAEGLRRELAENEKALKNIMAAIEAGIFTATTKDRLVELEERCAVLKQGIAAAEIQPPKLSREQLLFIFEKYQNRSLKDPEFIRDVIDTFVHAVYVYDDKMIITFNYSENNTLEISKKEIEEAATGAASPVFDFCGVNSTKINNNFLT

SEQ ID NO: 3774 - protein, 525 aa, Unknown
  Description of Unknown: Integrase B3775 sequence
  PTHR30461:SF3,SM00857,G3DSA:1.10.10.2600,IPR036162,PS51737, G3DSA:3.40.50.1390,IPR006119,IPR038109,PF07508,IPR011109, SSF53041,PTHR30461,Coil,PS51736,cd00338, PF00239
MWMLPPMSVDDIIMYLRKSRTDDPALTVQEVLSKHEQMLDDWVARNIPDDGRRIPEANRYREVVSGETIESRPCVQEVLRRVESPRVKAVLVVEPQRLSRGDLEDIGRLVKLLRYSNTIVITLQYTYDLRDERDRDMFERELKRGNEFLEYQKRIMGNGRLLSVQNGNFIGQKPPYGYNKVVIKEGKRKCHTLEPDPERAPIVKMVFEMYAGGTSASQIAKTLRTMGVTTADGGKWVTSSVKQMLTNDHYIGMVHWNKRKTVKVVEDGEVVATRPRNSDFLVYPGKHQPIIEKELWDAVQAIKGNIPPIKNRAKYANPFAGLVVCRCGGKMVRQQYIRDGVERCAPRLVCPNQAECHTASCSLPEFTEAVIEALEKGIKNFELMMADAPEDDATQQERLIAQLEKRLAELDRLELAQWDKYTQEAMPKHVFDALNKKVVQEKEETLQALKTAMETVPIRVDYEKKRETFAAAVRTLQDPDASVKEKNLLLKQCIERINYNRKPKESDNRRFGNPEPLELEFQFKV

SEQ ID NO: 3775 - protein, 525 aa, Unknown
  Description of Unknown: Integrase B3776 sequence
  cd00338,SM00857,G3DSA:1.10.10.2600,IPR036162,PF13408, PS51737,G3DSA:3.40.50.1390,IPR025827,IPR006119,IPR038109, PF07508,IPR011109,SSF53041,PTHR30461,PS51736, Coil,PF00239
MNESVCIYLRKSRADREAEAHGEGETLARHERILLDLAKKKEYIVGAIYREVVSGETIADRPVMQQLLHEVESGMWDGVLVVEVERLARGDTIDQGIVSRAFQYSDTKIITPTKIYDPNNEFDEEYFEFGLFMSRREYKTIKRRLNAGRISSVKEGKYCGNKPPYGYERVKLEKEKGYTLRLVPAQAEIVKMIYTWYAGDGCEQIGVAKIARKLNEMGIESALCGDWTPASIQGILTNPVYIGKIRWNGRKTVKTIQNGQVIKTRPRSKDTLICDGLHPAIISEDLYNSVQEIRKKNPPRPVSIANSIRNPLAGIVYCSKCGRAMVRRPYQKRGQEDTLMCPYTSCSTVSSKLSIVEKAVIDGIREIVEEYKLNNDINTSSKAIDCGITSKQNLIHEKENELESLNSQKAKQYDLLEQGIYTTEVFLERAKTIAASIQSCSDTIEKLKEEIKHDENTIKQQSDFIPRCEELLDNYWSLDIESKNKMLKSLIEKVTYSKDTKNAYGKGNEIGFQLDIFPKIQKENQ

SEQ ID NO: 3776 - protein, 525 aa, Unknown
  Description of Unknown: Integrase B3777 sequence
  PTHR30461:SF3,SM00857,G3DSA:1.10.10.2600,IPR036162,PF13408, PS51737,G3DSA:3.40.50.1390,IPR025827,IPR006119,IPR038109, PF07508,IPR011109,SSF53041,PTHR30461,Coil, PS51736,cd00338,PF00239
MNRTVTAIPATKKLGNLTASSGAPARRRVAAYARVSTEMEEQTSSYEAQIDYYTTYIRSRNDWQFAGMYCDEGISGTSMKRREGFQTMIDDALAGKIDLILTKSVSRFARNTVDSLTTVRKLKDAGVEVYFQKENIYTFDAKGELLITIMSSLAQEESRSISENVTWGHRKRFADGKVMVPYKSLLGYKKGADGSLVIDETQAPAVRLIYQLFLDGMAISEIKTELAARKILTPRGKEVWSTSTVRSILSNEKYKGDALLQKTFTTDFLTKKMKVNEGEVPQYYVTGNHEPIIEPRIWDQVQYELATRHGNISSAKVGLFSTRLKCSQCGAWYGRKTWASNTKYKYTVWQCNHKYTDEHPCSSATVKDEQIKDSFVQALNQLIACRPQQSQLPQVLGDMFDTSRLEEQAAACQAKIVELTEQIEALIAENQQRALDQDAYQNKYTELDTAYRKTLARKTSLEADITAKTAKHAAVTTALDDLTGEPVSEFRPSQWSALIDHAIVDEDGIRFVFRTGEQVRIALKG

SEQ ID NO: 3777 - protein, 525 aa, Unknown
  Description of Unknown: Integrase B3778 sequence
  SM00857,G3DSA:1.10.10.2600,IPR036162,PF13408,IPR025827, G3DSA:3.40.50.1390,PS51737,IPR006119,IPR038109,PF07508, IPR011109,SSF53041,PTHR30461,Coil,PS51736, cd00338,PF00239
MVKNRAAIYARFSSHNQRSESIEIQVENSRAYCEREGLQVVREYCDYAQTGRNVNRAEFQRMMNDAKLGLFDFVVIYKVTRIMRNRDEMALARIMLRKAGVEILYAGEEIASGSSGVLQLGMLEVLAEWESAIDSERIRDGIQKNAARCLANGHSLYGWDIVDGRYSVNEREAALMRKMKNMLFSGHSVADIVRALEGEKTRNGKPFNQDKVTKLLRRVQNGGTYSYAGHVVEGGMPGLWPQVEQDMIESVLNDRHRPRRKVDSSKEFPLSGKLYCTKCGMPMAGMSGTSKTGKAYHYYRCRKCRRTVRRDLIEDAVVDMTLQAVARDDVRQRIAQGMALYQSEQEETKPESYYLKKELRRIDAAFERIWQAIEDGIAPPGGKERTDELKCRKAEIEAQLRIAERDESMSFGVDELMLWLDEIATELTPLDILNKFVRFAEIDSKSNRIRVYFAFDKHGDGFSPNSADKGEHLYEERCSPNSTLVELMRKTANSTSTANRAAIHLDTCIVRVSKNWFVVVGTCQK

SEQ ID NO: 3778 - protein, 525 aa, Unknown
  Description of Unknown: Integrase B3779 sequence
  PTHR30461:SF3,SM00857,G3DSA:1.10.10.2600,IPR036162,PS51737, G3DSA:3.40.50.1390,IPR006119,IPR038109,PF07508,IPR011109, SSF53041,PF00239,PTHR30461,PS51736,Coil, cd00338
MWMLPPMSVDDIIMYLRKSRTDDPALTVLEVLSKHEQMLDDWVVRNIPDDGRRIPEANRYREVVSGETIESRPCVQEVLRRVESPRVKAVLVVEPQRLSRGDLEDIGRLVKLLRYSNTIVITLQYTYDLRDERDRDMFERELKRGNEFLEYQKRIMGNGRLLSVQNGNFIGQKPPYGYNKVVIKEGKRKCHTLEPDPERAPIVKMVFEMYAGGTSATQIAKTLRTMGVTTADGGKWVTSSVKQMLTNDHYIGMVHWNKRKTVKVVEDGEVVATRPRNSDFLVYPGKHQPIIEKELWDAVQAIKGNIPPIKNRAKYANPFAGLVVCQCGGKMVRQQYVRDGVERCAPRLVCPNQAECHTASCSLPEFTEAVIEALEKGIKNFELMMADAPEDDATQQERLIAQLEKRLAELDRLELAQWDKYTQEAMPKHVFDALNKKVVQEKEETLQALKTAMETVPIRVDYEKKRETFATAVKTLQDPNASVKEKNLLLKQCIERINYNRKPKESDNRRFGNPEPLELELQFKV

SEQ ID NO: 3779 - protein, 525 aa, Unknown
  Description of Unknown: Integrase B3780 sequence
  PTHR30461:SF3,SM00857,G3DSA:1.10.10.2600,IPR036162,PF13408, PS51737,G3DSA:3.40.50.1390,IPR025827,IPR006119,IPR038109, PF07508,IPR011109,SSF53041,PF00239,PTHR30461, Coil,cd00338
MKKRVLCLYRVSTIGQVDHDDIPMQRIACREFIARHPDWELVEEVSEKGVSGYKTKTEDRDALLRIKEKALAKQFDILLVFMFDRIGRRDNETPFVVQWFVENGVEVWSTKEGEQRFDNHVDKLLNYIRFWQASGESEKTSLRIRTKHLQMVQEGLYRGGLIPFGYKLEFLGRTNKKNQPVRDLMIDERESEIVKEIYHKTVSDGWGTNRIANWLNDQHIPTKRGTAFWRATSIRALVRNPIYTGRIRFGGDISEPFDHLRIIDDALFEQCELVIKRRVPRKSSKRSGNLRSTSPGLLTGILYCGSCGERLCFNHNTTVRTLADGTRRSYERDLYRCYRKVHSRNTCHGPSSYTAGLIEKDVLAVVHTYFESIRSIPSSQMLEAAGSRTRRIQEDALVRAEAALKKAQAEMTALEDETVRALTGESTMDIAFLNSLIPKRKANLEGAQNEVDRIRSEIADLEKADRSANHELEMILSWAETFDTSSRDTQRSVIAMLIDRIVVHANYHLDIHFRITAQQYLGKAS

SEQ ID NO: 3780 - protein, 525 aa, Unknown
  Description of Unknown: Integrase B3781 sequence
  SM00857,G3DSA:1.10.10.2600,IPR036162,PF13408,PS51737, G3DSA:3.40.50.1390,IPR025827,PS51736,IPR006119,IPR038109, PF07508,SSF53041,IPR011109,PF00239,PTHR30461, mobidb-lite,Coil,cd00338
MKSKNKPFIRKAVAYARFSSNNQREESIDAQLRAISDYCERENIQLVDIYSDEAQSAKTDNRDDFKNMTDAIFKGNYDIDAVLVHKFNRFARNKYDSALYKKRLRDIGIKVVSVTQPIDDSPEGRILESLIEAMDEYYSENLALEVKKGMLENALKGKHTGGGKLLGLSVDDEGYYYPDENAPIIYRIFKEYADGVPKTQIVERLNREGYRNQYGRKFNTRTITDLLQNEKYIGNFIYNHTQSQVIRLEGIIKNPIVDEDLWERVQKLRKDANKPKHRKRKYLMTGKLRCGVCGFTYCGSGAKKKNKNGDMSAYYKCQGKIKNKNGCTNPSLNKDYYEKLVIDTITKSVLTDNAIDEIAVSVTTQLERERKKPLIPTAKLRNQLDKVKDKQARLMELYLDGGMERKVLDEKNNALKEERKHIEEQIERNLYLEQSNILDVQDIKNMILEFREELKNNPDFDFAQVVFNTFVDSIVVYPDTLEVNLRVDFSTLGGDKRKNRGASHPINPLLINKSVKRKTHQQPTN

SEQ ID NO: 3781 - protein, 525 aa, Unknown
  Description of Unknown: Integrase B3782 sequence
  PTHR30461:SF3,SM00857,G3DSA:1.10.10.2600,IPR036162,PF13408, IPR025827,G3DSA:3.40.50.1390,PS51737,IPR006119,IPR038109, PF07508,SSF53041,IPR011109,PTHR30461,Coil, PS51736,cd00338,PF00239
MNVVIYARFSSHSQTEQSIEGQLKACYEYAERNSYTVIGEYIDRALTGTNDNRPEFLRMIEDSRKKTFQGILVYQLDRFARNRYDSAVYKKKLKKNGVRVLSARENISEDASGILIESVLEGLAEYYSAELSQKVRRGLDINASKCLCTGGGVALGFKVDKDRHFQVDEDTAPVVREIFEMYANGKTVTEIITMMNARNIVTSRGSAFNKNSLRKMLQNKRYIGTYTYKGTEIPNGIPRIIDDDLFMQVQEMMKKNRKAPARARAKEEYLLTTKLFCGHCKEMMTGYSGTSHTSAVHHYYICNNRKKKLCKKKNVQKDFIEKLVISECRKLLTPENIERISHEVVAASQRDQDMTNVRHLSKQLADIERKRKNLMSAIMECDSDLIRKTLYEQIPLLEKEKSDTELQLTLEKAKQVKLTVSEVRFFLNALRKGDPDSIKYQKALISVLVNAVYLYDDKITLIFNSGDHAVTLDAALLEKIEQQADSVPVEDRFVYEQLASTIGRISEPYIAWGTVFVQTKRHSLP

SEQ ID NO: 3782 - protein, 525 aa, Unknown
  Description of Unknown: Integrase B3783 sequence
  PTHR30461:SF3,SM00857,G3DSA:1.10.10.2600,IPR036162,PS51737, G3DSA:3.40.50.1390,IPR006119,IPR038109,PF07508,IPR011109, SSF53041,PF00239,PTHR30461,PS51736,Coil, cd00338
MWMLPQMSVDDIIMYLRKSRTDDPALTVQEVLSKHEQMLDDWVARNIPDDGRRIPEANRYREVVSGETIESRPCVQEVLRRVESPRVKAVLVVEPQRLSRGDLEDIGRLVKLLRYSNTIVITLQYTYDLRDERDRDMFERELKRGNEFLEYQKRIMGNGRLLSVQNGNFIGQKPPYGYNKVVIKEGKRKCHTLEPDPERAPIVKMVFEMYAGGTSASQIAKTLRTMGVTTADGGKWVTSSVKQMLTNDHYIGMVHWNKRKTVKVVEDGEVVATRPRNSDFLVYPGKHQPIIEKELWDAVQAIKGNIPPIKNRAKYANPFAGLVVCQCGGKMVRQQYVRDGVERCAPRLVCPNQAECHTASCSLPEFTEAVIEALEKGIKNFELMMADAPEDDASQQERLVAQLEKRLAELDRLELAQWDKYTQEAMPKHVFDALNKKVVQEKEETLQTLKTAMETVPIRVDYEKKRETFAAAVRTLQDPNASVKEKNLLLKQCIERINYNRKPKESDNRRFGNPEPLELEFQFKV

SEQ ID NO: 3783 - protein, 525 aa, Unknown
  Description of Unknown: Integrase B3784 sequence
  PTHR30461:SF3,SM00857,G3DSA:1.10.10.2600,IPR036162,PF13408, IPR025827,G3DSA:3.40.50.1390,PS51737,IPR006119,IPR038109, PF07508,cd03770,SSF53041,IPR011109,PTHR30461, PS51736,Coil,PF00239
MYLEISNPMDYHVALYIRLSKEDESEGPSESVTNQKSLLNEFVQQHRLSVYDTYIDDGWSGTSFNRPAFQRMIGDIETKKVNMVITKDLSRLGRDYIMTGHYMERYFPEKRVRYISLLDGIDTGIESTANDITPFRAIMNDMYAKDISKKIKSVKHDKQQKGQFIGGKPVYGYKMHPTEKNKIVIDEAVAPIVRRIFAMALAGMSCRRIAMVLNEEGIPTPATYCGWQRRQKGPYSGLWSSERISDMLKNETYIGNMVQGKSVKISYKSQKCIKQEQSKWIVVENTHEPLVDKETFHKVRQLLNSRKYTRSRKYDFLLKGLIFCHECGYPLAVINRKTTTGEDRLFFVCRTYQRFTKAGVCTCHCIKEQVVTDAVIEKVREICQAYLHPHRLQMIAKETIQTDKKELKQEYAIHAVRNKISSLTNNLDKMYMDRLSGLLTETDFERMYQRMKIERTALEEKLKELERLKESPISSDTLSKELVQRFLQSAYTSRELLVSLIERIELTETKQIIIKFRFPELEAIS

SEQ ID NO: 3784 - protein, 525 aa, Unknown
  Description of Unknown: Integrase B3785 sequence
  SM00857,G3DSA:1.10.10.2600,IPR036162,PF13408,IPR025827, PS51737,G3DSA:3.40.50.1390,IPR006119,IPR038109,PF07508, IPR011109,SSF53041,PTHR30461,Coil,PS51736, cd00338,PF00239
MAKPEVSELAVVYARYSSHSQGEQSIEGQLSNARDYAAAHGYTIVHEYVDRAKSGRTDNRAEFQQMLKDTAKRQFSVIILWKVDRFGRNREEIAINKMKCRKNGVRVEYVAETIPDSPEGVILESVLEGFAEYYSLQLSQNIRRGRAESAEKCQSLGGNRPLGYKTGPDKKFVIDENTAPTVKMIFTMYADGKTVTEIVDKLNEMGLRTLRGGPFTKNSLHSILKNKKYIGIYEYQGREIKDGVPRIIEDDVFNKVQEMLKINKRAPAKTWSRADYILTDKLFCGKCGALMFGESGTSKTGAKHNYYICSNKKRFRSCDKKAVRQADIEDTVLNATHELLQDDELLDYIVDRTWEYYLAQDNSQEELRNLQRQLTQTDTAISNLIRAIEAGILTEETKKRMDELTQQKADLKASIADREIARGFHLQKSHIAFYLRSLRDADWSDKEAQKRLIQSFVNAVFVYDDHITLTYNFSGDKSTITLRDMQRFEDGEEFGCRASRSTKTHRYELFWFKNVFGLTRKLPQR

SEQ ID NO: 3785 - protein, 525 aa, Unknown
  Description of Unknown: Integrase B3786 sequence
  PTHR30461:SF3,SM00857,G3DSA:1.10.10.2600,IPR036162,PF13408, PS51737,G3DSA:3.40.50.1390,IPR025827,IPR006119,IPR038109, PF07508,IPR011109,SSF53041,PTHR30461,Coil, PS51736,cd00338,PF00239
MSRTVTAIPATKKLGNVTTPSGVPARRRVAAYARVSTEMEEQTSSYEAQIDYYTTYIRSRSDWRFADMYSDEGISGTSMKRREGFQTMINDALAGKIDLILTKSVSRFARNTVDSLTTVRKLKDAGVEVYFEKENIYTFDAKGELLITIMSSLAQEESRSISENVTWGHRKRFQDGKIMVPYASLLGYKKGADGSLVIDETQAPTVRLIYQLFLDGMAISEIKTELAARKILTPRGKEVWSTSTVRSILSNEKYKGDALLQKTFTTDFLTKKMKVNEGEVPQYYVTGNHEPIIAPRIWDQVQYELATRHGNISSAKVGLFSTRLKCAQCGSWYGRKTWASNTKYKYTVWQCNHKYAGDKPCSSATVKDEDIKNAFVQALNQLIARQPRQSQLLQIFDSMFDTSRLEEQAAACQTKIVELTEQIEALIAKNQQRALDQDAYQNKYTELDTACRKTLACKASLEADIAANTAKHAAVTTALGDLAGEPVNDFRPAQWSALIDHAIVDEDGIRFVFRTGEQVRIALKG

SEQ ID NO: 3786 - protein, 525 aa, Unknown
  Description of Unknown: Integrase B3787 sequence
  PTHR30461:SF3,SM00857,G3DSA:1.10.10.2600,IPR036162,PF13408, IPR025827,G3DSA:3.40.50.1390,PS51737,IPR006119,cd03770, PF07508,IPR038109,SSF53041,IPR011109,PTHR30461, PS51736,Coil,PF00239
MYQEISNPMDYHVALYIRLSKEDESEGPSQSVTNQKSLLDEFVQKHRLQLYDTYIDDGWSGTNFDRPDFQRMIGDIEAKKVNMVITKDLSRLGRDYIMTGHYMERYFPEHRVRYISLLDGIDTGVESSANDITPFRAIMNDMYAKDISKKIKSVKRDKQRKGQFIGGKPVYGYKMHPTEKNKIIIDEEAAPIVRRIFAMALDGVSCRQIAATLNEEVVPTPATYCGWNMGRKGPYAGLWSSERISNMLQNETYIGNMVQGRQVKISYKSKKCLHQDRNNWVVVEDTHEPLIDAESFRKVRMLVNSRKRTRSRTYDFLLKGLIFCHECGHPLGVLNRPNAKGEETLYFVCRTYQRFTKNSACTTHYIKEKTVTDAVIAKVREVCEDYLTAEALLPAAEKAVKEASQENKTAAEISALQNKSANLTEHLDRMYTDRLSGLLPEEDFQRIFTRIKDERAQLEERIKELRQQQKNPISQTERAKDLVQRYLDTAYANRELLVSLIERIELTADREIIVNFRFAELQQTG

SEQ ID NO: 3787 - protein, 525 aa, Unknown
  Description of Unknown: Integrase B3788 sequence
  SM00857,G3DSA:1.10.10.2600,IPR036162,PS51737,G3DSA:3.40.50.1390, IPR006119,IPR038109,PF07508,SSF53041,IPR011109, PTHR30461,Coil,PS51736,cd00338,PF00239
MQENISINQIIMYLRKSRSDDPCMTVEEVLARHERQLQDYAVASFGSPVPEHHIFREVVSGETIADRPVMRQLMHLLESGSVRGVLVIEPQRLSRGDLEDCGRIINAFRYTNTLVLTPPKTYDLSDEYDRKFFEMELTRGNDYLEYTKKILNRGRLASVKQGNYIGSVAPYGYRKVKIGSGKDTAHTLEIVPEQADAVRMMFQLYLAGNGFTRIAAELDALGIKPLKSDHWSPAAISEMLSNPVYIGKIRWNHFKTVKTMQNGQITKTRPANSDYILVQGKHPAIIDQKTFDAVAARRGTAPKVKRGHELRNPFAGLVYCGTAGCGRSMTFKQFTNYRSKVPRRSESMICSNQRICHTKSVQYSAFVERVKEILSKTVDDFEIKLQNDDGNIVRIHENIIRNLEQDLLKLKDKDLRQKDAYEDGIYTKEEYASRNAKLQEQICEVQLSIQRAKDTMPPEVDYQERVSRFSDCLSKFEDTDISASEMNLLLKSCIEKIIYHNSSESKPGIGRFVSNPFELDIYLRL

SEQ ID NO: 3788 - protein, 525 aa, Unknown
  Description of Unknown: Integrase B3789 sequence
  PTHR30461:SF3,SM00857,G3DSA:1.10.10.2600,IPR036162,PF13408, IPR025827,G3DSA:3.40.50.1390,PS51737,IPR006119,IPR038109, PF07508,SSF53041,IPR011109,PTHR30461, Coil,PS51736,cd00338,PF00239
MAVARDNLARKQIFIPANMPEEEIVLRVAAYCRVSTDSDDQINSFTAQNSHYMEMITAHDQWELVDIYADEGITGTSAKKRKDFQRLLADCRNGRIDKVLVKSISRFARNTTECLEAVRELKSLGISIFFEEHNIDTRMVSSEMLTAVIASCAQVESESISKNTRWGIQRKMQSGTYVASSVPFGFRRENGNLRIEEPEANYVRYAVSSYLSGKSASDIAKEFVDKSTGDAVLASRKWSFQAVVEMLKNEKYCGDALYQKTYMTDALPRQCLRNRGERDQYYAANTHPAIIDRQSYEAVQMLLRRRNENHMQHTIKTSPLGGRFICARCGGGFRRKESGGRPAFACMTHTQDRNACDMIPIPENEVYRAFLRLYSNLRDHPEVLDFQIKKLTEIRSRQMLWSPAVVELNREISDILSQSHALSLLNKQGMVDSDIFISKSNQLAEQLRKAKQQKEILLKKKENDVIEQTKSLQGVFQDGPEYLENFDEELFCELIDKIIVESGTKIRFRLNNGMELPEHIERMVR

SEQ ID NO: 3789 - protein, 525 aa, Unknown
  Description of Unknown: Integrase B3790 sequence
  PTHR30461:SF3,cd00338,SM00857,G3DSA:1.10.10.2600,IPR036162, PF13408,IPR025827,G3DSA:3.40.50.1390,PS51737,IPR006119, IPR038109,PF07508,SSF53041,IPR011109,PTHR30461, PS51736,Coil,PF00239
MGKKQKITGGDAVIYARYSSHNQRDVSIEQQIEACRKYAASLSLKVTLTYEDRAISGRTDNRPAFQRMMRDAENGKFQYVLAWKSNRMGRNMMQAMVNEARLVDCGVKVFYAEEDFDDNAAGRFALRSMMNVNQFYIENMAEDVKRGLYDNAKKGLVNGSLPLGYKRGADGKPEIDEPKAAIVREIYTRVAAGELFASIAADLNARGIKTARGREWNKGSFHVLCHNDRYRGIYIYGDIRIPGGMPRIISDELFYDAQEAYGMKKDNRYGRARHGAENYLLTGKLYCGHCGSYMVGISGTSKTGEMHYYYACQKHRLEHTCEKKAIRRDVIENAVARAIMMYCLDDETIDFIVDSTIAYFKQKDHELHIEAMENELAAVQQAISNLMKAIEAGIITPTTRTRLLDLEEQQTKLSAKINTAKAELVEIDRDDLIAGLQLFRAGDVKNKKFLAKLFNTFLIAVYLYDDNRLKIVFSFTGNHNSVEIPLELNNDCPDNEIVSDETEVRMSHLECGRRGSNPHSVGTGA

SEQ ID NO: 3790 - protein, 525 aa, Unknown
  Description of Unknown: Integrase B3791 sequence
  PTHR30461:SF3,cd00338,SM00857,G3DSA:1.10.10.2600,IPR036162, PF13408,PS51737,G3DSA:3.40.50.1390,IPR025827,IPR006119, IPR038109,PF07508,SSF53041,IPR011109,PTHR30461, PS51736,Coil,PF00239
MYDDIKTCVLYVRYSSNNQTEQSIEGQLRVCKDFCAHHNIKIVEVYADRATSASKDIEKRVSFLKMIKDSEKGNFDAVVVYKLDRFARSRYDSATYKYRLRKNGVQLISATENISDDPEGIILESVLEGMAEFYSAELSQKINRGLRESAYKHNSIGGQIPLGYKTEGKKLVIDEETAPIVRQAFEMYAEGHSVAEICRTFNARGYKTSKGTRFGKSSFSKIFRNEKYIGVYQFHEYRAENAIPALIDKKTFDLVQARLKAVGKAPGQFKAKRVYLLSGKLYCGHCGSKMNGNCNTSGYVYYECYGKKNLHKDCNKRNLKKEFIEDIVVKDALSLLTEERIQEIASIAVQTNTHEVETSTDIPTIRSRLHETRLSLDNITKAIETGAAPETLVKRMVELEKEKKTLEGELKRQEKGIVYLDKEQVIFWLEQFKNGDIEDEDFRRQLIDLFVNSVTVWDEPDDYFKITIAYNLTSLQEKTYRLPKGGTLSDFASNTPALKSNPIIEGTLMFHTTFQQYSPYTRYRG

SEQ ID NO: 3791 - protein, 525 aa, Unknown
  Description of Unknown: Integrase B3792 sequence
  PTHR30461:SF3,IPR036162,PS51737,IPR011109,PTHR30461, PF00239,G3DSA:1.10.10.2600,IPR006119,SSF53041,cd00338, SM00857,IPR025827,IPR038109,mobidb-lite,PS51736, PF13408,G3DSA:3.40.50.1390,PF07508,Coil
MRKKSNLNAATRAVIYARYSSANQRDCSIEQQVAKCRELAARLGLTVIDVYEDRAISGKTDRRPNFQRMMKDADLRQFDVVLAWKSNRMGRNMLQAMTNEERLRDNGIRTVYAEEDFDDTAAGRFALRNMMNVNQFYSENMAEDITRGLMDNAAKCLSNGSLPLGYKPGDDRHVVLDEAEAAIVQEIFTRVSCYEPFIDIARDLNRRGIKTKKGSEWGRSSFHTICRNERYRGIYIYRDVRIEGGMPRIVSDELFYKVQEVLKVKKNPQGRRKRSGYEEYLLTGKLFCGHCGSPMTGIAGTSKTGAMHYYYTCQKRRTDHSCDKKAVRRDQIERAVGVAIQQQLLTDENIQMMADKLMEYNARTETKYRLQGLQDQLNANKTATANILKAIEMGIITDATKARLLELEKEQGQLLVKIDEAKAEMVPISRNDFVKLLYIYKEGEPTDKKYLAALFDNFLVRVDLYDDHLKITFDPTGGRQPIDMPIGAEESPESPGDSSESSDFEASSQDAEKFVLALHNCTKSL

SEQ ID NO: 3792 - protein, 525 aa, Unknown
  Description of Unknown: Integrase B3793 sequence
  PTHR30461:SF3,SM00857,G3DSA:1.10.10.2600,IPR036162,PF13408, IPR025827,G3DSA:3.40.50.1390,PS51737,IPR006119,IPR038109, PF07508,IPR011109,SSF53041,PTHR30461,Coil, PS51736,cd00338,PF00239
MNAVIYARYSSHNQTEQSIEGQLRDCYAYAKRCDLNVVGEYIDRAISGTTDERPDFQRMIADAPKKQFQRILVWKLDRFARSRYDSAIYKHQLKQYGVRVLSVMENVGEGDESILLEALLEASAEYYSLDLKKKIQRGQRETIAKGRFCGGSVPYGYQSVDGKLVIDEKTAPHVRYVFEQYASGVPMKKIIDELTRRGVKTARGLPLTCNTFSRALVNSAYIGQYRYKGEVVPGLCERMIDDDTFEKVQKFVTVHKHAPAANRSENVEYLLQGKAFCGHCGAPMRGECGRGKNQRTYYYYNCANRKRYNSCPKSLEKKDFLERFAVEQTVRYVLTPERIKQVAQIIVAQYEKEFSGNKISELEKRIRQLENDLNKLVDSLIEAPKVAHKRIYEKMEALEVQKAECETDLTKLRIAHDIRFTEQEVAAWLKQFCSGDPSAPEFQHKIIDTFINSIYVYDDHIIIFYNIKGEKSQVALPDIPEEIDSALSPESSTLTAVAPPYLRNPNLIPVGDGFGFLLFISSIVV

SEQ ID NO: 3793 - protein, 525 aa, Unknown
  Description of Unknown: Integrase B3794 sequence
  PTHR30461:SF3,cd00338,SM00857,G3DSA:1.10.10.2600,IPR036162, PF13408,IPR025827,G3DSA:3.40.50.1390,PS51737,IPR006119, IPR038109,PF07508,IPR011109,SSF53041,PTHR30461, PS51736,Coil,PF00239
MTKKVTTIPALLNKQSTNQVGIVKKRRVAAYARVSTDQEEQLTSYEAQVDYYTNYIKSRDDWEFVDVYTDEGISGTSTKHREGFNKMVKSALDGNIDLIITKSVSRFARNTVDSLTTIRKLKDIGCECYFEKENIWTFDGKGELLLTIMSSLAQEESRSISENVKWGHRKRFADGKVSVPFNNFLGYKKGEDGNLVIDEEQAMIVKRIYREFLSGSSSVAIAKGLTNDGIETPGHKQKWYATTVRSILTNEKYKGDALLQKHYTVDFLTKKQKINNGEVQQYYVENNHPAIIEPDVFEMVRLEIDRRLMLKGKYSGTDILTAKIRCGECGGSYGAKVWHSNDKYRRVMYQCNSKYSGKEKCKTPAIRSEDIESRFVNVVNILIESKDEIISNLEKVLDKICNKKELLEEKEKLENSLTEQVEKIQDLIDINSRVAQNQEKYKKEYDALIKNYDETKCKFEQLEIKLSQQAAKHQMIKDYINTLKKQEKLLTKFDGLVWGSLLESATIKDKDVIVFRFKDGTEING

SEQ ID NO: 3794 - protein, 525 aa, Unknown
  Description of Unknown: Integrase B3795 sequence
  SM00857,G3DSA:1.10.10.2600,IPR036162,PS51737,G3DSA:3.40.50.1390, IPR006119,IPR038109,PF07508,SSF53041,IPR011109, PTHR30461,PS51736,cd00338,PF00239
MTKVLKCAIYTRKSSEEGLEQDFNSLDAQREACEAYIKSQKHEGWELVDKQYNDGGFSGGTMNRPAFQELLEDVEKGEIDVVVVYKVDRLTRSLMDFAKIVDVFDKHETSFVSITQQFNTTTSMGRLTLNILLSFAQFEREVTGERIRDKFAASKKKGMWINGKPPMGYIKVDGKLEIEPSEAKTVKLIFSKYLEIGTVPDLIKYLQGNKIYTRSGKNFYKGHLYKILSNKTYIGKIVHKNSVYGGLHEPIIDFEIFEKTQRLLAQNALIRKNSTNAASGSLLKGKLFDDKDNYMSPTHSNKRGKRYRYYVSQAQIQNRLQDIGSVSKISAGEIENFVTEKVKEFVFNKKLLQKLFANYSVSQQKIIFEQIESKQINADFIRHMLIKAKISSQSVLITVSKTLTKEAVEYMIFGTHLPVEQKYDKNSLVELDYKIRISSTTKNGSKLIIGDVKQKTVNKILLDAIVKSFYYHKLMFENKLTSEQKANTHIYRLMKLRFLPKGIIKAILTGSHEPDWTIDKLYTFL

SEQ ID NO: 3795 - protein, 525 aa, Unknown
  Description of Unknown: Integrase B3796 sequence
  PTHR30461:SF3,SM00857,G3DSA:1.10.10.2600,IPR036162, PF13408,PS51737,G3DSA:3.40.50.1390,mobidb-lite, IPR025827,IPR006119,IPR038109,PF07508, SSF53041,IPR011109,PTHR30461,PS51736,cd00338,PF00239
MARSAKKIEYAPAEQIGVIYARYSSHNQKEESIEQQIAECTEFAEKNGIRIIGIYADKAVSGRSDRRPNFQRMMRDAEKRHFQIVVAYKSNRIARNMLNALQYEAKLDLFGIKTLYAKEEFGNTAAGRFALRTMMNVNQFYSENMGEDIKRGMVDNANECKVNGMLPLGYVKSKEGKYAIAPDEAAVVREIFDSVLKDVPVAEIARSLNQRGIHTKLGREWNKNSFHIMLKNDNYIGVYRHSGVVVEDGIPPILEKEVFAAVQEKLANKKKTAGRRSANGEYLLTGKLFCGYCGSYMIGVSGTGENGTVHNYYQCQKRHAEGRCEKKNVRRDFIEKLIARLTQDYILQDDTIEWIADSTMSFQAMARRESGVAQLERDLADNRKVAKNIMAAIEQGIITETTKARLLEVEGTIHDLERSLSIAKAASQPIERERVVFSLEQMREGNVGSKDHQKKLIDTFVKSVTLWDDRIQIDYYHTPGKHKFSYSLEELTSKAENESNASDVRTDSLELHHQAAPKKMPLRKA

SEQ ID NO: 3796 - protein, 525 aa, Unknown
  Description of Unknown: Integrase B3797 sequence
  PTHR30461:SF3,SM00857,G3DSA:1.10.10.2600,IPR036162,PS51737, G3DSA:3.40.50.1390,IPR006119,IPR038109,PF07508,IPR011109, SSF53041,PTHR30461,Coil,PS51736,cd00338, PF00239
MWMLPQMSVDDIIMYLRKSRTDDPALTVQEVLSKHEQMLDDWVVRNIPDDGRKIPEANRYREVVSGETIESRPCVQEVLRRVESPRVKAVLVVEPQRLSRGDLEDIGRLVKLLRYSNTIVITLQYTYDLRDERDRDMFERELKRGNEFLEYQKRIMGNGRLLSVQNGNFIGQKPPYGYNKVVIKEGKRKCHTLEPDPERAPIVKMVFEMYAGGTSASQIAKILRTMGVTTADGGKWVMSSVKQMLTNDHYIGMVHWNKRKTVKVVEDGEVVATRPRNSDFLVYPGKHQPIIEKELWDAVQAIKGNIPPIKNRAKYANPFAGLVVCQCGGKMVRQQYVRDGVERCAPRLVCPNQAECHTASCSLPEFTEAVIEALEKGIKNFELMMADAPEDDATQQERLIAQLEKRLAELDRLELAQWDKYTQEAMPKHVFDALNKKVVQEKEETLQALKTAMETVPIRVDYEKKRETFAVVVRTLQDPNASVKEKNLLLKQCIERINYNRKPKESDNRRFGNPEPLELEFQFKV

SEQ ID NO: 3797 - protein, 525 aa, Unknown
  Description of Unknown: Integrase B3798 sequence
  PTHR30461:SF3,SM00857,G3DSA:1.10.10.2600,IPR036162,PF13408, PS51737,IPR025827,G3DSA:3.40.50.1390,IPR006119,IPR038109, PF07508,IPR011109,SSF53041,PF00239,PTHR30461, PS51736,Coil,cd00338
MGYDINLANVVIYARYSSAGQNDQSIDGQLAKCHEYAQQRGFRVVGEYCDRALSGRYADTRPEFQRMIADSAKHAFEYVLVWKLDRFSRDRYDSAIYKKKLRSNGVRVLSVTEGIDESGESLLLEAILEAMAEEYSRQLAQNVKRGMRQNAEKALSLGGLAPLGYTVVNKQYVINEDEARIVRYIHEQYAAGAKQKDIVAGCEQLGYRNQRGGLLTLDAVKRILANDRYIGTYTYLDEVVIEDAFPAIVSKELKAKVKARLAANAKAPGHAKAKIEYLLHGKLFCGECGAPMVGSCAHGGHGSKYYYYSCASRKKQHSCEKRNERKDELEQCIVDHVRTRLLTDEWINKAADAVVAEYDKSYNASGIKPLEKQIREIDKEIDKLVDKLIDTQAAAAIAKINERIEAADARKRALEEELSTLRIASRAKMEKEDVVSWLMQFRIGDPADIAYRKKIIELFINSIYVYDDKINLFFNIGNSAQITYPQMLALDIPAGSDLGASGLPDTLLSEPIIMIDGVIGLVLRR

SEQ ID NO: 3798 - protein, 525 aa, Unknown
  Description of Unknown: Integrase B3799 sequence
  PTHR30461:SF3,cd00338,SM00857,G3DSA:1.10.10.2600,IPR036162, PF13408,PS51737,G3DSA:3.40.50.1390,IPR025827,IPR006119, IPR038109,PF07508,IPR011109,SSF53041,PTHR30461, PS51736,Coil,PF00239
MKKENEIRAVVYARYSSHSQTEQSIEGQISAAQVYAKAKGYTIVKEYVDRAKTGKNDNREAFQQMLSDTAKHEFSVIIVWKVDRFGRNREEITFNKYRCKKNDVRVEYIAEAVPDSPEGVILESVLEGMAEYYSLQLAQNIRRGIRASAEKCQAIGGHCSLGYAIDPKTKKYVIDPDTAPTVQLIFEKYAEGYTGMDIVRLLNEKGLRTVRGKPFTKNSLWTILKNERYAGVYLFKDEVRVEGGIPALVSRETFDKVQEMLEINHRSPVNTWNRATYLLTDKLFCGHCGSKMVGECGTSRTGATYNYYICAGKKRERNCSKKAVRQDWIEKVVLQQIRRVLFDQEFLEFIAHKAYTYYLEEKKKLDQSAAIKAQLSSVESSIDNLIRAMEAGIFSASTKSRLDDLENQKAALTRTLAEIKLSEESFDLTEDRILFFLESMRGLDMDDTDSRKRLVKTFVNAVYLYDDKITLAFNFTDSCEKPEIIELADIADGVVEKFVHRASCSTRNKKHYTEMCGAFLLTPNE

SEQ ID NO: 3799 - protein, 525 aa, Unknown
  Description of Unknown: Integrase B3800 sequence
  PTHR30461:SF3,SM00857,G3DSA:1.10.10.2600,IPR036162,PF13408, PS51737,G3DSA:3.40.50.1390,IPR025827,IPR006119,IPR038109, PF07508,IPR011109,SSF53041,PF00239,PTHR30461, PS51736,Coil,cd00338
MIAAIYSRKSKFTGKGESIENQIQLCMDYAKNLGINEFLVYEDEGFSGKSTDRPKFKEMLKDSKNKKFDYLICYRLDRISRNVSDFSTLIEDLNKLNISFVSIKEQFDTSTPMGRAMMYISSVFAQLERETIAERIRDNMYELAKTGRWLGGMPPYGFNSTQINYYDDGMNQKKMYKLQIDKDTMEIVKIIFDKYLELRSLSKLYKYMYENGIKGTRGGNLDPSALSLILKNPAYVKANKNVIDYLKSIDMEVIGDVDDTHGILTYAKNTDNPIAAVAKHEGVIDADKWIEVQNLLNANKSKAPRAGTGSKALLSGLLKCSKCGSNMRITYKNSKKGTIYYYICGTKKSLGVSACDCRNIRSDKAESKVIEELKNKSVESIISNYKNTQLENTKDSKDIKAQINSIKNQIKEKETYIDNLVMQLAKVTDSAASTFIIRKLEDLNNELSELKSKLNSLDTLSLENKKLDIDINMLIDNIDKFNKEIDTSDINKKRLLLSTIVDSMYWDSDEETIKVNLIGINSNRN

SEQ ID NO: 3800 - protein, 525 aa, Unknown
  Description of Unknown: Integrase B3801 sequence
  cd00338,SM00857,G3DSA:1.10.10.2600,IPR036162,PF13408, PS51737,G3DSA:3.40.50.1390,IPR025827,IPR006119,IPR038109, PF07508,IPR011109,SSF53041,PTHR30461,PS51736, Coil,PF00239
MENAKRKKDDLAGSRAVIYARYSSHSQREASIEQQVDACKAHAQQLGVRVVDVYEDRAISGKTDRRPSFQRLMKDAEKGRFDVVLAWKSNRIGRNMMQALVNESRLQDCGVRVCYAEEDFDDSAAGRFALRSMMNVNQFYSENMAEDITRGLYDNASKCMANGRQPLGYKRGEDGRVSLDEPAAAIVREIFTRVAAYEPFADIARDLNERGIRTATGSAWNKGSFCTLCHNERYLGIYIYGKVRIPGGIPRIVSDKLFYKVQEVCSMKKNPQNGKHRPGAEDYLLTGKLRCGKCGAPMSGISGTSRNGELHYYYTCQNHRAGGPCSKKAVRRDVIEPAVAQAIKMYCLTDDMIDWIADHAVAYWEAEDRALHIDALQAELDAVKKSVSNLLKAIEAGIITETTRDRMLALEEQQATLERQIREARAQIVHLDRDVLVDTLHLFRNGDVYDKEFTRELFRTFLKAVYLYDDDRLKIVFGFTDVTPEEVEIALESADFGEEECSFLDRESPPKKHCTSLEVRCFSFC

SEQ ID NO: 3801 - protein, 525 aa, Unknown
  Description of Unknown: Integrase B3802 sequence
  PTHR30461:SF3,cd00338,SM00857,G3DSA:1.10.10.2600,IPR036162, PF13408,PS51737,IPR025827,G3DSA:3.40.50.1390,IPR006119, IPR038109,PF07508,IPR011109,SSF53041,PTHR30461, PS51736,Coil,PF00239
MSSVDKIAVIYARYSSHGQTEQSIEGQIAAAQKYAEQHGYTIIHIYADRAMTGRNDDREQFQKMLSDTAMHQFGVILLWKIDRFGRNREEIAFNRYRCKKNGVRVERVAEDVPDGPEGVILDSVLEGMAEYYSLQLAQNVRRGQRESAKKSMSIGGNKMLGYVVNPETKRYESDPKTASYVTEIFKRYANGETISEIVAWLNAQGIRTTRGSEFTVNSLHRLLKNEKYTGVYIFHDIRNEGGMPALTDRATFDKVQEMLKVNRRAPVRVWSKTEYLLTDKLFCGHCGAIMVGESGHGRNGTKHSYYTCLNRKKKKSCDKKPVRQDVIEPLVLRAIGKLLENPATLENIADQVWAAYERSDTSGDTIKALDKQIADVDRALSNVMKAIEMGIINEMTKARMDELTDQKQALSVARAEAGLAGGFKLTRDMILFFLHDMAATNMTDCDCQKRLIKTFVNAIYLYDDHFDIAFNYTSNGKMVVKMQEINDTTSGEVFGRCAQSPAKSTAVVIQMYRKTAVLFVCGSIR

SEQ ID NO: 3802 - protein, 525 aa, Unknown
  Description of Unknown: Integrase B3803 sequence
  PTHR30461:SF3,SM00857,G3DSA:1.10.10.2600,IPR036162,PF13408, IPR025827,PS51737,G3DSA:3.40.50.1390,IPR006119,IPR038109, PF07508,IPR011109,SSF53041,PTHR30461,Coil, PS51736,cd00338,PF00239
MPEALNAVIYARYSSDRQTEQSIEGQLRECYAFAKANDIAVIDTYIDRAISGKTDNRPAFQKMIEDSAKRQFQAVIVYRLDRFTRNRYDSAIYKARLKKNGVKVLSAMENLNGSPESIIMESLLEGMAEYYSVELSQKITRGMRENALKGKALGGQRVLGYKVNSDCYFEIDETTAPVVVDIFKLYSSGKTVKEICDILNARGVKTARGGAFNKNSLHTILTNKKYIGIYKTKYGEIVGGIPAIIDKELFEMVALRMEQNKKAPARAKAEINYLLSTKLFCGKCRSAMVGESGTSKTGKKYYYYACVKKKREKACDKSNVKKDWIEDLVIQRTVTDILKDDVIEKIADRLVELQKAEAAESGTMLYLQNSLAEIQVSIKNIMTAIEKGIITESTKTRLTELEDEKRNVEIEIAKESIARRIISREQIIYWISSFKDGNITSEKYRQQLIDTFVHAVFVYDDKIVITYNYSGENNTATISDLDLSSPPVLLESKPSWARVSFCPFLLDLAFFCSFLFSFTRILYPY

SEQ ID NO: 3803 - protein, 525 aa, Unknown
  Description of Unknown: Integrase B3804 sequence
  PTHR30461:SF3,cd00338,SM00857,G3DSA:1.10.10.2600,IPR036162, PF13408,IPR025827,G3DSA:3.40.50.1390,PS51737,IPR006119, IPR038109,PF07508,IPR011109,SSF53041,PTHR30461, PS51736,Coil,PF00239
MSSVDKTAVIYARYSSHGQTEQSIDGQIAAAQKYAEGKGYTIIHIYADRAMTGRNDDREQFQKMLSDTATHQFGVILLWKIDRFGRNREEIAFNRYRCKKNGVRVERVAEDVPDGPEGVILDSVLEGMAEYYSLQLAQNVRRGQRESAKKSQTVGGCNIIGYKVNPDTKRYEVDPKTAPFVTEVFKRYANGETISEIVAWLNVQGVRATRGGEFTVNSLHRLLKNEKYTGVYIFHDIRNEGGMPALTDRATFDKVQEMLKVNRRAPARVWSKTEYLLTDKLFCGHCGAMMVGESGHGRNGTKHSYYTCWNRKKKKSCSKKPVRQDVIEPMVLRVISKMLSDEATLEYIADQVWAVYERSDTSGDTIKALDKQIADVDRALSNVMKAIEMGIINEMTKARMDELTDQKQALSVARAEAGLAGGFKLTRDMILFFLHDMAATNMTDHDCQKRLIKTFVNAIYLYDDHFDIAFNYTSNGKMVVKMQEINDTTSGEVFGRCAQSPAKSAAVVIQMYRKTAVLFVCGSIR

SEQ ID NO: 3804 - protein, 525 aa, Unknown
  Description of Unknown: Integrase B3805 sequence
  SM00857,G3DSA:1.10.10.2600,IPR036162,PF13408,PS51737, IPR025827,G3DSA:3.40.50.1390,IPR006119,IPR038109,PF07508, IPR011109,SSF53041,PTHR30461,Coil,PS51736, cd00338,PF00239
MAKNRAAIYARFSSHNQRSESIEIQVENSREYCEREGLQVVREYCDYAQTGRNVNRAEFQRMMNDAKLGLFDYVVIYKVTRIMRNRDEMALARIMLRKAGVEILYAGEEIASGSSGVLQLGMLEVLAEWESAIDSERIRDGIQKNAARCLANGHALYGWDIVDGRYSVNEREASLMRKMKNMLFSGRSVADIVRALEGEKTRNGKPFNQDKVTKLLRRVQNGGTYSYAGHVVYGGMPGLWPQVEQDMIESILNDRHRPRRKVDSAKEFPLSGKLYCSKCGMPMAGMSGTSKTGRAYHYYRCRKCRRTVRRDLIEDAVVDMTLQAVAREDVRKRIAQGMALYQSEQEETKPESYYLKKELRRIDAAFERIWQAIEDGIAPPGGKERTDELKRRKSEIEAQLRIAERGESLTFGVDELMLWLDEIATELTPLDILNKFVRFAEIDSKNNRVRVYFAFDKHGDGFTPNDVDKGEHLYEERCSPNSTLVELMRKTANSTSTANRAAIQLDTCIVRVSKNWFVVVGTCQK

SEQ ID NO: 3805 - protein, 525 aa, Unknown
  Description of Unknown: Integrase B3806 sequence
  PTHR30461:SF3,SM00857,G3DSA:1.10.10.2600,IPR036162,PF13408, IPR025827,PS51737,G3DSA:3.40.50.1390,IPR006119,IPR038109, PF07508,IPR011109,SSF53041,PTHR30461,Coil, PS51736,cd00338,PF00239
MVQERLRAVFYARVSTEEEKQLNALEKQIQENRDVISKNGWILVGEYIDEGKSGTTTKRRSDYKRLLADMTEDKFDIVVCKDQERLQRNTLDWYLFVDNLVKNSLKLFMYLDNKFFTPSEDALITGIKAIIAEEYSRNLSKKLNNANRRRVERALAGEEIAAMGNGKSLAFKIINGKWVKDEKEAELGKKIFELYLQWNSLRKVRDWVNENGYRNSVGKPFTTESIGRILKNEKAKGIIVMGHHHHDFDKKKIVRMPEEQWVRIPAPELAYVSEEMFDEVQRRLKAKTGKKRGVNAYSNPLSSKLYCGKCGGKLWKHNSNGYVNWHCSSKMAKGDIKCTGVSTTSVKVRKIYSEISKNLIVNKSAVKSSMLEWLHKLKASLQIEDKSEAAQKAIEQLERKKNKLTEAYLDEIISKEDYKAKYSALEDQIREQQKLLIPVEENEDIKDIEAVIENIDKEIDTYIASSQFEDSKVDYLIEHTKKITVIDKEHYVIDLDLLAGVILIGKDFLLYVHNTMSFSNGRIYI

SEQ ID NO: 3806 - protein, 525 aa, Unknown
  Description of Unknown: Integrase B3807 sequence
  SM00857,G3DSA:1.10.10.2600,IPR036162,PF13408,IPR025827, PS51737,G3DSA:3.40.50.1390,IPR006119,IPR038109,PF07508, IPR011109,SSF53041,PTHR30461,Coil,PS51736, cd00338,PF00239
MAKNRAAIYARFSSHNQRSESIEIQVENSREYCEREGLQVVREYCDYAQTGRNVNRAEFQRMMNDAKLGLFDYVVIYKVTRIMRNRDEMALARIMLRKAGVEILYAGEEIASGSSGVLQLGMLEVLAEWESAIDSERIRDGIQKNAARCLANGHALYGWDIVDGRYSVNEREASLMRKMKNMLFSGRSVADIVRALEGEKTRNGKPFNQDKVTKLLRRVQNGGTYSYAGHVVDGGMPGLWPQVEQDMIESILNDRHRPRRKVDSAKEFPLSGKLYCSKCGMPMAGMSGTSKTGRAYHYYRCRKCRRTVRRDLIEDAVVDMTLQAVAREDVRKRIAQGMALYQSEQEETKPESYYLKKELRRIDAAFERIWQAIEDGIAPPGGKERTDELKRRKSEIEAQLRIAERGESMSFGVDELMLWLDEIATELTPLDILNKFVRFAEIDGKSNRIRVYFAFDKHGDGFSPNSADKGEHLYEERCSPNSTLVELMRKTANSTSTANRAAIQLDTCIVRVSKNWFVVVGTCQK

SEQ ID NO: 3807 - protein, 525 aa, Unknown
  Description of Unknown: Integrase B3808 sequence
  cd00338,SM00857,G3DSA:1.10.10.2600,PS51736,PF13408, IPR025827,PS51737,IPR036162,G3DSA:3.40.50.1390,IPR006119, IPR038109,PF07508,IPR011109,SSF53041,PTHR30461, mobidb-lite,Coil,PF00239
MKSKNKPYVRKAVAYARFSSNNQREESIDAQLRAIKDYCENNDIKLVAIYTDEAQSATTDNRDDFRTMIDDILKGKHDIDGVLVHKFNRFARNKYDSALYKKRLRDIGIKVVSVTQPIDDSPEGRILESLIEAMDEYYSENLALEVKKGMLENALKGKHTGGGKLLGLSVDDEGYYYPDENAPIIYRIFKEYADGVPKTQIVERLNREGYRNQYGRKFNTRTITDLLQNEKYIGNFIYNHTQSQVIRLEGIIKNPIVDEDLWERVQKLRKDANKPKHRKRKYLMTGKLRCGVCGFTYCGSGAKKRNKNGDMSAYYKCQGKIKNKNGCTNPSLNKDYYEKLVIDTITKSVLTDNAIDEIAVSVTTQLEKERKKPVIPTAKLRNQLDKVKDKQARLMELYLDGGMERKVLDEKNNALKEERKHIEEQIERNLYLEQSNILDVQDIKNMILEFREELKNNPDFDFAQVVFNTFVDSIVVYPDTLEVNLRVDFSTLGGDKRKNRGASHPITPLSINKSVKRKTHQQPTN

SEQ ID NO: 3808 - protein, 525 aa, Unknown
  Description of Unknown: Integrase B3809 sequence
  PTHR30461:SF3,SM00857,G3DSA:1.10.10.2600,IPR036162,PS51736, PS51737,PF13408,IPR025827,G3DSA:3.40.50.1390,IPR006119, IPR038109,PF07508,SSF53041,IPR011109,PTHR30461, mobidb-lite,cd00338,PF00239
MARSAKKIEYAPAEQIGVIYARYSSHNQKEESIEQQIAECTEFAEKNGIRIIGIYADKAVSGRSDRRPNFQRMMRDAEKRHFQIVVAYKSNRIARNMLNALQYEAKLDSFGIKTLYAKEEFGNTAAGRFALRTMMNVNQFYSENMGEDIKRGMVDNATECKVNGMLPLGYVKGEDGKYAIAADEAAVVREIYDSVLKDIPLAEIARSLNQRGIRTKLGRDWNKNSFHILLKNDNYIGVYRHSGVVVEDGIPPILDKEVFEAVQEKLTNKKKTAGRRSANGEYLLTGKLFCGYCGSYMIGVSGTGENGTVHNYYQCQKRHAEGRCEKKNVRRDFIEKLIARLTQDYILQDDTIEWIADSTMSFQAMARRESGVAQLERDLADNRKVAKNIMAAIEQGIITETTKARLLEVEGTIHDLERSLSIAKAASQPIERERVVFSLEQMREGNVGSKEHQKKLIDTFVKSVTLWDDRIQIDYYHTPGKHKFSYSLEELTSKAENESNASDVRTDSLELHHQVAPKKMPLRKA

SEQ ID NO: 3809 - protein, 525 aa, Unknown
  Description of Unknown: Integrase B3810 sequence
  SM00857,G3DSA:1.10.10.2600,IPR036162,PF13408,PS51737, G3DSA:3.40.50.1390,IPR025827,IPR006119,IPR038109,PF07508, IPR011109,SSF53041,PTHR30461,Coil,PS51736, cd00338,PF00239
MAKPEVSELAVVYARYSSHSQGEQSIEGQLSNARDYAAAHGYTIVHEYVDRAKSGRTDNRAEFQQMLKDAAKRQFSVIILWKVDRFGRNREEIAINKMKCRKNGVRVEYVAETIPDSPEGVILESVLEGFAEYYSLQLSQNIRRGRAESAEKCQSLGGNRPLGYKTGPDKKFVIDENTAPTVKMIFTMYADGKTVTEIVDKLNEMGLRTLRGGPFTKNSLHSILKNKKYIGVYEYQGREIKDGVPRIIEDDVFNKVQEMLKINKRAPAKTWSRADYILTDKLFCGKCGALMFGESGTSKTGVKHNYYICSNKKRFRSCDKKAVRQADIEDAVLNATHELLQDDELLDYIVDRTWEYYLAQDNSQEELRNLQRQLAQTDTAISNLIRAIEAGILTEETKKRMDELTQQKADLKASIADREIARGFHLQKSHIAFYLRSLRDADWSDKETQKRLIQTFVNAVFVYDDHITLTYNFSGDKSTITLRDMQRFEDGEEFGCRASRSTKTHRYELFWFRNVFGLTRKLPQR

SEQ ID NO: 3810 - protein, 525 aa, Unknown
  Description of Unknown: Integrase B3811 sequence
  cd03768,PTHR30461:SF3,SM00857,G3DSA:1.10.10.2600,IPR036162, PF13408,IPR025827,G3DSA:3.40.50.1390,PS51737,IPR006119, IPR038109,PF07508,IPR011109,SSF53041,PTHR30461, PS51736,Coil,PF00239
MKKVAIYSRKSKFTGKGESIENQILKCKQFIQFKFDIDTKNTEIFIDEGFSGKNENRPRYQDMIKKVKNKEIDHIIIYQLNRLGRNARDIHNTMQMCEDLGCVIYSATEGFDSSTSFGRALIGILASLAQLEREQLAERVKDNMYTLAKMGRWLGGQSPLGFDGTREYYIDESGKERSVTRLKANNEELKIVKLIYEKYLEEKSISQVSKWTLTNNFKGKNGGNIDKSAINVILKNPVYVKSNTDVFKFLENNGYEVYGEANGNGLLRYGKNNKDNSTGIIATGNHKGIIDSSNWLKIQEILQENTEKAPALGKSKACLLTGLLKCSCGSNMQMRYGPKRKDGTRPYYYVCTMKINSGGTRCNSKNLNGQLFEEKLINHFKKYSEERLIKQLESTLNASKNLEKNINIESIDKDIESAEKSVKSLLNNLKQTTDTNIVNIIFSEISELQNTIKDLKYKKDNLLEDQSEIVLSQSEIISMINTFNDFISLYDTLSIDEKQKRLKTLFKEILYDGNKIHVKFNLKKN

SEQ ID NO: 3811 - protein, 525 aa, Unknown
  Description of Unknown: Integrase B3812 sequence
  PTHR30461:SF3,cd00338,SM00857,G3DSA:1.10.10.2600,IPR036162, PF13408,PS51737,G3DSA:3.40.50.1390,IPR025827,IPR006119, IPR038109,PF07508,IPR011109,SSF53041,PTHR30461, PS51736,Coil,PF00239
MGRKVTVIPPTISLQTHLPTTQKVKRKVAGYARVSTDFEEQLTSYEAQVDYYTKYIQEREDWEFVKVYTDEGISATSTVHRDGFNQMVADALDGKIDLIVTKSVSRFARNTVDSLTTVRKLKEKGVEVFFEKEDIYTLDSKGELLITIMSSLAQEESRSISENVTWGQRKRFADGKVSLPYKHFLGYRKGADGLPEIVPEEAEIVRGIYRWFMEGMTPYKIACILIEKGIPTPSGKEQWHLSTVKSILTNEKYKGSALLQKKFTVDFLTKKTKVNEGEVPQYYVEESHPAIIPPEEFELVQAEMARRKELGKRYHSGSIFTAKIVCGECGGFYGPKVWHSNSRYRRVIWRCNKKYTNDCYCKTPHIDEDTIKQGFLKAYNQLLTDKGSVLSLCEMLLRAFSDCSDLDTKMSVLDDEEKQITKNIREMVVINSRTVQKQPEYTLEYQSYEREYEALKAKYQKLQAEKLDRINKTTVIQDFMEQIKKRKEPIKVFSSDVWLTAIETVTIGKKGELQFRFKNGTEITV

SEQ ID NO: 3812 - protein, 525 aa, Unknown
  Description of Unknown: Integrase B3813 sequence
  PTHR30461:SF3,SM00857,G3DSA:1.10.10.2600,IPR036162,PF13408, IPR025827,G3DSA:3.40.50.1390,PS51737,IPR006119,IPR038109, PF07508,SSF53041,IPR011109,PTHR30461,cd00338, PF00239
MPTSKNTARKCAAGGSSDNSCGVEPLRAVIYARYSSSGQREESIEGQLRDCYEFAKKHGIIVIGEYIDKAMTGRVDRRPDFQRMMKDSEKGRFNCVLLWKMDRFARNRYDSAMYKYKLKKNGIRIFYAKETIPDGPEGIILESVMEGYAEYYSENLAQNVKRGNYDSALELKTLGKTCLGLKTGPDGRYMIDQAEAAIVRRIFEEYAEGERAKDIYERLNSEGYRTSRGGKFNKNSLRRILSNKKYIGVYEYEDIYVENGIPAIITDRDLFERVQKMLKINHDAPARGKAQNFLLTTKLFCGFCGSPMIGDGGTSHTGKAYAYYSCTKRKRGRSCKKESVPKDWIEDLVVGELVKIVHNDELIEQIADRVMEYQKREKDQSGLHALEIRQKENEKAISNMLAAIEAGIITPSTKTRLMELEADRADIEKGIAHELLAEPEFERDQIIYFLERFRSGDINDEAYRIMLVDTFLNSVYLYDDDHLVLVMNYSGENCKVDLKLVEGAVSGDGCKGSAFAPSSALKAPR

SEQ ID NO: 3813 - protein, 525 aa, Unknown
  Description of Unknown: Integrase B3814 sequence
  PTHR30461:SF3,SM00857,G3DSA:1.10.10.2600,IPR036162,G3DSA:3.40. 50.1390,IPR006119,IPR038109,SSF53041,PTHR30461,Coil, PS51736,cd00338,PF00239
MSKKKSKEKVVEFSKLTNKVAAVWTRVSTERQADTNGSLESQRRICTEYAESHAIRIKKYYGGTNESAKVEGKLYREMIAEVARDKEINIILVYSFDRFSRAGYEAMMTKAYLKAKGIYVVSATQATDPDSAAGGFMEDVIFLFNQFENNLRKDKCITGMVECLRNGNWYSKPPLGYDKLKVGREHVLTVNEKGKILRNAFVWKATEGIGDIEIVQRLKGLGLVIDRKHLNKILHNPFYCGFIQHSLLGDEVIKGNQEILIDEATFNKVNSISNAGYEHKEITEPFPLKRHIICSDCGGYLTGYTVKARGRDYYKCNKKGCKSNHSTEKLHQKYINLLNGYNIPDEFIPILTDVLRKVFEEYNQSKGETKKVLLKRKTECENRINAVKVRFGLGEINSEIYTATMSELNSRLAEIRRDLEDAGKNLSNMMNYINQTIEISCKLGSLWRDSDFSNRQKIQNLVYPGGIYFDKKNDDYRTENENEVFRIFRRFTAVCKGGKEKATSNFHCLSPSVGMRRAIDTFCFH

SEQ ID NO: 3814 - protein, 525 aa, Unknown
  Description of Unknown: Integrase B3815 sequence
  PTHR30461:SF3,SM00857,IPR036162,PF13408, IPR025827,G3DSA:3.40.50.1390,IPR006119,PF07508, IPR011109,SSF53041,PTHR30461,Coil, PS51736,cd00338,PF00239
MKRIGIYGRKSVFSDKSESIEHQFTLGKEYAYANYDNPEIIYYKDEGESGSYLERPDFQILLNDVINDNLDIVICYKLDRISRDVADFGAVYKLFMAHNTEIIPLRDNIVINENMSPIEKAMMYINTVFSQVERENTIIRVTDNMIELAKDGYWTGGRAPLGFSSKEIIVGGKKHHILSHNPTEIEFYTMVADTFLNGFTLSGLETYFRKNNVKTLRNAYLSSTQIWTILKSPFAAPADEATYDYFSSLGCKMVHDRSKYDGSHGLLVYGRTSGGRKRKHVTNPPDKWLVSIGLHTPIITSDKWLSIQKCFGNNTFCKTRKYKVGILNDILRCSCGSYMKVKHKYDKQYNVHYYHYRCLQRERRGSEYCASQMISVETLDNEVIEILKGIKLDKTLIDNYTTPASFFPLFRKPETINREIENEGKKIQNLTMSLAEASGSSAAKYIIKDIESHDKRIDELKEELKKSRLAMQNVKELQINKEDKYNAVCKIVDCIETATYDEINALLKETLTECVYDGEVLHIKL

SEQ ID NO: 3815 - protein, 525 aa, Unknown
  Description of Unknown: Integrase B3816 sequence
  PTHR30461:SF3,SM00857,G3DSA:1.10.10.2600,IPR036162,PF13408, IPR025827,PS51737,G3DSA:3.40.50.1390,IPR006119,IPR038109, PF07508,IPR011109,SSF53041,PTHR30461,Coil, PS51736,cd00338,PF00239
MNAVIYARFSSHSQREQSIEGQLRDCYEYAKRYDINIVGEYIDRAISGMTDDRPDFQRMIADAPKKQFERIIVWKLDRFARNRYDSALYKHKLKQYGIRVISAMENVGEGDESILLEALLEASAEYYSLDLKKKILRGQRETIAKGRWCGGPIPYGYKAVDGKLVADEKTAPIIRYVFEQYAQGVPMKEIIDELKRRGVRSSRGGELTYTTFSRALTNPVYIGNFMYKGELVPGVADALIDEDTYNKVQIIVKANAHAPAANKAKVEYLLQGKAFCGHCGSHMVGESGKSRNGDVYYYYSCAARKKAHKCRKKNEKKDFIEWYVVEQTLNYVLTPTRMRDIAKAVVAEYDKEFSGSKVQEYEKAIKQYERELDKLVDALVDAPKVAHKRIYEKMETLETQKASMENELVKLRIASEIRFTEEEVRAWLCRFCTGDLFDPEFRRNIIDTFINCIYLYDDRIIIFYNIKGGKQVSFVDLAESLDSESESSGSDLNANAPPPLDSNFDTKLESSFLFILADSAPKKAC

SEQ ID NO: 3816 - protein, 525 aa, Unknown
  Description of Unknown: Integrase B3817 sequence
  PTHR30461:SF3,IPR036162,PS51737,IPR011109,PTHR30461, PF00239,G3DSA:1.10.10.2600,IPR006119,SSF53041,cd00338, SM00857,IPR025827,IPR038109,mobidb-lite,PS51736, PF13408,G3DSA:3.40.50.1390,PF07508,Coil
MRKKSNLNAATRAVIYARYSSANQRDCSIEQQVAKCRELAARLGLTVIDVYEDRAISGKTDRRPNFQRMMKDADLRQFDVVLAWKSNRMGRNMLQAMTNEERLRDNAIRTIYAEEDFDDTAAGRFALRNMMNVNQFYSENMAEDITRGLMDNASKCLSNGSLPLGYKPGDDRHVVLDETEASIVQEIFTRVSCYEPFIDIARDLNRRGIKTKKGAEWGRSSFHTICRNERYRGIYIYRDVRVEGGMPRIISDELFYKVQEVLKVKKNPQGRRKRSGYEEYLLTGKLYCGHCGSPMTGIAGTSKTGAMHYYYTCQKRRTDHSCDKKAVRRDQIERAVGVAIQQQLLTDENIQMMADKLMEYNARTETKHRLQGLQDQLNANKTATANILKAIEMGIITDATKARLLELEKEQAQLLVKIDTAKAEMVPISRNDFVKLLYIYKEGEPTDKKYLAALFDNFLVRVDLYDDHLKITFDPTGGRQPIDMPIGAEDSPESPGDSSESSDFEASSQDAEKFVLALHNCTKSL

SEQ ID NO: 3817 - protein, 525 aa, Unknown
  Description of Unknown: Integrase B3818 sequence
  PTHR30461:SF3,SM00857,G3DSA:1.10.10.2600,IPR036162,PF13408, PS51737,G3DSA:3.40.50.1390,IPR025827,IPR006119,IPR038109, PF07508,IPR011109,SSF53041,PTHR30461,Coil, PS51736,cd00338,PF00239
MDTLADVVVYARYSSAGQNDQSIEGQVKTCREFAAQRGFRVVQEYADRAISGRHAETRPAFQQMIADAKKKTFQYILVWKLDRFARNRYDSAIYKKELRKYGVRVLSVTEGIDEGNESILLEAILEAMAEEYSRQLSQNVRRGMRQNAEKGLSLGGGTPYGYRLQGKRYVIVDREAEVVRFIHEAYAEGKTSREIINECKSRGYHTRNGADFTMNAIARMIANDKYAGAFLFKDELVVGDLYPPIVSPELKERAKKRLALKARAPGHEKAKVEYILHGKLFCGHCGAPMVGESGKSKSGTVYNYYACAEKKKRHGCKKKNERKDFLEWYIAEQITEYVLTDSRIEEIAGAVVAEYKKSFDASGIKRLEKKIKDADAELDKLVDALIKTSADAAVKRINARIEEVEQYRAQLEDDLSSLRIASRVEIKKDDVAKWLRSMRRGDLMDDEYRKKIVEIFVNAVYLYDDRVAIFFNVKDCKQVSYIDMIDATGWAACSDLSSNALPITDLSEHGKLIILNGAIGFLLRR

SEQ ID NO: 3818 - protein, 525 aa, Unknown
  Description of Unknown: Integrase B3819 sequence
  PTHR30461:SF3,cd00338,SM00857,G3DSA:1.10.10.2600,IPR036162, PF13408,IPR025827,G3DSA:3.40.50.1390,PS51737,IPR006119, IPR038109,PF07508,SSF53041,IPR011109,PTHR30461, PS51736,Coil,PF00239
MSSVDKTAVIYARYSSHGQTEQSIDGQIAAAQKYAEGKGYTIIHIYADRAMTGRNDDREQFQKMLSDTATHQFGVILLWKIDRFGRNREEIAFNRYRCKKNGVRVERVAEDVPDGPEGVILDSVLEGMAEYYSLQLAQNVRRGQRESAKKSQTVGGCNIIGYKVNPDTKRYEVDPKTAPFVTEVFKRYANGETISEIVAWLNVQGVRATRGGEFTVNSLHRLLKNEKYTGVYIFHDIRNEGGMPALTDRATFDKVQEMLKVNRRAPARVWSKTEYLLTDKLFCGHCGAMMVGESGHGRNGTKHSYYTCWNRKKKKSCSKKPVRQDVIEPMVLRVISKMLSDEATLEYIADQVWAVYERSDTSGDTIKALDKQIADVDRALSNVMKAIEMGIINEMTKARMDELTDQKQALSVARAEAGLAGGFKLTRDMILFFLHDMAATNMTDHDCQKRLIKTFVNAIYLYDDHFDIAFNYTSNGKMVVKMQEINDTTSGEVFGRCAQSPAKSTAVVIQMYRKTAVLFVCGSIR

SEQ ID NO: 3819 - protein, 525 aa, Unknown
  Description of Unknown: Integrase B3820 sequence
  cd03768,PTHR30461:SF3,SM00857,IPR036162,PF13408, IPR025827,G3DSA:3.40.50.1390,IPR006119,PF07508,SSF53041, IPR011109,PTHR30461,PS51736,Coil,PF00239
MVRIASYLRKSVYSDKSDSIQAQYTLISDYCNSHYTDFELYRYEDEGFTGANTNRPAFQKLTSDISERKIDILICYKIDRVSRDVKDFSNFFSFLQENKVEFVSIKEQIDTSTPLGRAMMYICSVFAQMERETIAQRVKDSLSELSKSGKWAGGRAPLGYRRERVVEMNGKNHTVLVPDPDGIQLLNLISNKFLEQNMTIVKLDRYCRKNNIKTATGSYFSSSQLWNVLKNPTYCTADSTAYDYFESLGCTMAVDRDRFDGSHAIMPYNRTRGGKTKKHVVNQVNEWIISVGLHEPLFTSEKYISIQSKFGNNVIDKTRKHKVGILHGIVKCSCGWNMRAKHKVLKSTGKTYDNYFCSQRENRGKDACSMPYVRVETLDSAVIDLLKQIKLDKKMIDNYCFDDTSISIHRRNRADVQRDIGRIENKILNLTNTLSNTSGSTAAKYIVSEIEKLDRELSGYKYELMEIGADEKKHAHFQHTKEDKYKMICDIVDNLDRLEYDEIRTLLKELFKECVWDGAVLHVKL

SEQ ID NO: 3820 - protein, 525 aa, Unknown
  Description of Unknown: Integrase B3821 sequence
  PTHR30461:SF3,SM00857,G3DSA:1.10.10.2600,IPR036162,PF13408, IPR025827,G3DSA:3.40.50.1390,PS51737,IPR006119,IPR038109, PF07508,IPR011109,SSF53041,PTHR30461, PS51736,cd00338,PF00239
MQTAENRSKYHQLRVAAYCRVSTEQEEQQNSYQVQIAYYTDLINRKKEWTLAGIFADEGISGTQTKKRTEFNRMIRMCRNKKIDLVITKSISRFARNTVDCLEYVRQLKDLGIGVIFEKENINTLTMTSEFMIALYGSFAQAESESISKNVSWGKEKAFREGKVQFQYKYLLGYKKGADGKPEIVPDEAETVRLIFKMYLDGYTLLNIADTLMTQGRRTATGKNIWSKGEVQRILKNEKYVGDALLQKSFTVDCITHKVVKNNGERPMYLVTDHHTPIVDRDTFNRVQQELARRTSKRKISDKTKTEQGKYSGKYALSELLICGHCGTPYRRRIWSRNGKKQVVWRCISRLEHGKKYCPDSPTIKEEQLHKAIIRAINNYYSCRNDIVRILKANIGTVLECQGQEDILAAEKRLREIDQARNDLVGLIASGGCDEDKLDSEFAKLYSEEQSLSERLEMLKSQNKTSQETQAKLDKIMDMIEHEKFELETFDNVLIRKLIECIKVLSKTEILVIFKGGYEVRAEIE

SEQ ID NO: 3821 - protein, 525 aa, Unknown
  Description of Unknown: Integrase B3822 sequence
  SM00857,G3DSA:1.10.10.2600,IPR036162,PF13408,IPR025827, G3DSA:3.40.50.1390,PS51737,IPR006119,IPR038109,PF07508, IPR011109,SSF53041,PTHR30461,Coil,PS51736, cd00338,PF00239
MAKPEVSELAVVYARYSSHSQGEQSIEGQLSNARDYAAAHGYTIVHEYVDRAKSGRTDNRAEFQQMLKDTAKRQFSVIILWKVDRFGRNREEIAINKMKCRKNGVRVEYVAETIPDSPEGVILESVLEGFAEYYSLQLSQNIRRGRAESAEKCQSLGGNRPLGYKTGPDKKFVIDENTAPTVKMIFTMYADGKTVTEIVDKLNEMGLRTLRGGPFTKNSLHSILKNKKYIGVYEYQGREIKDGVPRIIEDDVFNKVQEMLKINKRAPAKTWSRADYILTDKLFCGKCGALMFGESGTSKTGVKHNYYICSNKKRFRSCDKKAVRQADIEDTVLNATHELLQDDELLDYIVDRTWEYYLAQDNSQEELRNLQRQLAQTDTAISNLIRAIEAGILTEETKKRMDELTQQKADLKASIADREIARGFHLQKSHIAFYLRSLRDADWSDKEAQKRLIQTFVNAVFVYDDHITLTYNFSGDKSTITLRDMQRFEDGEEFGCRASRSTKTHRYELFWFRNVFGLTRKLPQR

SEQ ID NO: 3822 - protein, 525 aa, Unknown
  Description of Unknown: Integrase B3823 sequence
  PTHR30461:SF3,SM00857,G3DSA:1.10.10.2600,IPR036162,PS51737, G3DSA:3.40.50.1390,IPR006119,IPR038109,PF07508,IPR011109, SSF53041,PTHR30461,Coil,PS51736,cd00338, PF00239
MWMLPQMSVDDIIMYLRKSRTDDPALTVQEVLSKHEQMLDDWVARNIPDDGRRIPEANRYREVVSGETIESRPCVQEVLRRVESPRVKAVLVVEPQRLSRGDLEDIGRLVKLLRYSNTIVITLQYTYDLRDERDRDMFERELKRGNEFLEYQKRIMGNGRLLSVQNGNFIGQKPPYGYNKVVIKEGKRKCHTLEPDPERAPIVKMVFEMYAGGTSASQIAKTLRTMGVTTADGGKWVTSSVKQMLTNDHYIGMVHWNKRKTVKVVEDGEVVATRPRNSDFLVYPGKHQPIIEKELWDAVQAIKGNIPPIKNRAKYANPFAGLAVCQCGGKMVRQQYVRDGVERCAPRLVCPNQAECHTASCSLPEFTEAVIEALEKGIKNFELMMADAPEDDATQQERLIAQLEKRLAELDRLELAQWDKYTQEAMPKHVFDALNKKVVQEKEETLQALKTAMETVPIRVDYEKKRETFAAAVRTLQDPNASVKEKNLLLKQCIERINYNRKPKESDNRRFGNPEPLELEFQFKV

SEQ ID NO: 3823 - protein, 525 aa, Unknown
  Description of Unknown: Integrase B3824 sequence
  PTHR30461:SF3,SM00857,G3DSA:1.10.10.2600,IPR036162,PF13408, IPR025827,G3DSA:3.40.50.1390,PS51737,IPR006119,IPR038109, PF07508,IPR011109,SSF53041,PTHR30461,Coil, PS51736,cd00338,PF00239
MAKVTVIPSTKVSTFSNAFNPVVKRKVAAYARVSTDSDEQFTSFEAQCNYYENYINSKPDWELVKVYADEGISGTNTKNRTQFKQMIEDALGGKIDLIITKSISRFARNTLDTINYTRKLKAKGVEVYFEKENLWTFDDKAEFLLAIMSSIAQEESRSISQNVTMGKRWQMKEGKVSFAYKTFLGYKKENGKIAIDEEQAVIVRLIYREFLVCGKTASAIANMLNSMQVLTPGGKTKWTKNTVTSILTNEKYKGDAVLQKTFIKDFLEHKAVKNQGELPQYFVENSHPAIIDKDMWEMVQAEIKRRKEIGTSYSSVNAFSSKLVCGDCGGFYGKKIWHSTKPWRKEIYRCNKKYSDAHDKCQTPFITEVEVKSKFIKAYNQVMVNKEQVINDANEVIKALTDISQIDNAISETESELEVITELVRKLVRENASHSQNQDDYAKKYNELEARYEKTKNKLDELNDEKQIRKGKLLELNSYLATFKEAGEILTDWDDNLWMTVLDKAIVNRDGTITFKFIVGIDITL

SEQ ID NO: 3824 - protein, 525 aa, Unknown
  Description of Unknown: Integrase B3825 sequence
  PTHR30461:SF3,SM00857,G3DSA:1.10.10.2600,IPR036162,PF13408, PS51737,G3DSA:3.40.50.1390,IPR025827,PS51736,IPR006119, IPR038109,PF07508,IPR011109,SSF53041,PTHR30461, mobidb-lite,cd00338,PF00239
MARSAKKIEYAPAEQIGVIYARYSSHNQKEESIEQQIAECTEFAEKNGIRIIGIYADKAVSGRSDRRPNFQRMMRDAEKRHFQIVVAYKSNRIARNMLNALQYEARLDLFGIKTLYAKEEFGNTAAGRFALRTMMNVNQFYSENMGEDIKRGMVDNANECKVNGMLPLGYVKSNEGKYAVAPDEAAVVREIFDSFLKDVPVAEIARSLNQRGIRTKLGREWNKNSFHIMLKNDNYIGVYRHSGVVVEDGIPPILEREVFAAVQEKLANKKKTAGRRSANGEYLLTGKLFCGYCGSYMIGVSGTGENGTVHHYYQCQKRHAESRCEKKNVRRDFIEKLIARLTQEYILQDDTIEWIADSTMSFQAMARRESGIAQLEHDLADKRKIAKNIMSAIEQGIITETTKARLLEVEAETRDLERSLSVAKAAAQPVERERVVFSLEQMREGNVGSKDHQKKLIDTFVKSVTLWDDRIQIDYYHTPGKHKFSYSLEELTSKAENESNASDVRTDSLELHHQAAPKKMPLRKA

SEQ ID NO: 3825 - protein, 524 aa, Unknown
  Description of Unknown: Integrase B3826 sequence
  SM00857,G3DSA:1.10.10.2600,IPR036162,PF13408,PS51737, G3DSA:3.40.50.1390,IPR025827,IPR006119,IPR038109,PF07508, IPR011109,SSF53041,PF00239,PTHR30461,PS51736, Coil,cd00338
MNESVCIYLRKSRADREAEAHGEGETLARHERILLDLAKKKEYIVGAIYREVVSGETIADRPVMQQLLHEVESGMWDGVLVVEVERLARGDTIDQGVVSRAFQYSDTKIITPTKIYDPNNEFDEEYFEFGLFMSRREYKTIKRRLNAGRISSIKEGKYCGNKPPYGYERVKLEKEKGYTLRPVPAQAEIVKMIYTWYAGDGCEQIGVAKIARKLNEMGIESALGGDWTPASIQGILTNPVYIGKIRWNGRKTVKTIQNGQVIKTRPRSKDTLICDGLHPAIISEDLFNSVQEIRKKNPPRPVSIANSIRNPLAGIVYCSKCGRAMVRRPYQKRRQEDTLMCPYTSCPTVSSKLSLVEKAVIDGIKEIVEEYKLNNDINASSKDIDCVITSKQNLIHEKENELESLNAQKAKQYDLLEQGIYTTEVFLERAKTISASIQSCSDTIEKLKEEIKHDENIIKQQSDFIPRCEELLDNYWSLDTESKNKMLKSLIEKVAYSKDTKNAYGKGNEIGFQLDIFPKIQKNN

SEQ ID NO: 3826 - protein, 524 aa, Unknown
  Description of Unknown: Integrase B3827 sequence
  SM00857,G3DSA:1.10.10.2600,IPR036162,PS51737,G3DSA:3.40.50.1390, IPR006119,IPR038109,PF07508,SSF53041,IPR011109, PTHR30461,Coil,PS51736,cd00338,PF00239
MNESVCIYLRKSRADREAEAHGEGETLARHERILLDLAKKKEYIVGAIYREVVSGETIADRPVMQQLLHEVESGMWDGVLVVEVERLARGDTIDQGVVSRAFQYSDTKIITPTKIYDPNNEFDEEYFEFGLFMSRREYKTIKRRLNAGRISSVKEGKYCGNKPPYGYERVKLEKEKGYTLRPVPTQAEIVKMIYTWYSGDGCEQIGVAKIARKLNEMGIESALGGDWTPASIQGILTNPVYIGKIRWNGRKTVKTIQNGQVIKTRPRSKDTLICNGLHPAVISEDLYNSVQEIRKKNPPRPVSIANSIRNPLAGIVYCSKCGRAMVRRPYQKRRQEDTLMCPYTSCPTVSSKLSLVEKSVIDGIREIVEEYKLNNNINASSNDIDCVITSKQNLIHEKENELESLNAQKAKQYDLLEQGIYTTEVFLERAKTISASIQSCSDTIEKLKEEIKHDKNIIKQQSDFIPRCEELLDNYWSLDTESKNKMLKSLIEKVAYSKDTKNAYGKGDEISFRLDIFPRIQKKS

SEQ ID NO: 3827 - protein, 524 aa, Unknown
  Description of Unknown: Integrase B3828 sequence
  cd00338,SM00857,G3DSA:1.10.10.2600,IPR036162, PF13408,PS51737,G3DSA:3.40.50.1390,IPR025827, IPR006119,IPR038109,PF07508,SSF53041, IPR011109,PTHR30461,PS51736,Coil,PF00239
MNESVCIYLRKSRADREAEAHGEGETLARHQRILLDFAKKKEYIVGAIYREVVSGETIADRPVMQQLLHEVESGMWDGVLVVEVERLARGDTIDQGVVSRAFQYSDTKIITPTKIYDPNNEFDEEYFEFGLFMSRREYKTIKRRLNNGRISSVKEGKYCGNKPPYGYERVKLEKEKGYTLRPVPAQAEIVNMIYTWYAGDGCEQIGVAKIVRKLNDMGIKSALGGDWTPASIQGILTNPVYIGKIRWNGRKTVKTIQNGQVVKTRPRSRNVLICEGLHPSIISDDLYNSVQEIRQKNPPRPISIKNTVRNPLAGIVYCSKCGRAMVRRPHQKRGQEDTLMCPYTSCPTVSSKLSLVEKAVLDGIKEIAEKYKLNNDINTPSNTINSGIISKQNLIREKESELESLNVQKVKQYDLLERGIYTTEVFLERSKTIARSIQSCSDIITKLREEIEHDENIKAQQSNFIPRCEELLNNYWDLNIESRNRMLKNLVEKVVYSKNIKNTYGKGNEINFELDIFPKIQKND

SEQ ID NO: 3828 - protein, 524 aa, Unknown
  Description of Unknown: Integrase B3829 sequence
  cd00338,SM00857,G3DSA:1.10.10.2600,IPR036162,PF13408, PS51737,G3DSA:3.40.50.1390,IPR025827,IPR006119,IPR038109, PF07508,IPR011109,SSF53041,PTHR30461,PS51736, Coil,PF00239
MNESVCIYLRKSRADREAEAHGEGETLARHERILLDLAKKKEYIVGAIYREVVSGETIADRPVMQQLLHEVESGMWDGVLVVEVERLARGDTIDQGVVSRAFQYSDTKIITPTKIYDPNNEFDEEYFEFGLFMSRREYKTIKRRLNAGRISSVKEGKYCGNKPPYGYERVKLEKEKGYTLRPIPAQSEIVKMIYTWYSGDGCEQIGVAKIARKLNEMGIESALGGDWTPASIQGILTNPVYIGKIRWNGRKTVKTIQNGQVIKTRPRSKDTLICDGLHPAIISEDLFNSVQEIRKKNPPRPVSIANSIRNPLAGIVYCSKCGRAMVRRPYQKRGQEDTLMCPYTSCPTVSSKLPLVEKAVIDGIREIVEEYKLNNDINISSKDIDCGITSKQNLIHEKENELKNLNSQKAKQYDLLEQGIYTTEVFLERAKTISASIQSCSDTIEKLKEEIKHDENIIKQRSDFIPRCEELLDNYWSLDTESKNKMLKSLIEKVVYSKDTKNAYGKGNEIGFQLDIFPKIQKNN

SEQ ID NO: 3829 - protein, 524 aa, Unknown
  Description of Unknown: Integrase B3830 sequence
  SM00857,G3DSA:1.10.10.2600,IPR036162,PS51737,G3DSA:3.40.50.1390, IPR006119,IPR038109,PF07508,SSF53041,IPR011109, PTHR30461,Coil,PS51736,cd00338,PF00239
MNESVCIYLRKSRADREAEAHGEGETLARHERILLDLAKKKEYIVGAIYREVVSGETIADRPVMQQLLHEVESGLWDGVLVVEIERLARGDTIDQGVVSRAFQYSDTKIITPTKIYDPNNEFDEEYFEFGLFMSRREYKTIKRRLNAGRISSVKEGKYCGNKPPYGYERVKLEKEKGYTLRPVPAQAEIVKMIYTWYAGDGCEQIGVAKIARKLNEMGIESALGGDWTPASIQGILTNPVYIGKIRWNGRKTVKTIQNGQVIKTRPRSKDTLICDGLHPAIISEDLFNSVQEIRKKNPPRPVSIANSIRNPLAGIVYCSKCGRAMVRRPYQKRGQEDTLMCPYTSCHTVSSKLSMVEKSVIDGIREIVEEYKLNNDINTSSKAIDLTIISKQNLIHEKENELESLNTQKAKQYDLLEQGIYTTEVFLERAKTISASIQSCSDTIEKLKEEIKHDENIIKQQSDFIPRCEELLDNYWSLDAESKNKMLKSLIEKVTYSKDTKNAYGKGDEISFQLDIFPKIQKNN

SEQ ID NO: 3830 - protein, 524 aa, Unknown
  Description of Unknown: Integrase B3831 sequence
  SM00857,G3DSA:1.10.10.2600,IPR036162,PF13408, IPR025827,G3DSA:3.40.50.1390,PS51737,IPR006119, IPR038109,PF07508,SSF53041,IPR011109, PTHR30461,Coil,PS51736,cd00338,PF00239
MNESVCIYLRKSRADREAEAHGEGETLARHERILLDLAKKKEYIVGAIYREVVSGETIADRPVMQQLLHEVESGLWDGVLVVEIERLARGDTIDQGVVSRAFQYSDTKIITPTKIYDPNNEFDEEYFEFGLFMSRREYKTIKRRLNAGRISSVKEGKYCGNKPPYGYERVKLEKEKGYTLRPVPTQAEIVKMIYTWYAGDGCEQIGVAKIARKLNEMGIESALCGDWTPASIQGILTNPVYIGKIRWNGRKTVKTIQNGQVIKTRPRSKDTLICEGLHPAIISEDLFNSVQEIRKKNPPRPVSIANSIRNPLAGIVYCSKCGRAMVRRPYQKRRQEDTLMCPYTSCPTVSSKLSLVEKAVIDGIKEIVEEYKLNNNINASSKDIDCVITSKQNLIHEKENELKSLNSQKAKQYDLLEQGIYTTEVFLERAKTIAASIQSCYDTIEKLKEEIKHDQNIIKQQSDFIPRCEELLDNYWSLDTESKNKMLKSLIEKVTYSKDTKNAYGKGNEIGFQLDIFPKIQKNN

SEQ ID NO: 3831 - protein, 524 aa, Unknown
  Description of Unknown: Integrase B3832 sequence
  SM00857,G3DSA:1.10.10.2600,IPR036162,PS51737,G3DSA:3.40.50.1390, IPR006119,IPR038109,PF07508,IPR011109,SSF53041, PTHR30461,Coil,PS51736,cd00338,PF00239
MNESVCIYLRKSRADREAEAHGEGETLARHERILLDLAKKKEYIVGAIYREVVSGETIADRPVMQQLLHEVESGMWDGVLVVEVERLARGDTIDQGVVSRAFQYSDTKIITPTKIYDPNNEFDEEYFEFGLFMSRREYKTIKRRLNAGRISSVKEGKYCGNKPPYGYERVKLEKEKGYTLQPVPTQAEIVKMIYTWYAGDGCEQIGVAKIARKLNEMGIESALGGDWTPASIQGILTNPVYIGKIRWNGRKTVKTIQNGQVIKARPRSKDTLICDGLHPAIILEDLYNSVQEIRKKNPPRPISIKNSIRNPLAGIVYCSKCGRAIVRRPYQKRGQEDTLMCPYTSCPTVSSKLSLVEKAVIDGIREIVEEYKLNNDINISSKAIDCGITSKQNLIHEKENELESLNSQKAKQYDLLEQGIYTTEVFLERAKTIAASIQSCSDTIEKLKEEIKHDANIIKQQSDFIPRCEELLDNYWSLDTESKNRMLKSLIEKVVYSKDTKNAYGKGDEISFRLDIFPRIQKKS

SEQ ID NO: 3832 - protein, 524 aa, Unknown
  Description of Unknown: Integrase B3833 sequence
  PTHR30461:SF3,SM00857,G3DSA:1.10.10.2600,IPR036162,PF13408, IPR025827,G3DSA:3.40.50.1390,PS51737,IPR006119,IPR038109, PF07508,SSF53041,IPR011109,PTHR30461, Coil,PS51736,cd00338,PF00239
MGKKQKTNGGDAVIYARYSSHNQRDVSIEQQVEACRKHAAELGLTVTATYEDRAISGKTDKRPSFQRMMRDAEQHKFAYVLAWKSNRIGRNMMQALVNESRLVDCGVKVFYAEEDFDDNAAGRFALRSMMNVNQFYIENMAEDVKRGLYDNAKKGLVNGSLPLGYKRGADGKPEIDEPKAAIVREIYTRVAAGELFASIAADLNARGIKTARGREWNKGSFHVLCHNDRYRGIYMYGDIRIPGGMPRIISDELFYDAQEAYGMKKDNRYGRARHGAENYLLTGKLYCGHCGGYMVGISGTSKTGEMHYYYACQKHRLEHTCEKKAIRRDVIENAVARAIMMYCLDDETIDFIVDSTIAYFKQKDHELHIEAMENELAAVQQAISNLMKAIEAGIITPTTRTRLLDLEEQQAKLSAKINTAKAERVEIDRDDLIAGLQLFRTGDIKNKKFLAKLFNTFLIAVYLYDDNRLKIVFSFTGNHNSVEIPLELDNDCPDSEIVSDETEVRMSHLECWKSWSNIPILQSG

SEQ ID NO: 3833 - protein, 524 aa, Unknown
  Description of Unknown: Integrase B3834 sequence
  PTHR30461:SF3,cd00338,SM00857,G3DSA:1.10.10.2600,IPR036162, PF13408,PS51737,G3DSA:3.40.50.1390,IPR025827,IPR006119, IPR038109,PF07508,IPR011109,SSF53041,PTHR30461, PS51736,Coil,PF00239
MAKVTIIPSKINPITHQHLDVKVKRRVAAYARVSTDDEMQLTSYEAQVDYYTKLIKANDEWEFVKVYADEGITGTSLKNRKEFNAMIKDALDDKIDLIITKSVSRFARNTVDALTTIRKLKEKRKEIYFEKENIYTLDSKGEVLVTIMSSLAQDESRNISENVTWGQRKRFSDGKYNLARKNFLGYKKDQDGNIIIDEKEAVVVRKIYRYFLDGMTPGGIAQSLMDEGVPTPGGKTKWIYSTIISILQNEKYKGDALLQKRFTVNFLEHKMKKNEGEVNQYYVKKGHPAIIEPVIWDRVQLEIKRRENSKRIYSAKDAFSSKLVCADCGSYFGKKIWHSNDPYRKVIWRCNHKYDGDKKCDTPTLEEDTIKNAFLLAYTNLCVDKDIIIETTKELVDSLCDFEELDQKIIKESEDLDIIADKVHKMVMENANTAQDQEEYQKRYDYLSGKYNEGKVKLNALQEERARRATQKEILELKINELEDAYVLEEWNESIFKMSVDEILVSKYELTFKFYIGEEIKIKL

SEQ ID NO: 3834 - protein, 524 aa, Unknown
  Description of Unknown: Integrase B3835 sequence
  SM00857,G3DSA:1.10.10.2600,IPR036162,PF13408,PS51737, G3DSA:3.40.50.1390,IPR025827,IPR006119,IPR038109,PF07508, IPR011109,SSF53041,PTHR30461,Coil,PS51736, cd00338,PF00239
MNESVCIYLRKSRADREAEAHGEGETLARHQRILLDLAKKKEYIVGAIYREVVSGETIADRPVMQQLLHEVESGMWDGVLVVEVERLARGDTIDQGVVSRAFQYSDTKIITPTKIYDPNNEFDEEYFEFGLFMSRREYKTIKRRLNAGRISSVKEGKYCGNKPPYGYERVKLEKEKGYTLRPVPDQAEIVKMIYTWYAGDGCEQIGVAKIARKLNEMGIESALGGDWTPASIQGILTNPVYIGKIRWNGRKTVKTIQDGQVIKTRPRSKDTLICDGLHPAIISEDLFNSVQEIRKKNPPRPVSIANSIRNPLAGIVYCSKCGRAMVRRPYQKHGQKDTLMCPYTSCPTVSSKLSLVEKSVIDGIREIVEEYKLNNDINISSKAIDSTIISKQNLINEKENELKSLNSQKAKQYDLLEQGIYTTEVFLERAKTIATSIKSCSDTIEKLKEEIKHDQNIIKQQSDFIPRCEELLDNYWSLDTESKNKMLKSLIEKVTYSKDTKNAYGKGNEIGFQLDIFPKIQKNN

SEQ ID NO: 3835 - protein, 524 aa, Unknown
  Description of Unknown: Integrase B3836 sequence
  SM00857,G3DSA:1.10.10.2600,IPR036162,PS51737,G3DSA:3.40.50.1390, IPR006119,IPR038109,PF07508,IPR011109,SSF53041, PTHR30461,Coil,PS51736,cd00338,PF00239
MNESVCIYLRKSRADREAEAHGEGETLARHERILLDLAKKKEYIVGAIYREVVSGETIADRPVMQQLLHEVESGMWDGVLVVEVERLARGDTIDQGVVSRAFQYSDTKIITPTKIYDPNNEFDEEYFEFGLFMSRREYKTIKRRLNAGRISSIKEGKYCGNKPPYGYERVKLEKEKGYTLRPVPAQAEIVKMIYTWYAGDGCEQIGVAKIARKLNEMGIESALGGDWTPASIQGILTNPVYIGKIRWNGRKTVKTIQNGQVIKTRPRSKDTLICDGLHPAIISEDLFNSVQEIRKKNPPRPVSIANSIRNPLAGIVYCSKCGRAMVRRPYQKRRQEDTLMCPYTSCPTVSSKLSLVEKSVIDGIREIVEEYKLNNDINASSKDIDCVITSKQNLIHEKENELESLNSQKAKQYDLLEQGIYTTEIFLERAKTISASIQSCSDTIEKLKEEIKHDENIIKQRSDFIPRCEELLDNYWSLDTESKNKMLKSLIEKVVYSKDTKNAYGKGNEIGFQLDIFPKIQKNN

SEQ ID NO: 3836 - protein, 524 aa, Unknown
  Description of Unknown: Integrase B3837 sequence
  PTHR30461:SF3,IPR036162,PS51737,IPR011109,PTHR30461, PF00239,G3DSA:1.10.10.2600,IPR006119,SSF53041,cd00338, SM00857,IPR025827,IPR038109,mobidb-lite, PS51736,PF13408,G3DSA:3.40.50.1390,PF07508,Coil
MKFKYPAMGTTKNAVIYARYSSHSQREESIEGQLRICHEYAKAEGLAIVGEYIDRAISGTTDARPDFQRMIDDAKKKQFSYVIVYRLDRFARNRYDSVLYKHELKQCGVKVVSATEGIGTGDESILLEALIEASAEYYSMELSRKIKRGRQDSAMKGNFLGGAVPLGYKVVDSKFIIDDETAPIVRYIFERYAAGIGKKQIIDELTAKGYMRRTGKPFTYRAFDSVLRNRKYTGEFTQTGITVEGGCPAIVDTEMFEKVQARLEINRRAPAKAKAKTEYLLSGKMFCGYCGEPMIGISGTGRHEKTFYYYSCVGRRGKSGCKKQHEKKDFIEWYVCEQTVQYMQDPERLSHVAKRIIEINDAEFDGGKVKELERAVENCDNDIRKLVDALTTIPDAGRAALYDKIERIGAAKADMEIDLAKVRVLSEVRYKQEDVEAWIRSMCRGDLMDFEFRRQLIDVFINSVYLFDDRVVIVYNIKNGKQVSAIDVLNAVEELDGVELFPDSAEDSSAGGSGSFLVTDAPPR

SEQ ID NO: 3837 - protein, 524 aa, Unknown
  Description of Unknown: Integrase B3838 sequence
  SM00857,G3DSA:1.10.10.2600,IPR036162,PF13408,IPR025827, G3DSA:3.40.50.1390,PS51737,IPR006119,IPR038109,PF07508, SSF53041,IPR011109,PTHR30461,Coil,PS51736, cd00338,PF00239
MNESVCIYLRKSRADREAEAHGEGETLARHERILLDLAKKKEYIVGAIYREVVSGETIADRPVMQQLLHEVESGLWDGVLVVEIERLARGDTIDQGVVSRAFQYSDTKIITPTKIYDPNNEFDEEYFEFGLFMSRREYKTIKRRLNAGRISSVKEGKYCGNKPPYGYERVKLEKEKGYTLRPVPTQAEIVKMIYTWYAGDGCEQIGVAKIARKLNEMGIESALCGDWTPASIQGILTNPVYIGKIRWNGRKTVKTIQNGQVIKTRPRSKDTLICEGLHPAIISEDLFNSVQEIRKKNPPRPVSIANSIRNPLAGIVYCSKCGRAMVRRPYQKRRQEDTLMCPYTSCPTVSSKLSLVEKAVIDGIKEIVEEYKLNNDINASSKDIDCVITSKQNLIHEKENELESLNAQKAKQYDLLEQGIYTTEVFLERAKTISASIQSCSDTIEKLKEEIKHDQNIIKQQSDFIPRCEELLDNYWSLDTESKNKMLKSLIEKVAYSKDTKNAYGKGNEIGFQLDIFPKIQKNN

SEQ ID NO: 3838 - protein, 524 aa, Unknown
  Description of Unknown: Integrase B3839 sequence
  cd03768,PTHR30461:SF3,SM00857,IPR036162,PF13408, PS51737,G3DSA:3.40.50.1390,IPR025827,IPR006119,PF07508, IPR011109,SSF53041,PTHR30461,PS51736,Coil, PF00239
MRFFNYGRKSVYSDKSDSIDNQFRMSREYCEQKFPGKIESWQEFSDEDFTGANTSRPDLQRMLSYIEEGFCDVLVVYQLDRLSRNVRDFSNIYAMLEEHNVMFISIKENIDTTTPIGRAMMYVTVVFAQMERETTATRVADNMRGLAKKGYWMGGQAPLGYSIKHIVIGDKKHSALELDPDGVRYVTQIFDDFLSSHGSLNAMVTRFRHQGIRTLTGKFFSKAHLHNILTMPYCVEATPEVYDYYAAKGCIMDSASPREKWDGSTGVLIYGRFSDKSQKHLVQPPENWTICLGLQKPFIPAEKWLAVQERFKQNTFCKDAKWPVPLLRGILRCNKCGSLMPVSRRKKVDGTCSSWYYCRKRKDEGSEACDMNQIKCDLIDEKVLEIFRKIALDPDSIHQFVKTESPSEIPNLSFISSRISSVESKIGKLAASLALAENSTASKYIIEEIERLDAELAALKREASHAEMKIHQAAAKERNSQATAIEIAKFINNLDGFSAKEKNEIARSVIRDCRWDGEKLFLTL

SEQ ID NO: 3839 - protein, 524 aa, Unknown
  Description of Unknown: Integrase B3840 sequence
  SM00857,G3DSA:1.10.10.2600,IPR036162,PF13408,IPR025827, PS51737,G3DSA:3.40.50.1390,IPR006119,IPR038109,PF07508, IPR011109,SSF53041,PF00239,PTHR30461,PS51736, Coil,cd00338
MNESVCIYLRKSRADREAEAHGEGETLARHERILLDLAKKKEYIVGAIYREVVSGETIADRPVMQQLLHEVESGMWDGVLVVEVERLARGDTIDQGIVSRAFQYSDTKIITPTKIYDPNNEFDEEYFEFGLFMSRREYKTIKRRLNAGRISSVKEGKYCGNKPPYGYERVKLEKEKGYTLRPVPTQAEIVKMIYTWYAGDGCEQIGVAKIARKLNEMGMESALGGDWTPASIQGILTNPVYIGKIRWNGRKTVKTIQDGQVIKTRPRSKDTLICDGLHPAIISEDLYNSVQEIRKKNPPRPNSIKNSIRNPLSGIVYCSKCGRAMVRRPYQKRGQEDTLMCPYTSCPTVSSKLSLVEKAVLDGIREIVEEYKLNNDINTSSKAIDCGITSKQNLIHEKENELESLNAQKAKQYDLLEQGIYTTEVFLERAKTIAASIQSCSATIEKLKEEIKHEQNIIKQQSDFIPRCEELLDNYWSLDTESKNKMLKSLIEKIAYSKDNKNAYGKGNEINFQLDIFPKIQKNN

SEQ ID NO: 3840 - protein, 524 aa, Unknown
  Description of Unknown: Integrase B3841 sequence
  SM00857,G3DSA:1.10.10.2600,IPR036162,PS51737,G3DSA:3.40.50.1390, IPR006119,IPR038109,PF07508,SSF53041,IPR011109, PTHR30461,PS51736,cd00338,PF00239
MLKYNSETNLDSDIDSDIDKYAIYLRKSRADLEAEKIGDGETLARHKKILTDLAARKGLYVSKIYEEIISGETIEARPEIQKLIQDCYDGKYRGILVVEVTRLSRGNQGDAQTIMDCLKYSNYNKGLLVVTPTKTYDIVHSQEDEEYMEFELFMSRREYKMIKKRLERGRMQAIVEGNYMASHRPYGYNIVKTKTGRTLIPNKDEAPIVKLIFDLAADNVPLLTIARHLKDMGVPTYNGDYYWSRVSVKRILENPVYIGKVRWNNRTTIKTMVDGKIETRLTTLNKNHYMEYDGKHKKYALTDEETFAKVNSRLTETRTKYDYKLVNPLAGLLRCKKCGRVMNLRTYDSRKYNVSPRYNHDGSPYCKLSSVMYTDVIDTLIRALELYIEDFKIEINNDFQHDDTNIQMQIQTLKREETKLKQKITKLFDSWENGILNDNEFIERKVINNESLENIQRQIRDLEKSIPEKIDYKEKIILLSNAVESLRDDTVSAKIKNDYLKEIISTIEYSRERPGEFILDIELL

SEQ ID NO: 3841 - protein, 524 aa, Unknown
  Description of Unknown: Integrase B3842 sequence
  SM00857,G3DSA:1.10.10.2600,IPR036162,PS51737, G3DSA:3.40.50.1390,IPR006119,IPR038109,PF07508, SSF53041,IPR011109,PTHR30461,PS51736, cd00338,PF00239
MLKYNSETNLDSDIDSDIDKYAIYLRKSRADLEAEKIGDGETLARHKKILTDLAARKGLYVSKIYEEIISGETIEARPEIQKLIQDCYDGKYRGILVVEVTRLSRGNQGDAQTIMDCLKYSNYNKGLLVVTPTKTYDIVHSQEDEEYMEFELFMSRREYKMIKKRLERGRMQAIVEGNYMASHRPYGYNIVKTKTGRTLIPNKDEAPIVKLIFDLAADNVPLLTIARRLKDMGVPTYNGDYYWSRVSVKRILENPVYIGKVRWNNRTTIKTMVDGKIETRLTTLNKNHYMEYDGKHKKYALTDEETFAKVNSRLTETRTKYDYKLVNPLAGLLRCKKCGRVMNLRTYDSRKYNVSPRYNHDGSPYCKLSSVMYTDVIDTLIRALELYIEDFKIEINNDFQHDDTNIQMQIQTLKREETKLKQKITKLFDSWENGILNDNEFIERKVINNESLENIQRQIRDLEKSIPEKIDYKEKIILLSNAVESLRDDTVSAKIKNDYLKEIISTIEYSRERPGEFILDIELL

SEQ ID NO: 3842 - protein, 524 aa, Unknown
  Description of Unknown: Integrase B3843 sequence
  SM00857,G3DSA:1.10.10.2600,IPR036162,PF13408,IPR025827, G3DSA:3.40.50.1390,PS51737,IPR006119,IPR038109,PF07508, SSF53041,IPR011109,PTHR30461,Coil,PS51736, cd00338,PF00239
MNESVCIYLRKSRADREAEAHGESETLARHEHILLDLAKRQGYSIGAIYREVVSGETISARPVMQKLLHEVESGLWDGVLVVEVERLARGDTIDQGVVSRAFQYSDTKIITPTKIYDPNNEFDEEYFEFGLFMSRREYKTIKRRLNNGRISSVKEGKYCGNKPPYGYERVKLEKEKGYTLRPVPAQAEIVKMIYTWYAGDGCEQIGVAKIVRKLNDMKIESALGGDWTPASIQGILTNPVYIGKIRWNGRKTVKTIQNGQVIKTRPRSRDVLICEGLHPAIISDDLYNSVQEIRQKNPPRPISIKNTVRNPLAGIVYCSKCGRAMVRRPYQKRGQEDTLMCPYTSCPTVSSKLSLVEKAVIDGIEEIAEEYKLNNDINVPSSTINSGIVSKQNLIREKESELESLNAQKAKQYDLLEQGIYTTEIFIERSKTIAAAIQTCADAIKKIKEEVEHDKDIMSQQSAFIPRCEEMLNNYWGLDAESKNKMLKSLIEKVVYSKDKRNAYGHGNEANFELDIFPKIQENN

SEQ ID NO: 3843 - protein, 524 aa, Unknown
  Description of Unknown: Integrase B3844 sequence
  PTHR30461:SF3,cd00338,SM00857,G3DSA:1.10.10.2600,IPR036162, PF13408,IPR025827,PS51737,G3DSA:3.40.50.1390,IPR006119, IPR038109,PF07508,IPR011109,SSF53041,PTHR30461, PS51736,Coil,PF00239
MDGLNLANVVIYARYSSAGQNDQSIDGQLAKCREYAQQRGYRVVGEYCDRALSGRYAETRPEFQRMISDSAKHAFDFVLVWKLDRFSRDRYDSAIYKKKLRANGVRVLSVTEGVGDSSESVLLEAILEAMAEEYSRQLAQNVRRGMRQNAEKALSLGGLAPLGYRVVDKRYEVDEEAAQIVRFVHEQYAAGATQKQIVADCAQRGYRNQRGNPLTIDSVKRILSNERYVGTYRYLDDIVIEDAFPAIVSKELKQQVRARLTANAKAPGHAKAKIEYLLHGKLFCGLCGAPMIGECGRGRHGATYYYYTCAARKKAHTCKKRNERKDELEQYIVEYIGTHVLTDEWISAAADRVVAEYARSYDASGIKPLERQIREADKDIDKLVDTLISATADAARRRINERIEAAEAKKKALEEDLASLRIASRVQIRKEDIVAWLCQFRGGDSVDLEYRKKVIELFVNAIYIYDDKIKMFFNVTDSAQITYPEMLALEAPPGSDFGASGVPDVSLSEHFVFINGVIGMVVHR

SEQ ID NO: 3844 - protein, 524 aa, Unknown
  Description of Unknown: Integrase B3845 sequence
  PTHR30461:SF3,cd00338,SM00857,G3DSA:1.10.10.2600,IPR036162, PF13408,PS51737,G3DSA:3.40.50.1390,IPR025827,IPR006119, IPR038109,PF07508,SSF53041,IPR011109,PTHR30461, PS51736,Coil,PF00239
MLLLENLIMYLRKSRSDDISMSVEDVLAKHEGIIQEYCEREFGARLPENRIFREVVSGETIADRPVMKEIMKLLETGTVKGVLVVEPQRLSRGDLEDCGRIINTFRYTGTLVITPQKTYDLTNEYDRKFFEMELTRGNDYLEYTKRILSRGREASVKQGNFIGSIAPYGYKKIVVGSGKDKYHSLEINPEEADAVRLMYALFINEGYGFAKIAHRLDELGFKPRSSENWQPAAIKDMLENPVYIGKIRWNWRKTQKRMANGEVVKVRPKTKDPSEWILVDGKHPAIISEELYNAALERRGKNPCVRKSLELTNPYAGLLFCGTCGRAMSQKRFINRRTHTQSVCDSMLCNNQANCHTKSVKYSAFEQRVIELLEDAVADFEIKLKDNNTNVIELHRGIIQKHMHELERLHEKDMRQKDAYEDGIYTKEEYIKRNALIQEQIAKTTSALEEAKTSAPKAIDYAEKIKRFNDCINALKDPDVSAPEKNTLLKNCVKRIDYYNEGESKPGVGRYVENVFELNMLLNM

SEQ ID NO: 3845 - protein, 524 aa, Unknown
  Description of Unknown: Integrase B3846 sequence
  PTHR30461:SF3,SM00857,G3DSA:1.10.10.2600,IPR036162,PF13408, IPR025827,G3DSA:3.40.50.1390,PS51737,IPR006119,IPR038109, PF07508,SSF53041,IPR011109,PTHR30461,PS51736, cd00338,PF00239
MLLPENLIMYLRKSRSDDAAMSVEDVLAKHEEILQEYCEHEFGVRLPEAKIFREVVSGETIADRPVMKEIMKLLETGTVKGVLVVEPQRLSRGDLEDCGKIINTFRYTGTLVITPQKTYDLTNEYDRKFFEMELTRGNDYLEYTKRILNRGREASVKHGNFIGSIAPYGYKKVVVGSGKDKYHSLEIEPEEADAIRLMYALFVNEGYGFAKIAHRLDELGFKPRSSKNWQPAAIKDMLENPVYIGKIRWNWRKTQKRMTNGEIVKIRPKTKDPSEWILVDGKHPAIISEELYNIALERRGKNPCVRKSLELTNPYAGLLFCGTCGRAMSQKRFVNRRAHTQSVCDSMLCNNQANCHTKSIKYSAFEKRVIELLEDAVTGFELKLKDNNTNIIQLHEGIIRKHMHELERLHEKDMRQKDAYEDGIYTKEEYIKRNALVQEQIAKTTSALEQAKLSAPKPVDYAKKIKQFNDCINALKNSEMSAPEKNILLRNCVKRIDYYNDGESKPGVGRYVENVFELNMLLNI

SEQ ID NO: 3846 - protein, 524 aa, Unknown
  Description of Unknown: Integrase B3847 sequence
  cd00338,SM00857,G3DSA:1.10.10.2600,IPR036162,PF13408, PS51737,IPR025827,G3DSA:3.40.50.1390,IPR006119,IPR038109, PF07508,IPR011109,SSF53041,PTHR30461,PS51736, Coil,PF00239
MNESVCIYLRKSRADREAEAHGEGETLARHQRILLDLAKKKEYIVGAIYREVVSGETIADRPVMQQLLHEVESGMWDGVLVVEVERLARGDTIDQGVVSRAFQYSDTKIITPTKIYDPNNEFDEEYFEFGLFMSRREYKTIKRRLNAGRISSVKEGKYCGNKPPYGYERIKLAREKGYTLRPVPAQAEIVKMIYTWYAGDGCEQIGVAKIVRKLNDMGIKSALGGDWTPASIQGILTNPVYIGKIRWNGRKTVKTIQNGQVVKTRPRSRNVLICEGLHPSIISDDLYNSVQEIRQKNPPRPISIKNTVRNPLAGIVYCSKCGRAMVRRPHQKRGQEDTLMCPYTSCPTVSSKLSLVEKAVLDGIKEITEKYKLNNDINVPYNTINSGIVSKQNLIREKESELESLNVQKAKQYDLLERGIYTTEVFLERSKTIARSIQSCSDIITKLREEIEHDENIKAQQSNFIPRCEELLNNYWDLNIESRNRMLKNLVEKVVYSKNIKNTYGKGNEINFELDIFPKIQKND

SEQ ID NO: 3847 - protein, 524 aa, Unknown
  Description of Unknown: Integrase B3848 sequence
  PTHR30461:SF3,SM00857,G3DSA:1.10.10.2600,IPR036162,PF13408, IPR025827,G3DSA:3.40.50.1390,PS51737,IPR006119,IPR038109, PF07508,SSF53041,IPR011109,PF00239,PTHR30461, PS51736,Coil,cd00338
MDGLNLANVVIYARYSSAGQNDQSIDGQLAKCREFAQHRGFRVVHEYCDRALSGRYAETRPEFQRMIADSEKRAFEYVLVWKLDRFSRDRYDSAIYKRKLRANGVRVLSATEGIDESSESVLLEAILEAMADEYSRQLAQNVKRGMRQNAEKCLSLGGIAPLGYRVVNKQYEINEDEAQIVRCIHEQYASGMSQKQISAECSRLGYRNQRGKPIDLHAIKRILANERYIGTYIYNGEVIAEDAFPAIITKELKKQVRERLAANAKSPGHAKAKIEYLLHGKLFCGECGAPMVGECGRSRSGTVHYYYSCAARKKQHTCKKRNERKDELEQYIVDYIGKSVLTDEWIKSASARVVAEYARSYDASGIKPLERQIRETDKELEQLVDALIKTTADVAIRKINERIEATEAKKHTLEEELASLRIASRVQLREEDVAAWISQFRDGDSADMEYRKKVIDLFVNAIYIYDDRIKMFFNVTDSEQITYPEMLALDEPSGSDFGASAVPDVSLSEHLIFINGVIGMVVHR

SEQ ID NO: 3848 - protein, 524 aa, Unknown
  Description of Unknown: Integrase B3849 sequence
  PTHR30461:SF3,SM00857,G3DSA:1.10.10.2600,IPR036162,PF13408, IPR025827,G3DSA:3.40.50.1390,PS51737,IPR006119,IPR038109, PF07508,IPR011109,SSF53041,PTHR30461,Coil, PS51736,cd00338,PF00239
MNKLRAAAYCRVSTDRAEQSGSLASQRSFFDDYIRNSDSMTLVGVFYDEGTSGTTTLNRYGFNKMISLAVSGGIDIILTKEVSRFARNTVDTLNITRMLRAKGVGIIFINDNIDTRDSDGELRLSIMATIAQEESRKISERVKWGQQRKMEQGVVFGRSCLGYDVKDGKITVNADSAEIVKRIFTEYTVLLKGAESIADRLNAEQIRTVNGGRWSGAFIRKVLRNVKYVGDLEQKKTCTPDFLTHKKRLNSSEHIYIRNHHEPIISRELWEQTQAEISRRKPTDTSRHSDRYVFSGKVYCGVCGSVMVSRVKALKNGKIYHALRCSGRIGGKSCNNETLNVTALKACVKRIFTDMPIDKTAVINAVIKGLSRTDKPDIPALRKKIETLNAKKRRAVDLMLDGLITQQELIEQKSYYDSIIEKLSQEISSDKSVFETDKIRKNAERFLDFTSDPIWLLVIRADYIHGTLTVYLKGIEKGFTTCFTATGRGDSYRVITANTVRSQGIIPGTMQVQKNRCRHDVNDK

SEQ ID NO: 3849 - protein, 524 aa, Unknown
  Description of Unknown: Integrase B3850 sequence
  cd00338,SM00857,G3DSA:1.10.10.2600,IPR036162,PF13408, PS51737,G3DSA:3.40.50.1390,IPR025827,IPR006119,IPR038109, PF07508,IPR011109,SSF53041,PTHR30461,PS51736, Coil,PF00239
MNESVCIYLRKSRADREAEAHGEGETLARHERILLDLAKKKEYIVGAIYREVVSGETIADRPVMQQLLHEVESGMWDGVLVVEVERLARGDTIDQGIVSRAFQYSDTKIITPTKIYDPNNEFDEEYFEFGLFMSRREYKTIKRRLNAGRISSVKEGKYCGNKPPYGYERVKLEKEKGYTLRPVPTQAEIVKMIYTWYAGDGCEQIGVAKIARKLNEMGIESALGGDWTPASIQGILTNPVYIGKIRWNGRKTVKTIQTGQVIKTRPRSKDTLICNGLHPAVISEDLYNSVQEIRKKNPPRPVSIANSIRNPLAGIVYCSKCGRAMVRRPYQKRGQEDTLMCPYTSCPTVSSKLSLVEKAVLDGIREIVEKYKLNNDINISSKDIDCGITSKQNLIHEKENELKNLNSQKAKQYDLLEQGIYTTEVFLERAKTISASIQSCSDTIEKLKEEIKHDENIIKQRSDFIPRCEELLDNYWSLDTESKNKMLKSLIEKVVYSKDTKNAYGKGNEIGFQLDIFPKIQKNN

SEQ ID NO: 3850 - protein, 524 aa, Unknown
  Description of Unknown: Integrase B3851 sequence
  SM00857,G3DSA:1.10.10.2600,IPR036162,PF13408,PS51737, G3DSA:3.40.50.1390,IPR025827,IPR006119,IPR038109,PF07508, IPR011109,SSF53041,PTHR30461,Coil,PS51736, cd00338,PF00239
MNESVCIYLRKSRADREAEAHGEGETLARHERILLDLAKKKEYIVGAIYREVVSGETIADRPVMQQLLHEVESGMWDGVLVVEVERLARGDTIDQGVVSRAFQYSDTKIITPTKIYDPNNEFDEEYFEFGLFMSRREYKTIKRRLNNGRISSVKEGKYCGNKPPYGYERVKLEKEKGYTLRPVPAQAEVVKMIYAWYAGDGCEQIGVAKIVRKLNEMGIESALGGDWTPASIQGILTNPVYIGKIRWNGRKTVKTIHNGQVVKTRPRSRDVLICGGLHPAIISDDLYNSVQEIRQKNPPRPISIKNTVRNPLAGIVYCSKCGRAMVRRPYQKRGQEDTLMCPYTSCSTVSSKLSIVEKAVIDGIRDIAEEYKLNNDVNTSSKAIDLTIISKQNLIREKESELENLNTQKAKQYDLLEQGIYTTEVFLERSKTIATSIQSCSDIITKLKEEIEHDENIMAQQSDFVPRCEELLNNYWNLDVESRNRMLKSLVEKVVYSKNIKNAYGKSNEINFELDIFPKIQKND

SEQ ID NO: 3851 - protein, 524 aa, Unknown
  Description of Unknown: Integrase B3852 sequence
  cd03768,PTHR30461:SF3,SM00857,G3DSA:1.10.10.2600,IPR036162, PF13408,IPR025827,G3DSA:3.40.50.1390,PS51737,IPR006119, IPR038109,PF07508,IPR011109,SSF53041,PTHR30461, PS51736,PF00239
MLMIADYSRKSVYSDKSDSTQAQYNLALDYCKGHYNDYEVIRYEDEGYTGANTDRPAFSCMVNDIKDGKINIVICYKIDRVSRDVKDFSNFFSFLQDHNVEFVSIKEQIDTSTPLGRAMMYICSVFAQMERETIAERVKDGMTDLSKTGKWAGGRAPLGYKRERVEISGKSHTVLIPDAQGCKLLNLISDTFLDTGYSLTQLERYCRENNITTSRGAYFSSSQIWTILKNPIYCTADQAAYDYFEGLGCQMGVDRDKFDGKRAIMSYGRTAGGKRKKHVVNPPEKWVISVGLHAPLWTSEKYIAIQDRFGNNQIDKARKHKIGILKGVVKCKCGYTMRVQHKVDNANGKIYDNYFCSLRNRRGKSFCDMHFTPVSTLDDAVIEILKQIKLDKSMIDNFIVDDSKINVAYRSRSDVQRDIDRIDGKILNLTNALGNASGSTASKYIVQEIERLDRELSGLKYELLEISTNEKKRNRANYDRELKYKMVCDIVDNLEYADYDEINGLLKDLFKECVYDGQTLHIKI

SEQ ID NO: 3852 - protein, 524 aa, Unknown
  Description of Unknown: Integrase B3853 sequence
  SM00857,G3DSA:1.10.10.2600,IPR036162,PF13408,IPR025827, G3DSA:3.40.50.1390,PS51737,IPR006119,IPR038109,PF07508, IPR011109,SSF53041,PTHR30461,Coil,PS51736, cd00338,PF00239
MQALAQNVTVIPARRRVGSQRTAAQVQKIRVAAYCRVSTDSEKQETSYEAQVSHYTEYIKSKPEWQMVEVYADDGISGTNTAKRDEFNRMIADCEAGKIDLILTKSISRFSRNTLDCLKYTRKLKALNIAVFFEKENINTMDSKGEVLLTIMASLAQQESESLSANVRMGIQYRNQQGKVQVNHNWFLGYTKDADGNLVIDPEQAEIVRRIYREYLEGASFLQIKRSLKADGIPNEAGHLKWHESNIHQILTNEKYIGDALLQKTYTVSILEKKRAANNGEMPKYYVEGSHEAIIDRDVFMKVKAEIARRANLNPEGKRRVYSSKYALSGMVFCGHCGDIYRRVKWNNRGCKSTVWRCVSRVIKKDVDFDRPARTVKEEVLQGAIVTAVNDAYARKNIVTALLKQNIESTVFGDLEERMAMVDKELSDLQTQMIAVSGDEVAIEALGDQIDGLRAERQNILTEAAERSDLQERMNDIISFLDEMPTMLTEYSDTITRRLVEKITIFDEKIVVEMKSGLHIEVKE

SEQ ID NO: 3853 - protein, 524 aa, Unknown
  Description of Unknown: Integrase B3854 sequence
  cd03768,PTHR30461:SF3,SM00857,IPR036162,PF13408, IPR025827,G3DSA:3.40.50.1390,IPR006119,PF07508,SSF53041, IPR011109,PTHR30461,PS51736,PF00239
MTIIACYSRKSIYSDKSDSTQAQYNLAVEYCKSHYNDYQVIQYEDEGYTGANTNRPAFSRMVEDIKDKKINIVICYKIDRVSRDVKDFSNFFSFLQEHNVEFVSIKEQIDTSTPLGRAMMYICSVFAQMERETIAERVKDGMTDLSKSGKWAGGRAPLGYKRERINVSGKSHTILVPDTKGIDLLNHIADTFLNNNLSLTQLEKYCRDNNITTINGSYFSSSQLWNLLKNPTYCTADQTAYDYFEKLGCKMGVDCDKFDGTHAVMSYGRTAGGNRKKHISNPPAEWIISVGLHTPLWTSEKYIAIQKKFGNNKIDKTRKHKIGILKGIVRCKCGYLMRVQHKVDRTYNTIYDNYFCSLRNHRGKSFCDMRFTSVSKIDNAVIDILKQIKLDKSMIDNFIVDDRNLNVVYRSRSDVQHDINSINTKILNLTNALSNTPASTASKYIVKEIEKYDKELAGLNYELLEISSNEKKQSRSKYNKESKYKLVCDIVDNLDSADYDELNGLLKDLFKECVYDGETLHIKL

SEQ ID NO: 3854 - protein, 524 aa, Unknown
  Description of Unknown: Integrase B3855 sequence
  PTHR30461:SF3,cd00338,SM00857,G3DSA:1.10.10.2600, IPR036162,PF13408,PS51737,IPR025827, G3DSA:3.40.50.1390,IPR006119,IPR038109,PF07508, IPR011109,SSF53041,PTHR30461,PS51736,Coil,PF00239
MDHGLNLVNVVIYARYSSVGQNDQSIDGQLAKCREYAQQRGFRVVGEYCDRALSGRYAETRPEFQRLVSDSSKHAFEYVLVWKLDRFSRDRYDSAIYKKKLRANGVRVLSVTEGIDESSESVLLEAILEAMAEEYSRQLAQNVKRGMRQNAEKALSLGGMPPLGYDVVSKRYTINESEAQIVRFIHERYAAGAAQKLIVDECLQRGYCAKRGNELTIGAINRILRNPKYAGTYVCDDLVLEDAIPAIVSKPLKQQVRDRLAASAKAPGHAKAKVEYLLHGKLFCGECGAPMIGECGRGKNGTTHYYYTCAARKKSRSCKKRNERKFELEKYIVEYISMYVLTDEWISAAAERVVAEYARSYDAAGIKPLERQIREADKELDALIDTLIKTTSAAAIAKINERIEAAEAKKRTLEADLATLRIASRVEIRKEDIVAWLDQFRVGSSSDPEYCKKIIELFVNAVYVYDDRIKMFFNVRDSAQITYPEMLALDGLECSDFDLSGVPNDSLSEQILFINGIIGMLVRR

SEQ ID NO: 3855 - protein, 524 aa, Unknown
  Description of Unknown: Integrase B3856 sequence
  cd00338,SM00857,G3DSA:1.10.10.2600,IPR036162,PF13408, PS51737,G3DSA:3.40.50.1390,IPR025827,IPR006119,IPR038109, PF07508,IPR011109,SSF53041,PTHR30461,PS51736, Coil,PF00239
MNESVCIYLRKSRADREAEAHGEGETLARHERILLDLAKKKEYTVGAIYREVVSGETIADRPVMQQLLHEVESGMWDGVLVVEVERLARGDTIDQGIVSRAFQYSDTKIITPTKIYDPNNEFDEEYFEFGLFMSRREYKTIKRRLNAGRISSIKEGKYCGNKPPYGYERVKLEKEKGYTLRPIPAQSEIVKMIYTWYAGDGCEQIGVAKIVRKLNEMGIESALGGDWTPASIQGILTNPVYIGKIRWNGRKTVKTIQNGQVIKTRPRSKDTLICEGLHPAIISEDLFNSVQEIRKKNPPRPVSIANSIRNPLAGIVYCSKCGRAMVRRPYQKRGQEDTLMCPYTSCPTVSSKLPLVEKAVIDGIREIVEEYKLNNDINISSKDIDCGITSKQNLIHEKENELKNLNSQKAKQYDLLEQGIYTTEVFLERAKTISASIQSCSDTIEKLKEEIKHGENIIKQRSDFIPRCEELLDNYWSLDTESKNKMLKSLIEKVVYSKDTKNAYGKGNEIGFQLDIFPKIQKNN

SEQ ID NO: 3856 - protein, 524 aa, Unknown
  Description of Unknown: Integrase B3857 sequence
  SM00857,G3DSA:1.10.10.2600,IPR036162,PF13408,PS51737, IPR025827,G3DSA:3.40.50.1390,IPR006119,IPR038109,PF07508, IPR011109,SSF53041,PTHR30461,Coil,PS51736, cd00338,PF00239
MNESVCIYLRKSRADREAEAHGEGETLARHERILLDLAKKKEYIVGAIYHEVVSGETIADRPVMQQLLHEVESGMWDGVLVVEVERLARGDTIDQGVVSRAFQYSDTKIITPTKIYDPNNEFDEEYFEFGLFMSRREYKTIKRRLNNGRISSVKEGKYCGNKPPYGYERVKLEKEKGYTLRPVPAQAEVVKMIYAWYAGDGCEQIGVAKIVRKLNEMGIESALGGDWTPASIQGILTNPVYIGKIRWNGRKTVKTIHNGQVVKTRPRSRDVLICGGLHPAIISDDLYNSVQEIRQKNPPRPISIKNTVRNPLAGIVYCSKCGRAMVRRPYQKRGQEDTLMCPYTSCSTVSSKLSIVEKAVIDGIRDIAEEYKLNNDVNTSSKAIDLTIISKQNLIREKESELENLNTQKAKQYDLLEQGIYTTEVFLERSKTIATSIQSCSDIITKLREEIEHDENIMAQQSDFVPRCEELLNNYWNLDVESRNRMLKSLVEKVVYSKNIKNAYGKSNEINFELDIFPKIQKND

SEQ ID NO: 3857 - protein, 524 aa, Unknown
  Description of Unknown: Integrase B3858 sequence
  cd00338,SM00857,G3DSA:1.10.10.2600,IPR036162,PF13408, PS51737,G3DSA:3.40.50.1390,IPR025827,IPR006119,IPR038109, PF07508,SSF53041,IPR011109,PTHR30461,PS51736, Coil,PF00239
MKKTKNSVQRAVIYARYSCSNQTEQSIEGQLADCEKFAEKYNYYIVDTYIDRAMSATTDRRPQFQQMIADSATGGFDVIIVWKLDRFARNRYDSAVNKQKLNSNGVKVVSVMEHIEDTPEGALMESVLEGFAEYFSKDLSQKVSRGMRETALKFKATGLIPYGYKKTSDNICVPDEHTAPVVKKIFEMYSGGMINKDICDWLNSHGYRTSNGNLFKNQYLRKILNRRRYTGSYTYGDLELHDENQRIISDELFDRVQIQLQAKKRTGRIAREQYILAGKLFCGYCRNPIRGESGRNHQNRIYTYYKCSVNKTGGKCPKTTVQRDIIENNTIKFILNNFLNDEIINSVVDTIQASETAENNSAELITLRTQIEDTDRKINNLLTAIENGVFTPSTKQRLNDLENVKEKLKYELIVKQSEKNNFNAAAFKRFLKNIDVDDFKTTEQRQKLINLVLYREYLWNDKVLYIFNLTPSKPNDSVDIDSYVDALLASTGSTSPTDGVPLVAVFEPIKMYLIGRLLFCMKQM

SEQ ID NO: 3858 - protein, 524 aa, Unknown
  Description of Unknown: Integrase B3859 sequence
  PTHR30461:SF3,SM00857,G3DSA:1.10.10.2600,IPR036162,PF13408, IPR025827,G3DSA:3.40.50.1390,PS51737,IPR006119,IPR038109, PF07508,IPR011109,SSF53041,PTHR30461,PS51736, cd00338,PF00239
MNKLRAAAYCRVSTDRAEQSGSLASQRSFFDDYIRNSDSMTLVGVFYDEGTSGTTTLNRYGFNKMISLAVSGGIDIILTKEVSRFARNTVDTLNITRMLRAKGVGIIFINDNIDTRDSDGELRLSIMATIAQEESRKISERVKWGQQRKMEQGVVFGRSCLGYDVKDGKITVNADSAEIVKRIFTEYTVLLKGAESIADGLNAEQIRTVNGGRWSGAFIRKVLRNVKYVGDLEQKKTCTPDFLTHKKRLNRSEHIYIRNHHEPIISRELWEQTQAEISRRKPTDTSRHSDRYVFSGKVYCGVCGSVMVSRVKTLKNGKIYHALRCSGRIGGKSCNNETLNVTALKACVKRIFTDIPIDKTAVINAVIKGLSRTDKPDIPALRRKIETLNAKKRRAVDLMLDGLITQQELIEQKSYYDSIIEKLSQEISSDRSVFETDKIRKNAERFLDFTSDPLWLLVRRADYIHSTLTVYLKGVEKGFTTCFTATGRGDSYRVITGNTVRSQGIIPGTMQVQKNWFRHDVNDK

SEQ ID NO: 3859 - protein, 524 aa, Unknown
  Description of Unknown: Integrase B3860 sequence
  cd00338,SM00857,G3DSA:1.10.10.2600,IPR036162,PF13408, IPR025827,PS51737,G3DSA:3.40.50.1390,IPR006119,IPR038109, PF07508,IPR011109,SSF53041,PTHR30461,PS51736, Coil,PF00239
MNESVCIYLRKSRADREAEAHGEGETLARHERILLDLAKKKEYIVGAIYREVVSGETIADRPVMQQLLHEVESGMWDGVLVVEVERLARGDTIDQGVVSRAFQYSDTKIITPTKIYDPNNEFDEEYFEFGLFMSRREYKTIKRRLNAGRISSVKEGKYCGNKPPYGYERVKLEKEKGYTLRPVPAQAEIVKMIYTWYAGDGCEQIGVAKIARKLNEMGIESALGGDWTPATIQGILTNPVYIGKIRWNGRKTVKTIQNGQVVKARPRSKDTLICNGLHPAIISEDLFNSVQEIRKKNPPRPVSIANSIRNPLAGIVYCSKCGRAMVRRPYQKRGQEDTLMCPYTSCSTVSSKLPLVEKAVIDGIKEIVEEYKLNNDINTSSKAIDCVITSKQNLIHEKENELESLNSQKAKQYDLLEQGIYTTEVFLERAKTISASIQSCSDTIEKLKEEIKHEQNIIKQQSDFIPRCEELLDNYWSLDTESKNKMLKSLIEKIAYSKDNKNAYGKGNKIGFQLDIFPKIQKNN

SEQ ID NO: 3860 - protein, 524 aa, Unknown
  Description of Unknown: Integrase B3861 sequence
  SM00857,G3DSA:1.10.10.2600,IPR036162,PF13408,PS51737, G3DSA:3.40.50.1390,IPR025827,IPR006119,IPR038109,PF07508, IPR011109,SSF53041,PF00239,PTHR30461,PS51736, Coil,cd00338
MNESVCIYLRKSRADREAEAHGEGETLARHERILLDLAKKKEYIVGAIYREVVSGETIADRPVMQQLLHEVESGMWDGVLVVEVERLARGDTIDQGIVSRAFQYSDTKIITPTKIYDPNNEFDEEYFEFGLFMSRREYKTIKRRLNAGRISSVKEGKYCGNKPPYGYERVKLEKEKGYTLRPVQTQAEIVKMIYTWYAGDGCEQIGVAKIARKLNEMGIETALGGDWTPASIQGILTNPVYIGKIRWNGRKTVKTIQNGQVIKTRPRSKDTLICEGLHPAIISEVLYDSVQEIRKKNPPRPISIKNSIRNPLSGIVYCSKCGRAMVRRPYQKCGQEDTLMCPYTSCPTVSSKLSLVEKAVLDGIREIVEKYKLNNDINTSSQAIDLTIISKQNLIHEKENELESLNAQKAKQYDLLEQGIYTTEVFLERAKTISASIQSCSDTIEKLKEEIKHDENIIKQRSDFIPRCEELLDNYWSLDTESKNKMLKSLIEKVTYSKDTKNAYGKGNEIGFQLDIFPKIQKNN

SEQ ID NO: 3861 - protein, 524 aa, Unknown
  Description of Unknown: Integrase B3862 sequence
  PTHR30461:SF3,SM00857,G3DSA:1.10.10.2600,IPR036162,PS51737, G3DSA:3.40.50.1390,IPR006119,IPR038109,PF07508,IPR011109, SSF53041,PTHR30461,Coil,PS51736,cd00338, PF00239
MITFDNIIIYLRKSRSDDPNLSVNEVLLRHEADLQEYCMREFGKTMPEERIYREVVSGETINDRPVMIQIMRLLETGIIDAVLVVEPQRLSRGDMQDCGRIINTLRYTNTLVITPPKTYNLNDEYDRKFFEMELTRGNDYLEYNKKILNRGRIRSVREGNFIASVPPYGYKKIKVGEGKNSYHTLKIVPDEAEAVKIMFHLYINKHYGFTNIANYLDAHGYIPRKSAHWSPAAISDMIDNPVYMGKIRWNYLKTRKKIVNGEIVKTRPINRNTEDVILVDGRHEAIIDEDTFNQALIRRGNSPRLKKGTELQNPFAGILFCGSCNRAMSFKQFTDRRSSTGHISESMLCNNQRICHTKSVSYSDFINNVKASLKTSIHDFEVLLNNNNDDKELERKQYIKSLELELKRIKEKDSRQKDAYEDGIYTKAEYAKRNAKLQEQLAFTEKKLEEARQIKSYTDIYKEQIAKYTRCLDIISDNNITAATKNELLKPLISKIVYYNSQQSKAGLGRYIKNEFTLDIFLNV

SEQ ID NO: 3862 - protein, 524 aa, Unknown
  Description of Unknown: Integrase B3863 sequence
  PTHR30461:SF3,cd00338,SM00857,G3DSA:1.10.10.2600,IPR036162, PF13408,PS51737,G3DSA:3.40.50.1390,IPR025827,IPR006119, IPR038109,PF07508,IPR011109,SSF53041,PTHR30461, PS51736,Coil,PF00239
MCAKKKPAMLEPDMQDAVIYTRYSSHNQRDCSIEQQVADCEIFARQNNLRVVKVYADRHLSGTTDNRPQFQQMLKDASHGHWAYVICWKIDRFARNRYDSATYKFRLKKAGVRVLYAKESIPDGPEGILLESVLEGSAEYYSAALAQNIRRGMKYNAEQCKVNSGSIPFGYCKGPDGRFAIHEANAEVVREIFRKAAAGMPFVDIANDLNSRGLKTSRGGRWNKGSFRLLMNEAYIGVYHFSDTRIEGGMPALIDQGTFWAANERLKANSSVRGRHQDGGDYLLTGKLKCAHCGSYMIGFSGTGKSGELHYYYGCQKRRRERACKKANVPREWIERVVVKAALDYVLRPDVMEWIADAVMEYQEREAASAQLAALTAELEENQKATDNVMKAIEAGIITSTTKQRLLDLEAKAQDLKRAIELEKLSHVRLERDQVLFWLDRFRGGSLQSQEFRRKVIDAFVSVVYLSDDHLRIAFNYSGGSNAEADFDLVMDAEAAAGELSKKFAQGHVASTIRNADEPSKENE

SEQ ID NO: 3863 - protein, 524 aa, Unknown
  Description of Unknown: Integrase B3864 sequence
  SM00857,G3DSA:1.10.10.2600,IPR036162,PF13408,IPR025827, G3DSA:3.40.50.1390,PS51737,IPR006119,IPR038109,PF07508, SSF53041,IPR011109,PF00239,PTHR30461,PS51736, Coil,cd00338
MPDCLYLRKSRVDMEAEARGEKDVLARHEAELLRTARRLGRTVGAIYREVVSGDTIAARPVMQQLLREVEAGQWEAVLVMEVERLARGDTIDQGVVARAFQYSETKIITPIKTYDPTNEFDEEYFEFGLYMSRREYKTIKRRMQRGREASIREGKFVGNKNPYGYVRVKLQGVKGWTLAPDPPRSEVVQDIFRWYTEGYTGPDGATQLLGVTSIANRLNELGIHTAHGTFWNASVVNAMLRNPVYAGWVRWNYRATVRTVKDGQVSLSRPRNKANQTLVRGLHPALVSQQTFDAAQKRLSINPSRVGPKNAARKNPLAGLIFCSVCGSSMVRRPYSNGAEPCVMCPRPHCPTVSSQMYVLEDTLMDALAQWLEELEPETPPDPAEDPEVQSLQALIDDTSRQLQKLDAQIDRAYELVETGVYTSEVFSARSMELARRRLDVQDQKRNAELELQSRKQALFFWRQLAPQVRHVIDSYRASSDPDEQNALLRTVLARVEYKKTTRARWGDGSDLSLTLFPLVPDSD

SEQ ID NO: 3864 - protein, 524 aa, Unknown
  Description of Unknown: Integrase B3865 sequence
  cd00338,SM00857,G3DSA:1.10.10.2600,IPR036162,PF13408, PS51737,G3DSA:3.40.50.1390,IPR025827,IPR006119,IPR038109, PF07508,IPR011109,SSF53041,PTHR30461,PS51736, Coil,PF00239
MNESVCIYLRKSRADREAEAHGEGETLARHERILLDLAKKKEYIVGAIYREVVSGETIADRPVMQQLLREVESGMWDGVLVVEVERLARGDTIDQGVVSRAFQYSDTKIITPTKTYDPNNEFDEEYFEFGLFMSRREYKTIKRRLNAGRISSVKEGKYCGNKPPYGYERVKLEKEKGYTLRPVPDQSNIVKMIYTWYAGDGCEQIGVAKIARKLNDMGIKSALGSDWTPASIQGILTNPVYIGKIRWNGRKVVKTVHNGQVVKTRPRSKDTFICDGLHQAIISEDLFNSVQEIRKKNPPRPVGIANSIRNPLSGIVYCSKCGRAMVRRPYQKSGQEDTIMCPYTSCPTVSSKLPIVEKAVLDGIEEIVEKYKLNNDINVSSESISFGISSKQNLINEKEKELESLNAQKAKQYDLLEQGIYTTEVFLERAKTISASIQSCSDTIEKLKEEIKHEQNIIKQQSDFIPRCEELLDNYWSLDTESKNKMLKSLIEKVTYSKDTKNAYGKGNEIGFQLDIFPKIQKNN

SEQ ID NO: 3865 - protein, 524 aa, Unknown
  Description of Unknown: Integrase B3866 sequence
  PTHR30461:SF3,SM00857,G3DSA:1.10.10.2600,IPR036162,PF13408, IPR025827,PS51737,G3DSA:3.40.50.1390,IPR006119,IPR038109, PF07508,SSF53041,IPR011109,PF00239,PTHR30461, PS51736,Coil,cd00338
MDNLNLANVVIYARYSSAGQNDQSIDGQLAKCREYAQQRGYRVVGEYCDRALSGRYAETRPEFQRLIADSAKRAFDFVLVWKLDRFSRDRYDSAIYKKKLRANGVRVLSVTEGVGDSSESVLLEAILEAMAEEYSRQLAQNVRRGMRQNAEKGLSLGGLAPLGYRVVNKQYEINADEARIVRFIHEQYADGAGQKQIVADCARLGYRNQRGNPLTLASVKRILTNERYAGRYDYLGEIVIEDAFPAIVSKELKKRVRDRLKANSKAPGHAKAKVEYLLHGKLFCGECGAPMIGECGRGRHGATYYYYTCAARKKQHTCKKRNERKDELEACIVDYIGSCVLTDSWIDGAAERVVAEYQKSYDASGIKPLEKQIRDADKEIDQLVDALISATAEAARRRINERIETAEARKQALEADLASLRIASRVQIKKEDIVVWLNQFRTGDRSDLEYRKKVIDLFVNSIYLYDDTFKLFLNVTDSTQITYSDSLALAPPSVSDFGASGVPDMHLSEHIIFVNGVIGMIVQR

SEQ ID NO: 3866 - protein, 524 aa, Unknown
  Description of Unknown: Integrase B3867 sequence
  cd00338,SM00857,G3DSA:1.10.10.2600,IPR036162,PF13408, PS51737,G3DSA:3.40.50.1390,IPR025827,IPR006119,IPR038109, PF07508,IPR011109,SSF53041,PTHR30461,PS51736, Coil,PF00239
MNESVCIYLRKSRADREAEAHGEGETLARHERILLDLAKKKEYIVGAIYREVVSGETIADRPVMQQLLREVESGMWDGVLVVEVERLARGDTIDQGVVSRAFQYSDTKIITPTKIYDPNNEFDEEYFEFGLFMSRREYKTIKRRLNAGRISSVKEGKYCGNKPPYGYERVKLEKEKGYTLRPVPTQAEIVKMIYTWYAGDGCEQIGVAKIVRKLNEMGIESALGDDWTPASIQGILTNPVYIGKIRWNGRKTVKTIQNGQVIKTRPRSKDTLICDGLHPAIISEDLYNSVQEIRKKNPPRPISIKNSIRNPLSGIVYCSKCGRAMVRRPYQKRGQEDTLMCPYTSCTTVSSKLSLVEKAVIDGIREIVEEYKLNNDINTSSKAIDCGITSKQNLIHEKENELESLNAQKAKQYDLLEQGIYTTEVFLERAKTIAASIQSCSDTIEKLKEEIKHDENIIKQRSDFIPRCEELLDNYWSLDTESKNKMLKSLIEKVTYSKDTKNAYGKGNEIGFQLDIFPKIQKNN

SEQ ID NO: 3867 - protein, 524 aa, Unknown
  Description of Unknown: Integrase B3868 sequence
  cd00338,SM00857,G3DSA:1.10.10.2600,IPR036162,PF13408, PS51737,IPR025827,G3DSA:3.40.50.1390,IPR006119,IPR038109, PF07508,SSF53041,IPR011109,PTHR30461,PS51736, Coil,PF00239
MNESVCIYLRKSRADREAEAHGEGETLARHERILLDIAKKKEYIVGAIYREVVSGETIADRPVMQQLLHEVESGMWDGVLVVEVERLARGDTIDQGIVSRAFQYSDTKIITPTKIYDPNNEFDEEYFEFGLFMSRREYKTIKRRLNAGRISSVKEGKYCGNKPPYGYERVKLEKEKGYTLRPVQTQAEIVKMIYTWYAGDGCEQIGVAKIARKLNEMGIETALGGDWTPASIQGILTNPVYIGKIRWNGRKTVKTIQNGQVIKTRPRSKDTLICEGLHPAIISEVLYDSVQEIRKKNPPRPISIKNSIRNPLSGIVYCSKCGRAMVRRPYQKCGQEDTLMCPYTSCPTVSSKLSLVEKAVIDGIREIVEEYKLNNDINISSKAIDCGITSKQNLIHEKENELESLNAQKAKQYDLLEQGIYTTEVFLERAKTIAASIQSCSDTIEKLKEEIKHEQNIIKQQSDFIPRCEELLDNYWSLDTESKNKMLKSLIEKVTYSKDTKNAYGKGNEIGFQLDIFPKIQKNN

SEQ ID NO: 3868 - protein, 524 aa, Unknown
  Description of Unknown: Integrase B3869 sequence
  cd00338,SM00857,G3DSA:1.10.10.2600,IPR036162,PF13408, IPR025827,G3DSA:3.40.50.1390,PS51737,IPR006119,IPR038109, PF07508,IPR011109,SSF53041,PTHR30461,PS51736, Coil,PF00239
MNESVCIYLRKSRADREAEAHGEGETLARHERILLDLAKKKEYIVGAIYREVVSGETIADRPVMQQLLHEVESGMWDGVLVVEVERLARGDTIDQGVVSRAFQYSDTKIITPTKIYDPNNEFDEEYFEFGLFMSRREYKTIKRRLNAGRISSVKEGKYCGNKPPYGYERVKLEKEKGYTLRPVPTQAEIVKMIYTWYSGDGCEQIGVAKIARKLNEMGIESALGGDWTPASIQGILTNPVYIGKIRWNGRKTVKTIQTGQVIKTRPRSKDTLICNGLHPAVISEDLYNSVQEIRKKNPPRPVSIANSIRNPLAGIVYCSKCGRAMVRRPYQKRGQEDTLMCPYTSCPTVSSKLSLVEKAVLDGIREIVEKYKLNNDINTSSQAIDLTIISKQNLIHEKENELESLNAQKAKQYDLLEQGIYTTEVFLERAKTISASIQSCSDTIEKLKEEIKHDENIIKQQSDFIPRCEELLDNYWSLDTESKNKMLKSLIEKVAYSKDTKNAYGKGNEIGFQLDIFPKIQKNN

SEQ ID NO: 3869 - protein, 524 aa, Unknown
  Description of Unknown: Integrase B3870 sequence
  PTHR30461:SF3,SM00857,G3DSA:1.10.10.2600,IPR036162,PF13408, PS51737,G3DSA:3.40.50.1390,IPR025827,IPR006119,IPR038109, PF07508,SSF53041,IPR011109,PF00239,PTHR30461, PS51736,Coil,cd00338
MDHDLNLANVVIYARYSSAGQNDQSIDGQLAKCREYAQQRGFRVVGEYCDRALSGRYAETRPEFQRLVSDSSKHAFEYVLVWKLDRFSRDRYDSAIYKKKLRANGVRVLSVTEGIDESSESVLLEAILEAMAEEYSRQLAQNVKRGMRQNAEKALSLGGMPPLGYDVVSKRYTINESEAQIVRFIHERYAAGAAQKLIVDECRQRGYCAKRGNELTIGAVNRILRNPKYAGTYVCDDLVLEDAIPAIVSKPLKQQVRDRLAASAKAPGHAKAKVEYLLHGKLFCGECGAPMIGECGRGKNGTTHYYYTCAARKKSRSCKKRNERKFELEKYIVEYISMYVLTDEWINAAAERVVAEYARSYDASGIKPLERQIREADKELDALVDTLIKTASATAIAKINDRIEAVEAKKRTLEADLATLRIASRVEIRKEDIVAWLDQFRVGSSSDPEYCKKIIELFVNAVYVYDDRIKMFFNVRDSAQITYPEMLALDGLECSDFDLSGVPDDALSEQILFINGIIGMLVRR

SEQ ID NO: 3870 - protein, 524 aa, Unknown
  Description of Unknown: Integrase B3871 sequence
  SM00857,G3DSA:1.10.10.2600,IPR036162,PF13408,PS51737, G3DSA:3.40.50.1390,IPR025827,IPR006119,IPR038109,PF07508, SSF53041,IPR011109,PF00239,PTHR30461,PS51736, Coil,cd00338
MNESVCIYLRKSRADREAEAHGEGETLARHEHILLDLAKRQGYSIGAIYREVVSGETISARPVMQKLLHEVESGMWDGVLVVEVERLARGDTIDQGVVSRAFQYSDTKIITPTKIYDPNNEFDEEYFEFGLFMSRREYKTIKRRLNNGRISSVKEGKYCGNKPPYGYERVKLEKEKGYTLRPVPAQAEIVKMIYTWYAGNGCEQIGAAKIVRKLNEMGIETALGGDWTPASIQGILTNPVYIGKIRWNGRKTVKTIQNGQVVKTRPRSKDTIICDGLHPAIISDDLYNSVQEIRQKNPPRPISIKNTVRNPLAGIVYCSKCGRAMVRRPYQKRGQEDTLMCPYTSCPTVSSKLSLVEKAVLDGIKEIAEKYKLNNDINASSNTINSGIVSKQSLIREKESELESLNVQKAKQYDLLEQGIYTTEVFLERSKTIAISIQSCSDIITKLREEIEHDENIMAQQSDFIPRCEELLNSYWNLDVESRNRMLKSLVEKVVYSKNIKNTYGKGNEINFELDIFPKIQKND

SEQ ID NO: 3871 - protein, 524 aa, Unknown
  Description of Unknown: Integrase B3872 sequence
  PTHR30461:SF3,SM00857,IPR036162,PF13408,IPR025827, G3DSA:3.40.50.1390,PS51737,IPR006119,PF07508,IPR011109, SSF53041,PTHR30461,Coil,PS51736,cd00338, PF00239
MNICCYGRKSIYSDHSDSIDNQFRMCRDYVEMKFSGQVDSFLEYQDEAFTGANTKRPDLQRLLADISAGNCDVLIVYQLDRLSRDVRDFANIYAILEEHHVKFISIKENIDTSTPIGRATMYVTVVFAQMERETIAARVADNMIGLAKKGYWTGGNPPEGYVRTRIEVNGKKHCSIVPDPEGVKYVNWIFDTFLQNDYSLQGMETAFKKQGIRTRRGAFFSTAQLHKILTMPYCVAATPEVYDFYAAKGCIMDPESPRESWDGTRGVMIYGRSTEKNKKHELQPPEKWLVCLGAHEPFMPAEKWLAVQARFARNKFDKTMKYDVPLLKGVLRCSCGSIMCVSRKKKVDGSVSSWYYCLKRMRQGKEVCDSRQIKCELLDQKVLELLQSIRRDPGVIHKFAENNVEMLNGPDPKVLASKISTCQTRIDRLVSSLSLAADSSAQKYILAELERLDLEIQALRREHNLALATERKRSMQQQNTLSKVSEINRLIADLDSFSASEKNAIVKDVIKKCVWDGESLSIML

SEQ ID NO: 3872 - protein, 524 aa, Unknown
  Description of Unknown: Integrase B3873 sequence
  SM00857,G3DSA:1.10.10.2600,IPR036162,PS51737,G3DSA:3.40.50.1390, IPR006119,IPR038109,PF07508,SSF53041,IPR011109, PTHR30461,Coil,PS51736,cd00338,PF00239
MNESVCIYLRKSRADREAEAHGEGETLARHERILLDLAKKKEYIVGAIYREVVSGETIADRPVMQQLLREVESGMWDGVLVVEVERLARGDTIDQGVVSRAFQYSDTKIITPTKIYDPNNEFDEEYFEFGLFMSRREYKTIKRRLNAGRISSVKEGKYCGNKPPYGYERVKLEKEKGYTLRPVPTQAEIVKMIYTWYAGDGCEQIGVAKIARKLNEMGIESALCGDWTPASIQGILTNPVYIGKIRWNGRKTVKTIQNGQVIKTRPRSKDTLICDGLHPAIISEDLYNSVQEIRKKNPPHPVSIANSIRNPLAGIVYCSKCGRAMVRRPYQKRGQEDTLMCPYTSCPTVSSKLSLVEKSVIDGIREIVEEYKLNNDINVSSKDIDCVITSKQNLIHEKENELESLNAQKAKQYDLLEQGIYTTEVFLERAKTISASIQSCSDTIEKLKEEIKHEQNIIKQQSDFIPRCEELLDNYWSLDTESKNKMLKSLIEKIAYSKDNKNAYGKGNEIGFQLDIFPKIQKNN

SEQ ID NO: 3873 - protein, 524 aa, Unknown
  Description of Unknown: Integrase B3874 sequence
  PTHR30461:SF3,cd00338,SM00857,G3DSA:1.10.10.2600,IPR036162, PS51737,G3DSA:3.40.50.1390,IPR006119,IPR038109,PF07508, SSF53041,IPR011109,PTHR30461,PS51736, Coil,PF00239
MRNDPILSLNQVIIYLRKSRADDPNMSVEDVLASHERQLQEYATKTFGSVIPESQIYREVVSGETISDRPVVQQVLRLIESEDIRAVLVIEPQRLSRGDLENCGRIINLFRYSQTYVLTPMVSYDLCDEYDRKFFEMELTRGNDYLEYTKRILLRGRLAAVKQGDYIGNVAPYGYRKAVIADGKKRHHTLEIVPEEADAVKIMFAMYADGTGFPTIAHHLDDLGIIPRNGDHWKVATLKDMLENPVYIGKIRWNWKKTRKVVEDGEIRKIRRRDENCLLFDGLHPAIIDKDLYDRANAIRKSRPHVRKNSQLSNPFAGLLFCECGTAMSMKRYVNHGRSGDRVLYSMICNDQTYCHTKSVSYSDFLDRVISVLRDAIKDFEVKLSDDCTGATIALEAHIRALESNLNQLRKKDERQKDAYENGVYSLSDYIARNSKIQDQIRKTTAALDTAKSTPFPSVDYSGKIVKFQACIDSLLDDSVSAVEKNRLLKECIERIDYHNDMPSLPGVGRYVDNIFDLKISLRL

SEQ ID NO: 3874 - protein, 524 aa, Unknown
  Description of Unknown: Integrase B3875 sequence
  SM00857,G3DSA:1.10.10.2600,IPR036162,PF13408,IPR025827, G3DSA:3.40.50.1390,PS51737,IPR006119,IPR038109,PF07508, SSF53041,IPR011109,PTHR30461,Coil,PS51736, cd00338,PF00239
MNESVCIYLRKSRADREAEAHGEGETLARHERILLELAKKKEYIVGAIYREVVSGETIADRPVMQQLLHEVESGMWDGVLVVEVERLARGDTIDQGVVSRAFQYSDTKIITPTKIYDPNNEFDEEYFEFGLFMSRREYKTIKRRLNNGRISSVKEGKYCGNKPPYGYERVKLEKEKGYTLRPVPAQAEIVKMIYTWYAGDGCEQIGVAKIVRKLNDMGIKSALGGDWTPASIQGILTNPVYIGKIRWNGRKTVKTIQNSQVVKTRPRSRDVLICEGLHPAIISDDLYNSAQEVRQKNPPRPISIKNTVRNPLAGIVYCSNCGRAMVRRPYQKRGQEDTLMCPYTSCPTVSSKLSLVEKAVLDGIKEITEQYKLNNDINVPSNTINSGIVSKQNLIREKESELENLNAQKAKQYDLLEQGIYTTEVFLERSKTIAISIQSCSDIITKLREEIEHDENIMAQQSDFVPRCEELLNNYWNLNMESRNRMLKNLVEKVVYSKNIKNTYGKGNEINFDLDIFPKIQKND

SEQ ID NO: 3875 - protein, 524 aa, Unknown
  Description of Unknown: Integrase B3876 sequence
  cd00338,SM00857,G3DSA:1.10.10.2600,IPR036162,PS51737, G3DSA:3.40.50.1390,IPR006119,IPR038109,PF07508,SSF53041, IPR011109,PTHR30461,PS51736,Coil,PF00239
MNESVCIYLRKSRADREAEAHGEGETLARHERILLELAKKKEYIVGAIYREVVSGETIADRPVMQQLLHEVESGMWDGVLVVEVERLARGDTIDQGVVSRAFQYSDTKIITPTKIYDPNNEFDEEYFEFGLFMSRREYKTIKRRLNNGRISSVKEGKYCGNKPPYGYERVKLEKEKGYTLRPVPAQAEIVKMIYTWYAGDGCEQIGVAKIVRKLNDMGIKSALGGDWTPASIQGILTNPVYIGKIRWNGRKTVKTIQNGQVVKTRPRSRNVLICEGLHPSIISDDLYNSVQEIRQKNPPRPISIKNTVRNPLARIVYCSKCGRAMVRRPHQKRGQEDTLMCPYTSCPTVSSKLSLVEKAVLDGIKGITEKYKLNNDINVPYNTINSGIVSKQNLIREKESELESLNVQKAKQYDLLERGIYTTEVFLERSKTIARSIQSCSDIITKLREEIEHDENIKAQQSNFIPRCEELLNNYWDLNIESRNRMLKNLVEKVVYSKNIKNTYGKGNEINFELDIFPKIQKND

SEQ ID NO: 3876 - protein, 524 aa, Unknown
  Description of Unknown: Integrase B3877 sequence
  cd00338,SM00857,G3DSA:1.10.10.2600,IPR036162, PF13408,IPR025827,PS51737,G3DSA:3.40.50.1390, IPR006119,IPR038109,PF07508,IPR011109, SSF53041,PTHR30461,PS51736,Coil,PF00239
MNESVCIYLRKSRADREAEAHGEGETLARHERILLDLAKKKEYIVGAIYREVVSGETIADRPVMQQLLHEVESGMWDGVLVVEVERLARGDTIDQGIVSRAFKFSNTKIITPLKTYDPNNEYDEEYFEFGLFMSRREYKTIKRRLNAGRISSVKEGKYCGNKPPYGYERVKLEKEKGYTLRPVPTQAEIVKMIYTWYSGDGCEQIGVAKIARKLNEMGIESALGGDWTPASIQGILTNPVYIGKIRWNGRKTVKTIQTGQVIKTRPRSKDTLICNGLHPAVISEDLYNSVQEIRKKNPPRPVSIANSIRNPLAGIVYCSKCGRAMVRRPYQKRGQEDTLMCPYTSCPTVSSKLSLVEKAVLDGIREIVEKYKLNNDINTSSQAIDLTIISKQNLIHEKENELESLNAQKAKQYDLLEQGIYTTEVFLERAKTISASIQSCSDTIEKLKEEIKHDENIIKQQSDFIPRCEELLDNYWSLDTESKNKMLKSLIEKVAYSKDTKNAYGKGNEIGFQLDIFPKIQKNN

SEQ ID NO: 3877 - protein, 524 aa, Unknown
  Description of Unknown: Integrase B3878 sequence
  PTHR30461:SF3,SM00857,G3DSA:1.10.10.2600,IPR036162,PF13408, PS51737,G3DSA:3.40.50.1390,IPR025827,IPR006119,IPR038109, PF07508,IPR011109,SSF53041,PTHR30461,PS51736, cd00338,PF00239
MNKLRAAAYCRVSTDRAEQSGSLASQRSFFDDYIRNSDSMTLVGVFYDEGTSGTTTLNRYGFNKMISLAVSGGIDIILTKEVSRFARNTVDTLNITRMLRAKGVGIIFINDNIDTRDSDGELRLSIMATIAQEESRKISERVKWGQQRKMEQGVVFGRSCLGYDVKDGKITINADSAEIVKRIFTEYTVLLKGAESIADGLNAEQIRTVNGGRWSGAFIRKVLRNVKYVGDLEQKKTCTPDFLTHKKRLNRSEHIYIRNHHEPIISRELWEQTQAEISRRKPTDTSRHSDRYVFSGKVYCGVCGSVMVSRVKTLKNGKIYHALRCSGRIGGKSCNNETLNVTALKTCVKRIFTDMPIDKTAVINAVIKGLSRTDKPDIPALRRKIETLNAKKRRAVDLMLDGLITQQELIEQKSYYDSIIEKLSQEISSDRSVFETDKIRKNAERFLDFTSDPLWLLVIRADYIHGTLTVYLKGIENGFTTCFTATGRGDSYRVITGNTVRSQGIIPGTMQVQKNRCRHDVNDK

SEQ ID NO: 3878 - protein, 524 aa, Unknown
  Description of Unknown: Integrase B3879 sequence
  PTHR30461:SF3,SM00857,G3DSA:1.10.10.2600,IPR036162,PS51737, G3DSA:3.40.50.1390,IPR006119,IPR038109,PF07508,IPR011109, SSF53041,PTHR30461,Coil,PS51736,cd00338, PF00239
MNTDQIIEKVTSQYTQDKYAMYLRKSRADIEMEALGEGETLAKHKTMLFTLAARHDILPSQITIYQEIVSGESIQDRPEVQRLLEDVYAEKYKGVLVVEVERLARGNTKDQGEVAEAFQMSDTKIITPVKVYDPDNEFDQEYFEFGLFMSRREFKTIRRRLEAGKLQAVLEGNYLLPQRVFGYNIVRKSKDNRYLVINDEERPLVQMMFDWFTEENRSCDWIAKQFTSMGIPTMQGSREWHKETISCMLKNKLYIGIITWGKSKTVKVRDPKTGKVQKKRVQASPEEVKYINGKHKPIISEAQFRKAQGRFKKNPINHGKELVSPLAGLIHCADCGKALDWINYKDSRGIRYSHKASTYCKKKSLRVEIVFDALVEVLEAHIEDFEFKMNHDGNGAARARHLEKISRMDAELEKLEKKRKKLFDDYEDEVYTKEEFIERKQVYAQSIADLKAQLAQAKADVPEVIDYSERIITLQKIIETFKDPALDAQAKNDFLKEFIEDIRYDVIDYGRSKGGKPVLEIIFK

SEQ ID NO: 3879 - protein, 524 aa, Unknown
  Description of Unknown: Integrase B3880 sequence
  PTHR30461:SF3,cd00338,SM00857,G3DSA:1.10.10.2600,IPR036162, PF13408,IPR025827,PS51737,G3DSA:3.40.50.1390,IPR006119, IPR038109,PF07508,SSF53041,IPR011109,PTHR30461, PS51736,Coil,PF00239
MRAFIYCRFSSHKQQELSIEGQRDICQEYADKHNITVVGQYADRARSGKTENRADFRRLMRDAATGVVDCVLVWRYDRFFRNRAESALYRKQLEAAGVHLISVTEYIPEGSAGIITQGMIETVAEYFSAKLSEDVSRGMNKAAQHCQIVGRAPLGYRAGPDKRWQIDPVGAELVRRIFEWYASGKPMGQLAAQLNEEGHRTTNGTLYTRSSFNSILRNEKYIGVYSYGGEVRIEGGCPRIVEDELFFTVQRRLSANRHRPGAYKAEVPYLLSGKLFCGLCGAPMTGTAGTSHTGARHYYYICNNRRAKTCKKKNVRLDLIEEAVLQSALDILTDENIAYISTEVERRCAENSDSAALLASLNAQLEEVQRRLKNIGNAIAQGIITETTKELLEEAEADRTALRQQIDRAKVQAALVVKAEAVACWLDGFRRGDRTDPDFRRQVFGALVHSIFVYDDYLKIIFNVDSAGAAVVPYEAAQAATPSEAPPGSYLDTLGAPKRYLARSCGVFFYCYFPGHCGTERLKK

SEQ ID NO: 3880 - protein, 524 aa, Unknown
  Description of Unknown: Integrase B3881 sequence
  PTHR30461:SF3,SM00857,G3DSA:1.10.10.2600,IPR036162,PF13408, PS51737,IPR025827,G3DSA:3.40.50.1390,IPR006119,IPR038109, PF07508,IPR011109,SSF53041,PTHR30461,Coil, PS51736,cd00338,PF00239
MYEDIKTACLYVRFSSHNQTEQSIEGQTRVCQEFCQRHNIKIVEIYADRATSASKNTEKRVSFLKMIKDSEKGLFDAVVVYKLDRFARSRYDSATYKYRLKKNGVQLISATENITNSPEGIILESVLEGMAEFYSAELSQKINRGMRESAYKHNSIGGALPLGYKTVDKKLVIDEKTAPIVREAFTMYAEGHSVAEICRIFNARGYKTSKGTEFGKNSFSKIFRNERYIGTYTYHDYRAEDAIPAIIDRDLWDRVQLRLKKVKNSPGRNKAKRVYLLSGKLFCGHCGESMNGNCNGNKYAFYECYGKKSKYNGCQKRNLRKEYIERLVAQDALSLLTDENIEHLATVACERNDYEIETGSPIPVIRDRIHQTEVSINNLTKAIETGATPDALVKRMVELEREKKDLSTQLKKEEELIVPLEKEQVIFWLEKFKDGDIEDEEFCRLLIDLFVNSVTVWDEDNDMLKVTIAYNLTSLPTKTYRLTKDGTLSDFTGNAPGMSANPTIHGNLVIHTFVCSQIKRYQRF

SEQ ID NO: 3881 - protein, 524 aa, Unknown
  Description of Unknown: Integrase B3882 sequence
  SM00857,G3DSA:1.10.10.2600,IPR036162,PF13408,PS51737, G3DSA:3.40.50.1390,IPR025827,IPR006119,IPR038109,PF07508, IPR011109,SSF53041,PTHR30461,Coil,PS51736, cd00338,PF00239
MNESVCIYLRKSRADREAEAHGEGETLARHERILLDLAKKKEYIVGAIYREVVSGETIADRPVMQQLLHEVESGMWDGVLVVEVERLARGDTIDQGVVSRAFQYSDTKIITPTKIYDPNNEFDEEYFEFGLFMSRREYKTIKRRLNNGRISSVKEGKYCGNKPPYGYERVKLEKEKGYTLRPVPAQAEVVKMIYAWYAGDGCEQIGVAKIVRKLNEMGIESALGGDWTPASIQGILTNPVYIGKIRWNGRKTVKTIHNGQVVKTRPRSRDVLICGGLHPAIISDDLYNSVQEIRQKNPPRPISIKNTVRNPLAGIVYCSKCGRAMVRRPYQKRGQEDTLMCPYTSCSTVSSKLSIVEKAVIDGIRDIAEEYKLNNDVNTSSKAIDLTIISKQNLIREKESELENLNTQKAKQYDLLEQGIYTTEVFLERSKTIATSIQSCSDIITKLREEIEHDENIMAQQSDFVPRCEELLNNYWNLDVESRNRMLKSLVEKVVYSKNIKNAYGKSNEINFELDIFPKIQKND

SEQ ID NO: 3882 - protein, 524 aa, Unknown
  Description of Unknown: Integrase B3883 sequence
  cd03768,PTHR30461:SF3,SM00857,IPR036162,PF13408, IPR025827,PS51737,G3DSA:3.40.50.1390,IPR006119,PF07508, IPR011109,SSF53041,PTHR30461,PS51736,Coil, PF00239
MIFCCYGRKSVYSDRSDSVDNQFRMCRDYVNVKYSGQVDDFRAYSDEDFTGANTNRPDLQRLLEDIRSGAADVLIVYQLDRLSRDVRDFANIYATLEEHRVKFVSIKENIDTSTPIGRAMMYVTVVFAQMERETIAARVTDNMIGLAKKGYWVGGNPPVGYVRDQIIVDGKKHCAITPDPEGARYVTWIFDSFIQFGGSIQKMETQFKHKGIRTQRGGFFSASQLHKILTMPYCVEATPEVYDFYQAKGCIMDPGSPREKWDGSVGVMVYGRTTEKNKKHELQPPDQWRVCLGVHKPFMPADKWLAVQARFAQNQRFKSARWPSPLLKGVIRCKCGALMSIGRKQKVDGSVSSAYYCPKRTRQGADACDMRQIKCEILDVKVINILRAVEQDNTAILRYVQKDQDTAARPDPKKISGQIKSCEAKIEKLAASLALASGSAATKYIIAEMERLDLEIQALNREYTIAASEERKRSAAQVSTQERAKIISEKMRNFDGFTAAERNAIAREVIKKCVWDGETLYVEL

SEQ ID NO: 3883 - protein, 524 aa, Unknown
  Description of Unknown: Integrase B3884 sequence
  cd00338,SM00857,G3DSA:1.10.10.2600,IPR036162,PF13408, IPR025827,G3DSA:3.40.50.1390,PS51737,IPR006119,IPR038109, PF07508,IPR011109,SSF53041,PTHR30461,PS51736, Coil,PF00239
MNESVCIYLRKSRADREAEAHGEGETLARHERILLDLAKKKEYIVGAIYREVVSGETIADRPVMQQLLHEVESGMWDGVLVVEVERLARGDTIDQGVVSRAFQYSDTKIITPTKIYDPNNEFDEEYFEFGLFMSRREYKTIKRRLNAGRISSVKEGKYCGNKPPYGYERVKLEKEKGYTLRPVPTQAEIVKMIYTWYSGDGCEQIGVAKIARKLNEMGIESALGGDWTPASIQGILTNPVYIGKIRWNGRKTVKTIQNGQVIKTRPRSKDTLICNGLHPAVISEDLYNSVQEIRKKNPPRPVSIANSIRNPLAGIVYCSKCGRAMVRRPYQKRRQEDTLMCPYTSCPTASSKLSLVEKSVIDGIREIVEEYKLNNDINASSKDIDCVITSKQNLIHEKENELESLNSQKAKQYDLLEQGIYTTEIFLERAKTISASIQSCSDTIEKLKEEIKHDENIIKQRSDFIPRCEELLDNYWGLDTESKNKMLKSLIEKVTYSKDTKNAYGKGNEIGFQLDIFPKIQKNN

SEQ ID NO: 3884 - protein, 524 aa, Unknown
  Description of Unknown: Integrase B3885 sequence
  cd00338,SM00857,G3DSA:1.10.10.2600,IPR036162,PF13408, PS51737,G3DSA:3.40.50.1390,IPR025827,IPR006119,IPR038109, PF07508,IPR011109,SSF53041,PTHR30461,PS51736, Coil,PF00239
MSLENVCIYLRKSRADQEAELRGEGETLARHERILLDLAKSRNYSVGAIYREIVSGETISARPVMQQLLREVEAGSWDGVLVVEVERLARGDTIDQGVVSRAFQFSDTKIITPTKTYDPDNEFDEEYFEFGLFMSRREYKTIKRRLNAGRIASVKEGKYCGSKPPYGYERVKLHGEKGFTLQPVPEQAEVIKMIYSLYSGASGDRIGVSKIVRKLNDMGIKSPSGKDWVPISVQDVLANPVYAGMIRWNGRKTVRAIQDGVVTQSRPRSKEDDILLFPGRHPAIVSKEMYDSVQQIRKKNPPRPISIKNTIKNPLAGIVYCSKCGRAMVRRPYQKRGQDDTLMCSYTSCPTVSSKLSLVERAVLNGIQDLVDEYRLNDAVPGPDINNAVKSKKKLIAEKEHELEKLNVQKMKQYDLLEQGIYTTEVFLERSNSIASSINSCQDSIECLKEEIRHDKELIDQQSSFIPRCENLLEIYWSLDTAAKNKMLKELIERVNYTKDVKNAFRMGNEATFVLDIFPRIQSN

SEQ ID NO: 3885 - protein, 524 aa, Unknown
  Description of Unknown: Integrase B3886 sequence
  SM00857,G3DSA:1.10.10.2600,IPR036162,PF13408,PS51737, G3DSA:3.40.50.1390,IPR025827,IPR006119,IPR038109,PF07508, IPR011109,SSF53041,PTHR30461,Coil,PS51736, cd00338,PF00239
MNESVCIYLRKSRADREAEARGEGETLARHEHILLDLAKRQGYSIGAIYREVVSGETISARPIMQQLLHEVESGMWDGVLVVEVERLARGDTIDQGVVSRAFQYSDTKIITPTKIYDPNNEFDEEYFEFGLFMSRREYKTIKRRLNAGRISSVKEGKYCGNKPPYGYERIKLAREKGYTLRPIPVQAEIVKMIYTWYAGDGCEQIGVAKIVRKLNDMGIESALGGDWTPASIQGILTNPVYIGKIRWNGRKTVKTIQNGQVVKTRPRSKNVLICEGLHPAIIPDDLYNSVQEIRQKNPYRPISIKNTVRNPLAGIVYCSKCGRAMVRRPYQKSGQEDTLMCPYTSCSTVSSKLSLVEKAVIDGIREIAEKYKLNNDINVPSSTINSGIVSKQNLIREKENELENLNSQKAKQYDLLEQGIYTTEVFLERSKTISASIQSCSDAITNLREEIEHDENIKAQQSDFIPRCEELLDNYWSLDTESKNKMLKSLIEKVVYSKNTKNAYGKGNEISFQLDIFPKIQKNN

SEQ ID NO: 3886 - protein, 524 aa, Unknown
  Description of Unknown: Integrase B3887 sequence
  PTHR30461:SF3,cd00338,SM00857,G3DSA:1.10.10.2600,IPR036162, PF13408,PS51737,G3DSA:3.40.50.1390,IPR025827,IPR006119, IPR038109,PF07508,IPR011109,SSF53041,PTHR30461, PS51736,Coil,PF00239
MCAKKKPAMLEPDMQDAVIYTRYSSHNQRDCSIEQQVADCEIFARQNNLRVVKVYADRHLSGTTDNRPQFQQMLKDASHGHWAYVICWKIDRFARNRYDSATYKFRLKKAGVRVLYAKESIPDGPEGILLESVLEGSAEYYSAALAQNIRRGMKYNAEQCKVNSGSIPFGYCKGPDGRFAIHEANAEVVREIFRKAAAGMPFVDIANDLNSRGLKTSRGGRWNKGSFRLLMNEAYIGVYHFSDTRIEGGMPALIDQGTFWAANERLKANSSVRGRHQDGGDYLLTGKLKCAHCGSYMIGFSGTGKNGELHYYYGCQKRRRERACKKANVPREWIERVVVKAALDYVLRPDVMEWIADAVMEYQEREAASAQLAALTAELEENQKATDNVMNAIEAGIITSTTKQRLLDLEAKAQDLKRAIELEKLSHVHLERDQVLFWLDRFRGGSLQSQEFRRKVIDAFVSVVYLSDDHLRIAFNYSGGSNAEAGFDLVMDAEAAAGELSKKFAQGHVASTIRNADEPSKENE

SEQ ID NO: 3887 - protein, 524 aa, Unknown
  Description of Unknown: Integrase B3888 sequence
  PTHR30461:SF3,SM00857,G3DSA:1.10.10.2600,IPR036162,PS51737, G3DSA:3.40.50.1390,IPR006119,IPR038109,PF07508,IPR011109, SSF53041,PF00239,PTHR30461,PS51736,Coil, cd00338
MNTDQIIEKVTSQYTQDKYAMYLRKSRADIEMEALGEGETLAKHKTMLFNLAARHDILPSQITIYQEIVSGESIQDRPEVQRLLDDVYANKYKGVLVVEVERLARGNTKDQGEVAEAFQMSDTKIITPVKVYDPDNEFDQEYFEFGLFMSRREYKTIRRRLEAGKLQAVLEGNYLLPQRVFGYNIVRKSKDNRYLVVNEEEQPLVQMMFDWFTEENRSCDWIAKQFTSMGIPTMQGSREWHKETISCMLKNKLYIGIITWGKSKTVKVRDPKTGKVQKKRVQASPEEVKYINGKHKPIISEAQFRKAQGRFKKNPINHGKELVSPLAGLIHCADCGKALDWINYKDSRGIRYSHKASTYCKKKSLRVEIVFDALVEALEAHIEDFEFKMNHDGNGAARARHLEKISRMDAELEKLEKKRKKLFDDYEDEVYTKEEFIERKQVYAQSIADLKAQLAQAKADVPEVIDYSERIITLQKIIETFKDPSLDAQAKNDFLKEFIEDIRYDVIDYGRSKGGKPVLEIIFK

SEQ ID NO: 3888 - protein, 524 aa, Unknown
  Description of Unknown: Integrase B3889 sequence
  SM00857,G3DSA:1.10.10.2600,IPR036162,PF13408,IPR025827, G3DSA:3.40.50.1390,PS51737,IPR006119,IPR038109,PF07508, IPR011109,SSF53041,PTHR30461,Coil,PS51736, cd00338,PF00239
MNESVCIYLRKSRADREAEAHGEGETLARHQRILLDLAKKKEYIVGAIYREVVSGETIADRPVMQQLLHEVESGMWDGVLVVEVERLARGDTIDQGVVSRAFQYSDTKIITPTKIYDPNNEFDEEYFEFGLFMSRREYKTIKRRLNAGRISSVKEGKYCGNKPPYGYERVKLEKEKGYTLRPVPTQAEIVKMIYAWYAGDGCEQIGVAKIVRKLNDMRIKSALGGDWTPASIQGILTNPVYIGKIRWNGRKTVKTIQNGQVIKTRPRSKDTLICEGLHPAIISEDLFNSVQEIRKKNPPRPVSIANSIRNPLAGIVYCSKCGRAMVRRPYQKRRQEDTLMCPYTSCPTVSSKLSLVEKAVIDGIKEIVEEYKLNNDINASSKDIDCVITSKQNLIHEKENELESLNAQKAKQYDLLEQGIYTTEVFLERAKTISASIQSCSDTIEKLKEEIKHDQNIIKQQSDFIPRCEELLDNYWSLDTESKNKMLKSLIEKVAYSKDTKNAYGKGNEIGFQLDIFPKIQKNN

SEQ ID NO: 3889 - protein, 524 aa, Unknown
  Description of Unknown: Integrase B3890 sequence
  SM00857,G3DSA:1.10.10.2600,IPR036162,PF13408,IPR025827, G3DSA:3.40.50.1390,PS51737,IPR006119,IPR038109,PF07508, SSF53041,IPR011109,PF00239,PTHR30461,PS51736, Coil,cd00338
MNESVCIYLRKSRADREAEAHGEGETLARHQRILLDLAKKKEYIVGAIYREVVSGETIADRPVMQQLLHEVESGMWDGVLVVEVERLARGDTIDQGVVSRAFQYSDTKIITPTKIYDPNNEFDEEYFEFGLFMSRREYKTIKRRLNAGRISSVKEGKYCGNKPPYGYERVKLEKEKGYTLRPVPTQAEIVKMIYTWYAGDGCEQIGVAKIARKLNEMGMESALGGDWTPASIQGILTNPVYIGKIRWNGRKTVKTIQTGQVIKTRPRSKDTLICDGLHPAIISEDLYNSVQEIREKNPPRPISIKNSIRNPLSGIVYCSKCGRAMVRRPYQKRGQEDTLMCPYTSCPTVSSKLSLVEKAVLDGIREIVEKYKLNNDINTSSQAIDLTIISKQNLIHEKENELESLNAQKAKQYDLLEQGIYTTEVFLERAKTISASIQSCSDTIEKLKEEIKHDENIIKQQSDFIPRCEELLDNYWSLDTESKNKMLKSLIEKVAYSKDTKNAYGKGNEIGFQLDIFPKIQKNN

SEQ ID NO: 3890 - protein, 524 aa, Unknown
  Description of Unknown: Integrase B3891 sequence
  cd00338,SM00857,G3DSA:1.10.10.2600,IPR036162,PF13408, IPR025827,G3DSA:3.40.50.1390,PS51737,IPR006119,IPR038109, PF07508,IPR011109,SSF53041,PTHR30461,PS51736, Coil,PF00239
MNESVCIYLRKSRADREAEAHGEGETLARHERILLDLAKKKEYIVGAIYREVVSGETIADRPVMQQLLREVESGMWDGVLVVEVERLARGDTIDQGVVSRAFQYSDTKIITPTKIYDPNNEFDEEYFEFGLFMSRREYKTIKRRLNAGRISSVKEGKYCGNKPPYGYERVKLEKEKGYTLRPVPTQAEIVKMIYTWYAGDGCEQIGVAKIARKLNEMGIESALGGDWTPASIQGILTNPVYIGKIRWNGRKTVKTIQNGQVIKTRPRSKDTLICEGLHPAIISEDLFNSVQEIRKKNPPRPVSIANSIRNPLAGIVYCSKCGRAMVRRPYQKRGQKDTLMCPYTSCSTVSSKLSLVEKAVIDGIKEIVEEYKLNNDIDASSKAIDSGITSKQNLIREKESELESLNAQKAKQYDLLEQGIYTTEIFIERAKTIAASIQSCSDTIEKLKEEIKHEQNIIKQQSDFIPRCEELLDNYWSLDTESKNKMLKSLIEKVTYSKDTKNAYGKGNEIGFQLDIFPKIQKNN

SEQ ID NO: 3891 - protein, 524 aa, Unknown
  Description of Unknown: Integrase B3892 sequence
  cd00338,SM00857,G3DSA:1.10.10.2600,IPR036162,PF13408, IPR025827,G3DSA:3.40.50.1390,PS51737,IPR006119,IPR038109, PF07508,IPR011109,SSF53041,PTHR30461,PS51736, Coil,PF00239
MNESVCIYLRKSRADREAEAHGEGETLARHERILLDLAKKKEYIVGAIYREVVSGETIADRPVMQQLLREVESGMWDGVLVVEVERLARGDTIDQGVVSRAFQYSDTKIITPTKIYDPNNEFDEEYFEFGLFMSRREYKTIKRRLNAGRISSVKEGKYCGNKPPYGYERVKLEKEKGYTLRPVPTQAEIVKMIYTWYAGDGCEQIGVAKIARKLNEMGIESALCGDWTPASIQGILTNPVYIGKIRWNGRKTVKTIQNGQVIKTRPRSKDTLICDGLHPAIISEDLYNSVQEIRKKNPPRPISIKNSIRNPLSGIVYCSKCGRAMVRRPYQKRGQEDTLMCPYTSCPTVSSKLSLVEKSVIDGIREIVEEYKLNNDINASSKDIDCVITSKQNLIHEKENELENLNAQKAKQYDLLEQGIYTTEVFLERAKTISASIQSCSDTIEKLKEEIKHDENIIKQQSDFIPRCEELLDNYWSLNTESKNKMLKSLIEKVTYSKDTKNAYGKGNEIGFQLDIFPKIQKNN

SEQ ID NO: 3892 - protein, 524 aa, Unknown
  Description of Unknown: Integrase B3893 sequence
  SM00857,G3DSA:1.10.10.2600,IPR036162,PS51737,G3DSA:3.40.50.1390, IPR006119,IPR038109,PF07508,IPR011109,SSF53041, PTHR30461,Coil,PS51736,cd00338,PF00239
MNESVCIYLRKSRADREAEAHGEGETLARHERILLDLAKKKEYIVGAIYREVVSGETIADRPVMQQLLHEVESGMWDGVLVVEVERLARGDTIDQGVVSRAFQYSDTKIITPTKIYDPNNEFDEEYFEFGLFMSRREYKTIKRRLNAGRISSIKEGKYCGNKPPYGYERVKLEKEKGYTLRPVPAQAEIVKMIYTWYAGDGCEQIGVAKIARKLNEMGIESALGGDWTPASIQGILTNPVYIGKIRWNGRKTVKTIQNGQVIKTRPRSKDTLICNGLHPAVISEDLYNSVQEIRKKNPPRPVSIANSIRNPLAGIVYCSKCGRAMVRRPYQKRRQEDTLMCPYTSCPTVSSKLSLVEKSVINGIREIVEEYKLNNDINASSKDIDCVITSKQNLIHEKENELESLNSQKAKQYDLLEQGIYTTEIFLERAKTISASIQSCSDTIEKLKEEIKHDENIIKQRSDFIPRCEELLDNYWSLDTESKNKMLKSLIEKVVYSKDTKNAYGKGKEIGFQLDIFPKIQKNN

SEQ ID NO: 3893 - protein, 524 aa, Unknown
  Description of Unknown: Integrase B3894 sequence
  SM00857,G3DSA:1.10.10.2600,IPR036162,PF13408, IPR025827,PS51737,G3DSA:3.40.50.1390,IPR006119, IPR038109,PF07508,IPR011109,SSF53041, PTHR30461,Coil,PS51736,cd00338,PF00239
MNESVCIYLRKSRADREAETHGEGETLARHQRILLDLAKKKEYIVGAIYREVVSGETIADRPVMQQLLHEVESGMWDGVLVVEVERLARGDTIDQGVVSRAFQYSDTKIITPTKIYDPNNEFDEEYFEFGLFMSRREYKTIKRRLNAGRISSVKEGKYCGNKPPYGYERIKLAREKGYTLRPVPAQAEIVKMIYTWYAGDGCEQIGVAKIVRKLNEMGIESAQGGDWTPASIQGILTNPVYIGKIRWNGRKTVKTIQNGQVVKTRPRSKDVLICEGLHPAIISDDLYNSAQKIRQKNPYRPISIKNTVRNPLAGIVYCSKCGRAMVRRPYQKHGQEDTLMCPYTSCSTVSSKLSLVEKAVIDGIKEIAEEYKLNNNINVSSKAIDSTIISKQNLINEKENELKSLNSQKAKQYDLLEQGIYTTEVFLERAKTISASIQSCSDTIEKLKEEIKHDQNIIKQQSDFVPRCEELLDNYWSLDTESKNKMLKSLIEKVVYSKNTKNAYGKGNEIGFQLDIFPKIQKND

SEQ ID NO: 3894 - protein, 524 aa, Unknown
  Description of Unknown: Integrase B3895 sequence
  PTHR30461:SF3,cd00338,SM00857,G3DSA:1.10.10.2600,IPR036162, PF13408,PS51737,G3DSA:3.40.50.1390,IPR025827,IPR006119, IPR038109,PF07508,IPR011109,SSF53041,PTHR30461, PS51736,Coil,PF00239
MILLENLIMYLRKSRSDDISMSVEDVLAKHEHILQEYCEREFGARLPENRIFREVVSGETIADRPVMKEIMKLLETGTIKGVLVVEPQRLSRGDLEDCGKIINTFRYTETLIITPTKTYDLSNEYDRKFFEMELTRGNDYLEYTKRILNRGREASVRQGNFIGSIAPYGYKKIVVGSGKDKYHTLEIDNEEADAIRLMYSLFVNEGYGFARIAHRLDELGFKPRNSENWQPAAIKDMVENPVYIGKIRWNWRKTQKRMENGEIVKIRPKTKDSSEWILVDGKHPAIISEELYNEALKRRGKNPCVRKSLELTNPYAGLLFCGTCGRAMSQKRFVNRRTHTQSVCDSMLCNNQANCHTKSVKYSAFEQRVIELLENAVADFEIKLKDNNTNVIQLHEGIVQKHLRELERLHEKDMRQKDAYEDGVYTKEEYIKRNALVQEQIAKATSALEQAKASTPKVIDYADKIRRFTDCINALKNPDISASEKNVLLKSCIKRIDYYNDGESKPGVGRYVENVFELNMLLNI

SEQ ID NO: 3895 - protein, 524 aa, Unknown
  Description of Unknown: Integrase B3896 sequence
  SM00857,G3DSA:1.10.10.2600,IPR036162,PF13408,PS51737, G3DSA:3.40.50.1390,IPR025827,IPR006119,IPR038109,PF07508, IPR011109,SSF53041,PF00239,PTHR30461,PS51736, Coil,cd00338
MNESVCIYLRKSRADREAEAHGEGETLARHERILLELAKKKEYIVGAIYREVVSGETIADRPVMQQLLHEVESGMWDGVLVVEVERLARGDTIDQGVVSRAFQYSDTKIITPTKIYDPNNEFDEEYFEFGLFMSRREYKTIKRRLNNGRISSVKEGKYCGNKPPYGYERVKLEKEKGYTLRPVPAQAEIVNMIYTWYAGDGCEQIGVAKIVRKLNDMGIKSALGGDWTPASIQGILTNPVYIGKIRWNGRKTVKTIQNGQVVKTRPRSRNVLICEGLHPAIISDDLYNSVQEIRQKNPPRPISIKNTVRNPLAGIVYCSKCGRAMVRRPYQKRGQEDTLMCPYTSCPTVSSKLSLVEKAVLDGIKEIAEKYKLNNDINTPSNTINSGIISKQNLIREKESELESLNVQKVKQYDLLERGIYTTEVFLERSKTIARSIQSCSDIITKLREEIEHDENIKAQQSNFIPRCEELLNNYWDLNIESRNRMLKNLVEKVVYSKNIKNTYGKGNEINFELDIFPKIQKND

SEQ ID NO: 3896 - protein, 524 aa, Unknown
  Description of Unknown: Integrase B3897 sequence
  SM00857,G3DSA:1.10.10.2600,IPR036162,PS51737,G3DSA:3.40.50.1390, IPR006119,IPR038109,PF07508,SSF53041,IPR011109, PF00239,PTHR30461,PS51736,Coil,cd00338
MTVFEMNDAINDAFTGKMDKYAIYLRKSRADIEAEKLGEGETLTRHKMILTELAARKGFYIEKIYQEIVSGETIEAREEIQKLINDCYAGKYRGILVIDITRLSRGNQGDAQTILDCLKFANNNNGVLVITPTKTYDVAHNHDDEEYMEFELFMSRREYKMIRKRMERGKLQAVVEGNYISSSRPYGYNILKTKTGRTLIPNDEEAPVVKQIFEWTIKNNSTPGKIARRLTAMGVPTYTGMPEWSDETIRSILQNPVYTGKVRWNNRMAVKRLVDGELVKSRPRWNHNEHYIEVDGKHKQYALIDDETFKKAGQRFHSDKTRAGLKLVNPLAGILCCAKCGRPMMYMPYVNNPTPPRLAHRHSQTCKVKSAIASDVIEAVVHGLKLYIEDFEMKIDEMPEVDENAIADQIDALQKEIKKIKKKLSKLFDAWENDDITDNEFVQRKAVNNARIDAIKNEIEELENTIPEKEEHEDTIMKLSDALDALLDEELEASVKNTYLKEIVSKIEFSRENNKEFILDIILK

SEQ ID NO: 3897 - protein, 524 aa, Unknown
  Description of Unknown: Integrase B3898 sequence
  PTHR30461:SF3,SM00857,G3DSA:1.10.10.2600,IPR036162,PS51737, G3DSA:3.40.50.1390,IPR006119,IPR038109,PF07508,IPR011109, SSF53041,PTHR30461,Coil,PS51736, cd00338,PF00239
MNTDQIIEKVTSQYTQDKYAMYLRKSRADIEMEALGEGETLAKHKTMLFNLAARHDILPSQITIYQEIVSGESIQDRPEVQRLLDDVYANKYKGVLVVEVERLARGNTKDQGEVAEAFQMSDTKIITPVKVYDPDNEFDQEYFEFGLFMSRREYKTIRRRLEAGKLQAVLEGNYLLPQRVFGYNIVRKSKDNRYLVINEEEQPLVQMMFDWFTEENRSCDWIAKQFTSMGIPTMQGSREWHKETISCMLKNKLYIGIITWGKSKTVKVRDPKTGKVQKKRVQASPEEVKYINGKHKPIISEAQFRKAQGRFKKNPINHGKGLVSPLAGLIHCADCGKALDWINYKDSRGIRYSHKASTYCKKKSLRVEIVFDALVEALEAHIEDFEFKMNHDGNGAERARHLEKISRMDAELEKLEKKRKKLFDDYEDEVYTKEEFIERKQVYAQSIADLKAQLAQAKADVPEVIDYSERIITLQKIIETFKDPALDAQAKNDFLKEFIEDIRYDVIDYGRSKGGKPVLEIIFK

SEQ ID NO: 3898 - protein, 524 aa, Unknown
  Description of Unknown: Integrase B3899 sequence
  SM00857,G3DSA:1.10.10.2600,IPR036162,PF13408,IPR025827, G3DSA:3.40.50.1390,PS51737,IPR006119,IPR038109,PF07508, SSF53041,IPR011109,PTHR30461,Coil,PS51736, cd00338,PF00239
MNESVCIYLRKSRADREAEAHGEGETLARHERILLDLAKKKEYIVGAIYREVVSGETIADRPVMQQLLREVESGMWDGVLVVEVERLARGDTIDQGVVSRAFQYSDTKIITPTKIYDPNNEFDEEYFEFGLFMSRREYKTIKRRLNAGRISSVKEGKYCGNKPPYGYERVKLEKEKGYTLRPVPTQAEIVKMIYTWYAGDGCEQIGVAKIARKLNEMGIESALCGDWTPASIQGILTNPVYIGKIRWNGRKTVKTIQNGQVIKTRPRSKDTLICEGLHPAIISEDLFNSVQEIRKKNPPRPVSIANSIRNPLAGIVYCSKCGRAMVRRPYQKRRQEDTLMCPYTSCPTVSSKLSLVEKAVIDGIKEIVEEYKLNNNINASSKDIDCVITSKQNLIHEKENELKSLNSQKAKQYDLLEQGIYTTEVFLERAKTIAASIQSCYDTIEKLKEEIKHDQNIIKQQSDFIPRCEELLDNYWSLDTESKNKMLKSLIEKVTYSKDTKNAYGKGNEIGFQLDIFPKIQKNN

SEQ ID NO: 3899 - protein, 524 aa, Unknown
  Description of Unknown: Integrase B3900 sequence
  cd00338,SM00857,G3DSA:1.10.10.2600,IPR036162,PF13408, IPR025827,G3DSA:3.40.50.1390,PS51737,IPR006119,IPR038109, PF07508,IPR011109,SSF53041,PTHR30461,PS51736, Coil,PF00239
MNESVCIYLRKSRADREAEAHGEGETLARHERILLDLAKKKEYIVGAIYREVVSGETIADRPVMQQLLHEVESGMWDGVLVVEVERLARGDTIDQGVVSRAFQYSDTKIITPTKIYDPNNEFDEEYFEFGLFMSRREYKTIKRRLNAGRISSVKEGKYCGNKPPYGYERVKLEKEKGYTLRPVPAQAEIVKMIYTWYAGDGCEQIGVAKIARKLNEMGIESALGGDWTPASIQGILTNPVYIGKIRWNGRKTVKTIQNGQVIKTRPRSKDTLICEGLHPAIISEDLFNSVQEIRKKNPPRPVSIANSIRNPLAGIVYCSKCGRAMVRRPYQKRGQEDTLMCPYTSCPTVSSKMSLVEKSVIDGIREIVEEYKLNNDINTSSKAIDCGITSKQNLIHEKENELESLNAQKAKQYDLLEQGIYTTEVFLERAKTIAASIQSCSATIEKLKEEIKHDENIIKQRSDFIPRCEELLDNYWSLDTESKNKMLKSLIEKVVYSKDTKNAYGKGNEIGFQLDIFPKIQKNN

SEQ ID NO: 3900 - protein, 524 aa, Unknown
  Description of Unknown: Integrase B3901 sequence
  PTHR30461:SF3,cd00338,SM00857,G3DSA:1.10.10.2600,IPR036162, PF13408,PS51737,G3DSA:3.40.50.1390,IPR025827,IPR006119, IPR038109,PF07508,IPR011109,SSF53041,PTHR30461, PS51736,Coil,PF00239
MSRTSRKVKAPDSTEAVTRLVAYYRYSGGSRQTEQSIEGQRRDCEAFARAHGLTIQHEYIDRHISGKTDDRPAFQQMISDSDRRLFDAIICWKTDRLSRSREDSIVYKSRLRRNGVLILYAAESNLAGSEGMIIESIMESLAEYYSAELAEKSRRGMRESALKGKVLNAVRPLGLMTDENKKLVPDPSTAPIVQYIFEQYAAGASSTSIVQRLNEQGLRTSKGNPFNKSSINRIIQNEAYRGVYVSKKFDVRIEGAIPAIIDDDLWERTQKMFERNRQSRTPHSSRADYVLSGKLYCGECGCLMRGICGHSATGQVYHYYSCPGRSLGRTCTRKNIPQDVLENLVVRTVADKLLRPETIEQLADALFELQQAEASRPNAEQQAIEADLADVRRKLSNVLDAIENGTASAALTSRLSGLEQREKDLSFQLSSLESKKPLSFTRDQFVFLLQQFQVTPSERTKAYCRRLVDTFVRKIELTSTELILYFNISEETENKQKSASIEPSKKSSTETRLVRVARIELTAS

SEQ ID NO: 3901 - protein, 524 aa, Unknown
  Description of Unknown: Integrase B3902 sequence
  SM00857,G3DSA:1.10.10.2600,IPR036162,PF13408,PS51737, IPR025827,G3DSA:3.40.50.1390,IPR006119,IPR038109,PF07508, IPR011109,SSF53041,PF00239,PTHR30461,PS51736, Coil,cd00338
MNESVCIYLRKSRADREAEAHGEGETLARHERILLDLAKKKEYIVGAIYREVVSGETIADRPVMQQLLHEVESGMWDGVLVVEVERLARGDTIDQGIVSRAFQYSDTKIITPTKIYDPNNEFDEEYFEFGLFMSRREYKTIKRRLNAGRISSVKEGKYCGNKPPYGYERVKLEKEKGYTLRPVPTQAEIVKMIYTWYAGDGCEQIGVAKIARKLNEMGIESALGGDWTPASIQGILTNPVYIGKIRWNGRKTVKTIQTGQVIKTRPRSKDTLICNGLHPAVISEDLYNSVQEIRKKNPPRPVSIANSIRNPLAGIVYCSKCGRAMVRRPYQKRGQEDTLMCPYTSCPTVSSKLSLVEKAVLDGIREIVEKYKLNNDINTSSQAIDLTIISKQNLIHEKENELESLNAQKAKQYDLLEQGIYTTEVFLERAKTISASIQSCSDTIEKLKEEIKHDENIIKQQSDFIPRCEELLDNYWSLDTESKNKMLKSLIEKVAYSKDTKNAYGKGNEIGFQLDIFPKIQKNN

SEQ ID NO: 3902 - protein, 524 aa, Unknown
  Description of Unknown: Integrase B3903 sequence
  SM00857,G3DSA:1.10.10.2600,IPR036162,PS51737,G3DSA:3.40.50.1390, IPR006119,IPR038109,PF07508,SSF53041,IPR011109, PTHR30461,Coil,PS51736,cd00338,PF00239
MNESVCIYLRKSRADREAEAHGEGETLARHERILLDLAKKKEYTVGAIYREVVSGETIADRPVMQQLLHEVESGMWDGVLVVEVERLARGDTIDQGIVSRAFQYSDTKIITPTKIYDPNNEFDEEYFEFGLFMSRREYKTIKRRLNAGRISSIKEGKYCGNKPPYGYERVKLEKEKGYTLRPIPAQSEIVKMIYTWYAGDGCEQIGVAKIVRKLNEMGIESALGGDWTPASIQGILTNPVYIGKIRWNGRKTVKTIQNGQVIKTRPRSKDTLICNGLHPAVISEDLYNSVQEIRKKNPPRPVSIANSIRNPLAGIVYCSKCGRAMVRRPYQKRRQEDTLMCPYTSCPTVSSKLSLVEKSVIDGIREIVEEYKLNNDINASSKDIDCVITSKQNLIHEKENELESLNSQKAKQYDLLEQGIYTTEIFLERAKTISASIQSCSDTIEKLKEEIKHDKNIIKQRSDFIPRCEELLDNYWSLDTESKNKMLKSLIEKVVYSKDTKNAYGKGNEIGFQLDIFPKIQKNN

SEQ ID NO: 3903 - protein, 524 aa, Unknown
  Description of Unknown: Integrase B3904 sequence
  PTHR30461:SF3,SM00857,G3DSA:1.10.10.2600,IPR036162,PF13408, IPR025827,PS51737,G3DSA:3.40.50.1390,IPR006119,IPR038109, PF07508,SSF53041,IPR011109,PF00239, PTHR30461,PS51736,Coil,cd00338
MDNLNLANVVIYARYSSAGQNDQSIDGQLAKCREYAQQRGYRVVGEYCDRALSGRYAETRPEFQRMISDSAKHAFDFVLVWKLDRFSRDRYDSAIYKKKLRANGVRVLSVTEGVGDSSESVLLEAILEAMAEEYSRQLAQNVRRGMRQNAEKGLSLGGLPPLGYRVVNKQYEINEDEARIVRFIHEQYADGAGQKQIVADCARLGYRNQRGNPLTLAAVKRILANERYVGRYDYLGEIVIEDAFPAIVSKELKKRVRDRLKANAKAPGHAKAKVEYLLHGKLFCGECGAPMIGECGRGRHGATYYYYTCAARKKQHTCKKRNERKDELEASIVDYIGSCVLTDSWIDGAAERVVAEYQKSYDASGIKPLEKQIRDADKEIDQLVDALISATAEAARRRINERIETAEARKQALEADLASLRIASRVQIRKEDIVLWLNQFRNGDRSDLEYRKKVIDLFVNAIYLYDDSFKLFLNVADSSQVTYADALALAPPSVSDFGASGVPEKHLSEHIIFVNGVIGMIVQR

SEQ ID NO: 3904 - protein, 524 aa, Unknown
  Description of Unknown: Integrase B3905 sequence
  PTHR30461:SF3,SM00857,G3DSA:1.10.10.2600,IPR036162,PF13408, IPR025827,G3DSA:3.40.50.1390,PS51737,IPR006119,IPR038109, PF07508,SSF53041,IPR011109,PF00239,PTHR30461, PS51736,Coil,cd00338
MENAVIYARYSSDKQTEQSIEGQLRICTAYAEQNDLNIVHHYIDRAMSGTNDRRPEFQQMISDSARKQFKYIIVYKFDRFARNMYDSAIYEHKLEQSGVKVLSATEQVGDGNESLIVKAVLRAMAEMYSRQLSDNVKRGMKESALKANSTGGTIPFGYRLDGKKLVLDERTAPFAKHIFMEYAAGKAKMDIVRELDREGCRKSNGKVLTMQNITYILSNIKYTGVFKFKDIEIENGCPALVSKETFDRCKERSERERRKYGKSAQEVDYLLVGKLYCGYCKKPMIGDSGTSRNGDKHHYYTCYTRKSRRRTGETCRKKSERKDFLEWYVVQQVKEYILDNRRIEIIADAVVKKFKELFESSGEDVILKRLRSIDHEVDDAVDALLKTKNPAAIDKINARLEKLQAERESAEIELAKFRITKNVIPDREDLIEWLKSFQGDALDPEYQKKMIDTFINAIYLYDDKVVICFNLKGGKQVSGIEELEHSDELDECSSSLLNGSPLYKLSEHAELYVISGLLACVVKR

SEQ ID NO: 3905 - protein, 524 aa, Unknown
  Description of Unknown: Integrase B3906 sequence
  SM00857,G3DSA:1.10.10.2600,IPR036162,PF13408,PS51737, G3DSA:3.40.50.1390,IPR025827,IPR006119,IPR038109,PF07508, IPR011109,SSF53041,PTHR30461,Coil,PS51736, cd00338,PF00239
MNESVCIYLRKSRADREAEAHGEGETLARHERILLDLAKKKEYIVGAIYREVVSGETIADRPVMQQLLHEVESGMWDGVLVVEVERLARGDTIDQGVVSRAFQYSDTKIITPTKIYDPNNEFDEEYFEFGLFMSRREYKTIKRRLNNGRISSVKEGKYCGNKPPYGYERVKLEKEKGYTLRPVPAQAEVVKMIYAWYAGDGCEQIGVAKIVRKLNEMGIESALGGDWTPASIQGILTNPVYIGKIRWNGRKTVKTIHNGQVVKTRPRSRDVLICGGLHPAIISDDLYNSVQEIRQKNPPRPISIKNTVRNPLAGIVYCSKCGRAMVRRPYQKRGQEDTLMCPYTSCSTVSSKLSIVEKAVIDGIRDIAEEYKLNNDVNTSSKAIDLTIISKQNLIREKESELENLNTQRTKQYDLLEQGIYTTEVFLERSKTIATSIQSCSDIITKLREEIEHDENIMAQQSDFVPRCEELLNNYWNLDVESRNRMLKSLVEKVVYSKNIKNAYGKSNEINFELDIFPKIQKND

SEQ ID NO: 3906 - protein, 524 aa, Unknown
  Description of Unknown: Integrase B3907 sequence
  PTHR30461:SF3,SM00857,G3DSA:1.10.10.2600,IPR036162,PF13408, IPR025827,G3DSA:3.40.50.1390,PS51737,IPR006119,IPR038109, PF07508,IPR011109,SSF53041,PTHR30461,PS51736, cd00338,PF00239
MNKLRAAAYCRVSTDRAEQSGSLASQRSFFDDYIRNSDSMTLVGVFYDEGTSGTTTLNRYGFNKMISLAVSGGIDIILTKEVSRFARNTVDTLNITRMLRAKGVGIIFINDNIDTRDSDGELRLSIMATIAQEESRKISERVKWGQQRKMEQGVVFGRSCLGYDVKDGKITINADSAEIVKRIFTEYTVLLKGAESIADGLNAEQIRTVNGGRWSGAFIRKVLRNVKYVGDLEQKKTCTPDFLTHKKRLNRSEHIYIRNHHEPIISRELWEQTQAEISRRKPTDTSRHSDRYVFSGKVYCGVCGSVMVSRVKTLKNGKIYHALRCSGRIGGKSCNNETLNVTALKACVKRIFTDMPIDKTAVINAVIKGLSRTDKPDIPALRRKIETLNAKKRRAVDLMLDGLITQQELIEQKSYYDSIIEKLSQEISSDRSVFETDKIRKNAERFLDFTSDPLWLLVIRADYIHGTLTVYLKGIENGFTTCFTATGRGDSYRVITGNTVRSQGIIPGTMQVQKNWFRHDVNDK

SEQ ID NO: 3907 - protein, 524 aa, Unknown
  Description of Unknown: Integrase B3908 sequence
  SM00857,G3DSA:1.10.10.2600,IPR036162,PF13408,IPR025827, PS51737,G3DSA:3.40.50.1390,IPR006119,IPR038109,PF07508, IPR011109,SSF53041,PF00239,PTHR30461,PS51736, Coil,cd00338
MNESVCIYLRKSRADREAEAHGEGETLARHERILLDLAKKKEYIVGAIYREVVSGETIADRPVMQQLLHEVESGMWDGVLVVEVERLARGDTIDQGIVSRAFQYSDTKIITPTKIYDPNNEFDEEYFEFGLFMSRREYKTIKRRLNAGRISSVKEGKYCGNKPPYGYERVKLEKEKGYTLRPVPTQAEVVKMIYTWYAGDGCEQIGVAKIARKLNEMGIESALGGDWTPASIQGILTNPVYIGKIRWNGRKTVKTIQNGQVIKTRPRSKDTLICEGLHPAIISEDLFNSVQEIRKKNPPRPISIKNSIRNPLSGIVYCSKCGRAMVRRPYQKRGQEDTLMCPYTSCPTVSSKLSLVEKSVIDGIREIVEKYKLNNDINMSSKVIDCGITSKQNLIHEKENELESLNAQKAKQYDLLEQGIYTTEIFLERAKTISASIQSCSDTIEKLKEEIKHDENIIKQQSDFIPRCEELLDNYWSLDTESKNKILKSLIEKVTYSKDTKNAYGKGDEISFQLDIFPKIQKNN

SEQ ID NO: 3908 - protein, 524 aa, Unknown
  Description of Unknown: Integrase B3909 sequence
  cd00338,SM00857,G3DSA:1.10.10.2600,IPR036162,PF13408, IPR025827,G3DSA:3.40.50.1390,PS51737,IPR006119,IPR038109, PF07508,SSF53041,IPR011109,PTHR30461,PS51736, Coil,PF00239
MNESVCIYLRKSRADREAEAHGEGETLARHEHILLDLAKRQSYSIGAIYREVVSGETISARPVMQRLLHEVESGMWDGVLVVEVERLARGDTIDQGVVSRAFQYSDTKIITPTKIYDPNNEFDEEYFEFGLFMSRREYKTIKRRLNNGRISSVKEGKYCGNKPPYGYERVKLEKEKGYTLRPIPAQVEVVKMIYTWYAGDGCEQIGVAKIVRKLNEMGIESALGGDWTPASIQGILTNPVYIGKIRWNGRKTVKTIQNGQVVKTRPRSRDVLICEGLHPAIISDDLYNSVQEIRQKNPPRPISIKNTVRNPLAGIVYCSKCGRAMVRRPYQKHGQEDTLMCPYTSCSTVSSKLSLVEKAVFDGIKEIAEQYKLNNDINVPYNTINSGIVSKQNLIRKKESELESLNVQKAKQYDLLEQGIYTTEVFLERSKAIATSIQSCSDTITKLREEIEHDENIMVQQSDFVPRCEELLNNYWNLNMESRNRMLKNLVEKVVYSKNIKNTYGKGNEINFELDIFPKIQKND

SEQ ID NO: 3909 - protein, 524 aa, Unknown
  Description of Unknown: Integrase B3910 sequence
  SM00857,G3DSA:1.10.10.2600,IPR036162,PS51737,G3DSA:3.40.50.1390, IPR006119,IPR038109,PF07508,SSF53041,IPR011109, PTHR30461,Coil,PS51736,cd00338,PF00239
MNESVCIYLRKSRADREAEAHGEGETLARHERILLDIAKKKEYIVGAIYREVVSGETIADRPVMQQLLHEVESGMWDGVLVVEVERLARGDTIDQGIVSRAFQYSDTKIITPTKIYDPNNEFDEEYFEFGLFMSRREYKTIKRRLNAGRISSVKEGKYCGNKPPYGYERVKLEKEKGYTLQPVPAQAEIVKMIYTWYAGDGCEQIGVAKIARKLNEMGIESALGGDWTPASIQGILTNPVYIGKIRWNGRKTVKTIQNGQVIKTRPRSKDTLICEGLHPAIISEDLFNSVREIRKKNPPRPISIKNSIRNPLSGIVYCSKCGRAMVRRPYQKSSQEDTLMCPYTSCPTVSSKLSLVEKSVIDGIREIVEEYKLNNDINISSKAIDCGITSKQNLIHEKENELESLNAQKAKQYDLLEQGIYTTEVFLERAKTIAASIQSCSDTIEKLKEEIKHEQNIIKQQSDFIPRCEELLDNYWSLDTESKNKMLKSLIEKVTYSKDTKNAYGKGNEIGFQLDIFPKIQKNN

SEQ ID NO: 3910 - protein, 524 aa, Unknown
  Description of Unknown: Integrase B3911 sequence
  SM00857,G3DSA:1.10.10.2600,IPR036162,PS51737, G3DSA:3.40.50.1390,IPR006119,IPR038109,PF07508, IPR011109,SSF53041,PTHR30461,Coil, PS51736,cd00338,PF00239
MNESVCIYLRKSRADREAEAHGEGETLARHERILLDLAKKKEYIVGAIYREVVSGETIADRPVMQQLLHEVESGMWDGVLVVEVERLARGDTIDQGIVSRAFQYSDTKIITPTKIYDPNNEFDEEYFEFGLFMSRREYKTIKRRLNAGRISSIKEGKYCGNKPPYGYERVKLEKEKGYTLRPIPAQSEIVKMIYTWYAGDGCEQIGVAKIVRKLNEMGIESALGGDWTPASIQGILTNPVYIGKIRWNGRKTVKTIQNGQVVKTRPRSKDIILCDGLHPAIISDDLFNSVQEIRKKNPPRPISIKNSIRNPLAGIVYCSKCGRAMVRRPYQKRRQEDTLMCPYTSCPTVSSKLSLVEKSVINGIREIVEEYKLNNDINASSKDIDCVITSKQNLIHEKENELESLNSQKAKQYDLLEQGIYTTEIFLERAKTISASIQSCSDTIEKLKEEIKHDENIIKQRSDFIPRCEELLDNYWSLDTESKNKMLKSLIEKVVYSKDTKNAYGKGKEIGFQLDIFPKIQKNN

SEQ ID NO: 3911 - protein, 524 aa, Unknown
  Description of Unknown: Integrase B3912 sequence
  SM00857,G3DSA:1.10.10.2600,IPR036162,PF13408,PS51737, G3DSA:3.40.50.1390,IPR025827,IPR006119,IPR038109,PF07508, IPR011109,SSF53041,PF00239,PTHR30461,PS51736, Coil,cd00338
MSLENVCIYLRKSRADQEAEARGEGETLARHERILLDLARSCNYNVGAIYREIVSGETISARPVMQQLLREVEAGSWDGVLVVEVERLARGDTIDQGVVSRAFQFSDTKIITPTKTYDPDNEFDEEYFEFGLFMSRREYKTIKRRLNAGRIASVKEGKYCGSKPPYGYERVKLHGEKGFTLQPVPEQAEVIKMIYSLYSGASGDRIGVSKIVRKLNDMGIKSPSGKDWVPISVQDVLANPVYAGMIRWNGRKTVRAIQDGVVTQSRPRSKEDDILLFPGRHPAIVSKEMYDSVQQIRKKNPPRPISIKNTIKNPLAGIVYCSKCGRAMVRRPYQKRGQDDTLMCSYTSCPTVSSKLSLVERAVLNGIQDLVDEYRLNDAVPGPDINNAVKSKKKLIAEKEHELEKLNVQKMKQYDLLEQGIYTTEVFLERSNSIAFSINSCQDSIECLKEEIRHDKELIDQQSSFIPRCENLLEIYWSLDTAAKNKMLKELIERVNYTKDTKNAFRKGNEATFVLDIFPRIQSN

SEQ ID NO: 3912 - protein, 524 aa, Unknown
  Description of Unknown: Integrase B3913 sequence
  PTHR30461:SF3,SM00857,G3DSA:1.10.10.2600,IPR036162,PF13408, IPR025827,G3DSA:3.40.50.1390,PS51737,IPR006119,IPR038109, PF07508,IPR011109,SSF53041,PTHR30461,Coil, PS51736,cd00338,PF00239
MNVVIYARFSSHNQTEQSIEGQIKVCREYANRNGLEIVGIYKDEAKSGTRDDRTDFQRMIKDSEKKHFQGVLVYQLDRFARNKYDSAIYKRKLKLNGVRVLSARENISTDASGILMESVLEGMAEYFSVELGQKVQRGMEINASKFYYNGGTVPLGLKLKSIPVPLGVNGKTIYKKQFDIDEETAPIVKKIFEMYIADNTMADIIRYLNERNIKTSFGKEFNKNSIRTIILNKKYIGVYSYKGQETPNVIPRIIDDDTFYKAQEKLLKNKEAPARTKAKTNYLLTTKLYCGTCKSMMVGISGTSHTGKLHCYYSCKGTWQHKCDRKNVQKDYIEDLVVQQARNMLTTKAINRIAKIVAKIAQKEKDNTRLKQLENALKENDKQKANLFDSLKICYDNEVRKSIFEEISRMDKEKIELQKLITLEKSTYIEVTEPQIKFFLKNLKSGKINDQKYRQMLINVLIYRIYLYDDNLTIVYNTQDRTFITRVPTIEQIENSFFENKSVFSEINNLNIGSNLGKDVLPYF

SEQ ID NO: 3913 - protein, 524 aa, Unknown
  Description of Unknown: Integrase B3914 sequence
  SM00857,G3DSA:1.10.10.2600,IPR036162,PS51737,G3DSA:3.40.50.1390, IPR006119,IPR038109,PF07508,IPR011109,SSF53041, PTHR30461,Coil,PS51736,cd00338,PF00239
MNESVCIYLRKSRADREAEAHGEGETLARHERILLDLAKKKEYIVGAIYREVVSGETIADRPVMQQLLREVESGMWDGVLVVEVERLARGDTIDQGVVSRAFQYSDTKIITPTKTYDPNNEFDEEYFEFGLFMSRREYKTIKRRLNAGRISSVKEGKYCGNKPPYGYERVKLEKEKGYTLRPVPDQSNIVKMIYTWYAGDGCEQIGVAKIARKLNDMGIKSALGSDWTPASIQGILTNPVYIGKIRWNGRKVVKTVQNGQVVKTRPRSKDTLICEGLHPAIISEDLFNSVQEIRKKNPPRPVSIANSIRNPLAGIVYCSKCGRAMVRRPYQKRGQEDTLMCPYTSCPTVSSKLSLVEKSVIDGIREIVEEYKLNNDINASSKDIDCVITSKQNLIHEKENELESLNSQKAKQYDLLEQGIYTTEVFLERAKTISASIQSCSDTIEKLKEEIKHDENIIKQQSDFIPRCEELLDNYWSLDTESKNKMLKSLIEKVAYSKDTKNAYGKGNEIGFQLDIFPKIQKNN

SEQ ID NO: 3914 - protein, 524 aa, Unknown
  Description of Unknown: Integrase B3915 sequence
  cd03768,PTHR30461:SF3,SM00857,IPR036162, PF13408,IPR025827,G3DSA:3.40.50.1390,IPR006119, PF07508,SSF53041,IPR011109,PTHR30461, PS51736,PF00239
MVRIASYLRKSVYSDKSDSIQAQYTLISDYCKSHYTDFELYRYEDEGFTGANTNRPAFQRLTNDISERRIDVLVCYKIDRVSRDVKDFSNFFSFLQENKVEFVSIKEQIDTSTPLGRAMMYICSVFAQMERETIAQRVKDSMIELSKSGKWAGGRAPLGYRRDRVEINGKNHTVLVPDPDGIQLLNLISDKFLENNMSLVKLDGYCRKNNIKTATGSYFSSSQLWNVLKNPTYCTADSAAYDYFESLGCTMAVDRDRFDGSHAIMPYNRTRGGKTKKHAINPINEWIISVGLHEPLFTSEKYISIQRKFGQNVIDKTRKHKVGILHGIVKCSCGWNMRAKHKVDKVTGKIYDDYFCNQRQNRGRESCSMPAVHIDTLDSAIIDFLKQIKLDKKMIDNYCFDEAAVTVHRRKRADVQRDIGRIESKILNLTNTLSNTSGSSAAKYIVSEIEKLDRELSGYKYELMEIGADEKKHAHFQHTKEAKYKMVCDIVDNLDRLEYDEIRTLLKELFKECVWDGEVLHVKL

SEQ ID NO: 3915 - protein, 524 aa, Unknown
  Description of Unknown: Integrase B3916 sequence
  PTHR30461:SF3,IPR036162,PS51737,IPR011109,PTHR30461, PF00239,G3DSA:1.10.10.2600,IPR006119,SSF53041,cd00338, SM00857,IPR025827,IPR038109,mobidb-lite,PS51736, PF13408,G3DSA:3.40.50.1390,PF07508,Coil
MRKKSNLNAATRAVIYARYSSANQRDCSIEQQVAKCRELAARLGLTVIDVYEDRAISGKTDRRPNFQRMMKDADLRQFDVVLAWKSNRMGRNMLQAMTNEERLRDNGIRTVYAEEDFDDTAAGRFALRNMMNVNQFYSENMAEDITRGLMDNASKCLSNGSLPLGYKPGDDRHVVLDETEASIVQEIFTRVSCCEPFIDIARDLNRRGIKTKKGAEWGRSSFHTICRNERYRGIYIYRDVRVEGGMPRIISDELFYKVQEVLKVKKNPQGRRKRSGYEEYLLTGKLYCGHCGSPMTGIAGTSKTGAMHYYYTCQKRRTDHSCDKKAVRRDQIERAVGVAIQQQLLTDENIQMMADKLMEYNARTETKHRLQGLQDQLNANKTATANILKAIEMGIITDATKARLLELEKEQAQLLVKIDTAKAEMVPISRNDFVKLLYIYKEGEPTDKKYLAALFDNFLVRVDLYDDHLKITFDPTGGRQPIDMPIGAEDSPESPGDSSESSDFEASSQDAEKFVLALHNCTKE

SEQ ID NO: 3916 - protein, 524 aa, Unknown
  Description of Unknown: Integrase B3917 sequence
  PTHR30461:SF3,cd00338,SM00857,IPR036162,PF13408, IPR025827,G3DSA:3.40.50.1390,IPR006119,PF07508,IPR011109, SSF53041,PTHR30461,PS51736,Coil,PF00239
MKIGIYGRKSVFSDKSESIENQFKMGAEYAYANYDNPEIIYYKDEGESGSYLERPDFQNLLNDVIANNIDVLICYKLDRISRDVADFGAVYKLFMAHGIEIIPLRDNIIVNENMTPIEKAMMYMNAIFSQVERENTVIRVTDNMVELAKNGYWPGGRPPIGFSLQQVVVEGKKHTILSKQPEGMEFYNMLADTFLNGHTLSSLETYFRKIDVKTLNGSYLSSIQIYNILKSPFYAPADTNTYDYFASLGCKMIHSREEYNGEYGLIVYGRTSGGRKRKHVLNPPEKWIVSIGKHTPVISSDKWLAIQNRFGQNTINKTRKYNVGILNGILRCSCGALMKTKHKYDKQYDVHYFHYTCQNRQRRGPDYCTMPMISVDTIDSKVIEILKSIQLDRTLIDKYVVAPGAPLTYRSPESLTKEISIEEKKINNLTASLADAAGSTAAKYIIAEMENHDSRLNELKKELREVRLERQKERSRIIDKEEKYQAVCRIVNCLETASYEEINTLLQETLKECMYDGEVLHIKL

SEQ ID NO: 3917 - protein, 524 aa, Unknown
  Description of Unknown: Integrase B3918 sequence
  PTHR30461:SF3,SM00857,G3DSA:1.10.10.2600,IPR036162,PF13408, IPR025827,G3DSA:3.40.50.1390,PS51737,IPR006119,IPR038109, PF07508,IPR011109,SSF53041,PF00239, PTHR30461,PS51736,Coil,cd00338
MDHGLNLANVVIYARYSSAGQNDQSIDGQLAKCREYAQQRGFRVVGEYCDRALSGRYAETRPEFQRLVSDSSKHAFEYVLVWKLDRFSRDRYDSAIYKKKLRANGVRVLSVTEGIDESSESVLLEAILEAMAEEYSRQLAQNVKRGMRQNAEKALSLGGMPPLGYDVVSKRYTINESEAQIVRFIHERYAAGAAQKLIVDECRQRGYFAKRGNELTIGAVNRILRNPKYAGTYVCDDLVLEDAIPAIVSKPLKQQVRDRLAASAKSPGHAKAKVEYLLHGKLFCGECGAPMIGECGRGKNGTTHYYYTCAARKKSRSCKKRNERKFELEKYIVEYISMYVLTDEWINAAAERVVAEYARSYAASGIKPLERQIREADKELDALVDTLIKTASATAIAKINERIEAVDAKKRTLEADLATLRIASRVEIRKDDIVAWLDQFRVGSSSDPEYCKKIIELFVNAVYVYDDRIKMFFNVRDSAQITYPEMLALDGLECSDFDLSGVPNEALSEQILFINGIIGMLVRR

SEQ ID NO: 3918 - protein, 524 aa, Unknown
  Description of Unknown: Integrase B3919 sequence
  SM00857,G3DSA:1.10.10.2600,IPR036162,PS51737,G3DSA:3.40.50.1390, IPR006119,IPR038109,PF07508,IPR011109,SSF53041, PTHR30461,Coil,PS51736,cd00338,PF00239
MNESVCIYLRKSRADREAEAHGEGETLARHERILLDLAKKKEYIVGAIYREVVSGETIADRPVMQQLLHEVESGMWDGVLVVEVERLARGDTIDQGVVSRAFQYSDTKIITPTKIYDPNNEFDEEYFEFGLFMSRREYKTIKRRLNAGRISSIKEGKYCGNKPPYGYERVKLEKEKGYTLRPVPTQAEIVKMIYTWYSGDGCEQIGVAKIARKLNEMGIESALGGDWTPASIQGILTNPVYIGKIRWNGRKTVKTIQNGQVIKTRPRSKDTLICNGLHPAVISEDLYNSVQEIRKKNPPRPVSIANSIRNPLAGIVYCSKCGRAMVRRPYQKRRQEDTLMCPYTSCPTVSSKLSLVEKSVIDGIREIVEEYKLNNDINASSKDIDCGITSKQNLIHEKENELKNLNSQKAKQYDLLEQGIYTTEVFLERAKTISASIQSCSDTIEKLKEEIKHDENIIKQRSDFIPRCEELLDNYWSLDTESKNKMLKSLIEKVVYSKDTKNAYGKGNEIGFQLDIFPKIQKNN

SEQ ID NO: 3919 - protein, 524 aa, Unknown
  Description of Unknown: Integrase B3920 sequence
  SM00857,G3DSA:1.10.10.2600,IPR036162,PF13408, IPR025827,G3DSA:3.40.50.1390,PS51737,IPR006119, IPR038109,PF07508,SSF53041,IPR011109, PF00239,PTHR30461,PS51736,Coil,cd00338
MNESVCIYLRKSRADREAEAHGEGETLARHQRILLDLAKKKEYIVGAIYREVVSGETIADRPVMQQLLREVESGMWDGVLVVEVERLARGDTIDQGVVSRAFQYSDTKIITPTKIYDPNNEFDEEYFEFGLFMSRREYKTIKRRLNNGRISSVKEGKYCGNKPPYGYERVKLEKEKGYTLRPIPAQAEVVKMIYTWYAGDGCEQIGVAKIVRKLNDMGIESALGGDWTPASIQGILTNPVYIGKIRWNGRKTVKTIQNGQVVKTRPRSKNVLICEGLHPAIISDDLYNSVQEIRQKNPYRPISIKNTVRNPLAGIVYCNKCGRAMVRRPYQKRGQEDTLMCPYTSCSTVSSKLSLVEKAVIDGIREIAEKYKLNNDINVPSNTIDSGITSKQNLIREKESELESLNAQKAKQYDLLEQGIYTTEVFLDRAKTISASIQSCSDTIANLREEIEHDENIKAQQSDFIPRCEELLNNYWSLDTESKNKMLKSLIEKVIYTKDSKNTYGHGNEINFELDIFPKIQKNN

SEQ ID NO: 3920 - protein, 524 aa, Unknown
  Description of Unknown: Integrase B3921 sequence
  SM00857,G3DSA:1.10.10.2600,IPR036162,PS51737,G3DSA:3.40.50.1390, IPR006119,IPR038109,PF07508,SSF53041,IPR011109, PTHR30461,Coil,PS51736,cd00338,PF00239
MNESVCIYLRKSRADREAEAHGEGETLARHQRILLDLAKKKEYIVGAIYREVVSGETIADRPVMQQLLHEVESGMWDGVLVVEVERLARGDTIDQGVVSRAFQYSDTKIITPTKIYDPNNEFDEEYFEFGLFMSRREYKTIKRRLNAGRISSIKEGKYCGNKPPYGYERVKLEKEKGYTLRPVPAQAEIVKMIYTWYAGDGCEQIGVAKIARKLNEMGIESALGGDWTPASIQGILTNPVYIGKIRWNGRKTVKTIQNGQVIKTRPRSKDTLICDGLHPAIISEDLFNSVQEIRKKNPPRPVSIANSIRNPLAGIVYCSKCGRAMVRRPYQKRRQEDTLMCPYTSCPTVSSKLSLVEKSVIDGIREIVEEYKLNNDINASSKDIDCVITSKQNLIHEKENELESLNSQKAKQYDLLEQGIYTTEIFLERAKTISASIQSCSDTIEKLKEEIKHDENIIKQRSDFIPRCEELLDNYWSLDTESKNKMLKSLIEKVVYSKDTKNAYGKGNEIGFQLDIFPKIQKNN

SEQ ID NO: 3921 - protein, 524 aa, Unknown
  Description of Unknown: Integrase B3922 sequence
  cd00338,SM00857,G3DSA:1.10.10.2600,IPR036162, PF13408,IPR025827,G3DSA:3.40.50.1390,PS51737, IPR006119,IPR038109,PF07508,SSF53041, IPR011109,PTHR30461,PS51736,Coil,PF00239
MSLENVCIYLRKSRADREAEARGEGETLARHERILLDLARSRNYNVGAIYREIVSGETISARPVMQQLLREVEAGSWDGVLVVEVERLARGDTIDQGVVSRAFQFSDTKIITPAKTYDPDNEFDEEYFEFGLFMSRREYKTIKRRLNAGRIASVKEGKYCGSRPPYGYERVKLRGEKGFTLQPVPEQAEVIKMIYSLYSGASGDRIGVSKIVRKLNDMGIKSPSGKDWVPISVQDVLANPVYAGMIRWNGRKTVRAIQDGMVTQSRPRSKEDDILLFPGRHPAIVSKEMYDSVQQIRKKNPPRPISIKNTIKNPLAGIVYCSKCGRAMVRRPYQKRGQDDTLMCSYTSCPTVSSKLSLVERAVLNGIQDLVDEYRLNDAVPGPDINNAVKSKKKLIAEKEHELEKLNVQKMKQYDLLEQGIYTTEVFLERSNSIASSINSCQDSIECLKEEIRHDKELIDQQSSFIPRCENLLEIYWSLDIATKNKMLKELIERVNYTKDVKNAFRMGNEATFVLDIFPRIQSN

SEQ ID NO: 3922 - protein, 524 aa, Unknown
  Description of Unknown: Integrase B3923 sequence
  cd00338,SM00857,G3DSA:1.10.10.2600,IPR036162,PF13408, IPR025827,PS51737,G3DSA:3.40.50.1390,IPR006119,IPR038109, PF07508,IPR011109,SSF53041,PTHR30461,PS51736, Coil,PF00239
MNESVCIYLRKSRADREAEAHGEGETLARHERILLDLAKKKEYIVGAIYREVVSGETIADRPVMQQLLHEVESGMWDGVLVVEVERLARGDTIDQGVVSRAFQYSDTKIITPTKIYDPNNEFDEEYFEFGLFMSRREYKTIKRRLNAGRISSVKEGKYCGNKPPYGYERVKLEKEKGYTLRPVPAQAEIVKMIYTWYAGDGCEQIGVAKIARKLNEMGIESALGGDWTPATIQGILTNPVYIGKIRWNGRKTVKTIQNGQVVKARPRSKDTLICNGLHPAIISEDLFNSVQEIRKKNPPRPVSIANSIRNPLAGIVYCSKCGRAMVRRPYQKRGQEDTLMCPYTSCSTVSSKLPLVEKAVIDGIKEIVEEYKLNNDINTSSKAIDCVITSKQNLIHEKENELESLNSQKAKQYDLLEQGIYTTEVFLERAKTISASIQSCSDTIEKLKEEIKHEQNIIKQQSDFIPRCEELLDNYWSLDTESKNKMLKSLIEKVTYSKDTKNAYGKGNEIGFQLDIFPKIQKNN

SEQ ID NO: 3923 - protein, 524 aa, Unknown
  Description of Unknown: Integrase B3924 sequence
  cd00338,SM00857,G3DSA:1.10.10.2600,IPR036162,PF13408, IPR025827,PS51737,G3DSA:3.40.50.1390,IPR006119,IPR038109, PF07508,IPR011109,SSF53041,PTHR30461,PS51736, Coil,PF00239
MNESVCIYLRKSRADREAEAHGEGETLARHERILLDLAKKKEYIVGAIYREVVSGETIADRPVMQQLLHEVESGMWDGVLVVEVERLARGDTIDQGVVSRAFQYSDTKIITPTKIYDPNNEFDEEYFEFGLFMSRREYKTIKRRLNAGRISSVKEGKYCGNKPSYGYERVKIEKEKGYTLRPVPAQAEIVKMIYTWYAGDGCEQIGVAKIARKLNEMGIESALGGDWTPASIQGILTNPVYIGKIRWNGRKTVKTIQNGQVIKTRPRSKDTLICEGLHPAIISEDLFNSVQEIRKKNPPRPVSIANSIRNPLAGIVYCSKCGRSMVRRPYQKRGQEDTLMCPYTSCPTVSSKLSLVEKAVIDGISEIVEEYKLNNDINTSSKAIDCGITSKQNLIHEKENELESLNAQKAKQYDLLEQGIYTTEVFLERAKTIAASIQSCSATIEKLKEEIKHEQNIIKQQSDFIPRCEELLDNYWSLDTESKNKMLKSLIEKIAYSKDNKNAYGKGNEINFQLDIFPKIQKNN

SEQ ID NO: 3924 - protein, 524 aa, Unknown
  Description of Unknown: Integrase B3925 sequence
  PTHR30461:SF3,cd00338,SM00857,G3DSA:1.10.10.2600,IPR036162, PF13408,PS51737,G3DSA:3.40.50.1390,IPR025827,IPR006119, IPR038109,PF07508,IPR011109,SSF53041,PTHR30461, PS51736,Coil,PF00239
MFEDVKTACLYVRFSSHNQTEQSIEGQTRVCQEFCQRHNIKIIEIYADRATSASKNTEKRVSFLKMIKDSEKGLFDAVVVYKLDRFARSRYDSATYKYRLKKNGVQLISATENITDSPEGIILESVLEGMAEFYSAELSQKINRGMRESAYKHNSIGGALPLGYKTVDKKLVIDEKTAPIVREAFTMYAEGHSVAEICRIFNARGYKTSKGTEFGKNSFSKIFRNERYIGTYTYHDYRAEDAIPAIIDRDLWDRVQLRLKKVKNSPGRNKAKRVYLLSGKLFCGHCGESMNGNCNGNKYAFYECYGKKSKYNGCQKRNLRKEYIERLVAQDALSLLTDENIEHLATVACERNDYEIETGSPIPVIRDRIHQTEVSINNLTKAIETGATPDALVKRMVELEREKKDLSTQLKKEEELIVPLEKEQVIFWLEKFKDGDIEDEEFCRLLIDLFVNSVTVWDEDNDMLKVTIAYNLTSLPTKTYRLTKDGTLSDFTGNAPGMSANPTIHGNLVIHTFVCPQIKRYQRF

SEQ ID NO: 3925 - protein, 524 aa, Unknown
  Description of Unknown: Integrase B3926 sequence
  SM00857,G3DSA:1.10.10.2600,IPR036162,PS51737,G3DSA:3.40.50.1390, IPR006119,IPR038109,PF07508,SSF53041,IPR011109, PTHR30461,Coil,PS51736,cd00338,PF00239
MNESVCIYLRKSRADREAEAHGEGETLARHERILLDLAKKKEYIVGAIYREVVSGETIADRPVMQQLLREVESGMWDGVLVVEVERLARGDTIDQGVVSRAFQYSDTKIITPTKIYDPNNEFDEEYFEFGLFMSRREYKTIKRRLNAGRISSVKEGKYCGNKPPYGYERVKLEKEKGYTLRPVPTQAEIVKMIYTWYAGDGCEQIGVAKIARKLNEMGIESALGGDWTPASIQGILTNPVYIGKIRWNGRKTVKTIQNGQVIKTRPRSKDTLICEGLHPAIISEDLFNSVQEIRKKNPPRPVSIANSIRNPLAGIVYCSKCGRSMVRRPYQKRGQEDTLMCPYTSCHTVSSKLSLVEKSVIDGIREIVEEYKLNNDINASSKDIDCVITSKQNLIHEKENELKSLNSQKAKQYDLLEQGIYTTEVFLERAKTISTSIQSCSDTIEKLKEEIKHDQNIIKQQSDFIPRCEELLDNYWSLDTESKNRMLKSLIEKVTYSKDAKNAYGKGNEIGFQLDIFPKIQKNN

SEQ ID NO: 3926 - protein, 524 aa, Unknown
  Description of Unknown: Integrase B3927 sequence
  SM00857,G3DSA:1.10.10.2600,IPR036162,PF13408, IPR025827,G3DSA:3.40.50.1390,PS51737,IPR006119, IPR038109,PF07508,IPR011109,SSF53041, PF00239,PTHR30461,PS51736,Coil,cd00338
MSLENVCIYLRKSRADREAEARGEGETLARHERILLDLARSRNYNVGAIYREIVSGETISARPVMQQLLREVEAGSWDGVLVVEVERLARGDTIDQGVVSRAFQFSDTKIITPTKTYDPDNEFDEEYFEFGLFMSRREYKTIKRRLNAGRISSVKEGKYCGSKPPYGYERVKLHGEKGFTLQPVPEQAEVIKMIYSLYSGASGDRIGVSKIVRKLNDMGIKSPSGKDWVPISVQDVLANPVYAGMIRWNGRKTVRAIQDGMVTQSRPRSKEDDILLFPGRHPAIVSKEMYDSVQQIRKKNPPRPISIKNTIKNPLAGIVYCSKCGRAMVRRPYQKRGQDDTLMCSYTSCPTVSSKLSLVERAVLNGIQDLVDEYRLNAAVPGPDINNAVKSKEKLIAEKEHELEKLNVQKMKQYDLLEQGIYTTEVFLERSNSIASSINSCQDSIECLKEEIRHDKELIDQQSSFIPRCENLLEIYWSLDTATKNKMLKELIERVNYTKDTKNAFRKGNEATFVLDIFPRIQSN

SEQ ID NO: 3927 - protein, 524 aa, Unknown
  Description of Unknown: Integrase B3928 sequence
  PTHR30461:SF3,SM00857,G3DSA:1.10.10.2600,IPR036162,PS51737, G3DSA:3.40.50.1390,IPR006119,IPR038109,PF07508,IPR011109, SSF53041,PTHR30461,Coil,PS51736,cd00338, PF00239
MYNNINNNMEMYIKYLRKSRKDLEAEEHGEGDTLAKHDLILTNLYRSMGIKDEQVITLKEIVSGDSIASRPVIQEVLQLVEQGSVTGVLVVEVERLARGNTLDQGIVSNAFQYSNTKIITPLKIYDPHNEFDQEYFEFGLFMSRREYKTINRRLQNGRTTSATQGKFPASRAPYGYKRKKIEHDKGWTLEIVPEQAETVKCIFNLYAYQNMKPSEICKYLDNLNVKPLKSNTWSSSSIRDILSNPVYVGKIRWKDRKVVKILKDGKIINTQPVNKGNDVVLVDALHQPIIDIKTFELVQKKKKENNTAPIPGIYNIQNPLCGLIRCSKCGRLMFRVSCETLACTNPKCHNVSSKINIVEKKLIESLNIWLEEHEKEIDNASLKNLSNSEIIKIKKNQLEKANLELMKCKDTLERIYGFLEQGIYNIDIFTQRKNKILAKEQEQLKKIEILDNEIKKIEQNEKSKIELIPKVKNVLDIYSKCNNIKEKNELLKTVIKKVDYLKTEKCYGKKNNPENFELMIYTKF

SEQ ID NO: 3928 - protein, 524 aa, Unknown
  Description of Unknown: Integrase B3929 sequence
  PTHR30461:SF3,SM00857,G3DSA:1.10.10.2600,IPR036162,PF13408, IPR025827,G3DSA:3.40.50.1390,PS51737,IPR006119,IPR038109, PF07508,IPR011109,SSF53041,PTHR30461,PS51736, cd00338,PF00239
MNKLRAAAYCRVSTDRAEQSGSLASQRSFFDDYIRNSDSMTLVGVFYDEGTSGTTTLNRYGFNKMISLAVSGGIDIILTKEVSRFARNTVDTLNITRMLRAKGVGIIFINDNIDTRDSDGELRLSIMATIAQEESRKISERVKWGQQRKMEQGVVFGRSCLGYDVKDGKITVNADSAEIVKRIFTEYTVLLKGAESIADGLNAEQIRTVNGGRWSGAFIRKVLRNVKYVGDLEQKKTCTPDFLTHKKRLNRSEHIYIRNHHEPIISRELWEQTQAEISRRKPTDTSRHSDRYVFSGKVYCGVCGSVMVSRVKTLKNGKIYHALRCSGRIGGKSCNNETLNVTALKACVKRIFTDMPIDKTAVINAVIKGLSRTDKPDIPALRRKIETLNAKKRRAVDLMLDGLITQQELIEQKSYYDSIIEKLSQEISSDRSVLETDKIRKNAERFLDFTSDPLWLLVIRADYIHGTLTVYLKGIENGFTTCFTATGRGDSYRVITGNTVRSQGIIPGTMQVQKNRCRHDVNDK

SEQ ID NO: 3929 - protein, 524 aa, Unknown
  Description of Unknown: Integrase B3930 sequence
  cd00338,SM00857,G3DSA:1.10.10.2600,IPR036162,PF13408, IPR025827,G3DSA:3.40.50.1390,PS51737,IPR006119,IPR038109, PF07508,IPR011109,SSF53041,PTHR30461,PS51736, Coil,PF00239
MNESVCIYLRKSRADREAEAHGEGETLARHQRILLDLAKKKEYIIGAIYREVVSGETIADRPVMQQLLHEVESGVWDGVLVVEVERLARGDTIDQGVVSRAFQYSDTKIITPTKIYDPNNEFDEEYFEFGLFMSRREYKTIKRRLNAGRISSAKEGKYCGSKPPYGYERVKLEKEKGYTLRPIPAQAEIVKMIYAWYAGDGCERIGISKIVRRLNDMGIESALGNDWIPATVRGVLTNPVYTGKIHWNSRKTVKTIQDGQIVKTRPRSKDIILCDGLHPAIISDDLFNSVQEIRKKNPPRPVGISKLIRNPLSGIVYCSKCGRAMVRRPYQKRGQEDSLLCPYTSCPTVSSKLSLVEKAVLDGIKEIVEEYKLNNDINASSKAIDSGITSKQNLIHEKENELKNLNSQKAKQYDLLEQGIYTTEVFLERAKTIAASIQSCSDTIEKLKEEIKHDENIIKQQSDFIPRCEELLDNYWSLDTESKNEMLKSLIEKVTYSKDTKNAYGKGDEISFQLDIFPRIQKNS

SEQ ID NO: 3930 - protein, 524 aa, Unknown
  Description of Unknown: Integrase B3931 sequence
  PTHR30461:SF3,SM00857,IPR036162,PF13408,PS51737, G3DSA:3.40.50.1390,IPR025827,IPR006119,PF07508,IPR011109, SSF53041,PTHR30461,Coil,PS51736,cd00338, PF00239
MNICCYGRKSIYSDHSDSIDNQFRMCRDYVEMKFSGQVDSFLEYQDEAFTGANTKRPDLQRLLTDISAGNCDVLIVYQLDRLSRDVRDFANIYAILEEHRVKFISIKENIDTSTPIGRAMMYVTVVFAQMERETIAARVADNMIGLAKKGYWTGGNPPEGYVRTRIEANGKKHCSIVPDPEGVKYVTWIFDTFLQNDYSLQSMETAFKNQGIRTRRGAFFSTAQLHKILTMPYCVQATPEVYDYYVARGCQMDPESPRESWDGTCGVMIYGRTTQKNKKHQMQPPEKWLVCLGAHEPFMPAEKWLAVQARFARNKFDKTMKYDVPLLKGVLRCSCGSIMCVSRKKKVDGSVSSWYYCLKRMRQGKEVCDSRQIKCELLDQKVLELLQSIKRDPQVIHKFAENNVDMLNGPDPKVLASKISTCQTRIDRLVSSLSLAADSSAQKYILAELERLDLEIQALRREHNLALAAERKRSMQQQNTLSKVSEINRLIADLDSFSASEKNAIVKDVIKKCVWDGESLSIML

SEQ ID NO: 3931 - protein, 524 aa, Unknown
  Description of Unknown: Integrase B3932 sequence
  SM00857,G3DSA:1.10.10.2600,IPR036162,PF13408,PS51737, G3DSA:3.40.50.1390,IPR025827,IPR006119,IPR038109,PF07508, SSF53041,IPR011109,PF00239,PTHR30461,PS51736, Coil,cd00338
MSLENVCIYLRKSRADREAEAKGEGETLARHERILLDLARSRNYNVGAIYREIVSGETISARPVMQQLLREVEAGSWDGVLVVEVERLARGDTIDQGVVSRAFQFSDTKIITPTKTYDPDNEFDEEYFEFGLFMSRREYKTIKRRLNAGRISSVKEGKYCGSRPPYGYERVKLRGEKGFTLQPVPEQAEVIKMIYSLYSGSSGDRIGVSKIVRKLNDMGIKSPSGKDWVPISVQDVLANPVYAGMIRWNGRKTVRAIQDGVVTQSRPRSKEDDILLFPGRHPAIVSKEMYDSVQQIRKKNPPRPISIKNTIKNPLAGIVYCSKCGRAMVRRPYQKRGQDDTLMCSYTSCPTVSSKLSLVERAVLNGIQDLVDEYRLNDAVPGPDINNAVKSKKKLIAEKEHELEKLNVQKMKQYDLLEQGIYTTEVFLERSNSIASSINSCQDSIECLKEEIRHDKELIDQQSSFIPRCENLLEIYWSLDTAAKNKMLKELIERVNYTKDTKNAFRKGNEATFVLDIFPRIQSN

SEQ ID NO: 3932 - protein, 524 aa, Unknown
  Description of Unknown: Integrase B3933 sequence
  cd00338,SM00857,G3DSA:1.10.10.2600,IPR036162,PF13408, PS51737,G3DSA:3.40.50.1390,IPR025827,IPR006119,IPR038109, PF07508,IPR011109,SSF53041,PTHR30461,PS51736, Coil,PF00239
MNESVCIYLRKSRADREAEAHGEGETLARHEHILLDLAKRQGYSIGAIYREVVSGETISARPVMQKLLHEVESGMWDGVLVVEVERLARGDTIDQGVVSRAFQYSDTKIITPTKIYDPNNEFDEEYFEFGLFMSRREYKTIKRRLNNGRISSVKEGKYCGNKPPYGYERVKLEKEKGYTLRPVPAQAEIVKMIYTWYAGDGCEQIGVAKIVRKLNDMGIESALGGDWTPASIQGILTNPVYIGKIRWNGRKTVKTIQNGQVVKTRPRSKNVLICEGLHPAIIPDDLYNSVQEIRRKNPPRPISIKNTVRNPLAGIVYCSKCGRAMVRRPYQKRGQEDTLMCPYTSCPTVSSKLSLVEKAVIDGIKEIAEKYKLNNDINVPYNTINSGIVSKQKLIREKESELESLNTQKVKQYDLLEQGIYTTEVFLERSKTISASIQSCFDIITKLREEIEHDENIMTQQSDFIPRCEELLNNYWNLNMESRNRMLKSLVEKVVYSKNIKNTYGKGNEINFELDIFPKIQKNN

SEQ ID NO: 3933 - protein, 524 aa, Unknown
  Description of Unknown: Integrase B3934 sequence
  cd00338,SM00857,G3DSA:1.10.10.2600,IPR036162,PF13408, PS51737,G3DSA:3.40.50.1390,IPR025827,IPR006119,IPR038109, PF07508,IPR011109,SSF53041,PTHR30461,PS51736, Coil,PF00239
MNAVIYARYSSDKQTEQSIEGQLREGYAYAERMGITVVGEYIDRAVSGTSDQRPDFQRMISDSIKRQFEAVIVWKLDRFARNRYDSAIYKSKLKKNGVRVFSVTEGIGDGDESIILEAVLEAMAEVYSKQLGQNAARGMRETAMKGLCTGGQIPLGYAVGEDHKLHIDSKTAPAVQLIYTLYADGQSKTQIANELNSRGFRTKTGKPYNCNSFYRILTNPMYYGNYTYKGEVLRECPAIISKALYDKCQERNDVVKRSRGMKISEVEWLLRGKLYCGHCGTQMTGDSGTSRTNEKYYYYTCHKHKRYKDCDKKSEKKEQLERAVCQKTVEYVLREDRIEYIAERVVEQYEKEFDASTIKEKEMSLSKLNIELDKCAESLMNTTIRSVVDRINARAEELEAAKSELEHELAQLRITSKARITVDEIMTFLRGFCSGDVDDIQFRRKIIDTFINAVYVFDDKYVIYYNVRDCKQVTYSDMLASIHAPSDMSVHGSDCLLYGEPEKARKHYVYGLLLFQKNISNEVL

SEQ ID NO: 3934 - protein, 524 aa, Unknown
  Description of Unknown: Integrase B3935 sequence
  SM00857,G3DSA:1.10.10.2600,IPR036162,PS51737,G3DSA:3.40.50.1390, IPR006119,IPR038109,PF07508,SSF53041,IPR011109, PTHR30461,Coil,PS51736,cd00338,PF00239
MNESVCIYLRKSRADREAEAHGEGETLSRHERILLDLAKKKEYIVGAIYREVVSGETIADRPVMQQLLHEVESGMWDGVLVVEVERLARGDTIDQGVVSRAFQYSDTKIITPTKIYDPNNEFDEEYFEFGLFMSRREYKTIKRRLNAGRISSVKEGKYCGNKPPYGYERVKLEKEKGYTLRPVPTQAEIVKMIYTWYSGDGCEQIGVAKIARKLNEMGIESALGGDWTPASIQGILTNPVYIGKIRWNGRKTVKTIQNGQVIKTRPRSKDTLICNGLHPAVISEDLYNSVQEIRKKNPPRPVSIANSIRNPLAGIVYCSKCGRAMVRRPYQKRRQEDTLMCPYTSCPTVSSKLSLVEKSVINGIREIVEEYKLNNDINASSKDIDCVITSKQNLIHEKENELESLNSQKAKQYDLLEQGIYTTEIFLERAKTISASIQSCSDTIEKLKEEIKHDENIIKQRSDFIPRCEELLDNYWSLDTESKNKMLKSLIEKVVYSKDTKNAYGKGKEIGFQLDIFPKIQKNN

SEQ ID NO: 3935 - protein, 524 aa, Unknown
  Description of Unknown: Integrase B3936 sequence
  PTHR30461:SF3,SM00857,G3DSA:1.10.10.2600,IPR036162,PF13408, PS51737,G3DSA:3.40.50.1390,IPR025827,IPR006119,IPR038109, PF07508,IPR011109,SSF53041,PTHR30461, Coil,PS51736,cd00338,PF00239
MDHGLNLANVVIYARYSSAGQNDQSIDGQLAKCREYAQQRGFRVVGEYCDRALSGRYAETRPEFQRLVSDSSKHAFEYVLVWKLDRFSRDRYDSAIYKKKLRANGVRVLSVTEGIDESSESVLLEAILEAMAEEYSRQLAQNVKRGMRQNAEKALSLGGMPPLGYDVVSKRYTINESEAQIVRFIHERYAAGAAQKLIVDECRQRGYCAKRGNELTIGAINRILRNPKYAGTYVCDDLVLEDSIPAIVSKPLKQQVRDRLAASAKAPGHAKAKVEYLLHGKLFCGECGAPMIGECGRGKNGTTHYYYTCAARKKSRSCKKRNERKFELEKYIVEYISMYVLTDEWINAAAERVVAEYARSYAASGIKPLERQIREADKELDALVDTLIKTASATAIAKINERIEAAEAKKRTLEADLATLRIASRVEIRKEDIVAWLDQFRVGSSSDPEYCKKIIELFVNAVYVYDDRIKMFFNVRDSAQITYPEMLALDGLECSDFDLSGVPDDALSEQILFINGIIGMLVRR

SEQ ID NO: 3936 - protein, 524 aa, Unknown
  Description of Unknown: Integrase B3937 sequence
  cd00338,SM00857,G3DSA:1.10.10.2600,IPR036162,PS51737, G3DSA:3.40.50.1390,IPR006119,IPR038109,PF07508,IPR011109, SSF53041,PTHR30461,PS51736,Coil,PF00239
MNESVCIYLRKSRADREAEAHGEGETLARHERILLDLAKKKEYIVGAIYREVVSGETIADRPVMQQLLHEVESGMWDGVLVVEVERLARGDTIDQGVVSRAFQYSDTKIITPTKIYDPNNEFDEEYFEFGLFMSRREYKTIKRRLNVGRISSVKEGKYCGNKPPYGYERVKLEKEKGYTLRPVPTQAEIVKMIYTWYAGDGCEQIGIAKIARKLNEMGIESALGGDWTPASIQGILTNPVYIGKIRWNGRKTVKTIQNGQVIKARPRSKDTLICDGLHPAIISEDLYNSVQEIRKKNPPRPVSIANSIRNPLAGIVYCSKCGRAMVRRPYQKRGQEDTLMCPYTSCPTVSSKLSLVEKSVINGIKEIVEEYKLNNDINISSKAIDCGITSKQNLIHEKENELESLNAQKAKQYDLLEQGIYTTEVFLERAKTISASIQSCSDTIEKLKEEIKHDENIIKQQSDFIPRCEELLDNYWSLDTESKNRMLKSLIEKVTYSKDAKNAYGKGNEIGFQLDIFPKIQKNN

SEQ ID NO: 3937 - protein, 524 aa, Unknown
  Description of Unknown: Integrase B3938 sequence
  SM00857,G3DSA:1.10.10.2600,IPR036162,PF13408, IPR025827,PS51737,G3DSA:3.40.50.1390,IPR006119, IPR038109,PF07508,IPR011109,SSF53041, PTHR30461,Coil,PS51736,cd00338,PF00239
MNESVCIYLRKSRADREAEAHGEGETLARHEHILLDLAKRQGYSIGAIYREVVSGETISARPVMQKLLHEVESGMWDGVLVVEVERLARGDTIDQGVVSRAFQYSDTKIITPTKIYDPNNEFDEEYFEFGLFMSRREYKTIKRRLNNGRISSVKEGKYCGNKPPYGYERVKLEKEKGYTLRPVPVQAEIVKMIYTWYAGDGCEQIGVAKIVRKLNDMGIKSALGGDWTPASIQGILTNPVYIGKIRWNGRKTVKTIQNGQVVKTRPRSRDVLICEGLHPAIISEDLYNSAQEIRQKNPPRPISIKNTVRNPLAGIVYCSKCGRAMVRRPHQKRGQEDTLMCPYTSCSTVSSKLSLVEKAVIDGIKEITEKYKLNNDINVSSNTINSGIVSKQNLIREKESELESLNAQKVKQYDLLEQGIYTTEVFLERSKTIAISIQSCSDTITKLREEIEHDENIKAKQSDFIPRCEELLNNYWSLDVESRNRMLKNLVEKVVYSKNIKNTYGKGNEINFELDIFPKIQKND

SEQ ID NO: 3938 - protein, 524 aa, Unknown
  Description of Unknown: Integrase B3939 sequence
  SM00857,G3DSA:1.10.10.2600,IPR036162,PS51737,G3DSA:3.40.50.1390, IPR006119,IPR038109,PF07508,SSF53041,IPR011109, PTHR30461,Coil,PS51736,cd00338,PF00239
MNESVCIYLRKSRADREAEAHGEGETLARHERILLDLAKKKEYIVGAIYREVVSGETIADRPVMQQLLHEVESGMWDGVLVVEVERLARGDTIDQGVVSRAFQYSDTKIITPTKIYDPNNEFDEEYFEFGLFMSRREYKTIKRRLNAGRISSVKEGKYCGNKPPYGYERVKLEKEKGYTLRPIPAQSEIVKMIYTWYSGDGCEQIGVAKIARKLNEMGIESALGGDWTPASIQGILTNPVYIGKIRWNGRKTVKTIQNGQVIKTRPRSKDTLICNGLHPAVISEDLYNSVQEIRKKNPPRPVSIANSIRNPLAGIVYCSKCGRAMVRRPYQKRRQEDTLMCPYTSCPTVSSKLSLVEKSVIDGIREIVEEYKLNNDINASSKDIDCVITSKQNLIHEKENELESLNSQKAKQYDLLEQGIYTTEIFLERAKTISASIQSCSDTIEKLKEEIKHDENIIKQRSDFIPRCEELLDNYWSLDTESKNKMLKSLIEKVVYSKDTKNAYGKGNEIGFQLDIFPKIQKNN

SEQ ID NO: 3939 - protein, 524 aa, Unknown
  Description of Unknown: Integrase B3940 sequence
  PTHR30461:SF3,cd00338,SM00857,G3DSA:1.10.10.2600,IPR036162, PF13408,PS51737,G3DSA:3.40.50.1390,IPR025827,IPR006119, IPR038109,PF07508,IPR011109,SSF53041, PTHR30461,PS51736,Coil,PF00239
MCAKKKPAMLEPDMQDAVIYTRYSSHNQRDCSIEQQVADCEIFARQNNLRVVKVYADRHLSGTTDNRPQFQQMLKDAAHGHWAYVICWKIDRFARNRYDSATYKFRLKKAGVRVLYAKESIPDGPEGILLESVLEGSAEYYSAALAQNIRRGMKFNAEQCKVNSGSIPFGYCKGPDGRFAIHEANAEVVREIFRKAAAGMPFVDIANDLNSRGLKTSRGGRWNKGSFRLLMNEAYIGVYHFSDTRIEGGMPALIDQGTFWAANERLKANSSVRGRHQDGGDYLLTGKLKCAHCGSYMIGFSGTGKSGELHYYYGCQKRRRERACKKANVPREWIERVVVKAALDYVLRPDVMEWIADAVMEYQEREAASAQLAALIAELEENQKATDNVMKAIEAGIITSTTKQRLLDLEAKAQDLKRAIELEKLSHVRLERDQVLFWLDRFRGGSLQSQEFRRKVIDAFVSVVYLSDDHLRIAFNYSGGSNAEADFDLVMDAEAAACELSKKFAQGHVTSTIRSADEPSKENE

SEQ ID NO: 3940 - protein, 524 aa, Unknown
  Description of Unknown: Integrase B3941 sequence
  cd00338,SM00857,G3DSA:1.10.10.2600,IPR036162,PF13408, PS51737,G3DSA:3.40.50.1390,IPR025827,IPR006119,IPR038109, PF07508,IPR011109,SSF53041,PTHR30461,PS51736, Coil,PF00239
MNESVCIYLRKSRADREAEAHGEGETLARHERILLDLAKKKEYIVGAIYREVVSGETIADRPVMQQLLHEVESGMWDGVLVVEVERLARGDTIDQGVVSRAFQYSDTKIITPTKIYDPNNEFDEEYFEFGLFMSRREYKTIKRRLNAGRISSVKEGKYCGNKPPYGYERVKLEKEKGYTLRPVPAQAEIVKMIYTWYAGDGCEQIGVAKIARKLNEMGIESALGGDWTPASIQGILTNPVYIGKIRWNGRKTVKTIQNGQVIKTRPRSKDTLICDGLHPAIISEDLFNSVQEIRKKNPPRPVSIANSIRNPLAGIVYCSKCGRAMVRRPYQKRGQEDTLMCPYTSCPTVSSKLPLVEKAVIDGIREIVEEYKLNNDINISSKDIDCGITSKQNLIHEKENELKNLNSQKAKQYDLLEQGIYTTEVFLERAKTISASIQSCSDTIEKLKEEIKHDENIIKQRSDFIPRCEELLDNYWSLDTESKNKMLKSLIEKVVYSKDTKNAYGKGNEIGFQLDIFPKIQKNN

SEQ ID NO: 3941 - protein, 524 aa, Unknown
  Description of Unknown: Integrase B3942 sequence
  SM00857,G3DSA:1.10.10.2600,IPR036162,PF13408,PS51737, IPR025827,G3DSA:3.40.50.1390,IPR006119,IPR038109,PF07508, IPR011109,SSF53041,PF00239,PTHR30461,PS51736, Coil,cd00338
MSLENVCIYLRKSRADREAEARGEGETLARHERILLDLARSRNYNVGAIYREIVSGETISARPVMQQLLREVEAGSWDGVLVVEVERLARGDTIDQGVVSRAFQFSDTKIITPTKTYDPDNEFDEEYFEFGLFMSRREYKTIKRRLNAGRISSVKEGKYCGSRPPYGYERVKLRGEKGFTLQPVPEQAEVIKMIYSLYSGASGDRIGVSKIVRKLNDMGIKSPSGKDWVPISVQDVLANPVYAGMIRWNGRKTVKAIQDGVVTQSRPRSKEDDILLFPGRHPAIVSKEMYDSVQQIRKKNPPRPISIKNTIKNPLAGIVYCSKCGRAMVRRPYQKRGQDDTLMCSYTSCPTVSSKLSLVERAVLNGIQDLVDEYRLNDAVPGPDINNAVKSKEKLIAEKEHELEKLNVQKMKQYDLLEQGIYTTEVFLERSNSIASSINSCQDSIECLKEEIRHDKELIDQQSSFIPRCENLLEIYWSLDTAAKNKMLKELIERVNYTKDVKNAFRMGNEATFVLDIFPRIQSN

SEQ ID NO: 3942 - protein, 524 aa, Unknown
  Description of Unknown: Integrase B3943 sequence
  cd00338,SM00857,G3DSA:1.10.10.2600,IPR036162,PF13408, PS51737,G3DSA:3.40.50.1390,IPR025827,IPR006119,IPR038109, PF07508,SSF53041,IPR011109,PTHR30461,PS51736, Coil,PF00239
MNESVCIYLRKSRADREAEAHGEGETLARHERILLDLAKKKEYTVGAIYREVVSGETIADRPVMQQLLHEVESGMWDGVLVVEVERLARGDTIDQGIVSRAFQYSDTKIITPTKIYDPNNEFDEEYFEFGLFMSRREYKTIKRRLNAGRISSIKEGKYCGNKPPYGYERVKLEKEKGYTLRPIPAQSEIVKMIYTWYAGDGCEQIGVAKIVRKLNEMGIESALGGDWTPASIQGILTNPVYIGKIRWNGRKTVKTIQTGQVIKTRPRSKDTLICNGLHPAVISEDLYNSVQEIRKKNPPRPVSIANSIRNPLAGIVYCSKCGRAMVRRPYQKRGQEDTLMCPYTSCPTVSSKLSLVEKAVLDGIREIVEKYKLNNDINTSSQAIDLTIISKQNLIHEKENELESLNAQKAKQYDLLEQGIYTTEVFLERAKTISASIQSCSDTIEKLKEEIKHDENIIKQQSDFIPRCEELLDNYWSLDTESKNKMLKSLIEKVAYSKDTKNAYGKGNEIGFQLDIFPKIQKNN

SEQ ID NO: 3943 - protein, 524 aa, Unknown
  Description of Unknown: Integrase B3944 sequence
  SM00857,G3DSA:1.10.10.2600,IPR036162,PS51737,G3DSA:3.40.50.1390, IPR006119,IPR038109,PF07508,IPR011109,SSF53041, PTHR30461,Coil,PS51736,cd00338,PF00239
MNESVCIYLRKSRADREAEAHGEGETLARHERILLDLAKKKEYIVGAIYREVVSGETIADRPVMQQLLHEVESGMWDGVLVVEVERLARGDTIDQGIVSRAFQYSDTKIITPTKIYDPNNEFDEEYFEFGLFMSRREYKTIKRRLNAGRISSVKEGKYCGNKPPYGYERVKLEKEKGYTLRPVPTQSEIVKMIYTWYAGDGCEQIGVAKIARKLNEMGIESALGDDWTPASIQGILTNPVYIGKIRWNGRKTVKTIQNGQVIKTRPRSKDTLICDGLHSAIISDDLFNSVQEIRKKNPPRPVSIANSIRNPLAGIVYCSKCGRAMVRRPYQKRGQEDTLMCPYTSCHTVSSKLPLVEKSVIDGIREIVEEYKLNNDINTSSKAIDCGITSKQNLIHEKENELESLNAQKAKQYDLLEQGIYTTEIFLERAKTISASIQSCSDTIEKLKEEIKHEQNIIKQQSDFIPRCEELLDNYWSLDTESKNKMLKSLIEKVTYSKDTKNAYGKGDEISFRLDIFPRIQKKS

SEQ ID NO: 3944 - protein, 524 aa, Unknown
  Description of Unknown: Integrase B3945 sequence
  cd00338,SM00857,G3DSA:1.10.10.2600,IPR036162, PF13408,PS51737,IPR025827,G3DSA:3.40.50.1390, IPR006119,IPR038109,PF07508,IPR011109, SSF53041,PTHR30461,PS51736,Coil,PF00239
MNESVCIYLRKSRADREAEAHGEGETLARHQRILLDLAKKKEYIVGAIYREVVSGETIADRPVMQQLLHEVESGMWDGVLVVEVERLARGDTIDQGVVSRAFQYSDTKIITPTKIYDPNNEFDEEYFEFGLFMSRREYKTIKRRLNAGRISSVKEGKYCGNKPPYGYERIKLAREKGYTLRPVPAQAEIVKMIYTWYAGDGCEQIGVAKIVRKLNDMGIKSALGGDWTPASIQGILTNPVYIGKIRWNGRKTVKTIQNGQVVKTRPRSRNVLICEGLHPSIISDDLYNSVQEIRQKNPPRPISIKNTVRNPLAGIVYCSKCGRAMVRRPHQKHGQEDTLMCPYTSCPTVSSKLSLVEKAVLDGIKEITEKYKLNNDINVPYNTINSGIVSKQNLIREKESELESLNVQKAKQYDLLERGIYTTEVFLERSKTIARSIQSCSDIITKLREEIEHDENIKAQQSNFIPRCEELLNNYWDLNIESRNRMLKNLVEKVVYSKNIKNTYGKGNEINFELDIFPKIQKND

SEQ ID NO: 3945 - protein, 524 aa, Unknown
  Description of Unknown: Integrase B3946 sequence
  PTHR30461:SF3,SM00857,G3DSA:1.10.10.2600,IPR036162,PF13408, IPR025827,G3DSA:3.40.50.1390,PS51737,IPR006119,IPR038109, PF07508,IPR011109,SSF53041,PTHR30461,PS51736, cd00338,PF00239
MNKLRAAAYCRVSTDRAEQSGSLASQRSFFDDYIRNSDSMTLVGVFYDEGTSGTTTLNRYGFNKMISLAVSGGIDIILTKEVSRFARNTVDTLNITRMLRAKGVGIIFINDNIDTRDSDGELRLSIMATIAQEESRKISERVKWGQQRKMEQGVVFGRSCLGYDVKDGKITVNADSAEIVKRIFTEYTVLLKGAESIADGLNAEQIRTVNGGRWSGAFIRKVLRNVKYVGDLEQKKTCTPDFLTHKKRLNRSEHIYIRNHHEPIISRELWEQTQAEISRRKPTDTSRHSDRYVFSGKVYCGVCGSVMVSRVKTLKNGKIYHALRCSGRIGGKSCNNETLNVTALKACVKRIFTDMPIDKTAVINAVIKGLSRTDKPDIPALRRKIETLNAKKRRAVDLMLDGLITQQELIEQKSYYDSIIEKLSQEISSDRSVFETDKIRKNAERFLDFTSDPLWLLVIRADYIHGTLTVYLKGIEKGFTTCFTATGRGDSYRVITGNTVRSQGIIPGTMQVQKNWFRHDVNDK

SEQ ID NO: 3946 - protein, 524 aa, Unknown
  Description of Unknown: Integrase B3947 sequence
  SM00857,G3DSA:1.10.10.2600,IPR036162,PF13408,PS51737, G3DSA:3.40.50.1390,IPR025827,IPR006119,IPR038109,PF07508, IPR011109,SSF53041,PF00239,PTHR30461,PS51736, Coil,cd00338
MNESVCIYLRKSRADREAEAHGEGETLARHQRILLDLAKKKEYIVGAIYREVVSGETIADRPVMQQLLHEVESGMWDGVLVVEVERLARGDTIDQGVVSRAFQYSDTKIITPTKIYDPNNEFDEEYFEFGLFMSRREYKTIKRRLNAGRISSVKEGKYCGNKPPYGYERVKLEKEKGYTLRPVPDQAEIVKMIYTWYAGDGCEQIGVAKIARKLNEMGIESALGGDWTPASIQGILTNPVYIGKIRWNGRKTVKTIQDGQVIKTRPRSKDTLICDGLHPAIISEDLYNSVQEIRKKNPPRPISIKNSIRNPLSGIVYCSKCGRVMVRRPYQKRGQEDTLMCPYTSCPTVSSKLSLVEKAVLDGIREIVEEYKLNNDINTSSKAIDCGITSKQNLIHEKENELESLNAQKAKQYDLLEQGIYTTEVFLERAKTIAASIQSCSATIEKLKEEIKHEQNIIKQQSDFIPRCEELLDNYWSLDTESKNKMLKSLIEKIAYSKDNKNAYGKGNEINFQLDIFPKIQKNN

SEQ ID NO: 3947 - protein, 524 aa, Unknown
  Description of Unknown: Integrase B3948 sequence
  cd00338,SM00857,G3DSA:1.10.10.2600,IPR036162,PF13408, PS51737,G3DSA:3.40.50.1390,IPR025827,IPR006119,IPR038109, PF07508,IPR011109,SSF53041,PTHR30461,PS51736, Coil,PF00239
MSLENVCIYLRKSRADREAEARGEGETLARHERILLDLARSRNYNVGAIYREIVSGETISARPVMQQLLREVEAGSWDGVLVVEVERLARGDTIDQGVVSRAFQFSDTKIITPAKTYDPDNEFDEEYFEFGLFMSRREYKTIKRRLNAGRIASVKEGKYCGSRPPYGYERVKLRGEKGFTLQPVPEQAEVIKMIYSLYSGSSGDRIGVSKIVRKLNDMGIKSPSGKDWVPISVQDVLANPVYAGMIRWNGRKTVRAIQDGVVTQSRPRSKEDDILLFPGRHPAIVSKEMYDSVQQIRKKNPPRPISIKNTIKNPLAGIVYCSNCGRAMVRRPYQKRGQDDTLMCSYTSCPTVSSKLSLVERAVLNGIQDLVDEYRLNDTVPGPDINNAVKSKEKLIAEKEHELEKLNVQKMKQYDLLEQGIYTTEVFLERSNSIASSINSCQDSIECLKEEIRHDKELIDQQSSFIPRCENLLEIYWSLDTAAKNKMLKELIERVNYTKDVKNAFRMGNEATFVLDIFPRIQSN

SEQ ID NO: 3948 - protein, 524 aa, Unknown
  Description of Unknown: Integrase B3949 sequence
  PTHR30461:SF3,cd00338,SM00857,G3DSA:1.10.10.2600,IPR036162, PF13408,PS51737,IPR025827,G3DSA:3.40.50.1390,IPR006119, IPR038109,PF07508,IPR011109,SSF53041,PTHR30461, PS51736,Coil,PF00239
MRAFIYCRFSSHKQQELSIEGQRDICQEYADKHNITVVGQYADRARSGKTENRADFRRLMRDAATGVVDCVLVWRYDRFFRNRAESALYRKQLEAAGVHLISVTEYIPEGSAGIITQGMIETVAEYFSAKLSEDVSRGMNKAAQHCQIVGRAPLGYRAGPNKRWQIDPVGAELVRRIFEWYASGKAMGQLAAQLNEEDHRTTNGTLYTRSSFNSILRNEKYIGVYSYGGEVRIEGGCPRIIEDELFFTVQRRLSANRHRPGAYKAEVPYLLSGKLFCGLCGAPMTGTAGTSHTGARHYYYICNNRRAKTCKKKNVRLDLIEEAVLQSALDILTDENIAYISAEVERRCAENSDSAALLASLNAQLEEVQRRLKNIGNAIAQGIITETTKELLEEAEADRTALRQQIDRAKVQAALVVKAEAVACWLDGFRRGDRTDPDFRRQVFGALVHSVFVYDDYLKIIFNVDSAGAAVVPYEAAQAATPSEAPPGSYLDTLGAPKKALRKRKAFFIMIAALCECFHFAADF

SEQ ID NO: 3949 - protein, 524 aa, Unknown
  Description of Unknown: Integrase B3950 sequence
  PTHR30461:SF3,SM00857,G3DSA:1.10.10.2600,IPR036162,PF13408, PS51737,G3DSA:3.40.50.1390,IPR025827,IPR006119,IPR038109, PF07508,IPR011109,SSF53041,PTHR30461,Coil, PS51736,cd00338,PF00239
MNKLRAAAYCRVSTDRAEQSGSLASQRSFFDDYIRNSDSMTLVGVFYDEGTSGTTTLNRYGFNKMISLAVSGGIDIILTKEVSRFARNTVDTLNITRMLRAKGVGIIFINDNIDTRDSDGELRLSIMATIAQEESRKISERVKWGQQRKMEQGVVFGRSCLGYDVKDGKITVNADSAEIVKRIFTEYTVLLKGAESIADRLNAEQIRTVNGGRWSGAFIRKVLRNVKYVGDLEQKKTCTPDFLTHKKRLNSSEHIYIRNHHEPIISRELWEQTQAEISRRKPTDTSRHSDRYVFSGKVYCGVCGSVMVSRVKTLKNGKIYHALRCSGRIGGKSCNNETLNVTALKACVKRIFTDMPIDKTAVINAVIKGLSRTDKPDIPALRRKIETLNAKKRRAVDLMLDGLITQQELIEQKSYYDSIIEKLSQEISSDRSVFETDTIRKNAERFLDFTSDPIWLLVIRADYIHGTLTVYLKGVEKGFTTCFTATGRGDSYRVITANTVRSQGIIPGMMQVQKNWFRHDVNDK

SEQ ID NO: 3950 - protein, 524 aa, Unknown
  Description of Unknown: Integrase B3951 sequence
  SM00857,G3DSA:1.10.10.2600,IPR036162,PS51737,G3DSA:3.40.50.1390, IPR006119,IPR038109,PF07508,IPR011109,SSF53041, PTHR30461,PS51736,cd00338,PF00239
MLKYNSETNLDSDIDSDIDKYAIYLRKSRADLEAEKIGDGETLARHKKILTDLAARKGLYVSKIYEEIISGETIEARPEIQKLIQDCYDGKYRGILVVEVTRLSRGNQGDAQTIMDCLKYSNYNKGLLIVTPTKTYDIVHSQEDEEYMEFELFMSRREYKMIKKRLERGRMQAIVEGNYMASHRPYGYNIVKTKTGRTLIPNKDEAPIVKLIFDLAADNVPLLTIARHLKDMGVPTYNGDYYWSRVSVKRILENPVYIGKVRWNNRTTIKTMVDGKIETRLTTLNKNHYMEYDGKHKKYALTDEETFAKVNSRLTETRTKYDYKLVNPLAGLLRCKKCGRVMNLRTYDSRKYNVSPRYNHDGSPYCKLSSVMYTDVIDTLIRALELYIEDFKIEINNDFQHDDTNIQMQIQTLKREETKLKQKITKLFDSWENGILNDNEFIERKVINNESLENIQRQIRDLEKSIPEKIDYKEKIILLSNAVESLRDDTVSAKIKNDYLKEIISTIEYSRERPGEFILDIELL

SEQ ID NO: 3951 - protein, 524 aa, Unknown
  Description of Unknown: Integrase B3952 sequence
  cd00338,SM00857,G3DSA:1.10.10.2600,IPR036162, PF13408,PS51737,G3DSA:3.40.50.1390,IPR025827, IPR006119,IPR038109,PF07508,IPR011109, SSF53041,PTHR30461,PS51736,Coil,PF00239
MNESVCIYLRKSRADREAEAHGEGETLARHERILLDLAKKKEYIVGAIYREVVSGETIADRPVMQQLLHEVESGMWDGVLVVEVERLARGDTIDQGIVSRAFQYSDTKIITPTKIYDPNNEFDEEYFEFGLFMSRREYKTIKRRLNAGRISSVKEGKYCGNKPPYGYERVKLEKEKGYTLRPVPTQAEIVKMIYTWYAGDGCEQIGVAKIARKLNEMGIESALGGDWTPASIQGILTNPVYIGKIRWNGRKTVKTIQTGQVIKTRPRSKDTLICNGLHPAVISEDLYNSVQEIRKKNPPRPVSIANSIRNPLAGIVYCSKCGRAMVRRPYQKRGQEDTLMCPYTSCPTVSSKLSLVEKAVLDGIREIVEKYKLNNDINTSSQAIDLTIISKQNLIHEKENELESLNAQKAKQYDLLEQGIYTTEVFLERAKTISASIQSCSDTIEKLKEEIKHYENIIKQQSDFIPRCEELLDNYWSLDTESKNKMLKSLIEKVAYSKDTKNAYGKGNEIGFQLDIFPKIQKNN

SEQ ID NO: 3952 - protein, 524 aa, Unknown
  Description of Unknown: Integrase B3953 sequence
  cd00338,SM00857,G3DSA:1.10.10.2600,IPR036162,PF13408, PS51737,G3DSA:3.40.50.1390,IPR025827,IPR006119,IPR038109, PF07508,SSF53041,IPR011109,PTHR30461,PS51736, Coil,PF00239
MNESVCIYLRKSRADREAEAHGDGETLARHERILLDLAKKKAYTVGAIYREVVSGETISARPVMQQLLHEVESGMWDGVLVVEVERLARGDTIDQGVVSRAFQYSDTKIITPTKIYDPNNEFDEEYFEFGLFMSRREYKTIKRRLNAGRISSVKEGKYCGNKPPYGYERVKLEKEKGYTLRPVPDQANIVKMIYTWYAGDGCEQIGVAKIARKLNDMGIKSALGSDWTPASIQGILTNPVYIGKIRWNGRKVVKTVQNGQVVKTRPRSKDVLVCDGLHPAIISENLFNSVQEIRQKNPPRPISIKNTVRNPLAGIVYCSKCGRAMVRRPYQKSGQEDSLLCPYTSCSTVSSKLSLVEKAVIDGIEEIVEKYKLNNDINVSSESISSGISSKQNLINEKEKELESLNAQKAKQYDLLEQGIYTTEVFLERAKTIATSIQACSSTIEKLKEEIKHDENLMEQQSDFIPRCEELLDNYWSLDTESKNKMLKSLIEKVVYSKDTKNAYGKGNEVSFQLDIFPKIQKEN

SEQ ID NO: 3953 - protein, 524 aa, Unknown
  Description of Unknown: Integrase B3954 sequence
  SM00857,G3DSA:1.10.10.2600,IPR036162,PS51737,G3DSA:3.40.50.1390, IPR006119,IPR038109,PF07508,IPR011109,SSF53041, PTHR30461,Coil,PS51736,cd00338,PF00239
MNESVCIYLRKSRADREAEAHGEGETLARHERILLDLAKKKEYIVGAIYREVVSGETIADRPVMQQLLHEVESGMWDGVLVVEVERLARGDTIDQGVVSRAFQYSDTKIITPTKIYDPNNEFDEEYFEFGLFMSRREYKTIKRRLNAGRISSVKEGKYCGNKPPYGYERVKLEKEKGYTLRPVPTQAEIVKMIYTWYAGDGCEQIGIAKIARKLNEMGIESALCGDWTPASIQGILTNPVYIGKIRWNGRKTVKTIQNGHVVKTRPRSKDVLVCEGLHPAIISEVLYDSVQEIRKKNPPRPVSIANSIRNPLAGIVYCSKCGRAMVRRPYQKRGQEDTLMCPYTSCPTVSSKLSLVEKSVLDGIREIAEEYKLNNDINTSSKAIDCGITSKQNLIHEKENELESLNAQKAKQYDLLEQGIYTTEVFLERAKTIAASIQSCSDTIEKLKEEIKHDENIIKQQSDFIPRCEELLDNYWSLDTESKNKMLKSLIEKVVYSKDNKNAYGKGNEIGFQLDIFPKIQKNN

SEQ ID NO: 3954 - protein, 524 aa, Unknown
  Description of Unknown: Integrase B3955 sequence
  PTHR30461:SF3,SM00857,G3DSA:1.10.10.2600,IPR036162,PF13408, IPR025827,PS51737,G3DSA:3.40.50.1390,IPR006119,IPR038109, PF07508,IPR011109,SSF53041,PTHR30461, PS51736,cd00338,PF00239
MNKLRAAAYCRVSTDRAEQSGSLASQRSFFDDYIRNSDSMTLVGVFYDEGTSGTTTLNRYGFNKMISLAVSGGIDIILTKEVSRFARNTVDTLNITRMLRSKGVGIIFINDNIDTRDSDGELRLSIMATIAQEESRKISERVKWGQQRKMEQGVVFGRSCLGYDVKDGKITINADSAEIVKRIFTEYTVLLKGAESIADGLNAEQIRTVNGGRWSGAFIRKVLRNVKYVGDLEQKKTCTPDFLTHKKRLNRSEHIYIRNHHEPIISRELWEQTQAEISRRKPTDTSRHSDRYVFSGKVYCGVCGSVMVSRVKTLKNGKIYHALRCSGRIGGKSCNNETLNVIALKACVKRIFTDIPIDKTAVINAVIKGLSRTDKPDIPALRRKIETLNAKKRRTVDLMLDGLITQQELIEQKSYYDSIIEKLSQEISSDRSVFETDKIRKNAERFLDFTSDPIWLLVIRADYIHGTLTVYLKGIEKGFTTCFTATGRGDSYRVITGNTVRSQGIIPVTMQVQKNWFRHDVNDK

SEQ ID NO: 3955 - protein, 524 aa, Unknown
  Description of Unknown: Integrase B3956 sequence
  cd00338,SM00857,G3DSA:1.10.10.2600,IPR036162,PF13408, IPR025827,G3DSA:3.40.50.1390,PS51737,IPR006119,IPR038109, PF07508,SSF53041,IPR011109,PTHR30461,PS51736, Coil,PF00239
MNESVCIYLRKSRADREAEAHGEGETLARHERILLELAKKKEYIVGAIYREVVSGETIADRPVMQQLLREVESGMWDGVLVVEVERLARGDTIDQGVVSRAFQYSDTKIITPTKIYDPNNEFDEEYFEFGLFMSRREYKTIKRRLNAGRISSVKEGKYCGNKPPYGYERVKLTREKGYTLRPVPAQAEIVKMIYTWYAGDGCEQIGVAKIARKLNEMGIESALGGDWTPASIQGILTNPVYIGKIRWNGRKTVKTIQTGQVIKTRPRSKDTLICNGLHPAVISEDLYNSVQEIRKKNPPRPVSIANSIRNPLAGIVYCSKCGRAMVRRPYQKRGQEDTLMCPYTSCPTVSSKLSLVEKAVLDGIREIVEKYKLNNDINTSSQAIDLTIISKQNLIHEKENELESLNAQKAKQYDLLEQGIYTTEVFLERAKTISASIQSCSDTIEKLKEEIKHDENIIKQQSDFIPRCEELLDNYWSLDTESKNKMLKSLIEKVAYSKDTKNAYGKGNEIGFQLDIFPKIQKNN

SEQ ID NO: 3956 - protein, 524 aa, Unknown
  Description of Unknown: Integrase B3957 sequence
  SM00857,G3DSA:1.10.10.2600,IPR036162,PS51737,G3DSA:3.40.50.1390, IPR006119,IPR038109,PF07508,IPR011109,SSF53041, PTHR30461,Coil,PS51736,cd00338,PF00239
MNESVCIYLRKSRADREAEAHGEGETLARHERILLDLAKKKEYIVGAIYREVVSGETIADRPVMQQLLHEVESGMWDGVLVVEVERLARGDTIDQGVVSRAFQYSDTKIITPTKIYDPNNEFDEEYFEFGLFMSRREYKTIKRRLNAGRISSVKEGKYCGNRPPYGYERVKLEKEKGFTLRPVPDQAEIVKMIYAWYAGDGCEQIGVAKIVRKLNEMGIESALGDDWTPATIQGILTNPVYIGKIRWNGRKTVKTIQNGQVIKTRPRSKDTLICNGLHPAIIPEDLYDSVQEIRKKNPPRPVSIASSIRNPLAGIVYCSKCGRAMVRRPYQKRGQEDSLLCPYTSCPTVSSKLSLVEKSVLDGIREIVEEYKLNNDINTSSKAIDCGITSKQNLIHEKENELESLNSQKAKQYDLLEQGIYTTEVFLERAKTIAASIQSCSDTIEKLKEEIKHDENIIKQQSDFIPRCEELLDNYWSLDTESKNKMLKSLIEKVTYSKYTKNAYGKGNEIGFQLDIFPKIQKNN

SEQ ID NO: 3957 - protein, 524 aa, Unknown
  Description of Unknown: Integrase B3958 sequence
  SM00857,G3DSA:1.10.10.2600,IPR036162,PF13408, IPR025827,PS51737,G3DSA:3.40.50.1390,IPR006119, IPR038109,PF07508,IPR011109,SSF53041, PTHR30461,Coil,PS51736,cd00338,PF00239
MNESVCIYLRKSRADREAEAHGEGETLARHEHILLDLAKRQGYSIGAIYREVVSGETISARPVMQRLLHEVESGMWDGVLVVEVERLARGDTIDQGVVSRAFQYSDTKIITPAKIYDPNNEFDEEYFEFGLFMSRREYKTIKRRLNNGRISSVKEGKYCGNKPPYGYERVKLEKEKGYTLRPVPAQAEVVKMIYTWYAGDGCEQIGVAKIVRKLNGMRIESALGSDWTPASIQGILTNPVYIGKIRWNGRKTVKTIQNGQVVKTRPRSRDVLICEGLHPAIISDDLYNSVQEIRQKNPPRPISIKSTVRNPLAGIVYCSKCGRAMVRRPYQKRGQEDTLLCPYTSCSTVSSKLSLVEKAVIDGIEEIAEEYKLNNDIDISSKDIDFGITSKQNLIHEKESELERLNNQKAKQYDLLEQGIYTTEVFLERSKAIAESVQACSDTIEKLREEISHDKTIIEQQSAFVPRCEELLNNYWSLDTESKNKMLKSLIEKVIYTKDTKNTYGHSNEINFELDIFPKIQKNN

SEQ ID NO: 3958 - protein, 524 aa, Unknown
  Description of Unknown: Integrase B3959 sequence
  SM00857,G3DSA:1.10.10.2600,IPR036162,PF13408,PS51737, G3DSA:3.40.50.1390,IPR025827,IPR006119,IPR038109,PF07508, IPR011109,SSF53041,PF00239,PTHR30461,PS51736, Coil,cd00338
MNESVCIYLRKSRADREAEAHGEGETLARHERILLDLAKKKEYIVGAIYREVVSGETIADRPVMQQLLHEVESGMWDGVLVVEVERLARGDTIDQGVVSRAFQYSDTKIITPTKIYDPNNEFDEEYFEFGLFMSRREYKTIKRRLNAGRISSIKEGKYCGNKPPYGYERVKLEKEKGYTLRPVPAQAEIVKMIYTWYAGDGCEQIGVAKIARKLNEMGIESALGGDWTPASIQGILTNPVYIGKIRWNGRKTVKTIQNGQVIKTRPRSKDTLICDGLHPAIISEDLFNSVQEIRKKNPPRPVSIANSIRNPLAGIVYCSKCGRAMVRRPYQKRGQEDTLMCPYTSCPTVSSKLPLVEKAVIDGIREIVEEYKLNNDINISSKDIDCGITSKQNLIHEKENELKNLNSQKAKQYDLLEQGIYTTEVFLERAKTISASIQSCSDTIEKLKEEIKHDENIIKQRSDFIPRCEELLDNYWSLDTESKNKMLKSLIEKVVYSKDTKNAYGKGNEIGFQLDIFPKIQKNN

SEQ ID NO: 3959 - protein, 524 aa, Unknown
  Description of Unknown: Integrase B3960 sequence
  cd00338,SM00857,G3DSA:1.10.10.2600,IPR036162,PF13408, IPR025827,PS51737,G3DSA:3.40.50.1390,IPR006119,IPR038109, PF07508,SSF53041,IPR011109,PTHR30461,PS51736, Coil,PF00239
MNAVIYARYSSDKQTEQSIEGQLREGYAYAERAGMTIVGAYIDRAISGTSDQRPDFQRMIADSAKRQFEAVIVWKLDRFARNRYDSAIYKSKLKKNGVRVFSVTEGIGDGDESIILEAVLEAMAEMYSKQLGQNAARGMRETARKGLCTGGQIPLGYVVGEDHKLHIDSKTAPAVQLIYTLFADGKTKTQIAKELNARGFRTKNGKLYTSNSFFRILTNPMYYGDYTYKGDIPRECPAIISRALYDKCQERNEATKRSRGMKTSEVEWLLRGKLFCGHCGTQMTGDSGTGRANEKHYYYPCHKRKRYKDCDKKSEKKEQLERAVCQKTVEYVLREDRIGYIAERVVEQYEKEFDASIIKEKEMSLVKLDAELDKCAESLMHTTVRSVVDRINARAEELEAAKSELEHELAQLRITSKARITVDEIITFLRGFCSGDVEDIQFRRKIVDTFINAVYVFDDKYVVYYNVRDCKQVTYSDMLASIHAPSDMSAHGSDCLLYGEPLSNQSEHILIVSSCVFGLVMTKE

SEQ ID NO: 3960 - protein, 524 aa, Unknown
  Description of Unknown: Integrase B3961 sequence
  PTHR30461:SF3,SM00857,G3DSA:1.10.10.2600,IPR036162,PF13408, PS51737,G3DSA:3.40.50.1390,IPR025827,IPR006119,IPR038109, PF07508,IPR011109,SSF53041,PTHR30461,PS51736, cd00338,PF00239
MNKLRAAAYCRVSTDRAEQSGSLASQRSFFDDYIRNSDSMTLVGVFYDEGTSGTTTLNRYGFNKMISLAVSGGIDIILTKEVSRFARNTVDTLNITRMLRSKGVGIIFINDNIDTRDSDGELRLSIMATIAQEESRKISERVKWGQQRKMEQGVVFGRSCLGYDVKDGKITVNADSAKIVKRIFTEYTVLLKGAESIADGLNAEQIRTVNGGRWSGAFIRKVLRNVKYVGDLEQKKTCTPDFLTHKKRLNRSEHIYIRNHHEPIISRELWEQTQAEISRRKPTDTSRHSDRYVFSGKVYCGVCGSVMVSRVKTLKNGKIYHALRCSGRIGGKSCNNETLNVTALKACVKRIFTDIPIDKTAVINAVIKGLSRTDKPDIPALRRKIETLNAKKRRAVDLMLDGLITQQELIEQKSYYDSIIEKLSQEISSDRSVFETDKIRTNAERFLDFTSDPIWLLVIRAYYIHGTLTVYLKGIEKGFTTCFTATGRGDSYRVITGNTVRSQGIIPGTMQVQKNWFRHDVNDK

SEQ ID NO: 3961 - protein, 524 aa, Unknown
  Description of Unknown: Integrase B3962 sequence
  SM00857,G3DSA:1.10.10.2600,IPR036162,PS51737,G3DSA:3.40.50.1390, IPR006119,IPR038109,PF07508,SSF53041,IPR011109, PTHR30461,Coil,PS51736,cd00338,PF00239
MNESVCIYLRKSRADREDEAHGEGETLARHEHILLDLAKRQGYSIGAIYREVVSGETISARPVMQRLLHEVESGLWDGVLVVELERLARGDTIDQGVVSRAFQYSDTKIITPTKIYDPNNEFDEEYFEFGLFMSRREYKTIKRRLNAGRISSVKEGKYCGNKPPYGYERVKLEKEKGYTLRPVPTQAEIVKMIYTWYAGDGCEQIGVAKIARKLNEMGIESALGGDWTPASIQGILTNPVYIGKIRWNGRKTVKTIQNGQVIKTRPRSKDTLICNGLHPAIISEDLFNSVQEIRKKNPPRPISIKNSIRNPLAGIVYCSKCGRAMVRRPYQKRGQEDTLMCPYTSCPTVSSKLSLVEKSVIDGIREIVEEYKLNNDINTSSEAIDCGITSKQNLIHEKENELESLNAQKAKQYDLLEQGIYTTEVFLERAKTISASIQSCSDTIEKLKEEIKHDENIIKQRSDFIPRCEELLDNYLSLDTESKNKMLKSLIEKVTYSKDTKNAYGKGNEIGFQLDIFPKIQKNN

SEQ ID NO: 3962 - protein, 524 aa, Unknown
  Description of Unknown: Integrase B3963 sequence
  PTHR30461:SF3,SM00857,G3DSA:1.10.10.2600,IPR036162,PF13408, IPR025827,G3DSA:3.40.50.1390,PS51737,IPR006119,IPR038109, PF07508,IPR011109,SSF53041,PTHR30461, PS51736,cd00338,PF00239
MNKLRAAAYCRVSTDRAEQSGSLASQRSFFDDYIRNSDSMTLVGVFYDEGTSGTTTLNRYGFNKMISLAVSGGIDIILTKEVSRFARNTVDTLNITRMLRAKGVGIIFINDNIDTRDSDGELRLSIMATIAQEESRKISERVKWGQQRKMEQGVVFGRSCLGYDVKDGKITINADSAEIVKRIFTEYTVLLKGAESIADELNAEQIRTVNGGRWSGAFIRKVLRNVKYVGDLEQKKTCTPDFLTHKKRLNSSEHIYIRNHHEPIISRELWEQTQAEISRRKPTDTSRHSDRYVFSGKVYCGVCGSVMVSRVKTLKNGKIYHALRCSGRIGGKSCNNETLNVTALKACVKRIFTDIPIDKTAVINAVIKGLSRTDKPDIPALRRKIETLNAKKRRAVDLMLDGLITQQELIEQKSYYDSIIEKLSQEISSDRSVFETDKIRKNAERFLDFTSDPIWLLVIRADYIHGTLTVYLKGIEKGFTTCFTATGRGDSYRVITGNTVRSQGIIPGTMQVQKNRCRHDVNDK

SEQ ID NO: 3963 - protein, 524 aa, Unknown
  Description of Unknown: Integrase B3964 sequence
  PTHR30461:SF3,cd00338,SM00857,G3DSA:1.10.10.2600,IPR036162, PF13408,PS51737,G3DSA:3.40.50.1390,IPR025827,IPR006119, IPR038109,PF07508,SSF53041,IPR011109,PTHR30461, PS51736,Coil,PF00239
MLLLENLIMYLRKSRSDDISMSVEDVLAKHEGIIQEYCEREFGTRLPENRIFREVVSGETIADRPVMKEIMKLLETGTVKGVLVVEPQRLSRGDLEDCGRIINTFRYTGTLVITPQKTYDLTNEYDRKFFEMELTRGNDYLEYTKRILSRGREASVKQGNFIGSIAPYGYKKIVVGSGKDKYHSLEINPEEADAVRLMYALFINEGYGFAKIAHRLDELGFKPRSSENWQPAAIKDMLENPVYIGKIRWNWRKTQKRMANGEVVKVRPKTKDPSEWILVDGKHPAIISEELYNAALERRGKNPCVRKSLELTNPYAGLLFCGTCGRAMSQKRFINRRTHTQSVCDSMLCNNQANCHTKSVKYSAFEQRVIELLEDAIADFEIKLKDNNTNVIELHRGIIQKHMRELERLHEKDMRQKDAYEDGIYTKEEYIKRNALLQEQIAKTTSALEEAKTSAPKAIDYAEKIKRFNDCINALKDPDVSAPEKNTLLKNCVKRIDYYNEGESKPGVGRYVENVFELNMLLNM

SEQ ID NO: 3964 - protein, 524 aa, Unknown
  Description of Unknown: Integrase B3965 sequence
  cd00338,SM00857,G3DSA:1.10.10.2600,IPR036162,PF13408, PS51737,G3DSA:3.40.50.1390,IPR025827,IPR006119,IPR038109, PF07508,IPR011109,SSF53041,PTHR30461,PS51736, Coil,PF00239
MNESVCIYLRKSRADREAEAHGEGETLARHERILLDLAKKQDYSIGAIYREVVSGETIADRPVMQQLLHEIESGVWDGVLVVEVERLARGDTIDQGVVSRAFQYSDTKIITPTKIYDPNNEFDEEYFEFGLFMSRREYKTIKRRLNNGRISSVKEGKYCGNKPPYGYERVKLEKEKGYTLRPVPAQAEVVKMIYTWYAGDGCEQIGTSKIVRKLNDMGIKSMSGNNWTPASIQGILTNPVYIGKIRWNGRKTVKTIQDGQVVKTRPRSKDVLVCDGLHPAIISDDLYNSAQEIRKKNPPRPISIKSTVRNPLAGIVYCSKCGRAMVRRPYQKCGQEDTLMCPYTSCSTVSSRLSLVEKAVIDGIREIAEKYKLNNDINVLSSAINSGIVSKQNLIREKESELESLNVQKAKQYDLLEQGIYTTEVFLERSKTISASIQSCSDSIEKLKQEIKHDENLIEQQSDFIPRCEELLNNYWSLDTESKNKMLKSLIEKVIYSKDSKSAYGHGDEVNFELDIFPKIQENN

SEQ ID NO: 3965 - protein, 524 aa, Unknown
  Description of Unknown: Integrase B3966 sequence
  SM00857,G3DSA:1.10.10.2600,IPR036162,PF13408,IPR025827, G3DSA:3.40.50.1390,PS51737,IPR006119,IPR038109,PF07508, IPR011109,SSF53041,PF00239,PTHR30461,PS51736, Coil,cd00338
MSLENVCIYLRKSRADREAEARGEGETLARHERILLDLARSRNYNVGAIYREIVSGETISARPVMQQLLREVEAGSWDGVLVVEVERLARGDTIDQGVVSRAFQFSDTKIITPTKTYDPDNEFDEEYFEFGLFMSRREYKTIKRRLNAGRISSVKEGKYCGSRPPYGYERVKLRGEKGFTLQPVPEQAEVIKMIYSLYSGASGDRIGVSKIVRKLNDMGIKSPSGKSWVPISVQDVLANPVYAGMIRWNGRKTVRAIQDGVVTQSRPRSKEDDILLFPGRHPAIVSKEMYDSVQQIRKKNPPRPISIKNTIKNPLAGIVYCSKCGRAMVRRPYQKRGQDDTLMCSYTSCPTVSSKLSLVERAVLNGIQDLVDEYRLNDAVPGPDINNAVKSKEKLIAEKEHELEKLNVQKMKQYDLLEQGIYTTEVFLERSNSIASSINSCQDSIECLKEEIRHDKELIDQQSSFIPRCENLLEIYWSLDTAAKNKMLKELIERVNYTKDVKNAFRMGNEATFVLDIFPRIQSN

SEQ ID NO: 3966 - protein, 524 aa, Unknown
  Description of Unknown: Integrase B3967 sequence
  cd00338,SM00857,G3DSA:1.10.10.2600,IPR036162,PF13408, PS51737,G3DSA:3.40.50.1390,IPR025827,IPR006119,IPR038109, PF07508,SSF53041,IPR011109,PTHR30461,PS51736, Coil,PF00239
MNESVCIYLRKSRADREAEAHGEGETLARHERILLDLAKKKEYIVGAIYREVVSGETIADRPVMQQLLHEVESGMWDGVLVVEVERLARGDTIDQGVVSRAFQYSDTKIITPTKIYDPNNEFDEEYFEFGLFMSRREYKTIKRRLNAGRISSVKEGKYCGNKPPYGYERVKLEKEKGYTLRPVPTQAEIVKMIYTWYSGDGCEQIGVAKIARKLNEMGIESALGGDWTPASIQGILTNPVYIGKIRWNGRKTVKTIQTGQVIKTRPRSKDTLICDGLHPAIISEDLFNSVQEIRKKNPPRPVSIANSIRNPLAGIVYCSKCGRAMVRRPYQKRGQEDTLMCPYTSCPTVSSKLPLVEKAVIDGIREIVEEYKLNNDINISSKDIDCGITSKQNLIHEKENELKNLNSQKAKQYDLLEQGIYTTEVFLERAKTISASIQSCSDTIEKLKEEIKHDENIIKQRSDFIPRCEELLDNYWSLDTESKNKMLKSLIEKVVYSKDTKNAYGKGNEIGFQLDIFPKIQKNN

SEQ ID NO: 3967 - protein, 524 aa, Unknown
  Description of Unknown: Integrase B3968 sequence
  cd00338,SM00857,G3DSA:1.10.10.2600,IPR036162,PF13408, IPR025827,G3DSA:3.40.50.1390,PS51737,IPR006119,IPR038109, PF07508,SSF53041,IPR011109,PTHR30461,PS51736, Coil,PF00239
MSLENVCIYLRKSRADREAEARGEGETLARHERILLDLARSRNYNVGAIYREIVSGETISARPVMQQLLREVEAGSWDGVLVVEVERLARGDTIDQGVVSRAFQFSDTKIITPAKTYDPDNEFDEEYFEFGLFMSRREYKTIKRRLNAGRIASVKEGKYCGSKPPYGYERVKLHGEKGFTLQPVPEQAEVIKMIYSLYSGASGDRIGVSKIVRKLNDMGIKSPSGKSWVPISVQDVLANPVYAGMIRWNGRKTVRAIQDGVVTQSRPRSKEDDILLFPGRHPAIVSKEMYDSVQQIRKKNPPRPISIKNTIKNPLAGIVYCSKCGRAMVRRPYQKRGQDDTLMCSYTSCPTVSSKLSLVERAVLNGIQDLVDEYRLNDAVPGPDINNAVKSKKKLIAEKEHELEKLNVQKMKQYDLLEQGIYTTEVFFERSNSIASSINSCQDSIECLKEEIRHDKELIDQRSSFIPRCENLLEIYWSLDTAAKNKMLKELIERVNYTKDVKNAFRMGNEATFVLDIFPRIQSN

SEQ ID NO: 3968 - protein, 524 aa, Unknown
  Description of Unknown: Integrase B3969 sequence
  SM00857,G3DSA:1.10.10.2600,IPR036162,PF13408,IPR025827, PS51737,G3DSA:3.40.50.1390,IPR006119,IPR038109,PF07508, IPR011109,SSF53041,PF00239,PTHR30461,PS51736, Coil,cd00338
MNESVCIYLRKSRADREAEAHGEGETLARHERILLDLAKKKEYTVGAIYREVVSGETIADRPVMQQLLHEVESGMWDGVLVVEVERLARGDTIDQGIVSRAFQYSDTKIITPTKIYDPNNEFDEEYFEFGLFMSRREYKTIKRRLNAGRISSVKEGKYCGNKPPYGYERVKLEKEKGYTLRPVPTQAEIVKMIYTWYAGDGCEQIGVAKIVRKLNEMGMESALGGDWTPASIQGILTNPVYIGKIRWNGRKTVKTIQTGQVIKTRPRSKDTLICDGLHPAIISEDLYNSVQEIREKNPPRPISIKNSIRNPLSGIVYCSKCGRAMVRRPYQKRGQEDTLMCPYTSCPTVSSKLSLVEKAVLDGIREIVEKYKLNNDINTSSQAIDLTIISKQNLIHEKENELESLNAQKAKQYDLLEQGIYTTEVFLERAKTISASIQSCSDTIEKLKEEIKHDENIIKQQSDFIPRCEELLDNYWSLDTESKNKMLKSLIEKVAYSKDTKNAYGKGNEIGFQLDIFPKIQKNN

SEQ ID NO: 3969 - protein, 524 aa, Unknown
  Description of Unknown: Integrase B3970 sequence
  PTHR30461:SF3,SM00857,G3DSA:1.10.10.2600,IPR036162,PF13408, IPR025827,G3DSA:3.40.50.1390,PS51737,IPR006119,IPR038109, PF07508,SSF53041,IPR011109,PF00239,PTHR30461, PS51736,Coil,cd00338
MDGLNLANVVIYARYSSAGQNDQSIDGQLAKCREYAQQRGYRVVGEYCDRALSGRYAETRPEFQRMISDSAKHAFDFVLVWKLDRFSRDRYDSAIYKKKLRANGVRVLSVTEGVGDSSESVLLEAILEAMAEEYSRQLAQNVRRGMRQNAEKALSLGGLAPLGYRVVDKRYEVDEEAAQIVRFVHEQYAAGATQKQIVADCAQRGYRNQRGNPLTIDSVKRILSNERYVGTYRYLDDIVIEDAFPAIVSKELKQQVRARLTANAKAPGHAKAKIEYLLHGKLFCGLCGAPMIGECGRGRHGATYYYYTCAARKKQHTCKKRNERKDALEKYIVEYIGSHVLTDDWIDAAAERVVAEYARSYDAAGIKPLERQIREVDKELDQLTDALIKTSSAAVIARINDRVEAVEVKRRALEDELASLRIASRVQLQKADVAAWLSQFRSVDSADLEYRKKVIELFVNAIYIYDDRIKMFFNVTDSAQITYPEMLALEAPPGSDFGASGVPDVFLSEHFVFINGVIGMVVHR

SEQ ID NO: 3970 - protein, 524 aa, Unknown
  Description of Unknown: Integrase B3971 sequence
  PTHR30461:SF3,cd00338,SM00857,G3DSA:1.10.10.2600,IPR036162, PF13408,PS51737,IPR025827,G3DSA:3.40.50.1390,IPR006119, IPR038109,PF07508,IPR011109,SSF53041,PTHR30461, PS51736,Coil,PF00239
MDHGLNLANVVIYARYSSVGQNDQSIDGQLAKCREYAQQRGFRVVGEYCDRALSGRYAETRPEFQRLVSDSSKHAFEYVLVWKLDRFSRDRYDSAIYKKKLRANGVRVLSVTEGIDESSESVLLEAILEAMAEEYSRQLAQNVKRGMRQNAEKALSLGGMPPLGYDVVSKRYTINESEAQIVRFIHERYAAGAAQKLIVDECRQRGYCAKRGNELTIGAINRILRNPKYAGTYVCDDLVLEDSIPAIVSKPLKQQVRDRLAASAKAPGHAKAKVEYLLHGKLFCGECGAPMIGECGRGKNGTTHYYYTCAARKKSRSCKKRNERKFELEKYIVEYISMYVLTDEWINAAAERVVAEYARSYAASGIKPLERQIREADKELDALVDTLIKTASATAIAKINDRIEAVEAKKRTLEADLATLRIASRVEIRKEDIVAWLDQFRVGSSSDPEYCKKIIELFVNAVYVYDDRIKMFFNVRDSAQITYPEMLALDGLECSDFDLSGVPDDALSEQILFINGIIGMLVRR

SEQ ID NO: 3971 - protein, 524 aa, Unknown
  Description of Unknown: Integrase B3972 sequence
  cd00338,SM00857,G3DSA:1.10.10.2600,IPR036162,PF13408, IPR025827,G3DSA:3.40.50.1390,PS51737,IPR006119,IPR038109, PF07508,IPR011109,SSF53041,PTHR30461,PS51736, Coil,PF00239
MNESVCIYLRKSRADREAEAHGEGETLARHERILLDLAKKKEYIVGAIYREVVSGETIADRPVMQQLLHEVESGMWDGVLVVEVERLARGDTIDQGVVSRAFQYSDTKIITPTKIYDPNNEFDEEYFEFGLFMSRREYKTIKRRLNAGRISSVKEGKYCGNKPPYGYERVKLEKEKGYTLRPVPTQAEIVKMIYTWYAGDGCEQIGVAKIARKLNEMGIESALCGDWTPASIQGILTNPVYIGKIRWNGRKTVKTIQNGQVIKTRPRSKDTLICDGLHPAIISEDLYNSVQEIRKKNPPRPVSIANSIRNPLAGIVYCSKCGRAMVRRPYQKRGQEDTLMCPYTSCHTVSSKLSLVEKAVLDGIRKIVEKYKLNNNINTSSQAIDLTIISKQNLIHEKENELESLNAQKAKQYDLLEQGIYTTEVFLERSKTIAASIQSCSDTIEKLKEEIKHDENIIKQRSDFIPRCEELLDNYWSLDTESKNKMLKSLIEKVTYSKDTKNAYGKGNEIGFQLDIFPKIQKNN

SEQ ID NO: 3972 - protein, 524 aa, Unknown
  Description of Unknown: Integrase B3973 sequence
  SM00857,G3DSA:1.10.10.2600,IPR036162,PS51737,G3DSA:3.40.50.1390, IPR006119,IPR038109,PF07508,SSF53041,IPR011109, PTHR30461,Coil,PS51736,cd00338,PF00239
MNESVCIYLRKSRADREAEAHGEGETLARHERILLDLAKKKEYIVGAIYREVVSGETIADRPVMQQLLHEVESGMWDGVLVVEVERLARGDTIDQGVVSRAFQYSDTKIITPTKIYDPNNEFDEEYFEFGLFMSRREYKTIKRRLNAGRISSVKEGKYCGNKPPYGYERVKLEKEKGYTLRPVPAQAEIVKMIYTWYAGDGCEQIGVAKITRKLNEMGIESALGGDWTPASIQGILTNPVYIGKIRWNGRKTVKTIQNGQVIKTRPRSKDTLICNGLHPAIISEDLYNSVQEIRQKNPPRPISMKNSIRNPLAGIVHCSKCGRAMVRRPYQKRGQEDTLMCPYTSCPTVSSKLSLVEKAVLDGIREIVEEYKLNNDINTSSKAIDCGIASKQNLIHEKENELESLNAQKAKQYDLLEQGIYTTEVFLERAKTISASIQSCSDIIEKLKEEIKHGENIIKQQSDFIPRCKKLLNNYWSLDTESKNKMLKSLIEKVAYSKDTKNAYGKGNEIGFQLDIFPKIQKNN

SEQ ID NO: 3973 - protein, 524 aa, Unknown
  Description of Unknown: Integrase B3974 sequence
  PTHR30461:SF3,cd00338,SM00857,G3DSA:1.10.10.2600,IPR036162, PF13408,PS51737,IPR025827,G3DSA:3.40.50.1390,IPR006119, IPR038109,PF07508,IPR011109,SSF53041, PTHR30461,Coil,PF00239
MKRVLCLYRVSTIGQVDHDDIPMQRIACREFINQHPDWVLVEEISEKGVSGYKTKTEDRDALTRIKEKALAKKFDILLVFMFDRIGRRDNETPFVVQWFVENGIEVWSTKEGEQRFDNHVDKLLNYIRFWQASGESEKTSMRIRTRHLQMIQEGLYRGGLIPFGYKLEFMGRTNKKGQPVRDLVIDEAESKIVKEIYHKSVSDGWGANRIANWLNERGIPTKRQKTFWRATSIRALVRNPIYTGRIRFGGDLSEPFDHLRIIDDDLFGLCDQTIEGRCPRHPDKRVGHLRSTSNGLLTGILYCGSCGERMCFNHNTTVRILADGTKRSYERDVYRCYRKIHSRRTCQGRSTYSAERIEKDILAVVHTYFENIRSKPTLQMLAAAGNRKRSIQQDAIAQAEAALKKAQIELAALEDAAVKAITGETNMDLELINSLFPKRRMNLDKAMQEVERLRAELADSEKLESAANHELNMILSWADTFDAASRETQRSIIAMLIDKVVVNTNYHLDIHFRITAQQYLGKAS

SEQ ID NO: 3974 - protein, 524 aa, Unknown
  Description of Unknown: Integrase B3975 sequence
  SM00857,G3DSA:1.10.10.2600,IPR036162,PS51737,G3DSA:3.40.50.1390, IPR006119,IPR038109,PF07508,SSF53041,IPR011109, PTHR30461,Coil,PS51736,cd00338,PF00239
MNESVCIYLRKSRADREAEAHGEGETLARHERILLDLAKKKEYIVGAIYREVVSGETIADRPVMQQLLHEVESGMWDGVLVVEVERLARGDTIDQGVVSRAFQYSDTKIITPTKIYDPNNEFDEEYFEFGLFMSRREYKTIKRRLNAGRISSVKEGKYCGNKPPYGYERVKLEKEKGYTLRPVPTQAEIVKMIYTWYAGDGCEQIGVAKIARKLNEMGIESALCGDWTPASIQGILTNPVYIGKIRWNGRKTVKTIQNGQVIKTRPRSKDTLICEGLHPAIISEDLFNSVQEIRKKNPPRPVSIANSIRNPLAGIVYCSKCGRAMVRRPYQKRGQEDTLMCPYTSCPTVSSKLSLVEKSVIDGIREIVEEYKLNNDINASSKDIDCVITSKQNLINEKENELKSLNSQKAKQYDLLEQGIYTTEVFLERAKTIATSIKSCSDTIEKLKEEIKHDENIIKQQSDFIPRCEDLLDNYWSLDTESKNKMLKSLIEKVTYSKDTKNAYGKGNEIGFQLDIFPKIQKNN

SEQ ID NO: 3975 - protein, 524 aa, Unknown
  Description of Unknown: Integrase B3976 sequence
  SM00857,G3DSA:1.10.10.2600,IPR036162,PS51737, G3DSA:3.40.50.1390,IPR006119,IPR038109,PF07508, SSF53041,IPR011109,PTHR30461,Coil, PS51736,cd00338,PF00239
MNESVCIYLRKSRADREAEAHGEGETLARHERILLDLAKKKEYIVGAIYREVVSGETIADRPVMQQLLHEVESGMWDGVLVVEVERLARGDTIDQGVVSRAFQYSDTKIITPTKIYDPNNEFDEEYFEFGLFMSRREYKTIKRRLNAGRISSVKEGKYCGNKPPYGYERVKLEKEKGYTLRPVQTQAEIVKMIYAWYAGDGCEQIGVAKIARKLNEMGIESALGGDWTPASIQGILTNPVYIGKIRWNGRKTVKTIQNGQVIKARPRSKDTLICDGLHPAIILEDLYNSVQEIRKKNPPRPISIKNSIRNPLAGIVYCSKCGRAMVRRPYQKRGQEDTLMCPYTSCPTVSSKLSLVEKSVIDGIREIVEEYKLNNDINTSSKAIDCGITSKQNLIHEKENELESLNSQKAKQYDLLEQGIYTTEVFLERAKTIAASIQSCSDTIEKLKEEIKHDKNIIKQQSDFIPRCEELLDNYWSLDTESKNRMLKSLIEKVVYSKDTKNAYGKGDEISFRLDIFPRIQKKS

SEQ ID NO: 3976 - protein, 524 aa, Unknown
  Description of Unknown: Integrase B3977 sequence
  SM00857,G3DSA:1.10.10.2600,IPR036162,PF13408,IPR025827, PS51737,G3DSA:3.40.50.1390,IPR006119,IPR038109,PF07508, SSF53041,IPR011109,PF00239,PTHR30461,PS51736, Coil,cd00338
MNAVIYARYSSDKQTEQSIEGQLREGYAYAERAGMTIVGAYIDRAISGTSDQRPDFQRMIADSAKRQFEAVIVWKLDRFARNRYDSAIYKSKLKKNGVRVFSVTEGIGDGDESIILEAVLEAMAEMYSKQLGQNAARGMRETARKGLCTGGQIPLGYVVGEDHKLHIDSKTAPAVQLIYTLFADGKTKTQIAKELNARGFRTKNGKLYTSNSFFRILTNPMYYGDYTYKGDIPRECPAIISRALYDKCQERNEATKRSRGMKTSEVEWLLRGKLFCGHCGTQMTGDSGTGRANEKHYYYTCHKRKRYKDCDKKSEKKEQLERAVCQKTVEYVLREDRIGYIAERVVEQYEKEFDASIIKEKEMSLIKLDAELDKCAESLMHTTVRSVVDRINARAEELEAAKFELEHELAQLRITSKARITVDEIITFLRGFCSGDVEDIQFRRKIVDTFINAVYVFDDKYVVYYNVRDCKQVTYSDMLASIHAPSDMSAHGSDCLLYGEPLSNQSEHILIVSSCVFGLVMTKE

SEQ ID NO: 3977 - protein, 524 aa, Unknown
  Description of Unknown: Integrase B3978 sequence
  SM00857,G3DSA:1.10.10.2600,IPR036162,PS51737,G3DSA:3.40.50.1390, IPR006119,IPR038109,PF07508,SSF53041,IPR011109, PTHR30461,Coil,PS51736,cd00338,PF00239
MNESVCIYLRKSRADREAEAHGEGETLARHERILLDLAKKKEYIVGAIYREVVSGETIADRPVMQQLLHEVESGMWDGVLVVEVERLARGDTIDQGVVSRAFQYSDTKIITPTKIYDPNNEFDEEYFEFGLFMSRREYKTIKRRLNAGRISSVKEGKYCGNKPPYGYERVKLEKEKGYTLRPVPTQAEIVKMIYTWYAGDGCEQIGVAKIARKLNEMGIESALGGDWTPASIQGILTNPVYIGKIRWNGRKTVKTIQNGQVIKTRPRSKDTLICNGLHPAVISEDLYNSVQEIRKKNPPRPVSIANSIRNPLAGIVYCSKCGRAMVRRPYQKRRQEDTLMCPYTSCPTVSSKLSLVEKSVIDGIREIVEEYKLNNDINASSKDIDCVITSKQNLIHEKENELESLNSQKAKQYDLLEQGIYTTEIFLERAKTISASIQSCSDTIEKLKEEIKHDENIIKQRSDFIPRCEELLDNYWSLDTESKNKMLKSLIEKVVYSKDTKNAYGKGNEIGFQLDIFPKIQKNN

SEQ ID NO: 3978 - protein, 524 aa, Unknown
  Description of Unknown: Integrase B3979 sequence
  cd00338,SM00857,G3DSA:1.10.10.2600,IPR036162, PF13408,PS51737,G3DSA:3.40.50.1390,IPR025827, IPR006119,IPR038109,PF07508,IPR011109, SSF53041,PTHR30461,PS51736,Coil,PF00239
MSLENVCIYLRKSRADREAEARGEGETLARHERILLDLARSRNYNVGAIYREIVSGETISARPVMQQLLREVEAGSWDGVLVVEVERLARGDTIDQGVVSRAFQFSDTKIITPTKTYDPDNEFDEEYFEFGLFMSRREYKTIKRRLNAGRISSVKEGKYCGSRPPYGYERVKLRGEKGFTLQPVPEQAEVIKMIYSLYSGSSGDRIGVSKIVRKLNDMGIKSPSGKDWVPISVQDVLANPVYAGMIRWNGRKTVKAIQDGVVTQSRPRSKEDDILLFPGRHPAIVSKEMYDSVQQIRKKNPPRPISIKNTIKNPLAGIVYCSKCGRAMVRRPYQKRGQDDTLMCSYTSCPTVSSKLSLVERAVLNGIQDLVDEYRLNDAVPGPDINNAVKSKKKLIAEKEHELEKLNVQKMKQYDLLEQGIYTTEVFLERSNSIASSINSCQDSIECLKEEIRHDKELIDQQSSFIPRCENLLEIYWSLDTATKNKMLKELIERVNYTKDTKNAFRKGNEATFVLDIFPRIQSN

SEQ ID NO: 3979 - protein, 524 aa, Unknown
  Description of Unknown: Integrase B3980 sequence
  PTHR30461:SF3,SM00857,G3DSA:1.10.10.2600,IPR036162,PF13408, PS51737,IPR025827,G3DSA:3.40.50.1390,IPR006119,IPR038109, PF07508,SSF53041,IPR011109,PF00239,PTHR30461, PS51736,Coil,cd00338
MDNLNLANVVIYARYSSAGQNDQSIDGQLAKCREYAQQRGYRVVGEYCDRALSGRYAETRPEFQRLIADSAKRAFDFVLVWKLDRFSRDRYDSAIYKKKLRANGVRVLSVTEGVGDSSESVLLEAILEAMAEEYSRQLAQNVRRGMRQNAEKGLSLGGLAPLGYRVVNKQYEINEDEARIVRFIHEQYADGAGQKQIVSDCARLGYRNQRGNPLTLASVKRILANERYAGRYDYLGEIVIEDAFPAIVSKELKKRVRDRLKANAKAPGHAKAKVEYLLHGKLFCGECGAPMIGECGRGRHGATYYYYTCAARKKQHTCKKRNERKDELEACIVDYIGSCVLTDSWIDGAAERVVAEYQKSYDASGIKPLEKQIRDADKEIDQLVDALISATAEAARRRINERIETAEARKRALEADLASLRIASRVQIKKEDIVVWLSQFRTGDRSDLEYRKKVIDLFVNAIYLYDDSFKLFLNVADSAQVTYADALALAPPSVSDFGASGVPDMHLSEHIIFINGVIGMIVQR

SEQ ID NO: 3980 - protein, 524 aa, Unknown
  Description of Unknown: Integrase B3981 sequence
  cd03768,PTHR30461:SF3,SM00857,IPR036162,PF13408, IPR025827,G3DSA:3.40.50.1390,PS51737,IPR006119,PF07508, IPR011109,SSF53041,PTHR30461,PS51736,Coil, PF00239
MIFCCYGRKSVYSDRSDSVDNQFRMCRDYVNVKYSGQVDDFRAYSDEDFTGANTNRPDLQRLLEDIRSGAADVLIVYQLDRLSRDVRDFANIYATLEEHRVKFVSIKENIDTSTPIGRAMMYVTVVFAQMERETIAARVTDNMIGLAKKGYWVGGNPPVGYVRDQIIVDGKKHCAITPDPEGARYVTWIFDSFIQFGGSIQKMETQFKHKGIRTQRGGFFSASQLHKILTMPYCVEATPEVYDFYQAKGCIMDPGSPREKWDGSVGVMVYGRTTEKNKKHELQPPDQWRVCLGVHKPFMPAEKWLAVQARFAQNQRFKTARWPSPLLKGVIRCKCGALMSIGRKQKVDGSVSSAYYCPKRTRQGADVCDMRQIKCETLDAKVVNILRTVEQDNTAILRYVQKDPDTTAGPDPKKISGQIKSCEAKIEKLAASLALASGSAATKYIIAEMERLDLEIQALNREYTIAASEERKRSAAQVSTQERAKIISEKMRNFDGFTAAERNAIAREVIKKCVWDGETLYVEL

SEQ ID NO: 3981 - protein, 524 aa, Unknown
  Description of Unknown: Integrase B3982 sequence
  cd00338,SM00857,G3DSA:1.10.10.2600,IPR036162,PF13408, PS51737,IPR025827,G3DSA:3.40.50.1390,IPR006119,IPR038109, PF07508,IPR011109,SSF53041,PTHR30461,PS51736, Coil,PF00239
MSLENVCIYLRKSRADREAEARGEGETLARHERILLDLARSRNYNVGAIYREIVSGETISARPVMQQLLREVEAGSWDGVLVVEVERLARGDTIDQGVVSRAFQFSDTKIITPTKTYDPDNEFDEEYFEFGLFMSRREYKTIKRRLNAGRISSVKEGKYCGSRPPYGYERVKLRGEKGFTLQPVPEQAEVIKMIYSLYSGASGDRIGVSKIVRKLNDMGIKSPSGKDWVPISVQDVLANPVYAGMIRWNGRKTVKAIQDGVVTQSRPRSKEDDILLFPGRHPAIVSKEMYDSVQQIRKKNPPRPISIKNTIKNPLAGIVYCSKCGRAMVRRPYQKRGQDDTLMCSYTSCSTVSSKLSLVERAVLNGIQDLVDEYRLNDAVPGPDINNAVKSKKKLIAEKEHELEKLNVQKMKQYDLLEQGIYTTEVFLERSNSIASSINSCQDSIECLKEEIRHDKELIDQQSSFIPRCENLLEIYWSLDTAAKNKMLKELIERVNYTKDVKNAFRMGNEATFVLDIFPRIQSN

SEQ ID NO: 3982 - protein, 524 aa, Unknown
  Description of Unknown: Integrase B3983 sequence
  SM00857,G3DSA:1.10.10.2600,IPR036162,PS51737,G3DSA:3.40.50.1390, IPR006119,IPR038109,PF07508,SSF53041,IPR011109, PTHR30461,Coil,PS51736,cd00338,PF00239
MNESVCIYLRKSRADREAEAHGEGETLARHERILLDLAKKKEYIVGAIYREVVSGETIADRPVMQQLLHEVESGMWDGVLVVEVERLARGDTIDQGVVSRAFQYSDTKIITPTKIYDPNNEFDEEYFEFGLFMSRREYKTIKRRLNAGRISSVKEGKYCGNKPPYGYERVKLEKEKGYTLRPIPAQSEIVKMIYTWYSGDGCEQIGVAKIARKLNEMGIESALGGDGTPASIQGILTNPVYIGKIRWNGRKTVKTIQNGQVIKTRPRSKDTLICNGLHPAVISEDLYNSVQEIRKKNPPRPVSIANSIRNPLAGIVYCSKCGRAMVRRPYQKRRQEDTLMCPYTSCPTVSSKLSLVEKSVIDGIREIVEEYKLNNDINASSKDIDCVITSKQNLIHEKENELESLNSQKAKQYDLLEQGIYTTEIFLERAKTISASIQSCSDTIEKLKEEIKHDKNIIKQRSDFIPRCEELLDNYWSLDTESKNKMLKSLIEKVVYSKDTKNAYGKGNEIGFQLDIFPKIQKNN

SEQ ID NO: 3983 - protein, 524 aa, Unknown
  Description of Unknown: Integrase B3984 sequence
  cd00338,SM00857,G3DSA:1.10.10.2600,IPR036162, PF13408,IPR025827,G3DSA:3.40.50.1390,PS51737, IPR006119,IPR038109,PF07508,IPR011109, SSF53041,PTHR30461,PS51736,Coil,PF00239
MNESVCIYLRKSRADREAEAHGEGETLARHERILLDLAKKKEYIVGAIYREVVSGETIADRPVMQQLLHEVESGMWDGVLVVEVERLARGDTIDQGIVSRAFKFSNTKIITPLKTYDPNNEYDEEYFEFGLFMSRREYKTIKRRLNAGRISSVKEGKYCGNKPPYGYERVKLEKEKGYTLRPVPTQAEIVKMIYTWYSGDGCEQIGVAKIARKLNEMGIESALGGDWTPASIQGILTNPVYIGKIRWNGRKTVKTIQTGQVIKTRPRSKDTLICNGLHPAVISEDLYNSVQEIRKKNPPRPVSIANSIRNPLAGIVYCSKCGRAMVRRPYQKRGQEDTLMCPYTSCPTVSSKLSLVEKAVLDGIREIVEEYKLNNDINTSSQAIDLTIISKQNLIHEKENELESLNAQKAKQYDLLEQGIYTTEVFLERAKTISASIQSCSDTIEKLKEEIKHDENIIKQQSDFIPRCEELLDNYWSLDTESKNKMLKSLIEKVAYSKDTKNAYGKGNEIGFQLDIFPKIQKNN

SEQ ID NO: 3984 - protein, 524 aa, Unknown
  Description of Unknown: Integrase B3985 sequence
  cd03768,PTHR30461:SF3,SM00857,IPR036162,PF13408, IPR025827,G3DSA:3.40.50.1390,PS51737,IPR006119,PF07508, SSF53041,IPR011109,PTHR30461,PS51736,Coil, PF00239
MIFCCYGRKSVYSDRSDSVDNQFRMCRDYVNVKYSGQVDDFRAYSDEDFTGANTNRPDLQRLLEDIRSSAADVLIVYQLDRLSRDVRDFANIYAALEEHRVKFVSIKENIDTSTPIGRAMMYVTVVFAQMERETIAARVTDNMIGLAKKGYWVGGNPPVGYVRDQIIVDGKKHCAITPDPEGARYVTWIFDSFIQFGGSIQKMETQFKHKGIRTQRGGFFSVSQLHKILTMPYCVEATPEVYDFYQAKGCIMDPGSPREKWDGSVGVMVYGRTTEKNKKHELQPPDQWRVCLGVHKPFMPAEKWLAVQARFAQNQRFKSARWPSPLLKGVIRCKCGALMSIGRKQKVDGSVSSAYYCPKRTRQGADACDMRQIKCDILDAKVINILRTVEQDNTAILRYVQKDQDTAARPDPKKISGQIKSCEAKIEKLAASLALASGSAAAKYIIAEMERLDLEIQALNREYTIAASEERKRSAAQVSTRERAKIISEKMRNFDGFTAAERDAIAREVIKKCVWDGETLYVEL

SEQ ID NO: 3985 - protein, 524 aa, Unknown
  Description of Unknown: Integrase B3986 sequence
  PTHR30461:SF3,SM00857,G3DSA:1.10.10.2600,IPR036162,PF13408, PS51737,G3DSA:3.40.50.1390,IPR025827,IPR006119,IPR038109, PF07508,IPR011109,SSF53041,PTHR30461,PS51736, cd00338,PF00239
MNKLRAAAYCRVSTDRAEQSGSLASQRSFFDDYIRNSDSMTLVGVFYDEGTSGTTTLNRYGFNKMISLAVSGGIDIILTKEVSRFARNTVDTLNITRMLRAKGVGIIFINDNIDTRDSDGELRLSIMATIAQEESRKISERVKWGQQRKMEQGVVFGRSCLGYDVKDGKITVNADSAEIVKRIFTEYTVLLKGAESIADGLNAEQIRTVNGGRWSGAFIRKVLRNVKYAGDLEQKKTCTPDFLTHKKRLNSSEHIYIRNHHEPIISRELWEQTQAEISRRKPTDTSRHSDRYVFSGKVYCGVCGSVMVSRVKTLKNGKIYHALRCSGRIGGKSCNNETLNVTALKACIKRIFTDMPIDKTAVINAVIKGLSRTDKPDIPALRRKIETLNAKKRRAVDLMLDGLITQQELIEQKSYYDSIIEKLSQEISSDRSVFETDKIRKSAEKFLDFTSDPIWLLVIRADYIHGTLTVYLNGIEKGFTTCFTATGRGDSYRVITGNTVRSQGIIPGTMQVQKNWFRHDVNDK

SEQ ID NO: 3986 - protein, 524 aa, Unknown
  Description of Unknown: Integrase B3987 sequence
  PTHR30461:SF3,cd00338,SM00857,G3DSA:1.10.10.2600,IPR036162, PF13408,IPR025827,G3DSA:3.40.50.1390,PS51737,IPR006119, IPR038109,PF07508,SSF53041,IPR011109,PTHR30461, PS51736,Coil,PF00239
MCAKKKPAMLEPDMQDAVIYTRYSSHNQRDCSIEQQVADCEIFARQNNLRVVKVYADRHLSGTTDNRPQFQQMLKDASHGHWAYVICWKIDRFARNRYDSATYKFRLKKAGVRVLYAKESIPDGPEGILLESVLEGSAEYYSAALAQNIRRGMKYNAEQCKVNSGSIPFGYCKGPDGRFAIHEANADVVREIFRKAATGMPFVDIANDLNSRGLKTSRGGRWNKGSFRLLMNEAYIGVYHFSDTRIEGGMPALIDQGTFWAANERLKANSSVRGRHQDGGDYLLTGKLKCAHCGSYMIGFSGTGKNGELHYYYGCQKRRRERACKKANVPREWIERVVVKAALDYVLRPDVMEWIADAVMEYQEREAASAQLAALTAELEENQKATDNVMKAIEAGIITSTTKQRLLDLEAKAQDLKRAIELEKLSHVRLERDQVLFWLDRFRGGSLQSQEFRRKVIDAFVSVVYLSDDHLRIAFNYSGGSNAEADFGLVMDAEAAAGELSKKFAQGHVASTIRNADEPSKENE

SEQ ID NO: 3987 - protein, 524 aa, Unknown
  Description of Unknown: Integrase B3988 sequence
  PTHR30461:SF3,SM00857,G3DSA:1.10.10.2600,IPR036162,PF13408, IPR025827,G3DSA:3.40.50.1390,PS51737,IPR006119,IPR038109, PF07508,IPR011109,SSF53041,PTHR30461,PS51736, cd00338,PF00239
MNKLRAAAYCRVSTDRAEQSGSLASQRSFFDDYIRNSDSMTLVGVFYDEGTSGTTTLNRYGFNKMISLAVSGGIDIILTKEVSRFARNTVDTLNITRMLRAKGVGIIFINDNIDTRDSDGELRLSIMATIAQEESRKISERVKWGQQRKMEQGVVFGRSCLGYDVKDGKITVNADSAEIVKRIFTEYTVLLKGAESIADGLNAEQIRTVNGGRWSGAFIRKVLRNVKYVGDLEQKKTCTPDFLTHKKRLNRSEHIYIRNHHEPIISRELWEQTQAEISRRKPTDTSRHSDRYVFSGKVYCGVCGSVMVSRVKTLKNGKIYHALRCSGRIGGKSCNNETLNVTALKACVKRIFTDIPIDKTAVINAVIKGLSRTDKPDIPALRRKIETLNAKKRRAVDLMLDGLITQQELIEQKSYYDSIIEKLSQEISSDRSVFETDKIRKNAERFLDFTSDPLWLLVRRADYIHSTLTVYLKGVEKGFTTCFTATGRGDSYRVITGNTVRSQGIIPGTMQVPKNRCRHDVNDK

SEQ ID NO: 3988 - protein, 524 aa, Unknown
  Description of Unknown: Integrase B3989 sequence
  PTHR30461:SF3,cd00338,SM00857,G3DSA:1.10.10.2600,IPR036162, PF13408,PS51737,IPR025827,G3DSA:3.40.50.1390,IPR006119, IPR038109,PF07508,IPR011109,SSF53041,PTHR30461, PS51736,Coil,PF00239
MYKIHTTVTVFYHILTKKSIGVIKNLKTAVIYARYSSDKQTEQSIEGQLYDCYNYAKQHGITVVQEYIDRAMTGKNDDRPAFQQMLHESAMHKWDSVIVWKLDRFARNTIDSAVNRQILAKNGVKLLSVMESFGDDASGQMMTHIIEAINEYYSADLREKTIRGMRQSALKAQTTGHIPLGYKVVDKKLVIDDETRIIPETVFRMYAEGERLTDIAEHLNAQGYRNRRGRPFTTNSFYNMLSNEKYIGIYKYDDIVIEGGIPQMIPNDVFEAVREKLITNRKRAAKNTAKADYYLSGKLYCGHCGEPMSGLSGTGRNGVKHYYYRCNGVQKKSGCHKKLENKYLIEDEVCRAARSAFEQMDKAETAETIYQMYLQTVRNEYAPAELEKELTECTKQAENVVNAIAQTGGNQLLYDKVRELEERKEQLSSALRLSQAMTDNVPSVEQITVFIDDILATDINTTEGKKAIADIMISKVYVYDDKLTVIFKDKDGKCVDIPLSAVSDSSSADCAPSALGSQANFKAN

SEQ ID NO: 3989 - protein, 524 aa, Unknown
  Description of Unknown: Integrase B3990 sequence
  SM00857,G3DSA:1.10.10.2600,IPR036162,PF13408,IPR025827, G3DSA:3.40.50.1390,PS51737,IPR006119,IPR038109,PF07508, IPR011109,SSF53041,PTHR30461,Coil,PS51736, cd00338,PF00239
MLSIPKVAQYARFSSDNQRSESIDAQIRAMNQFCKQNHWQVVSTYTDEARSATTDNRPQFQQMIADSGKGLFDIVLVHKLDRFSRDRYDSAIYKKKLKKNHVKLCSVLERMDDSPESIMMEAVLEGMSEYYSKNLAREVMKGMNETALQCKHTGGCPPLGYDLDENRHLVINESEAQAVRIIFQMFADGYGYTTIIDYLNAHGYKTKRGKMFGKNSLYEMLSNEKYTGVFVFNKAAARTDGKRNNHAQKESYIRIEGGCPTIIGKKLFAQVQRIKAKNRRNTGRYHSKEFYLLTGKLVCDVCGKRMIGNLRFSGRSKTRLATYRCNTHRAACNNKELNKDYLDAYIDVLIGERLKSKNLRRAVAKVNQQVQKFNHNFDANYEGISAQYTEVQDSLANITRAIEKGIFTDDLLQRAEQLENEKAKLETRLHELKLLEPIAYEDVAYLHTQWKELKRNTEEFRTFIQQFVKAIHVRPYDFDIVLDMGFGVVELTETIPMRRGELYEMFDSKVKEQRICLKNQKADT

SEQ ID NO: 3990 - protein, 524 aa, Unknown
  Description of Unknown: Integrase B3991 sequence
  cd00338,SM00857,G3DSA:1.10.10.2600,IPR036162,PF13408, IPR025827,G3DSA:3.40.50.1390,PS51737,IPR006119,IPR038109, PF07508,IPR011109,SSF53041,PTHR30461,PS51736, Coil,PF00239
MSLENVCIYLRKSRADREAEARGEGETLARHERILLDLARSRNYNVGAIYREIVSGETISARPVMQQLLREVEAGSWDGVLVVEVERLARGDTIDQGVVSRAFQFSDTKIITPTKTYDPDNEFDEEYFEFGLFMSRREYKTIKRRLNAGRISSVKEGKYCGSRPPYGYERVKLRGEKGFTLQPVPEQAEVIKMIYSLYSGASGDRIGVSKIVRKLNDMGIKSPSGKDWVPISVQDVLANPVYAGMIRWNGRKTVRAIQDGMVTQSRPRSKEDDILLFPGRHPAIVSKEMYDSVQQIRKKNPPRPISIKNTIKNPLAGIVYCSKCGRAMVRRPYQKRGQDDTLMCSYTSCPTVSSKLSLVERAVLNGIQDLVDEYRLNDAVPGPDINNAVKSKEKLIAEKEHELEKLNVQKMKQYDLLEQGIYTTEVFLERSNSIASSINSCQDSIECLKEEIRHDKELIDQQSSFIPRCENLLEIYWSLDTAAKNKMLKELIERVNYTKDTKNAFRKGNEATFVLDIFPRIQSN

SEQ ID NO: 3991 - protein, 524 aa, Unknown
  Description of Unknown: Integrase B3992 sequence
  cd00338,SM00857,G3DSA:1.10.10.2600,IPR036162,PF13408, PS51737,G3DSA:3.40.50.1390,IPR025827,IPR006119,IPR038109, PF07508,IPR011109,SSF53041,PTHR30461,PS51736, Coil,PF00239
MNESVCIYLRKSRADREAEAHGEGETLARHEHILLDLAKRQGYSIGAIYREVVSGETISARPVMQKLLHEVESGLWDGVLVVEVERLARGDTIDQGVVSRAFQYSDTKIITPTKIYDPNNEFDEEYFEFGLFMSRREYKTIKRRLNNGRISSVKEGKYCGNKPPYGYERVKLEKEKGYTLRPVPAQAEIVKMIYTWYAGDGCEQIGVAKIVRKLNEMGIESALGGDWTPASIQGILTNPVYIGKIRWNGRKTVKAIQNGQVVKTRPRSKDVLICEGLHPAIISDDLYNSVQEIRQKNPYRPISIKNTVRNPLAGIVYCNKCGRAMVRRPYQKRGQEDTLMCPYTSCSTVSSKLSLVEKAVIDGIREIAEEYKLNNDINVPSNTIDSGITSKQNLIREKESELESLNSQKAKQYDLLEQGIYTTEVFLERSKTISASIQSCSDTIANLREEIEHDENIKAQQSDFVPRCEELLNNYWNLNMESRNRMLKSLVEKVVYSKNIKNTYGKGNEINFELDIFPKIQKND

SEQ ID NO: 3992 - protein, 524 aa, Unknown
  Description of Unknown: Integrase B3993 sequence
  cd00338,SM00857,G3DSA:1.10.10.2600,IPR036162,PF13408, PS51737,G3DSA:3.40.50.1390,IPR025827,IPR006119,IPR038109, PF07508,IPR011109,SSF53041,PTHR30461,PS51736, Coil,PF00239
MNESVCIYLRKSRADREAEAHGEGETLARHERILLDLAKKKEYIVGAIYREVVSGETIADRPVMQQLLREVESGMWDGVLVVEVERLARGDTIDQGVVSRAFQYSDTKIITPTKIYDPNNEFDEEYFEFGLFMSRREYKTIKRRLNAGRISSVKEGKYCGNKPPYGYERVKLEKEKGYTLRPVPTQAEIVKMIYTWYAGDGCEQIGVAKIARKLNEMGIESALGDDWTPASIQGILTNPVYIGKIRWNGRKTVKTIQNGQVIKTRPRSKDTLICDGLHPAIISEDLYNSVQEIRKKNPPRPISIKNSIRNPLSGIVYCSKCGRAMVRRPYQKRGQEDTLMCPYTSCTTVSSKLSLVEKAVIDGIREIVEEYKLNNDINTSSKAIDCGITSKQNLIHEKENELESLNAQKAKQYDLLEQGIYTTEVFLERAKTIAASIQSCSDTIEKLKEEIKHDENIIKQRSDFIPRCEELLDNYWSLDTESKNKMLKSLIEKVTYSKDTKNAYGKGNEIGFQLDIFPKIQKNN

SEQ ID NO: 3993 - protein, 524 aa, Unknown
  Description of Unknown: Integrase B3994 sequence
  PTHR30461:SF3,SM00857,G3DSA:1.10.10.2600,IPR036162,PF13408, IPR025827,PS51737,G3DSA:3.40.50.1390,IPR006119,IPR038109, PF07508,IPR011109,SSF53041,PTHR30461,Coil, PS51736,cd00338,PF00239
MNAVIYARFSSHSQREQSIEGQLRDCYEYAKRYDINIVGEYIDRAISGMTDDRPDFQRMIADAPKKQFERIIVWKLDRFARNRYDSALYKHKLKQYGIRVISAMENVGEGDESILLEALLEASAEYYSLDLKKKILRGQRETIAKGRWCGGPIPYGYKAVDGKLVADEKTAPIIRYVFEQYAQGVPMKEIIDELKRRGVRSSRGGELTYTTFSRALTNPVYIGNFMYKGELVPGVADALIDEDTYNKVQIIVKANAHAPAANKAKVEYLLQGKAFCGHCGSHMVGESGKSRNGDVYYYYSCAARKKAHKCRKKNEKKDFIEWYVVEQTLNYVLTPTRMRDIAKAVVAEYDKEFSGSKVQEYEKAIKQYERELDKLVDALVDAPKVAHKRIYEKMETLETQKASMENELVKLRIASEIRFTEEEVRAWLRRFCTGDLFDPEFRRNIIDTFINCIYLYDDRIIIFYNIKGGKQVSFVDLAESLDSESESSGSDLNANAPPFNIKSEPAYIFVNGVFGCIFPRNDVE

SEQ ID NO: 3994 - protein, 524 aa, Unknown
  Description of Unknown: Integrase B3995 sequence
  SM00857,G3DSA:1.10.10.2600,IPR036162,PF13408,IPR025827, PS51737,G3DSA:3.40.50.1390,IPR006119,IPR038109,PF07508, SSF53041,IPR011109,PTHR30461,Coil,PS51736, cd00338,PF00239
MNESVCIYLRKSRADREAEAHGEGETLARHERILLDLAKKKEYIVGAIYREVVSGETIADRPVMQQLLHEVESGMWDGVLVVEVERLARGDTIDQGVVSRAFQYSDTKIITPTKIYDPNNEFDEEYFEFGLFMSRREYKTIKRRLNAGRISSVKEGKYCGNKPPYGYERVKLEKEKGFTLRPVPDQAEIVKMIYAWYAGDGCEQIGVAKIARKLNEMGIETALGGDWTPASIQGILTNPVYIGKIRWNGRKTVKTIQDGQVIKTRPRSKDTLICDGLHPAIISEDLYNFVQEIRKKNPPRPISIKNSIRNPLSGIVYCSKCGRAMVRRPYQKRGQEDTLMCPYTSCPTVSSKLSLVEKSVIDGIREIVEEYKLNNDINTSSKAIDCGITSKRNLIHEKENELKSLNSQKAKQYDLLEQGIYTTEVFLERAKTIAASIQSCSDTIEKLKEEIKHDQNIIKQQSDFIPRCEELLDNYWSLDTESKNKMLKSLIEKVTYSKDTKNAYGKGNEIGFQLDIFPKIQKNN

SEQ ID NO: 3995 - protein, 524 aa, Unknown
  Description of Unknown: Integrase B3996 sequence
  PTHR30461:SF3,SM00857,G3DSA:1.10.10.2600,IPR036162,PF13408, IPR025827,G3DSA:3.40.50.1390,PS51737,IPR006119,IPR038109, PF07508,SSF53041,IPR011109,PTHR30461,Coil, PS51736,cd00338,PF00239
MPKVTKIPPRLNPATFAPLESVEKRKVAGYARVSTDSEEQKTSYTAQVDYYTKFIKERIDWEFVGVYTDEGISATNTRHREGFNRMIADALNGKIDLIVTKSVSRFARNTVDSLTTIRKLKEKGVEVFFQKENIYTLDSKGELLLTIMSSLSQEESRSISENVTWGQRKRMADGKVSLPYSHFLGYRKGKDGIPEIVPEEAEIVRYIYRSFMEGKTPNHIAECLTFKHVPTPAGKEIWSPSTIESILTNEKYRGSALLQKSFTVDFLSKKKKINEGELMQYYIPESHEAIIPPDEFELVQAEYTRRKRIGRAYNSKSIFSAKLVCECCGGYFGSKIWHSTSKYRRTVWQCNGKFKNGKKCMTPHLYESHIKEKFLTAMNQVLANKTEIIENCLLFKETFSNTAMIEEKIENIQKQMEQLTKQIRMLIQKQSITPIKSEDYYRQYDGLVISFGKLKFKQDTLIQKQDEMENKLKFIMDYIEFLKSQENLIIEFSETLWFRAVDQVTVCTDGKMIFAFKDGSKIKV

SEQ ID NO: 3996 - protein, 524 aa, Unknown
  Description of Unknown: Integrase B3997 sequence
  SM00857,G3DSA:1.10.10.2600,IPR036162,PS51737,G3DSA:3.40.50.1390, IPR006119,IPR038109,PF07508,IPR011109,SSF53041, PF00239,PTHR30461,PS51736,Coil,cd00338
MNESVCIYLRKSRADREAEAHGEGETLARHERILLDLAKKKEYIVGAIYREVVSGETIADRPVMQQLLHEVESGMWDGVLVVEVERLARGDTIDQGIVSRAFQYSDTKIITPTKIYDPNNEFDEEYFEFGLFMSRREYKTIKRRLNAGRISSVKEGKYCGNRPPYGYERVKLEKEKGFTLRPVPDQAEIVKMIYAWYAGDGCEQIGVAKIARKLNEMGIESALGGDWTPTTIQGILTNPVYIGKIRWNGRKTVKTIQNGQVIKTRPRSKNILICNGLHPAIISEDLFNSVQEIRKKNPPHPVSVSKLIRNPLSGIVYCSKCGRAMVRRPYQKSSQEDTLMCPYTSCPTVSSKLSLVEKSVIDGIREIVEEYKLNNDINTSSKDIDCVITSKQNLINEKENELESLNAQKAKQYDLLEQGIYTTEVFLERAKTISASIQSCSDTIEKLKEEIKHDENIIKQQSDFIPRCEELLDNYWSLDTESKNRMLKSLIEKVTYSKDAKNAYGKGNEIGFQLDIFPKIQKNN

SEQ ID NO: 3997 - protein, 524 aa, Unknown
  Description of Unknown: Integrase B3998 sequence
  cd03768,PTHR30461:SF3,SM00857,IPR036162,PF13408,PS51737,G3DSA:3. 40.50.1390,IPR025827,IPR006119,PF07508,IPR011109,SSF53041, PTHR30461,PS51736,Coil,PF00239
MIFCCYGRKSVYSDRSDSVDNQFRMCRDYVNVKYSGQVDDFRAYSDEDFTGANTNRPDLQRLLEDIRSGGADVLIVYQLDRLSRDVRDFANIYAILEEHRVKFVSIKENIDTSTPIGRAMMYVTVVFAQMERETIAARVTDNMIGLAKKGYWVGGNPPVGYVRDQIIVDGKKHCAITPDPEGARYVTWIFDSFVQFGGSIQKMETQFKHKGVRTQRGGFFSASQLHKILTMPYCAEATPEVYDFYQAKGCIMDPGSPREKWDGSVGVMVYGRTTEKNKKHELQPPDQWRVCLGVHKPFMPADKWLAVQARFAQNQRFKSARWPSPLLKGVIRCKCGALMSIGRKQKVDGSVSSAYYCPKRTRQGADACDMRQIKCEILDAKVINILRTVEQDNTAILRYVQKDQDTAARPDPKKISGQIKSCEAKIEKLAASLALASGSAAAKYIIAEMERLDLEIQALNREYTIAASEERKRSAAQVSTQERAKIISEKMRNFDGFTAAERNAIAREVIKKCVWDGETLYVEL

SEQ ID NO: 3998 - protein, 524 aa, Unknown
  Description of Unknown: Integrase B3999 sequence
  cd03768,PTHR30461:SF3,SM00857,IPR036162,PF13408, IPR025827,G3DSA:3.40.50.1390,PS51737,IPR006119,PF07508, IPR011109,SSF53041,PTHR30461,PS51736,Coil, PF00239
MIFCCYGRKSVYSDRSDSVDNQFRMCRDYVNVKYSGQVDDFRAYSDEDFTGANTNRPDLQRLLEDIRSGAADVLIVYQLDRLSRDVRDFANIYATLEEHRVKFVSIKENIDTSTPIGRAMMYVTVVFAQMERETIAARVTDNMIGLAKKGYWVGGNPPVGYVRDRIIVDGKKHCAITPDPEGARYVTWIFDSFIQFGGSIQKMETQFKHKGVRTQRGGFFSASQLHKILTMPYCVEATPEVYDFYQAKGCIMDPGSPREKWDGSVGVMVYGRTTEKNKKHELQPPDQWRVCLGVHKPFMPADKWLAVQARFAQNQRFKSARWPSPLLKGVIRCKCGALMSIGRKQKVDGSVSSAYYCPKRTRQGADVCDMRQIKCETLDAKVVNILRTVEQDNTAILRYVQKDPDTTAGPDPKKISGQIKSCEAKIEKLAASLALASGSAATKYIIAEMERLDLEIQALNREYTIAASEERKRSAAQVSTQERAKIISEKMRNFDGFTAAERNAIAREVIKKCVWDGETLYVEL

SEQ ID NO: 3999 - protein, 524 aa, Unknown
  Description of Unknown: Integrase B4000 sequence
  cd00338,SM00857,G3DSA:1.10.10.2600,IPR036162,PF13408, IPR025827,PS51737,G3DSA:3.40.50.1390,IPR006119,IPR038109, PF07508,IPR011109,SSF53041,PTHR30461,PS51736, Coil,PF00239
MNESVCIYLRKSRADREAEAHGEGETLARHERILLDLAKKKEYIVGAIYREVVSGETIADRPVMQQLLHEVESGMWDGVLVVEVERLARGDTIDQGVVSRAFQYSDTKIITPTKIYDPNNEFDEEYFEFGLFMSRREYKTIKRRLNAGRISSVKEGKYCGNKPPYGYERVKLEKEKGYTLRPVPTQAEIVKMIYTWYAGDGCEQIGVAKIARKLNEMGIESALGGDWTPASIQGILTNPVYIGKIRWNGRKTVKTIQNGQVIKTRPRSKDTLICNGLHPAIISEDLFDSVQEIRKKNPPRPVGIKNSIRNPLSGIVYCSKCGRAMVRRPYQKSGQEDTLMCPYTSCSTVSSKLPLVEKSVIDGIREIVEEYKLNNDINASSNAIDLTIISKQNLIHEKENELESLNAQKAKQYDLLEQGIYTTEVFLERAKTISASIQSCSDTIEKLKEEIKHDENIIKQQSDFIPRCEELLDNYWSLDTESKNKMLKSLIEKVVYSKDTKNAYGKGNEIGFQLDIFPKIQKNN

SEQ ID NO: 4000 - protein, 524 aa, Unknown
  Description of Unknown: Integrase B4001 sequence
  cd03768,PTHR30461:SF3,SM00857,IPR036162,PF13408, IPR025827,G3DSA:3.40.50.1390,PS51737,IPR006119,PF07508, SSF53041,IPR011109,PTHR30461,PS51736,Coil, PF00239
MIFCCYGRKSVYSDRSDSVDNQFRMCRDYVNVKYAGQVDDFRAYSDEDFTGANTNRPDLQRLLEDIRSGGADVLIVYQLDRLSRDVRDFANIYATLEEHRVKFVSIKENIDTSTPIGRAMMYVTVVFAQMERETIAARVTDNMIGLAKKGYWVGGNPPVGYVRDRIIVDGKKHCAITPDPEGARYVTWIFDSFIQFGGSIQKMETQFKHKGIRTQRGGFFSASQLHKILTMPYCVEATPEVYDFYQAKGCIMDPGSPREKWDGSVGVMVYGRTTEKNKKHELQPPDQWRVCLGVHKPFMPADKWLAVQARFAQNQRFKSARWPSPLLKGVIRCKCGALMSIGRKQKVDGSVSSAYYCPKRTRQGADVCDMRQIKCETLDAKVVDILRTVEQDNTAILRYAQKDRDTTAGPDPKKISSQIKSSEAKIEKLAASLALASNSAAAKYIIAEMERLDLEIQALNREYTIAASEERKRSAAQVSTQERAKIISEKMRNFDGFTAAERNAIAREVIRKCVWDGETLYVEL

SEQ ID NO: 4001 - protein, 524 aa, Unknown
  Description of Unknown: Integrase B4002 sequence
  SM00857,G3DSA:1.10.10.2600,IPR036162,PF13408,PS51737, G3DSA:3.40.50.1390,IPR025827,IPR006119,IPR038109,PF07508, IPR011109,SSF53041,PTHR30461,Coil,PS51736, cd00338,PF00239
MNESVCIYLRKSRADREAEAHGEGETLARHERILLDLAKKKEYIVGAIYREVVSGETIADRPVMQQLLHEVESGMWDGVLVVEVERLARGDTIDQGVVSRAFQYSDTKIITPTKIYDPNNEFDEEYFEFGLFMSRREYKTIKRRLNAGRISSVKEGKYCGNKPPYGYERVKLEKEKGYTLRPIPAQSEIVKMIYTWYAGDGCEQIGIAKIVRKLNDMGIESALGGDWTPASIQGILTNPVYIGKIRWNGRKVVKTVQNGQVVKKRPRSKDVLVCDGLHPAVISEDLFNSVQEIRQKNPPHPISMKNTVRNPLSGIVYCSKCGRAMVRRPYQKSGQEDTLLCPYTSCPTVSSKLSVVEKAVLDGIKEIAEEYKLNNNINVPSEAINSGITSKQSLIREKESELENLNVQKSKQYDLLEQGIYTTEVFLERAKTIAASIQSCSDTIAKLREEIEHDKDIMAQQSDFIPRCEELLNNYWSLDTESKNKMLKSLIEKVIYSKDTKNAYGKGNEVSFQLDIFPKIQKNN

SEQ ID NO: 4002 - protein, 524 aa, Unknown
  Description of Unknown: Integrase B4003 sequence
  cd03768,PTHR30461:SF3,SM00857,G3DSA:1.10.10.2600,IPR036162, PF13408,PS51737,IPR025827,G3DSA:3.40.50.1390,IPR006119, IPR038109,PF07508,IPR011109,SSF53041,PTHR30461, PS51736,PF00239
MLMIADYSRKSVYSDKSDSTQAQYNLALDYCKGHYNDYDVIRYEDEGYTGANTDRPAFSRMVEDIKDGKINIVICYKIDRVSRDVKDFSNFFSFLQDHNVEFVSIKEQIDTSTPLGRAMMYICSVFAQMERETIAERVKDGMTDLSKTGKWAGGRAPLGYKRERVEISGKSHTVLVPDAQGCKLLNLISDTFLDTGYSLTQLERYCRENNITTSRGAYFSSSQIWTILKNPIYCTADQAAYDYFEGLGCQMGVDRDKFDGKRAIMSYGRTAGGKRKKHVVNPPEKWVISVGLHAPLWTSEKYIAIQDRFGNNQIDKARKHKIGILKGVVKCKCGYTMRVQHKVDNANGKIYDNYFCSLRNRRGKSFCDMHFTPVSTLDDAVIEILKRIKLDKSMIDNFIVDDSKINVAYRSRSDVQRDIDRIDGKILNLTNALGNASGSTASKYIVREIERLDRELSGLKYELLEISTNEKKRNRANYDRELKYKMVCDIVDNLEYADYDEINGLLKDLFKECVYDGQTLHIKI

SEQ ID NO: 4003 - protein, 524 aa, Unknown
  Description of Unknown: Integrase B4004 sequence
  SM00857,G3DSA:1.10.10.2600,IPR036162,PF13408,IPR025827, G3DSA:3.40.50.1390,PS51737,IPR006119,IPR038109,PF07508, IPR011109,SSF53041,PF00239,PTHR30461,PS51736, Coil,cd00338
MNESVCIYLRKSRADREAEAHGEGETLARHERILLDLAKKKEYIVGAIYREVVSGETISARPVMQQLLREVESGMWDGVLVVEVERLARGDTIDQGVVSRAFQYSDTKIITPTKIYDPNNEFDEEYFEFGLFMSRREYKTIKRRLNAGRISSIKEGKYCGNKPPYGYERVKLEKEKGYTLRPVPTQAEVVKMVYTWYAGDGCEQIGVAKIARKLNEMGIETALGSDWTPASIQGILTNPVYIGKIRWNGRKIVKTVHNGQVVKTRPRSKDTLICDGLHQAIISEDLFNSVQEIRKKNPPRPVGIANSIRNPLSGIVYCSKCGRAMVRRPYQKSGQEDTLMCPYTSCPTVSSKLPIVEKAVLDGIEEIVEKYKLNNDINVSSESISSGISSKQNLINEKEKELESLNAQKAKQYDLLEQEIYTTEVFLERSKTIAASIQSCSDTIAKLREEIEHDKDIIAQQSDFIPRCEELLNNYWSLDTESKNRMLKSLIEKVVYSKDTKNAYGKGNEVSFQLDIFPKIQKEN

SEQ ID NO: 4004 - protein, 524 aa, Unknown
  Description of Unknown: Integrase B4005 sequence
  PTHR30461:SF3,SM00857,G3DSA:1.10.10.2600,IPR036162,PF13408, IPR025827,G3DSA:3.40.50.1390,PS51737,IPR006119,IPR038109, PF07508,IPR011109,SSF53041,PTHR30461,PS51736, cd00338,PF00239
MNKLRAAAYCRVSTDRAEQSGSLASQRSFFDDYIRNSDSMTLVGVFYDEGTSGTTTLNRYGFNKMISLAVSGGIDIILTKEVSRFARNTVDTLNITRMLRAKGVGIIFINDNIDTRDSDGELRLSIMATIAQEESRKISERVKWGQQRKMEQGVVFGRSCLGYDVKDGKITVNADSAEIVKRIFTEYTVLLKGAESIADELNAEQIRTVNGGRWSGAFIRKVLRNVKYVGDLEQKKTCTPDFLTHKKRLNSSEHIYIRNHHEPIISRELWEQTQAEISRRKPTDTSRHSDRYVFSGKVYCGVCGSVMVSRVKTLKNGKIYHALRCSGRIGGKSCNNETLNVTALKACVKRIFTDMPIDKTAVINAVIKGLSRTDKPDIPALRRKIETLNAKKRRAVDLMLDGLITQQELIEQKSYYDSIIEKLSQEISSDRSVFETDKIRKNAERFLDFTSDPIWLLVIRADYIHGTLTVYLKGIEKGFTTCFTATGRGDSYRVITGNTVRSQGIIPGTMQVQKNRCRHDVNDK

SEQ ID NO: 4005 - protein, 524 aa, Unknown
  Description of Unknown: Integrase B4006 sequence
  SM00857,G3DSA:1.10.10.2600,IPR036162,PF13408,IPR025827, G3DSA:3.40.50.1390,PS51737,IPR006119,IPR038109,PF07508, SSF53041,IPR011109,PF00239,PTHR30461,PS51736, Coil,cd00338
MNESVCIYLRKSRADREAEAHGEGETLARHERILLDLAKKKEYTVGAIYREVVSGETIADRPVMQQLLHEVESGMWDGVLVVEVERLARGDTIDQGIVSRAFQYSDTKIITPTKIYDPNNEFDEEYFEFGLFMSRREYKTIKRRLNAGRISSVKEGKYCGNKPPYGYERVKLEKEKGYTLRPVPTQAEIVKMIYTWYAGDGCEQIGIAKIARKLNEMGIESALCGDWTPASIQGILTNPVYIGKIRWNGRKTVKTIQNGHVVKTRPRSKDVLVCEGLHPAIIPDDLYNSVQEIRKKNPPRPISIKNSIRNPLSGIVYCSKCGRAMVRRPYQKRGQEDTLMCPYTSCPTVSSKLSLVEKSVIDGIREIVEEYKLNNDINTSSKAIDCGITSKQNLIHEKENELESLNSQKAKQYDLLEQGIYTTEVFLERAKTIAASIQSCSDTIEKLKEEIKHDKNIIKQQSDFIPRCEELLDNYWSLDTESKNRMLKSLIEKVVYSKDTKNAYGKGDEISFRLDIFPRIQKKS

SEQ ID NO: 4006 - protein, 524 aa, Unknown
  Description of Unknown: Integrase B4007 sequence
  SM00857,G3DSA:1.10.10.2600,IPR036162,PF13408,IPR025827, G3DSA:3.40.50.1390,PS51737,IPR006119,IPR038109,PF07508, SSF53041,IPR011109,PTHR30461,Coil,PS51736, cd00338,PF00239
MNESVCIYLRKSRADREAEAHGEGETLARHEHILLDLAKRQGYSIGAIYREVVSGETISARPVMQKLLHEVESGLWDGVLVVEVERLARGDTIDQGVVSRAFQYSDTKIITPTKIYDPNNEFDEEYFEFGLFMSRREYKTIKRRLNNGRISSVKEGKYCGNKPPYGYERVKLEKEKGYTLRPVPAQAEVVKMIYAWYAGDSCEQIGVAKIVRKLNDMGIESALGGDWTPASIQGILTNPVYVGKIRWNGRKTVKTIQNGQVVKTRPRSRDVLVCEGLHPAIIPDNLYNSVQEIRQKNPPRPISIKNTVRNPLAGIVYCSKCGRAMVRRPYQKRGQEDTLMCPYTSCSTVSSKLSLVEKAVIDGIREMVERYKLNNNINLPYNTINSGIASKQNLIREKESELENLNAQKSKQYDLLEQGIYTTEIFIERSKAIAATIQTCADAIKKIKEEVEHDKGIISQQSAFVPRCEEMLTNYWDLDAESKNKMLKSLIEKVVYSKDKRNAYGHGNEANFELDIFPKIQENN

SEQ ID NO: 4007 - protein, 524 aa, Unknown
  Description of Unknown: Integrase B4008 sequence
  PTHR30461:SF3,SM00857,G3DSA:1.10.10.2600,IPR036162,PF13408, PS51737,IPR025827,G3DSA:3.40.50.1390,IPR006119,IPR038109, PF07508,IPR011109,SSF53041,PF00239,PTHR30461, PS51736,Coil,cd00338
MDGLNLANVVIYARYSSAGQNDQSIDGQLAKCREYAQQRGYRVVGEYCDRALSGRYAETRPEFQRMISDSAKHAFDFVLVWKLDRFSRDRYDSAIYKKKLRANGVRVLSVTEGVGDSSESVLLEAILEAMAEEYSRQLAQNVRRGMRQNAEKALSLGGLAPLGYRVVDKRYEVDEEAAQIVRFVHEQYAAGATQKQIVADCAQRGYRNQRGNPLTIDSVKRILSNERYVGTYRYLDDIVIEDAFPAIVSKDLKKRVRDRLNANAKAPGHAKAKVEYLLHGKLFCGECGAPMIGECGRGRHGATYYYYTCAARKKQHACKKRNERKDELEASIVDYIGSCVLTDSWIDGAAERVVAEYQKSYDASGIKPLEKQIRDADKEIDQLVDALISATAEAARRRINERIETAEARKQALEADLASLRIASRVQIRKGDIVVWLNQFRTGDRSDLEYRKKVIELFVNAIYIYDDRIKMFFNVTDSAQITYPEMLALEAPPGSDFGASGVPDVSLSEHFVFINGVIGMVVHR

SEQ ID NO: 4008 - protein, 524 aa, Unknown
  Description of Unknown: Integrase B4009 sequence
  SM00857,G3DSA:1.10.10.2600,IPR036162,PF13408,IPR025827, G3DSA:3.40.50.1390,PS51737,IPR006119,IPR038109,PF07508, IPR011109,SSF53041,PTHR30461,Coil,PS51736, cd00338,PF00239
MNESVCIYLRKSRADREAEAHGEGETLARHEHILLDLAKRQGYSIGAIYREVVSGETISARPVMQRLLHEVESGLWDGVLVVEVERLARGDTIDQGVVSRAFQYSDTKIITPTKIYDPNNEFDEEYFEFGLFMSRREYKTIKRRLNNGRISSVKEGKYCGNKPPYGYERIKLEKEKGYTLRPVPAQAEVVKMIYTWYAGDGCEQIGVAKIVRKLNDMGIESALGGDWTPASIQGILTNPVYIGKIRWNGRKTVKTIQNGQVVKTRPRSRDVLICEGLHPAIIPDDLYNSAQEIRQKNPSRPISIKNTIRNPLAGIVYCSKCGRAMVRRPYQKRGQEDTLMCPYTSCPTVSSKLSLVEKAVIDGIKGIAEKYKLNNDINVPYNTINSGIVSKQKLIREKESELESLNTQKAKQYDLLEQGIYTTEVFLERSKTISASIQSCSDIITKLREEIEHDENIMTQQSDFIPRCEELLNNYWNLNMESRNRMLKSLIEKVVYSKYKRNTYGHGNEANFELDIFPKIQKND

SEQ ID NO: 4009 - protein, 524 aa, Unknown
  Description of Unknown: Integrase B4010 sequence
  cd00338,SM00857,G3DSA:1.10.10.2600,IPR036162,PF13408, PS51737,IPR025827,G3DSA:3.40.50.1390,IPR006119,IPR038109, PF07508,IPR011109,SSF53041,PTHR30461,PS51736, Coil,PF00239
MNESVCIYLRKSRADREAEAHGEGETLARHQRILLDLAKKKEYIVGAIYREVVSGETIADRPVMQQLLHEVESGMWDGVLVVEVERLARGDTIDQGVVSRAFQYSDTKIITPTKIYDPNNEFDEEYFEFGLFMSRREYKTIKRRLNAGRISSVKEGKYCGNKPPYGYERIKLAREKGYTLRPVPAQAEIVKMIYTWYAGDGCEQIGVAKIVRKLNDMGIKSALGGDWTPASIQGILTNPVYIGKIRWNGRKTVKTIQNGQVVKTRPRSRNVLICEGLHPSIISDDLYNSVQEIRQKNPPRPISIKNTVRNPLAGIVYCSKCGRAMVRRPHQKRGQEDTLMCPYTSCPTVSSKLSLVEKAVLDGIKEITEKYKLNNDINVPYNTINSGIVSKQNLIREKESELESLNVQKAKQYDLLERGIYTTEVFLERSKTIARSIQSCSDIITKLRKEIEHDENIKAQQSNFIPRCEELLNNYWDLNIESRNRMLKNLVEKVVYSKNIKNTYGKGNEINFELDIFPKIQKND

SEQ ID NO: 4010 - protein, 524 aa, Unknown
  Description of Unknown: Integrase B4011 sequence
  SM00857,G3DSA:1.10.10.2600,IPR036162,PF13408,IPR025827, G3DSA:3.40.50.1390,PS51737,IPR006119,IPR038109,PF07508, SSF53041,IPR011109,PTHR30461,Coil,PS51736, cd00338,PF00239
MNESVCIYLRKSRADREAEAHGEGETLARHERILLDLAKKKEYIVGAIYREVVSGETIADRPVMQQLLHEVESGMWDGVLVVEVERLARGDTIDQGVVSRAFQYSDTKIITPTKIYDPNNEFDEEYFEFGLFMSRREYKTIKRRLNAGRISSVKEGKYCGNKPPYGYERVKLEKEKGYTLRPVQTQAEIVKMIYAWYAGDGCEQIGVAKIARKLNEMGIESALGGDWTPASIQGILTNPVYIGKIRWNGRKTVKTIQNGQVIKARPRSKDTLICDGLHPAIILEDLYNSVQEIRKKNPPRPISIKNSIRNPLAGIVYCSKCGRAMVRRPYQKRGQEDTLMCPYTSCPTVSSKLSLVEKAVIDGIREIVEEYKLNNDINISSKAIDCGITSKQNLIHEKENELESLNSQKAKQYDLLEQGIYTTEVFLERAKTIAASIQSCSDTIEKLKEEIKHDKNIIKQQSDFIPRCEELLDNYWSLDTESKNRMLKSLIEKVVYSKDTKNAYGKGDEISFRLDIFPRIQKKS

SEQ ID NO: 4011 - protein, 524 aa, Unknown
  Description of Unknown: Integrase B4012 sequence
  PTHR30461:SF3,SM00857,G3DSA:1.10.10.2600,IPR036162,PF13408, IPR025827,G3DSA:3.40.50.1390,PS51737,IPR006119,IPR038109, PF07508,IPR011109,SSF53041,PTHR30461,PS51736, cd00338,PF00239
MNKLRAAAYCRVSTDRAEQSGSLASQRSFFDDYIRNSDSMTLVGVFYDEGTSGTTTLNRYGFNKMISLAVSGGIDIILTKEVSRFARNTVDTLNITRMLRAKGVGIIFINDNIDTRDSDGELRLSIMATIAQEESRKISERVKWGQQRKMEQGVVFGRSCLGYDVKDGKITINADSAEIVKRIFTEYTVLLKGAESIADGLNAEQIRTVNGGRWSGAFIRKVLRNVKYVGDLEQKKTCTPDFLTHKKRLNRSEHIYIRNHHEPIISRELWEQTQAEISRRKPTDTSRHSDRYVFSGKVYCGVCGSVMVSRVKTLKNGKIYHALRCSGRIGGKSCNNETLNVTALKACVKRIFTDMPIDKTAVINAVIKGLSRTDKPDIPALRRKIETLNAKKRRAVDLMLDGLITQQELIEQKSYYDSIIEKLSQEISSDRSVFETDKIRKNAERFLDFTSDPLWLLVIRADYIHGTLTVYLKGIENGFTTCFTATGRGDSYRVITGNTVRSQGIIPGTMQVQKNRCRHDVNDK

SEQ ID NO: 4012 - protein, 524 aa, Unknown
  Description of Unknown: Integrase B4013 sequence
  PTHR30461:SF3,SM00857,G3DSA:1.10.10.2600,IPR036162,PF13408, PS51737,G3DSA:3.40.50.1390,IPR025827,IPR006119,IPR038109, PF07508,IPR011109,SSF53041,PF00239,PTHR30461, PS51736,Coil,cd00338
MRAFIYGRFSSHKQQELSIEAQIDICREYAEKHNITVVGEYVDRARSARTENRADFRRLIRDACTGVVDCVLVWRYDRFFRDRAESALYRKQLEAAGVHLISVTEFIPDGSAGVITQGMIETVAEYFSAKLSEDVTRGMNKAAQHCQITGGAPLGYRPGPNKRWQIDPVGAELVKRCFEWYDSGKSMGELADHFNKEGHKTAKGNSFNKSSFTTILRNKKYIGIYEYDGTVSIAGGVPRIIEDDLFFRVQRKLDANRHRPGAYKAEVPYLLSGKLFCGKCGSPMTGTAGTGKSGVRHYYYICNNRRAKKCDKKNVRLDLIEEAVLQSALDVLTDDNISYISAEVERRCSENSGNKALVASLRVQLTEVEKQLKNIGNAIAQGIITETTKQMLMDAEADRAALRQQIDRATVQASLEVKAEAVACWLDGFRHGDRKSPEFRKDVFGALVHSVFVYDDYMKIIFNVDSAGAALVPFSAVQNAATSDFVGALPGSYLGGSGVPEKNNPNLFLVENGFGLFLFLGLEQ

SEQ ID NO: 4013 - protein, 524 aa, Unknown
  Description of Unknown: Integrase B4014 sequence
  SM00857,G3DSA:1.10.10.2600,IPR036162,PS51737,G3DSA:3.40.50.1390, IPR006119,IPR038109,PF07508,SSF53041,IPR011109, PTHR30461,Coil,PS51736,cd00338,PF00239
MNESVCIYLRKSRADREAEAHGEGETLARHEHILLDLAKRQGYSIGAIYREVVSGETISARPVMQKLLHEVESGLWDGVLVVEVERLARGDTIDQGVVSRAFQYSDTKIITPTKIYDPNNEFDEEYFEFGLFMSRREYKTIKRRLNNGRISSVKEGKYCGNKPPYGYERVKLEKEKGYTLRPVPAQAEIVKMIYTWYAGDGCEQIGVAKIVRKLNEMGIESALGGDWTPASIQGILTNPVYIGKIRWNGRKTVKAIQNGQVIKTRPRSKDTLICEGLHPAIISEDLFNSVQEIRKKNPPRPVSIANSIRNPLAGIVYCSKCGRAMVRRPYQKRGQEDTLMCPYTSCPTVSSKLSLVEKSVIDGIREIVEEYKLNNDINASSKDIDCVITSKQNLIHEKENELESLNSQKAKQYDLLEQGIYTTEVFLERAKTISASIQSCSDTIEKLKEEIKHDENIIKQRSDFIPRCEELLDNYWSLDTESKNKMLKSLIEKVAYSKDTKNAYGKGNEIGFQLDIFPKIQKNN

SEQ ID NO: 4014 - protein, 524 aa, Unknown
  Description of Unknown: Integrase B4015 sequence
  PTHR30461:SF3,cd00338,SM00857,G3DSA:1.10.10.2600,IPR036162, PF13408,IPR025827,G3DSA:3.40.50.1390,PS51737,IPR006119, IPR038109,PF07508,IPR011109,SSF53041, PTHR30461,PS51736,Coil,PF00239
MDNLNLANVVIYARYSSAGQNDQSIDGQLAKCREYAQQRGYRVVGEYCDRALSGRYAETRPEFQRLIADSAKRAFDFVLVWKLDRFSRDRYDSAIYKKKLRANGVRVLSVTEGVGDSNESVLLEAILEAMAEEYSRQLAQNVRRGMRQNAEKGLSLGGLAPLGYRVVNKQYEINEDEARIVRFIHEQYADGAGQKQIVADCARLGYRNQRGNPLTLASVKRILANERYAGRYDYLGEIVIEDAFPAIVSKDLKKRVRDRLKANAKAPGHAKAKVEYLLHGKLFCGECGAPMIGECGRGRHGATYYYYTCAARKKQHTCKKRNERKDELEASIVDYIGSCVLTDSWIDGAAERVVAEYQKSYDASGIKPLEKQIRDADKEIDQLVDALISATAEAARRRINERIETAEARKRALEADLASLRIASRVRIRKEDIVVWLNQFRTGDRSDLEYRKKVIDLFVNAIYLYDDSFKLFLNVADSAQVTYADALALAPPSVSDFGASGVPDMHLSEHIIFINGVIGMIVQR

SEQ ID NO: 4015 - protein, 524 aa, Unknown
  Description of Unknown: Integrase B4016 sequence
  PTHR30461:SF3,SM00857,G3DSA:1.10.10.2600,IPR036162,PF13408, IPR025827,G3DSA:3.40.50.1390,PS51737,IPR006119,IPR038109, PF07508,IPR011109,SSF53041,PTHR30461,Coil, PS51736,cd00338,PF00239
MPKVTKIPPRLNPATFAPLESVEKRKVAGYARVSTDSEEQKTSYTAQVDYYTKFIKERIDWEFVGVYTDEGISATNTRHREGFNRMIADALNGKIDLVVTKSVSRFARNTVDSLTTIRKLKEKGVEVFFQKENIYTLDSKGELLLTIMSSLSQEESRSISENVTWGQRKRMADGKVSLPYSHFLGYRKGKDGIPEIVPEEAEIVRYIYRSFMEGKTPNHIAECLTFKHVPTPAGKEIWSPSTIESILTNEKYRGSALLQKSFTVDFLSKKKKINEGELMQYYIPESHEAIIPPDEFELVQAEYTRRKRIGRAYNSKSIFSAKLVCECCGGYFGSKIWHSTSKYRRTVWQCNGKFKNGKKCMTPHLYESHIKEKFLTAMNQVLANKTEIIENCLLFKETFSNTAMIEEKIENIQKQMEQLTKQIRMLIQKQSITPIKSEDYYRQYDGLVISFGKLKFKQDTLIQKQDEMENKLKFIMDYIEFLKSQENLIIEFSETLWFRAVDQVTVCTDGKMIFAFKDGSKIKV

SEQ ID NO: 4016 - protein, 524 aa, Unknown
  Description of Unknown: Integrase B4017 sequence
  PTHR30461:SF3,SM00857,G3DSA:1.10.10.2600,IPR036162,PF13408, IPR025827,G3DSA:3.40.50.1390,PS51737,IPR006119,IPR038109, PF07508,IPR011109,SSF53041,PTHR30461,PS51736, cd00338,PF00239
MAGAKNITVIPAKKRVGNTVTAEDKPKLKVAAYCRVSTDSEEQATSYDAQVEHYTEYIRKNPEWEFAGIYADDGISGTNTKKREEFNRMIEDTMAGKIDMIITKSISRFARNTLDCLKYIRQLKEKNVPVFFEKENINTLDAKGEVLLTIMASLAQQESESLSKNVKMGLQFRYQNGEVQVNHNWFLGYTKDENGHLIIDEEQAVVVRRIFREYLQGASLKTIADGLMADGIPTATGNKKWRGDGIRKILTNEKYMGDALLQKTYTVDVLTKKRVSNNGIVPQYYVENNHEAIIPRQLFMQVQQELQRRAHLRTENGKTKRVYSSKYALSSIIYCGKCGDLFRRVAWKARGASYNKWRCASRIEKGPKKGCDAEAISESEIQKAVMRAINKTLGGREEFLVQLQHNIEDVLNGDYTATLEYIDQRMAELQEKLVMCVNKNAEYDVIAKEIDALREKKAAVVTKDAEQEMLRKRINEMRHFLQMQTSRITEYDEQLVRRLIEKITVYDDKLIFEFKSGMTIELKR

SEQ ID NO: 4017 - protein, 524 aa, Unknown
  Description of Unknown: Integrase B4018 sequence
  cd00338,SM00857,G3DSA:1.10.10.2600,IPR036162,PF13408, IPR025827,G3DSA:3.40.50.1390,PS51737,IPR006119,IPR038109, PF07508,IPR011109,SSF53041,PTHR30461,PS51736, Coil,PF00239
MSLENVCIYLRKSRADREAEARGEGETLARHERILLDLARSRNYNVGAIYREIVSGETISARPVMQQLLREVEAGSWDGVLVVEVERLARGDTIDQGVVSRAFQFSDTKIITPTKTYDPDNEFDEEYFEFGLFMSRREYKTIKRRLNAGRISSVKEGKYCGSRPPYGYERVKLRGEKGFTLQPVPEQAEVIKMIYSLYSGASGDRIGVSKIVRKLNDMGIKSPSGKDWVPISVQDVLANPVYAGMIRWNGRKTVRAIQDGMVTQSRPRSKEDDILLFPGRHPAIVSKEMYDSVQQIRKKNPPRPISIKNTIKNPLAGIVYCSKCGRAMVRRPYQKRGQDDTLMCSYTSCPTVSSKLSLVERAVLNGIQDLVDEYRLNDAVPGPDINNAVKSKKKLIAEKEHELEKLNVQKMKQYDLLEQGIYTTEVFLERSNSIASSINSCQDSIECLKEEIRHDKELIDQQSSFIPRCENLLEIYWSLDTATKNKMLKELIERVNYTKDTKNAFRKGNEATFVLDIFPRIQSN

SEQ ID NO: 4018 - protein, 524 aa, Unknown
  Description of Unknown: Integrase B4019 sequence
  SM00857,G3DSA:1.10.10.2600,IPR036162,PF13408,PS51737, G3DSA:3.40.50.1390,IPR025827,IPR006119,IPR038109,PF07508, IPR011109,SSF53041,PTHR30461,Coil,PS51736, cd00338,PF00239
MNESVCIYLRKSRADREAEAHGEGETLARHERILLDLAKKKEYIVGAIYREVVSGETIADRPVMQQLLHEVESGMWDGVLVVEVERLARGDTIDQGVVSRAFQYSDTKIITPTKIYDPNNEFDEEYFEFGLFMSRREYKTIKRRLNNGRISSVKEGKYCGNKPPYGYERVKLEKEKGYTLRPVPAQAEVVKMIYAWYAGDGCEQIGVAKIVRKLNEMGIESALGGDWTPASIQGILTNPVYIGKIRWNGRKTVKTIHNGQVVKTRPRSRDVLICGGLHPAIISDGLYNSVQEIRQKNPPRPISIKNTVRNPLAGIVYCSKCGRAMVRRPYQKRGQEDTLMCPYTSCSTVSSKLSIVEKAVIDGIRDIAEEYKLNNDVNTSSKAIDLTIISKQNLIREKESELENLNTQKAKQYDLLEQGIYTTEVFLERSKTIATSIQSCSDIITKLREEIEHDENIMAQQSDFVPRCEELLNNYWNLDVESRNRMLKSLVEKVVYSKNIKNAYGKSNEINFELDIFPKIQKND

SEQ ID NO: 4019 - protein, 524 aa, Unknown
  Description of Unknown: Integrase B4020 sequence
  PTHR30461:SF3,SM00857,G3DSA:1.10.10.2600,IPR036162,PS51737, G3DSA:3.40.50.1390,IPR006119,IPR038109,PF07508,SSF53041, IPR011109,PTHR30461,Coil,PS51736,cd00338, PF00239
MNTDQIIEKVTSQYTQDKYAMYLRKSRADIEMEALGEGETLAKHKTMLFNLAARHDILPSQITIYQEIVSGESIQDRPEVQRLLEDVYAEKYKGVLVVEVERLARGNTKDQGEVAEAFQMSDTKIITPVKVYDPDNEFDQEYFEFGLFMSRREFKTIRRRLEAGKLQAVLEGNYLLPQRVFGYNIVRKSKDNRYLVINEEEQPLVQMMFDWFTEENRSCDWIAKQFTSMGIPTMQGSREWHKETISCMLKNKLYIGIITWGKSKTVKVRDPKTGKVQKKRVQASPEEVKYINGKHKPIISEAQFRKAQGRFKKNPINHGKELVSPLAGLIHCADCGKALDWINYKDSRGIRYSHKASTYCKKKSLRVEIVFDALVEALEAHIEDFEFKMNHDGNGAERARHLEKISRMDAELEKLEKKRKKLFDDYEDEVYTKEEFIERKQVYAQSIADLKAQLAQAKADVPEVIDYSERIITLQKIIETFKDPALDAQAKNDFLKEFIEDIRYDVIDYGRSKGGKPVLEIIFK

SEQ ID NO: 4020 - protein, 524 aa, Unknown
  Description of Unknown: Integrase B4021 sequence
  SM00857,G3DSA:1.10.10.2600,IPR036162,PS51737,G3DSA:3.40.50.1390, IPR006119,IPR038109,PF07508,IPR011109,SSF53041, PTHR30461,Coil,PS51736,cd00338,PF00239
MNESVCIYLRKSRADREAEAHGDGETLARHERILLDLAKKKEYIVGAIYREVVSGETIADRPVMQQLLHEVESGMWDGVLVVEVERLARGDTIDQGVVSRAFQYSDTKIITPTKIYDPNNEFDEEYFEFGLFMSRREYKTIKRRLNAGRISSVKEGKYCGNKPPYGYERVKLEKEKGYTLRPVPTQAEIVKMIYTWYAGDGCEQIGVAKIARKLNEMGIETALGGDWTPASIQGILTNPVYIGKIRWNGRKTVKTIQNGQVIKTRPRSKDTLICEGLHPAIISEVLYDSVQEIRKKNPPRPVSIANSIRNPLAGIVYCSKCGRAMVRRPYQKRGQEDTLMCPYTSCPTVSSKLSLVEKSVLDGIREIVEEYKLNNDINTSSKAIDCGITSKQNLIHEKENELESLNAQKAKQYDLLEQGIYTTEVFLERAKTISASIQSCSDTIEKLKEEIKHEQNIIKQQSDFIPRCEELLDNYWSLDTESKNKMLKSLIEKIAYSKDNKNAYGKGNKIGFQLDIFPKIQKNN

SEQ ID NO: 4021 - protein, 524 aa, Unknown
  Description of Unknown: Integrase B4022 sequence
  PTHR30461:SF3,cd00338,SM00857,G3DSA:1.10.10.2600,IPR036162, PS51737,G3DSA:3.40.50.1390,IPR006119,IPR038109,PF07508, SSF53041,IPR011109,PTHR30461,PS51736, Coil,PF00239
MRNDPILSLSHVIIYLRKSRADDPNMSVEDVLASHERQLQEYATKTFGSVIPESQIYREVVSGETISDRPVVQQVLRLIESEDIRAVLVIEPQRLSRGDLEDCGRIINLFRYSQTYVLTPMVSYDLCDEYDRKFFEMELTRGNDYLEYTKRILLRGRLAAVKQGDYIGNVAPYGYRKAVIADGKKRHHTLEIVPEEADAVKIMFTMYADGTGFPTIAHHLDALGIIPRNGDHWKVATLKDMLENPVYIGKIRWNWKKTRKVVEDGEIRKIRRRDENCLLFDGLHPAIIDKDLYDRANAIRKSRPHVRKNSQLSNPFAGLLFCECGTAMSMKRYVNHGRSGDRVLYSMICNDQTYCHTKSVSYSDFIDRVISVLRDAIKDFEVKLSDDCTGATIALEAHIHALESNLNQLRKKDERQKDAYENGVYSLSDYIARNSKIQDQIRKTTAALDTAKSTPLPSVDYSGKIVKFQACIDSLLDDSVSAVEKNRLLKECIERIDYHNDMPSLPGVGRHVDNIFDLKISLRL

SEQ ID NO: 4022 - protein, 523 aa, Unknown
  Description of Unknown: Integrase B4023 sequence
  SM00857,G3DSA:1.10.10.2600,IPR036162,PF13408,IPR025827, PS51737,G3DSA:3.40.50.1390,IPR006119,IPR038109,PF07508, IPR011109,SSF53041,PTHR30461,Coil,PS51736, cd00338,PF00239
MNESVCIYLRKSRADREAEAHGEGETLARHERILLELAKKKEYIVGAIYREVVSGETIADRPVMQQLLREVESGMWDGVLVVEVERLARGDTIDQGVVSRAFQYSDTKIITPTKIYDPNNEFDEEYFEFGLFMSRREYKTIKRRLNNGRISSVKEGKYCGNKPPYGYERVKLEKEKGYTLRPVPAQAEVVKMIYTWYAGDECEQIGVAKIVRKLNDMGIKSASGNDWTPTSVQGILANPVYIGKIRWNGRKTVKTIQNGQVVKTRPRSKDVLICEGLHPAIISDDLYNSAQKIRQKNPYRPISIKNTVRNPLAGIVYCSKCGRAMVRRPYQKRGQEDTLMCPYTSCSTVSSKLSLVEKAVIDGIREIAEEYKLNNDINVPSNTIDSGITSKQNLIREKESELESLNTQKAKQYDLLEQGIYTTEIFLERAKTISASIQSCSDTIEKLKEEIKHDQNIIKQQSDFIPRCEELLDNYWSLDTESKNKMLKSLIEKVVYSKNTKNAYGKGNEIGFQLDIFPKIQEK

SEQ ID NO: 4023 - protein, 523 aa, Unknown
  Description of Unknown: Integrase B4024 sequence
  PTHR30461:SF3,cd00338,SM00857,IPR036162,PF13408, IPR025827,G3DSA:3.40.50.1390,PS51737,IPR006119,PF07508, SSF53041,IPR011109,PTHR30461,PS51736,Coil, PF00239
MFFGIYGRKSVYSDKSDSVDNQHRMCNDYIKAHFKADDITLVTSYSDEDYTGANTKRPDLQRLLEDVKSGAINVLVVYQLDRISRDVRDFSNIYAMLEEYHVMFISIKENIDTTTPIGRAMMYVTVVFAQMERETIATRVRDNMIGLAKKGFWTGGNPPYGYVRKNILINGKKHVTIEPDPDGVAYNIWIYDSFLKNHCSLQSMETYFRKEGIKTRNGAFFSTTQLYKILTMPYCVEATPEIYDYFAAKGCQMDPDSPREKWDGSVGVMIYGRSTGVNKKHQLQPPEKWLVCLGLHKPFMPAAKWLAVQNQFSENKFDKTQKYDIPLLKGILRCSCGSIMAVSRKKKINSEVSSWYYCLRRMKNGVEACDRKQIKVDIIDQKLLNTLHSIEIDPSMIYRFVQKSELPLPDIKTINNKISSIELRIGRLASSLALADGSAASKYIVAEIERLDSDLQFLKRERAVINVEIKKRGELNESAEGKAQHIQNVMKGLNGFTAEEKNRIMRDILKECVWDGSELSIVL

SEQ ID NO: 4024 - protein, 523 aa, Unknown
  Description of Unknown: Integrase B4025 sequence
  SM00857,G3DSA:1.10.10.2600,IPR036162,PS51737,G3DSA:3.40.50.1390, IPR006119,IPR038109,PF07508,IPR011109,SSF53041, PTHR30461,Coil,PS51736,cd00338,PF00239
MNESVCIYLRKSRADREAEAHGEGETLARHERILLDLAKKKEYIVGAIYREVVSGETIADRPVMQQLLHEVESGMWDGVLVVEVERLARGDTIDQGIVSRAFQYSDTKIITPTKIYDPNNEFDEEYFEFGLFMSRREYKTIKRRLNAGRISSVKEGKYCGNKPPYGYERVKLEKEKGYTLRPVPTQAEVVKMIYTWYAGDGCEQIGVAKIARKLNEMGIESALGGDWTPASIQGILTNPVYIGKIRWNGRKTVKTIQNGQVIKTRPRSKDTLICEGLHPAIISEDLFNSVQEIRKKNPPRPVSIANSIRNPLAGIVYCSKCGRSMVRRPYQKRGQEDTLMCPYTSCPTVSSKLSLVEKSVIDGIREIVEEYKLNNDINISSKAIDCGITSKQNLIHEKENELESLNAQKAKQYDLLEQGIYTTEVFLERAKTISASIQSCSNTIEKLKEEIKHDENIIKQQSDFIPRCEELLDNYWSLDTESKNKMLKSLIEKVAYSKDNKNAYGKGNEIGFQLDIFPKIQEK

SEQ ID NO: 4025 - protein, 523 aa, Unknown
  Description of Unknown: Integrase B4026 sequence
  PTHR30461:SF3,SM00857,G3DSA:1.10.10.2600,IPR036162,PS51737, G3DSA:3.40.50.1390,IPR006119,IPR038109,PF07508,IPR011109, SSF53041,PF00239,PTHR30461,PS51736, Coil,cd00338
MVSFDSIIIYLRKSRSDDPAQTVEEVLAKHEHILQDYCMKEYGKAIPEKRIYREVVSGETIQDRPVMQQLLKELEAENISGVLIVEPQRLSRGDLQDCGQIINSFRYTNTAVITPGKTYDLSDEYDRKFFEMELTRGNDYLEYTKKILSRGRVASVRQGNYICSVRPYGYRKITLGSGKDKCHTLEIIPEEADAIRLMYHLYLDENMGFTNIARTLDSLHIKPLKSDNWSAATIRDMIDNPIYIGKVVWNSRKVVKKWENEQITKVRPRNKGDDVICVNGRHEAIIDEHTFEAARNKRGLNPKVKKFKELRNPLAGLLFCGTCGHGMSMKKYVDKRSHTGKITTVMLCNQQAVCHTKSAQYEGILAKIKVSLANAIFDFEIKLKEQENNNIDMHELRIASLEEELNRLYNKDVRQKDAYEDGIYTKEEYIERNSKLQERILNVKEDIADEKKNIPVKIDYEDKIITFKDCLASLDDPNISAADKNILLKSCIDKIIYYNDMPSKPGIGRYIENSFRLEIFLKL

SEQ ID NO: 4026 - protein, 523 aa, Unknown
  Description of Unknown: Integrase B4027 sequence
  PTHR30461:SF3,cd00338,SM00857,IPR006118,G3DSA:1.10.10.2600, IPR036162,PS51737,G3DSA:3.40.50.1390,IPR006119,IPR038109, PF07508,IPR011109,SSF53041,PTHR30461,PS00397, PS51736,Coil,PF00239
MNNNYENITVDDLLKNLPIYKELIQHINTLDSTCKIRIAAAYLRVSTDMQTEYSPEAQLEDIIKYCIKENIMLPKENIYIEPGLSGTRADKRPKFQMMMLKAEEKEKPFDLILVHKYDRFARNREDSIVYKSKLRKKLGIDIIAVKEQLPEDKKLAMMMESQLETWGEYYSMNLSDEVKKGQRKKADRGESSAPAPFGYEKVIKEIRKEKNRDKIIRELIVKKDEADIVIKIFDKFINGESLRNITIWLNSLGIKTKRNGKFSDRAVLWILNNPIYIGYIRWTEDGMQRDFNNPDTIVKKSTHEHIITDEVWEKAQEKLKTMNEVYGHRKHQVKHEHWLRGLIRCDNCGEMLVKNGKAFQCTGYTHARCTISHSITVKSVEEAILEQLKINFKNKPINIEISRKSFDNTDEVAILQNQLSQIEIKEKRVKLAYENGIDSLEEYKENKERLNNDKQLILKEIAKKGKSKSEIEKREDVFKRCKDAYGILTDPTISDDDKAIVTHSLIDHIVFVKNERKLVITYK

SEQ ID NO: 4027 - protein, 523 aa, Unknown
  Description of Unknown: Integrase B4028 sequence
  cd03768,PTHR30461:SF3,SM00857,IPR036162,PF13408, PS51737,IPR025827,G3DSA:3.40.50.1390,IPR006119,PF07508, IPR011109,SSF53041,PTHR30461,PS51736,Coil, PF00239
MRFFSYGRKSVFSDKSDSIDNQFRMNREYCESKFSGQVDSWQQFSDEDFTGANTSRPDLQRMLSFIKGGFCDVLVVYQLDRLSRDVRDFANIYALLEEHGVMFISIKENIDTTTPIGRAMMYVTVVFAQMERETIAARVTDNMLGLAKKGYWTGGNPPVGYVRKHIVVNGKKHCSIEVDPDGARYVTQIFDTFLAYNCSLQGMETRFKNQGIRTQSGKFFSTTQLHKMLTMPYCVEATPEVYDFYAAKGCIMDPGSPREMWDGSVGVIIYGRSTEKNKKHQAQPPEKWTVCLGKHKPFMPAEKWLAVQSRFTQNKCIKDAKWPVPLLKGVLRCKCGNLMQVSRKKKVDGTCSSWYYCRKRMRQGVDACDMGQIKCDLLDEKVLELFRGITADPALIQKFVKAEAPADVPDLKAAQARVSACERKIGRLAASLALAEDSAASKYIIAEMERLDVELGALKREASLAEMESHRAAASAKDAKATAAEIAKLIHGLDGFDDKEKNAIARAVIQECTWDGERLFIKL

SEQ ID NO: 4028 - protein, 523 aa, Unknown
  Description of Unknown: Integrase B4029 sequence
  cd03768,PTHR30461:SF3,SM00857,IPR036162,PF13408, IPR025827,PS51737,G3DSA:3.40.50.1390,IPR006119,PF07508, IPR011109,SSF53041,PTHR30461,PS51736,Coil, PF00239
MRFFSYGRKSVFSDKSDSIDNQFRMNREYCESKFSGQVDSWQQFSDEDFTGANTSRPDLQRMLSFIKGGFCDVLVVYQLDRLSRDVRDFANIYALLEEHGVMFISIKENIDTTTPIGRAMMYVTVVFAQMERETIAARVTDNMLGLAKKGYWTGGNPPVGYVRKHIVVNGKKHCSIEVDPDGARYVTQIFDTFLAYNCSLQGMETRFKNQGIRTQSGKFFSTTQLHKMLTMPYCVEATPEVYDFYAAKGCIMDPGSPREMWDGSVGVIIYGRSTEKNKKHQAQPPEKWTVCLGKHKPFMPAEKWLAVQSRFTQNKCIKDAKWPVPLLKGVLRCKCGNLMQVSRKKKVDGTCSSWYYCRKRMRQGVDACDMGQIKCDLLDEEVLELFRGITADPALIQKFVKAEAPADVPDLKAAQARVSACERKIGRLAASLALAEDSAASKYIIAEMERLDVELGALKREASLAEMESHQAAASAKDAKATAAEIAKLIHGLDGFDDKEKNAIARAVIQECTWDGERLFITL

SEQ ID NO: 4029 - protein, 523 aa, Unknown
  Description of Unknown: Integrase B4030 sequence
  PTHR30461:SF3,cd00338,SM00857,IPR006118,G3DSA:1.10.10.2600, IPR036162,PS51737,G3DSA:3.40.50.1390,IPR006119,IPR038109, PF07508,SSF53041,IPR011109,PTHR30461,PS00397, PS51736,Coil,PF00239
MNNNYENITVDDLLKNLPIYKELIQHINTLDSTCKIRIAAAYLRVSTDMQTEYSPEAQLEDIIKYCIKENIMLPKENIYIEPGLSGTRADKRPKFQMMMLKAEEKEKPFDLILVHKYDRFARNREDSIVYKSKLRKKLGIDIIAVKEQLPEDKKLAMMMESQLETWGEYYSMNLSDEVKKGQRKKADRGESSAPAPFGYEKVIKEIRKEKNRDKIIRELIVKKDEADIVIKIFDKFINGESLRNITIWLNSLGIKTKRNGKFSDRAVLWILNNPIYIGYIRWTEDGMQRDFNNPDTIVKKSTHEHIITDEVWEKAQEKLKTMNEVYGHRKHQVKHEHWLRGLIRCDNCGEMLVKNGKAFQCTGYTHARCTISHSITVKSVEEAILEQLKINFKDKPINIEISRKSFDNTDEVAILQNQLSQIEIKEKRVKLAYENGIDSLEEYKENKERLNNDKQLILKEIAKKGKSKSEIEKREDVFKRCKDAYGILTDPTISDDDKAIVTHSLIDHIVFVKNERKLVITYK

SEQ ID NO: 4030 - protein, 523 aa, Unknown
  Description of Unknown: Integrase B4031 sequence
  PTHR30461:SF3,cd00338,SM00857,IPR036162,PF13408, IPR025827,PS51737,G3DSA:3.40.50.1390,IPR006119,PF07508, IPR011109,SSF53041,PTHR30461,PS51736,Coil, PF00239
MFFGIYGRKSVYSDKSDSVDNQHRMCNDYIKTHFKSDDITLITSYSDEDYTGANTKRPDLQRLLEDVKSGAINVLVVYQLDRISRDVRDFSNIYALLEEYHVMFISIKENIDTTTPIGRAMMYVTVVFAQMERETIATRVRDNMIGLAKKGFWTGGNPPYGYVRKNIVINGKKHVTIEPDPDGVAYNIWIYDSFLKNHCSLQSMETYFRKEGIKTRNGAFFSSTQLYKILTMPYCVEATPEIYDYFAAKGCQMDPDSPRDKWDGSVGVMVYGRSTEVNKKHQLQPPEKWLICLGLHKPFMPAAKWLAVQNQFSKNKFDKTPKYDIPLLKGVLRCSCGSIMAVSRKKKINGEVSSWYYCLRRMRNGVEACDRKQIKVDIIDQKLLNTLHSIESDPSMIFCFVQKKELPLPDIKTINNKISSVESKISKLASSLALADGSAASKYIVAEIERLDSDLQFLKRERAAINIEIKKRDELNESAESKALHIQNVMKGLSGFTAEEKNLIMRDILKECVWDGSELSIVL

SEQ ID NO: 4031 - protein, 523 aa, Unknown
  Description of Unknown: Integrase B4032 sequence
  cd03768,PTHR30461:SF3,SM00857,IPR036162,PF13408, IPR025827,G3DSA:3.40.50.1390,PS51737,IPR006119,PF07508, IPR011109,SSF53041,PTHR30461,PS51736,Coil, PF00239
MRFFSYGRKSVFSDKSDSIDNQFRMNREYCESKFSGQVDSWQQFSDEDFTGANTSRPDLQRMLSFIKGGFCDVLVVYQLDRLSRDVRDFANIYALLEEHGVMFISIKENIDTTTPIGRAMMYVTVVFAQMERETIAARVTDNMLGLAKKGYWTGGNPPVGYVRKHIVVNGKKHCSIEVDPEGARYVTQIFDTFLAYNCSLQGMETRFKNQGIRTQNGKFFSTAQLHKMLTMPYCVEATPEVYDFYAAKGCIMDPGSPREMWDGSVGVIIYGRSTEKNKKHQAQPPEKWTVCLGKHKPFMPAEKWLAVQSRFTQNKCIKDAKWPVPLLKGVLRCKCGNLMQVSRKKKVDGTCSSWYYCRKRMRQGVDACDMGQIKCDLLDEEVLELFRGITADPALIQKFVKAEAPADVPDLKAAQARVSACERKIGRLAASLALAEDSAASKYIIAEMERLDVELGALKREASLAEMESHQAAASAKDAKATAAEIAKLIHGLEGFDDKEKNAIARAVIQECTWDGERLFITL

SEQ ID NO: 4032 - protein, 523 aa, Unknown
  Description of Unknown: Integrase B4033 sequence
  PTHR30461:SF3,SM00857,G3DSA:1.10.10.2600,IPR036162,PS51737, G3DSA:3.40.50.1390,IPR006119,IPR038109,PF07508,IPR011109, SSF53041,PTHR30461,Coil,PS51736,cd00338, PF00239
MPNTKSFTVNEVLVYLRKSRSDSPDMSVEEVLRKHEEMIQQYASTHFHSPIPEKNIFREVVSGETIDSRPQMKNLLKMIESEQFKAVLVVEPQRLSRGDLEDCGRLINILRYTNTTVLTLTHSFNLQEEYERKFFEMEITRGNDYLEYTKRILKRGREASVAKGNYIGSVDPYGYKKTVIKKDGVTCHTLEIIPEEADTVKLIHELYAYTPGGIGFTNIAHKLDAMHIKPKKAAHWTPAIISSILCNPLYLGMVRWNNRKVVKYINEGQLAKARPQNSEAKYYKGLHKPIITQELYDACMARRGTNPSLRRNKELCNPFTGLLYCGTCGHAMSLKIYKNHNSVSQMMLCNHQAYCHTKSVLYSAFLRRFMSSMEDTLNDFELAQKSDDGRAQAISKTIVVNLENKLKKLNEKDARQKDAYEDGIYSKEEFLERNVRTQQDIASTIIALEDARAKKADIIDYEEKIRRFKDCLHALNDPELSAAEKNRFLKSCVDKILYYNNMESKAGIGRYIENVFSLEIQYK

SEQ ID NO: 4033 - protein, 523 aa, Unknown
  Description of Unknown: Integrase B4034 sequence
  SM00857,G3DSA:1.10.10.2600,IPR036162,PF13408,PS51737, G3DSA:3.40.50.1390,IPR025827,IPR006119,IPR038109,PF07508, IPR011109,SSF53041,PF00239,PTHR30461,PS51736, Coil,cd00338
MNENVCIYLRKSRADQEAELRGEGETLARHERILLDLAKSRNYSVGAIYREIVSGETISARPVMQQLLREVEAGSWDGVLVVEVERLARGDTIDQGVVSRAFQFSDTKIITPTKTYDPDNEFDEEYFEFGLFMSRREYKTIKRRLNAGRIASVKEGKYCGSKPPYGYERVKLHGEKGFTLQPVPEQAEVIKMIYSLYSGASGDRIGVSKIVRKLNDMGIKSPSGKDWVPISVQDVLANPVYAGMIRWNGRKTVRAIQDGMVTQSRPRSKDDDILLFPGRHPAIVSKEMYDSVQQIRKKNPPRPISIKNTIKNPLAGIVYCSKCGRAMVRRPYQKRGQDDTLMCSYTSCPTVSSKLSLVERAVLNGIQDLVDEYRLNDAVPGPDINNAVKSKKKLIAEKEHELEKLNVQKMKQYDLLEQGIYTTEVFLERSNSIASSINSCQDSIECLKEEIRHDKELIDQQSSFIPRCENLLEIYWSLDTAAKNKMLKELIERVNYTKDVKNAFRMGNEATFVLDIFPRIQSN

SEQ ID NO: 4034 - protein, 523 aa, Unknown
  Description of Unknown: Integrase B4035 sequence
  cd03768,PTHR30461:SF3,SM00857,IPR036162,PF13408, IPR025827,G3DSA:3.40.50.1390,PS51737,IPR006119,PF07508, SSF53041,IPR011109,PTHR30461,PS51736,Coil, PF00239
MRFFSYGRKSVFSDKSDSIDNQFRMNREYCESKFSGQVDSWQQFSDEDFTGANTSRPDLQRMLSFIKGGFCDVLVVYQLDRLSRDVRDFANIYALLEEHGVMFISIKENIDTTTPIGRAMMYVTVVFAQMERETIAARVTDNMLGLAKKGYWTGGNPPVGYVRKHIVVNGKKHCSIEVDPEGARYVTQIFDTFLAYNCSLQGMETRFKNQGIRTQNGKFFSTAQLHKMLTMPYCVEATPEVYDFYAAKGCIMDPGSPREMWDGSVGVIIYGRSTEKNKKHQAQPPEKWTVCLGKHKPFMPAEKWLAVQSRFTQNKCIKDAKWPVPLLKGVLRCKCGNLMQVSRKKKVDGTCSSWYYCRKRMRQGVDACDMGQIKCDLLDEEVLELFRGITADPALIQKFVKAEAPADVPDLKAAQARVSACERKIGRLAASLALAEDSAASKYIIAEMERLDVELGALKREASLAEMESHRAAASAKDAKATAAEIAKLIHGLDGFDDKEKNAIARAVIQECTWDGERLFITL

SEQ ID NO: 4035 - protein, 523 aa, Unknown
  Description of Unknown: Integrase B4036 sequence
  cd03768,PTHR30461:SF3,SM00857,IPR036162,PF13408, IPR025827,G3DSA:3.40.50.1390,PS51737,IPR006119,PF07508, SSF53041,IPR011109,PTHR30461,PS51736,Coil, PF00239
MRFFSYGRKSVFSDKSDSIDNQFRMNREYCESKFSGQVDSWQQFSDEDFTGANTSRPDLQRMLSFIKGGFCDVLVVYQLDRLSRDVRDFANIYALLEEHGVMFISIKENIDTTTPIGRAMMYVTVVFAQMERETIAARVTDNMLGLAKKGYWTGGNPPVGYVRKHIVVNGKKHCSIEVDPDGARYVTQIFDTFLAYNCSLQGMETRFKNQGIRTQSGKFFSTTQLHKILTMPYCVEATPEVYDFYAAKGCIMDPGSPREMWDGSVGVIIYGRSTEKNKKHQAQPPEKWTVCLGKHKPFMPAEKWLAVQSRFTQNKCIKDAKWPVPLLKGVLRCKCGNLMQVSRKKKVDGTCSSWYYCRKRMRQGVDACDMGQIKCDLLDEEVLELFRGITADPALIQKFVKAETPADVPDLKAAQARVSACERKIGRLAASLALAEDSAASKYIIAEMERLDVELGALKREASLAEMESHRAAASAKDAKATAAEIAKLIHGLDGFDDKEKNAIARAVIQECTWDGERLFITL

SEQ ID NO: 4036 - protein, 523 aa, Unknown
  Description of Unknown: Integrase B4037 sequence
  cd03768,PTHR30461:SF3,SM00857,IPR036162,PF13408, PS51737,G3DSA:3.40.50.1390,IPR025827,IPR006119,PF07508, IPR011109,SSF53041,PTHR30461,PS51736,Coil, PF00239
MRFFSYGRKSVFSDKSDSIDNQFRMNREYCESKFSGQVDSWQQFSDEDFTGANTSRPDLQRMLSFIKGGFCDVLVVYQLDRLSRDVRDFANIYALLEEHGVMFISIKENIDTTTPIGRAMMYVTVVFAQMERETIAARVTDNMLGLAKKGYWTGGNPPVGYVRKHIVVDGKKHCSIEVDPDGARYVTQIFDTFLAYNCSLQGMETRFKNQGIRTQSGKFFSTTQLHKMLTMPYCVEATPEVYDFYAAKGCIMDPGSPREMWDGSVGVIIYGRSTEKNKKHQAQPPEKWTVCLGKHKPFMPAEKWLAVQSRFTQNKCIKDAKWPVPLLKGVLRCKCGNLMQVSRKKKVDGTCSSWYYCRKRMRQGVDACDMGQIKCDLLDEKVLELFRGITADPGLIQKFVKTKAPDDIPNLKAAQARVSACERKIGRLAASLALAEDSTASKYIIAEMERLDVELGALKREASLAEMENHRAAANAKDAKATAAEIAKLIHGLEGFDDKEKNAIARAVIQECTWDGERLFITL

SEQ ID NO: 4037 - protein, 523 aa, Unknown
  Description of Unknown: Integrase B4038 sequence
  cd03768,PTHR30461:SF3,SM00857,G3DSA:1.10.10.2600,IPR036162, PF13408,IPR025827,G3DSA:3.40.50.1390,PS51737,IPR006119, IPR038109,PF07508,IPR011109,SSF53041,PTHR30461, PS51736,Coil,PF00239
MNTIAIYTRKSKFTGKGESIENQIEKCKKFIEFKFNIDSENVNIFIDEGFSGKNENRPQYQLMMEKIKKKEIDSIVIYQLNRLGRNARDIHNTMQLCDDLGVIIYSATEGFDSSTSFGRAVIGILASLAQLEREQLAERVKDNMYTLAKMGRWLGGQSPLGFDGSREYYIDETGKERSITKLKKNEEELKLVKLLYDKYLEEKSLSQVGKWALINHLTGKNGGNLNKNAINVILQNPVYVKSSKEVFEYLSNEGYEVCGEPNGNGLLRYGKDDEPIVATAKHKGVIPSDQWIEVQKILKGNAYKAPRMGKTNTALLTGLLRCKCGSTMRISYGQKRKDGTKPFYYICNMKINSGGARCNLKNLNGNLFEKNFIQFLKNYSKETLFAELQKLLNNSKDLESTISSNKIDVEIEKSNKAIKQILNKLKLTDDDELSKILLQEIKVENNNLKALSKQKEELLNDQSEVVITQSEVLAILDDLDNFQKTFDDLNLEDKQKALKSLIESITLTDDKFIVDFNIKKKTR

SEQ ID NO: 4038 - protein, 523 aa, Unknown
  Description of Unknown: Integrase B4039 sequence
  PTHR30461:SF3,SM00857,IPR036162,PF13408,PS51737, G3DSA:3.40.50.1390,IPR025827,IPR006119,PF07508,IPR011109, SSF53041,PTHR30461,Coil,PS51736,cd00338, PF00239
MNICCYGRKSIYSDHSDSIDNQFRMCRDYVEMKFSGQVDSFLEYQDEAFTGANTKRPDLQRLLADISAGNCDVLIVYQLDRLSRDVRDFANIYAILEEHRVKFISIKENIDTSTPIGRAMMYVTVVFAQMERETIAARVADNMIGLAKKGYWTGGNPPEGYVRTRIEANGKKHCSIVPDPEGVKYVNWIFDTFLQNDYSLQSMETAFKNQGIRTRRGAFFSTAQLHKILTMPYCVQATPEVYDYYVARGCQMDPESPRESWDGTCGVMIYGRTTQKNKKHQMQPPEKWLVCLGAHEPFMPADKWLAVQARFCRNKFDKTMKYDVPLLKGVLRCSCGSIMCVARKKKKEGVSSWYYCLKRMRQGKEVCDSHQIKCELLDQKVLELLQSIERDPALIHQFAEQNAEVLAGPDPKVLASKISTCQTRIDRLVSSLSLAAESSAQKYILAELERLDLEIQALRREHNLALTAERNRTRQQQDTFSKVSEISRLIGDMDSFSASEKNAIVKDVIKKCVWDGESLSIML

SEQ ID NO: 4039 - protein, 523 aa, Unknown
  Description of Unknown: Integrase B4040 sequence
  cd03768,PTHR30461:SF3,SM00857,IPR036162,PF13408, PS51737,IPR025827,G3DSA:3.40.50.1390,IPR006119,PF07508, IPR011109,SSF53041,PTHR30461,PS51736,Coil, PF00239
MRFFSYGRKSVFSDKSDSIDNQFRMNREYCESKFSGQVDSWQQFSDEDFTGANTSRPDLQRMLSFIKGGFCDVLVVYQLDRLSRDVRDFANIYALLEEHGVMFISIKENIDTTTPIGRAMMYVTVVFAQMERETIAARVTDNMLGLAKKGYWTGGNPPVGYVRKHIVVNGKKHCSIEVDPDGARYVTQIFDTFLAYNCSLQGMETRFKNQGIRTQSGKFFSTTQLHKMLTMPYCVEATPEVYDFYAAKGCIMDPGSPREMWDGSVGVIIYGRSTEKNKKHQAQPPEKWTVCLGKHKPFMPAEKWLAVQSRFTQNKCIKDAKWPVPLLKGVLRCKCGNLMQVSRKKKVDGTCSSWYYCRKRMRQGVDACDMGQIKCDLLDGEVLELFRGITADPALIQKFVKAEAPADVPDLKAAQARVSACERKIGRLAASLALAEDSAASKYIIAEMERLDVELGALKREASLAEMESHRAAASAKDAKATAAEIAKLIHGLDGFDDKEKNAIARAVIQECTWDGERLFIKL

SEQ ID NO: 4040 - protein, 523 aa, Unknown
  Description of Unknown: Integrase B4041 sequence
  cd03768,PTHR30461:SF3,SM00857,IPR036162,PF13408, PS51737,G3DSA:3.40.50.1390,IPR025827,IPR006119,PF07508, IPR011109,SSF53041,PTHR30461,PS51736,Coil, PF00239
MRFFSYGRKSVFSDKSDSIDNQFRMNREYCESKFSGQVDSWQQFSDEDFTGANTSRPDLQRMLSFIKGGFCDVLVVYQLDRLSRDVRDFANIYALLEEHGVMFISIKENIDTTTPIGRAMMYVTVVFAQMERETIAARVTDNMLGLAKKGYWTGGNPPVGYVRKHIVVNGKKHCSIEVDPDGARYVTQIFDTFLAYNCSLQGMETRFKNQGIRTQSGKFFSTTQLHKMLTMPYCVEATPEVYDFYAAKGCIMDPGSPREMWDGSVGVIIYGRSTEKNKKHQAQPPEKWTVCLGKHKPFMPAEKWLAVQSRFTQNKCIKDAKWPVPLLKGVLRCKCGNLMQVSRKKKVDGTCSSWYYCRKRMRQGVDACDMGQIKCNLLDEKVLELFRGITADPALIQKFVKAEAPTDVPDLKAAQARVSACERKIGRLAASLALAEDSAASKYIIAEMERLDVELGALKREASLAEMEIHRAAASAKDAKATAAEIAKLIHGLDGFDDKEKNAIARAVIQECIWDGERLFITL

SEQ ID NO: 4041 - protein, 523 aa, Unknown
  Description of Unknown: Integrase B4042 sequence
  cd03768,PTHR30461:SF3,SM00857,IPR036162,PF13408, IPR025827,PS51737,G3DSA:3.40.50.1390,IPR006119,PF07508, IPR011109,SSF53041,PTHR30461,PS51736,Coil, PF00239
MRFFSYGRKSVFSDKSDSIDNQFRMNREYCESKFSGQVDSWQQFSDEDFTGANTSRPDLQRMLSFIKGGFCDVLVVYQLDRLSRDVRDFANIYALLEEHGVMFISIKENIDTTTPIGRAMMYVTVVFAQMERETIAARVTDNMLGLAKKGYWTGGNPPVGYVRKHIVVNGKKHCSIEVDPDGARYVTQIFDTFLAYNCSLQGMETRFKNQGIRTQSGKFFSTTQLHKMLTMPYCVEATPEVYDFYAAKGCIMDPGSPREMWDGSVGVIIYGRSTEKNKKHQAQPPEKWTVCLGKHKPFMPAEKWLAVQSRFTQNKCIKDAKWPVPLLKGVLRCKCGNLMQVSRKKKVDGTCSSWYYCRKRMRQGVDACDMGQIKCDLLDEEVLELFRGITADPALIQKFVKAEAPADVPDLKAAQARVSACERKIGRLAASLALAEDSAASKYIIAEMERLDVELGALKREASLAEMESHRAAASAKDAKATAAEIAKLIHGLDGFDDKEKNAIARAVIQECTWDGERLFITL

SEQ ID NO: 4042 - protein, 523 aa, Unknown
  Description of Unknown: Integrase B4043 sequence
  PTHR30461:SF3,SM00857,IPR036162,PF13408,IPR025827, PS51737,G3DSA:3.40.50.1390,IPR006119,PF07508,IPR011109, SSF53041,PTHR30461,Coil,PS51736,cd00338, PF00239
MNICCYGRKSIYSDHSDSIDNQFRMCRDYVEMKFSGQVDSFLEYQDEAFTGANIKRPDLQRLLVDIAAGNCDILIVYQLDRLSRDVRDFANIYAILEEHHVKFISIKENIDTSTPIGRAMMYVTVVFAQMERETIAARVADNMIGLAKKGYWTGGNPPEGYVRTRIEANGKKHCSIVPDPEGVKYVTWIFDTFLQNGYSLQSMETAFKKQGIRTRTGAFFSTTQLHKILTMPYCAQATPEVYDYYAAKGCQMDIESPREQWDGTCGVMIYGRTTQKNKKHQMQPPEKWLVCLGAHEPFMPADKWLAVQARFAQNKFDKTMKYDVPLLKGVLRCSCGSIMCVSRKKKKEGVSSWYYCLKRMRQGKEVCDSHHIKCELLDQKVLELLQSIKRDPGVIQKFAEQNTEVLSGPDPKVLASKINTCQTRIDRLVSSLSLAADSSAQKYILAELERLDLEIQALRREHNLALAVERKRSLQQQDTLSKVSEINRLVSDLDSFSAAEKNAIVKDVIKKCVWDGESLSIML

SEQ ID NO: 4043 - protein, 523 aa, Unknown
  Description of Unknown: Integrase B4044 sequence
  cd03768,PTHR30461:SF3,SM00857,IPR036162,PF13408, PS51737,G3DSA:3.40.50.1390,IPR025827,IPR006119,PF07508, IPR011109,SSF53041,PTHR30461,PS51736,Coil, PF00239
MRFFSYGRKSVFSDKSDSIDNQFRMNREYCESKFSGQVDSWQQFSDEDFTGANTSRPDLQRMLSFIKGGFCDVLVVYQLDRLSRDVRDFANIYALLEEHGVMFISIKENIDTTTPIGRAMMYVTVVFAQMERETIAARVTDNMLGLAKKGYWTGGNPPVGYVRKHIVVNGKKHCSIEVDPDGARYVTQIFDTFLAYNCSLQGMETRFKNQGIRTQSGKFFSTTQLHKMLTMPYCVEATPEVYDFYAAKGCIMDPGSPREMWDGSVGVIIYGRSTEKNKKHQAQPPEKWTVCLGKHKPFMPAEKWLAVQSRFTQNKCIKDAKWPVPLLKGVLRCKCGNLMQVSRKKKVDGTCSSWYYCRKRMRQGVDACDMGQIKCDLLDDEVLELFRGIAADPGLIQKFVKAEAPADVPDLKAAQARVSACERKIGRLAASLALAEDSAASKYIIAEMERLDVELGALKREASLAEMESHRAAASAKDAKATAAEIAKLIHGLDGFDDKEKNAIARAVIQECTWDGERLFIKL

SEQ ID NO: 4044 - protein, 523 aa, Unknown
  Description of Unknown: Integrase B4045 sequence
  PTHR30461:SF3,SM00857,G3DSA:1.10.10.2600,IPR036162,PF13408, PS51737,G3DSA:3.40.50.1390,IPR025827,IPR006119,IPR038109, PF07508,IPR011109,SSF53041,PTHR30461,Coil, PS51736,cd00338,PF00239
MAKSVTTIPATLSRFTAAPINSTKKRRVAAYARVSTDNEEQLTSYEAQIDYYTNYINGRDDWEFVGVYPDEGITGTNTKKREQFRQMVADALDGKIDLIITKSVSRFARNTVDSLTTIRKLKEHNVEVYFEKENIWTFDSKGELLLTIMSSLAQEESRSISENCTWGQRKRFADGKVTVPFKRFLGYDMGPDHNLVVNPEQAKLVKRIYGMFLQGQSPFQIARTLTEEGIPSPGGKDHWNPSNIKSILTNEKYKGDALLQKSFTVDFLTKKKKTNEGEIPQYYVKDNHEAIIDPETFEMVQTLMTTRTKGRNRKSSVSIFSSKVKCGDCGSWYGPKVWHSNDAYRKVIWQCNHKFDGQKCATPTLTEDEIKELFLRAANQVIDQKEQFIAIYEQVLSRNLDTTALESELSDLEAEINIAAELIEECIKENAHVALDQDEYQKRYDALVARFDKAKARHTEVTDLIAERMARKHQIEAYLKNLRSREPLTEFRETDWLAMVDYIIVHNKKDIRVTFKDGTEIET

SEQ ID NO: 4045 - protein, 523 aa, Unknown
  Description of Unknown: Integrase B4046 sequence
  PTHR30461:SF3,SM00857,G3DSA:1.10.10.2600,IPR036162,PS51737, G3DSA:3.40.50.1390,IPR006119,IPR038109,PF07508,IPR011109, SSF53041,PF00239,PTHR30461,PS51736,Coil, cd00338
MVSFDSIIIYLRKSRSDDPAQTVEEVLAKHEHILQDYCMKEYGKAIPEKRIYREVVSGETIQDRPVMQQLLKELETGNISGVLIVEPQRLSRGDLQDCGQIINSFRYTNTAVITPGKTYDLSDEYDRKFFEMELTRGNDYLEYTKKILSRGRVASVRQGNYICSVRPYGYRKITLGSGKDKCHTLEIIPEEADAIRLMYHLYLDENMGFTNIARTLDSLHIKPLKSDNWSAATIRDMIDNPIYIGKVVWNSRKVVKKWENEQITKVRPRNKGDDVICVNGRHEAIIDEHTFEAARNKRGLTPKVKKFKELRNPLAGLLFCGTCGHGMSMKKYVDKRSHTGKVTTVMLCNQQAVCHTKSAQYEDILAKIKVSLANAISDFKIKLKEQENNNIDMHELRIASLEEELNRLYNKDVRQKDAYEDGIYTKEEYIERNSKLQERILNVKEEIADEKNNVPVKIDYEDKIMTFKDCLSSLDDSDISAADKNILLKSCIDKIIYYNDMPSKPGIGRYIENSFRLEIFLKL

SEQ ID NO: 4046 - protein, 523 aa, Unknown
  Description of Unknown: Integrase B4047 sequence
  cd03768,PTHR30461:SF3,SM00857,IPR036162,PF13408, IPR025827,PS51737,G3DSA:3.40.50.1390,IPR006119,PF07508, IPR011109,SSF53041,PTHR30461,PS51736,Coil, PF00239
MRFFSYGRKSVFSDKSDSIDNQFRMNREYCESKFSGQVDSWQQFSDEDFTGANTSRPDLQRMLSFIKGGFCDVLVVYQLDRLSRDVRDFANIYALLEEHGVMFISIKENIDTTTPIGRAMMYVTVVFAQMERETIAARVTDNMLGLAKKGYWTGGNPPVGYVRKHIVVNGKKHCSIEVDPDGARYVTQIFDTFLAYNCSLQGMETRFKNQGIRTQSGKFFSTTQLHKMLTMPYCVEATPEVYDFYAAKGCIMDPGSPREMWDGSVGVIIYGRSTEKNKKHQAQPPEKWTVCLGKHKPFMPAEKWLAVQSRFTQNKCIKDAKWPVPLLKGVLRCKCGNLMQVSRKKKVDGTCSSWYYCRKRMRQGVDACDMGQIKCDLLDEEVLELFRGITADPALIQKFVKAEAPADVPDLKAAQARVSACERKIGRLAASLALAEDSAASKYIIAEMERLDVELGALKREASLAEMESHRAAASAKDAKATAAEIAKLIHGLDGFDDKEKNAIARAVIQECTWDGERLFIKL

SEQ ID NO: 4047 - protein, 523 aa, Unknown
  Description of Unknown: Integrase B4048 sequence
  PTHR30461:SF3,SM00857,G3DSA:1.10.10.2600,IPR036162,PS51737, G3DSA:3.40.50.1390,IPR006119,IPR038109,PF07508,IPR011109, SSF53041,PF00239,PTHR30461,PS51736,Coil, cd00338
MVSFDSIIIYLRKSRSDDPAQTVEEVLAKHERILQDYCMKEYGKAIPEKRIYREVVSGETIQDRPVMQQLLKELEAENISGVLIVEPQRLSRGDLQDCGQIINSFRYTNTAVITPGKTYDLSDEYDRKFFEMELTRGNDYLEYTKKILSRGRVASVRQGNYICSVRPYGYKKITLGSGKDKCHTLEIIPEEADAIRLMYHLYLDENMGFTNIARTLDSLHIKPLKSDNWSAATIRDMIDNPIYIGKVVWNSRKVVKKWENEQITKVRPRNKGDDVICVNGRHEAIIDEHTFEAARNKRGLTPKVKKFKELRNPLAGLLFCGTCGHGMSMKKYVDKRSHTGKVTTVMLCNQQAVCHTKSAQYEDILAKIKVSLANAISDFKIKLKEQENNNIDMHELRIASLEEELNRLYNKDVRQKDAYEDGIYTKEEYIERNSKLQERILNVKEEIADEKNNVPVKIDYEDKIMTFKDCLSSLDDSDISAADKNILLKSCIDKIIYYNDMPSKPGIGRYIENSFRLEIFLKL

SEQ ID NO: 4048 - protein, 523 aa, Unknown
  Description of Unknown: Integrase B4049 sequence
  PTHR30461:SF3,SM00857,G3DSA:1.10.10.2600,IPR036162,PS51737, G3DSA:3.40.50.1390,IPR006119,IPR038109,PF07508,IPR011109, SSF53041,PF00239,PTHR30461,PS51736,Coil, cd00338
MVSFDSIIIYLRKSRSDDPAQTVEEVLAKHERILQDYCMKEYGKAIPEKRIYREVVSGETIQDRPIMQQLLKELETGNISGVLIVEPQRLSRGDLQDCGQIINSFRYTNTAVITPGKTYDLSDEYDRKFFEMELTRGNDYLEYTKKILSRGRVASVRQGNYICSVRPYGYRKITLGSGKDKCHTLEIIPEEADAIRLMYHLYLDENMGFTNIARTLDSLHIKPLKSDNWSAATIRDMIDNPIYIGKVVWNSRKVVKKWENEQITKVRPRNKGDDVICVNGRHEAIIDEHTFEAARNKRGLTPKIKKFKELRNPLAGLLFCGTCGHGMSMKKYVDKRSHTGKVTTVMLCNQQAVCHTKSAQYEDILAKIKVSLANAISDFKIKLKEQENNNIDMHELRIASLEEELNRLYNKDVRQKDAYEDGIYTKEEYIERNSKLQERILNVKEEIADEKNNVPVKIDYEDKIMTFKDCLSSLDDSDISAADKNILLKSCIDKIIYYNDMPSKPGIGRYIENSFRLEIFLKL

SEQ ID NO: 4049 - protein, 523 aa, Unknown
  Description of Unknown: Integrase B4050 sequence
  PTHR30461:SF3,SM00857,G3DSA:1.10.10.2600,IPR036162,PF13408, PS51737,IPR025827,G3DSA:3.40.50.1390,IPR006119,IPR038109, PF07508,IPR011109,SSF53041,PTHR30461,Coil, PS51736,cd00338,PF00239
MNTARTVTVIPATLNLFTSTPKMSQNKRKVAAYARVSTDNEEQLSSYAAQVDYYTRYIKSKTEWDFVDIYTDEGITATNTKKRDGFKRMVKDALDGKIDLIVTKSVSRFARNTVDTLTTVRKLKEKGIEVYFEKENIYTLDSKGELLITIMSSLAQEESRSISENTTWGQRKRFADGKVSLPYKKFLGYERGEDGIPQIVEKEAKIVRLIYRLFLEGRTTTGIATHLTRLKVPTPAGKEKWTTSTIKSILTNEKYKGDALLQKSYTVDFLTKKKKKNEGEVPQYYVENSHEAIISPEVFDMVQYEFEKRKGRVQSGANCFSSKIVCGDCGRFYGSKIWHSNDKYRKIIWRCNAKFKNKEKCKTPHVTEQQIKEAFVKTVNSMIENKEQVIKDCKELILELTDTTLIEEKEIKLQGERSILYNSMKELIERNSRSKIDQIKYNERYEELRGRYDKVTEQLSKIEDLKFEMKAKEHKINEFIRNLKQSTEIITGFDEKLWYTLIGKVIINRDGNIKFEFKNGKII

SEQ ID NO: 4050 - protein, 523 aa, Unknown
  Description of Unknown: Integrase B4051 sequence
  cd03768,PTHR30461:SF3,SM00857,IPR036162,PF13408, IPR025827,PS51737,G3DSA:3.40.50.1390,IPR006119,PF07508, IPR011109,SSF53041,PTHR30461,PS51736,Coil, PF00239
MRFFSYGRKSVFSDKSDSIDNQFRMNREYCESKFSGQVDSWQQFSDEDFTGANTSRPDLQRMLSFIKGGFCDVLVVYQLDRLSRDVRDFANIYALLEEHGVMFISIKENIDTTTPIGRAMMYVTVVFAQMERETIAARVTDNMLGLAKKGYWTGGNPPVGYVRKHIVVNGKKHCSIEVDPDGARYVTQIFDTFLAYNCSLQGMETRFKNQGIRTQNGKFFSTAQLHKMLTMPYCVEATPEVYDFYAAKGCIMDPGSPREMWDGSAGVIIYGRSTEKNKKHQLQPPEKWTVCLGKHKPFMPAEKWLAVQSRFTQNKCIKDAKWPVPLLKGVLRCKCGNLMQVSRKKKVDGTCSSWYYCRKRMRQGVDACDMGQIKCDLLDEEVLELFRGITADPALIQKFVKAEAPADVPDLKAAQARVSACERKIGRLAASLALAEDSAASKYIIAEMERLDVELGALKREASLAEMESHQAAASAKDAKATAAEIAKLIHGLDGFDDKEKNAIARAVIQECTWDGERLFIKL

SEQ ID NO: 4051 - protein, 523 aa, Unknown
  Description of Unknown: Integrase B4052 sequence
  PTHR30461:SF3,SM00857,G3DSA:1.10.10.2600,IPR036162,PF13408, IPR025827,G3DSA:3.40.50.1390,PS51737,IPR006119,IPR038109, PF07508,SSF53041,IPR011109,PTHR30461,cd00338, PF00239
MPTSKNMARKYAAGGGSDNSCDVEPLRAVIYARYSSSGQREESIEGQLRDCYDFAKKHGIIVIGEYIDKAMTGRVDRRPDFQRMMKDSEKGRFNCVLLWKMDRFARNRYDSAMYKYKLKKNGIRIFYAKETIPDGPEGIILESVMEGYAEYYSENLAQNVKRGNYDSALELKTLGKTCLGLKTGPDGRYMVDQAEAAIVRRIFEEYAEGERAKDIYERLNSEGYRTSRGGKFNKNSLRRILSNKKYIGVYEYEDIYVENGIPAIITDRDLFERVQKMLKINHDAPARGKAQNFLLTTKLFCGLCGSPMIGDGGTSHTGKAYAYYSCTKRKRGRSCKKESVPKDWIEDLVVGELVKIVHNDELIEQIADRVMEYQKREKDQSGLHALEIRQKENEKAISNMLAAIEAGIITPSTKTRLMELEADRADIEKGIAHELLAEPEFERDQIIYFLERFRSGDINDEAYRIMLVDTFLNSVYLYDDDHLVLVMNYSGENCKVDLKLVEGAVSGDGCKGSAFAPSSALTF

SEQ ID NO: 4052 - protein, 523 aa, Unknown
  Description of Unknown: Integrase B4053 sequence
  SM00857,G3DSA:1.10.10.2600,IPR036162,PF13408,IPR025827, G3DSA:3.40.50.1390,PS51737,IPR006119,IPR038109,PF07508, IPR011109,SSF53041,PF00239,PTHR30461,PS51736, Coil,cd00338
MNENVCIYLRKSRADQEAELRGEGETLARHERILLDLAKSRNYSVGAIYREIVSGETISARPVMQQLLREVEAGSWDGVLVVEVERLARGDTIDQGVVSRAFQFSDTKIITPTKTYDPDNEFDEEYFEFGLFMSRREYKTIKRRLNAGRIASVKEGKYCGSKPPYGYERVKLHGEKGFTLQPVPDQAEVIKMIYSLYSGSSGDRIGVSKIVRKLNDMGIKSPSGKDWVPISVQDVLANPVYAGMIRWNGRKTVRAIQDGVVTQSRPRSKEDDILLFPGRHPAIVSKEMYDSVQQIRKKNPPRPISIKNTIKNPLAGIVYCSKCGRAMVRRPYQKRGQDDTLMCSYTSCPTVSSKLSLVERAVLNGIQDLVDEYRLNDAVPGPDINNAVKSKKKLIAEKEHELEKLNVQKMKQYDLLEQGIYTTEVFLERSNSIASSINSCQDSIECLKEEIRHDKELIDQRSSFIPRCENLLEIYWSLDTAAKNKMLKELIERVNYTKDVKNAFRMGNEATFVLDIFPRIQSN

SEQ ID NO: 4053 - protein, 523 aa, Unknown
  Description of Unknown: Integrase B4054 sequence
  cd03768,PTHR30461:SF3,SM00857,IPR036162,PF13408, IPR025827,PS51737,G3DSA:3.40.50.1390,IPR006119,PF07508, IPR011109,SSF53041,PTHR30461,PS51736,Coil, PF00239
MRFFSYGRKSVFSDKSDSIDNQFRMNREYCESKFSGQVDSWQQFSDEDFTGANTSRPDLQRMLSFIKGGFCDVLVVYQLDRLSRDVRDFANIYALLEEHGVMFISIKENIDTTTPIGRAMMYVTVVFAQMERETIAARVTDNMLGLAKKGYWTGGNPPVGYVRKHIVVDGKKHCSIEVDPDGARYVTQIFDTFLAYNCSLQGMETRFKNQGIRTQSGKFFSTTQLHKMLTMPYCVEATPEVYDFYAAKGCIMDPGSPREMWDGSVGVIIYGRSTEKNKKHQAQPPEKWTVCLGKHKPFMPAEKWLAVQSRFTQNKCIKDAKWPVPLLKGVLRCKCGNLMQVSRKKKVDGTCSSWYYCRKRMRQGVDACDMGQIKCDLLDEKVLELFRGITADPGLIQKFVKTKAPDDIPNLKAAQARVAACERKIGRLAASLALAEDSTASKYIIAEMERLDVELGALKREASLAEMENHRATANAKDAKATAVEIAKLIHGLEGFDDKERNTIARAVIQECTWDGERLFITL

SEQ ID NO: 4054 - protein, 523 aa, Unknown
  Description of Unknown: Integrase B4055 sequence
  PTHR30461:SF3,SM00857,G3DSA:1.10.10.2600,IPR036162,PF13408, IPR025827,G3DSA:3.40.50.1390,PS51737,IPR006119,IPR038109, PF07508,SSF53041,IPR011109,PF00239,PTHR30461, PS51736,Coil,cd00338
MDGLNLANVVIYARYSSVGQNDQSIDGQLTKCREYAQQHGFRVVAEYCDRALSGRYAETRPEFQRMIADSAKHAFEYVLVWKLDRFSRDRYDSAIYKKKLRANGVRVLSVTEGISENSESLLLEAILEAMAEEYSRQLAQNVRRGMRQNAEKGLSLGGLAPLGYDVINKRYEINEGEAQIVRYIHERYAAGTGQAQIVAECRERGYCCKRGNEFTVNAVNRILKNEKYAGTYICDDLILEDAVPAIVPKELKKKVRNRLAANAKAPGHAKAKVEYLLHGKLFCGECGAPMIGECGRGKNGTTHHYYTCATRKKSHSCKKRNEQKDALERFIVNYICMYVLTDEWINAAAERVVAEYRKSYDASGIKPLEKQIRDLDKELDKLVDTLINTASSAAIKRINERIDAAELKKSTLEADLASLRIASRVEIKKEDIAAWLNQFRNGNVDDIDYCKKVIESFVNAIYVYDDKIKMFFNSRESAQTTYPQMLAFDMPESSDLEASGVPSIDLSELFCFINGVIGIVVRR

SEQ ID NO: 4055 - protein, 523 aa, Unknown
  Description of Unknown: Integrase B4056 sequence
  SM00857,G3DSA:1.10.10.2600,IPR036162,PF13408,IPR025827, G3DSA:3.40.50.1390,PS51737,IPR006119,IPR038109,PF07508, SSF53041,IPR011109,PTHR30461,PS51736,cd00338, PF00239
MNESVCIYLRKSRADREAEAHGEGETLARHERILLELAKKKEYIVGAIYREVVSGETIADRPVMQQLLHEVESGMWDGVLVVEVERLARGDTIDQGVVSRAFQYSDTKIITPTKIYDPNNEFDEEYFEFGLFMSRREYKTIKRRLNNGRISSVKEGKYCGNKPPYGYERVKLEKEKGYTLRPVPAQAEIVKMIYTWYAGDGCEQIGVAKIVRKLNDMGIESALGGDWTPASIQGILTNPVYIGKIRWNGRKTVKTIQNGQVVKTRPRSKDVLICEGLHPAIISDDLYNSVQEIRKKNPPRPISIKNTVRNPLAGIVYCSKCGRAMVRRPHQKRGQEDTLMCPYTSCSTVSSKLSLVEKAVIDGIKELTEKYKLNNDINVPSNTINSGIVYKQNLIREKESELESLNVQKAKQYDLLEQGIYTTEVFLERSKTIAISIQSCSDTITKLREEIEHDENIKAQQSNFIPRCEELLNNYWDLNMESRNRMLKNLVEKVVYSKNMKNTYGKGNEINFELDIFPKIQEK

SEQ ID NO: 4056 - protein, 523 aa, Unknown
  Description of Unknown: Integrase B4057 sequence
  SM00857,G3DSA:1.10.10.2600,IPR036162,PF13408,IPR025827, G3DSA:3.40.50.1390,PS51737,IPR006119,IPR038109,PF07508, IPR011109,SSF53041,PF00239,PTHR30461,PS51736, Coil,cd00338
MNENVCIYLRKSRADQEAELRGEGETLARHERILLDLAKSRNYSVGAIYREIVSGETISARPVMQQLLREVEAGSWDGVLVVEVERLARGDTIDQGVVSRAFQFSDTKIITPTKTYDPDNEFDEEYFEFGLFMSRREYKTIKRRLNAGRIASVKEGKYCGSKPPYGYERVKLHGEKGFTLQPVPEQAEVIKMIYSLYSGASGDRIGVSKIVRKLNDMGIKSPSGKDWVPISVQDVLANPVYAGMIRWNGRKTVKAIQDGVVTQSRPRSKEDDILLFPGRHPAIVSKEMYDSVQQIRKKNPPRPISIKNTIKNPLAGIVYCSKCGRAMVRRPYQKRGQDDTLMCSYTSCPTVSSKLSLVERAVLNGIQDLVDEYRLNDAVPGPDINNAVKSKKKLIAEKEHELEKLNVQKMKQYDLLEQGIYTTEVFLERSNSIASSINSCQDSIECLKEEIRHDKELIDQQSSFIPRCENLLEIYWSLDTAAKNKMLKELIERVNYTKDVKNAFRMGNEATFVLDIFPRIQSN

SEQ ID NO: 4057 - protein, 523 aa, Unknown
  Description of Unknown: Integrase B4058 sequence
  cd03768,PTHR30461:SF3,SM00857,IPR036162,PF13408, PS51737,G3DSA:3.40.50.1390,IPR025827,IPR006119,PF07508, IPR011109,SSF53041,PTHR30461,PS51736,Coil, PF00239
MRFFSYGRKSVFSDKSDSIDNQFRMNREYCESKFSGQVDSWQQFSDEDFTGANTSRPDLQRMLSFIKGGFCDVLVVYQLDRLSRDVRDFANIYALLEEHGVMFISIKENIDTTTPIGRAMMYVTVVFAQMERETIAARVTDNMLGLAKKGYWTGGNPPVGYVRKHIVVNGKKHCSIEVDPDGARYVTQIFDTFLAYNCSLQGMETRFKNQGIRTQSGKFFSTTQLHKMLTMPYCVEATPEVYDFYAAKGCIMDPGSPREMWDGSVGVIIYGRSTEKNKKHQAQPPEKWTVCLGKHKPFMPAEKWLAVQSRFTQNKCIKDAKWPVPLLKGVLRCKCGNLMQVSRKKKVDGTCSSWYYCRKRMRQGVDACDMGQIKCDLLDEKVLELFRGITADPALIQKFVKSEAPADVPDLKAAQARVSACERKIGRLAASLALAEDSAASKYIIAEMERLDVELGALKREASLAEMESHRAAASAKDAKATAAEIAKLIHGLEGFDDKEKNAIARAVIQECTWDGERLFITL

SEQ ID NO: 4058 - protein, 523 aa, Unknown
  Description of Unknown: Integrase B4059 sequence
  PTHR30461:SF3,SM00857,G3DSA:1.10.10.2600,IPR036162,PS51737, G3DSA:3.40.50.1390,IPR006119,IPR038109,PF07508,IPR011109, SSF53041,PTHR30461,Coil,PS51736,cd00338, PF00239
MPNTKSFTVNEVLVYLRKSRSDSPDMSVEEVLRKHEEMIQQYASTHFHSPIPEKNIFREVVSGETIDSRPQMKNLLKMIESEQFKAVLVVEPQRLSRGDLEDCGRLINILRYTNTTVLTLTHSFNLQEEYERKFFEMEITRGNDYLEYTKRILKRGREASVAKGNYIGSVDPYGYKKTVIKKDGITCHTLEIIPEEADTVKLIHELYAYTPEGIGFTNIAHKLDAMHIKPKKAAHWTPAIISSILCNPLYLGMVRWNNRKVVKYINEGQLAKARPQNTEAKYYKGLHEPIITQKLYDACMARRGTNPSLRRNKELCNPFAGLLYCGTCGHAMSLKIYKNHNSVSQMMLCNHQAYCHTKSVLYSAFLRRFISSMEDTLNDFELAQKSDDGRTQAISKTIVINLENKLKKLNEKDARQKDAYEDGIYSKEEFLKRNVRTQQDIASTIIALEDARAKKADIIDYEEKIRRFKDCLHALNDPELSAAEKNRFLKSCVDKILYYNNMESKAGIGRYIENVFSLEIQYK

SEQ ID NO: 4059 - protein, 523 aa, Unknown
  Description of Unknown: Integrase B4060 sequence
  PTHR30461:SF3,SM00857,G3DSA:1.10.10.2600,IPR036162,PS51737, G3DSA:3.40.50.1390,IPR006119,IPR038109,PF07508,IPR011109, SSF53041,PF00239,PTHR30461,PS51736,Coil, cd00338
MVSFDSIIIYLRKSRSDDPAQTVEEVLAKHERILQDYCIKEYGKAIPEKRIYREVVSGETIQDRPVMQQLLKELEAENISGVLIVEPQRLSRGDLQDCGQIINSFRYTNTAVITPGKTYDLSDEYDRKFFEMELTRGNDYLEYTKKILSRGRVASVRQGNYICSVRPYGYRKITLGSGKDKCHTLEIIPEEADVIRLMYHLYIDENMGFTNIARTLDSLHIKPLKSDNWSAATIRDMIDNPIYIGKVVWNSRKVVKKWENEQITKVRPRNKGDDVICVNGRHEAIIDEHTFEAARNKRGLTPKVKKFKELRNPLAGLLFCGTCGHGMSMKKYVDKRSHTGKVTTVMLCNQQAVCHTKSAQYEDILAKIKVSLANAISDFKIKLKEQENNNIDMHELRIASLEEELNRLYNKDVRQKDAYEDGIYTKEEYIERNSKLQESILNVKEEIADEKNNVPVKIDYEDKIMTFKDCLSSLDDSDISAADKNILLKSCIDKIIYYNDMPSKPGIGRYIENSFRLEIFLKL

SEQ ID NO: 4060 - protein, 523 aa, Unknown
  Description of Unknown: Integrase B4061 sequence
  PTHR30461:SF3,SM00857,G3DSA:1.10.10.2600,IPR036162,PS51737, G3DSA:3.40.50.1390,IPR006119,IPR038109,PF07508,IPR011109, SSF53041,PF00239,PTHR30461,PS51736,Coil, cd00338
MVSFDSIIIYLRKSRSDDPAQTVEEVLAKHERILQDYCIKEYGKAIPEKRIYREVVSGETIQDRPVMQQLLKELEAENISGVLIIEPQRLSRGDLQDCGQIINSFRYTNTAVITPGKTYDLSDEYDRKFFEMELTRGNDYLEYTKKILSRGRVASVRQGNYICSVRPYGYRKITLGSGKDKCHTLEIIPEEADVIRLMYHLYIDENMGFTNIARTLDSLHIKPLKSDNWSAATIRDMIDNPIYIGKVVWNSRKVVKKWENEQITKVRPRNKGDDVICVNGRHEAIIDEHTFEAARNKRGLTPKVKKFKELRNPLAGLLFCGTCGHGMSMKKYVDKRSHTGKVTTVMLCNQQAVCHTKSAQYEDILAKIKVSLANAISDFKIKLKEQENNNIDMHELRIASLEEELNRLYNKDVRQKDAYEDGIYTKEEYIERNSKLQESILNVKEEIADEKNNVPVKIDYEDKIMTFKDCLSSLDDSDISAADKNILLKSCIDKIIYYNDMPSKPGIGRYIENSFRLEIFLKL

SEQ ID NO: 4061 - protein, 523 aa, Unknown
  Description of Unknown: Integrase B4062 sequence
  PTHR30461:SF3,SM00857,G3DSA:1.10.10.2600,IPR036162,PS51737, G3DSA:3.40.50.1390,IPR006119,IPR038109,PF07508,IPR011109, SSF53041,PTHR30461,Coil,PS51736,cd00338, PF00239
MPNIESFTVNEVLVYLRKSRSDSPDMSVEEVLRKHEEMIQQYASTHFQSPIPEKNIFREVVSGETIDSRPQMKNLLKMIESEQFKAVLVVEPQRLSRGDLEDCGRLINILRYTNTTVLTLTHSFNLQEEYERKFFEMEITRGNDYLEYTKRILKRGREASVAKGNYIGSVDPYGYKKTVIKKDGITCHTLEIIPEEADTVKLIHELYAYTPGGIGFTNIAHKLDAMHIKPKKAAHWTPAIISSILCNPLYLGMVRWNNRKVVKYINEGQLAKARPQNSESKYYKGLHEPIITQELYDACMARRGTNPSLRRNKELCNPFAGLLYCGTCGHAMSLKIYKNHNSVSQMMLCNHQAYCHTKSVLYSAFLRRFMSSMEDTLNDFELAQKSDDGRAQAISKTIVVNLENKLKKLNEKDARQKDAYEDGIYSKEEFLKRNVRTQQDIASTIIALEDARAKKADIIDYEEKIRRFKDCLHALNDPELSAAEKNRFLKSCVDKILYYNNMESKAGIGRYIENVFSLEIQYK

SEQ ID NO: 4062 - protein, 523 aa, Unknown
  Description of Unknown: Integrase B4063 sequence
  cd03768,PTHR30461:SF3,SM00857,IPR036162,PF13408, PS51737,G3DSA:3.40.50.1390,IPR025827,IPR006119,PF07508, IPR011109,SSF53041,PTHR30461,PS51736,Coil, PF00239
MRFFSYGRKSVFSDKSDSIDNQFRMNREYCESKFSGQVDSWQQFSDEDFTGANTSRPDLQRMLSFIKGGFCDVLVVYQLDRLSRDVRDFANIYALLEEHGVMFISIKENIDTTTPIGRAMMYVTVVFAQMERETIAARVTDNMLGLAKKGYWTGGNPPVGYVRKHIVVNGKKHCSIEVDPDGARYVTQIFDTFLAYNCSLQGMETRFKNQGIRTQSGKFFSTTQLHKMLTMPYCVEATPEVYDFYAAKGCIMDPGSPREMWDGSVGVIIYGRSTEKNKKHQAQPPEKWTVCLGKHKPFMPAEKWLAVQSRFTQNKCIKDAKWPVPLLKGVLRCKCGNLMQVSRKKKVDGTCSSWYYCRKRMRQGVDACDMGQIKCDLLDEKVLELFRGITADPALIQKFVKAEAPADVPDLKAAQARVSACERKIGRLAASLALAEDSAASKYIIVEMERLDVELGALKREASLAEMEGHRAAASAKDAKATAAEIAKLIHGLEGFDDKEKNAIARAVIQECTWDGERLFIKL

SEQ ID NO: 4063 - protein, 523 aa, Unknown
  Description of Unknown: Integrase B4064 sequence
  PTHR30461:SF3,SM00857,IPR036162,PF13408,IPR025827, G3DSA:3.40.50.1390,IPR006119,PF07508,SSF53041,IPR011109, PF00239,PTHR30461,PS51736,Coil,cd00338
MFFGIYGRKSVYSDKSDSVDNQHRMCNDYIKAHFKADDITLVTSYSDEDYTGANTKRPDLQRLLEDVKSGAINVLVVYQLDRISRDVRDFSNIYAMLEEYHVMFISIKENIDTTTPIGRAMMYVTVVFAQMERETIATRVRDNMIGLAKKGFWTGGNPPYGYVRKNILINGKKHVTIEPDPDGVAYNIWIYDSFLKNHCSLQSMETNFRKEGIKTRNGAFFSTTQLYKILTMPYCVEATPEIYDYFAAKGCQMDPDSPREKWDGSVGVMIYGRSTGVNKKHQLQPPEKWLVCLGLHKPFMPAAKWLAVQNQFSENKFDKTQKYDIPLLKGILRCSCGSIMAVSRKKKINGEVSSWYYCLRRMKNGVEACDRKQIKVDIIDQKLLNTLHSIEIDPSMIYRFVQKSELPLPDIKTINNKISSIESRIGRLASSLALADGSAASKYIVAEIERLDSDLQFLKRERAVINVEIKKRDELNESAEGKAQHIQNVMKGLNGFTAEEKNRIMRDILKECVWDGSELSIVL

SEQ ID NO: 4064 - protein, 523 aa, Unknown
  Description of Unknown: Integrase B4065 sequence
  PTHR30461:SF3,cd00338,SM00857,G3DSA:1.10.10.2600,IPR036162, PF13408,PS51737,IPR025827,G3DSA:3.40.50.1390,IPR006119, IPR038109,PF07508,IPR011109,SSF53041, PTHR30461,PS51736,Coil,PF00239
MDGLNLANVVIYARYSSVGQNDQSIDGQLTKCREYAQQHGFRVVSEYCDRALSGRYAETRPEFQRMIADSAKHAFEYVLVWKLDRFSRDRYDSAIYKKKLRANGVRVLSVTEGISENSESLLLEAILEAMAEEYSRQLAQNVRRGMRQSAEKGLSLGGIAPLGYDVINKRYEINEGEAQIVRYIHERYAAGTGQAQIVAECRERGYCCKRGNEFTVNAVNRILKNEKYAGTYICGDLILEDAVPAIVPKELKKKVRNRLAANAKAPGHAKAKVEYLLHGKLFCGECGAPMIGECGRGKNGTTHHYYTCATRKKSHSCKKRNEQKDALERFIVNYICMYVLTDEWINTAAERVVAEYRKSYDASGIKPLEKQIRDLDKELDKLVDTLINTASSAAIKRINERIDAAELKKSTLEADLASLRIASRVEIKKEDIAAWLHQFQNGNVDDIDYCKKVIESFVNAIYVYDDKIKMFFNSCESAQITYPQVLAFDMPESSDLEASGVPSIDLSELFYFINGVIGIVVRR

SEQ ID NO: 4065 - protein, 523 aa, Unknown
  Description of Unknown: Integrase B4066 sequence
  PTHR30461:SF3,cd00338,SM00857,G3DSA:1.10.10.2600,IPR036162, PF13408,PS51737,IPR025827,G3DSA:3.40.50.1390,IPR006119, IPR038109,PF07508,IPR011109,SSF53041,PTHR30461, PS51736,Coil,PF00239
MNENVTLIPARKRPGNRISKAVEKPKLKVAAYCRVSTDSDEQAGSYEVQVQHYTDYIGRNKEWEFAGIYADDGISGTNTKKREGFNGMIEDCMAGKIDMVITKSISRFARNTIDCLKYVRQLKEKNIAIIFEKENINTLEASGELLLTIMASLAQQESASLSQNVKLGLQFRYQDGKVQINHNHFLGYTKDENGNLIIEEEEAKVVRRIFREYLEGASFRDIAKGLERDKIKTGGKRYKWHLSTIQGILQNEKYMGDALLQKTITTDFIEKTRIKNDGSVPQYYVKDSQEAIIPRDIFTQVQEEMVRRANLFSGVENKKKRVYSSKYALSSICTCSKCGDIYRRIAWNNRGKHSIVWRCCTRVENGPSACDAPTVQETELQQATVQAINQLVKSSSTTLDVLMKNIEIALADDNAGELEKINALLSEKQKQLVKLAHAKKDYSSLADEIDLLRDKKQELLVAKAENEGFKKRIKELEEFLKEADQELTEYDESMVRRYIDKIVVYEDKFTVCFKAGVDLDIER

SEQ ID NO: 4066 - protein, 523 aa, Unknown
  Description of Unknown: Integrase B4067 sequence
  cd03768,PTHR30461:SF3,SM00857,IPR036162,PF13408, PS51737,G3DSA:3.40.50.1390,IPR025827,IPR006119,PF07508, IPR011109,SSF53041,PTHR30461,PS51736,Coil, PF00239
MRFFSYGRKSVFSDKSDSIDNQFRMNREYCESKFSGQVDSWQQFSDEDFTGANTSRPDLQRMLSFIKGGFCDVLVVYQLDRLSRDVRDFANIYALLEEHGVMFISIKENIDTTTPIGRAMMYVTVVFAQMERETIAARVTDNMLGLAKKGYWTGGNPPVGYVRKHIVVNGKKHCSIEVDPDGARYVTQIFDTFLAYNCSLQGMETRFKNQGIRTQSGKFFSTTQLHKMLTMPYCVEATPEVYDFYAAKGCIMDPGSPREMWDGSVGVIIYGRSTEKNKKHQAQPPEKWTVCLGKHKPFMPAEKWLAVQSRFTQNKCIKDAKWPVPLLKGVLRCKCGNLMQVSRKKKVDGTCSSWYYCRKRMRQGVDACDMGQIKCNLLDEKVLELFRGITADPALIQKFVKAEAPTDVPDLKAAQARVSACERKIGRLAASLALAEDSAASKYIIAEMERLDVELGALKREASLAEMESHRAAASAKDAKATAAEIAKLIHGLDGFDDKEKNAIARAVIQECIWDGERLFITL

SEQ ID NO: 4067 - protein, 523 aa, Unknown
  Description of Unknown: Integrase B4068 sequence
  cd03768,PTHR30461:SF3,SM00857,IPR036162,PF13408, IPR025827,PS51737,G3DSA:3.40.50.1390,IPR006119,PF07508, IPR011109,SSF53041,PTHR30461,PS51736,Coil, PF00239
MRFFSYGRKSVFSDKSDSIDNQFRMNREYCESKFSSQVDSWQQFSDEDFTGANTSRPDLQRMLSFIKNGFCDVLVVYQLDRLSRDVRDFANIYALLEEHGVMFISIRENIDTTTPIGRAMMYVTVVFAQMERETIAARVTDNMLGLAKKGYWTGGNPPVGYVRKHIVVNGKKHCSIEVDPDGARYVTQIFDTFLAYNCSLQGMETRFKNQGIRTRAGKFFSTTQLHKMLTMPYCVEATPEVYDFYAAKGCIMDPGSPREMWDGSVGVIIYGRSTEKNKKHQVQPPEKWTVCLGKHKPFMPAEKWLAVQSRFTQNKCIKDAKWPVPLLKGVLRCKCGNLMQISRKKKGDGTCSSWYYCRKRMRQGVDACDMSQIKCDLLDEKVLELFRGIAADPGLIQKFVKTKAPTDIPDLKAAQARLATCERKIGRLAASLALAEDSAASKYIIAEMERLDVELGALKREASLAEMESHRAAASAKDAKATAAEIAKLIHGLDGFDDKEKNAIARAVIQECTWDGERLFITL

SEQ ID NO: 4068 - protein, 523 aa, Unknown
  Description of Unknown: Integrase B4069 sequence
  SM00857,G3DSA:1.10.10.2600,IPR036162,PF13408,IPR025827, G3DSA:3.40.50.1390,PS51737,IPR006119,IPR038109,PF07508, SSF53041,IPR011109,PTHR30461,PS51736,cd00338, PF00239
MNESVCIYLRKSRADREAEAHGEGETLARHERILLELAKKKEYIVGAIYREVVSGETIADRPVMQQLLHEVESGMWDGVLVVEVERLARGDTIDQGVVSRAFQYSDTKIITPTKIYDPNNEFDEEYFEFGLFMSRREYKTIKRRLNNGRISSVKEGKYCGNKPPYGYERVKLEKEKGYTLRPVPAQAEIVKMIYTWYVGDGCEQIGVAKIVRKLNDMGIESALGGDWTPASIQGILTNPVYIGKIRWNGRKTVKTIQNGQVVKTRPRSKDVLICEGLHPAIISDDLYNSVQEIRKKNPPRPISIKNTVRNPLAGIVYCSKCGRAMVRRPHQKRGQEDTLMCPYTSCSTVSSKLSLVEKAVIDGIKELTEKYKLNNDINVPSNTINSGIVYKQNLIREKESELESLNVQKAKQYDLLEQGIYTTEVFLERSKTIAISIQSCSDTITKLREEIEHDENIKAQQSNFIPRCEELLNNYWDLNMESRNRMLKNLVEKVVYSKNMKNTYGKGNEINFELDIFPKIQEK

SEQ ID NO: 4069 - protein, 523 aa, Unknown
  Description of Unknown: Integrase B4070 sequence
  SM00857,G3DSA:1.10.10.2600,IPR036162,PF13408,IPR025827, G3DSA:3.40.50.1390,PS51737,IPR006119,IPR038109,PF07508, SSF53041,IPR011109,PF00239,PTHR30461,PS51736, Coil,cd00338
MNESVCIYLRKSRADREAEAHGEGETLARHQRILLDLAKKKEYIVGAIYREVVSGETIADRPVMQQLLREVESGMWDGVLVVEVERLARGDTIDQGVVSRAFQYSDTKIITPTKIYDPNNEFDEEYFEFGLFMSRREYKTIKRRLNNGRISSVKEGKYCGNKPPYGYERVKLEKEKGYTLRPIPAQAEVVKMIYTWYAGDGCEQIGVAKIVRKLNDMGIESALGGDWTPASIQGILTNPVYIGKIRWNGRKTVKTIQNGQVVKTRPRSMDVLICEGLHPAIISDDLYNSVQEIRQKNPYRPISIKNTVRNPLAGIVYCNKCGRAMVRRPYQKRGQEDTLMCPYTSCSTVSSKLSLVEKAVIDGIREIAEKYKLNNDINVPSNTIDSGITSKQNLIREKESELESLNAQKAKQYDLLEQGIYTTEVFLERSKTISASIQSCSDTIANLREEIEHDENIKAQQSDFVPRCEELLNNYWSLDTESRNRMLKNLVEKVVYSKNIKNTYGKGNEINFELDIFPRIQKK

SEQ ID NO: 4070 - protein, 523 aa, Unknown
  Description of Unknown: Integrase B4071 sequence
  cd03768,PTHR30461:SF3,SM00857,IPR036162,PF13408, PS51737,IPR025827,G3DSA:3.40.50.1390,IPR006119,PF07508, IPR011109,SSF53041,PTHR30461,PS51736,Coil, PF00239
MRFFSYGRKSVFSDKSDSIDNQFRMNREYCESKFSGQVDSWQQFSDEDFTGANTSRPDLQRMLSFIKGGFCDVLVVYQLDRLSRDVRDFANIYALLEEHGVMFISIKENIDTTTPIGRAMMYVTVVFAQMERETIASRVTDNMLGLAKKGYWTGGNPPVGYVRKHIVVNGKKHCSIEVDPDGARYVTQIFDTFLAYNCSLQGMETRFKNQGIRTQSGKFFSTTQLHKMLTMPYCVEATPEVYDFYAAKGCIMDPGSPREMWDGSVGVIIYGRSTEKNKKHQAQPPEKWTVCLGKHKPFMPAEKWLAVQSRFTQNKCIKDAKWPVPLLKGVLRCKCGNLMQVSRKKKVDGTCSSWYYCRKRMRQGVDACDMGQIKCDLLDEKVLELFRGITADPALIQKFVKAEAPADVPDLKAAQARVSACERKIGRLAASLALAEDSAASKYIIAEMERLDVELGALKREASLAEMESHRAAASAKDAKATAVEIAKLIHGLEGFDDKEKNAIARAVIQECTWDGERLFITL

SEQ ID NO: 4071 - protein, 523 aa, Unknown
  Description of Unknown: Integrase B4072 sequence
  cd03768,PTHR30461:SF3,SM00857,IPR036162,PF13408, PS51737,G3DSA:3.40.50.1390,IPR025827,IPR006119,PF07508, IPR011109,SSF53041,PTHR30461,PS51736,Coil, PF00239
MRFFSYGRKSVFSDKSDSIDNQFRMNREYCESKFSGQVDSWQQFSDEDFTGANTSRPDLQRMLSFIKGGFCDVLVVYQLDRLSRDVRDFANIYALLEEHGVMFISIKENIDTTTPIGRAMMYVTVVFAQMERETIAARVTDNMLGLAKKGYWTGGNPPVGYVRKHIVVNGKKHCSIEVDPDGARYVTQIFDTFLAYNCSLQGMETRFKNQGIRTQNGKFFSTAQLHKMLTMPYCVEATPEVYDFYAAKGCIMDPGSPREMWDGSAGVIIYGRSTEKNKKHQLQPPEKWTVCLGKHKPFMPAEKWLAVQSRFTQNKCIKDAKWPVPLLKGVLRCKCGNLMQVSRKKKVDGTCSSWYYCRKRMRQGVDACDMGQIKCDLLDEKVLELFRGITADPALIQKFVKAEAPADVPDLKAAQARVSACERKIGRLAASLALAEDSAASKYIIAEMERLDVELGALKREASLAEMESHQAAASAKDAKTTAAEIAKLIHGLDGFDDKEKNAIARAVIQECTWDGERLFIKL

SEQ ID NO: 4072 - protein, 523 aa, Unknown
  Description of Unknown: Integrase B4073 sequence
  PTHR30461:SF3,SM00857,G3DSA:1.10.10.2600,IPR036162,PS51737, G3DSA:3.40.50.1390,IPR006119,IPR038109,PF07508,SSF53041, IPR011109,PTHR30461,Coil,PS51736,cd00338, PF00239
MPNTESFTVNEILVYLRKSRSDSPDMSVEEVLRKHEEMIQQYASTHFHSPIPEKNIFREVVSGETIDSRPQMKNLLKMIESEQFKAVLVVEPQRLSRGDLEDCGRLINILRYTNTTVLTLTHSFNLQEEYERKFFEMEITRGNDYLEYTKRILKRGREASVAKGNYIGSVDPYGYKKTVIKKDGVTCHTLEIIPEEANTVKLIHELYAYTPEGIGFTNIAHKLDAMHIKPKKAAHWTPAIISSILCNPLYLGMVRWNNRKVVKYINEGQLAKARPQNTEAKYYKGLHEPIITQELYDTCMARRGTNPSLRRNKELCNPFAGLLYCGTCGHAMSLKIYKNHNSVSQMMLCNHQAYCHTKSVLYSAFLRRFMSSMEDTLNDFELAQKSDDGRAQAISKTIVVNLENKLKKLNEKDARQKDAYEDGIYSKEEFLKRNVRTQQDIASTIIALEDARAKKADIVDYEEKIRRFKDCLHALNDPELSAAEKNRFLKSCVDKILYYNNMESKAGIGRYIENVFSLEIQYK

SEQ ID NO: 4073 - protein, 523 aa, Unknown
  Description of Unknown: Integrase B4074 sequence
  PTHR30461:SF3,SM00857,G3DSA:1.10.10.2600,IPR036162,PS51737, G3DSA:3.40.50.1390,IPR006119,IPR038109,PF07508,SSF53041, IPR011109,PTHR30461,Coil,PS51736,cd00338, PF00239
MVSFDSIIIYLRKSRSDDPAQTVEEVLAKHERILQDYCMKEYGKAIPEKRIYREVVSGETIQDRPVMQQLLKELETGNISGVLIVEPQRLSRGDLQDCGQIINSFRYTNTAVITPGKTYNLSDEYDRKFFEMELTRGNDYLEYTKKILSRGRVASVRQGNYICSVRPYGYRKITLGSGKDKCHTLEIIPEEADAIRLMYHLYLDENMGFTNIARTLDSLHIKPLKSDNWSAATIRDMIDNPIYIGKVVWNSRKVVKKWENEQITKVRPRNKGDDVICVNGRHEAIIDEHTFEAARNKRGLTPKIKKFKELRNPLAGLLFCGTCGHGMSMKKYVDKRSHTGKVTTVMLCNQQAVCHTKSAQYEDILAKIKVSLANAIFDFEIKLKEQENNNIDMHELRMSSLLDELNRLYSKDVRQKDAYEDGIYTKEEYIERNSKLQERILNVKEDIADEKKNIPVKIDYEDKIITFKDCLASLDDPNISAADKNILLKSCIDKIIYYNDMPSKPGIGRYIENSFRLEIFLKL

SEQ ID NO: 4074 - protein, 523 aa, Unknown
  Description of Unknown: Integrase B4075 sequence
  SM00857,G3DSA:1.10.10.2600,IPR036162,PF13408,IPR025827, G3DSA:3.40.50.1390,PS51737,IPR006119,IPR038109,PF07508, IPR011109,SSF53041,PTHR30461,Coil,PS51736, cd00338,PF00239
MAKPEVSELAVVYARYSSHSQGEQSIEGQLSNARDYAAAHGYTIVHEYVDRAKSGRTDNRAEFQQMLKDTAKRQFSVIILWKVDRFGRNREEIAINKMKCRKNGVRVEYVAETIPDSPEGVILESVLEGFAEYYSLQLSQNIRRGRAESAEKCQSLGGNRPLGYKTGPDKKFVIDENTAPTVKMIFTMYADGKTVTEIVDKLNEMGLRTLRGGPFTKNSLHSILKNKKYIGVYEYQGREIKDGVPRIIEDDVFNKVQEMLKINKRAPAKTWSRADYILTDKLFCGKCGALMFGESGTSKTGVKHNYYICSNKKRFRSCDKKAVRQADIEDTVLNATHELLQDDELLDYIVDRTWEYYLAQDNSQEELRNLQRQLAQTDTAISNLIRAIEAGILTEETKKRMDELTQQKADLKASIADREIARGFHLQKSHIAFYLRSLRDADWSDKEAQKRLIQTFVNAVFVYDDHITLTYNFSGDKSTITLHDMQRFEDGEEFGCRASRSTKGVLHEPFYFVGGFAVTIWFR

SEQ ID NO: 4075 - protein, 523 aa, Unknown
  Description of Unknown: Integrase B4076 sequence
  cd03768,PTHR30461:SF3,SM00857,IPR036162,PF13408, IPR025827,PS51737,G3DSA:3.40.50.1390,IPR006119,PF07508, IPR011109,SSF53041,PTHR30461,PS51736,Coil, PF00239
MRFFSYGRKSVFSDKSDSIDNQFRMNREYCESKFSGQVDSWQQFSDEDFTGANTSRPDLQRMLSFIKGGFCDVLVVYQLDRLSRDVRDFANIYALLEEHGVMFISIKENIDTTTPIGRAMMYVTVVFAQMERETIAARVTDNMLGLAKKGYWTGGNPPVGYVRKHIVVNGKKHCSIEVDPDGARYVTQIFDTFLAYNCSLQGMETRFKNQGIRTQSGKFFSTTQLHKMLTMPYCVEATPEVYDFYAAKGCIMDPGSPREMWDGSVGVIIYGRSTEKNKKHQAQPPEKWTVCLGKHKPFMPAEKWLAVQSRFTQNKCIKDAKWPVPLLKGVLRCKCGNLMQVSRKKKVDGTCSSWYYCRKRMRQGVDACDMGQIKCDLLDEEVLELFRGITADPALIQKFIKAEAPADVPDLKAAQARVSACERKIGRLAASLALAEDSAASKYIIAEMERLDVELGALKREASLAEMESHRAAASAKDAKATATEIAKLIHGLDGFDDKEKNAIARAVIQECTWDGERLFIML

SEQ ID NO: 4076 - protein, 523 aa, Unknown
  Description of Unknown: Integrase B4077 sequence
  cd03768,PTHR30461:SF3,SM00857,IPR036162,PF13408, PS51737,IPR025827,G3DSA:3.40.50.1390,IPR006119,PF07508, IPR011109,SSF53041,PTHR30461,PS51736,Coil, PF00239
MRFFSYGRKSVFSDKSDSIDNQFRMNREYCESKFSGQVDSWQQFSDEDFTGANTSRPDLQRMLSFIKGGFCDVLVVYQLDRLSRDVRDFANIYALLEEHGVMFISIKENIDTTTPIGRAMMYVTVVFAQMERETIAARVTDNMLGLAKKGYWTGGNPPVGYVRKHIVVNGKKHCSIEVDPDGARYVTQIFDTFLAYNCSLQGMETRFKNQGIRTQSGKFFSTTQLHKMLTMPYCVEATPEVYDFYAAKGCIMDPGSSREMWDGSVGVIIYGRSTEKNKKHQAQPPEKWTVCLGKHKPFMPAEKWLAVQSRFTQNKCIKDAKWPVPLLKGVLRCKCGNLMQVSRKKKVDGTCSSWYYCRKRMRQGVDACDMGQIKCDLLDEKVLELFRGITADPALIQKFVKAEAPADVPDLKAAQARVSACERKIGRLAASLALAEDSAASKYIIAEMERLDVELGALKREASLAEMESHRAAASAKDAKATAAEIAKLIHGLDGFDDKEKNAIARAVIQECTWDGERLFIKL

SEQ ID NO: 4077 - protein, 523 aa, Unknown
  Description of Unknown: Integrase B4078 sequence
  PTHR30461:SF3,SM00857,G3DSA:1.10.10.2600,IPR036162,PS51737, G3DSA:3.40.50.1390,IPR006119,IPR038109,PF07508,SSF53041, IPR011109,PTHR30461,Coil,PS51736,cd00338, PF00239
MPNTESFTVNEVLVYLRKSRSDSPDMSVEEVLRKHEEMIQQYASTHFRSPIPEKNIFREVVSGETIDSRPQMKNLLKMIESEQFKAVLVVEPQRLSRGDLEDCGRLINILRYTNTTVLTLTHSFNLQEEYERKFFEMEITRGNDYLEYTKRILKRGREASVAKGNYIGSVDPYGYKKTVIKKDGITCHTLEIIPEEADTVKLIHELYAYTPGGIGFTNIAHKLDAMHIKPKKAAHWTPAIISSILCNPLYLGMVRWNNRKVVKYINEGQLAKARPQNTEAKYYKGLHEPIITQELYDACMARRGTNPSLRRNKELCNPFAGLLYCGTCGHAMSLKIYKNHNSVSQMMLCNHQAYCHTKSVLYSAFLRRFISSMEDTLNDFELAQKSDDGRTQAISKTIVINLENKLKKLNEKDARQKDAYEDGIYSKEEFLKRNVRTQQDIASTIIALEDARAKKADIVDYEEKIRRFKDCLHALNDPELSAAEKNRFLKSCVDKILYYNNMESKAGIGRYIENVFSLEIQYK

SEQ ID NO: 4078 - protein, 523 aa, Unknown
  Description of Unknown: Integrase B4079 sequence
  PTHR30461:SF3,SM00857,IPR036162,PF13408,PS51737, IPR025827,G3DSA:3.40.50.1390,IPR006119,PF07508,IPR011109, SSF53041,PTHR30461,Coil,PS51736,cd00338, PF00239
MNICCYGRKSIYSDHSDSIDNQFRMCRDYVEMKFSGQVDSFLEYQDEAFTGANIKRPDLQRLLVDIAAGNCDVLIVYQLDRLSRDVRDFANIYAILEEHHVKFISIKENIDTSTPIGRAMMYVTVVFAQMERETIAARVADNMIGLAKKGYWTGGNPPEGYVRTRIEANGKKHCSIVPDPEGVKYVNWIFDTFLQNDYSLQSMETAFKNQGIRTRRGAFFSTAQLHKILTMPYCVQATPEVYDYYVARGCQMDPESPRESWDGTCGVMIYGRTTQKNKKHQMQPPEKWLICLGAHEPFMPADKWLAVQARFCRNKFDKTMKYDVPLLKGVLRCSCGSIMCVARKKKKEGVSSWYYCLKRMRQGKEVCDSHQIKCELLDQKVLELLQSIERDPALIHQFAEQNAEVLAGPDPKVLASKISTCQTRIDRLVSSLSLAAESSAQKYILAELERLDLEIQALRREHNLALTAERNRTRQQQDTFSKVSEISRLIGDMDSFSASEKNAIVKDVIKKCVWDGESLSIML

SEQ ID NO: 4079 - protein, 523 aa, Unknown
  Description of Unknown: Integrase B4080 sequence
  cd03768,PTHR30461:SF3,SM00857,IPR036162,PF13408, PS51737,G3DSA:3.40.50.1390,IPR025827,IPR006119,PF07508, IPR011109,SSF53041,PTHR30461,PS51736,Coil, PF00239
MRFFSYGRKSVFSDKSDSIDNQFRMNREYCDTKFSGQVDSWQQFSDEDFTGANTQRPDLQRMLSFIKNGFCDVLVVYQLDRLSRDVRDFANIYSLLEEHGVMFVSIKENIDTTTPIGRAMMYVTVVFAQMERETIAARVTDNMLGLAKKGYWTGGNPPRGYVRKHIVVDGKKHCSIEPDPDGVRYVTRIFDTFLAMNCSLQGMETRFKNQGIRTESGKFFSTTQLHKILTMPYCVEATPEVYDFYASKGCIMDPGSPREKWDGSVGVIIYGRSTEKNKKHQAQPPEKWTVCLGMHKPFMPAEKWLAVQARFGQNKCIKDAKWPVPLLKGVLRCKCGNLMQVSRKKKVDGTCSSWYYCRKRMRQGVDACDMGQIKCDLLDNEVLELFRGIAADPAMIQKFVKAEAPDEVPDLKAAQARVSACENKIGRLAASLALAEESSASKYIIAEMERLDVELGALKREAALAEMESHRAAASAKDAKATAVEIAKLIHGLEGFDDKEKNAIARAVIQECTWDGERLFITL

SEQ ID NO: 4080 - protein, 523 aa, Unknown
  Description of Unknown: Integrase B4081 sequence
  PTHR30461:SF3,cd00338,SM00857,G3DSA:1.10.10.2600,IPR036162, PF13408,PS51737,G3DSA:3.40.50.1390,IPR025827,IPR006119, IPR038109,PF07508,IPR011109,SSF53041,PTHR30461, PS51736,Coil,PF00239
MNVSKNITIIPARRRVGNTAKSVQTPKIRVAAYCRVSTDSDEQATSYEAQVEHYTTYIRMNPEWEFAGIFADDGISGTNTKKREQFNRMIERAMAGEIDMIVTKSISRFARNTLDCLKFIRKLKEKNIPVYFEKENINTMDAKGEVLLTIMASLAQQESQSLSQNVKLGIQYRYQQGYVKVNHNRFLGYTKDENGKLIIEKEGAEVVKRIYREYLEGASLQKICMGLEADGILTGAGKKIWRSDALRLILKNEKYIGDALLQKTYTVDFLEKKRVPNDGLMPQYYVENSHEAIIPRDVFMRVQEEMHRRANLHSGRQGKKRVYSSKYALSSIVYCSNCGDIYRRIQWRAHGEKYTVWRCCNRVENGPAACDADAILEEELHDVVVQAINRTLSKRENMKVVLASNIESVLTEVNGIPLGTIDSQLEELQNELIKVANAKGNYDSITDEIYRLRELKQNAMKKTAECKGIRLRVEEMRRFLEEQEVDITEYDERLTRRLIKRITVYDDHYSVEFKSGISVDIHK

SEQ ID NO: 4081 - protein, 523 aa, Unknown
  Description of Unknown: Integrase B4082 sequence
  PTHR30461:SF3,SM00857,G3DSA:1.10.10.2600,IPR036162,PS51737, G3DSA:3.40.50.1390,IPR006119,IPR038109,PF07508,IPR011109, SSF53041,PF00239,PTHR30461,Coil,cd00338
MYQLPNLQSSQVLIYLRKSRADDPSLSVEEVLSKHEQMLNEWAARSLPEPHVVPEENRYREVVSGETIDSRPKMQELLRRIESPSIRAVLVVEPQRLSRGDLEDIGRIVKILRYTNTLVITLQYSYDMHDAHDRDAFERELKRGNEFLEYQKRIMNNGKVLSVKNGNYIGNVPPYGYRKVRIKDGKRYAYTLEPDPIEAPILKAIFTWYADGIGTTHICDKLEEMGVKPRKAKAWSPYSIAGFFNNQHYIGKVIWAHRATVRTIENGDVVVRRPRADDYMVFDGKHEPLIDMELWNRVQAIKSLYPPVKKGRDVKSPYAGMMYCKKCGRAIKRQTYTTGEIRYVCINQRACKTASCTDIEMRDAVAKLLSDSLEAFEVQLEQMEEKNKAAAMRQDILSSLKQRLEDLYALEAAQWNEKAKGAMPDRVFERLNAEVVSEIESIQKSIAESEANPPEPCDIAERIVAFQTALDLLMDDTAPAKEKNALLKMCFSRIWYSRKQKDAEYGRRWGQSHPISLLAELKV

SEQ ID NO: 4082 - protein, 523 aa, Unknown
  Description of Unknown: Integrase B4083 sequence
  cd03768,PTHR30461:SF3,SM00857,IPR036162,PF13408,PS51737,G3DSA:3 .40.50.1390,IPR025827,IPR006119,PF07508,IPR011109,SSF53041, PTHR30461,PS51736,PF00239
MRFFSYGRKSVFSDKSDSIDNQFRMNREYCESKFSGQVDSWQQFSDEDFTGANTSRPDLQRMLSFIKGGFCDVLVVYQLDRLSRDVRDFANIYALLEEHGVMFISIKENIDTTTPIGRAMMYVTVVFAQMERETIAARVTDNMLGLAKKGYWTGGNPPVGYVRKHIIVNGKKHCSIEVDPDGARYVTQIFDTFLAYNCSLQGMETRFKNQGIRTQSGKFFSTTQLHKMLTMPYCVEATPEVYDFYAAKGCIMDPGSPREMWDGSVGVIIYGRSTEKNKKHQAQPPEKWTVCLGKHKPFMPAEKWLAVQSRFTQNKCIKDAKWPVPLLKGVLRCKCGNLMQVSRKKKVDGTCSSWYYCRKRMRQGVDACDMGQIKCDLLDEEVLELFRGITADPALIQKFVKAEAPADVPDLKAAQARVSACERKIGRLAASLALAEDSAASKYIIAEMERLDVELGALKRETSLAEMESHRAAASAKDAKATAAEIAKLIHGLDGFDDKEKNAIARAVIQECTWDGERLFITL

SEQ ID NO: 4083 - protein, 523 aa, Unknown
  Description of Unknown: Integrase B4084 sequence
  PTHR30461:SF3,IPR036162,PS51737,IPR011109,PTHR30461, PF00239,G3DSA:1.10.10.2600,IPR006119,SSF53041,cd00338, SM00857,IPR025827,IPR038109,mobidb-lite,PS51736, PF13408,G3DSA:3.40.50.1390,PF07508,Coil
MARKKNIAAGQNAVIYARYSSHNQREVSIEQQVRECMKHAAELGLHVVGTYEDRAISGKTDKRPNFQRMMRDAEKGKFQAVVAWKSNRIGRNMLQAMVNEAKLEDCGVKVFYAEEDFDDTAAGRFALRNMMNVNQFYSENMAEDITRGLYDNASKCMANGRQPLGYKRGEDGRVVLDEANAAVVREIFTRVAAGDLFVDIARDLNAQGIKTSKGANWNKGSFQSICQNERYRGIYIYGDVRVVDGIPRIVSDDLWYRVQEAMRMKKNPVGTRHRVGAEDYLLTGKLRCGHCGSYMTGVSGTSRNGELHYYYTCQKRRTEHACDKKNIRRDVIEPAVAQAIKMYCLTDDVIEWMADRTVEYWEKHDNDLQIEALEQQLEENKKATSNMLKAIEMGIITEATRTRMVELETEQSRLSVQLNAAKEDVVKIDREQIISYLELLQQGDIHDRDFQMELFKNFLVAVYVYDDNRMKLVFSCMGDQNSVEIPLETGEDPPDGGLSPGAKMFVLTPDSSTIGSNKSYKHR

SEQ ID NO: 4084 - protein, 523 aa, Unknown
  Description of Unknown: Integrase B4085 sequence
  cd03768,PTHR30461:SF3,SM00857,IPR036162,PF13408, PS51737,IPR025827,G3DSA:3.40.50.1390,IPR006119,PF07508, IPR011109,SSF53041,PTHR30461,PS51736,Coil, PF00239
MRFFSYGRKSVFSDKSDSIDNQFRMNREYCESKFSGQVDSWQQFSDEDFTGANTSRPDLQRMLSFIKGGFCDVLVVYQLDRLSRDVRDFANIYALLEEHGVMFISIKENIDTTTPIGRAMMYVTVVFAQMERETIAARVTDNMLGLAKKGYWTGGNPPVGYVRKHIVVNGKKHCSIEVDPDGARYVTQIFDTFLAYNCSLQGMETRFKNQGIRTQNGKFFSTAQLHKMLTMPYCVEATPEVYDFYAAKGCIMDPGSPREMWDGSAGVIIYGRSTEKNKKHQLQPPEKWTVCLGKHKPFMPAEKWLAVQSRFTQNKCIKDAKWPVPLLKGVLRCKCGNLMQVSRKKKVDGTCSSWYYCRKRMRQGVDACDMGQIKCDLLDEKVLELFRGITADPALIQKFVKAEAPADVPDLKAAQARVSACERKIGRLAASLALAEDSAASKYIIAEMERLDVELGALKREASLAEMESHQAAASAKDAKATAAEIAKLIHGLDGFDDKEKNAIARAVIQECTWDGERLFIKL

SEQ ID NO: 4085 - protein, 523 aa, Unknown
  Description of Unknown: Integrase B4086 sequence
  PTHR30461:SF3,cd00338,SM00857,G3DSA:1.10.10.2600,IPR036162, PF13408,PS51737,G3DSA:3.40.50.1390,IPR025827,IPR006119, IPR038109,PF07508,IPR011109,SSF53041,PTHR30461, PS51736,Coil,PF00239
MARKKNIAAGQNAVIYARYSSHNQREVSIEQQVRECMKHAAELGLHVVGTYEDRAISGKTDKRPNFQRMMRDAEKGKFQAVVAWKSNRIGRNMLQAMVNEAKLEDCGVKVFYAEEDFDDTAAGRFALRNMMNVNQFYSENMAEDITRGLYDNASKCMANGRQPLGYKRGEDGRVVLDEANAAVVREIFTRVAAGDLFVDIARDLNAQGIKTSKGANWNKGSFQSICQNERYRGIYIYGDVRVADGIPRIVSDDLWYRVQEAMRMKKNPVGTRHRVGAEDYLLTGKLRCGHCGSYMTGVSGTSRNGELHYYYTCQKRRTEHACDKKNIRRDVIEPAVAQAIKMYCLTDDVIAWIADRTVEYWEKHDNDLQIEALEQQLEENKKATSNMLKAIEMGIITEATRTRMVELETEQSRLSVQLNAAKEDVVKIDREQIISYLELLQQGDIHDRDFQMELFKNFLVAVYVYDDNRMKLVFSCMGDQNSVEIPLETGEDPPDGGLSPDAKMFVLTPDSSTIQFVLEPDSL

SEQ ID NO: 4086 - protein, 523 aa, Unknown
  Description of Unknown: Integrase B4087 sequence
  SM00857,G3DSA:1.10.10.2600,IPR036162,PF13408,IPR025827, G3DSA:3.40.50.1390,PS51737,IPR006119,IPR038109,PF07508, IPR011109,SSF53041,PTHR30461,Coil,PS51736, cd00338,PF00239
MPDYAIYLRKSRKDNEAEQRGEGETLARHRKLLLDYAKCEGLRIAKIYEEVVSGESIATRPQMQLLLADVEQGLYDGVLVVEVERLARGDTMDQGLVAQTFKYSNTKIYTPMKVYDPNNEFDEEYFEFGLFMSRREYKTINRRLQRGRRASASEGKYIAGRAPYGYEKIKIPNDKGNTLRIIPEQAEVIKQIYDWYVNGLDGEDAGLSKIATKLNSLGIKPYRNDYWSKETLRDIITNPVYAGFIRWGYRRNKKTVVDGKTVTSRPVTLDENCVLSKGLHEAIITQELYDKAQRKIKSIPPPPVGYKKELKGSLAGIVICKNCGHKMTLRSPSTKGKPPYLVCHYRYCDNVSTPYDIVEKRVLDTLKEWAEKYKLKEKQSKKNSSSSIDMLKSSVESAKKKVATLQQQLDGMCDLLEQGIYTPDMFRQRSVSVTERITKAKAEYEQLSEQLESMEKLLTEKSEFIPKVEHVLKIYDTLSTPADKNRVLKEVIDHAEYSKAKSGAYKGVSVDDFNLTVFPKMPL

SEQ ID NO: 4087 - protein, 523 aa, Unknown
  Description of Unknown: Integrase B4088 sequence
  cd03768,PTHR30461:SF3,SM00857,IPR036162,PF13408, IPR025827,G3DSA:3.40.50.1390,PS51737,IPR006119,PF07508, SSF53041,IPR011109,PTHR30461,PS51736,Coil, PF00239
MRFFSYGRKSVFSDKSDSIDNQFRMNREYCESKFSGQVDSWQQFSDEDFTGANTSRPDLQRMLSFIKGGFCDVLVVYQLDRLSRAVRDFANIYALLEEHGVMFISIKENIDTTTPIGRAMMYVTVVFAQMERETIAARVTDNMLGLAKKGYWTGGNPPVGYVRKHIVVNGKKHCSIEVDPDGARYVTQIFDTFLAYNCSLQGMETRFKNQGIRTQSGKFFSTTQLHKMLTMPYCVEATPEVYDFYAAKGCIMDPGSPREMWDGSVGVIIYGRSTEKNKKHQAQPPEKWTVCLGKHKPFMPAEKWLAVQSRFTQNKCIKDAKWPVPLLKGVLRCKCGNLMQVSRKKKVDGTCSSWYYCRKRMRQGVDACDMGQIKCDLLDEEVLELFRGITADPTLIQKFVKAEAPADVPDLKAAQARVSACERKIGRLAASLALAEDSAASKYIIAEMERLDVELGALKREASLAEMESHRAAASAKDAKATAAEIAKLIHGLDGFDDKEKNAIARAVIQECTWDGERLFIKL

SEQ ID NO: 4088 - protein, 523 aa, Unknown
  Description of Unknown: Integrase B4089 sequence
  SM00857,G3DSA:1.10.10.2600,IPR036162,PF13408,IPR025827, G3DSA:3.40.50.1390,PS51737,IPR006119,IPR038109,PF07508, IPR011109,SSF53041,PF00239,PTHR30461,PS51736, Coil,cd00338
MNENVCIYLRKSRADQEAELRGEGETLARHERILLDLAKSRNYSVGAIYREIVSGETISARPVMQQLLREVEAGSWDGVLVVEVERLARGDTIDQGVVSRAFQFSDTKIITPTKTYDPDNEFDEEYFEFGLFMSRREYKTIKRRLNAGRIASVKEGKYCGSKPPYGYERVKLHGEKGFTLQPVPDQAEVIKMIYSLYSGAFGDRIGVSKIVRKLNDMGIKSPSGKDWVPISVQDVLANPVYAGMIRWNGRKTVRAIQDGVVTQSRPRSKEDDILLFPGRHPAIVSKEMYDSVQQIRKKNPPRPISIKNTIKNPLAGIVYCSKCGRAMVRRPYQKRGQDDTLMCSYTSCPTVSSKLSLVERAVLNGIQDLVDEYRLNDTVPGPDINNAVKSKEKLIAEKEHELEKLNVQKMKQYDLLEQGIYTTEVFLERSNSIASSINSCQDSIECLKEEIRHDKELIDQQSSFIPRCENLLEIYWSLDTAAKNKMLKELIERVNYTKDVKNAFRMGNEATFVLDIFPRIQSN

SEQ ID NO: 4089 - protein, 523 aa, Unknown
  Description of Unknown: Integrase B4090 sequence
  cd00338,SM00857,G3DSA:1.10.10.2600,IPR036162,PF13408, PS51737,G3DSA:3.40.50.1390,IPR025827,IPR006119,IPR038109, PF07508,IPR011109,SSF53041,PTHR30461,PS51736, Coil,PF00239
MSNYLENNCIYLRKSRADREAEARGEGETLARHERILLDLAKKRGCHIGAIYKEVVSGETISARPVMQQLLREVEAGMWDGVLVVEIERLARGDTIDQGTVSRAFQYSDTKIITPAKVYDPNNEFDEEYFEFGLFMSRREYKTIKRRLNAGRISSVKEGKYCGNRPPYGYERVKLEHEKGFSLRPLPDEAEIVKLIFNWYVYGVDGERLGMAKIARRLNNMNVVTQKGRDWTIPSVSSILQNPVYAGKIRWNSRKVVRKIENGSVVLSRPRSNDVLLADGRHESLISWDLYQKAMDLKSKNPPRPVPTYSTVKNPLSGIIYCKKCGRSMVRRPYAKRGQEDSLICPYTSCNTVSSKLSLVEKAVITGLSDLVQNYKLNDTLQDHSGMDMIAAKEALIASKKEELKKLNAQKLKQYDLLEQGIYTSEIFLERSSINAQQIQSCTKSIEDLQVELEHDQQLLAQKNTFIPRCENLLSNYWSWDAKTRNDVLKELIERIDYSKDTKNAFRKGNDITFSLDIYPKIQ

SEQ ID NO: 4090 - protein, 523 aa, Unknown
  Description of Unknown: Integrase B4091 sequence
  cd00338,SM00857,G3DSA:1.10.10.2600,IPR036162,PF13408, PS51737,G3DSA:3.40.50.1390,IPR025827,IPR006119,IPR038109, PF07508,IPR011109,SSF53041,PTHR30461,PS51736, Coil,PF00239
MVQEKLRAVFYARVSTEEERQLNALEKQVAECKDAILQKGWKLVDQYVDEGKSGTQIKRRDEYRRLFEDLENDKFDIVVIKSQDRLQRNTLDWYIWIDRLTTHGKRLYMYLEDTFYSPDNALISGIKAILAEEYSRELSKKINNSYKRRIEAAKNGEKISIVNNSRSLGYDKVNGELVINEKEAEVVRMIFNMYASGEGLRAISNTLYDMGYRNRSGNEIDPTTISRMLSSEKYKGVYVINQRHYDFDTKKTVLNPKSEWVHIPGAVPAIVEPELWDRVQEIKGSKVQSIKNEKRGRNCGKSIFSGKIYCAKCGAKYWRSLENGYVKFKCSSYSKYGKIPGKGCDNKSFSENALYSILQSLSEQIVEVNTAEVRKSLLNWLESLRERLRASQGDDTIKEEIRKQTARKEKLTDAYMDGIISKEDYSKRYKELEKTLEDLKDKLLTLEVNEDLQSIEEVIQNIDKEMEEYLQTQSFNESRVEFLNQHLTKVTVNKDSFLLEFDLIGGAILTGKDFYLFVDNPRK

SEQ ID NO: 4091 - protein, 523 aa, Unknown
  Description of Unknown: Integrase B4092 sequence
  cd03768,PTHR30461:SF3,SM00857,IPR036162,PF13408, PS51737,G3DSA:3.40.50.1390,IPR025827,IPR006119,PF07508, IPR011109,SSF53041,PTHR30461,PS51736,Coil, PF00239
MRFFSYGRKSVFSDKSDSIDNQFRMNREYCESKFSGQVDSWQQFSDEDFTGANTSRPDLQRMLSFIKGGFCDVLVVYQLDRLSRDVRDFANIYALLEEHGVMFISIKENIDTTTPIGRAMMYVTVVFAQMERETIAARVTDNMLGLAKKGYWTGGNPPVGYVRKHIVVDGKKHCSIEVDPDGARYVTQIFDTFLAYNCSLQGMETRFKNQGIRTQSGKFFSTTQLHKMLTMPYCVEATPEVYDFYAAKGCIMDPGSPREMWDGSVGVIIYGRSTEKNKKHQAQPPEKWTVCLGKHKPFMPAEKWLAVQSRFTQNKCIKDAKWPVPLLKGVLRCKCGNLMQVSRKKKVDGTCSSWYYCRKRMRQGVDACDMGQIKCDLLDEKVLELFRGITADPGLIQKFVKTKAPDDIPNLKAAQARVSACERKIGRLAASLALAEDSTASKYIIAEMERLDVELGALKREASLAEMENHRATANAKDAKVTAAEIAKLIHGLEGFDDKEKNAIARAVIQECTWDGERLFITL

SEQ ID NO: 4092 - protein, 523 aa, Unknown
  Description of Unknown: Integrase B4093 sequence
  SM00857,G3DSA:1.10.10.2600,PS51736,PF13408,PS51737, IPR025827,G3DSA:3.40.50.1390,IPR036162,IPR006119,IPR038109, PF07508,IPR011109,SSF53041,PTHR30461,Coil, mobidb-lite,cd00338,PF00239
MYEEIKTACLYLRYSSSNQTEQSIEGQMHVCQDFCKRHNIRIVEMYIDRATSASKDIEKRVGFLKMIKDSEKGNFDAVIVYKLDRFARSRYDSATYKYRLKRNGVQLVSATENITQDPEGIILESVLEGMAEFYSAELSQKIGRGMKESAMKHNSTGGVIPLGYKIVNKKLIIDESTAPIVREAFQRYADGESVAEICRTFNARGYKTAKGANFGKSSFTLMFRNEKYIGTYRYSDYQAKDAIPAIIDKDLWDKVQMRVGKTQKAPARNKAKHVYLLTGKLFCGHCRSTMNGDCNSDGYLYYRCYGKKMHKNCTKRNVGKNFIETLVVQDAISFLTDDYIEKIATIACDRNKQEIESASPIPMIQDRIAQIDVSLTNLLKAIEIGATPDTLVQRMKELETEKKSMEIQLKKEMGNQVYIDKEQVIFWLEKFKNGNINDEQFCQTVIDLFINSVTIWDDDNNTFKVTIAYNISSIPTKTYRPSKDGRSSDFTSNGQGLSANPTIHENVLIRTFQISIPHHKIVK

SEQ ID NO: 4093 - protein, 523 aa, Unknown
  Description of Unknown: Integrase B4094 sequence
  PTHR30461:SF3,cd00338,SM00857,G3DSA:1.10.10.2600,IPR036162, PS51737,G3DSA:3.40.50.1390,IPR006119,IPR038109,PF07508, SSF53041,IPR011109,PTHR30461,PS51736,Coil, PF00239
MVSFDNIIIYLRKSRSDDPVQTVEEVLAKHERILQDYCMKEYGKAIPEKRIYREVVSGETIQDRPIMQKLLKELETDNISGVLIVEPQRLSRGDLQDCGQIINSFRYTNTAVITPTKTYNLSDEYDRKFFEMELTRGNDYLEYTKKILNRGRVASVKQGNYICSVRPYGYKKIVIGTGKDKCHTLEIIPEEAEAIKLMYHLYLDENMGFTNIARTLDSMHIKPLKSSNWSAATIRDMIDNPIYIGKIVWNNRKVVKKWENEQIIKVRPRNKGDDVICVDGKHEAIIDEETFNAARQKRGLTPKVRKFKELRNPLAGILFCSTCGHSMSMKKYVDKRSHTGKVTTIMLCNKQAVCHTKSAQYEQIVAKIKESLADAIANFEIKMKEQENNNIDIHKQRITSLKDELNRLYNKDVRQKDAFEDGIYTKEEYIERNSKLQSQILNIKAEIENEKNNTPVIIDYQNKITTFTECLTSLDDDSISAADKNSLLKNCIDKIIYHNDMPSLPGIGRYIENSFRLEIFLKM

SEQ ID NO: 4094 - protein, 523 aa, Unknown
  Description of Unknown: Integrase B4095 sequence
  PTHR30461:SF3,SM00857,G3DSA:1.10.10.2600,IPR036162,PF13408, PS51737,G3DSA:3.40.50.1390,IPR025827,IPR006119,IPR038109, PF07508,IPR011109,SSF53041,PF00239,PTHR30461, PS51736,Coil,cd00338
MAEKTITVIPARKRVGSRKQVTEEKPKLRVAAYCRVSTDRDEQESSYEAQVEHYTEFIDRNPEWQLAGIYADDGISGTNTKKREEFNRMIEDCMASKIDMVITKSISRFARNTLDCLKYIRQLKEKNISVYFEKENINTMDAKGEVLLTIMASLAQQESQSLSQNVKLGLQFRYQAGKVQVNHNRFLGYTKDDEGNLVIVPEEAEIVLRIYREYLEGASLFQIGQGLEADGIKTAAGSDYWLQSTLKKILTNEKYIGDALLQKTYTVDFLNKKRVANNGIVPQYYVENSHPAIIPREKFMKVREEMYRRAHMECGPDQKRRIYSSRYALSSIVYCAHCNDIFRRINWNNRGCKSTVWRCLSRVEKDRPSCTARTVKEELLHEVVVRAVNEVITGSSSFIPALQASFERCLGDSNSAAVEGIDAHLLELQQELLKLANAKQNYETLADEIDELRAEKEELLLQEANKEGIRQRIADMMAYLQSEPEEVTEYSEALVRRMIEKITVYDDHFVVEFKSGIEITINE

SEQ ID NO: 4095 - protein, 523 aa, Unknown
  Description of Unknown: Integrase B4096 sequence
  cd03768,PTHR30461:SF3,SM00857,IPR036162,PF13408, IPR025827,G3DSA:3.40.50.1390,PS51737,IPR006119,PF07508, SSF53041,IPR011109,PTHR30461,PS51736,Coil, PF00239
MRFFSYGRKSVFSDKSDSIDNQFRMNREYCESKFSGQVDSWQQFSDEDFTGANTSRPDLQRMLSFIKGGFCDVLVVYQLDRLSRDVRDFANIYALLEEHGVMFISIKENIDTTTPIGRAMMYVTVVFAQMERETIAARVTDNMLGLAKKGYWTGGNPPVGYVRKHIVVNGKKHCSIEVDPDGARYVTQIFDTFLAYNCSLQGMETRFKNQGIRTQSGKFFSTTQLHKMLTMPYCVEATPEVYDFYAAKGCIMDPGSPREMWDGSVGVIIYGRSTEKNKKHQAQPPEKWTVCLGKHKPFMPAEKWLAVQSRFTQNKCIKDAKWPVPLLKGVLRCKCGNLMQVSRKKKVDGTCSSWYYCRKRMRQGVDACDMGQIKCDLLDEEVLELFRGITADPALIQKFVKAEAPADVPDLKAAQARVSACERKIGRLAASLALAEDSAASKYIIAEMERLDVELGALKREASLAEMESHQAAASAKDAKATAAEIAKLIHGLDGFDDKEKNAIARAVIQECTWDGERLFIKL

SEQ ID NO: 4096 - protein, 523 aa, Unknown
  Description of Unknown: Integrase B4097 sequence
  cd03768,PTHR30461:SF3,SM00857,IPR036162,PF13408, PS51737,IPR025827,G3DSA:3.40.50.1390,IPR006119,PF07508, IPR011109,SSF53041,PTHR30461,PS51736,Coil, PF00239
MRFFSYGRKSVFSDKSDSIDNQFRMNREYCESKFSGQVDSWQQFSDEDFTGANTSRPDLQRMLSFIKGGFCDVLVVYQLDRLSRDVRDFANIYALLEEHGVMFISIKENIDTTTPIGRAMMYVTVVFAQMERETIAARVTDNMLGLAKKGYWTGGNPPVGYVRKHIVVNGKKHCSIEVDPDGARYVTQIFDTFLAYNCSLQGMETRFKNQGIRTQNGKFFSTAQLHKMLTMPYCVEATPEVYDFYAAKGCIMDPGSPREMWDGSVGVIIYGRSTEKNKKHQAQPPEKWTVCLGKHKPFMPAEKWLAVQSRFTQNKCIKDAKWPVPLLKGVLRCKCGNLMQVSRKKKVDGTCSSWYYCRKRMRQGVDACDMGQIKCDLLDEEVLELFRGITADPALIQKFVKAEAPADVPDLKAAQARVSACERKIGRLAASLALAEDSAASKYIIAEMERLDVELGALKREASLAEMESHRAAASAKDAKATAAEIAKLIHGLDGFDDKEKNAIARAVIQECTWDGERLFITL

SEQ ID NO: 4097 - protein, 523 aa, Unknown
  Description of Unknown: Integrase B4098 sequence
  SM00857,G3DSA:1.10.10.2600,IPR036162,PF13408,PS51737, G3DSA:3.40.50.1390,IPR025827,IPR006119,IPR038109,PF07508, IPR011109,SSF53041,PTHR30461,Coil,PS51736, cd00338,PF00239
MVKNRAAIYARFSSHNQRSESIEIQVENSREYCEREGLHVVREYCDYAQTGRNVDRAEFQRMMSDAKLGLFDFVVIYKVTRIMRNRDEMALARIMLRKAGVEILYAGEEIASGSSGVLQLGMLEVLAEWESAIDSERIRDGIQKNAERCMANGRTLYGWDIVEGRYAINEREAAVLRRMKNLLFSGNSVAEIVRAVDAERSKRGAKFNQDTVTKLLKRVQNAGVYKYAGHEVEGGMPALWSQAEQDMINSILSDRHRPRRKVDSALEFPLSGKLYCARCGMPMAGTSGTSKNGSAYHYYKCRKCRRTVRRDLIEDAVVDMTYEAVKQADVRKRIAKTLAGYEAERATEEKPESYFIKKEIRRIDTAFERIWQAIEDGIAPPGGRERTTELKRQRAELEARLRVAEQAESLEPSVDDVLLWLDDLANDTTPLEILNEFVRFVEIDGKDVTVYFMFDELPDDFTPKQKKAEHPCYQRCSTNSLVVELMRKTANSTSTANRAAIHLDTCIVRVSKNWFVVVGTCQK

SEQ ID NO: 4098 - protein, 523 aa, Unknown
  Description of Unknown: Integrase B4099 sequence
  cd03768,PTHR30461:SF3,SM00857,IPR036162,PF13408, IPR025827,PS51737,G3DSA:3.40.50.1390,IPR006119,PF07508, IPR011109,SSF53041,PTHR30461,PS51736,Coil, PF00239
MRFFSYGRKSVFSDKSDSIDNQFRMNREYCESKFSGQVDSWQQFSDEDFTGANTSRPDLQRMLSFIKGGFCDVLVVYQLDRLSRDVRDFANIYALLEEHGVMFISIKENIDTTTPIGRAMMYVTVVFAQMERETIAARVTDNMLGLAKKGYWTGGNPPVGYVRKHIVVNGKKHCSIEVDPDGARYVTQIFDTFLAYNCSLQGMETRFKNQGIRTQSGKFFSTTQLHKMLTMPYCVEATPEVYDFYAAKGCIMDPGSPREMWDGSVGVIIYGRSTEKNKKHQAQPPEKWTVCLGKHKPFMPAEKWLAVQSRFTQNKCIKDAKWPVPLLKGVLRCKCGNLMQVSRKKKVDGTCSSWYYCRKRMRQGVDACDMGQIKCDLLDEEVLELFRGITADPALIQKFVKAEAPADVPDLKAAQARVSACERKIGRLAASLALAEDSAASKYIIAEMERLDVELGALKREASLAEMESHRAAASAKDAKATATEIAKLIHGLDGFDDKEKNAIARAVIQECTWDGERLFITL

SEQ ID NO: 4099 - protein, 523 aa, Unknown
  Description of Unknown: Integrase B4100 sequence
  PTHR30461:SF3,cd00338,SM00857,G3DSA:1.10.10.2600,IPR036162, PS51737,G3DSA:3.40.50.1390,IPR006119,IPR038109,PF07508, IPR011109,SSF53041,PTHR30461,PS51736,Coil, PF00239
MNIGNQLGKLKKSDQFCIYLRKSRADAEAEKLGEGETLARHKKILTKLAAKKELYVEKIYHEIVSGESIAARPEMQKLIKDCYDGKYRGIIVIDVDRLSRGNQADMQTIMDCLKYSNNRNGLLVVTPTKTYDVANNYDDEEYIEFVLFMSRREYKTILKRMERGRKQSIIEGNYLGSTAPYGYDILKTRAGRTLIPNQEEAKIVKQIFEMYISGETSYKICTKLSSQGIKTPAGNEYWHDSTIRSIITNPVYIGRVSWSAKLTTKKLVDGKLIVQRKKSRKTDQYMEYDGKHKPIISEEMFKAANNRIPVSKTKRNCKLRNILAGIIVCKKCGKAMLYQHQYNKSTAPRYIHAPRTECTIKSVRVSDVIDALIRALELSIEDFEIKVNNLPTVDENNIQSQIEAIEKQIKKTEKKLSKLFDSWEEDLISANEFLERKNIHNKNIQSCKLQIKELKQSIPDKEEFEESISSLHEALQLLKDDAIDADIKNEYLKTIIEKIEFSRKSVDEFILDIKFKDNIIVNE

SEQ ID NO: 4100 - protein, 523 aa, Unknown
  Description of Unknown: Integrase B4101 sequence
  cd03768,PTHR30461:SF3,SM00857,IPR036162,PF13408, IPR025827,G3DSA:3.40.50.1390,PS51737,IPR006119,PF07508, IPR011109,SSF53041,PTHR30461,PS51736,Coil, PF00239
MRFFSYGRKSVFSDKSDSIDNQFRMNREYCESKFSGQVDSWQQFSDEDFTGANTSRPDLQRMLSFIKGGFCDVLVVYQLDRLSRDVRDFANIYALLEEHGVMFISIKENIDTTTPIGRAMMYVTVVFAQMERETIAARVTDNMLGLAKKGYWTGGNPPVGYVRKHIVVNGKKHCSIEVDPDGARYVTQIFDTFLAYNCSLQGMETRFKNQGIRTQSGKFFSTTQLHKMLTMPYCVEATPEVYDFYAAKGCIMDPGSPREMWDGSVGVIIYGRSTEKNKKHQAQPPEKWTVCLGKHKPFMPAEKWLAVQSRFTQNKCIKDAKWPVPLLKGVLRCKCGNLMQVSRKKKVDGTCSSWYYCRKRMRQGVDACDMGQIKCDLLDEEVLELFRGITADPALIQKFVKAEAPADVPDLKAAQARVSACERKIGRLAASLALAEDSAASKYIIAEMERLDVELGALKREASLAEMESHRAAASAKDAKATAVEIAKLIHGLEGFDDKEKNAIARAVIQECTWDGERLFITL

SEQ ID NO: 4101 - protein, 523 aa, Unknown
  Description of Unknown: Integrase B4102 sequence
  cd03768,PTHR30461:SF3,SM00857,IPR036162,PF13408, PS51737,IPR025827,G3DSA:3.40.50.1390,IPR006119,PF07508, IPR011109,SSF53041,PTHR30461,PS51736,Coil, PF00239
MRFFSYGRKSIFSDKSDSIDNQFRMSREYCESKFSGQVDSWQQFSDEDFTGANADRPDLQRMLSFIKNGFCDVLVVYQLDRLSRDVRDFANIYALLEEHGVMFISIKENIDTTTPIGRAMMYVTVVFAQMERETIAARVTDNMLGLAKKGYWTGGNPPVGYVRKHIVVNGKKHCSIEVDPDGARYVTQIFDTFLAYNCSLQGMETRFKNQGIRTRAGKFFSTTQLHKMLTMPYCVEATPEVYDFYAAKGCIMDPGSPREMWDGSVGVIIYGRSTEKNKKHQVQPPEKWTVCLGKHKPFMPAEKWLAVQSRFSQNKCIKDAKWPVPLLKGVLRCKCGNLMQISRKKKGDGTCSSWYYCRKRMRQGIDACDMGQIKCDLLDEEVLELFRGIAADPGLIQKFVKMEAPADVPDLKAAQARVSVCERKIGRLAASLAMAEDSVASKYIIAEMERLDVELGALKREASLAEMESHRAAVSAKDAKATAAEIAKLIHGLEGFDDKEKNAIARAVIQECTWDGERLFITL

SEQ ID NO: 4102 - protein, 523 aa, Unknown
  Description of Unknown: Integrase B4103 sequence
  PTHR30461:SF3,SM00857,G3DSA:1.10.10.2600,IPR036162,PS51737, G3DSA:3.40.50.1390,IPR006119,IPR038109,PF07508,SSF53041, IPR011109,PTHR30461,Coil,PS51736,cd00338, PF00239
MPNTESFTVNEILVYLRKSRSDSPDMSVEEVLRKHEEMIQQYASTHFCSPIPEKNIFREVVSGETIDSRPQIKNLLKMIESEQFKAVLVVEPQRLSRGDLEDCGRLINILRYTNTTVLTLTHSFDLQEEYERKFFEMEITRGNDYLEYTKRILKRGREASVAKGNYIGSVDPYGYKKTVIKKDGVTCHTLEIIPEEADTVKLIHELYAYTPEGIGFTNIAHKLDAMHIKPKKAAHWTPAIISSILCNPLYLGMVRWNNRKVVKYINEGQLAKARPQNSEAKYYKGLHEPIITHELYDACMARRGTNPSLRRNKELCNPFAGLLYCGTCGHAMSLKIYKNHNSVSQMMLCNHQAYCHTKSVLYSAFLRRFISSMENTLNDFELAQKSDDGRTQAISKTIVINLENKLKKLNEKDARQKDAYEDGIYSKEEFLKRNVRTQQDIASTIIALEDARAKKADIVDYEEKIRRFKDCLHALNDPELSAAEKNRFLKSCVDKILYYNNMESKAGIGRYIENVFSLEIQYK

SEQ ID NO: 4103 - protein, 523 aa, Unknown
  Description of Unknown: Integrase B4104 sequence
  cd03768,PTHR30461:SF3,SM00857,IPR036162,PF13408, PS51737,IPR025827,G3DSA:3.40.50.1390,IPR006119,PF07508, IPR011109,SSF53041,PTHR30461,PS51736,Coil, PF00239
MRFFSYGRKSVFSDKSDSIDNQFRMNREYCESKFSGQVDSWQQFSDEDFTGANTSRPDLQRMLSFIKGGFCDVLVVYQLDRLSRDVRDFANIYALLEEHGVMFISIKENIDTTTPIGRAMMYVTVVFAQMERETIAARVTDNMLGLAKKGYWTGGNPPVGYVRKHIVVNGKKHCSIEVDPDGARYVTQIFDTFLAYNCSLQGMETRFKNQGIRTQSGKFFSTTQLHKMLTMPYCVEATPEVYDFYAAKGCIMDPGSPREMWDGSVGVIIYGRSTEKNKKHQAQPPEKWTVCLGKHKPFMHAEKWLAVQSRFTQNKCIKDAKWPVPLLKGVLRCKCGNLMQVSRKKKVDGTCSSWYYCRKRMRQGVDACDMGQIKCDLLDEKVLELFRGITADPALIQKFVKAEAPADVPDLKAAQARVSACERKIGRLAASLALAEDSAASKYIIAEMERLDVELGALKREASLAEMESHRAAASAKDAKATAAEIAKLIHGLDGFDDKEKNAIARAVIQECTWDGERLFITL

SEQ ID NO: 4104 - protein, 523 aa, Unknown
  Description of Unknown: Integrase B4105 sequence
  PTHR30461:SF3,IPR036162,PS51737,IPR011109,PTHR30461, PF00239,G3DSA:1.10.10.2600,IPR006119,SSF53041,cd00338, SM00857,IPR025827,IPR038109,mobidb-lite,PS51736, PF13408,G3DSA:3.40.50.1390,PF07508,Coil
MKACLYLRYSSSSQTEQSIEGQQRVCLDYCKRQGITVVATYIDRATSASKHTEKRHEFLQMIKDAEKGLFDAVIVYKLDRFARNRYDSANYKYRLKKVGVRLISATENLTDSPESIILESVLEGMAEFYSAELAQKVSRGMQESAYKCQVTGGTIPLGYKIENKHFVIDPRTAPIVQEAFRLYDEGKSISMISEIFNNKGYRTTRGYAFNKNSFKSMFRNEKYIGVYQYKEHRVEGGVPAIVDKALFDRVQEKLKLTANAPARGKAKVDYLLSGKLFCGHCGEQMNGDTGTSAQGVSYNYYSCYGHKQHRCQKKSIRKELIEDVVVQDALTLLTPDIMNLIADATMQEYYKEIQIEGKIPALEEHLQELDAALKNITAAIERGVVPETLLNRMVELEKEKKSCQKELEYEKQKKDAITKQDVLEFLTRIAQGNIKTEAAKKRIINLFVNSVTLWDEPDGWFKITTAYNVTDVPSKTYRIKSDTGKGSDLERNGGPNKNNPNLFPIGDGFGLFVFFGKLAFAKQ

SEQ ID NO: 4105 - protein, 523 aa, Unknown
  Description of Unknown: Integrase B4106 sequence
  cd03768,PTHR30461:SF3,SM00857,IPR036162,PF13408, IPR025827,PS51737,G3DSA:3.40.50.1390,IPR006119,PF07508, SSF53041,IPR011109,PTHR30461,PS51736,Coil, PF00239
MRFFSYGRKSVFSDKSDSIDNQFRMNREYCESKFSGQVDSWQQFSDEDFTGANTSRPDLQRMLSFIKGGFCDVLVVYQLDRLSRDVRDFANIYALLEEHSVMFISIKENIDTTTPIGRAMMYVTVVFAQMERETIAARVTDNMLGLAKKGYWTGGNPPVGYVRKHIVVNGKKHCSIEVDPDGARYVTQIFDTFLAYNCSLQGMETRFKNQGIRTQSGKFFSTTQLHKMLTMPYCVEATPEVYDFYAAKGCIMDPGSPREMWDGSVGVIIYGRSTEKNKKHQAQPPEKWTVCLGKHKPFMPAEKWLAVQSRFTQNKCIKDAKWPVPLLKGVLRCKCGNLMQVSRKKKVDGTCSSWYYCRKRMRQGVDACDMGQIKCDLLDEEVLELFRGITADPALIQKFVKAEAPADVTDLKAAQARVSACERKIGRLAASLALAEDSAASKYIIAEMERLDVELGALKREASLAEMESHRAAASAKDAKATAAEIAKLIHGLDGFDDKEKNAIARAVIQECTWDGERLFITL

SEQ ID NO: 4106 - protein, 523 aa, Unknown
  Description of Unknown: Integrase B4107 sequence
  PTHR30461:SF3,SM00857,G3DSA:1.10.10.2600,IPR036162,PF13408, PS51737,G3DSA:3.40.50.1390,IPR025827,IPR006119,IPR038109, PF07508,IPR011109,SSF53041,PTHR30461,Coil, PS51736,cd00338,PF00239
MGKKQKTNGGDAVIYARYSSHNQRDVSIEQQVEACRKHAAELGLTVTATYEDRAISGKTDKRPSFQRMMRDAEQHKFAYVLAWKSNRIGRNMMQALVNESRLVDCGVKVFYAEEDFDDNAAGRFALRSMMNVNQFYIENMAEDVKRGLYDNAKKGLVNGSLPLGYKRGADGKPEIDEPKAAIVREIYTRVAAGELFASIADDLNARGIKTARGREWNKGSFHVLCHNDRYRGIYMYGDIRIPGGMPRIISDELFYDAQEAYSMKKDNRYGRARHGAENYLLTGKLYCGHCGGYMVGISGTSKTGEMHYYYACQKHRLEHTCEKKAIRRDVIENAVARAIMMYCLDDETIDFIVDSTIAYFKQKDHELHIEAMENELAAVQQAISNLMKAIEAGIITPTTRTRLLDLEEQQAKLSAKINTAKAERVEIDRDDLIAGLQLFRTGDIKNKKFLAKLFNTFLIAVYLYDDNRLKIVFSFTGNHNSVEIPLELDNDCPDSQIVSDETEVRMSHLECDGRESNPRPTDS

SEQ ID NO: 4107 - protein, 523 aa, Unknown
  Description of Unknown: Integrase B4108 sequence
  PTHR30461:SF3,SM00857,IPR036162,PF13408,PS51737, G3DSA:3.40.50.1390,IPR025827,IPR006119,PF07508,IPR011109, SSF53041,PTHR30461,Coil,PS51736,cd00338, PF00239
MNICCYGRKSIYSDHSDSIDNQFRMCRDYVEMKFSGQVDSFLEYQDEAFTGANTKRPDLQRLLTDISAGNCDVLIVYQLDRLSRDVRDFANIYAILEEHRVKFISIKENIDTSTPIGRAMMYVTVVFAQMERETIAARVADNMIGLAKKGYWTGGNPPEGYVRTRIEANGKKHCSIVPDPEGVKYVNWIFDTFLQNDYSLQSMETAFKNQGIRTRRGAFFSTAQLHKILTMPYCVQATPEVYDYYVARGCQMDPESPRESWDGTCGVMIYGRTTQKNKKHQMQPPEKWLVCLGAHEPFMPADKWLAVQARFCRNKFDKTMKYDVPLLKGVLRCSCGSIMCVARKKKKEGVSSWYYCLKRMRQGKEVCDSHQIKCELLDQKVLELLQSIERDPALIHQFAEQNAEVLAGPDPKVLASKISTCQTRIDRLVSSLSLAAESSAQKYILAELERLDLEIQALRREHNLALTAERNRTRQQQDTFSKVSEISRLIGDMDSFSASEKNAIVKDVIKKCAWDGESLSIML

SEQ ID NO: 4108 - protein, 523 aa, Unknown
  Description of Unknown: Integrase B4109 sequence
  cd03768,PTHR30461:SF3,SM00857,IPR036162,PF13408, PS51737,IPR025827,G3DSA:3.40.50.1390,IPR006119,PF07508, IPR011109,SSF53041,PTHR30461,PS51736,Coil, PF00239
MRFFSYGRKSVFSDKSDSIDNQFRMSREYCDTKFSGQVDSWQQFSDEDFTGANTQRPDLQRMLSFIKNGFCDVLVVYQLDRLSRDVRDFANIYSLLEEHGVMFVSIKENIDTTTPIGRAMMYVTVVFAQMERETIAARVTDNMLGLAKKGYWTGGNPPRGYVRKHIVVDGKKHCSIEPDPDGVRYVTRIFDTFLAMNCSLQGMETRFKNQGIRTESGKFFSTTQLHKILTMPYCVEATPEVYDFYASKGCIMDPGSPREMWDGSVGVIIYGRSTEKNKKHQAQPPEKWTVCLGMHKPFMPAEKWLAVQARFGQNKCIKDAKWPVPLLKGVLRCKCGNLMQVSRKKKVDGTCSSWYYCRKRMRQGVDACDMGQIKCDLLDDEVLELFRGIAADPAMIQKFVKAEAPDEVPDLKAAQARVSACERKIGRLAASLALAEESSASKYIIAEMERLDVELGALKREASLAEMESHRAAASAKDAKATAVEIAKLIHGLEGFDDKEKNAIARAVIQECTWDGERLFITL

SEQ ID NO: 4109 - protein, 523 aa, Unknown
  Description of Unknown: Integrase B4110 sequence
  PTHR30461:SF3,cd00338,SM00857,G3DSA:1.10.10.2600,IPR036162, PS51737,G3DSA:3.40.50.1390,IPR006119,IPR038109,PF07508, IPR011109,SSF53041,PTHR30461,PS51736,Coil, PF00239
MVSFDSIIIYLRKSRSDDPAQTVEEVLAKHERILQDYCMKEYGKAIPEKRIYREVVSGETIQDRPIMQQLLKELEAENISGVLIVEPQRLSRGDLQDCGQIINSFRYTNTAVITPGKTYDLSDEYDRKFFEMELTRGNDYLEYTKKILSRGRVASVRQGNYICSVRPYGYRKITLGSGKDKCHTLEIIPEEADVIRLMYHLYIDENMGFTNIARTLDSLHIKPLKSDNWSAATIRDMIDNPIYIGKVVWNSRKVVKKWENEQITKVRPRNKGDDVICVNGRHEAIIDERTFEAARNKRGLTPKVKKFKELRNPLAGLLFCGTCGHGMSMKKYVDKRSHTGKITTVMLCNQQAVCHTKSAQYEDILAKIKISLANAISDFKIKLKEQENNNIDMHELRIASLEEELNRLYNKDVRQKDAYEDGIYTKEEYIERNSKLQERILNVKEEIADEKNNVPVKIDYEDKIMTFKDCLSSLDDSDISAADKNILLKSCIDKIIYYNDMPSKPGIGRYIENSFRLEIFLKL

SEQ ID NO: 4110 - protein, 523 aa, Unknown
  Description of Unknown: Integrase B4111 sequence
  SM00857,G3DSA:1.10.10.2600,IPR036162,PF13408,IPR025827, PS51737,G3DSA:3.40.50.1390,IPR006119,IPR038109,PF07508, SSF53041,IPR011109,PF00239,PTHR30461,PS51736, Coil,cd00338
MKTAVIYARYSSDRQTEQSIEGQVRVCNDYAERNEILIVNQYIDRATTGTNDNRDAFQQMLKDSDKKQFDFVLVYKLDRFSRNKFEMAMHRKHLKDNGIKILSAMENIPDSPEGILLESLLEGMNQYYSEELSQKTRRGQKETRLKGLHCAGKLNYGYYTEKKKVFIHEEEGPIVKEIFERYAAGERGNEIAISFAERGILYRGKPFSAANIYVILHGEKYTGKYTLHGEVYDNIYPRIIEPELFERCKAKIDANRYGNHIPDYSYLLRKRVYCGECGTRMTSYSGTSKSSKVSKYYKCWNARDRKKCNAKFIKKDLLESIVLKALQETLTGKNLSVIVDEIYKQHNAKLLGDNPVKILEKELLQINKSINNIMKAIEQGIITDTTKERLQELENTRKDLQEKLIFERMQEKVVLDKKVIENYLKKAVEKEPEIMIELLVEKVYVYSDDHIEIMLHYVDTPIKPKPIEYDKDTNPEGESLRGSLIYTTKIFVDNDIFKGMNKKILEPTFKETQKMPVLIEIRG

SEQ ID NO: 4111 - protein, 523 aa, Unknown
  Description of Unknown: Integrase B4112 sequence
  cd03768,PTHR30461:SF3,SM00857,IPR036162,PF13408, IPR025827,G3DSA:3.40.50.1390,PS51737,IPR006119,PF07508, SSF53041,IPR011109,PTHR30461,PS51736,Coil, PF00239
MRFFSYGRKSVFSDKSDSIDNQFRMNREYCESKFSGQVDSWQQFSDEDFTGANTQRPDLQRMLSFIKNGFCDVLVVYQLDRLSRDVRDFANIYSLLEEHGVMFVSIKENIDTTTPIGRAMMYVTVVFAQMERETIAARVTDNMLGLAKKGYWTGGNPPRGYVRKHIVVDGKKHCSIEVDPDGARYVTQIFDTFLAYNCSLQGMETRFKNQGILTESGKFFSTTQLHKILTMPYCVEATPDVYDFYAAKGCIMDPGSPREKWDGSVGVMIYGRSTEKNKKHQAQPPEKWTVCLGMHKPFMPAEKWLAVQSRFTQNKCIKDAKWPVPLLKGVLRCKCGNLMQVSRKKKVDGTCSSWYYCRKRMRQGVDACDMGQIKCDLLDEKVLELFRGITADPALIQKFVKAEAPADVPDLKAAQARVSACERKIGRLAASLALAEDSAASKYIIAEMERLDVELGALKREAALAEMESHRAAASAKDAKATAVEIAKLIHGLEGFDDKEKNAIARAVIQECTWDGERLFITL

SEQ ID NO: 4112 - protein, 523 aa, Unknown
  Description of Unknown: Integrase B4113 sequence
  PTHR30461:SF3,SM00857,G3DSA:1.10.10.2600,IPR036162,PS51737, G3DSA:3.40.50.1390,IPR006119,IPR038109,PF07508,IPR011109, SSF53041,PTHR30461,Coil,PS51736,cd00338, PF00239
MVSFDSIIIYLRKSRSDDPAQTVEEVLAKHERILQDYCMKEYGKAIPEKRIYREVVSGETIQDRPVMQQLLKELEAENISGVLIVEPQRLSRGDLQDCGQIINSFRYTNTAVITPGKTYDLSDEYDRKFFEMELTRGNDYLEYTKKILSRGRVASVRQGNYICSVRPYGYRKITLGSGKDKCHTLEIIPEEADAIRLMYHLYLDENMGFTNIARTLDSLHIKPLKSDNWSAATIRDMIDNPIYIGKVVWNSRKVVKKWENEQITKVRPRNKGDDVICVNGRHEAIIDEHTFEAARNKRGLTPKVKKFKELRNPLAGLLFCGTCGHGMSMKKYVDKRSHTGKVTTVMLCNQQAVCHTKSAQYEDILAKIKVSLANAIFDFEIKLKEQENNNIDMHELRMSSLLDELNRLYSKDVRQKDAYEDGIYTKEEYIERNSKLQERILNVKEDIADEKKNIPVKIDYEDKIITFKDCLASLDDPNISAADKNILLKSCIDKIIYYNDMPSKPGIGRYIENSFRLEIFLKL

SEQ ID NO: 4113 - protein, 523 aa, Unknown
  Description of Unknown: Integrase B4114 sequence
  cd03768,PTHR30461:SF3,SM00857,IPR036162,PF13408, IPR025827,PS51737,G3DSA:3.40.50.1390,IPR006119,PF07508, IPR011109,SSF53041,PTHR30461,PS51736,Coil, PF00239
MRFFSYGRKSVFSDKSDSIDNQFRMNREYCESKFSGQVDSWQQFSDEDFTGANTSRPDLQRMLSFIKGGFCDVLVVYQLDRLSRDVRDFANIYALLEEHGVMFISIKENIDTTTPIGRAMMYVTVVFAQMERETIAARVTDNMLGLAKKGYWTGGNPPVGYVRKHIVVNGKKHCSIEVDPDGARYVTQIFDTFLAYNCSLQGMETRFKNQGIRTQNGKFFSTAQLHKMLTMPYCVEATPEVYDFYAAKGCIMDPGSPREMWDGSAGVIIYGRSTEKNKKHQLQPPEKWTVCLGKHKPFMPAEKWLAVQSRFTQNKCIKDAKWPVPLLKGVLRCKCGNLMQVSRKKKVDGTCSSWYYCRKRMRQGVDACDMGQIKCDLLDEEVLELFRGITADPALIQKFVKAEAPADVPDLKAAQARVSACERKIGRLAASLALAEDSAASKYIIAEMERLDVELGALKREASLAEMESHRAAASAKDAKATATEIAKLIHGLEGFDDKEKNAIARAVIQECTWDGERLFITL

SEQ ID NO: 4114 - protein, 523 aa, Unknown
  Description of Unknown: Integrase B4115 sequence
  cd03768,PTHR30461:SF3,SM00857,IPR036162,PF13408, PS51737,IPR025827,G3DSA:3.40.50.1390,IPR006119,PF07508, IPR011109,SSF53041,PTHR30461,PS51736,Coil, PF00239
MRFFSYGRKSVFSDKSDSIDNQFRMNREYCESKFSGQVDSWQQFSDEDFTGANTSRPDLQRMLSFIKGGFCDVLVVYQLDRLSRDVRDFANIYALLEEHGVMFISIKENIDTTTPIGRAMMYVTVVFAQMERETIAARVTDNMLGLAKKGYWTGGNPPVGYVRKHIVVDGKKHCSIEVDPDGARYVTQIFDTFLAYNCSLQGMETRFKNQGIRTQSGKFFSTTQLHKMLTMPYCVEATPEVYDFYAAKGCIMDPGSPREMWDGSVGVIIYGRSTEKNKKHQAQPPEKWTVCLGKHKPFMPAEKWLAVQSRFTQNKCIKDAKWPVPLLKGVLRCKCGNLMQVSRKKKVDSTCSSWYYCRKRMRQGVDACDMGQIKCDLLDEKVLELFRGITADPGLIQKFVKTKAPDDIPNLKAAQARVAACERKIGRLAASLALAEDSTASKYIIAEMERLDVELGALKREASLAEMENHRATANANDAKATAAEIAKLIHGLEGFDDKEKNAIARAVIQECTWDGERLFITL

SEQ ID NO: 4115 - protein, 523 aa, Unknown
  Description of Unknown: Integrase B4116 sequence
  SM00857,G3DSA:1.10.10.2600,IPR036162,PF13408,PS51737, G3DSA:3.40.50.1390,IPR025827,IPR006119,IPR038109,PF07508, IPR011109,SSF53041,PTHR30461,Coil,PS51736, cd00338,PF00239
MPDYAIYLRKSRKDNEAEQRGEGETLARHRKLLLDYAKCEGLHIAKIYEEVVSGESIATRPQMQLLLADVEQGLYDGVLVVEVERLARGDTMDQGLVAQTFKYSSTKIYTPMKVYDPNNEFDEEYFEFGLFMSRREYKTINRRLQRGRRASASEGKYIAGRAPYGYEKIKIPNDKGNTLRIIPEQAEVIKQIYDWYVNGLDGEDVGLTKIATKLNSMGIKPYRNDYWGKEALRDIITNPVYAGYIRWGYRRNKKTVVDGKTVTCRPVTLDENCVLSKGLHEAIIPQELYDKAQRKIKSVPPPPVGYKKELKGSLAGIVICKNCGHKMTLRSPSTKGKPPYLVCHYRYCDNVSTPYDIVEKRVLDTLQEWAEKYKLKEKQNKKNSSGSIDMLKSSVESAKKKVATLQQQLDGMCDLLEQGIYTPDMFRQRSVSVTERITKAKAEYEQLSEQLVSMEKLLTEKSEFIPKVEHVLKIYDTLSTPADKNRVLKEVIDHAEYSKTKSGAYKGVSVDDFNLTVFPKMPL

SEQ ID NO: 4116 - protein, 523 aa, Unknown
  Description of Unknown: Integrase B4117 sequence
  cd03768,PTHR30461:SF3,SM00857,IPR036162,PF13408, IPR025827,G3DSA:3.40.50.1390,PS51737,IPR006119,PF07508, SSF53041,IPR011109,PTHR30461,PS51736,Coil, PF00239
MRFFSYGRKSVFSDKSDSIDNQFRMNREYCESKFSSQVDSWQQFSDEDFTGANTSRPDLQRMLSFIKGGFCDVLVVYQLDRLSRDVRDFANIYALLEEHGVMFISIKENIDTTTPIGRAMMYVTVVFAQMERETIAARVTDNMLGLAKKGYWTGGNPPVGYVRKHIVVNGKKHCSIEVDPDGARYVTQIFDTFLAYNCSLQGMETRFKNQGIRTQSGKFFSTTQLHKMLTMPYCVEATPEVYDFYAAKGCIMDPGSPREMWDGSVGVIIYGRSTEKNKKHQAQPPEKWTVCLGKHKPFMPAEKWLAVQSRFTQNKCIKDAKWPVPLLKGVLRCKCGNLMQVSRKKKVDGTCSSWYYCRKRMRQGVDACDMGQIKCDLLDEEVLELFRGIAADPGLIQKFVKAEAPADVPDLKAAQARVSACERKIGRLAASLALAEDSAASKYIIAEMERLDVELGALKREASLAEMESHRAAASAKDAKATAVEIAKLIHGLEGFDDKEKNAIARAVIQECTWDGERLFITL

SEQ ID NO: 4117 - protein, 523 aa, Unknown
  Description of Unknown: Integrase B4118 sequence
  cd00338,SM00857,G3DSA:1.10.10.2600,IPR036162,PF13408, IPR025827,G3DSA:3.40.50.1390,PS51737,IPR006119,IPR038109, PF07508,IPR011109,SSF53041,PTHR30461,PS51736, Coil,PF00239
MKKVQVIPATLQNYTEKPIHSQKKRRVAGYARVSTDRDEQLTSYEAQVDYYTNYIKGRSDWEFAGMYTDEGISATNTLHREGFKSMIRDAMDGKIDLIITKSVSRFARNTVDSLTIVRKLRDKGVEIYFEKENIWTLDAKGELLITIMSSLAQEESRSISENVTWGHRKRFADGKVSLAFSHFLGYDRGADGNLVVNKEQAETVKLIYRLYLSGYTFHSIAKKLTEQKVPTPAGGKMWRTNTVRSILMNEKYKGDALLQKKFTVDFLTKKSKRNEGEVPQYYVQNDHEAIISPQVFDLVQETIKKRRNIKGRKRYSGVSIFSSKIKCGQCGSWYGAKVWHSTDKYRQTVYRCNDKFKRHCKTPHLTENEIENVFVRAVNQLIKNKDEILSNIILLKIRLVDTTDLEKKRNALELNMNLLAERVQQLISENACLTQDQMEYNQEYSKLVNRYEKIKIKYGQICDTMKQRTSRGQELERFIENLQKQEFISIFDKRLWCSLVDFITVNEKDDIWVTFKDGTEIKA

SEQ ID NO: 4118 - protein, 523 aa, Unknown
  Description of Unknown: Integrase B4119 sequence
  PTHR30461:SF3,cd00338,SM00857,G3DSA:1.10.10.2600,IPR036162, PF13408,IPR025827,G3DSA:3.40.50.1390,PS51737,IPR006119, IPR038109,PF07508,IPR011109,SSF53041,PTHR30461, PS51736,Coil,PF00239
MIPAVIYARFSSHSQTEQSIEGQLAACYDFAEREGYTVIGEYIDRAISARTDDRPDFQRMIADSAKHTFEVILVYQLDRFSRNRYDSAVNKQKLKKNGVRVVSARENITADASGVLMEAVLEGMAEYYSAELAQKIRRGMDISGSKCLATGGRPALGYKVDETKHYQIDEDTAPMVVKIFEMYASGMTVAQIITELNQQNIKTSTGADFNKNSLRKMLTNKRYIGIYTYKGTETPGGIPRIVSDELFNRVAEMMEKNKKAPARARAKEEYLLTTKLFCGHCREMMTGISGTSKTGTIHNYYTCNGRKKKLCSKKNVQKEYIEDRVIALARAQLTDENISKISKAVAALCEREKESSEYRRLERQRRDIEKQKANLVDALKYGKATETLLNEIAKLESSIEGIDRQILMEKVKCLDLKEPEIAFFLTKLRDGDINDITYRRAIIAVMVNAVYLYDDGRLTVIFNSSDRPVEVTEGLLADVEEDAAEFVSGLCRSTNLIAGRTPEVTIVVLPYGFVLATQIKDRL

SEQ ID NO: 4119 - protein, 523 aa, Unknown
  Description of Unknown: Integrase B4120 sequence
  cd00338,SM00857,G3DSA:1.10.10.2600,IPR036162,PS51737, G3DSA:3.40.50.1390,IPR006119,IPR038109,PF07508,SSF53041, IPR011109,PTHR30461,PS51736,Coil,PF00239
MELLNVCIYLRKSRADREAEARGEGETLARHERILLDLAKKRGYNVGAIYKEIVSGETISARPVMQQVLHEVESGMWDGVLVVEVERLARGDTIDQGVVSRAFQYSGTMIITPSKTYDPNNEFDEEYFEFGLFMSRREYKTIKRRLNAGRISSVKEGKYCGNKPPYGYKRVKLQREKGWTLEPVPEQAEVVKMIFSWYAGYGCEQIGMAKIVRKLNDAGVATMYKKPWTVASLSKMLSNPVYIGMVRWNARKTVKSVKDGVITRSRPLAKDYLLCPGRHPAIISEELYNAAQHIRKKNPPRPVGVRNTVKNPLAGIVYCSKCGRAMVRRPYQKSGQEDTLLCPYTSCPTVSSKLSLVEESLLDGLRELVDGYKLNGDVSESDTNDMISSKEILIAEKHAEIKKLNEQKLKQYDLLEQGIYSTEIFLERSKATAATLEACSAAIERLQEELEHDRLLLEQRSSFIPRCEDLLEHYWDLDIPTRNRILRELIDKVLYTKDTKNAFLEGDKITFLLDIFPKIQENT

SEQ ID NO: 4120 - protein, 523 aa, Unknown
  Description of Unknown: Integrase B4121 sequence
  SM00857,G3DSA:1.10.10.2600,IPR036162,PF13408, IPR025827,G3DSA:3.40.50.1390,PS51737,IPR006119, IPR038109,PF07508,IPR011109,SSF53041, PF00239,PTHR30461,PS51736,Coil,cd00338
MNENVCIYLRKSRADQEAELRGEGETLARHERILLDLAKSRNYSVGAIYREIVSGETISARPVMQQLLREVEAGSWDGVLVVEVERLARGDTIDQGIVSRAFQFSDTKIITPTKTYDPDNEFDEEYFEFGLFMSRREYKTIKRRLNAGRISSVKEGKYCGSRPPYGYERVKLRGEKGFTLQPVPEQAEVIKMIYSLYSGASGDRIGVSKIVRKLNDMGIKSPSGKDWVPISVQDVLSNPVYAGMIRWNGRKTVRAIQDGVVTQSRPRSKEDDILLFPGRHPAIVSKEMYDSVQQIRKKNPPRPISIKNTIKNPLAGIVYCSKCGRAMVRRPYQKRGQDDTLMCSYTSCPTVSSKLSLVERAVLNGIQDLVDEYRLNAAVPGPDINNAVKSKEKLIAEKEHELEKLNVQKMKQYDLLEQGIYTTEVFLERSNSIASSINSCQDSIECLKEEIRHDKELIDQQSSFIPRCENLLEIYWSLDTAAKNKMLKELIERINYTKDAKNAFRMGNEATFVLDIFPRIQPN

SEQ ID NO: 4121 - protein, 523 aa, Unknown
  Description of Unknown: Integrase B4122 sequence
  cd03768,PTHR30461:SF3,SM00857,IPR036162,PF13408, PS51737,G3DSA:3.40.50.1390,IPR025827,IPR006119,PF07508, IPR011109,SSF53041,PTHR30461,PS51736,Coil, PF00239
MRFFSYGRKSVFSDKSDSIDNQFRMSREYCESKFSGQVDSWQQFSDEDFTGANTQRPDLQRMLSFIKNGFCDVLVVYQLDRLSRDVRDFANIYSLLEEHGVMFVSIKENIDTTTPIGRAMMYVTVVFAQMERETIAARVTDNMLGLAKKGYWTGGNPPRGYVRKHIVVDGKKHCSIEPDPDGVRYVTRIFDTFLAMNCSLQGMETRFKNQGIRTESGKFFSTTQLHKILTMPYCVEATPEVYDFYASKGCIMDPGSPREMWDGSVGVIIYGRSTEKNKKHQAQPPEKWTVCLGKHKPFMPAEKWLAVQSRFTQNKCIKDAKWPVPLLKGVLRCKCGNLMQVSRKKKVDGTCSSWYYCRKRMRQGVDACDMGQIKCDLLDEEVLELFRGITTDPALIQKFVKAEAPADVPDLKAAQARVSACERKIGRLAASLALAEDSAASKYIIAEMERLDVELGALKREASLAEMESHRAAASVKDAKATAAEIAKLIHGLDGFDDKEKNAIARAVIQECTWDGERLFITL

SEQ ID NO: 4122 - protein, 523 aa, Unknown
  Description of Unknown: Integrase B4123 sequence
  SM00857,G3DSA:1.10.10.2600,IPR036162,PS51737,G3DSA:3.40.50.1390, IPR006119,IPR038109,PF07508,IPR011109,SSF53041, PTHR30461,Coil,PS51736,cd00338,PF00239
MTVFEMNDAIDNAFSGKMDKYAIYLRKSRADLEAERDGEGDSLARHKMILTEVAARKGLYVEKIYQEIVSGETIEARPEIQKLINDCYAGKYRGILIVDITRLSRGNQGDAQTILDCLKYSNSNNGILVVTPTKTYDVANNSDDEEYMEFELFMSRREYKMIRKRMERGKLQSIVEGNYLATHRPYGYNILNTKTGRTLIPNEEEAPFVKKIFEWTVKENMTAGEIARRLTAMGVPTYSGSPEWSLYSIKHILTNPVYMGKIRWNDRMTVKRLVNGELAKSRPRSSHNDHYIEIEGKHVKHALIDEETFRNAAARFHSDRTKVGLKLVNPLAGLLYCKECGMIMQYKDYGGTRNPRLAHKPSQVCKVKSALFTDVMDALVHALKLYIEDFEMKIDNMPDVDENTIVSQLESLQKEKNRIEKVLSKLFDSWERDEITNNEFAQRKAVNNARIESIKNEMNNLEETVPEKEEYTENIMKLSDALNALLDDNLDAETKNKYLKAIVRRIEFSRENNDEFILDTYLK

SEQ ID NO: 4123 - protein, 523 aa, Unknown
  Description of Unknown: Integrase B4124 sequence
  cd03768,PTHR30461:SF3,SM00857,IPR036162, PF13408,IPR025827,PS51737,G3DSA:3.40.50.1390, IPR006119,PF07508,IPR011109,SSF53041, PTHR30461,PS51736,Coil,PF00239
MRFFSYGRKSVFSDKSDSIDNQFRMNREYCESKFSSQVDSWQQFSDEDFTGANTSRPDLQRMLSFIKGGFCDVLVVYQLDRLSRDVRDFANIYALLEEHGVMFISIKENIDTTTPIGRAMMYVTVVFAQMERETIAARVTDNMLGLAKKGYWTGGNPPVGYVRKHIVVNGKKHCSIEVDPDGARYVTQIFDTFLAYNCSLQGMETRFKNQGIRTQSGKFFSTTQLHKMLTMPYCVEATPEVYDFYAAKGCIMDPGSPREMWDGSVGVIIYGRSTEKNKKHQAQPPEKWTVCLGKHKPFMPAEKWLAVQSRFTQNKCIKDAKWPVPLLKGVLRCKCGNLMQVSRKKKVDGTCSSWYYCRKRMRQGVDACDMGQIKCDLLDEEVLELFRGITADPALIQKFVKAEAPADVPDLKAAQARVSACERKIGRLAASLALAEDSAASKYIIAEMERLDVELGALKREASLAEMESHRAAASAKDAKATAAEIAKLIHGLDGFDDKEKNAIARAVIQECTWDGERLFITL

SEQ ID NO: 4124 - protein, 523 aa, Unknown
  Description of Unknown: Integrase B4125 sequence
  cd03768,PTHR30461:SF3,SM00857,IPR036162,PF13408, IPR025827,PS51737,G3DSA:3.40.50.1390,IPR006119,PF07508, IPR011109,SSF53041,PTHR30461,PS51736,Coil, PF00239
MRFFSYGRKSVFSDKSDSIDNQFRMNREYCESKFSGQVDSWQQFSDEDFTGANTSRPDLQRMLSFIKGGFCDVLVVYQLDRLSRDVRDFANIYALLEEHGVMFISIKENIDTTTPIGRAMMYVTVVFAQMERETIAARVTDNMLGLAKKGYWTGGNPPVGYVRKHIVVNGKKHCSIEVDPDGARYVTQIFDTFLAYNCSLQGMETRFKNQGIRTQSGKFFSTTQLHKMLTMPYCVEATPEVYDFYAAKGCIMDPGSPREMWDGSVGVIIYGRSTEKNKKHQAQPPEKWTVCLGKHKPFMPAEKWLAVQSRFTQNKCIKDAKWPVPLLKGVLRCKCGNLMQVSRKKKVDGTCSSWYYCRKRMRQGVDACDMGQIKCDLLDEEVLELFRGITADPALIQKFVKAEAPADVPDLKAAQARVSACERKIGRLAASLALAEDSAASKYIIAEMERLDVELGALKREASLAEMEGHRAAASAKDAKATAAEIAKLIHGLDGFDDKEKNAIARAVIQECTWDGERLFITL

SEQ ID NO: 4125 - protein, 523 aa, Unknown
  Description of Unknown: Integrase B4126 sequence
  PTHR30461:SF3,SM00857,G3DSA:1.10.10.2600,IPR036162,PF13408, PS51737,G3DSA:3.40.50.1390,IPR025827,IPR006119,IPR038109, PF07508,IPR011109,SSF53041,PTHR30461,Coil, PS51736,cd00338,PF00239
MAKSVTTIPATLSRFTAAPINSTKKRRVAAYARVSTDNEEQLTSYEAQIDYYTNYINGRDDWEFVGVYPDEGITGTNTKKREQFRQMVADALDGKIDLIITKSVSRFARNTVDSLTTIRKLKEHNVEVYFEKENIWTFDSKGELLLTIMSSLAQEESRSISENCTWGQRKRFADGKVTVPFKRFLGYDMGPDHNLVVNPEQAKLVKRIYGMFLQGQSPFQIARTLTEEGIPSPGGKDHWNPSNIKSILTNEKYKGDALLQKSFTVDFLTKKKKTNEGEIPQYYVKDNHEAIIDPETFEMVQTLMTTRTKGRNRKSSVSIFSSKVKCGDCGSWYGPKVWHSNDAYRKVIWQCNHKFDGQKCATPTLTEDEIKELFLRAANQVIDQKEQFIAIYEQVLSRSLDTTALESELSDLEAEINIAAELIEECIKENAHVALDQDEYQKRYDALVARFDKAKARHTEVTDLIAERMARKHQIESYLKELRSREPLTEFRETDWLAMVDYITVHSKKDIRVTFKDGTEIKA

SEQ ID NO: 4126 - protein, 523 aa, Unknown
  Description of Unknown: Integrase B4127 sequence
  SM00857,G3DSA:1.10.10.2600,IPR036162,PF13408,PS51737, IPR025827,G3DSA:3.40.50.1390,IPR006119,IPR038109,PF07508, IPR011109,SSF53041,PTHR30461,Coil,PS51736, cd00338,PF00239
MNENVCIYLRKSRADQEAELRGEGETLARHERILLDLAKSRNYSVGAIYREIVSGETISARPVMQQLLREVEAGSWDGVLVVEVERLARGDTIDQGVVSRAFQFSDTKIITPTKTYDPDNEFDEEYFEFGLFMSRREYKTIKRRLNAGRISSVKEGKYCGSRPPYGYERVKLRGEKGFTLQPIPEQAEVIKMIYSLYSGASGDRIGVSKIVRKLNDMGIKSPSGKSWVPISVQDVLANPVYAGMIRWNGRKTVRAIQDGVVTQSRPRSKEDDILLFPGRHPAIVSKEMYDSVQQIRKKNPPRPISIKNTIKNPLAGIVYCSKCGRAMVRRPYQKRGQDDTLMCSYTSCPTVSSKLSLVERAVLNGIQDLVDEYRLNDAVPGPDINNAVKSKKKLIAEKEHELEKLNVQKMKQYDLLEQGIYTTEVFLERSNSIAFSINSCQDSIECLKEEIRHDKELIDQQSSFIPRCENLLEIYWSLDTAAKNKMLKELIERVNYTKDTKNAFRKGNEATFVLDIFPRIQSN

SEQ ID NO: 4127 - protein, 523 aa, Unknown
  Description of Unknown: Integrase B4128 sequence
  cd03768,PTHR30461:SF3,SM00857,IPR036162,PF13408, IPR025827,G3DSA:3.40.50.1390,PS51737,IPR006119,PF07508, IPR011109,SSF53041,PTHR30461,PS51736,Coil, PF00239
MRFFSYGRKSVFSDKSDSIDNQFRMNREYCESKFSSQVDSWQQFSDEDFTGANTSRPDLQRMLSFIKGGFCDVLVVYQLDRLSRDVRDFANIYALLEEHGVMFISIKENIDTTTPIGRAMMYVTVVFAQMERETIAARVTDNMLGLAKKGYWTGGNPPVGYVRKHIVVNGKKHCSIEVDPDGARYVTQIFDTFLAYNCSLQGMETRFKNQGIRTQSGKFFSTTQLHKMLTMPYCVEATPEVYDFYAAKGCIMDPGSPREMWDGSVGVIIYGRSTEKNKKHQAQPPEKWTVCLGKHKPFMPAEKWLAVQSRFTQNKCIKDAKWPVPLLKGVLRCKCGNLMQVSRKKKVDGTCSSWYYCRKRMRQGVDACDMGQIKCDLLDEEVLELFRGITADPALIQKFVKAEAPADVPDLKAAQARVSACERKIGRLAASLALAEDSAASKYIIAEMERLDVELGALKREASLAEMESHQAAASAKDAKATAAEIAKLIHGLDGFDDKEKNAIARAVIQECTWDGERLFIKL

SEQ ID NO: 4128 - protein, 523 aa, Unknown
  Description of Unknown: Integrase B4129 sequence
  SM00857,G3DSA:1.10.10.2600,IPR036162,PF13408,IPR025827, G3DSA:3.40.50.1390,PS51737,IPR006119,IPR038109,PF07508, IPR011109,SSF53041,PF00239,PTHR30461,PS51736, Coil,cd00338
MNENVCIYLRKSRADQEAELRGEGETLARHERILLDLAKSRNYSVGAIYREIVSGETISARPVMQQLLREVEAGSWDGVLVVEVERLARGDTIDQGVVSRAFQFSDTKIITPTKTYDPDNEFDEEYFEFGLFMSRREYKTIKRRLNAGRIASVKEGKYCGSKPPYGYERVKLRGEKGFTLQPVPEQAEIIKMIYSLYSGSSGDRIGVSKIVRKLNDMGIKSPSGKDWVPISVQDVLANPVYAGMIRWNGRKTVRAIQDGVVTQSRPRSKEDDILLFPGRHPAIVSKEMYDSVQQIRKKNPPRPISIKNTIKNPLAGIVYCSKCGRAMVRRPYQKRGQDDTLMCSYTSCPTVSSKLSLVERAVLNGIQDLVDEYRLNDAVPGPDINNAVKSKEKLIAEKEHELEKLNVQKMKQYDLLEQGIYTTEVFLERSNSIASSINSCQDSIECLKEEIRHDKELIDQQSSFIPRCENLLEIYWSLDTAAKNKMLKELIERVNYTKDVKNAFRMGNEATFVLDIFPRIQSN

SEQ ID NO: 4129 - protein, 523 aa, Unknown
  Description of Unknown: Integrase B4130 sequence
  cd03768,PTHR30461:SF3,SM00857,IPR036162,PF13408, IPR025827,G3DSA:3.40.50.1390,PS51737,IPR006119,PF07508, SSF53041,IPR011109,PTHR30461,PS51736,Coil, PF00239
MRFFSYGRKSVFSDKSDSIDNQFRMNREYCESKFSGQVDSWQQFSDEDFTGANTSRPDLQRMLSFIKGGFCDVLVVYQLDRLSRDVRDFANIYALLEEHGVMFISIKENIDTTTPIGRAMMYVTVVFAQMERETIAARVTDNMLGLAKKGYWTGGNPPVGYVRKHIVVNGKKHCSIEVDPDGARYVTQIFDTFLAYNCSLQGMETRFKNQGIRTQSGKFFSTTQLHKMLTMPYCVEATPEVYDFYAAKGCIMDPGSPREMWDGSVGVIIYGRSTEKNKKHQAQPPEKWTVCLGKHKPFMPAEKWLAVQSRFTRNKCIKDAKWPVPLLKGVLRCKCGNLMQVSRKKKVDGTCSSWYYCRKRMRQGVDACDMGQIKCDLLDEEVLELFRGITADPALIQKFVKAEAPADVPDLKAAQARVSACERKIGRLAASLALAEDSAASKYIIAEMERLDVELGALKREASLAEMESHRAAASAKDAKATAAEIAKLIHGLDGFDDKEKNAIARAVIQECTWDGERLFITL

SEQ ID NO: 4130 - protein, 523 aa, Unknown
  Description of Unknown: Integrase B4131 sequence
  cd03768,PTHR30461:SF3,SM00857,IPR036162,PF13408, PS51737,IPR025827,G3DSA:3.40.50.1390,IPR006119,PF07508, IPR011109,SSF53041,PTHR30461,PS51736,Coil, PF00239
MRFFSYGRKSVFSDKSDSIDNQFRMNREYCESKFSGQVDSWQQFSDEDFTGANTSRPDLQRMLSFIKGGFCDVLVVYQLDRLSRDVRDFANIYALLEEHGVMFISIKENIDTTTPIGRAMMYVTVVFAQMERETIAARVTDNMLGLAKKGYWTGGNPPVGYVRKHIVVNGKKHCSIEVDPDGARYVTQIFDTFLAYNCSLQGMETRFKNQGIRTQSGKFFSTTQLHKMLTMPYCVEATPEVYDFYAAKGCIMDPGSPREMWDGSVGVIIYGRSTEKNKKHQAQPPEKWTVCLGKHKPFMPAEKWLAVQSRFTQNKCIKDAKWPVPLLKGVLRCKCGNLMQVSRKKKVDGTCSSWYYCRKRMRQGVDACDMGQIKCNLLDEKVLELFRGITADPALIQKFVKAEAPTDVPDLKAAQARVSACERKIGRLAASLALAEDSAASKYIIAEMERLDVELGALKREASLAEMESHRAAASAKDAKATAAEIAKLIHGLDGFDDKEKNAIARAVIQECTWDGERLFITL

SEQ ID NO: 4131 - protein, 523 aa, Unknown
  Description of Unknown: Integrase B4132 sequence
  PTHR30461:SF3,SM00857,G3DSA:1.10.10.2600,IPR036162,PF13408, IPR025827,G3DSA:3.40.50.1390,PS51737,IPR006119,IPR038109, PF07508,IPR011109,SSF53041,PTHR30461,Coil, PS51736,cd00338,PF00239
MREFKQEELLPAVAYYRYSPGGGQTEQSIEGQRRDCMAYAKSHGYVIVKEYIDRHLTGRNDKRPAFQMMMQDAQLHRFTTLIAWKNDRISRNRRDALNYKDQLKKCGVQICYAEMDIPKGPEGILMESLMDGLAEYYSAELSQKIRRGMTESAYKCHALGSYPPFGLMVREKKFVPDPQTAPYVRWIYEQYAQGTQIKTICDALNAKGLRTRRGGEFNKNSLRRILSNKKYIGIYEAKGIRTENAIEPIIDRDLFDAVQARIPLNNHQGGRTGAKRIYPLSGIAYCAICGAPLIGDQGTGRAGRTYSYYACTGKKHRRHCNKKNVRQEVLDDAVLHTTLDYVLAPSVLPQIAAQAAAASASNDTTRAELNAAQAALDDTNRRINNILTAMEDGSFSKAAASRLTVLESEQSRLEAQIKALKRKRPTLSPNRIEFFLESMSQRTGELPQDYLNRIIKIFVSRVDLSNEDLKITYALTKKTAIPHGTAVNSATNKERTIELNPCSTVALSGGADGSRTHVRKEIS

SEQ ID NO: 4132 - protein, 523 aa, Unknown
  Description of Unknown: Integrase B4133 sequence
  PTHR30461:SF3,SM00857,G3DSA:1.10.10.2600,IPR036162,PS51737, G3DSA:3.40.50.1390,IPR006119,IPR038109,PF07508,IPR011109, SSF53041,PTHR30461,Coil,PS51736,cd00338, PF00239
MPNTESFTVNEVLVYLRKSRSDSPDMSVEEVLRKHEEMIQQYASTHFHSPIPEKNIFREVVSGETIDSRPQIKNLLKMIESEQFKAVLVVEPQRLSRGDLEDCGRLINILRYTNTTVLTLTHSFDLQEEYERKFFEMEITRGNDYLEYTKRILKRGREASVAKGNYIGSVDPYGYKKTVIKKDGITCHTLEIIPEEADTVKLIHELYAYTPEGIGFTNIAHKLDAMHIKPKKAAHWTPAIISSILCNPLYLGMVRWNNRKVVKYINEGQLAKARPQNSEAKYYKGLHEPIITHELYDACMARRGTNPSLRRNKELCNPFAGLLYCGTCGHAMSLKIYKNHNSVSQMMLCNHQAYCHTKSVLYSAFLRRFISSMEDTLNDFELAQKSDDGRTQAISKTIVINLENKLKKLNEKDARQKDAYEDGIYSKEEFLKRNVKTQQDIASTIIALEDARAKKADIIDYEEKIRRFKDCLHALNDPELSAAEKNRFLKSCVDKILYYNNMESKAGIGRYIENVFSLEIQYK

SEQ ID NO: 4133 - protein, 523 aa, Unknown
  Description of Unknown: Integrase B4134 sequence
  PTHR30461:SF3,cd00338,SM00857,G3DSA:1.10.10.2600,IPR036162, PF13408,IPR025827,G3DSA:3.40.50.1390,PS51737,IPR006119, IPR038109,PF07508,SSF53041,IPR011109,PTHR30461, PS51736,Coil,PF00239
MKKKQRVVIYIRYSSHKQAESFSIEYQVAECTRFIEMNDYELVDTYIDEAKTGQKIAGRDAFDKMMFEAGQDKFDKIIVFSFSRSFRNTRDALNCNHDLQEKYGIMIESVIERIDLSDPHGKFSGTNLFAMHELQAAIIAAHVRSGMYYAAQQGYYLGGFVPFGYELYETGELSRGKERKKYSPNPEEAELVREMFDLYADGFSLNFIQTAMKLKNVRGRRGDIIGQQTIARILKNPMYIGTVEAKFKGHDPLSIPNAVPAIIDMDTWGRVQARHKGNKLVQPRRTKRLYSLTGKITCAKCGGHMFGTYKGDKRSNNWHYAYYHCANKKIKGTCNALNVRKDQIDAYCLQEIKKHILNEEAMRSISEQIATAVGNSADDMAKAKAKAEKRMEQIVDILAKIKEDYYEGKITEAVERRMAAKYEAEQLELESSLRGLKTALKSAITSETVYSYLQELLSLYGSNNDELQKMLFDKLIDKILVHDDRIEVTLVVSPFGHIGDNSPSGQPKYEQSLMVGRKEIRHI

SEQ ID NO: 4134 - protein, 523 aa, Unknown
  Description of Unknown: Integrase B4135 sequence
  cd03768,PTHR30461:SF3,SM00857,IPR036162,PF13408, PS51737,IPR025827,G3DSA:3.40.50.1390,IPR006119,PF07508, IPR011109,SSF53041,PTHR30461,PS51736,Coil, PF00239
MRFFSYGRKSVFSDKSDSIDNQFRMNREYCESKFSGQVDSWQQFSDEDFTGANTSRPDLQRMLSFIKGGFCDVLVVYQLDRLSRDVRDFANIYALLEEHGVMFISIKENIDTTTPIGRAMMYVTVVFAQMERETIAARVTDNMLGLAKKGYWTGGNPPVGYVRKHIVVNGKKHCSIEVDPDGARYVTQIFDTFLAYNCSLQGMETRFKNQGIRTQSGKFFSTTQLHKMLTMPYCVEATPEVYDFYAAKGCIMDPGSPREMWDGSVGVIIYGRSTEKNKKHQAQPPEKWTVCLGKHKPFMPAEKWLAVQSRFTQNKCIKDAKWPVPLLKGVLRCKCGNLMQVSRKKKVDGTCSSWYYCRKRMRQGVDACDMGQIKCNLLDEEVLELFRGITADPALIQKFVKAEAPADVPDLKAAQARVSACERKIGRLAASLALAEDSAASKYIIAEMERLDVELGALKREASLAEMESHRAAASAKDAKATAAEIAKLIHGLDGFDDKEKNAIARAVIQECTWDGERLFITL

SEQ ID NO: 4135 - protein, 523 aa, Unknown
  Description of Unknown: Integrase B4136 sequence
  PTHR30461:SF3,SM00857,G3DSA:1.10.10.2600,IPR036162,PS51737, G3DSA:3.40.50.1390,IPR006119,IPR038109,PF07508,SSF53041, IPR011109,PTHR30461,Coil,PS51736,cd00338, PF00239
MPNTESFTVNEVLVYLRKSRSDNPDMSVEEVLRKHEEMIQQYASTHFRSPIPEKNIFREVVSGETINSRPQMKNLLKMIESEQFKAVLVVEPQRLSRGDLEDCGRLINILRYTNTTVLTLTHSFNLQEEYERKFFEMEITRGNDYLEYTKRILRRGREASVAKGNYIGSVDPYGYKKTVIKKDGITCHTLEIIPEEADTVKLIHELYAYTPGGIGFTNIAHKLDAMHIKPKKAAHWTPAIISSILCNPLYLGMVRWNNRKVVKYINEGQLAKARPQNSEAKYYKGLHEPIITQELYDACMARRGTNPSLRRNKELCNPFAGLLYCGTCGHAMSLKIYKKHNSVSQMMLCNHQAYCHTKSVLYSAFLRRFISSMEDTLNDFELAQKSDDGRTQAISKTIVINLENKLKKLNEKDARQKDAYEDGIYSKEEFLKRNVRTQQDIASTIIALEDARAKKADIIDYEEKIRRFKDCLHALNDPELSAAEKNRFLKSCVDKILYYNNMESKAGIGRYIENVFSLEIQYK

SEQ ID NO: 4136 - protein, 523 aa, Unknown
  Description of Unknown: Integrase B4137 sequence
  cd03768,PTHR30461:SF3,SM00857,IPR036162,PF13408, IPR025827,G3DSA:3.40.50.1390,PS51737,IPR006119,PF07508, IPR011109,SSF53041,PTHR30461,PS51736,Coil, PF00239
MRFFSYGRKSVFSDKSDSIDNQFRMNREYCESKFSGQVDSWQQFSDEDFTGANTSRPDLQRMLSFIKGGFCDVLVVYQLDRLSRDVRDFANIYALLEEHGVMFISIKENIDTTTPIGRAMMYVTVVFAQMERETIAARVTDNMLGLAKKGYWTGGNPPVGYVRKHIVVDGKKHCSIEVDPDGARYVTQIFDTFLAYNCSLQGMETRFKNQGIRTQSGKFFSTTQLHKMLTMPYCVEATPEVYDFYAAKGCIMDPGSPREMWDGSVGVIIYGRSTEKNKKHQAQPPEKWTVCLGKHKPFMPAEKWLAVQSRFTQNKCIKDAKWPVPLLKGVLRCKCGNLMQVSRKKKVDGTCSSWYYCRKRMRQGVDACDMGQIKCDLLDEKVLELFRGITADPGLIQKFVKTKAPDDIPNLKAAQARVAACERKIGRLAASLALAEDSTASKYIIAEMERLDVELGALKREASLAEMESHQATANAKDAKATAVEIAKLIHGLKGFDDKEKNAIARAVIQECTWDGERLFITL

SEQ ID NO: 4137 - protein, 523 aa, Unknown
  Description of Unknown: Integrase B4138 sequence
  cd03768,PTHR30461:SF3,SM00857,IPR036162,PF13408, IPR025827,PS51737,G3DSA:3.40.50.1390,IPR006119,PF07508, IPR011109,SSF53041,PTHR30461,PS51736,Coil, PF00239
MRFFSYGRKSVFSDKSDSIDNQFRMNREYCESKFSGQVDSWQQFSDEDFTGANISRPDLQRMLSFIKGGFCDVLVVYQLDRLSRDVRDFANIYALLEEHGVMFISIKENIDTTTPIGRAMMYVTVVFAQMERETIAARVTDNMLGLAKKGYWTGGNPPVGYVRKHIVVDGKKHCSIEVDPDGARYVTQIFDTFLAYNCSLQGMETRFKNQGIRTQSGKFFSTTQLHKMLTMPYCVEATPEVYDFYAAKGCIMDPGSPREMWDGSVGVIIYGRSTEKNKKHQAQPPEKWTVCLGKHKPFMPAEKWLAVQSRFTQNKCIKDAKWPVPLLKGVLRCKCGNLMQVSRKKKVDGTCSSWYYCRKRMRQGVDACDMGQIKCELLDDKVLELFRGIAADPGLIQKFVKAKAPDDIPNLKAAQARVSACERKIGRLAASLALAEDSTASKYIIAEMERLDVELGALKREASLAEMENHRATANAKDAKATAVEIAKLIHGLEGFDDKERNAIARAVIQECTWDGERLFITL

SEQ ID NO: 4138 - protein, 523 aa, Unknown
  Description of Unknown: Integrase B4139 sequence
  SM00857,G3DSA:1.10.10.2600,IPR036162,PF13408,PS51737, IPR025827,G3DSA:3.40.50.1390,IPR006119,IPR038109,PF07508, IPR011109,SSF53041,PTHR30461,Coil,PS51736, cd00338,PF00239
MAKPEVSELAVVYARYSSHSQGEQSIEGQLSNARDYAAAHGYTIVHEYVDRAKSGRTDNRAEFQQMLKDTAKRQFSVIILWKVDRFGRNREEIAINKMKCRKNGVRVEYVAETIPDSPEGVILESVLEGFAEYYSLQLSQNIRRGRAESAEKCQSLGGNRPLGYKTGPDKKFVIDENTAPTVKMIFTMYADGKTVTEIVDKLNEMGLRTLRGGPFTKNSLHSILKNKKYIGIYEYQGREIKDGVPRIIEDDVFNKVQEMLKINKRAPAKTWSRADYILTDKLFCGKCGALMFGESGTSKTGVKHNYYICSNKKRFRSCDKKAVRQADIEDTVLNATHELLQDDELLDYIVDRTWEYYLAQDNSQEELRNLQRQLAQTDTAISNLIRAIEAGILTEETKKRMDELTQQKADLKASIADREIARGFHLKKSHIAYYLRSLRDADWSDKEAQKRLIQTFVNAVFVYDDHITLTYNFSGDKNTITLRDMQRFEDGEEFGCRASRSTKGVLHEPFYFVGGFAVTIWFR

SEQ ID NO: 4139 - protein, 523 aa, Unknown
  Description of Unknown: Integrase B4140 sequence
  cd03768,PTHR30461:SF3,SM00857,IPR036162,PF13408, PS51737,G3DSA:3.40.50.1390,IPR025827,IPR006119,PF07508, IPR011109,SSF53041,PTHR30461,PS51736,Coil, PF00239
MRFFSYGRKSVFSDKSDSIDNQFRMNREYCESKFSGQVDSWQQFSDEDFTGANTSRPDLQRMLSFIKGGFCDVLVVYQLDRLSRDVRDFANIYALLEEHGVMFISIKENIDTTTPIGRAMMYVTVVFAQMERETIAARVTDNMLGLAKKGYWTGGNPPVGYVRKHIVVDGKKHCSIEVDPDGARYVTQIFDTFLAYNCSLQGMETRFKNQGIRTQSGKFFSTTQLHKMLTMPYCVEATPEVYDFYAAKGCIMDPGSPREMWDGSVGVIIYGRSTEKNKKHQAQPPEKWTVCLGKHKPFMPAEKWLAVQSRFTQNKCIKDAKWPVPLLKGVLRCKCGNLMQVSRKKKVDGTCSSWYYCRKRMRQGVDACDMGQIKCDLLDEKVLELFRGITADPSLIQKFVKTKAPTDISDLKAAQARVSACERKIGRLAASLALAEDSTASKYIIAEMERLDVELGALKREASLAEMENHRATANAKDAKATVVEIAKLIHGLEGFDDKEKNAIARAVIQECTWDGERLFITL

SEQ ID NO: 4140 - protein, 523 aa, Unknown
  Description of Unknown: Integrase B4141 sequence
  PTHR30461:SF3,cd00338,SM00857,G3DSA:1.10.10.2600,IPR036162, PF13408,PS51737,G3DSA:3.40.50.1390,IPR025827,IPR006119, IPR038109,PF07508,IPR011109,SSF53041,PTHR30461, PS51736,Coil,PF00239
MARKKNIAAGLDAVIYARYSSHNQREVSIEQQIAECTKHAAALGLRVVGTYEDRAISGKTDNRPRFQQMMRDAEKGKFQAVVAWKSNRIGRNMLQAMVNEAKLDDYGVKVFYAEEDFDDTAAGRFALRNMMNVNQFYSENMAEDITRGLYDNANKCMANGRQPLGYKRGADGKVMLDEPAAAVVREIFTRVATGDLFVDIARDLNAKGIKTSKGAAWNKGSFQSICQNERYKGIYIYGNVRIVDGIPRIVSDELWYRVQEAMRMKKNPVGTRHRVGAEDYLLTGKLRCGHCGSYMTGVSGTSRNGELHYYYTCQKRRTEHACNKKNVRRDVIEPAIAQAIKMYCLTDDVIEWVADRTVEYWEKHDNDLHIEALEQQLEENKKATSNMLKAIEMGIITDATRSRMIELETEQSKLAVQLNAAKADVVKIDRDDLIDELQIFRDMDVNNRSVQAELFKDFLVAAYLYDDNRLKLVFSFMGKEKNVEIPLETGEDPPDGGDSPDTKMFVFAPDCSTIQFVPEPNSL

SEQ ID NO: 4141 - protein, 523 aa, Unknown
  Description of Unknown: Integrase B4142 sequence
  PTHR30461:SF3,SM00857,G3DSA:1.10.10.2600,IPR036162,PS51737, G3DSA:3.40.50.1390,IPR006119,IPR038109,PF07508,IPR011109, SSF53041,PF00239,PTHR30461,PS51736,Coil, cd00338
MVSFDSIIIYLRKSRSDDPAQTVEEVLAKHERILQDYCMKEYGKAIPEKRIYREVVSGETIQDRPVMQQLLKELETGNISGVLIVEPQRLSRGDLQDCGQIINSFRYTNTAIITPGKTYNLSDEYDRKFFEMELTRGNDYLEYTKKILNRGRVASVRQGNYICSVRPYGYKKITLGSGKDKCHTLEIIPEEADAIRLMYHLYLDENMGFTNIARTLDSLHIKPLKSDNWSAATIRDMIDNPIYIGKVVWNSRKVVKKWENEQITKVRPRNKGDDVICVNGRHEAIIDEHTFDAARNKRGLTPKVKKFKELRNPLAGLLFCGTCGHGMSMKKYVDKRSHTGKVTTVMLCNQQAVCHTKSAQYEDILAKIKVSLSNAISDFKIKLKEQENNNIDMHELRIASLEEELNRLYNKDVRQKDAYEDGIYTKEEYIERNSKLQERILNVKEEIADEKNNVPVKIDYEDKIMTFKDCLSSLDDSDISAADKNILLKSCIDKIIYYNDMPSKPGIGRYIENSFRLEIFLKL

SEQ ID NO: 4142 - protein, 523 aa, Unknown
  Description of Unknown: Integrase B4143 sequence
  PTHR30461:SF3,SM00857,G3DSA:1.10.10.2600,IPR036162,PF13408, PS51737,IPR025827,G3DSA:3.40.50.1390,IPR006119,IPR038109, PF07508,IPR011109,SSF53041,PTHR30461,Coil, PS51736,cd00338,PF00239
MNAVIYARFSSHSQREQSIEGQLRDCYEYAKRYDINIVGEYIDRAISGMTDDRPDFQRMIADAPKKQFERIIVWKLDRFARNRYDSALYKHKLKQYGIRVISAMENVGEGDESILLEALLEASAEYYSLDLKKKILRGQRETIAKGRWCGGPIPYGYKAVDGKLVADEKTAPIIRYVFEQYAQGFPMKEIIDELKRRGVRSSRGGELTYTTFSRALTNPVYIGNFMYKGELVPGVADALIDEDTYNKVQIIVKANAHAPAANKAKVEYLLQGKAFCGHCGSHMVGESGKSRNGDVYYYYSCAARKKAHKCRKKNEKKDFIEWYVVEQTLQYVLTPARMRDIAKAVVAEYDKEFAGSRVEEYEKAIKQYERELDKLVDALVDAPKVAHKRIYEKMETLETQKASMENELVKLRIASEIRFTEEEVRAWLRRFCTGDLFDPEFRRNIIDTFINCIYLYDDRIIIFYNIKGGKQVSFVDLAESLDNESESSGSDLNANAPPNPRNPNVIPIGDGFGFLLFISSIVV

SEQ ID NO: 4143 - protein, 523 aa, Unknown
  Description of Unknown: Integrase B4144 sequence
  cd03768,PTHR30461:SF3,SM00857,IPR036162,PF13408, IPR025827,G3DSA:3.40.50.1390,PS51737,IPR006119,PF07508, SSF53041,IPR011109,PTHR30461,PS51736,Coil, PF00239
MRFFSYGRKSVFSDKSDSIDNQFRMNREYCESKFSGQVDSWQQFSDEDFTGANTSRPDLQRMLSFIKGGFCDVLVVYQLDRLSRDVRDFANIYALLEEHSVMFISIKENIDTTTPIGRAMMYVTVVFAQMERETIAARVTDNMLGLAKKGYWTGGNPPVGYVRKHIVVNGKKHCSIEVDPDGARYVTQIFDTFLAYNCSLQGMETRFKNQGIRTQSGKFFSTTQLHKMLTMPYCVEATPEVYDFYAAKGCIMDPGSPREMWDGSVGVIIYGRSTEKNKKHQAQPPEKWTVCLGKHKPFMPAEKWLAVQSRFTQNKCIKDAKWPVPLLKGVLRCKCGNLMQVSRKKKVDGTCSSWYYCRKRMRQGVDACDMGQIKCDLLDEEVLELFRGITADPALIQKFVKAEAPADVTDLKAAQARVSACERKIGRLAASLALAEDSAASKYIIAEMERLDVELGALKREASLAEMESHRAAASAKDAKATAVEIAKLIHGLEGFDDKEKNAIARAVIQECTWDGERLFITL

SEQ ID NO: 4144 - protein, 523 aa, Unknown
  Description of Unknown: Integrase B4145 sequence
  SM00857,G3DSA:1.10.10.2600,IPR036162,PF13408,PS51737, G3DSA:3.40.50.1390,IPR025827,IPR006119,IPR038109,PF07508, IPR011109,SSF53041,PF00239,PTHR30461,PS51736, Coil,cd00338
MNENVCIYLRKSRADQEAELRGEGETLARHERILLDLAKSRNYSVGAIYREIVSGETISARPVMQQLLREVEAGSWDGVLVVEVERLARGDTIDQGVVSRAFQFSDTKIITPTKTYDPDNEFDEEYFEFGLFMSRREYKTIKRRLNAGRIASVKEGKYCGSKPPYGYERVKLHGEKGFTLQPVPDQAEVIKMIYSLYSGASGDRIGVSKIVRKLNDMGIKSPSGKNWVPISVQDVLANPVYAGMIRWNGRKTVRAIQDGVVTQSRPRSKEDDILLFPGRHPAIVSKEMYDSVQQIRKKNPPRPISIKNTIKNPLAGIVYCSKCGRAMVRRPYQKRGQDDTLMCSYTSCPTVSSKLSLVERAVLNGIQDLVDEYRLNDAVPGPDINNAVKSKKKLITEKEHELEKLNVQKMKQYDLLEQGIYTTEVFLERSNSIASSINSCQDSIECLKEEIRHDKELIDQQSSFIPRCENLLEIYWSLDTAAKNKMLKELIERVNYTKDVKNAFRMGNEATFVLDIFPRIQSN

SEQ ID NO: 4145 - protein, 523 aa, Unknown
  Description of Unknown: Integrase B4146 sequence
  SM00857,G3DSA:1.10.10.2600,IPR036162,PF13408,IPR025827, PS51737,G3DSA:3.40.50.1390,IPR006119,IPR038109,PF07508, IPR011109,SSF53041,PTHR30461,Coil,PS51736, cd00338,PF00239
MNESVCIYLRKSRADREAEAHGEGETLARHERILLELAKKKEYIVGAIYREVVSGETIADRPVMQQLLREVESGMWDGVLVVEVERLARGDTIDQGVVSRAFQYSDTKIITPAKIYDPNNEFDEEYFEFGLFMSRREYKTIKRRLNNGRISSVKEGKYCGNKPPYGYERVKLEKEKGYTLRPVPAQAEVVKMIYTWYAGDECEQIGVAKIVRKLNDMGIKSASGNDWTPTSVQGILANPVYIGKIRWNGRKTVKTIQNGQVVKTRPRSKDVLICEGLHPAIISDDLYNSAQKIRQKNPYRPISIKNTVRNPLAGIVYCSKCGRAMVRRPYQKRGQEDTLMCPYTSCSTVSSKLSLVEKAVIDGIREIAEEYKLNNDINVPSNTIDSGITSKQNLIREKESELESLNTQKAKQYDLLEQGIYTTEIFLERAKTISASIQSCSDTIEKLKEEIKHDQNIIKQQSDFIPRCEELLDNYWSLDTESKNKMLKSLIEKVVYSKNTKNAYGKGNEIGFQLDIFPKIQEK

SEQ ID NO: 4146 - protein, 523 aa, Unknown
  Description of Unknown: Integrase B4147 sequence
  cd03768,PTHR30461:SF3,SM00857,IPR036162,PF13408, PS51737,G3DSA:3.40.50.1390,IPR025827,IPR006119,PF07508, IPR011109,SSF53041,PTHR30461,PS51736,PF00239
MRFFSYGRKSVFSDKSDSIDNQFRMNREYCESKFSGQVDSWQQFSDEDFTGANTSRPDLQRMLSFIKGGFCDVLVVYQLDRLSRDVRDFANIYALLEEHGVMFISIKENIDTTTPIGRAMMYVTVVFAQMERETIAARVTDNMLGLAKKGYWTGGNPPVGYVRKHIVVNGKKHCSIEVDPDGARYVTQIFDTFLAYNCSLQGMETRFKNQGIRTQSGKFFSTTQLHKMLTMPYCVEATPEVYDFYAAKGCIMDPGSPREMWDGSVGVIIYGRSTEKNKKHQAQPPEKWTVCLGKHKPFMPAEKWLAVQSRFTQNKCIKDAKWPVPLLKGVLRCKCGNLMQVSRKKKVDGTCSSWYYCRKRMRQGVDACDMGQIKCDLLDEKVLELFRGITADPALIQKFVKAEAPADVPDLKAAQARVSACERKIGRLAASLALAEDSAASKYIIAEMERLDVELGALKRETSLAEMESHRAAASAKDAKATAAEIAKLIHGLDGFDDKEKNAIARAVIQECTWDGERLFITL

SEQ ID NO: 4147 - protein, 523 aa, Unknown
  Description of Unknown: Integrase B4148 sequence
  cd03768,PTHR30461:SF3,SM00857,IPR036162, PF13408,IPR025827,PS51737,G3DSA:3.40.50.1390, IPR006119,PF07508,IPR011109,SSF53041, PTHR30461,PS51736,Coil,PF00239
MRFFSYGRKSVFSDKSDSIDNQFRMNREYCESKFSGQVDSWQQFSDEDFTGANTSRPDLQRMLSFIKGGFCDVLVVYQLDRLSRDVRDFANIYALLEEHGVMFISIKENIDTTTPIGRAMMYVTVVFAQMERETIAARVTDNMLGLAKKGYWTGGNPPVGYVRKHIVVNGKKHCSIEVDPDGARYVTQIFDTFLAYNCSLQGMETRFKNQGIRTQSGKFFSTTQLHKMLTMPYCVEATPEVYDFYAAKGCIMDPGSPREMWDGSVGVIIYGRSTEKNKKHQAQPPEKWTVCLGKHKPFMPAEKWLAVQSRFTQNKCIKDAKWPVPLLKGVLRCKCGNLMQVSRKKKVDGTCSSWYYCRKRMRQGVDACDMGQIKCDLLDEEVLELFRGITADPALIQKFVKAEAPADVPDLKAAQARVSACERKIGRLAASLALAEDSAASKYIIAEMERLDVELGALKREASLAEMESHQAAASAKDAKATAAEIAKLIHGLDGFDAKEKNAIARAVIQECTWDGERLFITL

SEQ ID NO: 4148 - protein, 523 aa, Unknown
  Description of Unknown: Integrase B4149 sequence
  PTHR30461:SF3,cd00338,SM00857,G3DSA:1.10.10.2600,IPR036162, PF13408,IPR025827,G3DSA:3.40.50.1390,PS51737,IPR006119, IPR038109,PF07508,SSF53041,IPR011109,PTHR30461, PS51736,Coil,PF00239
MTTAKNVMVIPARRRLGNTVQAEERPKLRVAAYCRVSTDSDEQATSYEAQVEHYTAFIKQNSELEFAGIFADDGISGTNTKKREEFNRMIGECMAGNIDLIVTKSISRFARNTLDCLKYIRELKEKNIPVFFEKENINTMDSKGEVLLTIMASLAQQESQSLSQNVKLGLQYRYQNGEVQVNHNRFLGYTKDEDGHLIIEPVEAEVVKRIYREYLEGASLLQICRSLKADSILTAANKPHWRPETVKKILQNEKYIGDALLQKTYTVDFLSKKRVKNNGIVPQYYVENSHEPIIPRELFMQVQEEMVRRANLRGGKDGKKRVYSSKYALSSIVYCGQCGDIYRRVHWNNRGYKSIVWRCVSRLEEKGSECTAPTINEETLQTAVVKAINELLANKEPFLQALQKNIATILNEENDNATNDIDSKLEELQQQLLIQAKSKNDYEDVADEIYHLRELKQNALVENAEREGKRQRIAEMTDFFNEQSCELEEYDEQLVRRLIEKVTVFHDKFAVEFKSGVEIDVEG

SEQ ID NO: 4149 - protein, 523 aa, Unknown
  Description of Unknown: Integrase B4150 sequence
  PTHR30461:SF3,cd00338,SM00857,G3DSA:1.10.10.2600,IPR036162, PS51737,G3DSA:3.40.50.1390,IPR006119,IPR038109,PF07508, IPR011109,SSF53041,PTHR30461,PS51736,Coil, PF00239
MTTFDMNNAVEIAKMDIYAIYLRKSRADMEAEKLGEGETLARHKKILTELAARKGLYIGKIYQEIVSGETIEDRPEIQKLIKDCYDGKYKGILIVEVTRLSRGNQGDAQKIMDCLKYSNMNNGLLVITPTKTYDVAHNTDDEEYMEFELFMSRREHKMIGKRMLRGRHQSVVEGNYISSYRPYGYNIIKTRTSRTLIPNKDEAPIVKMIFDMAVNQNMSSGKIARYLTISGIPTYYGEREWNPDTIKAILTNETYTGKVRWNYTMKIKTMVDGNLVSKRTNASETDHYMLYDGKHKEHALVDEDTFRKASTKYYHDKTKTNLRLSNPLAGLLFCKSCGRAMAYQSYAHRKGSVSPRYCHKTSTSCKIKSVVTQDVIDAVVYALKLYIDNFEIKMDSLPDVDENTIYDQIEVLEREIRKTERILSKLFDSWELEQISDNEFVQRKAIHNEKIESLKNRIEEIENSIPEKENYEDIIYHLSDALQKLTDDTLEAGIKNEYLKRVFSKIEFSRENNHEFILDINLR

SEQ ID NO: 4150 - protein, 523 aa, Unknown
  Description of Unknown: Integrase B4151 sequence
  cd03768,PTHR30461:SF3,SM00857,IPR036162,PF13408, PS51737,G3DSA:3.40.50.1390,IPR025827,IPR006119,PF07508, IPR011109,SSF53041,PTHR30461,PS51736,PF00239
MRFFSYGRKSVFSDKSDSIDNQFRMNREYCESKFSGQVDSWQQFSDEDFTGANTSRPDLQRMLSFIKGGFCDVLVVYQLDRLSRDVRDFANIYALLEEHGVMFISIKENIDTTTPIGRAMMYVTVVFAQMERETIAARVTDNMLGLAKKGYWTGGNPPVGYVRKHIVVNGKKHCSIEVDPDGARYVTQIFDTFLAYNCSLQGMETRFKNQGIRTQSGKFFSTTQLHKMLTMPYCVEATPEVYDFYAAKGCIMDPGSPREMWDGSVGVIIYGRSTEKNKKHQAQPPEKWTVCLGKHKPFMPAEKWLAVQSRFTQNKCIKDAKWPVPLLKGVLRCKCGNLMQVSRKKKVDGTCSSWYYCRKRMRQGVDACDMGQIKCDLLDEKVLELFRGITADPALIQKFVKAEAPADVPDLKATQARVSACERKIGRLAASLALAEDSAASKYIIAEMERLDVELGALKRETSLAEMESHRAAASAKDAKATAAEIAKLIHGLDGFDDKEKNAIARAVIQECTWDGERLFITL

SEQ ID NO: 4151 - protein, 523 aa, Unknown
  Description of Unknown: Integrase B4152 sequence
  PTHR30461:SF3,SM00857,IPR036162,PF13408,PS51737, G3DSA:3.40.50.1390,IPR025827,IPR006119,PF07508,SSF53041, IPR011109,PF00239,PTHR30461,PS51736, Coil,cd00338
MNICCYGRKSIYSDHSDSIDNQFRMCRDYVEMKFSGQVDSFLEYQDEAFTGANIKRPDLQRLLTDISAGNCDVLIVYQLDRLSRDVRDFANIYAILEEHRVKFISIKENIDTSTPIGRAMMYVTVVFAQMERETIAARVADNMIGLAKKGYWTGGNPPEGYVRTRIEANGKKHCSIVPDPEGVKYVTWIFDTFLQNGYSLQSMETAFKKQGIRTRTGAFFSTTQLHKILTMPYCVQATPEVYDYYAAKGCQMDIESPREQWDGACGVMIYGRTTQKNKKHQMQPPEKWLVCLGAHEPFMPADKWLAVQARFAQNKFDKTMKYDVPLLKGVLRCSCGSIMCVARKKKKEGVSSWYYCLKRMRQGKEVCDSHHIKCELLDQKVLELLQSIKRDPGVIQKFAEQNTEVLSGPDPKVLASKINTCQTRIDRLVSSLSLAADSSAQKYILAELERLDLEIQALRREHNLALAVERKRSLQQQDTLSKVSEINRLVSDLDSFSAAEKNAIVKDVIKKCVWDGESLSIML

SEQ ID NO: 4152 - protein, 523 aa, Unknown
  Description of Unknown: Integrase B4153 sequence
  SM00857,G3DSA:1.10.10.2600,IPR036162,PF13408,IPR025827, G3DSA:3.40.50.1390,PS51737,IPR006119,IPR038109,PF07508, IPR011109,SSF53041,PTHR30461,Coil,PS51736, cd00338,PF00239
MNESVCIYLRKSRADREAEAHGEGETLARHEHILLDLAKRQGYSIGAIYREVVSGETISARPVMQKLLHEVESGMWDGVLVVEVERLARGDTIDQGVVSRAFQYSDTKIITPTKIYDPNNEFDEEYFEFGLFMSRREYKTIKRRLNNGRISSVKEGKYCGNKPPYGYERVKLEKEKGYTLRPVPAQAEIVKMIYTWYAGDGCEQIGVAKIVRKLNDMKIESALGGDWTPASIQGILTNPVYIGKIRWNGRKTVKTIQNGQVIKTRPRSRDVLICEGLHPAIISDDLYNSVQEIRQKNPPRPISIKNTVRNPLAGIVYCSKCGRAMVRRPYQKRGQEDTLMCPYTSCPTVSSKLSLVEKAVIDGIEEIVEEYKLNNDISVSSKDIDLGIVSKQNLIHEKESELERLNNQKTKQYDLLEQGIYTTEVFLERSKAIAESAQTCSDTIEKLREEISHDKTIIEQQSAFIPRCEELLNNYWNLDMESRNKMLKSLIDKAIYTKDSKNAYGRGNEIKFELDIFPKIQEK

SEQ ID NO: 4153 - protein, 523 aa, Unknown
  Description of Unknown: Integrase B4154 sequence
  cd00338,SM00857,G3DSA:1.10.10.2600,IPR036162,PF13408, IPR025827,G3DSA:3.40.50.1390,PS51737,IPR006119,IPR038109, PF07508,SSF53041,IPR011109,PTHR30461,PS51736, Coil,PF00239
MNENVCIYLRKSRADQEAELRGEGETLARHERILLDLAKSRNYSVGAIYREIVSGETISARPVMQQLLREVEAGSWDGVLVVEVERLARGDTIDQGIVSRAFQFSNTKIITPTKTYDPDNEFDEEYFEFGLFMSRREYKTIKRRLNAGRISSVKEGKYCGSRPPYGYERVKLRGEKGFTLQPVPEQAEVIKMIYSLYSGASGDRIGVSKIVRKLNDMGIKSPSGKDWVPISVQDVLSNPVYAGMIRWNGRKTVRAIQDGVVTQSRPRSKEDDILLFPGRHPAIVSKEMYDSVQQIRKKNPPRPISIKNTIKNPLAGIVYCSKCGRAMVRRPYQKRGQDDTLMCSYTSCPTVSSKLSLVERAVLNGIQDLVDEYRLNAAVPGPDINNAVKSKEKLIAEKEHELEKLNVQKMKQYDLLEQGIYTTEVFLERSNSIASSINSCQDSIECLKEEIRHDKELIDQQSSFIPRCENLLEIYWSLDTAAKNKMLKELIERINYTKDAKNAFRMGNEATFVLDIFPRIQPN

SEQ ID NO: 4154 - protein, 523 aa, Unknown
  Description of Unknown: Integrase B4155 sequence
  PTHR30461:SF3,cd00338,SM00857,G3DSA:1.10.10.2600,IPR036162, PF13408,IPR025827,G3DSA:3.40.50.1390,PS51737,IPR006119, IPR038109,PF07508,IPR011109,SSF53041,PTHR30461, PS51736,Coil,PF00239
MAKTVRVIPASPKIFRSEVTAEPRRRRTAGYARVSTDHEEQASSYEMQMAHYKNYIESRADWDFVGMYSDEGISGTNTKKRDGFNQMIEDALAGKIDLIITKSVSRFARNTVDSLQNVRKLKEHGVEIYFEKENIWTFDSRGELLITIMSSLAQEESRSISENTTWGKRKQFAEGKTSVGYSAFLGYDKDFKINEEQAKIVRLIYKLFVGGRSFYAITKELEKRSIKSPSGKDKWYISIVRSILTNEKYRGDALIQKEYTADFLDKTRRKNTGEIPQYYVEEHHEAIIPPDLFDFVQAEIKHREQNGKHSGVSIFANKIKCGCCGTWYGAKVWHSTDKYRRVIYRCNKKYAHKGKPCGTRHLTEEEIKQIFVKALNSLVEVKENVIAELRSLINGVCQTGELTEEHDRTEQELGVLTERLETLIRENARVAQDQTAYLKQENEIRARYLEKQGHLARLDEQIAERESKRKTLETMIQVVCGINGEQTGFDEDLWGGLLDHIVVKADGQIVVIVKGGVEIGVGG

SEQ ID NO: 4155 - protein, 523 aa, Unknown
  Description of Unknown: Integrase B4156 sequence
  PTHR30461:SF3,cd00338,SM00857,G3DSA:1.10.10.2600,IPR036162, PF13408,PS51737,G3DSA:3.40.50.1390,IPR025827,IPR006119, IPR038109,PF07508,IPR011109,SSF53041,PTHR30461, PS51736,Coil,PF00239
MARKKNIAAGLDAVIYARYSSHNQREVSIEQQIAECTKHAAALGLRIVGTYEDRAISGKTDNRPRFQQMMRDAEKGKFQAVVAWKSNRIGRNMLQAMVNEAKLDDYGVKVFYAEEDFDDTAAGRFALRNMMNVNQFYSENMAEDITRGLYDNANKCMANGRQPLGYKRGADGKVMLDEPAAAVVREIFTRVAAGDLFVDIARDLNAKGIKTSKGAEWNKGSFQSICQNERYKGIYIYGDVRIVDGIPRIVSDELWYRVQEAMRMKKNPVGTRHRVGAEDYLLTGKLRCGHCGSYMTGVSGTSRNGELHYYYTCQKRRTEHACNKKNVRRDVIEPAIAQAIKMYCLTDDVIEWMADQTVQYWEKHDNDLQIEALEQQLAENKKATSNMLKAIEMGIITAATRSRMVELETENSKLTAQLSAAKRDVVKINREDLIDELHILRSKDIHDREVQAELFKDFLVAAYIYDDNRLKLVFSFMGKDNSVEIPLETGEDPPDGEDSPDAKMFVLTPDCSTIQFVLEPDSL

SEQ ID NO: 4156 - protein, 523 aa, Unknown
  Description of Unknown: Integrase B4157 sequence
  PTHR30461:SF3,cd00338,SM00857,G3DSA:1.10.10.2600,IPR036162, PF13408,IPR025827,PS51737,G3DSA:3.40.50.1390,IPR006119, IPR038109,PF07508,IPR011109,SSF53041,PTHR30461, PS51736,Coil,PF00239
MRAFIYCRFSSHKQQELSIEGQRDICQEYADKHNITVVGQYADRARSGKTENRADFRRLMRDAATGVVDCVLVWRYDRFFRNRAESALYRKQLEAAGVHLISVTEYIPEGSAGIITQGMIETVAEYFSAKLSEDVSRGMNKAAQHCQIVGRAPLGYRAGPNKRWQIDPVGAELVRRIFEWYASGKAMGQLAAQLNEEGHRTTNGTLYTRSSFNSILRNEKYIGVYSYGGEVRIEGGCPRIIEDELFFTVQRRLSANRHRPGAYKAEVPYLLSGKLFCGLCGAPMTGTAGTSHTGARHYYYICNNRRAKTCEKKNVRLDLIEEAVLQSALDILTDENIAYISAEVERRCAENSDSAALLASLNAQLEEVQRRLKNIGNAIAQGIITETTKELLEEAEADRTALRQQIDRAKVQAALVVKAEAVACWLDGFRRGDRTDPDFRRQVFGALVHSVFVYDDYLKIIFNVDSAGAAVVPYEAAQAATPSEAPPGSYLDTLGAPKNALHESVGRFLLQSFKEGSIWCTIG

SEQ ID NO: 4157 - protein, 523 aa, Unknown
  Description of Unknown: Integrase B4158 sequence
  cd03768,PTHR30461:SF3,SM00857,IPR036162,PF13408, PS51737,IPR025827,G3DSA:3.40.50.1390,IPR006119,PF07508, IPR011109,SSF53041,PTHR30461,PS51736,Coil, PF00239
MRFFSYGRKSVFSDKSDSIDNQFRMNREYCESKFSGQVDSWQQFSDEDFTGANTQRPDLQRMLSFIKNGFCDVLVVYQLDRLSRDVRDFANIYSLLEEHGVMFVSIKENIDTTTPIGRAMMYVTVVFAQMERETIAARVTDNMLGLAKKGYWTGGNPPRGYVRKHIVVDGKKHCSIEPDPDGVRYVTRIFDTFLAMNCSLQGMETRFKNQGIRTESGKFFSTTQLHKILTMPYCVEATPEVYDFYASKGCIMDPGSPREMWDGSVGVIIYGRSTEKNKKHQAQPPEKWTVCLGMHKPFMPAEKWLAVQARFGQNKCIKDAKWPVPLLKGVLRCKCGNLMQVSRKKKVDGTCSSWYYCRKRMRQGVDACDMGQIKCDLLDDEVLELFRGITADPALIQKFVKAEAPADVPDLKAAQARVSACERKIGRLAASLALAEDSAASKYIIAEMERLDVELGALKREAALAEMESHRAAASAKDAKATAAEIAKLIHGLDGFDDKEKNAIARAVIQECTWDGERLFITL

SEQ ID NO: 4158 - protein, 523 aa, Unknown
  Description of Unknown: Integrase B4159 sequence
  PTHR30461:SF3,cd00338,SM00857,IPR036162,PF13408, IPR025827,PS51737,G3DSA:3.40.50.1390,IPR006119,PF07508, IPR011109,SSF53041,PTHR30461,PS51736,Coil, PF00239
MFFGIYGRKSVYSDKSDSVDNQHRMCNDYIKTHFKSDDITLITSYSDEDYTGANTKRPDLQRLLEDVKSGAINVLVVYQLDRISRDVRDFSNIYALLEEYHVMFISIKENIDTTTPIGRAMMYVTVVFAQMERETIATRVRDNMIGLAKKGFWTGGNPPYGYVRKNIVINGKKHVTIEPDPDGVAYNIWIYDSFLKNHCSLQSMETYFRKEGIKTRNGAFFSSTQLYKILTMPYCVEATPEIYDYFAAKGCQMDPDSPRDKWDGSVGVMVYGRSTEVNKKHQLQPPEEWLICLGLHKPFMPAAKWLAVQNQFSKNKFDKTPKYDIPLLKGVLRCSCGSIMAVSRKKKINGEVSSWYYCLRRMRNGVEACDRKQIKVDIIDQKLLNTLHSIESDPSMIFCFVQKKELPLPDIKTINNKISSVESKISKLASSLALADGSAASKYIVAEIERLDSDLQFLKRERAAINIEIKKRDELNESAESKALHIQNVMKGLSGFTAEEKNLIMRDILKECVWDGSELSIVL

SEQ ID NO: 4159 - protein, 523 aa, Unknown
  Description of Unknown: Integrase B4160 sequence
  cd00338,SM00857,G3DSA:1.10.10.2600,IPR036162,PF13408, IPR025827,G3DSA:3.40.50.1390,PS51737,IPR006119,IPR038109, PF07508,SSF53041,IPR011109,PTHR30461,PS51736, Coil,PF00239
MNESVCIYLRKSRADREAEARGEGETLARHERILLDLAKKKEYIVGAIYREVVSGETIADRPVMQQLLHEVESGLWDGVLVVEVERLARGDTIDQGVVSRAFQYSDTKIITPTKVYDPNNEFDEEYFEFGLFMSRREYKTIKRRLNNGRISSVKEGKYCGNKPPYGYERVKLEKEKGYTLRPVPAQAEIVKMIYTWYAGDGCEQIGTSKIVRKLNDMGIKSMSGNNWTPASIQGILTNPVYIGKIRWNGRKTVKTIQDGQVVKTRPRSKDALVCDGLHPAIVPDDLYNSVQEIRQKNPPRPISIKNTVRNPLAGIVYCSKCGRAMVRRPYQKSGQEDTLMCPYTSCSTVSSKLSLVEKAVIDGIREIAEKYKLNNDINVPSSTINSGIVSKQNLIREKENELENLNSQKAKQYDLLEQGIYTTEVFLERSKTISASIQSCSDTIANLREEIEHDENIKAQQSDFIPRCEELLNNYWNLNMESRNRMLKSLIEKVVYSKDKRNAYGHGNEANFELDIFPKIQEK

SEQ ID NO: 4160 - protein, 523 aa, Unknown
  Description of Unknown: Integrase B4161 sequence
  SM00857,G3DSA:1.10.10.2600,IPR036162,PF13408,IPR025827, G3DSA:3.40.50.1390,PS51737,IPR006119,IPR038109,PF07508, IPR011109,SSF53041,PF00239,PTHR30461,PS51736, Coil,cd00338
MNENVCIYLRKSRADQEAELRGEGETLARHERILLDLAKSRNYSVGAIYREIVSGETISARPVMQQLLREVEAGSWDGVLVVEVERLARGDTIDQGVVSRAFQFSDTKIITPTKTYDPDNEFDEEYFEFGLFMSRREYKTIKRRLNAGRIASVKEGKYCGSKPPYGYERVKLHGEKGFTLQPVPDQAEVIKMIYSLYSGSSGDRIGVSKIVRKLNDMGIKSPSGKDWVPISVQDVLANPVYAGMIRWNGRKTVRAIQNGVVTQSRPRSKEDDILLFPGRHPAIVSKEMYDSVQQIRKKNPPRPISIKNTIKNPLAGIVYCSKCGRAMVRRPYQKRGQDDTLMCSYTSCPTVSSKLSLVERAVLNGIQDLVDEYRLNDAVPGPDINNAVKSKEKLIAEKEHELEKLNVQKMKQYDLLEQGIYTTEVFLERSNSIASSINSCQDSIECLKEEIRHDKELIDQQSSFIPRCENLLEIYWSLDTATKNKMLKELIERVNYTKDTKNAFRKGNEATFVLDIFPRIQSN

SEQ ID NO: 4161 - protein, 523 aa, Unknown
  Description of Unknown: Integrase B4162 sequence
  cd03768,PTHR30461:SF3,SM00857,IPR036162,PF13408, PS51737,IPR025827,G3DSA:3.40.50.1390,IPR006119,PF07508, IPR011109,SSF53041,PTHR30461,PS51736,Coil, PF00239
MRFFSYGRKSVFSDKSDSIDNQFRMSREYCDTKFSGQVDSWQQFSDEDFTGANTQRPDLQRMLSFIKNGFCDVLVVYQLDRLSRDVRDFANIYSLLEEHGVMFVSIKENIDTTTPIGRAMMYVTVVFAQMERETIAARVTDNMLGLAKKGYWTGGNPPRGYVRKHIVVDGKKHCSIEPDPDGVRYVTRIFDTFLAMNCSLQGMETRFKNQGIRTESGKFFSTTQLHKILTMPYCVEATPEVYDFYAAKGCIMDPGSPREMWDGSVGVIIYGRSTEKNKKHQAQPPEKWTVCLGMHKPFMPAEKWLAVQARFGQNKCIKDAKWPVPLLKGVLRCKCGNLMQVSRKKKVDGTCSSWYYCRKRMRQGVDACDMGQIKCDLLDEKVLELFRGITADPALIQKFVKAEAPADVPDLKAAQARVSACERKIGRLAASLALAEDSAASKYIIAEMERLDVELGALKREASLAEMESHRAAASAKDAKATAAEIAKLIHGLDGFDDKEKNAIARAVIQECTWDGERLFITL

SEQ ID NO: 4162 - protein, 523 aa, Unknown
  Description of Unknown: Integrase B4163 sequence
  cd03768,PTHR30461:SF3,SM00857,IPR036162,PF13408, IPR025827,G3DSA:3.40.50.1390,PS51737,IPR006119,PF07508, IPR011109,SSF53041,PTHR30461,PS51736,Coil, PF00239
MRFFSYGRKSVFSDKSDSIDNQFRMNREYCESKFSGQVDSWQQFSDEDFTGANTSRPDLQRMLSFIKGGFCDVLVVYQLDRLSRDVRDFANIYALLEEHGVMFISIKENIDTTTPIGRAMMYVTVVFAQMERETIAARVTDNMLGLAKKGYWTGGNPPVGYIRKHIVVDGKKHCSIEVDPDGARYVTQIFDTFLAYNCSLQGMETRFKNQGIRTQSGKFFSTTQLHKMLTMPYCVEATPEVYDFYAAKGCIMDPGSPREMWDGSVGVIIYGRSTEKNKKHQAQPPEKWTVCLGKHKPFMPAEKWLAVQSRFTQNKCIKDAKWPVPLLKGVIRCKCGNLMQVSRKKKVDGTCSSWYYCRKRMRQGVDACDMSQIKCDLLDEKVLELFRGIAADPGLIQKFVKTKAPTDISDLKAAQARVSACERKIGRLAASLALAEDSTASKYIIAEMERLDVELGALKREASLAEMENHRATANAKDAKATAVEIAKLIHGLKGFDDKEKNAIARAVIQECTWDGERLFITL

SEQ ID NO: 4163 - protein, 523 aa, Unknown
  Description of Unknown: Integrase B4164 sequence
  cd03768,PTHR30461:SF3,SM00857,IPR036162,PF13408, PS51737,IPR025827,G3DSA:3.40.50.1390,IPR006119,PF07508, IPR011109,SSF53041,PTHR30461,PS51736,Coil, PF00239
MRFFSYGRKSVFSDKSDSIDNQFRMNREYCESKFSGQVDSWQQFSDEDFTGANTSRPDLQRMLSFIKGGFCDVLVVYQLDRLSRDVRDFANIYALLEEHGVMFISIKENIDTTTPIGRAMMYVTVVFAQMERETIAARVTDNMLGLAKKGYWTGGNPPVGYVRKHIVVNGKKHCSIEVDPDGARYVTQIFDTFLAYNCSLQGMETRFKNQGIRTQSGKFFSTTQLHKMLTMPYCVEATPEVYDFYAAKGCIMDPGSPREMWDGSVGVIIYGRSTEKNKKHQAQPPEKWTVCLGKHKPFMPAEKWLAVQSRFTQNKCIKDAKWPVPLLKGVLRCKCGNLMQVSRKKKVDGTCSSWYYCRKRMRQGVDACDMGQIKCDLLDEKVLELFRGITADPALIQKFVKAEAPTDVPDLKAAQARVSACERKIGRLAASLALAEDSAASKYIIAEMERLDVELGALKREASLAEMESHRAAASAKDAKATAAEIAKLIHGLDGFDDKEKNAIARAVIQECTWDGERLFIKL

SEQ ID NO: 4164 - protein, 523 aa, Unknown
  Description of Unknown: Integrase B4165 sequence
  cd00338,SM00857,G3DSA:1.10.10.2600,IPR036162,PF13408, PS51737,IPR025827,G3DSA:3.40.50.1390,IPR006119,IPR038109, PF07508,IPR011109,SSF53041,PTHR30461,PS51736, Coil,PF00239
MNESVCIYLRKSRADREAEAHGEGETLARHERILLDLAKKKEYIVGAIYREVVSGETIADRPVMQQLLHEVESGMWDGVLVVEVERLARGDTIDQGVVSRAFQYSDTKIITPTKIYDPNNEFDEEYFEFGLFMSRREYKTIKRRLNAGRISSVKEGKYCGNKPPYGYERVKLEKEKGYTLRPVPTQAEIVKMIYTWYAGDGCEQIGVAKIARKLNEMGIESALCGDWTPASIQGILTNPVYIGKIRWNGRKTVKTIQNGQVIKTRPRSKDTLICDGLHPAIISEDLFNSVQEIRKKNPPRPISIKNSIRNPLSGIVYCSKCGRAMVRRPYQKRGQEDTLMCPYTSCPTVSSKLSLVEKAVLDGIREIVEKYKLNNDINTSSQAIDLTIISKQNLIHEKENELESLNAQKAKQYDLLEQGIYTTEVFLERAKTISASIQSCSDTIEKLKEEIKHDENIIKQQSDFIPRCEELLDNYWSLDTESKNKMLKSLIEKVAYSKDTKNAYGKGNEIGFQLDIFPKIQEK

SEQ ID NO: 4165 - protein, 523 aa, Unknown
  Description of Unknown: Integrase B4166 sequence
  PTHR30461:SF3,cd00338,SM00857,IPR036162,PF13408, IPR025827,G3DSA:3.40.50.1390,PS51737,IPR006119,PF07508, SSF53041,IPR011109,PTHR30461,PS51736,Coil, PF00239
MFFGIYGRKSVYSDKSDSVDNQHRMCNDYIKAHFKADDITLVTSYSDEDYTGANTKRPDLQRLLEDVKSGAINVLVVYQLDRISRDVRDFSNIYAMLEEYHVMFISIKENIDTTTPIGRAMMYVTVVFAQMERETIATRVRDNMIGLAKKGFWTGGNPPYGYVRKNILINGKKHVTIEPDPDGVAYNIWIYDSFLKNHCSLQSMETYFRKEGIKTRNGAFFSTTQLYKILTMPYCVEATPEIYDYFAAKGCQMDPDSPREKWDGSVGVMIYGRSTGVNKKHQLQPPEKWLVCLGLHKPFMPAAKWLAVQNQFSENKFDKTQKYDIPLLKGILRCSCGSIMAVSRKKKINGEVSSWYYCLRRMKNGVEACDRKQIKVDIIDQKLLNTLHSIEIDPSMIYRFVQKSELPLPDIKTINNKISSIESRIGRLASSLALADGSAASKYIVAEIERLDSDLQFLKRERAVINVEIKKRDELNESAEGKAQHIQNVMKGLNGFTAEEKNRIMRDILKECVWDGSELSIVL

SEQ ID NO: 4166 - protein, 523 aa, Unknown
  Description of Unknown: Integrase B4167 sequence
  SM00857,G3DSA:1.10.10.2600,IPR036162,PF13408,PS51737, G3DSA:3.40.50.1390,IPR025827,IPR006119,IPR038109,PF07508, SSF53041,IPR011109,PTHR30461,PS51736,cd00338, PF00239
MNESVCIYLRKSRSDREAEAHGEGETLARHEHILLDLAKRQGYSIGAIYREVVSGETISARPVMQKLLHEVESGMWDGVLVVEVERLARGDTIDQGVVSRAFQYSDTKIITPTKIYDPNNEFDEEYFEFGLFMSRREYKTIKRRLNNGRISSVKEGKYCGNKPPYGYERVKLEKEKGYTLRPVPAQAEIVKMIYTWYAGDGCEQIGVAKIVRKLNDMGIESALGGDWTPASIQGILTNPVYIGKIRWNGRKTVKTIQNGQVVKTRPRSKDVLICEGLHPAIISDDLYNSVQEIRKKNPPRPISIKNTVRNPLAGIVYCSKCGRAMVRRPHQKRGQEDTLMCPYTSCSTVSSKLSLVEKAVIDGIKELTEKYKLNNDINVPSNTINSGIVYKQNLIREKESELESLNVQKAKQYDLLEQGIYTTEVFLERSKTIAISIQSCSDTITKLRGEIKHDENIMVQQSDFVPRCEELLNNYWDLNMESRNRMLKNLVEKVVYSKNIKNTYGKGNEINFELDIFPKIQEK

SEQ ID NO: 4167 - protein, 523 aa, Unknown
  Description of Unknown: Integrase B4168 sequence
  PTHR30461:SF3,SM00857,G3DSA:1.10.10.2600,IPR036162,PF13408, IPR025827,PS51737,G3DSA:3.40.50.1390,IPR006119,IPR038109, PF07508,SSF53041,IPR011109,PTHR30461,Coil, PS51736,cd00338,PF00239
MGKKQKITGGDAVIYARYSSHNQRDVSIEQQIEACRKYAASLSLKVTLTYEDRAISGRTDNRPAFQRMMRDAENGKFQYVLAWKSNRMGRNMMQAMVNEARLVDCGVKVFYAEEDFDDNAAGRFALRSMMNVNQFYIENMAEDVKRGLYDNAKKGLVNGSLPLGYKRGADGKPEIDEPKAAIVREIYTRVAAGELFASIAADLNARGIKTARGREWNKGSFHVLCHNDRYRGIYMYGDIRIPGGMPRIISDELFYDAQEAYGMKKDNRYGRARHGAENYLLTGKLYCGHCGDYMVGISGTSKSGEMHHYYACQKHRLEHTCEKKAIRRDVIENAVAQAIMMYCLDDETIDFIVDSTIAYFKQKDHELHIEVMENELAAVQQAISNLMKAIEAGIITSTTRTRLLDLEEQQAKLSAKINTAKAERVEIDRDDLIAGLQLFRAGDVKNKKFLAKLFNTFLIAVYLYNDNRLKIVFSFTGNHNSVEIPLELNNDCPDNEIVSDETEVRMSHLECDGRDSNPRPTDS

SEQ ID NO: 4168 - protein, 523 aa, Unknown
  Description of Unknown: Integrase B4169 sequence
  cd03768,PTHR30461:SF3,SM00857,IPR036162,PF13408, IPR025827,PS51737,G3DSA:3.40.50.1390,IPR006119,PF07508, IPR011109,SSF53041,PTHR30461,PS51736,Coil, PF00239
MRFFSYGRKSVFSDKSDSIDNQFRMNREYCESKFSGQVDSWQQFSDEDFTGANTSRPDLQRMLSFIKGGFCDVLVVYQLDRLSRDVRDFANIYAMLEEHGVMFISIKENIDTTTPIGRAMMYVTVVFAQMERETIAARVTDNMLGLAKKGYWTGGNPPVGYVRKHIVVNGKKHCSIEVDPDGARYVTQIFDAFLSYNCSLQGMETRFKNQGIRTQSGKFFSTTQLHKILTMPYCVEATPEVYDFYAAKGCIMDPGSPREMWDGSSGVIIYGRSTEKNKKHQLQPPEKWTVCLGKHKPFMPAEKWLAVQSRFTQNKCIKDAKWPVPLLKGVLRCKCGNLMQVSRKKKVDGTCSSWYYCRKRMRQGVDACDMGQIKCDLLDEEVLELFRGIAADPGLIQKFVKAEAPADVPDLKAAQARVSACERKIGRLAASLALAEDSAASKYIIAEMERLDVELGALKREASLAEMESHRAAASAKDAKATAAEIAKLIHGLEGFDDKEKNAIARAVIQECTWDGERLFITL

SEQ ID NO: 4169 - protein, 523 aa, Unknown
  Description of Unknown: Integrase B4170 sequence
  cd03768,PTHR30461:SF3,SM00857,IPR036162,PF13408, PS51737,G3DSA:3.40.50.1390,IPR025827,IPR006119,PF07508, IPR011109,SSF53041,PTHR30461,PS51736,Coil, PF00239
MRFFSYGRKSVFSDKSDSIDNQFRMNREYCESKFSGQVDSWQQFSDEDFTGANTSRPDLQRMLSFIKGGFCDVLVVYQLDRLSRNVQDFANIYALLEERGVMFISIKENIDTTTPIGRAMMYVTVVFAQMERETIAARVTDNMLGLAKKGYWTGGNPPVGYVRKHIVVNGKKHCSIEVDPDGARYVTQIFDTFLAYNCSLQGMETRFKNQGIRTQGGKFFSTTQLHKMLTMPYCVEATPEVYDFYAAKGCIMDPGSPREMWDGSAGVIIYGRSTEKNKKHQLQPPEKWTVCLGKHKPFMSAEKWLAVQSRFTQNKCIKDAKWPVPLLKGVLRCKCGNLMQVSRRKKVDGTCSSWYYCRKRMRQGVDACDMGQIKCDLLDEEVLELFRGIAADPALIQKFVKAEAPADVPDLKAAQARVAACERKIGRLAASLALAEDSAASKYIIAEMERLDVELGALKREASLAEMESHRAAASAKDAKATAAEIAKLIHGLDGFDDKEKNAIARAVIQECTWNGERLLITL

SEQ ID NO: 4170 - protein, 523 aa, Unknown
  Description of Unknown: Integrase B4171 sequence
  cd03768,PTHR30461:SF3,SM00857,IPR036162,PF13408, IPR025827,PS51737,G3DSA:3.40.50.1390,IPR006119,PF07508, IPR011109,SSF53041,PTHR30461,PS51736,Coil, PF00239
MRFFSYGRKSVFSDKSDSIDNQFRMNREYCESKFSGQVDSWQQFSDEDFTGANTSRPDLQRMLSFIKGGFCDVLVVYQLDRLSRDVRDFANIYALLEEHGVMFISIKENIDTTTPIGRAMMYVTVVFAQMERETIAARVTDNMLGLAKKGYWTGGNPPVGYVRKHIVVNGKKHCSIEVDPDGARYVTQIFDTFLAYNCSLQGMETRFKNQGIRTQSGKFFSTTQLHKMLTMPYCVEATPEVYDFYAAKGCIMDPGSPREMWDGSVGVIIYGRSTEKNKKHQAQPPEKWTVCLGKHKPFMPAEKWLAVQSRFTQNKCIKDAKWPVPLLKGVLRCKCGNLMQVSRKKKVDGTCSSWYYCRKRMRQGVDACDMGQIKCDLLDEEVLELFRGITADPALIQKFVKAEAPADVPDLKAAQARVSACERKIGRLAASLALAEDSAASKYIIAEMERLDVELGALKREASLAEMESHRAAASAKDAKATAAEIAKLIHGLEGFDDKEKNAIARAVIQECTWDGERLFITL

SEQ ID NO: 4171 - protein, 523 aa, Unknown
  Description of Unknown: Integrase B4172 sequence
  PTHR30461:SF3,SM00857,G3DSA:1.10.10.2600,IPR036162,PF13408, IPR025827,G3DSA:3.40.50.1390,PS51737,IPR006119,IPR038109, PF07508,IPR011109,SSF53041,PF00239,PTHR30461, PS51736,Coil,cd00338
MRAFIYCRFSSHKQQELSIEGQRDICQEYADKHSITVVGQYADRARSGKTENRADFRRLMRDAATGVVDCVLVWRYDRFFRNRAESALYRKQLEAAGVHLISVTEYIPEGSAGIITQGMIETVAEYFSAKLSEDVSRGMNKAAQHCQIVGRAPLGYRAGPNKRWQIDPVGAELVRRIFEWYASGKAMGQLAAQLNEEGHRTTNGTLYTRSSFNSILRNEKYIGVYSYGGEVRIEGGCPRIIEDELFFTVQRRLSANRHRPGAYKAEVPYLLSGKLFCGLCGAPMTGTAGTSHTGARHYYYICNNRRAKTCKKKNVRLDLIEEAVLQSALDVLTDENIAYISTEVERRCAENSESAALLASLNAQLEEVQRRLKNIGNAIAQGIITETTKELLEEAEADRTALRQQIDRAKVQAALVVKAEAVACWLDGFRRGDRTDPDFRRQVFGALVHSVFVYDDYLKIIFNVDSAGAAVVPYEATQAAAPSEAPPGSYLDTLGAPKYALQEIAARFLLQSFKEGSIWCTIG

SEQ ID NO: 4172 - protein, 523 aa, Unknown
  Description of Unknown: Integrase B4173 sequence
  SM00857,G3DSA:1.10.10.2600,IPR036162,PF13408,IPR025827, G3DSA:3.40.50.1390,PS51737,IPR006119,IPR038109,PF07508, IPR011109,SSF53041,PTHR30461,Coil,PS51736, cd00338,PF00239
MPDYAIYLRKSRKDNEAEQRGEGETLARHRKLLLDYAKCEGLRIAKIYEEVVSGESIATRPQMQLLLADVEQGLYDGVLVVEVERLARGDTMDQGLVAQTFKYSNTKIYTPMKVYDPNNEFDEEYFEFGLFMSRREYKTINRRLQRGRRASASEGKYIAGRAPYGYEKIKIPNDKGNTLRIISEQAEVIKQIYDWYVNGLDGEDAGLSKIATKLNSLGIKPYRNDYWSKETLRDIITNPVYAGFIRWGYRRNKKTVIDGKTVTSRPVTLDENCVLSKGLHEAIVTQELYDKAQCKIKSVPPPPVGYKKELKGSLAGIVICKNCGHKMTLRSPSTKGKPPYLVCHYRYCDNVSTPYDIVEKRVLDTLKEWAEKYKLKEKQNKKNSSSSIDMLQSSVESAKKKVATLQQQLDGMCDLLEQGIYTPDMFRQRSVSVTERITKAKAEYEQLSEQLVSTEKLLTEKSEFIPKVEHVLKIYDTLSTPADKNRVLKEVIDHAEYSKAKSGAYKGVSVDDFNLTVFPKMPL

SEQ ID NO: 4173 - protein, 523 aa, Unknown
  Description of Unknown: Integrase B4174 sequence
  cd03768,PTHR30461:SF3,SM00857,IPR036162,PF13408, IPR025827,G3DSA:3.40.50.1390,PS51737,IPR006119,PF07508, SSF53041,IPR011109,PTHR30461,PS51736,Coil, PF00239
MRFFSYGRKSVFSDKSDSIDNQFRMNREYCESKFSGQVDSWQQFSDEDFTGANTSRPDLQRMLSFIKNGFCDVLVVYQLDRLSRDVRDFANIYALLEEHGVMFISIKENIDTTTPIGRAMMYVTVVFAQMERETIAARVTDNMLGLAKKGYWTGGNPPVGYVRKHIVVNGKKHCSIEVDPDGARYVTQIFDTFLAYNCSLQGMETRFKNQGIRTQSGKFFSTTQLHKILTMPYCVEATPEVYDFYAAKGCIMDPGSPREMWDGSVGVIIYGRSTEKNKKHQAQPPEKWTVCLGKHKPFMPAEKWLAVQSRFTQNKCIKDAKWPVPLLKGVLRCKCGNLMQVSRKKKVDGTCSSWYYCRKRMRQGVDACDMGQIKCDLLDEEVLELFRGITADPALIQKFVKAEAPADVPDLKAAQARVSACERKIGRLAASLALAEDSAASKYIIAEMERLDVELGALKREASLAEMESHRAAASAKDAKATAAEIAKLIHGLDGFDDKEKNAIARAVIQECTWDGERLFITL

SEQ ID NO: 4174 - protein, 523 aa, Unknown
  Description of Unknown: Integrase B4175 sequence
  cd03768,PTHR30461:SF3,SM00857,IPR036162,PF13408, PS51737,G3DSA:3.40.50.1390,IPR025827,IPR006119,PF07508, IPR011109,SSF53041,PTHR30461,PS51736,Coil, PF00239
MRFFSYGRKSVFSDKSDSIDNQFRMNREYCESKFSGQVDSWQQFSDEDFTGANTSRPDLQRMLSFIKGGFCDVLVVYQLDRLSRDVRDFANIYALLEEHGVMFISIKENIDTTTPIGRAMMYVTVVFAQMERETIAARVTDNMLGLAKKGYWTGGNPPVGYVRKHIVVNGKKHCSIEVDPEGARYVTQIFDTFLAYNCSLQGVETRFKKQGIRTQNGKFFSTAQLHKMLTMPYCVEATPEVYDFYAAKGCIMDPGSPREMWDGSVGVIIYGRSTEKNKKHQAQPPEKWTVCLGKHKPFMPAEKWLAVQSRFTQNKCIKDAKWPVPLLKGVLRCKCGNLMQVSRKKKVDGTCSSWYYCRKRMRQGVDACDMGQIKCDLLDDEVLELFRGIAADPGLIQKFVKAEAPADVPDLKAAQARVSACERKIGRLAASLALAEDSAASKYIIAEMERLDVELGALKREASLAEMESHRAAASAKDAKATAAEIAKLIHGLDGFDDKEKNAIARAVIQECTWDGERLFITL

SEQ ID NO: 4175 - protein, 523 aa, Unknown
  Description of Unknown: Integrase B4176 sequence
  cd03768,PTHR30461:SF3,SM00857,IPR036162,PF13408, IPR025827,PS51737,G3DSA:3.40.50.1390,IPR006119,PF07508, IPR011109,SSF53041,PTHR30461,PS51736,Coil, PF00239
MRFFSYGRKSVFSDKSDSIDNQFRMNREYCESKFSGQVDSWQQFSDEDFTGANTSRPDLQRMLSFIKGGFCDVLVVYQLDRLSRDVRDFANIYALLEEHGVMFISIKENIDTTTPIGRAMMYVTVVFAQMERETIAARVTDNMLGLAKKGYWTGGNPPVGYVRKHIVVNGKKHCSIEVDPDGARYVTQIFDTFLAYNCSLQGMETRFKNQGIRTQSGKFFSTTQLHKMLTMPYCVEATPEVYDFYAAKGCIMDPGSPREMWDGSVGVIIYGRSTEKNKKHQAQPPEKWTVCLGKHKPFMPAEKWLAVQSRFTQNKCIKDAKWPVPLLKGVLRCKCGNLMQVSRKKKVDGTCSSWYYCRKRMRRGVDACDMGQIKCDLLDEEVLELFRGITADPALIQKFVKAEHPAAVPDLKAAQARVSACERKIGRLAASLALAEDSAASKYIIAEMERLDVELGALKREASLAEMESHRAAASAKDAKATAAEIAKLIHGLDGFDDKEKNAIARAVIQECTWDGERLFITL

SEQ ID NO: 4176 - protein, 523 aa, Unknown
  Description of Unknown: Integrase B4177 sequence
  PTHR30461:SF3,cd00338,SM00857,IPR036162,PF13408, IPR025827,G3DSA:3.40.50.1390,IPR006119,PF07508,IPR011109, SSF53041,PTHR30461,PS51736,Coil,PF00239
MFFGIYGRKSVYSDKSDSVDNQHRMCNDYIKTHFKADDITLITSYSDEDYTGANTKRPDLQRLLEDVKSGAINVLVVYQLDRISRDVRDFSNIYAMLEEYHVMFISIKENIDTTTPIGRAMMYVTVVFAQMERETIATRVRDNMIGLAKKGFWTGGNPPYGYVRKNILINGKKHVTIEPDPDGVAYNIWIYDSFLKNHCSLQSMETNFRKEGIKTRNGAFFSTTQLYKILTMPYCVEATPEIYDYFAAKGCQMDPDSPREKWDGSVGVMIYGRSTGVNKKHQLQPPEKWLVCLGLHKPFMPAAKWLAVQNQFSENKFDKTQKYDIPLLKGILRCSCGSIMAVSRKKKINGEVSSWYYCLRRMKNGVEACDRKQIKVDIIDQKLLNTLHSIEIDPSMIYRFVQKSELPLPDIKTINNKISSIESRIGRLASSLALADGSAASKYIVAEIERLDSDLQFLKRERAVINVEIKKRDELNESAEGKAQHIQNVMKGLNGFTAEEKNRIMRDILKECVWDGSELSIVL

SEQ ID NO: 4177 - protein, 523 aa, Unknown
  Description of Unknown: Integrase B4178 sequence
  PTHR30461:SF3,SM00857,G3DSA:1.10.10.2600,IPR036162,PS51737, G3DSA:3.40.50.1390,IPR006119,IPR038109,PF07508,IPR011109, SSF53041,PTHR30461,Coil,PS51736, cd00338,PF00239
MPNTESFTVNEILVYLRKSRSDSQDMSVEEVLRKHEEMIQQYASTHFHSPIPEKNIFREVVSGETIDSRPQMKNLLKMIESEQFKAVLVVEPQRLSRGDLEDCGRLINILRYTNTTVLTLTHSFDLQEEYERKFFGMEITRGNDYLEYTKRILKRGREASVAKGNYIGSVDPYGYKKTVIKKDGVTCHTLEIIPEEADTVKLIHELYAYTPEGIGFTNIAHKLDAMHIKPKKAAHWTPAIISSILCNPLYLGMVRWNNRKVVKYINEGQLAKARPQNTEAKYYKGLHEPIITQELYDACMARRGTNPSLRRNKELCNPFAGLLYCGTCGHAMSLKIYKNHNSVSQMMLCNHQAYCHTKSVLYSAFLRRFISSMEDTLNDFELAQKSDDGRTQAISKTIVINLENKLKKLNEKDARQKDAYEDGIYSKEEFLKRNVRTQQDIASTIIALEDARAKKADIIDYEEKIRRFKDCLHALNDPELSAAEKNRFLKSCVDKILYYNNMESKAGIGRYIENVFSLEIQYK

SEQ ID NO: 4178 - protein, 523 aa, Unknown
  Description of Unknown: Integrase B4179 sequence
  cd03768,PTHR30461:SF3,SM00857,IPR036162,PF13408, IPR025827,PS51737,G3DSA:3.40.50.1390,IPR006119,PF07508, IPR011109,SSF53041,PTHR30461,PS51736,Coil, PF00239
MRFFSYGRKSVFSDKSDSIDNQFRMNREYCESKFSGQVDSWQQFSDEDFTGANTSRPDLQRMLSFIKGGFCDVLVVYQLDRLSRDVRDFANIYALLEEHGVMFISIKENIDTTTPIGRAMMYVTVVFAQMERETIAARVTDNMLGLAKKGYWTGGNPPVGYVRKHIVVDGKKHCSIEVDPDGARYVTQIFDTFLAYNCSLQGMETRFKNQGIRTQSGKFFSTTQLHKMLTMPYCVEATPEVYDFYAAKGCIMDPGSPREMWDGSVGVIIYGRSTEKNKKHQAQPPEKWTVCLGKHKPFMPAEKWLAVQSRFTQNKCIKDAKWPVPLLKGVLRCKCGNLMQVSRKKKVDGTCSSWYYCRKRMRQGVDACDMGQIKCDLLDEKVLELFRGITADPALIQKFVKAEAPADVPDLKAAQARVSACERKIGRLAASLALAEDSAASKYIIAEMERLDVELGALKREASLAEMESHRAAASAKDAKATAAEIAKLIHGLDGFDDKEKNAIARAVIQECTWDGERLFITL

SEQ ID NO: 4179 - protein, 523 aa, Unknown
  Description of Unknown: Integrase B4180 sequence
  PTHR30461:SF3,IPR036162,PS51737,IPR011109,PTHR30461, PF00239,G3DSA:1.10.10.2600,IPR006119,SSF53041,cd00338, SM00857,PS01300,IPR025827,IPR038109,IPR015967, PS51736,PF13408,G3DSA:3.40.50.1390,PF07508,Coil
MKRAVFYGRYSSDRQTEQSIEGQRRVCEEFAKAEQIQIVGEYIDRATSGTSTEQREQFQKMLKDSKNGGWDYVLVYKLDRFARSRYDSAISKQQLKKNGVKVLSATERITDSPEGILIEGLLESMDEYFSRELSRKCKRGIRESIIKGHNFGGRVLYGYDRKDKRFVVNEEQAVNVRRIFKSYLSGCTIQSIADQLNADGYRTNYGNEFKRYTVSDILHNDKYTGIHYIDGIEEPETCPAIISQTTFERVKEKLNQSAHRSREHTTGHTYALSGLLQCGVCGRYVCGSSVERKYFYYACRSREHAENSVHIHADKLEQVVIDALQTFFTEEQVSTLAERLYQIYTTDMDGKPDRSKRLNEIEKQIQGTVNALIACPSSKALQEKLTQLEEQKAEIEKMPILQPQLKKEHFENYFRWLALRLEHIEDRQTFFHTVIHKVLVYPEKAVIILNMTDEMADPPKREQVEAFMSNVGEVSLYPCPNCTIVKPSPSRFCDICTAPQRSNAISLIWNFCPSSSMKFSIKP

SEQ ID NO: 4180 - protein, 523 aa, Unknown
  Description of Unknown: Integrase B4181 sequence
  PTHR30461:SF3,SM00857,G3DSA:1.10.10.2600,IPR036162,PF13408, PS51737,G3DSA:3.40.50.1390,IPR025827,IPR006119,IPR038109, PF07508,IPR011109,SSF53041,PTHR30461,cd00338, PF00239
MPRKPAKHPAKPKRGKKLEIEEPGVLYGRYSSHNQKDISIEQQFEKCYELAAEYGIRIIDTYADRAVSGRTDKRVDFQRMMADAAKGKFRYVLAWKSNRIGRNMLEALVNEARFQELGVRVLYVEEDFDDTAAGRFAARSMMNVNQFYSENMAEDIKRGLYDNAANCMVTNGHLPYGYKADETLHYAIDEPRAAVIREIFTRVSCGEAFVDIMSSLNARGITTSYGRPWGRSSFQKILSNERYRGIYIYGDVRIEGGIPRIVSDELYFKVQEAITTKKNPQGRHRVNGDYLLTGKLFCGHCKSPMTGISGTGRAGKLHFYYVCQKRRTEKPCHKKNVRRDVIELKIAKAIRDYALKDDIIEWIADSCVEDHDRRVSESHLSVFEDQLAEVNRSIKNVMSAIEKGIITETTKGRLMELEAERTAIEGKICAAKAAIVPTNRERLVEWLRSLREGDVHDKKYQAGLFDTFLVAAYLYDDNRVKIVFSFAGDKNTIEIPLEDVIDSIDDEASCVRLSSTLSHQNPH

SEQ ID NO: 4181 - protein, 523 aa, Unknown
  Description of Unknown: Integrase B4182 sequence
  PTHR30461:SF3,SM00857,G3DSA:1.10.10.2600,IPR036162,PS51737, G3DSA:3.40.50.1390,IPR006119,IPR038109,PF07508,IPR011109, SSF53041,PTHR30461,Coil,PS51736,cd00338, PF00239
MVSFDSIIIYLRKSRSDDPAQTVEEVLAKHEHILQDYCMKEYGKAIPEKRIYREVVSGETIQDRPVMQQLLKELEAENISGVLIVEPQRLSRGDLQDCGQIINSFRYTNTAVITPGKTYDLSDEYDRKFFEVELTRGNDYLEYTKKILSRGRVASVRQGNYICSVRPYGYRKITLGSGKDKCHTLEIIPEEADAIRLMYHLYLDENMGFTNIARTLDSLHIKPLKSDNWSAATIRDMIDNPIYIGKVVWNSRKVVKKWENEQITKVRPRNKGDDVICVNGRHEAIIDEHTFEAARNKRGLTPKIKKFKELRNPLAGLLFCGTCGHGMSMKKYVDKRSHTGKVTTVMLCNQQAVCHTKSAQYEDILAKIKVSLANAIFDFEIKLKEQENNNIDMHELRMSSLLDELNRLYSKDVRQKDAYEDGIYTKEEYIERNSKLQERILNVKEDIADEKKNIPVKIDYEDKIITFKDCLASLDDPNISAADKNILLKSCIDKIIYYNDMPSKPGIGRYIENSFRLEIFLKL

SEQ ID NO: 4182 - protein, 523 aa, Unknown
  Description of Unknown: Integrase B4183 sequence
  PTHR30461:SF3,SM00857,G3DSA:1.10.10.2600,IPR036162,PS51737, G3DSA:3.40.50.1390,IPR006119,IPR038109,PF07508,IPR011109, SSF53041,PF00239,PTHR30461,PS51736,Coil, cd00338
MVSFDSIIIYLRKSRSDDPAQTVEEVLAKHERILQDYCIKEYGKAIPEKRIYREVVSGETIQDRPVMQQLLKELETGNISGVLIVEPQRLSRGDLQDCGQIINSFRYTNTAVITPGKTYNLSDEYDRKFFEMELTRGNDYLEYTKKILSRGRVASVRQGNYICSVRPYGYRKITLGSGKDKCHTLEIIPEEADAIRLMYHLYLDENMGFTNIARTLDSLHIKPLKSDNWSAATIRDMIDNPIYIGKVVWNSRKVVKKWENEQITKVRPRNKGDDVICVNGRHEAIIDEHTFEAARNKRGLTPKVKKFKELRNPLAGLLFCGTCGHGMSMKKYVDKRSHTGKVTTIMLCNQQAICHTKSAQYEDILAKIKVSLANAISDFKIKLKEQENNNIDMHELRIASLEEELNRLYNKDVRQKDAYEDGIYTKEEYIERNSKLQERILNVKEEIADEKNNVPVKIDYEDKIMTFKDCLSSLDDSDISAADKNILLKSCIDKIIYYNDMPSKPGIGRYIENSFRLEIFLKL

SEQ ID NO: 4183 - protein, 523 aa, Unknown
  Description of Unknown: Integrase B4184 sequence
  cd03768,PTHR30461:SF3,SM00857,IPR036162,PF13408, PS51737,IPR025827,G3DSA:3.40.50.1390,IPR006119,PF07508, IPR011109,SSF53041,PTHR30461,PS51736,Coil, PF00239
MRFFSYGRKSVFSDKSDSIDNQFRMNREYCESKFSGQVDSWQQFSDEDFTGANTSRPDLQRMLSFIKGGFCDVLVVYQLDRLSRDVRDFANIYALLEEHGVMFISIKENIDTTTPIGRAMMYVTVVFAQMERETIAARVTDNMLGLAKKGYWTGGNPPVGYVRKHIVVNGKKHCSIEVDPDGARYVTQIFDTFLAYNCSLQGMETRFKNQGIRTQSGKFFSTTQLHKMLTMPYCVEATPEVYDFYAAKGCIMDPGSPREMWDGSVGVIIYGRSTEKNKKHQAQPPEKWTVCLGKHKPFMPAEKWLAVQSRFTQNKCIKDAKWPVPLLKGVLRCKCGNLMQVSRKKKVDGTCSSWYYCRKRMRQGVDACDMGQIKCDLLDEKVLELFRGITADPALIQKFVKAEAPADVPDLKAAQARVSACERKIGRLAASLALAEDSAASKYIIAEMERLDVELGALKREASLAEMESHRAAASAKDAKATAAEIAKLIHGLDGFDDKEKNAIARAVIQECTWDGERLFITL

SEQ ID NO: 4184 - protein, 523 aa, Unknown
  Description of Unknown: Integrase B4185 sequence
  PTHR30461:SF3,SM00857,G3DSA:1.10.10.2600,IPR036162,PF13408, PS51737,G3DSA:3.40.50.1390,IPR025827,IPR006119,IPR038109, PF07508,IPR011109,SSF53041,PTHR30461,cd00338, PF00239
MPTSKNTARKYAAGGGSDNSCGVEPLRAVIYARYSSSGQREESIEGQLRDCYEFAKKHGIIVIGEYIDKAMTGRVDRRPDFQRMMKDSEKGRFNCVLLWKMDRFARNRYDSAMYKYKLKKNGIRIFYAKETIPDGPEGIILESVMEGYAEYYSENLAQNVKRGNYDSALELKTLGKTCLGLKTGPDGRYMIDQAEATIVRRIFEEYAEGERAKDIYERLNSEGYRTSRGGKFNKNSLRRILSNKKYIGVYEYEDIYVENGIPAIITDRDLFERVQKMLKINHDAPARGKAQNFLLTTKLFCGLCGSPMIGDGGTSHTGKAYAYYSCTKRKRGRSCKKESVPKDWIEDLVVGELVKIVHNDELIEQIADRVMEYQKREKDQSGLHALEIRQKENEKAISNMLAAIEAGIITPSTKTRLMELEADRADIEKGIAHELLAEPEFERDQIIYFLERFRSGDINDEAYRIMLVDTFLNSVYLYDDDHLVLVMNYSGENCKVDLKLVEGAVSGDGCKGSAFAPSSAVDL

SEQ ID NO: 4185 - protein, 523 aa, Unknown
  Description of Unknown: Integrase B4186 sequence
  PTHR30461:SF3,cd00338,SM00857,G3DSA:1.10.10.2600,IPR036162, PS51737,G3DSA:3.40.50.1390,IPR006119,IPR038109,PF07508, IPR011109,SSF53041,PTHR30461,PS51736,Coil, PF00239
MVSFDSIIIYLRKSRSDDPAQTVEEVLAKHERILQDYCMKEYGKAIPEKRIYREVVSGETIQDRPIMQQLLKELEAENISGVLIVEPQRLSRGDLQDCGQIINSFRYTNTAVITPGKTYDLSDEYDRKFFEMELTRGNDYLEYTKKILSRGRVASVRQGNYICSVRPYGYRKITLGSGKDKCHTLEIIPEEADAIRLMYHLYLDENMGFTNIARTLDSLHIKPLKSDNWSAATIRDMIDNPIYIGKVVWNSRKVVKKWENEQITKVRPRNKGDDVICVNGRHEAIIDERTFEAARNKRGLTPKVKKFKELRNPLAGLLFCGTCGHGMSMKKYVDKRSHTGKITTVMLCNQQAVCHTKSAQYEDILAKIKISLANAISNFKIKLKEQENNNIDMHELRIASLEEELNRLYNKDVRQKDAYEDGIYTKEEYIERNSKLQERILNVKEEIADEKNNVPVKIDYEDKIMTFKDCLSSLDDSDISAADKNILLKSCIDKIIYYNDMPSKPGIGRYIENSFRLEIFLKL

SEQ ID NO: 4186 - protein, 523 aa, Unknown
  Description of Unknown: Integrase B4187 sequence
  cd03768,PTHR30461:SF3,SM00857,IPR036162,PF13408, IPR025827,PS51737,G3DSA:3.40.50.1390,IPR006119,PF07508, IPR011109,SSF53041,PTHR30461,PS51736,Coil, PF00239
MRFFSYGRKSVFSDKSDSIDNQFRMNREYCESKFSGQVDSWQQFSDEDFTGANTSRPDLQRMLSFIKGGFCDVLVVYQLDRLSRDVRDFANIYALLEEHGVMFISIKENIDTTTPIGRAMMYVTVVFAQMERETIAARVTDNMLGLAKKGYWTGGNPPVGYVRKHIVVNGKKHCSIEVDPDGARYVTQIFDTFLAYNCSLQGMETRFKNQGIRTQSGKFFSTTQLHKMLTMPYCVEATPEVYDFYAAKGCIMDPGSPREMWDGSVGVIIYGRSTEKNKKHQAQPPEKWTVCLGKHKPFMPAEKWLAVQSRFTQNKCIKDAKWPVPLLKGVLRCKCGNLMQVSRKKKVDGTCSSWYYCRKRMRQGVDACDMGQIKCDLLDEEVLELFRGITADPALIQKFVKAEAPADVPDLKAAQARVSACERKIARLAASLALAEDSAASKYIIAEMERLDVELGALKREASLAEMESHRAAASAKDAKATAAEIAKLIHGLDGFDDKEKNAIARAVIQECAWDGERIFITL

SEQ ID NO: 4187 - protein, 523 aa, Unknown
  Description of Unknown: Integrase B4188 sequence
  PTHR30461:SF3,SM00857,G3DSA:1.10.10.2600,IPR036162,PS51737, G3DSA:3.40.50.1390,IPR006119,IPR038109,PF07508,IPR011109, SSF53041,PF00239,PTHR30461,PS51736,Coil, cd00338
MVSFDSIIIYLRKSRSDDPAQTVEEVLAKHERILQDYCMKEYGKAIPEKRIYREVVSGETIQDRPVMQQLLKELEAENISGVLIVEPQRLSRGDLQDCGQIINSFRYTNTAVITPGKTYDLSDEYDRKFFEMELTRGNDYLEYTKKILSRGRVASVRQGNYICSVRPYGYRKITLGSGKDKCHTLEIIPEEADAIRLMYHLYLDENMGFTNIARTLDSLHIKPLKSDNWSAATIRDMIDNPIYIGKVVWNSRKVVKKWENEQITKVRPRNKGDDVICVNGRHEAIIDERTFEAARNKRGLTPKVKKFKELRNPLAGLLFCGTCGHGMSMKKYVDKRSHTGKITTVILCNQQAVCHTKSAQYEDILAKIKISLANAISNFKIKLKEQENNNIDMHELRIASLEEELNRLYNKDVRQKDAYEDGIYTKEEYIERNSKLQERILNVKEEIADEKKNIPVKIDYEDKIITFKDCLASLDDPNISAADKNILLKSCIDKIIYYNDMPSKPGIGRYIENSFRLEIFLKL

SEQ ID NO: 4188 - protein, 523 aa, Unknown
  Description of Unknown: Integrase B4189 sequence
  PTHR30461:SF3,cd00338,SM00857,G3DSA:1.10.10.2600,IPR036162, PF13408,PS51737,G3DSA:3.40.50.1390,IPR025827,IPR006119, IPR038109,PF07508,IPR011109,SSF53041,PTHR30461, PS51736,Coil,PF00239
MARKKNIAAGLDAVIYARYSSHNQREVSIEQQIAECTKHAAALGLRIVGTYEDRAISGKTDNRPRFQQMMRDAEKGKFQAVVAWKSNRIGRNMLQAMVNEAKLDDYGVKVFYAEEDFDDTAAGRFALRNMMNVNQFYSENMAEDITRGLYDNANKCMANGRQPLGYKRGADGKVMLDEPAAAVVREIFNRVATGDLFVDIARDLNAKGIKTSKGATWNKGSFQSICQNERYKGIYIYGNVRIVDGIPRIVSDELWYKVQEAMRMKKNPVGTRHRVGAEDYLLTGKLRCGHCGSYMTGVSGTSRNGELHYYYTCQKRRTEHACNKKNVRRDVIEPAIAQAIKMYCLTDDVIEWVANRTVEYWEKHDNDLHIEALEQQLEENKKATSNMLKAIEMGIITDATRSRMIELETEQSKLAVQLNAAKADVVKIDRDDLIDELQIFRDMDVNNRSVQAELFKDFLVAAYIYDDNRLKLVFSFMGKDNSVEIPLETGEDPPDGGDSPDAKMFVLTPDCSTIGSNKSYKHR

SEQ ID NO: 4189 - protein, 523 aa, Unknown
  Description of Unknown: Integrase B4190 sequence
  PTHR30461:SF3,cd00338,SM00857,G3DSA:1.10.10.2600,IPR036162, PF13408,IPR025827,PS51737,G3DSA:3.40.50.1390,IPR006119, IPR038109,PF07508,IPR011109,SSF53041,PTHR30461, PS51736,Coil,PF00239
MSIKAVSYCRYSTDNQTENSIMYQMAAAEEYCKKHGMVLIDVYSDEAKTGTNTNREGLQRLIKDCDTSKFDAIIIYDQSRLSRNISDWFELRQLFSSKGKQLYSCNEQLSSDYLNSNAFLSEGIHALFAQNHVIETRRKTLDGVKSKAKQAGFCGGTPPLGYDIVNGEYVINEKEAPAIRKMFEMYALGKSYDDIMQVLYREGYRSKRGNKISSNAIYYLLRNERYVGIYYWNKYQYTVMRKRITRKENPEIVRIENAIPPIIDKETWTMVQEQLSKNKGASTRTKRQYLLSGLIKCGYCGGTYTGFASKNRRSGEETVYYTCSTKERLKTCKAKNVRGDEIESFVYYTLKDRIFNQDLAEQVADMIINQSKDIVTFDSAAVKREISKKKQAINNLFQAIENGLNAEITTDRINTLQDEIKALELSLEQSMKQNDTVIDREKLIQSLLEDAKKIDLDFEHRRAIIRKYVVKIEITDDTVNLHCIGDSSTTGGATPQYGVLLFAIDRISLKNIVRQVPTPTSKV

SEQ ID NO: 4190 - protein, 523 aa, Unknown
  Description of Unknown: Integrase B4191 sequence
  cd00338,SM00857,G3DSA:1.10.10.2600,IPR036162,PF13408, PS51737,G3DSA:3.40.50.1390,IPR025827,IPR006119,IPR038109, PF07508,IPR011109,SSF53041,PTHR30461,PS51736, Coil,PF00239
MNESVCIYLRKSRADREAEAHGEGETLARHQRILLDLAKKKEYIVGAIYREVVSGETIADRPVMQQLLHEVESGMWDGVLVVEVERLARGDTIDQGIVSRAFQYSDTKIITPTKIYDPNNEFDEEYFEFGLFMSRREYKTIKRRLNAGRISSVKEGKYCGNKPPYGYERVKLEKEKGYTLRPVPAQSEIVKMIYTWYAGDGCEQIGVAKITRKLNEMGIESSLGGDWTPASIQGILTNPVYIGKIRWNGRKTVKTIQNGQVIKTRPRSKDTLICEGLHPAIISEVLYDSVQEIRKKNPPRPISIKNSIRNPLSGIVYCSKCGRAMVRRPYQKCGQEDTLMCPYTSCPTVSSKLSLVEKAVIDGIREIVEEYKLNNDINISSKAIDLTIISKQNLIHEKENELESLNAQKAKQYDLLEQGIYTTEVFLERAKTISASIQSCSNTIEKLKEEIKHDENIIKQQSDFIPRCEELLDNYWSLDTESKNKMLKSLIEKVAYSKDNKNAYGKGNEIGFQLDIFPKIQEK

SEQ ID NO: 4191 - protein, 523 aa, Unknown
  Description of Unknown: Integrase B4192 sequence
  cd03768,PTHR30461:SF3,SM00857,IPR036162,PF13408, IPR025827,PS51737,G3DSA:3.40.50.1390,IPR006119,PF07508, SSF53041,IPR011109,PTHR30461,PS51736,Coil, PF00239
MRFFSYGRKSVFSDKSDSIDNQFRMNREYCESKFSSQVDSWQQFSDEDFTGANTSRPDLQRMLSFIKNGFCDVLVVYQLDRLSRDVRDFANIYALLEEHGVMFISIRENIDTTTPIGRAMMYVTVVFAQMERETIAARVTDNMLGLAKKGYWTGGNPPVGYVRKHIVVNGKKHCSIEVDPDGARYVTQIFDTFLAYNCSLQGMETRFKNQGIRTQSGKFFSTTQLHKMLTMPYCVEATPEVYDFYAAKGCIMDPGSPREMWDGSVGVIIYGRSTEKNKKHQVQPPEKWTVCLGKHKPFMPAEKWLAVQSRFTQNKCIKDAKWPVPLLKGVLRCKCGNLMQISRKKKGDGTCSSWYYCRKRMRQGVDACDMSQIKCDLLDEKVLELFRGIAADPGLIQKFVKTKAPTDIPDLKAAQARLATCERKIGRLAASLALAEDSAASKYIIAEMERLDVELGALKREASLAEMESHRAAASAKDAKATAAEIAKLIHGLDGFDDKEKNAIARAVIQECTWDGERLFITL

SEQ ID NO: 4192 - protein, 523 aa, Unknown
  Description of Unknown: Integrase B4193 sequence
  SM00857,G3DSA:1.10.10.2600,IPR036162,PF13408,IPR025827, G3DSA:3.40.50.1390,PS51737,IPR006119,IPR038109,PF07508, SSF53041,IPR011109,PTHR30461,Coil,PS51736, cd00338,PF00239
MPDYAIYLRKSRKDNDAEQRGEGETLARHRKLLLDYAKCEGLHIAKIYEEVVSGESIATRPQMQLLLADVEQGLYDGVLVVEVERLARGDTMDQGLVAQTFKYSNTKIYTPMKVYDPNNEFDEEYFEFGLFMSRREYKTINRRLQRGRRASASEGKYIAGRAPYGYEKIKIPNDKGNTLRIIPEQAEVIKQIYDWYVNGLDGEDVGLTKIATKLNSMGIKPYRNDYWGKEALRDIITNPVYAGYIRWGYRRNKKTVVDGKTITSRPVTLDENCVLSKGLHEAIVTQELYDKAQCKIKSVPPPPVGYKKELKGSLAGMVICKKCGHKMTLRNPSTKGKPPYLVCHYRYCDNVSTPYDIVEKRVLDTLKEWAEKYKLKEKQSKKNNAGSIDMLKSSVESAKKKVATLQQQLDGMCDLLEQGIYTPDMFRQRSVSVTERITKAKAEYEQLSEQLVSMEKLLTEKSEFIPKVEHVLKIYDTLSTPADKNRVLKEVIDHAEYSKAKSGAYKGVSVDDFNLTVFPKMPL

SEQ ID NO: 4193 - protein, 523 aa, Unknown
  Description of Unknown: Integrase B4194 sequence
  cd03768,PTHR30461:SF3,SM00857,IPR036162,PF13408, PS51737,G3DSA:3.40.50.1390,IPR025827,IPR006119,PF07508, IPR011109,SSF53041,PTHR30461,PS51736,Coil, PF00239
MRFFSYGRKSVFSDKSDSIDNQFRMNREYCESKFSGQVDSWQQFSDEDFTGANTSRPDLQRMLSFIKGGFCDVLVVYQLDRLSRDVRDFANIYALLEEHGVMFISIKENIDTTTPIGRAMMYVTVVFAQMERETIAARVTDNMLGLAKKGYWTGGNPPVGYVRKHIVVDGKKHCSIEVDPDGARYVTQIFDTFLAYNCSLQGMETRFKNQGIRTQSGKFFSTTQLHKMLTMPYCVEATPEVYDFYAAKGCIMDPGSPREMWDGSVGVIIYGRSTEKNKKHQAQPPEKWTVCLGKHKPFMPAEKWLAVQSRFTQNKCIKDAKWPVPLLKGVLRCKCGNLMQVSRKKKVDGTCSSWYYCRKRMRQGVDACDMGQIKCDLLDEKVLDLFRGITADPGLIQKFVKTKAPDDIPNLKAAQARVAACERKIGRLAASLALAEDSTASKYIIAEMERLDVELGALKREASLAEMENHRATANAKDAKATAVEIAKLIHGLEGFDDKERNAIARAVIQECTWDGERLFITL

SEQ ID NO: 4194 - protein, 523 aa, Unknown
  Description of Unknown: Integrase B4195 sequence
  cd03768,PTHR30461:SF3,SM00857,IPR036162,PF13408, IPR025827,PS51737,G3DSA:3.40.50.1390,IPR006119,PF07508, IPR011109,SSF53041,PTHR30461,PS51736,Coil, PF00239
MRFFSYGRKSVFSDKSDSIDNQFRMNREYCESKFSGQVDSWQQFSDEDFTGANTSRPDLQRMLSFIKGGFCDVLVVYQLDRLSRDVRDFANIYALLEEHGVMFISIKENIDTTTPIGRAMMYVTVVFAQMERETIAARVTDNMLGLAKKGYWTGGNPPVGYVRKHIVVNGKKHCSIEVDPDGARYVTQIFDTFLAYNCSLQGMETRFKNQGIRTQSGKFFSTTQLHKMLTMPYCVEATPEVYDFYAAKGCIMDPGSPREMWDGSVGVIIYGRSTEKNKKHQAQPPEKWTVCLGKHKPFMPAEKWLAVQSRFTQNKCIKDAKWPVPLLKGVLRCKCGNLMQVSRKKKVDGTCSSWYYCRKRMRQGVDACDMGQIKCDLLDEEVLELFRGITADPALIQKFVKAEAPADVPDLKAAQARVSACERKIGRLAASLALAEDSAASKYIIVEMERLDVELGALKREASLAEMEGHRAAASAKDAKATAAEIAKLIHGLEGFDDKEKNAIARAVIQECTWDGERLFITL

SEQ ID NO: 4195 - protein, 523 aa, Unknown
  Description of Unknown: Integrase B4196 sequence
  PTHR30461:SF3,SM00857,IPR036162,PF13408,IPR025827, PS51737,G3DSA:3.40.50.1390,IPR006119,PF07508,IPR011109, SSF53041,PTHR30461,Coil,PS51736,cd00338, PF00239
MNICCYGRKSIYSDHSDSIDNQFRMCRDYVEMKFSGQVDSFLEYQDEAFTGANIKRPDLQRLLVDIAAGNCDVLIVYQLDRLSRDVRDFANIYAILEEHHVKFISIKENIDTSTPIGRAMMYVTVVFAQMERETIAARVADNMIGLAKKGYWTGGNPPEGYVRTRIEANGKKHCSIVPDPEGVKYVTWIFDTFLQNGYSLQSMETAFKKQGIRTRTGAFFSTTQLHKILTMPYCAQATPEVYDYYAAKGCQMDIESPREQWDGTCGVMIYGRTTQKNKKHQMQPPEKWLVCLGAHEPFMPADKWLSVQARFAQNKFDKTMKYDVPLLKGVLRCSCGSIMCVSRKKKKEGVSSWYYCLKRMRQGKEVCDSHQIKCELLDQKVLELLQSIERDPALIHQFAEQNAEVLAGPDPKVLASKISTCQTRIDRLVSSLSLAAESSAQKYILAELERLDLEIQALRREHNLALTTERNRTRQQQDTFSKVSEISRLIGDMDSFSASEKNAIVKDVIKKCVWDGESLSIML

SEQ ID NO: 4196 - protein, 523 aa, Unknown
  Description of Unknown: Integrase B4197 sequence
  cd03768,PTHR30461:SF3,SM00857,G3DSA:1.10.10.2600,IPR036162, PF13408,PS51737,G3DSA:3.40.50.1390,IPR025827,IPR006119, IPR038109,PF07508,IPR011109,SSF53041,PTHR30461, PS51736,Coil,PF00239
MIAIYTRQSLFKKDSLSTSQQADLCIASCCGEEYEIFEDLGYSGKNLNRPAFEQMMKKVRNGQITKILVYKLDRISRNISDFANLLCELQKCSCEFQSVSENFDTSTPIGRAMIYICMVFAQMERENTSQRVHDNYYYRTELGFWGGGYAPYGYRLTKLKYKGKYHTVLEPDEKTAPLVKQIYEWYLEPNNSISTILDKLNNQLHIPSRKGALWSSRVIADILSRPLYAPNDMAIYNYLLGIGANISNAPEEFDGMASVDMYGKKNASASRHKRTRSADEMYCNISNHEAIIDSDTWLRVQYKRKSLLVTPSRAGTGKNSWFTGLMKCGCCGAGVSYTNSSGTQGYYLCSTKKNRGYYTCEQKPASKKKTDPMIIQNIIEHYSKQSVIDRIRNAEIKESERTASDLKERNDLMIKLNQVQTEIDNLMQSLSQGNEVLIKYINEKIVDLDKKKSSIASRLSEIDSGNTKNQEEVSLLKQLNLVLDDIPTTLQNGTFDEIKNLCHILVKRIVFQKDGQIDIEYTI

SEQ ID NO: 4197 - protein, 523 aa, Unknown
  Description of Unknown: Integrase B4198 sequence
  cd03768,PTHR30461:SF3,SM00857,IPR036162,PF13408, IPR025827,G3DSA:3.40.50.1390,PS51737,IPR006119,PF07508, SSF53041,IPR011109,PTHR30461,PS51736,Coil, PF00239
MRFFSYGRKSVFSDKSDSIDNQFRMNREYCESKFSGQVDSWQQFSDEDFTGANTSRPDLQRMLSFIKGGFCDVLVVYQLDRLSRDVRDFANIYALLEEHGVMFISIKENIDTTTPIGRAMMYVTVVFAQMERETIAARVTDNMLGLAKKGYWTGGNPPVGYVRKHIVVNGKKHCSIEVDPEGARYVTQIFDTFLAYNCSLQGMETRFKNQGIRTQNGKFFSTAQLHKMLTMPYCVEATPEVYDFYAAKGCIMDPGSPREMWDGSVGVIIYGRSTEKNKKHQAQPPEKWTVCLGKHKPFMPAEKWLAVQSRFTQNKCIKDAKWPVPLLKGVLRCKCGNLMQVSRKKKVDGTCSSWYYCRKRMRQGVDACDMGQIKCDLLDGEVLELFRGITADPALIQKFVKAEAPADVPDLKAAQARVSACERKIGRLAASLALAEDSAASKYIIAEMERLDVELGALKREASLAEMESHRAAASAKDAKATAAEIAKLIHGLDGFDDKEKNAIARAVIQECTWDGERLFITL

SEQ ID NO: 4198 - protein, 523 aa, Unknown
  Description of Unknown: Integrase B4199 sequence
  PTHR30461:SF3,cd00338,SM00857,G3DSA:1.10.10.2600,IPR036162, PF13408,PS51737,IPR025827,G3DSA:3.40.50.1390,IPR006119, IPR038109,PF07508,SSF53041,IPR011109,PTHR30461, PS51736,Coil,PF00239
METVKNITVIPARRRVGNTAKESEIPKLRVAAYCRVSTDSDEQATSYEAQVEHYTDYIRKNPEWEFAGIFADDGISGTNTKKREEFNRMIDEAMAGKIDMIVSKSISRFARNTLDCLKYIRQLKEKNIPVYFEKENINTMDAKGEVLLTIMASLAQQESQSLSQNVKLGFQYRYQQGQITVNHNRFLGYTKDEKGQLIIEPDEAEVVKRIFREYLEGASLQQIGRGLEADGILTGAGKKKWRAETLQKILKNEKYIGDALFQKTYTVDFLEKKRVPNNGLVLQYYVENSHEAIIPRELYMQVQEEMVRRANLHSGQNRKKRVYSSKYALSSIVYCSKCGDIYRRVVWNNRGKHSIVWRCCTRVEHGPGACNADAIHESELQNLVVRAINMALGQKDTMYDVLQRNVEAVLTGTDGISLDEIDARLEELQRELLNVANANGNYDSIVDEIYRLREAKQNAQVEGATREGMKQRISEMQQFFAEQTQDITEYDEQLVRRLIEKITVYDEKVIVEFKSGTNVDIHR

SEQ ID NO: 4199 - protein, 523 aa, Unknown
  Description of Unknown: Integrase B4200 sequence
  PTHR30461:SF3,SM00857,G3DSA:1.10.10.2600,IPR036162,PS51737, G3DSA:3.40.50.1390,IPR006119,IPR038109,PF07508,SSF53041, IPR011109,PTHR30461,Coil,PS51736,cd00338, PF00239
MPNTESFTVNEVLVYLRKSRSDSPDMSVEEVLRKHEEMIQQYASTHFCSPIPEKNIFREVVSGETIDSRPQMKNLLKMIESEQFKAVLVVEPQRLSRGDLEDCGRLINILRYTNTTVLTLTHSFNLQEEYERKFFEMEITRGNDYLEYTKRILRRGREASVAKGNYIGSVDPYGYKKTVIKKDGITCHTLEIIPEEADTVKLIHELYAYTPGGIGFTNIAHKLDAMHIKPKKAAHWTPAIISSILCNPLYLGMVRWNNRKVVKYINEGQLAKARPQNSEAKYYKGLHEPIITHELYDACMARRGTNPSLRRNKELCNPFAGLLYCGTCGHAMSLKIYKNHNSVSQMMLCNHQAYCHTKSVLYSAFLRRFISSMEDTLNDFELAQKSDDGRTQAISKTIVINLENKLKKLNEKDARQKDAYEDGIYSKEEFLKRNVRTQQDIASTIIALEDARAKKADIVDYEEKIRRFKDCLHALNDPELSAAEKNRFLKSCVDKILYYNNMESKAGIGRYIENVFSLEIQYK

SEQ ID NO: 4200 - protein, 523 aa, Unknown
  Description of Unknown: Integrase B4201 sequence
  cd03768,PTHR30461:SF3,SM00857,IPR036162,PF13408, IPR025827,PS51737,G3DSA:3.40.50.1390,IPR006119,PF07508, IPR011109,SSF53041,PTHR30461,PS51736,Coil, PF00239
MRFFSYGRKSVFSDKSDSIDNQFRMNREYCESKFSGQVDSWQQFSDEDFTGANTSRPDLQRMLSFIKGGFCDVLVVYQLDRLSRDVRDFANIYALLEEHGVMFISIKENIDTTTPIGRAMMYVTVVFAQMERETIAARVTDNMLGLAKKGYWTGGNPPVGYVRKHIVVNGKKHCSIEVDPDGARYVTQIFDTFLAYNCSLQGMETRFKNQGIRTQSGKFFSTTQLHKMLTMPYCVEATPEVYDFYAAKGCIMDPGSPREMWDGSVGVIIYGRSTEKNKKHQAQPPEKWTVCLGKHKPFMPAEKWLAVQSRFTQNKCIKDAKWPVPLLKGVLRCKCGNLMQVSRKKKVDGTCSSWYYCRKRMRQGVDACDMRQIKCDLLDEKVLELFRGITADPALIQKFVKAEAPADVPDLKAAQARVSACERKIGRLAASLALAEDSAASKYIIAEMERLDVELGALKREASLAEMESHRAAASAKDAKATAAEIAKLIHGLDGFDDKEKNAIARAVIQECTWDGERLFITL

SEQ ID NO: 4201 - protein, 523 aa, Unknown
  Description of Unknown: Integrase B4202 sequence
  PTHR30461:SF3,SM00857,G3DSA:1.10.10.2600,IPR036162,PF13408, IPR025827,G3DSA:3.40.50.1390,PS51737,IPR006119,IPR038109, PF07508,SSF53041,IPR011109,PTHR30461,Coil, PS51736,cd00338,PF00239
MSVRNIIIYLRKSRSDDPGMSVEDVLAKHERQLQEYAISEYGEQIPEDHIFREVVSGETIADRPVMKQVMQLLEAGNITAVLVIEPQRLSRGDLEDCGRIINTFRYTHTLVATPPKTYDLTNEYDRKFFEMELMRGNDYLEYTKKILNRGRVASVRQGNFIGSVAPYGYKRVRLGSGKDISYTLEIIPEEAEFLKLMYHLYLDEGYGFTRIAKHLDSIGAKPRKAEHWSPAAIKDMLENPVYIGKIRWNWRKTEKVMTNGQIIKTRPKTKDEAQWIYVDGKHKAIIDESLFRAVIDRRGKNPCVRKSKELINPFAGLLFCGTCGKAMSYKHFKQYRGKSENICTSMVCNNQSHCKTKSVLYDAFLDRVISTLEDTITDFKIKLQNDDCDSAKLHANVVKNLELELQKLQQKDFRQKDAYEDGIYTKEEYAARNAKLQEQIATTMDSLSKAKESVLPSVDYNEKIMRFTDCLNALKSPDVSATEKNMLLKSCINKIVYYNSMPSKAGAGRWIDNVFSLDIFLNL

SEQ ID NO: 4202 - protein, 523 aa, Unknown
  Description of Unknown: Integrase B4203 sequence
  PTHR30461:SF3,SM00857,G3DSA:1.10.10.2600,IPR036162,PS51737, G3DSA:3.40.50.1390,IPR006119,IPR038109,PF07508,IPR011109, SSF53041,PF00239,PTHR30461,PS51736,Coil, cd00338
MVSFDSIIIYLRKSRSDDPAQTVEEVLAKHEHILQDYCMKEYGKAIPEKRIYREVVSGETIQDRPIMQQLLKELEAENISGVLIVEPQRLSRGDLQDCGQIINSFRYTNTAVITPGKTYDLSDEYDRKFFEMELTRGNDYLEYTKKILSRGRVASVRQGNYICSVRPYGYRKITLGSGKDKCHTLEIIPEEADVIRLMYHLYIDENMGFTNIARTLDSLHIKPLKSDNWSAATIRDMIDNPIYIGKVVWNSRKVVKKWENEQITKVRPRNKGDDVICVNGRHEAIIDERTFEAARNKRGLTPKVKKFKELRNPLAGLLFCGTCGHGMSMKKYVDKRSHTGKITTVMLCNQQAVCHTKSAQYEDILAKIKISLANAISDFKIKLKEQENNNIDMHELRIASLEEELNRLYNKDVRQKDAYEDGIYTKEEYIERNSKLQERILNVKKEIADEKNNVPVKIDYEDKIMTFKDCLSSLDDSDISAADKNILLKSCIDKIIYYNDMPSKPGIGRYIENSFRLEIFLKL

SEQ ID NO: 4203 - protein, 523 aa, Unknown
  Description of Unknown: Integrase B4204 sequence
  cd03768,PTHR30461:SF3,SM00857,IPR036162,PF13408, IPR025827,G3DSA:3.40.50.1390,PS51737,IPR006119,PF07508, IPR011109,SSF53041,PTHR30461,PS51736,Coil, PF00239
MRFFSYGRKSVFSDKSDSIDNQFRMNREYCESKFSSQVDSWQQFSDEDFTGANTSRPDLQRMLSFIKGGFCDVLVVYQLDRLSRDVRDFANIYALLEEHGVMFISIKENIDTTTPIGRAMMYVTVVFAQMERETIAARVTDNMLGLAKKGYWTGGNPPVGYVRKHIVVNGKKHCSIEVDPDGARYVTQIFDTFLAYNCSLQGMETRFKNQGIRTQSGKFFSTTQLHKMLTMPYCVEATPEVYDFYAAKGCIMDPGSPREMWDGSVGVIIYGRSTEKNKKHQAQPPEKWTVCLGKHKPFMPAEKWLAVQSRFTQNKCIKDAKWPVPLLKGVLRCKCGNLMQVSRKKKVDGTCSSWYYCRKRMRQGVDACDMGQIKCDLLDEEVLELFRGITADPALIQKFVKAEAPADVPDLKAAQARVSACERKIGRLAASLALAEDSAASKYIIAEMERLDVELGALKREASLAEMESHQAAASAKDAKATAAEIAKLIHGLDGFDDKEKNAIARAVIQECTWDGERLFITL

SEQ ID NO: 4204 - protein, 523 aa, Unknown
  Description of Unknown: Integrase B4205 sequence
  cd03768,PTHR30461:SF3,SM00857,IPR036162,PF13408, IPR025827,PS51737,G3DSA:3.40.50.1390,IPR006119,PF07508, IPR011109,SSF53041,PTHR30461,PS51736,Coil, PF00239
MRFFSYGRKSIFSDKSDSIDNQFRMSREYCESKFSGQVDSWQQFSDEDFTGANADRPDLQRMLSFIKNGFCDVLVVYQLDRLSRDVRDFANIYALLEEHGVMFISIKENIDTTTPIGRAMMYVTVVFAQMERETIAARVTDNMLGLAKKGYWTGGNPPVGYVRKHIVVDGKKHCSIEVDPDGARYVTQIFDTFLAYNCSLQGMETRFKNQGIRTQGGKFFSTTQLHKMLTMPYCVEATPEVYDFYAAKGCIMDPGSPREMWDGSVGVIIYGRSTEKNKKHQVQPPEKWTVCLGKHKPFMPAEKWLAVQSRFSQNKCIKDAKWPVPLLKGVLRCKCGNLMQISRKKKGDGTCSSWYYCRKRMRQGIDACDMGQIKCDLLDEEVLELFRGIAADPGLIQKFVKTEAPADVPDLKAAQARVSVCERKIGRLAASLAMAEDSVASKYIIAEMERLDVELGALKREASLAEMESHRAAVSAKDAKATAAEIAKLIHGLEGFDDKEKNAIARAVIQECTWDGERLFITL

SEQ ID NO: 4205 - protein, 523 aa, Unknown
  Description of Unknown: Integrase B4206 sequence
  PTHR30461:SF3,SM00857,G3DSA:1.10.10.2600,IPR036162,PS51737, G3DSA:3.40.50.1390,IPR006119,IPR038109,PF07508,SSF53041, IPR011109,PTHR30461,Coil,PS51736,cd00338, PF00239
MPNTESFTVNEVLVYLRKSRSDSPDMSVEEVLRKHEEMIQQYASTHFHSPIPEKNIFREVVSGETIDSRPQMKNLLKMIESEQFKAVLVVEPQRLSRGDLEDCGRLINILRYTNTTVLTLTHSFNLQEEYERKFFEMEITRGNDYLEYTKRILKRGREASVAKGNYIGSVDPYGYKKTVIKKDGVTCHTLAIIPEEADTVKLIHELYAYTPEGIGFTNIAHKLDAMHIKPKKAAHWTPAIISSILCNPLYLGMVRWNNRKVVKYINEGQLAKARPQNSEAKYYKGLHEPIITQELYDACMARRGTNPSLRRNKELCNPFAGLLYCGTCGHAMSLKIYKNHNSVSQMMLCNHQAYCHTKSVLYSAFLRRFISSMEGTLNDFELAQKSDDGRAQAISKTIVVNLENKLKKLNEKDARQKDAYEDGIYSKEEFLVRNVKTQQDIASTIIALEDARAKKADIIDYEEKIRRFKDCLHALNDPELSAAEKNRFLKSCVDKILYYNNMESKAGIGRYIENVFSLEIQYK

SEQ ID NO: 4206 - protein, 523 aa, Unknown
  Description of Unknown: Integrase B4207 sequence
  PTHR30461:SF3,SM00857,G3DSA:1.10.10.2600,IPR036162,PS51737, G3DSA:3.40.50.1390,IPR006119,IPR038109,PF07508,IPR011109, SSF53041,PF00239,PTHR30461,PS51736,Coil, cd00338
MVSYDSIIIYLRKSRSDDPAQTVEEVLAKHERILQDYCMKEYGKAIPEKRIYREVVSGETIQDRPVMQQLLKELETGNISGVLIVEPQRLSRGDLQDCGQIINSFRYTNTAVITPGKTYDLSDEYDRKFFEMELTRGNDYLEYTKKILSRGRVASVRQGNYICSVRPYGYRKITLGTGKDKCHTLEIIPEEADTIRLMYHLYLDENMGFTNIARTLDSLHIKPLKSDNWSAATIRDMIDNPIYIGKVVWNSRKVVKKWENEQITKVRPRNKGDDVICVNGRHEAIIDEHTFEAARNKRGLTPKVKKFKELRNPLAGLLFCGTCGHGMSMKKYVDKRSHTGKITTVMLCNQQAVCHTKSAQYEGILAKIKVSLANAIFDFEIKLKEQENNNIDMHELRIASLEEELNRLYNKDVRQKDAYEDGIYTKEEYIERNSKLQERILNVKEDIADEKKNIPVKIDYEDKIITFKDCLASLDDPNISAADKNILLKSCIDKIIYYNDMPSKPGIGRYIENSFRLEIFLKL

SEQ ID NO: 4207 - protein, 523 aa, Unknown
  Description of Unknown: Integrase B4208 sequence
  SM00857,G3DSA:1.10.10.2600,IPR036162,PF13408,PS51737, G3DSA:3.40.50.1390,IPR025827,IPR006119,IPR038109,IPR011109, SSF53041,PTHR30461,Coil,PS51736,cd00338, PF00239
MVKNRAAIYARFSSHNQRSESIEIQVENSREYCKREGLQVVREYCDYAQTGRNVDRAEFQRMMSDAKLGLFDFVVIYKVTRIMRNRDEMALARIMLRKAGVEILYAGEEIASGSSGVLQLGMLEVLAEWESAIDSERIRDGIQKNAERCMANGRTLYGWDIVEGRYAINEREAAVLRRMKNLLFSGNSVAEIVRAVDGERSKRGAKFNQDTVTKLLKRVQNAGVYKYAGHEVEDGMPALWSQAEQDMINSILGDRHRPRRKIDSALEFPLSGKLYCARCGMPMAGTSGTSKNGSAYHYYKCRKCRRTVRRDLIEDAVVDMTYEAVKQTDVRKRIAKTLAGYEAERVTEEKPESYFIKKEIRRIDTAFERIWQAIEDGIAPPGGRERTTELKRQRAELEARLRVAEQSEALEPSVGDVLLWLDDLANDTTPLEILNEFVRFVEIDGKDVTVYFMFDELPDDFTPKQKKAEHPCYQRCSTNSLMVELMRKTANSTSTANRAAIQLDTCIVRVSKNWFVVVGTCQK

SEQ ID NO: 4208 - protein, 523 aa, Unknown
  Description of Unknown: Integrase B4209 sequence
  cd03768,PTHR30461:SF3,SM00857,IPR036162,PF13408, PS51737,G3DSA:3.40.50.1390,IPR025827,IPR006119,PF07508, SSF53041,IPR011109,PTHR30461,PS51736,Coil, PF00239
MRFFSYGRKSVFSDKSDSIDNQFRMNREYCESKFSSQVDSWQQFSDEDFTGANTSRPDLQRMLSFIKGGFCDVLVVYQLDRLSRDVRDFANIYALLEEHGVMFISIKENIDTTTPIGRAMMYVTVVFAQMERETIAARVTDNMLGLAKKGYWTGGNPPVGYVRKHIVVNGKKHCSIEVDPDGARYVTQIFDTFLAYNCSLQGMETRFKNQGIRTQNGKFFSTAQLHKMLTMPYCVEATPEVYDFYAAKGCIMDPGSPREMWDGSAGVIIYGRSTEKNKKHQLQPPEKWTVCLGKHKPFMPAEKWLAVQSRFTQNKCIKDAKWPVPLLKGVLRCKCGNLMQVSRKKKVDGTCSSWYYCRKRMRQGVDACDMGQIKCDLLDEEVLELFRGITADPALIQKFVKAEAPADVPDLKAAQARVSACERKIGRLAASLALAEDSAASKYIIAEMERLDVELGALKREASLAEMESHRAAASAKDAKATAAEIAKLIHGLDGFDDKEKNAIARAVIQECTWDGERLFITL

SEQ ID NO: 4209 - protein, 523 aa, Unknown
  Description of Unknown: Integrase B4210 sequence
  PTHR30461:SF3,cd00338,SM00857,G3DSA:1.10.10.2600,IPR036162, PF13408,IPR025827,G3DSA:3.40.50.1390,PS51737,IPR006119, IPR038109,PF07508,IPR011109,SSF53041,PTHR30461, PS51736,Coil,PF00239
MARKKNIAAGLDAVIYARYSSHNQREVSIEQQIAECTKHAAALGLRIVGTYEDRAISGKTDNRPRFQQMMRDAEKGKFQAVVAWKSNRIGRNMLQAMVNEAKLDDYGVKVFYAEEDFDDTAAGRFALRNMMNVNQFYSENMAEDITRGLYDNANKCMANGRQPLGYKRGADGKVMLDEPAAAVVREIFTRVAAGDLFVDIARDLNAKGIKTSKGATWNKGSFQSICQNERYKGIYIYGNVRIVDGIPRIVSDELWYKVQEAMRMKKNPVGTRHRVGAEDYLLTGKLRCGHCGSYMTGVSGTSRNGELHYYYTCQKRRTEHACNKKNVRRDVIEPAIAQAIKMYCLTDDVIEWVANRTVEYWEKHDNDLHIEALEQQLEENKKATSNMLKAIEMGIITDATRSRMIELETEQSKLAVQLNAAKADVVKIDRDDLIDELQIFRDMDVNNRSVQAELFKDFLVAAYIYDDNRLKLVFSFMGKDNSIEIPLETGEDPPDGEDSPDAKMFVLTPDCSTIQFVLEPDSL

SEQ ID NO: 4210 - protein, 522 aa, Unknown
  Description of Unknown: Integrase B4211 sequence
  PTHR30461:SF3,SM00857,G3DSA:1.10.10.2600,IPR036162,PF13408, PS51737,G3DSA:3.40.50.1390,IPR025827,IPR006119,IPR038109, PF07508,IPR011109,SSF53041,PF00239,PTHR30461, PS51736,Coil,cd00338
MSSIDKTAVIYARYSSHGQTEQSIDGQIAAAQKYAEGKGYTIIHIYADRAMTGRNDDREQFQKMLSDTATHQFGVILLWKIDRFGRNREEIAFNRYRCKKNGVRVERVAEDVPDGPEGVILDSVLEGMAEYYSLQLAQNVRRGQRESAKKSQSNGGTRMIGYKVNPDTKRYEVDPDTAPFITEVFRRYAGGQTMAEIAAWLNAQGLRATRGGMFTVNSLHRLLKNEKYTGVYIFRDIRNEGGMPALIDRATFDKVQEMLKVNRRAPSRVWSRAEYLLTDKLFCGHCGAPMAGVSGHGHTGVKHNYYTCLNRKRKKSCTKKSVRQDVLEPLVLKSIRNLLQDDATLKYIADKVWAEYERSDTSGDSIRALDRQIADVDRALSNVMKAIEMGIINETTKARMDELTEQKQALSAARADAGLARGFKLTRNMVLYFLRKMAATDISDRDSQKRLIKTFVNAIYLYDDHFDIAFNYTENGKVIVKMQEIDDASTEGAFGCCAQCPTKIKAPAVPRRVFLFWCSVSC

SEQ ID NO: 4211 - protein, 522 aa, Unknown
  Description of Unknown: Integrase B4212 sequence
  SM00857,G3DSA:1.10.10.2600,IPR036162,PF13408,PS51737, G3DSA:3.40.50.1390,IPR025827,IPR006119,IPR038109,PF07508, SSF53041,IPR011109,PTHR30461,Coil,PS51736, cd00338,PF00239
MVKNRAAIYARFSSHNQRSESIEIQVENSRAFCEREGLQVVHEYCDYAQTGRNIDRAEFQRMMNDARHGLFDYVVIYKVTRIMRNRDEMSLARIMLRKAGVEILYAGEDISSGSSGVLQLGMLEVLAEYESALDSERIRDGIQKNAERCMANGRTLYGWDIVEGRYVINEREASVLRRMKNMLFAGSSVADIVRAVSAERSKRGAKFNQDTVTKLLKRVQNAGVYKYAGHEVPDGMPAIWSQAEQDMIDNILGDRHKPRRKINSTLEFPLSGKLYCAKCGAPMAGTSGTSCTGATYHYYKCRKCRRTVRRDLVEDVVCDMTLQAVAREDVRQRIASGMVTFQAEQPKEQSRSYAIKKELKRIDRTFERIWQAIEDGIAPPGGRERTEELKQRKSELEAELRIAEREEAFNIGVDELMLWLDDAAENLTPEVILGTFVRFVEIDGKTLNVYFAFDHYGDDFRPKQKKAEPCPEGHSSANYPMVELMRKTANSTSTANRAAIQLDTCIVRVSKNWFVVVGTCQK

SEQ ID NO: 4212 - protein, 522 aa, Unknown
  Description of Unknown: Integrase B4213 sequence
  cd00338,SM00857,G3DSA:1.10.10.2600,IPR036162,PS51737, G3DSA:3.40.50.1390,IPR006119,IPR038109,PF07508,IPR011109, SSF53041,PTHR30461,PS51736,Coil,PF00239
MPRRRKVAAKDRGRCVIYARFSSSRQREESIEDQVRVCTAYARDNGMEVEGVYADHAASARSDDRPEFQRMVREARDGAWGVVLVYKLDRFARDRFDAANYRVRLRDAGVELVSAMEQIPDAPEGAILESVLEGVNEWYSRSLSQNVTRGMMGNARKCMANGVRVFGYRVDGEGRYVVDEREAAIVRRAFSMAALGSTRGEVMLWLNSTCRNVRGGQWRYPSVATLLSNEKYLGVYSFGDVRVEGGMPAIVDQEVFDAANRPRPHARVGAFPLTGRLFDAETGTPYRGDGGTSGTGRRYFYYTCPLERGVVRYPQAEVEDAVMGALRGFVARPGEAERLADAVLGAVGGMGDARRLDDARARLREAQRGKGRLVDAIVGGVDPSLVQERLDDLGAEVRRLEAEVARLERVTVPDRDWAVSWVRERMPESLTKQELRRTVGRCELADDGTLTVEIPWSTSCDSEAQKNSELPARGQFRVNKFGGQEDSESELFVTSSGLKIVCGQKLERSGQKIANRNHSAQK

SEQ ID NO: 4213 - protein, 522 aa, Unknown
  Description of Unknown: Integrase B4214 sequence
  SM00857,G3DSA:1.10.10.2600,IPR036162,PF13408, IPR025827,G3DSA:3.40.50.1390,PS51737,IPR006119, IPR038109,PF07508,IPR011109,SSF53041, PTHR30461,Coil,PS51736,cd00338,PF00239
MVKNRAAIYARFSSHNQRSESIEIQVENSRAYCEREGLQVVREYCDYAQTGRNIDRAEFQRMMSDARHGLFDYVVIYKVTRIMRNRDEMSLARIMLRKAGVEILYAGEDISSGSSGVLQLGMLEVLAEYESALDSERIRDGIQKNAERCMANGRTLYGWDIVEGRYVINEREASVLRRMKNMLFAGSSVADIVRAVSAERSKRGAKFNQDTVTKLLKRVQNAGVYKYAGHEVPDGMPAIWSQVEQDMIDNILGDRHKPRRKINSTLEFPLSGKLYCAKCGAPMAGTSGTSCTGATYHYYKCRKCRRTVRRDLVEDVVCDMTLQAVAREDVRQRIASGMVAFQAEQPKEQSRSYAIKKELKRIDRTFERIWQAIEDGIAPPGGRERTEELKQRKSELEAELRIAEREEAFNIGVDELMLWLDDAAENLTPEVILGTFVRFAEIDGKTLNVYFAFDHYGDDFRPKQKKAEPCPEGHSSTNSLLVELMRKTANSTSTANRAAIQLDTCIVRVSKNWFVVVGTCQK

SEQ ID NO: 4214 - protein, 522 aa, Unknown
  Description of Unknown: Integrase B4215 sequence
  PTHR30461:SF3,cd00338,SM00857,G3DSA:1.10.10.2600,IPR036162, PF13408,IPR025827,G3DSA:3.40.50.1390,PS51737,IPR006119, IPR038109,PF07508,SSF53041,IPR011109,PTHR30461, PS51736,Coil,PF00239
MTAVIYARYSSDNQREESIEGQIRECTAYAEKNDITIVKHYIDRAISAKTDNRPQFQQMIKDSDKKLFDIVLVWKLDRFARNRYDSARYKTQLKKNGVKLMSATEIISEGPEGIILESVLEGYAEYYSADLAEKVVRGQTENILKGRCNGGRGTFGYTLDSERKFHIDPLASPFVLESFTKYRDGLTMKEIRDWLNENGIKNPVGGEFTYNSVEHMLKNRRYIGELKFRDVVVPDAIPPIVPLELFDDVQEKIAKNKKAPARRKAEDDYLLTTKLHCGCCGALMFGESGTSRTGEVHRYYKCATAKKKKGCKKKTVRKQWLEDLVVNQTMQLVRDDAAMESIIAKVMELQDRENTNLPLYEKQLRDAESGIQNMLNAIQAGILTSSTKERLEQLEETKRELEARIAEEKLAKPKVTEEFIRFWLLRFRKLDMSLKDQRQALVDTFINAIYLYDDKVLITFNYKEGTQTVTFGEATEVASEGNGSDLDCFTAPRIPDTLSCAGDSFCATGRIRTATTTTAASG

SEQ ID NO: 4215 - protein, 522 aa, Unknown
  Description of Unknown: Integrase B4216 sequence
  PTHR30461:SF3,cd00338,SM00857,G3DSA:1.10.10.2600,IPR036162, PF13408,PS51737,IPR025827,G3DSA:3.40.50.1390,IPR006119, IPR038109,PF07508,IPR011109,SSF53041,PTHR30461, PS51736,Coil,PF00239
MANVTIIPARRKADKSTEEKSTALRVAAYCRVSTDSDEQATSYETQIEHYTNYIQMHPGWRFAGIYADEGISGTNTKNRSEFNRLIEDCMAGNIDMVVTKSVSRFARNTLDCLKYIRRLKERQIAVFFEKENINTLDAKGEVLLTIMASLAQQESQSLSQNVKLGVQYRFQQGQVRVNTNRFLGYDKDEDGKLVINPEEAEVVKRIFREFLEGWSYQSIGDHLAADGIKTAAGSTYWRGSTVRKMLQNEKYMGDALLQKTVTTDFLNKKRAINNGLAPQYYVEDDHEAIIPKDIFMNVQEEMQRRSRRRGTTGHFISGGKYALSNIVYCSHCGETYRRLTWSPKGKDRIVVWRCVSRVERKKKNLSIPCYSRTVEEELLKKVVVKAINRILPDKKNFIRIMKNNIREAISQRTQKPVQALDAKIKKLQGELLERVKQKQPYTDLTEQMDSLRAKKDALALTDADNREKQRRINVMMDFLEHQSGKIAAYDELLVRRLIEKIVVFDDHFIVVFKSGLETQIDL

SEQ ID NO: 4216 - protein, 522 aa, Unknown
  Description of Unknown: Integrase B4217 sequence
  cd00338,SM00857,G3DSA:1.10.10.2600,IPR036162,PS51737, G3DSA:3.40.50.1390,IPR006119,IPR038109,PF07508,SSF53041, IPR011109,PTHR30461,PS51736,Coil,PF00239
MNLENVCLYLRKSRADREAEARGEGETLARHERILLDLAKSRGYNVGAIYKEIVSGETISARPVMQQVLHEVEAGMWDGVLVVEVERLARGDTIDQGTVSRAFQYSDTKIITPSKTYDPNNEFDEEYFEFGLFMSRREYKTIKRRLNAGRISSVKEGKYCGNKPPYGYERVKLSGEKGYTLQPIPAQADIVRMIFSWYSGADGNQIGVAKIVRKLNDMGVKSALGKDWTPASVQSILVNPVYTGTIRWNGRKTVKSIQNGAVIRSRPRAKADDVLLFPGRHPAIISQDMYDTVQRIRKKNPPRPVQITNTIKNPLAGIVYCSKCGRAMVRRPYQKRGQEDSLLCPYTSCSTVSSKLSLVEKVLLDGIKNLVDEYKLSSDVPKLDIDNVITLKEKLIEEKEAELKKLDAQKLKQYDLLEQGVYTTDVFLERSKSTAASIEACIESIKGLREEIEHDKKLVEQQAVFIPKCENLLENYWEFDAQTRNKLLRELIEKVNYTKESKNYFLKGDEITFLLDIFPKIQ

SEQ ID NO: 4217 - protein, 522 aa, Unknown
  Description of Unknown: Integrase B4218 sequence
  SM00857,G3DSA:1.10.10.2600,IPR036162,PS51737, G3DSA:3.40.50.1390,IPR006119,IPR038109,PF07508, SSF53041,IPR011109,PTHR30461,Coil, PS51736,cd00338,PF00239
MREQYLIYLRKSRNDAQLEAMGVDVLERHEKTLLALAKSMNLQIGAIYREVVSGDSIAARPEMQRTLKEVEAGLWKGVLVMEVERLARGDTVDQGIVQRTFQYSETLIVTPAKIYDPNNEFDEEYFEFGLFMSRREYKTIRRRMRAGVTAAVREGKWPFNKAPYGWKRVKLEDARGWVLAPDPDEAPVVKLIFDMFTGPDRVGITSICKYLESHGIPPRNGDRWLECTILGILGNIANDQKVGIGHRKQITTVKDGVLTKSRESRLSNNYDLIATGLQPRLIDHDVFVEAQGYLGKGTPKPPESYGIKNPLASLVVCSCCGKKMQRRPKTTTPGCHGAPYDVLMCHTRGCPTIGAPLELVEKEVINVLSDWVAGYQLNPSQEVKNNVAEKQELLSATIVNRDSLLKQNEKLYDLLEREIYTTDIFLERSNNLHKRIEEAEASVSALEKDLEYEKQKFENSSRFIPECKELLSNYWDLSVPDRNKALKLLIDRVEYKKTVKNKWGTVDTPTFELTLKPRIPRI

SEQ ID NO: 4218 - protein, 522 aa, Unknown
  Description of Unknown: Integrase B4219 sequence
  SM00857,G3DSA:1.10.10.2600,IPR036162,PF13408,PS51737, G3DSA:3.40.50.1390,IPR025827,IPR006119,IPR038109,PF07508, IPR011109,SSF53041,PTHR30461,PS51736,cd00338, PF00239
MELLNVCIYLRKSRADREAEARGESETLARHERILLDLAKKRGYNVGAIYKEIVSGETISARPVMQQLLREVESGMWDGVLVVEVERLARGDTIDQGVVARSFQYSNTLIITPLKTYDPNNEYDEEYFEFGLFMSRREYKTIRRRLTAGRESSAKEGKYCGSKPPYGYSRVKLVGEKGWTLQPVPDQAEIVKLIFNLYVHGVSGERIGMAKICRKLNDSGIKTMDGGLWTISRVQAILRNPVYEGMIRWNSRKSVKHIKDGQITISRPFAQDYILVKGRHPAIVSRELFQQAQDIVNKNPARPLNSLHVLRNPLAGIVRCGKCDHVMTRKSPNGRQGDLIRCPYSSCSNISSKLPLVEKALLDGIQELVDGYRLNNSVSDQEYSLSISEREKMIQGKLKEIDILKKRKQRQYDLLEQGIYSTEEFLERSRATAAELSACDAVILSLKQEIEHEQELQFQRSSFIPKCEDLLANYWTWDTSTKNRFLRELIEKAVYTKNAKNTWKNGDDISFTLDIYPKIQQK

SEQ ID NO: 4219 - protein, 522 aa, Unknown
  Description of Unknown: Integrase B4220 sequence
  SM00857,G3DSA:1.10.10.2600,IPR036162,PS51737,G3DSA:3.40.50.1390, IPR006119,IPR038109,PF07508,SSF53041,IPR011109, PF00239,PTHR30461,PS51736,Coil,cd00338
MREQYLIYLRKSRNDAQLEAMGVDVLERHEKTLLALAKSMNLQIGAIYREVVSGDSIAARPEMQRTLKEVEAGLWKGVLVMEVERLARGDTVDQGIVQRTFQYSETLIVTPAKIYDPNNEFDEEYFEFGLFMSRREYKTIRRRMRAGVTAAVREGKWPFNKAPYGWKRVKLEDARGWVLAPDPDEAPVVKLIFDMFTGPDRVGITSICKYLESHGIPPRNGDRWLECTILGILGNIVNDQKVGIGHRKQITTVKDGVLTKSRESRLSNNYDLIATGLQPRLIDHDVFVEAQGYLGKGTPKPPESYGTKNPLASLIVCSCCGKKMQRRPKTTTPGCHGAPYDVLMCHTRGCPTIGAPLELVEKEVINALSDWVTGYQLDPSQEVKNNVTEKQALLSAAVANRDALLKQNEKLYDLLEREIYTTDVFLERSSTLHERIEEAELSISALEKDLEYEKQKFENSSRFIPECKELLSNYWDLSVPDRNKALKLLIDRVEYKKTARNKKGMADIPTFELVLKPRIPRI

SEQ ID NO: 4220 - protein, 522 aa, Unknown
  Description of Unknown: Integrase B4221 sequence
  SM00857,G3DSA:1.10.10.2600,IPR036162,PF13408, PS51737,G3DSA:3.40.50.1390,IPR025827,IPR006119, IPR038109,PF07508,IPR011109,SSF53041, PTHR30461,PS51736,cd00338,PF00239
MELLNVCIYLRKSRADREAEARGEGETLARHERILLDLAKKRGYNVGAIYKEIVSGETISARPVMQQLLREVESGMWDGVLVVEVERLARGDTIDQGVVARSFQYSNTLIITPLKTYDPNNEYDEEYFEFGLFMSRREYKTIRRRLTAGRESSAKEGKYCGSKPPYGYSRVKLVGEKGWTLQPVPDQAEIVKLIFNLYVHGVSGERIGMAKICRKLNDSGIKTMDGGLWTISRVQAILRNPVYEGMIRWNSRKAVKHIKDGQITISRPFAQDYILVKGRHPAIVSRELFQQAQDIVNKNPARPLNSLHVLRNPLAGIVRCGKCDHVMTRKSPNGRQGDLIRCPYSSCSNISSKLPLVEKALLDGIQELVDGYRLNNSVSDQEYSLSISEREKMIQGKLKEIDILKKRKQRQYDLLEQGIYSTEEFLERSRATAAELSACDAVILSLKQEIEHEQELQFQRSSFIPKCEDLLANYWTWDTSTKNRFLRELIEKAVYTKNAKNTWKNGDDISFTLDIYPKIQQK

SEQ ID NO: 4221 - protein, 522 aa, Unknown
  Description of Unknown: Integrase B4222 sequence
  PTHR30461:SF3,SM00857,G3DSA:1.10.10.2600,IPR036162,PF13408, PS51737,G3DSA:3.40.50.1390,IPR025827,IPR006119,IPR038109, PF07508,IPR011109,SSF53041,PTHR30461,Coil, PS51736,cd00338,PF00239
MGKVRIIPQTINPLTQVKIGTIKKKKVAAYARVSTDQEEQESSFDAQVQHFTEYIKSRDDWEFIKVYSDEGISGTSLKKRDGFNQMVADALDGKIDLILMKSISRFARNTLDLLTTVRKLTAKGVEVFFEEQNISTLDGGGELFLTIMSSIAQEESRTISENVKWGKKESYKKGNVSFAYSRFLGYKKEDGKIVIDKEQAVVVKQIYQWYLRDGLTLTAIAQRLNENSVKTPGGKNNWTVNNITSILTNEKYKGHAILQKTYCDNFLTHQMKKNTGQMPKYHVEDSHPAIIDEDTWNEVQLEIQRRREIGSCYSSTDVFSGKLICADCGSFYGAKLWHSTSKYARTVYQCNHKFKHKCRTPHLEVKFIKEKFIEAYNMVMIDKESLIEDTKEGITVLCDFVGLDGRLVELQNEMDIVSELSNKMIIENMHKLQSQEEYTKKYEELLKRYEKANVEYGRIQDEKLHKIGLSQKLESFIKDLENRPVSIDYFDETTFRFMVESVKVSRDKKLTFKFRNGKEIEV

SEQ ID NO: 4222 - protein, 522 aa, Unknown
  Description of Unknown: Integrase B4223 sequence
  PTHR30461:SF3,SM00857,G3DSA:1.10.10.2600,IPR036162,PF13408, PS51737,IPR025827,G3DSA:3.40.50.1390,IPR006119,IPR038109, PF07508,IPR011109,SSF53041,PTHR30461,Coil, PS51736,cd00338,PF00239
MPKVRVIQATKGSLANRLPVAAYCRVSSNSEDQRHSFVAQVREYTARIAENDKWELAGIYADKGITGTNARKRPEFQRLIEDCRQGKVKRILTKSISRFARNTQECLEYVRELKMLGVSVYFEKEGLDTADIAGELLISVFGSLAQEESSSIGGNMRKSYEYRMQSGKFIGNIAPYGYRWKNRSLEIYEPEAEIVRWIFNSYLNGTGRAQIARELNQRENGRNMWYVTTIQYILNNERYIGDALLQKKYTTEIYPKQEKRNRGDVPQYYLVESHPPIISRDTFERAQRLCQRRRNPQVTPSSPTDNNNTFFRKKAYCAECGRALRRKKQSSGYVSWVCSRHDESKMLCPAPPVAEAALLNSYKNMAGILLSSIDRILLPMAVQLRRLRERSIMGNEDINILNQQILSLTDQLHAVSKLHNLNILDVSAYREKTNALNALLDEAQRKRKLLISGTIEDDKLEKTEALISILQDTMQSPTALEDGEIFEQIVDKVLVDRNKKIMFRLINGLELTGSEGNSDGEK

SEQ ID NO: 4223 - protein, 522 aa, Unknown
  Description of Unknown: Integrase B4224 sequence
  PTHR30461:SF3,cd00338,SM00857,G3DSA:1.10.10.2600,IPR036162, PS51737,G3DSA:3.40.50.1390,IPR006119,IPR038109,PF07508, IPR011109,SSF53041,PTHR30461,PS51736,Coil, PF00239
MTALEQNSAVESALHPQMDKYAIYLRKSRADAEAEKLGEGETLARHKKILTELAARKGLYVEKIYHEIVSGETIEARPEIQKLMADCYAGKYRGIIIVEVTRLSRGSQGDAQKIMDCLKFANRNNGLLVITPTKVYDVAHNPDDEEYMEFELFMSRREYKMIKRRMDRGRTQAVVEGNYMGSYRPYGYDILKTRTSRTLVPNAEEAPIVKQIYEWSAEKGWSAGKIARTLTTMAVPTYTGDPEWSTATVKTILTNPTYSGKVRWNDRMTVKSMVNGELVSSRPRSCHTDHYMLYEGKHEALVSEETYRAASRRYYSDRTKANFKLKNPLAGLLRCQACGKMMMHQSYKGRSTPPRFNHRQSTVCKVKSATVEDVMKALIHALKLYIEDFELKIDNLPDVDENSILSQLNALEAEQRKVEKKLAKAFDDYEEGIYTANEFVARKAKHTARLDAIRAQMESLEVSIPEKEEYQEKIMLLSEALDSLLDDALDADVKNEYLKRIIDHIDFSRENNAEFILDVYLK

SEQ ID NO: 4224 - protein, 522 aa, Unknown
  Description of Unknown: Integrase B4225 sequence
  PTHR30461:SF3,SM00857,G3DSA:1.10.10.2600,IPR036162,PF13408, PS51737,G3DSA:3.40.50.1390,IPR025827,IPR006119,IPR038109, PF07508,IPR011109,SSF53041,PTHR30461,cd00338, PF00239
MPTSKNTARKYAAGGSSDNSCGVEPLRAVIYARYSSSGQREESIEGQLRDCYEFAKKHGIIVIGEYIDKAMTGRVDRRPDFQRMMKDSEKGRFNCVLLWKMDRFARNRYDSAMYKYKLKKNGIRIFYAKETIPDGPEGIILESVMEGYAEYYSENLAQNVKRGNYDSALELKTLGKTCLGLKTGPDGRYMIDQAEATIVRRIFEEYAEGERAKDIYERLNSEGYRTSRGGKFNKNSLRRILSNKKYIGVYEYEDIYVENGIPAIITDRDLFERVQKMLKINHDAPARGKAQNFLLTTKLFCGLCGSPMIGDGGTSHTGKAYAYYSCTKRKRGRSCKKESVPKDWIEDLVVGELVKIVHNDELIEQIADRVMEYQKREKDQSGLHALEIRQKENEKAISNMLAAIEAGIITPSTKTRLMELEADRADIEKGIAHELLAEPEFERDQIIYFLERFRSGDINDEAYRIMLVDTFLNSVYLYDDDHLVLVMNYSGENCKVDLKLVEGAVSGDGCKGSAFAPSSAYN

SEQ ID NO: 4225 - protein, 522 aa, Unknown
  Description of Unknown: Integrase B4226 sequence
  PTHR30461:SF3,cd00338,SM00857,G3DSA:1.10.10.2600,IPR036162, PS51737,G3DSA:3.40.50.1390,IPR006119,IPR038109,PF07508, IPR011109,SSF53041,PTHR30461,PS51736,Coil, PF00239
MTTFDMHNAADRALKIDVYAIYLRKSRADLEAEKLGEGETLARHRKILEELAARQGFYIGEIYTELESGDTIAGRPKIQKLIEDCYKGKYKGILVVEITRLSRGNQGDAQTIMDCLKYSNMNNGVLVITPTKTYDVAHSQEDEEYMEFELFMSRREYKMIHKRMDRGRKQAVVEGNYMGAFRLYGYNIIKTKTKRTLVPNEAEAPYIRKIFEWSAKENLSTFEIAKRLTAMGVPTYRGESQWHKDTVKAYLTNPVYMGKVRWNDRMRIKTMVDGELKITRPRFHSDQYMLYDGKHMKDALIDEETFRVVQKKFYKDRTRSGLKLRNPLASLVFCKKCGKAMHYQPYGKDRHDRIVHKNNAAGCKVKSAIASDMIAAVTHALKMYIEDFELKVDNSSDVDENAIERQIEELEKEIRKIEKKKAKLFDSWENDDITNNEFVERKNIHNTRIEVLEKQIEELEFTIPEKVEHEEKLLLLSDAFIAMQDDDIDAATKNEFLKRIISRIEFSRESDLEFILDIDLHQ

SEQ ID NO: 4226 - protein, 522 aa, Unknown
  Description of Unknown: Integrase B4227 sequence
  PTHR30461:SF3,SM00857,G3DSA:1.10.10.2600,IPR036162,PF13408, IPR025827,G3DSA:3.40.50.1390,PS51737,IPR006119,IPR038109, PF07508,SSF53041,IPR011109,PTHR30461,Coil, PS51736,cd00338,PF00239
MSAGKSAAGGPPDAAMRAYIYGRYSTHNQKDTSIEQQFREIYEYCERSGIKVMGEYADRAISGKTDKRPDFQRMMKDCAKGRVQLVVCWKIDRFARNRYDSAIYKARLKKYGVRVVYAKESIPDGPEGILLESVLEGSAEYYSANLSQNIRRGMEENALECKVNNGNLALGYCKGPDGRFAIEPVGAAIVRDVFTMYTSGMNITEICADLNARGCRTSRGARFNKNSLRVMLRNERYIGVYQYAKIRIEDGVPPIITREVFDLAQEIIAKNARTPAASWSQVDYLLTGKLFCGHCGSAMVGESGTSKTGSKHNYYICAAKKRKKTCNKKTVKKDWIESLVVSETVKNVLVDDVIKRIAAAVIELQRREREEGQIPLLEQQLSETERLLKNVMAAIEQGIITPTTKQRMDELEQQKAELGDAIEKASIELTTLTEDQVIFWLEKFRGGDVTDPAFQWKVIENFVNAVYLYDDRLRIVYNYAKQGAETVDFSFAEALEGCDGSPSEGFGLGASSSTKQFKIRTL

SEQ ID NO: 4227 - protein, 522 aa, Unknown
  Description of Unknown: Integrase B4228 sequence
  SM00857,G3DSA:1.10.10.2600,IPR036162,PS51737,G3DSA:3.40.50.1390, IPR006119,IPR038109,PF07508,IPR011109,SSF53041, PF00239,PTHR30461,PS51736,Coil,cd00338
MPRRRKFAAKDRGRCVIYARFSSSRQREESIEDQVRVCTAYARDNGMEVEGVYADHAASARSDDRPEFQRMVREARDGAWGVVLVYKLDRFARDRFDAANYRVRLRDAGVELVSAMEQIPDAPEGAILESVLEGVNEWYSRSLSQNVTRGMMGNARKCMANGVRVFGYRVDGEGRYVVDEREAAIVRRAFSMAALGSTRGEVMLWLNSTCRNVRGGQWRYPSVATLLSNEKYLGVYSFGDVRVEGGMPAIVDQEVFDAANRPRPHARVGAFPLTGRLFDAETGTPYRGDGGTSGTGRRYFYYTCPLAGGVVRYPQAEVEDAVMGALRGFVARPGEAERLADAVLGAVGGMGDARRLDDARTRLREAQRGKGRLVDAIVGGVDPSLVQERLDALGAEVRRLEAEVARLERVTVPDRDWAVSWVRERMPESLTKQELRRTVGRCELADDGTLTVEIPWSTSCDSEAQKNSELPARGQFRVNKFGGHEDSESELFVTSSGLKIVCGQKLERSGQKIANRNHSAQK

SEQ ID NO: 4228 - protein, 522 aa, Unknown
  Description of Unknown: Integrase B4229 sequence
  SM00857,G3DSA:1.10.10.2600,IPR036162,PS51737, G3DSA:3.40.50.1390,IPR006119,IPR038109,PF07508, SSF53041,IPR011109,PTHR30461,Coil, PS51736,cd00338,PF00239
MTTFDMNNATSKALDMDVYAIYLRKSRADLEAEKLGEGETLARHRKMLEELAARKGFYIGEIYTELESGESIAGRPKIQKLLEDCYKGKYKGILIVEVTRLSRGNQGDAQTIMDCLKYSNMNNGVLVVTPTKTYDVAHSQEDEEYMEFELFMSRREYKMIHKRMDRGRRQAVVEGNYMGAYRPYGYNIVKTKTKRTLVPNEIEAPYIKKIFEWSVKDGLSTHDIAKRLTAMGAPTYRGDTEWTKDSVKTYLTNPVYMGKVRWNNRMRIKTMVNGELKITRPRYHSDQYMLYDGKHMKDALIDEETFREAQKKFYKDRTRSGLRLKNPLAGLVYCKKCGKSMHLQPYDKTRSDRIVHKSNASGCRVKSAIASDVVAAVTHALRTYVDDFEVKIENSPDIDENDIQRQIDALAKEMRKIEKKKSKLFDSWENDDITNNEFVERKAIHNQRLETLEKQIEDLEYTIPEKEEYEEKLILVSEALMTIQDDQLDAATKNESLKQIISRIEFSRENDIEFILDIDLHQ

SEQ ID NO: 4229 - protein, 522 aa, Unknown
  Description of Unknown: Integrase B4230 sequence
  SM00857,G3DSA:1.10.10.2600,IPR036162,PS51737,G3DSA:3.40.50.1390, IPR006119,IPR038109,PF07508,IPR011109,SSF53041, PTHR30461,Coil,PS51736,cd00338,PF00239
MELLNVCIYLRKSRADREAEARGEGETLARHERILLDLAKARGYNVGAIYKEIVSGETISARPVMQQVLREVEAGMWDGVLVVEVERLARGDTIDQGVVARAFQYSSTLIITPLKTYDPNNEYDEEYFEFGLFMSRREYKTIRRRLTAGRESSAKEGKYCGSKPPYGYSRIKLIGEKGWTLQPVPDQAEIVKLIFNLYVHGVSGERIGMAKICRKLNDSGIKTMDGGLWTVPRVQAILRNPVYAGMIRWNSRKAVKHIQDGQITISRPFAQDHILAEGRHPAIVSKELFQQAQDIVNRNPARPLNSLHVLRNPLAGIVRCGKCGYVMTRKSPSDRQGALLRCPYSSCDNISSKLPLVEKALLDGLQELVDGYKLNSSFSDQEYSLSISEKEEMIRGKLKEIDILKKKKEKQYDLLEQGIYSTDEFLERSRATAAELSACDTVIYSLRQEIKHEQELQFQRSSFIPKCEDLLTHYWTWDTSTKNQFLRELIEKAVYTKSKRNTWKNGDDVSFTLDIYPKIQQK

SEQ ID NO: 4230 - protein, 522 aa, Unknown
  Description of Unknown: Integrase B4231 sequence
  PTHR30461:SF3,cd00338,SM00857,G3DSA:1.10.10.2600,IPR036162, PF13408,PS51737,G3DSA:3.40.50.1390,IPR025827,IPR006119, IPR038109,PF07508,IPR011109,SSF53041, PTHR30461,PS51736,Coil,PF00239
MSNAVIYARYSSGHQREESIEGQIRECTNFAKRNGLTIVEHYIDRAISAKTDDRPSFQQMVADSSKKTFDTIIVYTLDRFARNRYDSAVYKAKLKRNGVRVLSAKENITSDPSGIILESVLEGMAEYYSVELAQKVKRGMTENALACRWASGRIPFGYTIDADKHLHPDPALVPIVQEAFEMYAAGAKIVDIARKINSYHVVTGMGNKFGRSSFDRMIRSETYIGVFKWNDIRKENAIPPIITPELFYKCQARYNARNRKNVARPSAIYLLSGKLRCGCCGGSMCGMSGKSRNGTMHYYYSCYSTRRRTSHCDIGNIRRDEIEHIIAAHAASILKKPINLDIIANQALKTNNSVKNYRLESLIQQEKDLTQKLENCMKAIDQGLVSITLMDRIKQYEADLQSVKNDISLEKIKSNPIQVTKEHIIFFLEKFALLEGEKFKDRIISTMVRDIVIKKEKDGNYLVTVQYNYANSKELPNEESYSVPESIGSQDVELVDNSGVVTNRLRFYPYYFEETFIFTQAS

SEQ ID NO: 4231 - protein, 522 aa, Unknown
  Description of Unknown: Integrase B4232 sequence
  SM00857,G3DSA:1.10.10.2600,IPR036162,PF13408,IPR025827, PS51737,G3DSA:3.40.50.1390,IPR006119,IPR038109,PF07508, SSF53041,IPR011109,PTHR30461,Coil,PS51736, cd00338,PF00239
MELLNVCIYLRKSRADREAEARGEGETLARHERILLDLAKKRGYNVGAIYKEIVSGETISARPVMQQVLREVESGMWDGVLVVEVERLARGDTIDQGVVARAFRYSETLIITPLKTYDPNNEYDEEYFEFGLFMSRREYKTIRRRLTAGRESSAKEGKYCGSKPPYGYSRVKLVGEKGWTLQPVPDQAEIVKLIFNLYVHGVAGERIGMAKICRKLNDSGIKTMDGGLWTVPRVQAILRNPVYAGMIRWNSRKAVKHIQDGQITISRPFAKDYILVEGRHPAIVSKELFQQAQDIVNQNPARPLNSLHVLRNPLAGIIRCGKCGYVMTRKAPSGRQVDLLRCPYSSCNNVSSKLPLVEKALLDGIQELVDGYKLNSNFSDQEYSLSISEKEEMIRGKLKEIDVLRKKKEKQYDLLEQGIYSTEEFLERSRATAAELSACDTVIHSLRQEIKHEQELQFQRSSFIPKCEDLLAHYWTWDTSTKNQFLRELIEKAVYTKNTKNTWKNGDDVSFTLDIYPKIQHK

SEQ ID NO: 4232 - protein, 522 aa, Unknown
  Description of Unknown: Integrase B4233 sequence
  PTHR30461:SF3,SM00857,G3DSA:1.10.10.2600,IPR036162,PF13408, PS51737,IPR025827,G3DSA:3.40.50.1390,IPR006119,IPR038109, PF07508,IPR011109,SSF53041,PTHR30461,Coil, PS51736,cd00338,PF00239
MNGVIYARYSSHNQREESIEGQIRECKRYAEHHNITIVGEYADRAITGRTDDRAEFQKMIRDAEKGHFQVVLVYKLDRFARNRYDSATYRLKLKKCGVKVSSAMEAVQDGPEGIILEAVLEGMAEYYSANLSQNIKRGMTDNAMKCLATGGGRCLGYKTGPDKKYVIDPPAADTVRLIYEMYDQGHTYAHIVETLNNQGRTTFKGTPFNKNSLGKILHNRRYIGDYVWGDIVVAGGMPQIVDRDLWERVQAKLSRKEKASARARGDYNYILSGKLFCGKCGKGMIGDHGTSRNGTKFYYYTCSTRKHSGSCTKKSVRAEKIEAEVIRTTIQTVLQDDMIEYIADKVMEYQAKDTEGATLLSSYNNRLKETETAINGILKAIEDGLYTATMKERMGELEAQKEDLKASISREEINQRKVSRDELIFFLERFKGGNPEDPEYCRRLVDTFVNSIWLYDDKLVITYNFSGEKNKVTLEMVDAALDGCASGCSDKACATPPNETKANILLVSCSVFGFVQKIADRV

SEQ ID NO: 4233 - protein, 522 aa, Unknown
  Description of Unknown: Integrase B4234 sequence
  SM00857,G3DSA:1.10.10.2600,IPR036162,PF13408,IPR025827, G3DSA:3.40.50.1390,PS51737,IPR006119,IPR038109,PF07508, SSF53041,IPR011109,PTHR30461,PS51736,cd00338, PF00239
MELLNVCIYLRKSRADREAEARGEGETLARHERILLDLAKKRGYNVGAIYKEIVSGETISARPVMQQLLREVESGMWDGVLVVEVERLARGDTIDQGVVARSFQYSNTLIITPLKTYDPNNEYDEEYFEFGLFMSRREYKTIRRRLTAGRESSAKEGKYCGSKPPYGYSRVKLVGEKGWTLQPVPDQAEIVKLIFNLYVHGVSGERIGMAKICRKLNDSGIKTMDGGLWTISRVQAILRNPVYEGMIRWNSRKAVKHIKDGQITISRPFAQDYILVKGRHPAIVSKELFQQAQDIVNKNPARPLNSLHVLRNPLAGIVRCGKCDHVMTRKSPNGRQGDLIRCPYSSCSNISSKLPLVEKALLDGIQELVDGYRLNNSVSNQEYSLSISEREKMIQGKLKEIDILKKRKQRQYDLLEQGIYSTEEFLERSRATAAELSACDAVILSLKQEIEHEQELQFQRSSFIPKCEDLLANYWTWDTSTKNRFLRELIEKAVYTKNAKNTWKNGDDISFTLDIYPKIQQK

SEQ ID NO: 4234 - protein, 522 aa, Unknown
  Description of Unknown: Integrase B4235 sequence
  PTHR30461:SF3,cd00338,SM00857,G3DSA:1.10.10.2600,IPR036162, PF13408,PS51737,IPR025827,G3DSA:3.40.50.1390,IPR006119, IPR038109,PF07508,IPR011109,SSF53041,PTHR30461, PS51736,Coil,PF00239
MSSVDKTAVIYARYSSHGQTEQSIDGQIAAAQKYAEGKGYTIIHIYADRAMTGRNDDREQFQKMLSDTATHQFGVILLWKIDRFGRNREEIAFNRYRCKKNGVRVERVAEDVPDGPEGVILDSVLEGMAEYYSLQLAQNVRRGQRESAKKSQSNGGTRMIGYKVNPDTKRYEIDPDTAPFITEVFRRYAGGQTMAEIAAWLNAQGLRATRGGMFTVNSLHRLLKNEKYTGVYIFRDIRNEGGMPALIDRATFDKVQEMLKVNRRAPSRVWSRAEYLLTDKLFCGHCGAPMAGVSGHGHTGVKHNYYTCLNRKRKKSCTKKSVRQDVLEPLVLKSIRNLLQDDATLKYIADRVWAEYERSDTSGDTIRALDRQIADVDKALSNVMKAIEMGIINEMTKARMDELTEQKQALSAARADAGLARGFKLTRNMILYFLRKMAAMDISDRDSQKRLIKTFVNAIYLYDDHFDIAFNYTENGKVIVKMQEIDDASTGGAFGCCAQCPTKIKAPAVPRRVFLLWCSVSC

SEQ ID NO: 4235 - protein, 522 aa, Unknown
  Description of Unknown: Integrase B4236 sequence
  PTHR30461:SF3,SM00857,G3DSA:1.10.10.2600,IPR036162,PF13408, PS51737,IPR025827,G3DSA:3.40.50.1390,IPR006119,IPR038109, PF07508,IPR011109,SSF53041,PTHR30461,Coil, PS51736,cd00338,PF00239
MGKKQKTNGGDAVIYARYSSHNQRDVSIEQQVEACRKHAAELGLTVTATYEDRAISGKTDKRPSFQRMMRDAEQHKFAYVLAWKSNRIGRNMMQALVNESRLVDCGVKVFYAEEDFDDNAAGRFALRSMMNVNQFYIENMAEDVKRGLYDNAKKGLVNGSLPLGYKRGADGKPEIDEPKAAIVREIYTRVAAGELFASIADDLNARGIKTARGREWNKGSFHVLCHNDRYRGIYMYGDIRIPGGMPRIISDELFYDAQEAYSMKKDNRYGRARHGAENYLLTGKLYCGHCGGYMVGISGTSKTGEMHYYYACQKHRLEHTCEKKAIRRDVIENAVARAIMMYCLDDETIDFIVDSTIAYFKQKDHELHIEAMENELAAVQQAISNLMKAIEAGIITPTTRTRLLDLEEQQAKLSAKINTAKAERVEIDRDDLIAGLQLFRTGDIKNKKFLAKLFNTFLIAVYLYDDNRLKIVFSFTGNHNSVEIPLELDNDCPDSEIVSDETEVRMSHLECTSRDSNPGPTD

SEQ ID NO: 4236 - protein, 522 aa, Unknown
  Description of Unknown: Integrase B4237 sequence
  SM00857,G3DSA:1.10.10.2600,IPR036162,PS51737,G3DSA:3.40.50.1390, IPR006119,IPR038109,PF07508,IPR011109,SSF53041, PF00239,PTHR30461,PS51736,Coil,cd00338
MTTFDMNIATEHALKMDVYAIYLRKSRADLEAEKLGEGETLARHRKILEELAARKGFYIGEIYTELESGETIAGRPKIQKLIEDCYKGKYKGILIVEITRLSRGNQGDAQTIMDCLKYSNMNNGVLVVTPTKTYDVAHSQEDEEYMEFELFMSRREYKMIHKRMDRGRKQAVVEGNYMGTYRPYGYNIIKTKTKRTLVPNEYEAPYIRKIFEWSAKDNLSTFEIAKRLTAMGVPTYKGDSQWSKDSVKAYLTNPVYMGKVRWNDRMRIKTMVDGELKITRPRFHSDQYMLYDGKHMKDALVDEATFRKVQKKFYKDRTRSGLKLRNPLAGLVYCKKCGKAMHYQPYDKDRSDRIVHKANSGGCKVKSAIADDVISAVIHGLKLYVEDFELKVENASDTDASLIEKQIEDLEKEIRKIEKKKAKLFDSWENDDITNNEFVERKNIHNTRIEVLEKQIEELEYTIPEKVEHEEKLLLLSDAFIAMRDNEIDATTKNEFLKRIISRIEFSRENNGEFILDIDLHQ

SEQ ID NO: 4237 - protein, 522 aa, Unknown
  Description of Unknown: Integrase B4238 sequence
  PTHR30461:SF3,SM00857,G3DSA:1.10.10.2600,IPR036162,PF13408, PS51737,IPR025827,G3DSA:3.40.50.1390,IPR006119,IPR038109, PF07508,IPR011109,SSF53041,PF00239, PTHR30461,PS51736,Coil,cd00338
MSSVDKTAVIYARYSSHGQTEQSIDGQIAAAQKYAEGKGYTIIHIYADRAMTGRNDDREQFQKMLSDTATHQFGVILLWKIDRFGRNREEIAFNRYRCKKNGVRVERVAEDVPDGPEGVILDSVLEGMAEYYSLQLAQNVRRGQRESAKKSQSNGGTRMIGYKVNPDTKRYEIDPDTAPFITEVFRRYAGGQTMAEIAAWLNAQGLRATRGGMFTVNSLHRLLKNEKYTGVYIFRDIRNEGGMPALIDRATFDKVQEMLKVNRRAPSRVWSRAEYLLTDKLFCGHCGAPMAGVSGHGHTGVKHNYYTCLNRKRKKSCTKKSVRQDVLEPLVLKSIRNLLQDDATLKYIADRVWAEYERSDTSGDIIRALDRQIADVDRALSNVMKAIEMGIINEMTKARMDELTEQKQALSAARADAGLARGFKLTRNMILYFLRKMAAMDISDRDSQKRLIKTFVNAIYLYDDHFDIAFNYTENGKVIVKMQEIDDASTGGAFGCCAQCPTKIKAPAVPRRVFLFWCSVSC

SEQ ID NO: 4238 - protein, 522 aa, Unknown
  Description of Unknown: Integrase B4239 sequence
  PTHR30461:SF3,SM00857,G3DSA:1.10.10.2600,IPR036162,PF13408, IPR025827,G3DSA:3.40.50.1390,PS51737,IPR006119,IPR038109, PF07508,SSF53041,IPR011109,PTHR30461,Coil, PS51736,cd00338,PF00239
MAKTVRAIPATISRYTAAPINSRKKRRVAGYARVSTDHDDQISSYEAQVDYYTNYIRERDDWEFVGIYTDEGISATNTRHRDGFKRMVRDAMDGKIDLIVTKSVSRFARNTVDSLTTVRKLKDKGIEIYFEKENIWTLDAKGELLITIMSSLAQEESRSISENVTWGHRKRFADGKVCVPFGHFLGYDRGPDGNLVVNREQAKTVKLIYRLFLDGYTFHSIARELTSRGLETPARKKRWYPGTVESILTNEKYKGDALLQKRFTVNFLTKETKANEGEVPQYYVENNHEAIISPQVFDWVQEEIKRRREGRGRYSGVSIFSSKIKCGQCGGWYGAKVWHSTDKYRRTIYRCNDKFKSHCKTPHLTEDDIKEAFVRAVNQLIENKADVLDSITLLKERLTDTEDLEEERDRISTDLNLLADKIQQLIAENARVAQNQDDYDRNYNELVSRYEAAKTQYDKTCEAIQYRKARSRQMDSFIKELRNQDLIKEFDARLWGSLVDFITVYSKDDIRVTFKDGTEIRA

SEQ ID NO: 4239 - protein, 522 aa, Unknown
  Description of Unknown: Integrase B4240 sequence
  SM00857,G3DSA:1.10.10.2600,IPR036162,PS51737,G3DSA:3.40.50.1390, IPR006119,IPR038109,PF07508,IPR011109,SSF53041, PF00239,PTHR30461,PS51736,Coil,cd00338
MNEQYLIYLRKSRNDAQLEAMGVDVLERHEKTLLALAKSMNLQIGAIYREVVSGDSIAARPEMQRTLKEVEAGLWKGVLVMEVERLARGDTVDQGIVQRTFQYSETLIVTPAKIYDPNNEFDEEYFEFGLFMSRREYKTIRRRMRAGVTAAVREGKWPFNRSPYGWKRVKLEDARGWVLAPDPDEAPVVKLIFDMFTGPNRVGITSICKYLESHGIPPRNGDRWLECTILGILGNIVNDQKVGIGRRKQITTVKGGVLTKSRESRLSNNYDLIATGLQPRLIDHDVFVEAQGYLGKGTPKPPESYGIKNPLASLVVCSCCGKKMQRRPKTTTPGCHGAPYDVLMCHTRGCPTIGAPLELVEKEVINVLSDWVAGYQLNPSQEVKNNITEKQALLSAAIANRDALLKQNEKLYDLLEREIYTTDVFLERSSTLHERIEEAELSISALKKDLEYEEQKFENSSRFIPECKELLSSYWDLSVPDRNKALKLLIDRVEYKKTVKNKRGTVDTPTFELTLKPRIPRI

SEQ ID NO: 4240 - protein, 522 aa, Unknown
  Description of Unknown: Integrase B4241 sequence
  SM00857,IPR036162,PS51737,G3DSA:3.40.50.1390, IPR006119,PF07508,IPR011109,SSF53041, PTHR30461,Coil,PS51736,cd00338, PF00239
MREQYLIYLRKSRNDAQLEAMGVDVLERHEKTLLALAKSMNLQIGAIYREVVSGDSIAARPKMQRTLKEVEAGLWKGVLVMEVERLARGDTVDQGIVQRTFQYSETLIVTPAKIYDPNNEFDEEYFEFGLFMSRREYKTIRRRMRAGVTAAVREGKWPFNKAPYGWKRVKLEDARGWVLAPDPDEAPVVKLIYDMFTVPERVGITSKCKYLESHGIPPRNGDRWLECTILGILGNIVNDQKVGIGHRKQITTVKDGVLTKSRESRLSNNYDLIATGLQPRLIDHDLFVEAQGYLGKGTPKPPESYGTKNPLASLIVCSCCGKKMQRRPKTTTPGCHGAPYDVLMCHTRGCPTIGAPLELVEKEVINALSDWVTGYQLNPSQEVKNNVAEKQELLSAAIVNRDSLLKQNEKLYDLLEREIYTTDIFLERSNNLHERIEEAEASISALEKDLEYEKQKFKNSSRFIPECKELLSSYWDLSVPDRNKALKLLIDRVEYKKTVKNKRGTVDTPTFELTLKPRIPRI

SEQ ID NO: 4241 - protein, 522 aa, Unknown
  Description of Unknown: Integrase B4242 sequence
  PTHR30461:SF3,SM00857,G3DSA:1.10.10.2600,IPR036162,PS51737, G3DSA:3.40.50.1390,IPR006119,IPR038109,PF07508,IPR011109, SSF53041,PTHR30461,Coil,PS51736,cd00338, PF00239
MKKMKNNELLMGEYLLLYLRKSRQDNENETVEEVLSRHERQLQEYAAKTFGAVIPEDRIYREIVSGETIDDRPEMKKVLKRIEDPACKGVLVIEPQRLTRGDLLDCGTIVHAFRYSKTLVMTPTKIYDIEDKYDRKFFEMELTRGNDYLEYTKEILTRGREASVHEGNYIASIAPYGYKKVKNGKEQILVIDPVEAEYVRMAYHWYVYDGLGAANIGHKLNEMGAHPRKSKYFRPTAIRQMLTNEVYIGKIRWGHKKVIKVFEDGKVVKKRPRNPDYELIQGKHEPIISEELFNLAQEQKNKSTREHYDSTLKNYYAGLIKCKKCGYAIGMRIHRQKGVVYRRDRYYCRNGRYCDQKGSNAEIVNDAILKSLKGYLQDFKIKISGTNKELYETQMTVIENMENELGKLSKKEMDLYDYLEDGLYTKEVFKARMDLLKKEREELIEKIKKAKQTMPSVEKYQRQYYSLMQAIDAIENPNISAKDKNQLLKNIIEVIYYNKEQADIQTKDGIIRGDIEIEIILK

SEQ ID NO: 4242 - protein, 522 aa, Unknown
  Description of Unknown: Integrase B4243 sequence
  PTHR30461:SF3,SM00857,G3DSA:1.10.10.2600,IPR036162,PF13408, IPR025827,G3DSA:3.40.50.1390,PS51737,IPR006119,IPR038109, PF07508,SSF53041,IPR011109,PTHR30461,Coil, PS51736,cd00338,PF00239
MGKKQKTNGGDAVIYARYSSHNQRDVSIEQQVEACRKHAAELGLTVTATYEDRAISGKTDKRPSFQRMMRDAEQHKFAYVLAWKSNRIGRNMMQALVNESRLVDCGVKVFYAEEDFDDNAAGRFALRSMMNVNQFYIENMAEDVKRGLYDNAKKGLVNGSLPLGYKRGADGKPEIDEPKAAIVREIYTRVAAGELFASIADDLNARGIKTARGREWNKGSFHVLCHNDRYRGIYMYGDIRIPGGMPRIISDELFYDAQEAYGMKKDNRYGRARHGAENYLLTGKLYCGHCGGYMVGISGTSKTGEMHYYYACQKHRLEHTCEKKAIRRDVIENAVARAIMMYCLDDETIDFIVDSTIAYFKQKDHELHIEAMENELAAVQQAISNLMKAIEAGIITPTTRTRLLDLEEQQSKLSAKINTAKAERVEINRDDLIAGLQLFRTGDIKNKKFLAKLFNTFLIAVYLYDDNRLKIVFSFTGNHNSVEIPLELDNDCPDSEIVSDETEVRMSHLECTSRDSNPGPTD

SEQ ID NO: 4243 - protein, 522 aa, Unknown
  Description of Unknown: Integrase B4244 sequence
  PTHR30461:SF3,IPR036162,PS51737,IPR011109,PTHR30461, PF00239,G3DSA:1.10.10.2600,IPR006119,SSF53041,cd00338, SM00857,IPR025827,IPR038109,PS51736,cd18688, PF13408,G3DSA:3.40.50.1390,PF07508,Coil
MNGEIKNVVLYLRYSSAAQNEQSIEGQRHVCQEYCRRAGYQIIDEYVDRATSASHNVEKRLNFQRMLRDAERGRFDAVVVYKLDRFARNRYDSVNAKYRLKKAGVVLLSATENLSDSPESIILESVLEGMAEFYSAELSQKITRGMKETAQKHLSTGGTVPLGYHIENRRLVIDPTTAPIVKQAFEMYAAGHTATAIAKQFNASGYRTSKGTAFNRSSFKSMFHNERYIGIYKYGAYKAENAVPAIIDKQLWDAVQSRLSHPAPPSQGKAQVPFLLAGKLFCGHCGAKMNGDSGKGRSGEPYYYYTCYNRKREHTCHKKSVRKEWIEKVVVQDAMHLLTDDYIEELADIAVQENQRQIAATTKIPLLKEKIVETEKSINNIVTAIEKGVASDTLMHRITGLEQQKKDYENQLAAEETSAIQLDKYMVIYWLDQFKHGDVDDERFRRNLINLLVNSVTIWDDPDGGFRITTAYNLTDAPTKTFRVEALPGSDMGSSSPPLATNPNQILIIGLVLVQTRKHLMV

SEQ ID NO: 4244 - protein, 522 aa, Unknown
  Description of Unknown: Integrase B4245 sequence
  SM00857,G3DSA:1.10.10.2600,IPR036162,PS51737,G3DSA:3.40.50.1390, IPR006119,IPR038109,PF07508,SSF53041,IPR011109, PTHR30461,Coil,PS51736,cd00338,PF00239
MELLNVCIYLRKSRADREAEARGEGETLARHERILLDLAKKRGYNVGAIYKEIVSGETISARPVMQQVLREVEAGMWDGVLVVEVERLARGDTIDQGVVARAFQYSSTLIITPLKTYDPNNEYDEEYFEFGLFMSRREYKTIRRRLTAGRESSAKEGKYCGSKPPYGYSRIKLIGEKGWTLQPVPDQAEIVKLIFNLYVHGVSGERIGMAKICRKLNDSGIKTMDGGLWTVPRVQAILRNPVYAGMIRWNSRKAVKHIQDGQITISRPFAQDHILAEGRHPAIVSKELFQQAQDIVNRNPARPLNSLHVLRNPLAGIVRCGKCGYVMTRKSPSDRQGALLRCPYSSCDNISSKLPLVEKALLDGLQELVDGYKLNSSFSDQEYSLSISEKEEMIRGKLKEIDILKKKKEKQYDLLEQGIYSTDEFLERSRATAAELSACDTVIYSLRQEIKHEQELQFQRSSFIPKCEDLLTHYWTWDTSTKNQFLRELIEKAVYTKSKRNTWKNGDDVSFTLDIYPKIQQK

SEQ ID NO: 4245 - protein, 522 aa, Unknown
  Description of Unknown: Integrase B4246 sequence
  SM00857,G3DSA:1.10.10.2600,IPR036162,PF13408, PS51737,G3DSA:3.40.50.1390,IPR025827,IPR006119, IPR038109,PF07508,IPR011109,SSF53041, PTHR30461,Coil,PS51736,cd00338,PF00239
MVKNRAAIYARFSSHNQRSESIEIQVENSRAYCEREGLQVVHEYCDYAQTGRNIDRAEFQRMMNDARHGLFDYVVIYKVTRIMRNRDEMSLARIMLRKAGVEILYAGEDISSGSSGVLQLGMLEVLAEYESALDSERIRDGIQKNAERCMANGRTMYGWDIVEGRYVINEREASVLRRMKNMLFAGSSVADIVRAVSAERSKRGAKFNQDTVTKLLKRVQNAGVYKYAGHEVPDGMPAIWSQVEQDMIDNILGDRHKPRRKINSTLEFPLSGKLYCAKCGAPMAGTSGTSCTGATYHYYKCRKCRRTVRRDLVEDVVCDMTLQAVAREDVRRRIASGMIAFQAEQPKEQSRSYAIKKELKRIDRTFERIWQAIEDGIAPPGGRERTEELKQRKSELEAELRIAEREEAFNIGVDELMLWLDDAAENLTPEVILGTFVRFAEIDGKTLNVYFAFDHYGDDFRPKQKKAEPCPEGHSSTNYPMVELMRKTANSTSTATRAAIQLDTCIVRVSKNWFVVVGTCQK

SEQ ID NO: 4246 - protein, 522 aa, Unknown
  Description of Unknown: Integrase B4247 sequence
  PTHR30461:SF3,cd00338,SM00857,G3DSA:1.10.10.2600,IPR036162, PS51737,G3DSA:3.40.50.1390,IPR006119,IPR038109,PF07508, IPR011109,SSF53041,PTHR30461,PS51736,Coil, PF00239
MTVFEKNSAVESALHPQMDKYAIYLRKSRADAEAEKLGEGETLARHKKILTELAARKGLYVEKIYHEIVSGETIEARPEIQKLMADCYAGKYRGIIIVEVTRLSRGSQGDAQKIMDCLKFANRNNGLLVITPTKVYDVAHNPDDEEYMEFELFMSRREYKMIKRRMDRGRTQAVVEGNYMGSYRPYGYDILKTRTSRTLVPNAEEAPIVKQIYEWSAEKGWSAGKIARTLTTMAVPTYTGDPEWSTTTVKTILTNPTYSGKVRWNDRMTVKSMVNGELISSRPRSCHTDHYMLYEGKHEALVSEETYRAASRRYYSDRTKANFKLKNPLAGLLRCQACGKMMMHQSYKGRSTPPRFNHRQSTVCKVKSATVEDVMKALIHALKLYIEDFELKIDNLPDVDENSILSQLNALEAEQRKVEKKLAKAFDDYEEGIYTANEFVARKAKHTARLDAIKAQMESLEVSIPEKEEYQEKIMLLSEALDSLLDDALDADVKNEYLKRIIDHIDFSRENNAEFILDVYLK

SEQ ID NO: 4247 - protein, 522 aa, Unknown
  Description of Unknown: Integrase B4248 sequence
  PTHR30461:SF3,cd00338,SM00857,G3DSA:1.10.10.2600,IPR036162, PF13408,PS51737,IPR025827,G3DSA:3.40.50.1390,IPR006119, IPR038109,PF07508,IPR011109,SSF53041,PTHR30461, PS51736,Coil,PF00239
MCAKKKPAMLEPDMQDAVIYTRYSSHNQRDCSIEQQVADCEIFARQNNLRVVKVYADRHMSGTTDNRPQFQQMLKDAAHGHWAYVICWKIDRFARNRYDSATYKFRLKKAGVRVLYAKESIPDGPEGILLESVLEGSAEYYSAALAQNIRRGMKYNAEQCKVNSGSIPFGYCKGPDGRFAIHEANAEVVREIFRKAAAGMPFVDIANDLNSRGLKTSRGGRWNKGSFRLLMNEAYIGVYHFSDTRIEGGMPALIDQGTFWAANERLKANSSVRGRHQDGGDYLLTGKLKCAHCGSYMIGFSGTGKSGELHYYYGCQKRRRERACKKANVPREWIERVVVKAALDYVLRPDVMEWIADAVMEYQEREAASAQLAALTAELEENQKATDNVMKAIEAGIITSTTKQRLLDLEAKAQDLKRAIELEKLSHVRLERDQVLFWLDRFRGGSLQSQEFRRKVIDAFVSVVYLSDDHLRIAFNYSGGSNAEADFDLVMDAEAAAGELSKKFAQGHVASTKQFVLEPDSL

SEQ ID NO: 4248 - protein, 522 aa, Unknown
  Description of Unknown: Integrase B4249 sequence
  PTHR30461:SF3,SM00857,G3DSA:1.10.10.2600,IPR036162,PF13408, PS51737,G3DSA:3.40.50.1390,IPR025827,IPR006119,IPR038109, PF07508,IPR011109,SSF53041,PF00239,PTHR30461, PS51736,Coil,cd00338
MSSVDKTAVIYARYSSHGQTEQSIDGQIAAAQKYAEGKGYTIIHIYADRAMTGRNDDREQFQKMLSDTATHQFGVILLWKIDRFGRNREEIAFNRYRCKKNGVRVERVAEDVPDGPEGVILDSVLEGMAEYYSLQLAQNVRRGQRESAKKSQSNGGTRMIGYKVNPDTKRYEIDPDTAPFITEVFRRYAGGQTMAEIAAWLNAQGLRATRGGMFTVNSLHRLLKNEKYTGVYIFRDIRNEGGMPALIDRATFDKVQEMLKVNRRAPSRVWSRAEYLLTDKLFCGHCGAPMAGVSGHGHTGVKHNYYTCLNRKRKKSCTKKSVRQDVLEPLVLKSIRNLLQDDATLKYIADRVWAEYERSDTSGDTIRALDRQIADVDRALSNVMKAIEMGIINEMTKARMDELTEQKQALSAARADAGLARGFKLTRNMILYFLRKMAAMDISDRDSQKRLIKTFVNAIYLYDDHFDIAFNYTENGKVIVKMQEIDDASTGGAFGCCAQCPTKIKAPAVPRRVLLFWCSVSC

SEQ ID NO: 4249 - protein, 522 aa, Unknown
  Description of Unknown: Integrase B4250 sequence
  SM00857,G3DSA:1.10.10.2600,IPR036162,PF13408,IPR025827, G3DSA:3.40.50.1390,PS51737,IPR006119,IPR038109,PF07508, SSF53041,IPR011109,PTHR30461,Coil,PS51736, cd00338,PF00239
MNTLERDCIYLRKSRADREAEARGEEETLARHERILLDLAKRRGCHIGAIYREVVSGETISARPVMQRLLQEVESGMWDGVLVVEVERLARGDSIDQGVVARAFQYSDTKIITPTKTYDPNNEFDEEYFEFGLFMSRREYKTIKRRLNAGRVSSVQEGKYCGNKPPYGYRRVKLEHTKGYSLEPIPDQAEIVKLIYNWYTYGIDGERIGMCKITRKLIDMGVPSLSGKSWSTATVANILENPVYTGKIRWNRRKGLNKIENGNVVKSRPRCNDYILTDGLHEAIISQEIYDLAQYYRSMNPPRPIGASNTVKNPLSGIIKCGKCGHNMVRRPYNSRKQEDTLLCSYTGCNNVSSRLSLVEKALIAGLADLVQSYKINDSLNDTNGVDIIATKEKVLLDKRAELENLNTQKNRQYELLEQGIYTTEVFLERSGATAKQIDDCAAAIERIAADLAHDRELLEQKFNFIPKCEHLLSNYWDWDAPTRNSVLKELLERVDYFKDNKNDFKRGDEITFTLDIYPKIQ

SEQ ID NO: 4250 - protein, 522 aa, Unknown
  Description of Unknown: Integrase B4251 sequence
  PTHR30461:SF3,SM00857,G3DSA:1.10.10.2600,IPR036162,PF13408, PS51737,G3DSA:3.40.50.1390,IPR025827,IPR006119,IPR038109, PF07508,SSF53041,IPR011109,PF00239,PTHR30461, PS51736,Coil,cd00338
MRAFIYCRFSSHKQQELSIEGQRDICQEYADKHNITVVGQYADRARSGKTENRADFRRLMRDAATGVVDCVLVWRYDRFFRNRAESALYRKQLEAAGVHLISVTEYIPEGSAGIITQGMIETVAEYFSAKLSEDVSRGMNKAAQHCQIVGRAPLGYRAGPNKRWQIDPVGAELVRRIFEWYASGKAMGQLAAQLNEEGHRTTSGTLYTRSSFNSILRNEKYIGVYSYGGEVRIEGGCPRIIEDELFFTVQRRLSANRHRPGAYKAEVPYLLSGKLFCGLCGAPMTGTAGTSHTGARHYYYICNNRRAKTCKKKNVRLDLIEEAVLQSALDILTDENIAYISTEVERRCAENSDSAALLASLNAQLEEVQRRLKNIGNAIAQGIITETTKELLEEAEADRTALRQQIDRAKVQAALVVKAEAVACWLDGFRRGDRTDPDFRRQVFGALVHSVFVYDDYLKIIFNVDSAGAAVVPYEAAQAATPSEAPPGSYLDTLGAPYQANPNVLLFEGAFGFVFYFPIMKV

SEQ ID NO: 4251 - protein, 522 aa, Unknown
  Description of Unknown: Integrase B4252 sequence
  SM00857,IPR036162,PS51737,G3DSA:3.40.50.1390,IPR006119, PF07508,SSF53041,IPR011109,PTHR30461,Coil, PS51736,cd00338,PF00239
MREQYLIYLRKSRNDAQLEAMGVDVLERHEKTLLALAKSMNLQIGAIYREVVSGDSIAARPEMQRTLKEVEAGLWKGVLVMEVERLARGDTVDQGIVQRTFQYSETLIVTPAKIYDPNNEFDEEYFEFGLFMSRREYKTIRRRMRAGVTAAVREGKWPFNRSPYGWKRVKLEDARGWVLAPDPDEAPVVKLIFDMFTGPDRVGITSICKYLESHGIPPRNGDRWLECTILGILGNIVNDQKVGIGHRKQITTVKDGVLTKSRESRLSNNYDLIATGLQPRLIDHDVFVEAQGYLGKGTPKPPESYGIKNPLASLVVCSCCGQKMQRRPKTTTPGCHGAPYDVLMCHTRGCPTIGAPLELVEKEVINVLSGWVAGYQLNPSQEVKNNVTEKQALLSAAIANRDALLKQNEKLYDLLEREIYTTDVFLERSSTLHERIEEAELSISALEKDLEYEKQKFENSSRFVPKCKELLSSYWDLSVPDRNKALKLLIDRIEYKKTVKNKRGTVDTPTFELTLKPRIPRI

SEQ ID NO: 4252 - protein, 522 aa, Unknown
  Description of Unknown: Integrase B4253 sequence
  SM00857,G3DSA:1.10.10.2600,IPR036162,PS51737, G3DSA:3.40.50.1390,IPR006119,IPR038109,PF07508, SSF53041,IPR011109,PTHR30461,Coil, PS51736,cd00338,PF00239
MREQYLIYLRKSRNDAQLEAMGVDVLERHEKTLLALAKSMNLQIGAIYREVVSGDSIAARPEMQRTLKEVEAGLWKGVLVMEVERLARGDTVDQGIVQRTFQYSETLIVTPAKIYDPNNEFDEEYFEFGLFMSRREYKTIRRRMRAGVTAAVREGKWPFNKAPYGWKRVKLEDARGWVLAPDPDEAPVVKLIFDMFTGPDRVGITSICKYLESHGIPPRNGDRWLECTILGILGNIANDQKVGIGHCKQITTVKDGVLTKSRESRLSNNYDLIATGLQPRLIDHDVFVEAQGYLGKGTPKPPESYGTKNPLASLIVCSCCGKKMQRRPKTTTPGCHGAPYDVLMCHTRGCPTIGAPLELVEKEVINALSDWVTGYQLDPSQEVKNNVTEKQALLSAAVANRDALLKQNEKLYDLLEREIYTTDVFLERSNTLHERIEEAELSISALKKDLEYEKQKFENSSRFIPECKELLSSYWDLSVPDRNKALKLLIDRVEYKKTVKNKRGTVDTPTFELTLKPRIPRI

SEQ ID NO: 4253 - protein, 522 aa, Unknown
  Description of Unknown: Integrase B4254 sequence
  SM00857,G3DSA:1.10.10.2600,IPR036162,PF13408,IPR025827, G3DSA:3.40.50.1390,PS51737,IPR006119,IPR038109,PF07508, SSF53041,IPR011109,PTHR30461,PS51736,cd00338, PF00239
MELLNVCIYLRKSRADREAEARGEGETLARHERILLDLAKKRGYNVGAIYKEIVSGETISARPVMQQLLREVESGMWDGVLVVEVERLARGDTIDQGVVARSFQYSNTLIITPLKTYDPNNEYDEEYFEFGLFMSRREYKTIRRRLTAGRESSAKEGKYCGSKPPYGYSRIKLVGEKGWTLQPVPDQAEIVKLIFNLYVHGVSGERIGMAKICRKLNDSGIKTMDGGLWTISRVQAILRNPVYEGMIRWNSRKAVKHIKDGQITISRPFAQDYILVKGRHPAIVSRELFQQAQDIVNKNPARPLNSLHVLRNPLAGIVRCGKCDHVMTRKSPNGRQGDLIRCPYSSCSNISSKLPLVEKALLDGIQELVDGYRLNNSVSDQEYSLSISEREKMIQGKLKEIDILKKRKQRQYDLLEQGIYSTEEFLERSRATAAELSACDAVILSLKQEIEHEQELQFQRSSFIPKCEDLLANYWTWDTSIKNRFLRELIEKAVYTKNVKNTWKNGDDISFTLDIYPKIQQK

SEQ ID NO: 4254 - protein, 522 aa, Unknown
  Description of Unknown: Integrase B4255 sequence
  SM00857,G3DSA:1.10.10.2600,IPR036162,PS51737,G3DSA:3.40.50.1390, IPR006119,IPR038109,PF07508,SSF53041,IPR011109, PTHR30461,Coil,PS51736,cd00338,PF00239
MREQYLIYLRKSRNDAQLEAMGVDVLERHEKTLLALAKSMNLQIGAIYREVVSGDSIAARPEMQRTLKEVEAGLWKGVLVMEVERLARGDTVDQGIVQRTFQYSETLIVTPAKIYDPNNEFDEEYFEFGLFMSRREYKTIRRRMRAGVTAAVREGKWPFNKAPYGWKRVKLEDARGWVLAPDPDEAPVVKLIFDMFTGPDRVGITSICKYLESHGIPPRNGDRWLECTILGILGNIVNDQKVGIGHRKQITTVKDGVLTKSRESRLSNNYDLIATGLQPRLIDHDVFVEAQGYLGKGTPKPPESYGTKNPLASLIVCSCCGKKMQRRPKTTTPGCHGAPYDVLMCHTRGCPTIGAPLELVEKEVINALSDWVTGYQLDPSQEVKNNVTEKQALLSAAIANRDALLKQNEKLYDLLEREIYTTDVFLERSSTLHERIEEAELSISALEKDLEYEKQKFENSSRFIPECKELLSSYWDLSIPDRNKALKLLIDRVEYKKTVKNKRGTVDTPTFELTLKPRIPRI

SEQ ID NO: 4255 - protein, 522 aa, Unknown
  Description of Unknown: Integrase B4256 sequence
  PTHR30461:SF3,SM00857,G3DSA:1.10.10.2600,IPR036162,PF13408, PS51737,G3DSA:3.40.50.1390,IPR025827,IPR006119,IPR038109, PF07508,IPR011109,SSF53041,PF00239, PTHR30461,PS51736,Coil,cd00338
MSSVDKTAVIYARYSSHGQTEQSIDGQIAAAQKYAEGKGYTIIHIYADRAMTGRNDDREQFQKMLSDTATHQFGVILLWKIDRFGRNREEIAFNRYRCKKNGVRVERVAEDVPDGPEGVILDSVLEGMAEYYSLQLAQNVRRGQRESAKKSQSNGGTRMIGYKVNPDTKRYEIDPDTAPFITEVFRRYAGGQTMAEIAAWLNAQGLRATRGGMFTVNSLHRLLKNEKYTGVYIFRDIRNEGGMPALIDRATFDKVQEMLKVNRRAPSRVWSRAEYLLTDKLFCGHCGAPMAGVSGHGHTGVKHNYYTCLNRKRKKSCTKKSVRQDVLEPLVLKSIRNLLQDDATLKYIADRVWAEYERSDTSGDTIRALDRQIADVDRALSNVMKAIEMGIINEMTKARMDELTEQKQALSAARADAGLARGFKLTRNMILYFLRKMAAMDISDRDSQKRLIKTFVNAIYLYDDHFDIAFNYTENGKVIVKMQEIDDASTGGAFGCCAQCPTKIKAPAVPRRVFLFWCSVSC

SEQ ID NO: 4256 - protein, 522 aa, Unknown
  Description of Unknown: Integrase B4257 sequence
  cd00338,SM00857,G3DSA:1.10.10.2600,IPR036162,PF13408, PS51737,IPR025827,G3DSA:3.40.50.1390,IPR006119,IPR038109, PF07508,IPR011109,SSF53041,PTHR30461,PS51736, Coil,PF00239
MKKTKNSVQRAVIYARYSCSNQTEQSIEGQLADCEKFAEKYNYYIVDTYIDRAMSATTDRRPQFQQMIADSATGGFDVIIVWKLDRFARNRYDSAVNKQKLNSNGVKVVSVMEHIEDTPEGALMESVLEGFAEYFSKDLSQKVSRGMRETALKFKATGLIPYGYKKTSDNICVPDEHTAPVVKKIFEMYAGGMINKDICDWLNSHGYRTSNGNLFKNQYLRKILNRRRYTGTYTYGDLELHDENQRIISDELFDRVQIQLQAKKRTGRIAREQYILVGKLFCGYCRNPIRGESGRNHQNRIYTYYKCSVNKTGGKCPKTTVHRDIIENNTIKFILNNFLNDEIINSVVDTIQASETAENNSAELITLRTQIEDTDRKINNLLTAIENGVFTPSTKQRLNDLENVKEKLKYELIVKQSEKNNFNATAFKKFLKNIDVDDFKTIEQRQKLINLVLYREYLWNDKVLYIFNLTPSKPNDSVDVDSYVDAVLAGSTSPTDGVPLVAVFEPIKMYLIGRLLFCMKQI

SEQ ID NO: 4257 - protein, 522 aa, Unknown
  Description of Unknown: Integrase B4258 sequence
  PTHR30461:SF3,SM00857,G3DSA:1.10.10.2600,IPR036162,PF13408, IPR025827,G3DSA:3.40.50.1390,PS51737,IPR006119,IPR038109, PF07508,SSF53041,IPR011109,PTHR30461,PS51736, cd00338,PF00239
MGNVMLIPARRQVGNNARKQDEEKPKLRVAAYCRVSTDSDEQATSYEAQVEYYTEYIQKNPDWEFAGIYADDGISGTNTKKREEFNRMIDDCKAGNIDMIITKSISRFARNTLDCLKYIRQLKDMNIPVLFEKESINTMDAKGEVLITIMASLAQQESQSLSQNVKMGLQYRYQQGKVQINHNRFFGYTKDADGNLVIDPEQAETVKRIYREYLEGLSMDKIAAGLERDGILTGAGGKKWHTSTINKILRNEKYIGDALLQKTYTTDFLNKTRVKNNGLVPQYYVEGDHEAIIPKDIYLQVQEELVRRRVGKTSANGKKRNYSCNHCFSQIVICGECGEMFRRLHWNNRGVKSIVWRCISRLESTGLECHARTINELVLQDAVVKAINQMLGDKSNYQAQLQLNIAAVIRASQATAIDSIDEKLMSLQQELIQKANSKEDYDEIADEIFRLRELRQKTTVDTAARDEQIKRINDLQDYISQQTSYLTEFDEALVRRWIKQITIWDDRITVELKSGVSIDVDA

SEQ ID NO: 4258 - protein, 522 aa, Unknown
  Description of Unknown: Integrase B4259 sequence
  PTHR30461:SF3,SM00857,G3DSA:1.10.10.2600,IPR036162,PF13408, IPR025827,G3DSA:3.40.50.1390,PS51737,IPR006119,IPR038109, PF07508,SSF53041,IPR011109,PTHR30461,cd00338, PF00239
MSTNKNTARKYAAGGGSDNSCDVEPLRAVIYARYSSSGQREESIEGQLRDCYDFAKKHGIIVIGEYIDKAMTGRVDRRPDFQRMMKDSEKGRFNCVLLWKMDRFARNRYDSAMYKYKLKKNGIRIFYAKETIPDGPEGIILESVMEGYAEYYSENLAQNVKRGNYDSALELKTLGKTCLGLKTGPDGRYMIDQAEATIVRRIFEEYAEGERAKDIYERLNSEGYRTSRGGKFNKNSLRRILSNKKYIGVYEYEDIYVENGIPAIITDRDLFERVQKMLKINHDAPARGKAQNFLLTTKLFCGLCGSPMIGDGGTSHTGKAYAYYSCTKRKRGRGCKKESVPKDWIEDLVVGELVKIVHNDELIEQIADRVMEYQKREKDQSGLHALEIRQKENEKAISNMLAAIEAGIITPSTKTRLMELEADRADIEKGIARELLAEPEFERDQIIYFLERFRSGDIKDEAYRIMLVDTFLNSVYLYDDDHLVLVMNYSGENCKVDLKLVEGAVSGDGCKGSAFAPSSALK

SEQ ID NO: 4259 - protein, 522 aa, Unknown
  Description of Unknown: Integrase B4260 sequence
  PTHR30461:SF3,SM00857,G3DSA:1.10.10.2600,IPR036162,PF13408, IPR025827,G3DSA:3.40.50.1390,PS51737,IPR006119,IPR038109, PF07508,IPR011109,SSF53041,PTHR30461,PS51736, cd00338,PF00239
MNTVIYARYSAGPRQTDQSIEGQLRVCADFCKQRGLTVIDTYCDRHISGRTDERPEFQRLIADAKRKKFEAVVVYKTDRFARNKYDSAVYKRELKRNGIQIFYAAEAIPDGPEGIILESLMEGLAEYYSAELAQKIKRGMRENALKCQSTGSGRPLGYRVDEQKRFQIDPESAQTVQTIFEQYIKGESNAAICELLNSRGLRTAQGKPFNKNSINRIIKNRKYIGEYRYHDIVVEGGMPAIISKDTFNLAQAEMERRRTRKAPKSPKAEYLLAGRLFCGHCKGPMQGVSGTGKSGNKWYYYYCGNTRGKNKTCDKKQVSRDRLERAVVDFTVRYILQEELARKVHAAQERQNDTASEIAFYEKKLADNKKSIANVLRAIESGAATQTLPARLQELENEQAVILGEISFLKGKRLAFTEDQILFALMKHLEPYPGESEQDYRRRIISDFVSEVYLYDDRLLIYFNISSEDGKLKSADLSNIEGGEFDEGLTSSTNLIAGRTPEMTIVVLPYGFVLATQIKDRL

SEQ ID NO: 4260 - protein, 522 aa, Unknown
  Description of Unknown: Integrase B4261 sequence
  PTHR30461:SF3,cd00338,SM00857,G3DSA:1.10.10.2600,IPR036162, PF13408,PS51737,G3DSA:3.40.50.1390,IPR025827,IPR006119, IPR038109,PF07508,IPR011109,SSF53041,PTHR30461, PS51736,Coil,PF00239
MSNAVIYARYSSGHQREESIEGQIRECTNFAKRNGLTIVEHYIDRAISAKTDDRPSFQQMVADSSKKTFDTIIVYTLDRFARNRYDSAVYKAKLKRNGVRVLSAKENITSDPSGIILESVLEGMAEYYSVELAQKVKRGMTENALACRWASGRIPFGYTIDADKHLHPDPALVPIVQEAFEMYAAGAKIVDIARKINSYHVVTGMGNKFGRSSFDRMIRSETYIGVFKWNDIRKENAIPPIITPELFYKCQARYNARNRKNVARPSAIYLLSGKLRCGCCGGSMCGMSGKSRNGTMHYYYSCYSTRRRTSHCDIGNIRRDEIEHIIAAHAASILKKPINLDIIANQALKTNNSVKNYRLESLIQQEKDLTQKLENCMKAIDQGLVSITLMDRIKQYEADLQSVKNDISLEKIKSNPIQVTKEHIIFFLEKFALLEGEKFKDRIISTMVRDIVIKKEKDGNYLVTVQYNYANSKELPNEESYSVPESIGSQDVELVDHMGVVTNRLRFYPYYFEETFIFTQAS

SEQ ID NO: 4261 - protein, 522 aa, Unknown
  Description of Unknown: Integrase B4262 sequence
  PTHR30461:SF3,SM00857,G3DSA:1.10.10.2600,IPR036162,PS51737, G3DSA:3.40.50.1390,IPR006119,IPR038109,PF07508,IPR011109, SSF53041,PF00239,PTHR30461,PS51736,Coil, cd00338
MPRRRKFAAKDRGRCVIYARFSSSRQREESIEDQVRVCTAYARDNGMEVEGVYADHAASARSDDRPEFQRMVREARDGAWGVVLVYKLDRFARDRFDAANYRVRLRDAGVELVSAMEQIPDAPEGAILESVLEGVNEWYSRSLSQNVTRGMMGNARKCMANGVRVFGYRVDGEGRYVVDEREAAIVRRAFSMAALGSTRGEVMLWLNSTCRNVRGGQWRYPSVATLLSNEKYLGVYSFGDVRVEGGMPAIVDQELFDAANRPRPHARVGAFPLTGRLFDAETGTPYRGDGGTSGTGRRYFYYTCPLAGGVVRYPQTEVEDAVMGALRGFVARPGEAERLADAVLGAVGGMGDAHRLDDARTRLREAQRGKGRLVDAIVGGVDPSLVQERLDALGAEVRRLEAEVARLERVTVPDRDWAVSWVRERMPESLTKQELRRTVGRCELADDGTLTVEIPWSTSCDSEAQKNSELPARGQFRVNKFGGHEDSKSELFVTSSGLKIVCGQKLERSGQKIANRNHSAQK

SEQ ID NO: 4262 - protein, 522 aa, Unknown
  Description of Unknown: Integrase B4263 sequence
  SM00857,G3DSA:1.10.10.2600,IPR036162,PF13408,IPR025827, PS51737,G3DSA:3.40.50.1390,IPR006119,IPR038109,PF07508, SSF53041,IPR011109,PTHR30461,Coil,PS51736, cd00338,PF00239
MELLNVCIYLRKSRADREAEARGEGETLARHERILLDLAKKRGYNVGAIYKEIVSGETISARPVMQQVLREVESGMWDGVLVVEVERLARGDTIDQGVVARAFRYSETLIITPLKTYDPNNEYDEEYFEFGLFMSRREYKTIRRRLTAGRESSAKEGKYCGSKPPYGYSRVKLVSEKGWTLQPVPDQAEIVKLIFNLYVHGVAGERIGMAKICRKLNDSGIKTMDGGLWTVPRVQAILRNPVYAGMIRWNSRKAVKHIQDGQITISRPFAKDYILVEGRHPAIVSKELFQQAQDIVNQNPARPLNSLHVLRNPLAGIIRCGKCGYVMTRKAPSGRQVDLLRCPYSSCNNVSSKLPLVEKALLDGIQELVDGYKLNSNFSDQEYSLSISEKEEMIRGKLKEIDVLRKKKEKQYDLLEQGIYSTEEFLERSRATAAELSACDAVILSLKQEIEHEQELQFQRSSFIPKCEDLLANYWTWDTSTKNRFLRELIEKAVYTKNAKNTWKNGDDISFTLDIYPKIQQK

SEQ ID NO: 4263 - protein, 522 aa, Unknown
  Description of Unknown: Integrase B4264 sequence
  SM00857,G3DSA:1.10.10.2600,IPR036162,PF13408,IPR025827, G3DSA:3.40.50.1390,PS51737,IPR006119,IPR038109,PF07508, IPR011109,SSF53041,PTHR30461,PS51736,cd00338, PF00239
MELLNVCIYLRKSRADREAEARGEGETLARHERILLDLAKKRGYNVGAIYKEIVSGETISARPVMQQLLREVESGMWDGVLVVEVERLARGDTIDQGVVARSFQYSNTLIITPLKTYDPNNEYDEEYFEFGLFMSRREYKTIRRRLTAGRESSAKEGKYCGSKPPYGYSRVKLVGEKGWTLQPVPDQAEIVKLIFNLYVHGVSGERIGMAKICRKLNDSGIKTMDSGLWTISRVQAILRNPVYEGMIRWNSRKAVKHIKDGQITISRPFAQDYILVKGRHPAIVSRELFQQAQDIVNKNPARPLNSLHVLRNPLAGIVRCGKCDHVMTRKSPNGRQGDLIRCPYSSCSNISSKLPLVEKALLDGIQELVDGYRLNNSVSDQEYSLSISEREKMIQGKLKEIDILKKRKQRQYDLLEQGIYSTEEFLERSRATAAELSACDAVILSLKQEIEHEQELQFQRSSFIPKCEDLLANYWTWDTSTKNRFLRELIEKAVYTKNAKNTWKNGDDISFTLDIYPKIQQK

SEQ ID NO: 4264 - protein, 522 aa, Unknown
  Description of Unknown: Integrase B4265 sequence
  SM00857,G3DSA:1.10.10.2600,IPR036162,PF13408,PS51737, G3DSA:3.40.50.1390,IPR025827,IPR006119,IPR038109,PF07508, IPR011109,SSF53041,PTHR30461,Coil,PS51736, cd00338,PF00239
MVKNRAAIYARFSSHNQRSESIEIQVENSRAYCEREGLQVVREYCDYAQTGRNIDRAEFQRMMSDARHGLFDYVVIYKVTRIMRNRDEMSLARIMLRKAGVEILYAGEDISSGSSGVLQLGMLEVLAEYESALDSERIRDGIQKNAERCMANGRTLYGWDIVEGRYVINEREASVLRRMKNMLFAGSSVADIVRAVSAERSKRGAKFNQDTVTKLLKRVQNAGVYKYAGHEVPDGMPAIWSQAEQDMIDNILGDRHKPRRKINSTLEFPLSGKLYCAKCGAPMAGTSGTSCTGATYHYYKCRKCRRTVRRDLVEDVVCDMTLQAVAREDVRQRIASGMVTFQAEQPKEQSRSYAIKKELKRIDRTFERIWQAIEDGIAPPGGRERTEELKQRKSELEAELRIAEREEAFNIGVDELMLWLDDAAENLTPEVILGTFVRFVEIDGKTLNVYFAFDHYGDDFRPKQKKAEPCPEGHSSTNYPMVELMRKTANSTSTANRAAIQLDTCIVRVSKNWFVVVGTCQK

SEQ ID NO: 4265 - protein, 522 aa, Unknown
  Description of Unknown: Integrase B4266 sequence
  PTHR30461:SF3,cd00338,SM00857,G3DSA:1.10.10.2600,IPR036162, PF13408,PS51737,IPR025827,G3DSA:3.40.50.1390,IPR006119, IPR038109,PF07508,IPR011109,SSF53041,PTHR30461, mobidb-lite,Coil,PF00239
MPKKPTKHPAKPKRGKKLETEEPGVLYGRYSSHNQKDISVEQQFEKGYELAAEYGIKIIDTYADRAVSGRTDKRKDFQRMMSDAAKGKFRYVIAWKSNRMGRNMLEALINEARLQELGVRVLYVEEDFDDTAAGRFAARSMMNVNQFYSENMAEDIRRGLYDNASNCMVANGHLPYGYKRDDTLHYVIDEPKAAVIREIFTRVAAGEPFVDIMSSLNARGIKTSYNRPWGRSSFQKILSNERYRGIYIYGDVRKEDGIPRIISDELFFKVQEVITTKKNPQGRHRVNGDYLLTGKLFCGKCKSPMVGISGTGRSGKLHYYYVCQKHRTEKTCDKKNVRRDEIELQVAQAIKDYALKDDVIEWIADSTVAYNERKEAESKVGILEDQLAGTERGIKNIMSAIEQGIITETTKSRLVELESERATIKAKIAAARADIVTVSRDDIISGLEMFRDGDVHDKKYQARLFDTFLVAVYVYDDDLRLVFSFSGSKNTVQIPIESAVNAVENNEAKCSFKLCSAPPRTS

SEQ ID NO: 4266 - protein, 522 aa, Unknown
  Description of Unknown: Integrase B4267 sequence
  SM00857,G3DSA:1.10.10.2600,IPR036162,PS51737,G3DSA:3.40.50.1390, IPR006119,IPR038109,PF07508,SSF53041,IPR011109, PTHR30461,Coil,PS51736,cd00338,PF00239
MREQYLIYLRKSRNDAQLEAMGVDVLERHEKTLLALAKSMNLQIGAIYREVVSGDSIAARPEMQRTLKEVEAGLWKGVLVMEVERLARGDTVDQGIVQRTFQYSETLIVTPAKIYDPNNEFDEEYFEFGLFMSRREYKTIRRRMRAGVTAAVREGKWPFNKAPYGWKRVKLEDARGWVLAPDPDEAPVVKLIFDMFTGPDRVGITSICKYLESHGIPPRNGDRWLECTILGILGNIANDQKVGIGHRKQITTVKDGVLTKSRESRLSNNYDLIATGLQPRLIDHDVFVEAQGYLGKGTPKPPESYGTKNPLASLIVCSCCGKKMQRRPKTTTPGCHGAPYDVLMCHTRGCPTIGAPLELVEKEVINALSDWVTGYQLDPSQEVKNNVAEKQTLLSAAVANRDALLKQNEKLYDLLEREIYTTDVFLERSSTLHERIEEAELSISALEKDLEYEKKKFENSSRFIPECKELLSSYWDLSVPDRNKALKLLIDRVEYKKTVKNKRGTVDTPTFELTLKPRIPRI

SEQ ID NO: 4267 - protein, 522 aa, Unknown
  Description of Unknown: Integrase B4268 sequence
  PTHR30461:SF3,cd00338,SM00857,G3DSA:1.10.10.2600,IPR036162, PS51737,G3DSA:3.40.50.1390,IPR006119,IPR038109,PF07508, IPR011109,SSF53041,PTHR30461,PS51736, Coil,PF00239
MGGRAAIYARFSSHNQRGESIEIQVEKSRAYCAENDLRVVATYCDFAQTGTNTDRAEFQRMMADAKRGLFDFVVIYKVTRIMRNRDEMAMARIMLRRCRVEILYAGEDISDGSAGVLQLGMLEVLAEYESALDGERIRDGIQKNAERCMANGCVRYGWDIVDGRYVVNEEEAAAIRLGVRMVLSGKSVADVVRAWEPYRTKRGGKWRFQTVRRILMRRENGGEYRYAGVVVPGGMPAIVPMDDEERVIRMLEDSHRPRAKTEAWDFPLTGKLYDGRDGGLMTGTSGTGKSGRPYHYYRCRSCGRTVRRDVVEKRVADAVREALGSADSRERIARMLADAEEERADEKPLSETIKGELAKIETAFSNIWAAIESGIAPPGGKERIDALKQRQALLKDELRTAEALEAARLDYDRALFWLEGMAAAEVDDAQLLRTFVARVVLGGPDDDDGLRVAFTFDDSAGLGDNPSLPGAIGPGGEVFDRMNASSTISNRQVDTHIYLLFYFLSVPRRIELYAGRGRKENA

SEQ ID NO: 4268 - protein, 522 aa, Unknown
  Description of Unknown: Integrase B4269 sequence
  SM00857,IPR036162,PS51737,G3DSA:3.40.50.1390,IPR006119, PF07508,SSF53041,IPR011109,PTHR30461,Coil, PS51736,cd00338,PF00239
MREQYLIYLRKSRNDAQLEAMGVDVLERHEKTLLALAKSMNLQIGAIYREVVSGDSIAARPEMQRTLKEVEAGLWKGVLVMEVERLARGDTVDQGIVQRTFQYSETLIVTPAKIYDPNNEFDEEYFEFGLFMSRREYKTIRRRMRAGVTAAVREGKWPFNRSPYGWKRVKLEDARGWVLAPDPDEAPVVKLIFDMFTGPDRVGITSICKYLESHGIPPRNGDRWLECTILGILGNIVNDQKVGIGHRKQITTVKDGVLTKSRESRLSNNYDLIATGLQPRLIDHDVFVEAQGYLGKGTPKPPESYGIKNPLASLVVCSCCGQKMQRRPKTTTPGCHGAPYDVLMCHTRGCPTIGAPLELVEKEVINVLSDWVAGYQLNPSQEVKNNVTEKQALLSAAIANRDALLKQNEKLYDLLEREIYTTDVFLERSSTLHERIEEAELSISALEKDLEYEKQKFENSSRFIPECKELLSSYWDLSVPDRNKALKLLIDRIEYKKTVKNKRGTVDTPTFELTLKPRIPRI

SEQ ID NO: 4269 - protein, 522 aa, Unknown
  Description of Unknown: Integrase B4270 sequence
  PTHR30461:SF3,cd00338,SM00857,G3DSA:1.10.10.2600, IPR036162,PF13408,PS51737,G3DSA:3.40.50.1390, IPR025827,IPR006119,IPR038109,PF07508, IPR011109,SSF53041,PTHR30461,PS51736,Coil,PF00239
MSSVDKTAVIYARYSSHGQTEQSIDGQIAAAQKYAEGKGYTIIHIYADRAMTGRNDDREQFQKMLSDTATHQFGVILLWKIDRFGRNREEIAFNRYRCKKNGVRVERVAEDVPDGPEGVILDSVLEGMAEYYSLQLAQNVRRGQRESAKKSKSNGGTRMIGYKVNPDTKRYEIDPDTAPFITEVFRRYAGGQTMAEIAAWLNAQGLRATRGGMFTVNSLHRLLKNEKYTGVYIFRDIRNEGGMPALIDRATFDKVQEMLKVNRRAPSRVWSRAEYLLTDKLFCGHCGAPMDGVSGHGHTGVKHNYYTCLNRKRKKSCTKKSVRQDVLEPLVLKSIRNLLQDDATLKYIADRVWAEYERSDTSGDTIRALDRQIADVDRALSNVMKAIEMGIINEMTKARMDELTEQKQALSAARADAGLARGFKLTRNMILYFLRKMAAMDISDRDSQKRLIKTFVNAIYLYDDHFDIAFNYTENGKVIVKMQEIDDASTGGAFGCCAQCPTKIKAPAVPRRVFLFWCSVSC

SEQ ID NO: 4270 - protein, 522 aa, Unknown
  Description of Unknown: Integrase B4271 sequence
  SM00857,G3DSA:1.10.10.2600,IPR036162,PF13408,IPR025827, PS51737,G3DSA:3.40.50.1390,IPR006119,IPR038109,PF07508, IPR011109,SSF53041,PTHR30461,Coil,PS51736, cd00338,PF00239
MVKNRAAIYARFSSHNQRSESIEIQVENSRAYCEREGLQVVHEYCDYAQTGRNIDRAEFQRMMSDARHGLFDYVVIYKVTRIMRNRDEMSLARIMLRKAGVEILYAGEDISSGSSGVLQLGMLEVLAEYESALDSERIRDGIQKNAQRCMANGRTLYGWDIVEGRYVINEREASVLRKMKNMLFAGSSVADIVRAVSAERSKRGAKFNQDTVTKLLKRVQNAGVYKYAGHEVEDGMPAIWTQAEQDMISNILGDRHRPRRRVNSTLEFPLSGKLYCSKCGAPMAGTSGTSCTGATYHYYKCRKCRRTVRRDLIEDVVCDMTLQAVAREDVRRRIASGMVEFQKEQPKEQSRSYAIKKELKRIDRTFERIWQAIEDGIAPPGGRERTEELKQRKSELEAELRIAEREEAFNIGADELMLWLDDAAENLTPEVILNSFVRFAEIDGKTLNVYFAFDHYGNDFSPKKKKAEPCPEGHSSTNSCMVELMRKTANSTSTANRAAIQLDTCIVRVSKNWFVVVGTCQK

SEQ ID NO: 4271 - protein, 522 aa, Unknown
  Description of Unknown: Integrase B4272 sequence
  SM00857,G3DSA:1.10.10.2600,IPR036162,PF13408,PS51737, G3DSA:3.40.50.1390,IPR025827,IPR006119,IPR038109,PF07508, IPR011109,SSF53041,PTHR30461,Coil,PS51736, cd00338,PF00239
MNTLERDCIYLRKSRADREAEARGEEETLARHERILLDLAKRRSCHIGAIYREVVSGETISARPVMQRLLQEVESGMWDGVLVVEVERLARGDSIDQGVVARAFQYSDTKIITPTKTYDPNNEFDEEYFEFGLFMSRREYKTIKRRLNAGRVSSVQEGKYCGNKPPYGYRRVKLEHTKGYSLEPIPEQAEIVKLIYNWYTYGIDGERIGMCKITRKLIDMGVPSLSGKSWSTATVANILENPVYTGKIRWNRRKGMNKIENGNVVKSRPRCNDYILTDGLHEAIISQEIYDLAQNYRSMNPPRPIGASNTVKNPLSGIIKCGKCGHNMVRRPYNSRKQEDTLLCSYTGCNNVSSRLSLVEKALIAGLADLVQSYKINDSLNDTNGVDIIATKEKVLLDKRAELENLNTQKNRQYELLEQGIYTTEVFLERSGATAKQIDDCAAAIERIAADLAHDRELLEQKFNFIPKCEHLLSNYWDWDAPTRNSVLKELLERVDYFKDNKNDFKRGDEITFTLDIYPKIQ

SEQ ID NO: 4272 - protein, 522 aa, Unknown
  Description of Unknown: Integrase B4273 sequence
  PTHR30461:SF3,SM00857,G3DSA:1.10.10.2600,IPR036162,PF13408, IPR025827,G3DSA:3.40.50.1390,PS51737,IPR006119,IPR038109, PF07508,SSF53041,IPR011109,PF00239,PTHR30461, PS51736,Coil,cd00338
MLTSANVIIYLRKSRSDDPSMSVDEVLAKHESILQEYAINNYGSPIPEEQIYREVCSGETIADRPVMLQVMRLIEARIYGGVLVVEPQRLSRGDLEDCGKIINAFRYTETLVVTPPKTYDLLDDYDRKFFEMELMRGNDYLEYTKKILFRGRMASSKQGNFIGSIAPYGYRKVVVGSGKDAYHTLEIEPTESEAVKIMYHLYLDESYGFKKIANRLDELGFKPRKVDHWSAATIQNILENPVYCGKIQFNRRSTKKKIVDGELVKTRPLVTDPEKVVYVDGKHPALIDEARFQETMERRGKNPRVRKSKELTNPFAGLLFCGTCGHAMSHKKFYQHYKKSVCENMLCNDQARCHTKSVSYDAFVNRVTTSLEETIANFEMKLKNGTPSDAMMHQNQIRNLENELQHLKQRDTRQKDAYEDGIYTKEEYAQRNAKLQEQIASTTASLKAAKESSGNIIDYQEKLCRFRDALNALNDPDLPASKKNTLLKACIIKIVYYNDMPSLPGIGRYVENVFKLDIFYKL

SEQ ID NO: 4273 - protein, 522 aa, Unknown
  Description of Unknown: Integrase B4274 sequence
  SM00857,G3DSA:1.10.10.2600,IPR036162,PF13408,IPR025827, PS51737,G3DSA:3.40.50.1390,IPR006119,IPR038109,PF07508, IPR011109,SSF53041,PTHR30461,PS51736,cd00338, PF00239
MGNVMVIPARRQVGNTVKQSAQKKLRVAAYCRVSTDSEEQETSYEAQVTHYTEYIQKNPEWELAGIFADDGISGTNTKKRDEFNRMIDECMAGNIDMVITKSISRFARNTLDCLQYIRQLKDKNIPVYFEKEAINTLDAKGEVLITIMASLAQQESQSMSQNIKLGLQYRYQQGKVQVNHNRFLGYTKDDDGHLIIDPEQAEIVKRIYREYLEGSSMDKIADGLMADGILTGAGKTKWHTSTINKILRNEKYMGDALLQKTYTTDFLTKKRIKNNGTVPQYYVEGDHEAIIPKEFFMQVQAELVRRRVVHVSPTGKKRSFSCNHCFAQMVFCGDCGELYRRVHWNNHGCKSIVWRCISRLEPTAAEMNCTNRTVNELLLQEVTIKAFNQILTERDVFLKTLQQNIAKAVVNADTLSPDGIQSRLLELQKELIKKANNKQDYDAIADEIFRLRDQKEQSEVDSHHREEAMNRIKELQDFISGQETDITGFDETLVKKLIEKITVFADHFTVEFKSGITINIEA

SEQ ID NO: 4274 - protein, 522 aa, Unknown
  Description of Unknown: Integrase B4275 sequence
  PTHR30461:SF3,SM00857,G3DSA:1.10.10.2600,IPR036162,PF13408, IPR025827,G3DSA:3.40.50.1390,PS51737,IPR006119,IPR038109, PF07508,SSF53041,IPR011109,PTHR30461,cd00338, PF00239
MSTNKNTARKYAAGGGSDNSCDVEPLRAVIYARYSSSGQREESIEGQLRDCYDFAKKHGIIVIGEYIDKAMTGRVDRRPDFQRMMKDSEKGRFNCVLLWKMDRFARNRYDSAMYKYKLKKNGIRIFYAKETIPDGPEGIILESVMEGYAEYYSENLAQNVKRGNYDSALELKTLGKTCLGLKTGPDGRYMIDQAEAAIVRRIFEEYAEGERAKDIYERLNSEGYRTSRGGKFNKNSLRRILSNKKYIGVYEYEDIYVENGIPAIITDRDLFERVQKMLKINHDAPARGKAQNFLLTTKLFCGLCGSPMIGDGGTSHTGKAYAYYSCTKRKRGRSCKKESVPKDWIEDLVVGELVKIVHNDELIEQIADRVMEYQKREKDQSGLHALEIRQKENEKAISNMLAAIEAGIITPSTKTRLMELEADRADIEKGIAHELLAEPEFERDQIIYFLERFRSGDINDEAYRIMLVDTFLNSVYLYDDDHLVLVMNYSGENCKVDLKLVEGAVSGDGCKGSAFAPSSALK

SEQ ID NO: 4275 - protein, 522 aa, Unknown
  Description of Unknown: Integrase B4276 sequence
  SM00857,G3DSA:1.10.10.2600,IPR036162,PF13408,IPR025827, G3DSA:3.40.50.1390,PS51737,IPR006119,IPR038109,PF07508, IPR011109,SSF53041,PTHR30461,Coil,PS51736, cd00338,PF00239
MNTLERDCIYLRKSRADREAEARGEEETLARHERILLDLAKRRGCHIGAIYREVVSGETISARPVMQRLLQEVESGMWDGVLVVEVERLARGDSIDQGVVARAFQYSDTKIITPTKTYDPNNEFDEEYFEFGLFMSRREYKTIKRRLNAGRVSSVQEGKYCGNKPPYGYRRVKLEHTKGYSLEPIPEQAEIVKLIYNWYTYGIDGERIGMCKITRKLIDMGVPSLSGKSWSTATVANILENPVYTGKIRWNRRKGMNKIENGNVVKSRPRCDDYILTDGLHEAIISQEIYDLAQYYRSMNPPRPIGASNTVKNPLSGIIKCGKCGHNMVRRPYNSRKQEDTLLCSYTGCNNVSSRLSLVEKALIAGLADLVQSYKINDTLNDTNGVDIIAAKEKILLDKRAELENLNTQKNRQYELLEQGIYTTEVFLERSGATAKQIDDCAAAIERIAADLAHDRELLEQKFNFIPKCEHLLSNYWDWDAPTRNSVLKELLERVDYFKDNKNDFKRGDEITFTLDIYPKIQ

SEQ ID NO: 4276 - protein, 522 aa, Unknown
  Description of Unknown: Integrase B4277 sequence
  SM00857,G3DSA:1.10.10.2600,IPR036162,PF13408,PS51737, G3DSA:3.40.50.1390,IPR025827,IPR006119,IPR038109,PF07508, IPR011109,SSF53041,PTHR30461,PS51736,cd00338, PF00239
MELLNVCIYLRKSRADREAEARGEGETLARHERILLDLAKKRGYNVGAIYKEIVSGETISARPVMQQLLREVESGMWDGVLVVEVERLARGDTIDQGVVARSFQYSNTLIITPLKTYDPNNEYDEEYFEFGLFMSRREYKTIRRRLTAGRESSAKEGKYCGSKPPYGYSRVKLVGEKGWTLQPVPDQAEIVKLIFNLYVHGVSGERIGMAKICRKLNDSGIKTMDGGLWTISRVQAILRNPVYEGMIRWNSRKAVKHIKDGQITISRPFAQNYILVKGRHPAIVSRELFQQAQDIVNKNPARPLNSLHVLRNPLAGIVRCGKCDHVMTRKSPNGRQGDLIRCPYSSCSNISSKLPLVEKALLDGIQELVDGYRLNNSVSDQEYSLSISEREKMIQGKLKEIDILKKRKQRQYDLLEQGIYSTEEFLERSRATAAELSACDAVILSLKQEIEHEQELQFQRSSFIPKCEDLLANYWTWDTSTKNRFLRELIEKAVYTKNAKNTWKNGDDISFTLDIYPKIQQK

SEQ ID NO: 4277 - protein, 522 aa, Unknown
  Description of Unknown: Integrase B4278 sequence
  PTHR30461:SF3,cd00338,SM00857,G3DSA:1.10.10.2600,IPR036162, PF13408,PS51737,G3DSA:3.40.50.1390,IPR025827,IPR006119, IPR038109,PF07508,IPR011109,SSF53041,PTHR30461, PS51736,Coil,PF00239
MPKTEEKQTIKAVIYARYSSDRQREESIEGQLRICEDYARRNNMTILHTYADRAMTGRSDQRPEFQMMIRDAATMTFDIVLVYKLNRFARNRYDSAKYKHKLKKYGIKVVSAMENIADDPSGILLESVIEGMAEYYSAELAENVTRGMTENALEGKWPGGYVPLGYKLDDQHHLVIDEPKAEIVRMIFQMVLEGHNQKYIIDELSRHHYTTSSGRPFSYNTLRTILKNEKYIGRFDWGNVHKENALPSILDKKTFEAVQKQLHFRKKNHIKSCNESFLLTGKLFCGCCHSKMVGVSGTSKTGAIYYYYACAAHLKKKCKTRNVRKDALEDLVCEVTTRILSNPEAVEAIAQQAIEMQKSKKDSLELQAIKNQIADINQKLQNCVRAVESGLISETITNHINDYEKQLTRLKDDAARVKLLDGDVELTQQHIEFFFWSIAQKIKTADKYKSILLSSIVRNVIVDKDYIEIQYNYKNELPILQNPVRIESSYLNQMVNLPIPHANLTVMVSQDFFTVRIRRQAA

SEQ ID NO: 4278 - protein, 522 aa, Unknown
  Description of Unknown: Integrase B4279 sequence
  PTHR30461:SF3,cd00338,SM00857,G3DSA:1.10.10.2600,IPR036162, PF13408,IPR025827,G3DSA:3.40.50.1390,PS51737,IPR006119, IPR038109,PF07508,IPR011109,SSF53041,PTHR30461, PS51736,Coil,PF00239
MRAFIYCRFSSHKQQELSIEGQRDICQEYADKHNITVVGQYADRARSGKTENRADFRRLMRDAATGVVDCVLVWRYDRFFRNRAESALYRKQLEAAGVHLISVTEYIPEGSAGIITQGMIETVAEYFSAKLSEDVSRGMNKAAQHCQIVGRAPLGYRAGPNKRWQIDPVGAELVRRIFEWYASGKAMGQLAAQLNEEGHRTTNGTLYTRSSFNSILRNEKYIGVYSYGGEVRIEGGCPRIIEDELFFTVQRRLSANKHRPGAYKAEVPYLLSGKLFCGLCGAPMTGTAGTSHTGARHYYYICNNRRAKTCKKKNVRLDLIEEAVLQSALDILTDENIAYISTEVERRCAENSDSAALLASLNAQLEEVQRRLKNIGNAIAQGIITETTKELLEEAEADRTALRQQIDRAKVQAALVVKAEAVACWLDGFRRGDRTDPDFRRQVFGALVHSVFVYDDYLKIIFNVDSAGAAVVPYEAAQAATPSEAPPGSYLDTLGAPYQANPNVLLFEGAFGFVFYFPIMKV

SEQ ID NO: 4279 - protein, 522 aa, Unknown
  Description of Unknown: Integrase B4280 sequence
  PTHR30461:SF3,cd00338,SM00857,G3DSA:1.10.10.2600,IPR036162, PF13408,IPR025827,G3DSA:3.40.50.1390,PS51737,IPR006119, IPR038109,PF07508,IPR011109,SSF53041,PTHR30461, PS51736,Coil,PF00239
MARKKNIAAGLDAVIYARYSSHNQREVSIEQQIAECTKHAAALGLRIVGTYEDRAISGKTDNRPRFQQMMRDAEKGKFQAVVAWKSNRIGRNMLQAMVNEAKLDDYGVKVFYAEEDFDDTAAGRFALRNMMNVNQFYSENMAEDITRGLYDNANKCMANGRQPLGYKRGADGKVMLDEPAAAVVREIFTRVAAGDLFVDIARDLNAKGIKTSKGAAWNKGSFQSICQNERYKGIYIYGNVRIVDGIPRIVSDELWYKVQEAMRVKKNPVGTRHRVGAEDYLLTGKLRCGHCGSYMTGVSGTSRNGELHYYYTCQKRRTEHACNKKNVRRDVIEPAIAQAIKMYCLTDDVIEWMADQTVQYWEKHDNDLQIEALEQQLAENKKATSNMLKAIEMGIITEATRSRMVELETENSKLTAQLSAAKRDVVKINREDLIDELHILRSKDIHDREVQAELFKDFLVAAYIYDDNRLKLVFSFMGKDNSVEIPLETGEDPPDGEDSPDAKMFVLTPDCSTRTKALHGNV

SEQ ID NO: 4280 - protein, 522 aa, Unknown
  Description of Unknown: Integrase B4281 sequence
  SM00857,G3DSA:1.10.10.2600,IPR036162,PF13408,PS51737, G3DSA:3.40.50.1390,IPR025827,IPR006119,IPR038109,PF07508, IPR011109,SSF53041,PF00239,PTHR30461,PS51736, Coil,cd00338
MAVSKSVTVIPARKHVRKSGDEEKPKLRVTAYCRVSTDSDEQATSYETQIEHYTAYIQGHPDWVLAGIFADDGISGTNTKNREEFNRMIDECMAGNIDMIITKSISRFARNTLDCLKYIRQLKEKNIPVYFEKENINTMDSKGEVLLTIMASLAQQESQSLNQNVKLGLQYRYQQGEIQVNCARFLGYTKDENKRLVVVPEEAEIIKRIYREYLEGASMLKIARGLEADGILNGAGKERWHTSNINQILRNEKYIGDALLQKTYTVDFLTKKRVKNNGIVPQNYVENSHEAIIPREVFMQVQEELVRRRIVHTSPNGKTRTFSSNHCFAQIVICGNCGEVFRRVHWNNRGKKSIVWRCVSRLENTGLFCNARTVLESTIEQVLVTAINQTLCDKDTFLPTLRDNIATVINRESDNAYANIDKRLEELQTELLKLATSNADYDKVGDEIHRLREQKQKLQIESANRDELKKRIADMSTFLKKQSTALAEFDEQLVRRLIEKVTIYEDKFTVEFKSGLTVDVEE

SEQ ID NO: 4281 - protein, 522 aa, Unknown
  Description of Unknown: Integrase B4282 sequence
  PTHR30461:SF3,SM00857,G3DSA:1.10.10.2600,IPR036162,PS51737, G3DSA:3.40.50.1390,IPR006119,IPR038109,PF07508,SSF53041, IPR011109,PTHR30461,Coil,PS51736,cd00338, PF00239
MGGRAAIYARFSSHNQRGESIEIQVEKSRAYCAENDLRVVATYCDFAQTGTNTDRAEFQRMMADAKRGLFDFVVIYKVTRIMRNRDEMAMARIMLRRCRVEILYAGEDISDGSAGVLQLGMLEVLAEYESALDGERIRDGIQKNAERCMANGCVRYGWDIVDGRYVVNEEEAAAIRLGVRMVLSGKSVADVVRAWEPYRTKRGGKWRFQTVRRILMRRENGGEYRYAGVVVPGGMPAIVPMDDEERVIRMLEDSHRPRAKTEAWDFPLTGKLYDGRDGGLMTGTSGTGKSGRPYHYYRCRSCGRTVRRDVVEKRVADAVREALGSADSRERIARMLADAEEERADEKPLSETIKGELAKIETAFSNIWAAIESGIAPPGGKERIDALKQRQALLKDELRTAEALEAARLDYDRALFWLEGMAAAEVDDAQLLRTFVARVVLGGPDDDDGLRVAFTFDDSAGLGDNPSLPGAIGPGGEVFDRMNASSTNSYKQVEKCLYLLFYYLQIPRRIELYAGRGRKENA

SEQ ID NO: 4282 - protein, 522 aa, Unknown
  Description of Unknown: Integrase B4283 sequence
  SM00857,G3DSA:1.10.10.2600,IPR036162,PS51737,G3DSA:3.40.50.1390, IPR006119,IPR038109,PF07508,SSF53041,IPR011109, PTHR30461,Coil,PS51736,cd00338,PF00239
MNEQYLIYLRKSRNDAQLEAMGVDVLERHEKTLLALAKSMNLQIGAIYREVVSGDSIAARPEMQRTLKEVEAGLWKGVLVMEVERLARGDTVDQGIVQRTFQYSETLIVTPAKIYDPNNEFDEEYFEFGLFMSRREYKTIRRRMRAGVTAAVREGKWPFNKAPYGWKRVKLEDARGWVLAPDPDEAPVVKLIFDMFTGPDRVGITSICKYLESHGIPPRNGDRWLECTILGILGNIVNDQKVGIGHRKQITTVKDGVLTKSRESRLSNNYDLIATGLQPRLIDHDVFVEAQGYLGKGTPKPPESYGIKNPLASLVVCSCCGQKMQRRPKTTTPGCHGAPYDVLMCHTRGCPTIGAPLELVEKEVINVLSDWVAGYQLNPSQEVKNNVTEKQALLSAAIANRDALLKQNEKLYDLLECEIYTTDVFLERSSTLHERIEEAELSISALEKDLEYEKQKFENSSRFIPECKELLSSYWDLSVPDRNKALKLLIDRIEYKKTVKNKRGTVDIPTFELTLKPRIPRI

SEQ ID NO: 4283 - protein, 522 aa, Unknown
  Description of Unknown: Integrase B4284 sequence
  SM00857,G3DSA:1.10.10.2600,IPR036162,PF13408, IPR025827,G3DSA:3.40.50.1390,IPR006119,IPR038109, SSF53041,PTHR30461,Coil,PS51736, cd00338,PF00239
MVKNRAAIYARFSSHNQRSESIEIQVENSRAYCEREGLQVVREYCDYAQTGRNIDRAEFQRMMSDARHGLFDYVVIYKVTRIMRNRDEMSLARIMLRKAGVEILYAGEDISSGSSGVLQLGMLEVLAEYESALDSERIRDGIQKNAQRCMANGRTLYGWDIVEGRYVINEREASVLSRMKNMLFAGSSVADIVRAVSTERSKRGAKFNQDTVTKLLKRVQNAGVYKYAGHEVPDGMPAIWSQVEQDMIDNILGDRHKPRRKINSTLEFPLSGKLYCAKCGAPMAGTSGTSCTGATYHYYKCRKCRRTVRRDLVEDVVCDMTLQAVAREDVRQRIASGMVAFQAEQPKEQSRSYAIKKELKRIDRTFERIWQAIEDGIAPPGGKERTEELKQRKSELEAELRIAEREEAFNIGVDELMLWLDDAAENLTPEVILGTFVRFVEIDGKTLNVYFAFDRYGDDFRPKQKKAEPCPEGHSSTNSLVVELMRKTTNSTNTATRAAIQLDTCIVRVSKNWFVVVGTCQK

SEQ ID NO: 4284 - protein, 522 aa, Unknown
  Description of Unknown: Integrase B4285 sequence
  PTHR30461:SF3,SM00857,G3DSA:1.10.10.2600,IPR036162,PF13408, IPR025827,G3DSA:3.40.50.1390,PS51737,IPR006119,IPR038109, PF07508,IPR011109,SSF53041,PF00239,PTHR30461, PS51736,Coil,cd00338
MKAVIYARFSSHNQREESIEGQVRACQRFAKEHDMTVIEIYADRGLSGLHADNRPEFQRMIADSDRHKFQALIMWNLDRFSRDKYDTAVYKSRLKKNGVTLYYSDQNIPDTPEGIILESLLEGFAQYYSANLSRNAKRGLQENARKCLWNGGGLPLGYTIDETKHFVIDPAGAACVRLIFQMYADNHSIKEIVSTLNEKGYRTVKGNKFRLGSIQGVLRNRKYIGEYHASGITVPNGVPAIVDVELFNTVQEKIGVVSAAKARNKAEIPYLLTTKVFCGHCGSPMIGESGTGKGGSTYRYYKCSCRKNRKGQCDKRTEQKEWLEETVVAQTVEKFLHPDVIEDVSNACAAVLEQDCQNNALLKALNAQLADVEKSSRNIIKAIEAGVFTASMRERLAELEQQKEDITVQIDREQLRKPHLSAEQIAFFLRSFLDGDAHDPNFQERIIESLVRRVDVYDEGPGNRKLTVFYNLKKNNHSSVSVKCSDSESVGLPKRSVAKAADFFLLFAEGHFSNSNFFKMRN

SEQ ID NO: 4285 - protein, 522 aa, Unknown
  Description of Unknown: Integrase B4286 sequence
  PTHR30461:SF3,IPR036162,PS51737,IPR011109,PTHR30461, PF00239,G3DSA:1.10.10.2600,IPR006119,SSF53041,cd00338, SM00857,IPR025827,IPR038109,PS51736,cd18688, PF13408,G3DSA:3.40.50.1390,PF07508,Coil
MNGEIKNVVLYLRYSSAAQNEQSIEGQRHVCQEYCRRAGYQIIDEYVDRATSASHNVEKRFNFQRMLRDAERGRFDAVVVYKLDRFARNRYDSVNAKYRLKKAGVVLLSATENLSDSPESIILESVLEGMAEFYSAELSQKITRGMKETAQKHLSTGGAVPLGYRIKNRRLVIDPTTAPIVKQAFEMYAAGHTATAIAKQFNASGYRTSKGTAFNRSSFKSMFHNERYIGTYKYGAYKAENAVPAIIDKQLWDAVQSRLSLPVPPSQGKAQVPFLLAGKLFCGHCGAKMNGDSGKGRSGEPYYYYTCYNHKRGHTCNKKSVRKEWIEKVVVQDAMQLLTDDYIEELADIAVQENQRQIAATTKIPLLKEKIAETEKSINNIVTAIEKGVASDTLMHRITGLEQQKKDYENQLAAEETSAIQLDKYMVIYWLDQFKHGDVDDERFRRNLINLLVNSVTIWDDPDGGFRITTAYNLTDAPTKTFRVEALPGSDMGSSSPPLATNPNQILIIGLVLVQTRKHLMV

SEQ ID NO: 4286 - protein, 522 aa, Unknown
  Description of Unknown: Integrase B4287 sequence
  PTHR30461:SF3,IPR036162,PS51737,IPR011109,PTHR30461, PF00239,G3DSA:1.10.10.2600,IPR006119,SSF53041,cd00338, SM00857,IPR025827,IPR038109,mobidb-lite,PS51736, PF13408,G3DSA:3.40.50.1390,PF07508,Coil
MVMKDDRAYVRVSTLKDSQKDSPEHQEAFIRERASRENITISKVYEDRDTATSIVAREDVQKMIADAKRGEIRSIWFASLSRFSRDALDAISLKRILVNALKIRVVSIEDGYDSAVKDDELLFGIKSVVNQNTSGDISQSSRRGIRQSAAKGNYIGSIPPYGYRKVVVDGRKTLEVIPEQAEIVKKIFELYLNGNGEKNIVNYLNGDNEKNTPIPSYRGGVWGLTSVQRILQNENYTGYTVYGRHTTEVAYNDLSDLMDRGKKLVMKPKSEWQKTPFQTHEAIISKEVFDRAQEIRLLRGGGTRGGRRSFVNVFSKFIFCAECGTAMVSMGSKTKNKNGKDYRYLMCSRRRRTGEIGCSNGKWLPYYEFRDELIKDILERVRESIRVLEEEGASEINSQLPESNTEKDKRKLEKRIEENRKLLFEVRRQHMLGEIDDAQYEFEKGQYEKDISDSEHRLAIIEANERRSLDREKVIRETKQYLKELTEMKTYDDVEKTRMLLMQMVKRIEVNKDGEVDVQTYV

SEQ ID NO: 4287 - protein, 522 aa, Unknown
  Description of Unknown: Integrase B4288 sequence
  PTHR30461:SF3,SM00857,G3DSA:1.10.10.2600,IPR036162,PF13408, PS51737,IPR025827,G3DSA:3.40.50.1390,IPR006119,IPR038109, PF07508,IPR011109,SSF53041,PF00239,PTHR30461, Coil,cd00338
MKRVYCLYRVSTKGQVDKDDIPMQKTSCREFAERNGWTILKEFQEKGVSGFKVSASNRDAIQDLKAAAEKKEFDVLLVFMFDRIGRIDDETPFVVEWFIKHGIEIWSVNEGEQRMDNHVDKLMNYIRFWQANGESQKTSARVKTRLNQMTLDGKFTGGVAPFGYKLIKSGEINKKGKELMDIVIDDDEAPIVKKIFEMTVKEGYGSYRMADYLNSHGIRTHNNSKFQCNTVNRILKNRLYCGYLVSGGVESPYIERLHIIDENIFDQAQFILKQRSSKNEEKQQIARTTKGSTLLSGNIYCAHCGQKMVSTSYIDRYDRADGSQYRVSRQRYICTNKAMKRGACDGQSAYVAHRIDGAVLATLRDYLAKIKSTPKDIALEKRYKSEISEYRRKQTKLEKEIEKLKRQVVELSAEIGRSLLGESRFTPDILSTSIDNTNDLLHKKEIELSDIKYKLANQQNAMGRLDFYYSQFRTWADEFDNSTMEQKKMISCQLIREVKVARGYEIEIVFDLNYEQFLNTSK

SEQ ID NO: 4288 - protein, 522 aa, Unknown
  Description of Unknown: Integrase B4289 sequence
  PTHR30461:SF3,SM00857,G3DSA:1.10.10.2600,IPR036162,PF13408, IPR025827,G3DSA:3.40.50.1390,PS51737,IPR006119,IPR038109, PF07508,IPR011109,SSF53041,PF00239,PTHR30461, PS51736,Coil,cd00338
MNGVIYARYSSDRQTEQSIEGQLRECQEYADANNIKIVGTYIDRAKTGRNDNRAEFQKMLRDSKQKFFDAVIVWKIDRFGRNREDIAKNKAILRRNGVSVLYAKEHIPEGAEGIILEGLLESLAEYYSAELREKITRGMRESAYKCQFNGSGLSIGYSVDKEHKFHIDTDGAKIVHLLFDMYDDGNTVAEILRHIKARGIKTRRGKEFTHFGITRVLRNRQYIGEYRWHDIVIPGGIPRIISDEQFERVNREMDKNKKAPARARGEDVSFLLTGKIFCGLCKGTMIGDSGTGKSGNKFYYYSCRAKKTRHTCKKKSVKKEWLEREVVRLTASVVLQDDVIEYIADRVVDIQQKEREDKSIIDYLNNRLSETEDAIRNIMKAIEAGIITETTGARLRELEAEREDLKIEIEKEKIARPVISREQVIYFLERFKGGDVDDKEYQRQIIDMFVNKVFLYDDKFIITYNYSGDNNEITAEIVEEATEDARSDAVDGCSDKRPSGPPFFPRSYIWVWNFLFTVVQNA

SEQ ID NO: 4289 - protein, 522 aa, Unknown
  Description of Unknown: Integrase B4290 sequence
  PTHR30461:SF3,cd00338,SM00857,G3DSA:1.10.10.2600,IPR036162, PS51737,G3DSA:3.40.50.1390,IPR006119,IPR038109,PF07508, IPR011109,SSF53041,PTHR30461,PS51736,Coil, PF00239
MTALEQNSAGESALQPQMDKYAIYLRKSRADAEAEKLGEGETLARHKKILTELAARKGLYVEKIYHEIVSGETIEARPEIQKLMADCYAGKYRGIIIVEVTRLSRGSQGDAQKIMDCLKFSNRNNGLLVITPTKVYDVAHNPDDEEYMEFELFMSRREYKMIKRRMDRGRTQAVVEGNYMGSYRPYGYDILKTRTSRTLVPNAEEAPIVKQIYEWSAEKGWSAGKIARTLTTMAVPTYTGDPEWSTATVKTILTNPTYSGKVRWNDRMTVKSMVNGELISSRPRSCHTDHYMLYEGKHEALVSEETYRAASRRYYSDRTKANFKLKNPLAGLLRCQACGKMMMHQSYKGRSTPPRFNHRQSTVCKVKSATVEDVMKALIHALKLYIEDFELKIDNLPDVDENSILSQLNALEAEQRKVEKKLAKAFDDYEEGIYTANEFVARKAKHTARLDAIKAQMESLEVSIPEKEEYQEKIMLLSEALDSLLDDALDADVKNEYLKRIIDHIDFSRENNAEFILDVYLK

SEQ ID NO: 4290 - protein, 522 aa, Unknown
  Description of Unknown: Integrase B4291 sequence
  SM00857,IPR036162,PF13408,IPR025827,G3DSA:3.40.50.1390, IPR006119,SSF53041,PF00239,PTHR30461,PS51736, Coil,cd00338
MVKNRAAIYARFSSHNQRSESIEIQVENSRAYCEREGLQVVHEYCDYAQTGRNIDRAEFQRMMSDARHGLFDYVVIYKVTRIMRNRDEMSLARIMLRKAGVEILYAGEDISSGSSGVLQLGMLEVLAEYESALDSERIRDGIQKNAQRCMANGRTLYGWDIVEGRYVINEREASVLCRMKNMLFAGSSVADIVRAVSAERSKRGAKFNQDTVTKLLKRVQNAGVYKYAGHEVPDGMPAIWSQVEQDMIDNILGDRHKPRRKINSTLEFPLSGKLYCAKCGAPMAGTSGTSCTGATYHYYKCRKCRRTVRRDLVEDVVCDMTLQAVAREDVRQRIASGMVAFQAEQPKEQSRSYAIKKELKRIDRTFERIWQAIEDGIAPPGGRERTEELKQRKSELEAELRIAEREEAFNIGVDELMLWLDDAAENLTPEVILGTFVRFAEIDGKTLNVYFAFDHYGDDFRPKQKKAEPCPEGHSSTNSLLVELMRKTANSTSTANRASIQLDTCVVRVSKNWFVVVGTCQK

SEQ ID NO: 4291 - protein, 522 aa, Unknown
  Description of Unknown: Integrase B4292 sequence
  SM00857,G3DSA:1.10.10.2600,IPR036162,PS51737, G3DSA:3.40.50.1390,IPR006119,IPR038109,PF07508, SSF53041,IPR011109,PTHR30461,Coil, PS51736,cd00338,PF00239
MREQYLIYLRKSRNDAQLEAMGVDVLERHEKTLLALAKSMNLQIGAIYREVVSGDSIAARPEMQRTLKEVEAGLWKGVLVMEVERLARGDTVDQGIVQRTFQYSETLIVTPAKIYDPNNEFDEEYFEFGLFMSRREYKTIRRRMRAGVTAAVREGKWPFNKAPYGWKRVKLEDARGWVLAPDPDEAPVVKLIFDMFTGPDRVGITSICKYLESHGIPPRNGDRWLECTILGILGNIVNDQKVGIGHRKQITTVKDGVLTKSRESRLSNNYDLIATGLQPRLIDHDVFVEAQGYLGKGTPKPPESYGIKNPLASLVVCSCCGQKMQRRPKTTTPGCHGAPYDVLMCHTRGCPTIGAPLELVEKEVINVLSDWVAGYQLNPSQEVKNNVTEKQALLSAAIANRDALLKQNEKLYDLLEREIYTTDVFLERSSALHERIEEAELSISALEKDLEYEKQKFENSSRFIPECKELLSNYWDLSVPDRNKALKLLIDRVEYKKTVKNKWGTVDTPTFELTLKPRIPRI

SEQ ID NO: 4292 - protein, 522 aa, Unknown
  Description of Unknown: Integrase B4293 sequence
  PTHR30461:SF3,SM00857,G3DSA:1.10.10.2600,IPR036162,PF13408, IPR025827,G3DSA:3.40.50.1390,PS51737,IPR006119,IPR038109, PF07508,IPR011109,SSF53041,PF00239,PTHR30461, PS51736,Coil,cd00338
MSSVDKTAVIYARYSSHGQTEQSIDGQIAAAQKYAEGKGYTIIHIYADRAMTGRNDDREQFQKMLSDTATHQFGVILLWKIDRFGRNREEIAFNRYRCKKNGVRVERVAEDVPDGPEGVILDSVLEGMAEYYSLQLAQNVRRGQRESAKKSQSNGGTRMIGYKVNPDTKRYEIDPDTAPFITEVFRRYAGGQTMAEIAAWLNAQGLRATRGGMFTVNSLHRLLKNEKYTGVYIFRDIRNEGGMPTLIDRATFDKVQEMLKVNRRAPSRVWSRAEYLLTDKLFCGHCGAPMAGVSGHGHTGVKHNYYTCLNRKRKKSCTKKSVRQDVLEPLVLKSIRNLLQDDATLKYIADRVWAEYERSDTSGDTIRALDRQIADVDRALSNVMKAIEMGIINEMTKARMDELTEQKQALSAARADAGLARGFKLTRNMILYFLRKMAAMDISDRDSQKRLIKTFVNAIYLYDDHFDIAFNYTENGKVIVKMQEIDDASTGGAFGCCAQCPTKIKAPAVPRRVFLFWCSVSC

SEQ ID NO: 4293 - protein, 522 aa, Unknown
  Description of Unknown: Integrase B4294 sequence
  PTHR30461:SF3,SM00857,G3DSA:1.10.10.2600,IPR036162,PF13408, PS51737,IPR025827,G3DSA:3.40.50.1390,IPR006119,IPR038109, PF07508,SSF53041,IPR011109,PF00239,PTHR30461, PS51736,Coil,cd00338
MGNVMLIPARRQVGNNARKQEEEKPKLRVAAYCRVSTDSDEQATSYEAQVEHYTEYIQKNPDWEFAGIYADDGISGTNTKKREEFNHMIDDCKAGNIDMVITKSISRFARNTLDCLKYIRQLKDMNIPVLFEKESINTMDAKGEVLITIMASLAQQESQSLSQNVKLGLQYRYQQGKVQINHNRFLGYTKDADGNLIIDPEQAEIVKRIYREYLEGLSMDKIAAGLERDSILTGAGGKRWHTSTINKILRNEKYIGDALLQKTYTTDFLNKTRVKNNGLVPQYYVEGNHEAIIPKDIYLQVQEELVRRRVVKTSANGKKRSYSCNHCFSQIVICGECGEMFRRLHWNNRGVKSIVWRCISRLESTGLECHARTINELVLQDAVVKAINQMLGDKSSYQAQLQLNIASVIRASQATSVENIDEKLMALQQELIQKAQSKEAYDEIADEIFRLRELRQKTTVDTAARDEQIKRINDLQDYIAHQTTHLTEFDESLVRRWIKQITIWDDHITVELKSGVSIDVDA

SEQ ID NO: 4294 - protein, 522 aa, Unknown
  Description of Unknown: Integrase B4295 sequence
  SM00857,G3DSA:1.10.10.2600,IPR036162,PS51737,G3DSA:3.40.50.1390, IPR006119,IPR038109,PF07508,SSF53041,IPR011109, PF00239,PTHR30461,PS51736,Coil,cd00338
MREQYLIYLRKSRNDAQLEAMGVDVLERHEKTLLALAKSMNLQIGAIYREVVSGDSIAARPEMQRTLKEVEAGLWKGVLVMEVERLARGDTVDQGIVQRTFQYSETLIVTPAKIYDPNNEFDEEYFEFGLFMSRREYKTIRRRMRAGVTAAVREGKWPFNKAPYGWKRVKLEDARGWVLAPDPDEAPVVKLIFDMFTGPDRVGITSICKYLESHGIPPRNGDRWLECTILGILGNIVNDQKVGIGHRKQITTVKDGVLTKSRESRLSNNYDLIATGLQPRLIDHDVFIEAQGYLGKGTPKPPESYGTKNPLASLIVCSCCGKKMQRRPKTTTPGCHGAPYDVLMCHTRGCPTIGAPLELVEKEVINALSDWVTGYQLDPSQEVKNNVTEKQALLSAAVANRDALLKQNEKLYDLLEREIYTTDVFLERSSTLHERIEEAELSISALEKDLEYEKQKFENSSRFIPECKELLSSYWDLSVPDRNKALKLLIDRVEYKKTVKNKRGTVNTPTFELTLKPRIPRI

SEQ ID NO: 4295 - protein, 522 aa, Unknown
  Description of Unknown: Integrase B4296 sequence
  PTHR30461:SF3,cd00338,SM00857,G3DSA:1.10.10.2600,IPR036162, PF13408,PS51737,G3DSA:3.40.50.1390,IPR025827,IPR006119, IPR038109,PF07508,SSF53041,IPR011109, PTHR30461,PS51736,Coil,PF00239
MSNAVIYARYSSGHQREESIEGQIRECTNFAKRNGLTIVEHYIDRAISAKTDDRPSFQQMVADSSKKTFDTIIVYTLDRFARNRYDSAVYKAKLKRNGVRVLSAKENITSDPSGIILESGLEGMAEYYSVELAQKVKRGMTENALACRWASGRIPFGYTIDADKHLHPDPALVPIVQEAFEMYAAGAKIVDIARKINSYHVVTGMGNKFGRSSFDRMIRSETYIGVFKWNDIRKENAIPPIITPELFYKCQARYNARNRKNVARPSAIYLLSGKLRCGCCGGSMCGMSGKSRNGTMHYYYSCYSTRRRTSHCDIGNIRRDEIEHIIAAHAASILKKPINLDIIANQALKTNNSVKNYRLESLIQQEKDLTQKLENCMKAIDQGLVSITLMDRIKQYEADLQSVKNDISLEKIKSNPIQVTKEHIIFFLEKFALLEGEKFKDRIISTMVRDIVIKKEKDGNYLVTVQYNYANSKELPNEESYSVPESIGSQDVELVDNSGVVTNRLRFYPYYFEETFIFTQAS

SEQ ID NO: 4296 - protein, 522 aa, Unknown
  Description of Unknown: Integrase B4297 sequence
  PTHR30461:SF3,SM00857,G3DSA:1.10.10.2600,IPR036162,PF13408, IPR025827,G3DSA:3.40.50.1390,PS51737,IPR006119,IPR038109, PF07508,IPR011109,SSF53041,PF00239,PTHR30461, PS51736,Coil,cd00338
MNTVIYARYSAGPRQTDQSIEGQLRVCTDFCKQRGLTVIDTYCDRHISGRTDERPEFQRLIADAKRKKFEAVVVYKTDRFARNKYDSAVYKRELKRNGIQIFYAAEAIPDGPEGIILESLMEGLAEYYSAELAQKIKRGMHESALKCQSTGSGRPLGYRVDEQKHFQIDPESAQTVQTIFEQYIKGESNAAICELLNSRGLRTAQGKPFNKNSINRIIKNRKYIGEYRYHDIVVEGGMPRIISDELFNLAQAEMERRRTRKAPKSPKAEYLLAGRLFCGHCKGPMQGVSGTGKIGNKWYYYYCGNTRGKNKTCDKKQVSRDRLERAVVDFTVRYILQEDVLEELARKVHAAQERQNDTASEIAFYEKKLADNKKSIANVLRAIESGAATQTLPARLQELENEQAVILGEISFLKGKRLAFTEDQILFALMKHLEPYPGESEQDYRRRIISDFVSEVYLYDDRLLIYFNISSEDGKLKSADLSNIEGSEFDEGLISSTKTHRYEHLTAFAVWRNVFIIDIPVE

SEQ ID NO: 4297 - protein, 522 aa, Unknown
  Description of Unknown: Integrase B4298 sequence
  PTHR30461:SF3,cd00338,SM00857,G3DSA:1.10.10.2600,IPR036162, PF13408,PS51737,IPR025827,G3DSA:3.40.50.1390,IPR006119, IPR038109,PF07508,SSF53041,IPR011109,PTHR30461, mobidb-lite,Coil,PF00239
MYEEIKTACLYLRYSSSNQTEQSIEGQMHVCQDFCKRHNIRIVEMYIDRATSASKDIEKRVEFLKMIKDSEKGNFNAVIVYKLDRFARSRYDSATYKYRLKRNGVQLISATENITQDPEGIILESVLEGMAEFYSAELSQKINRGMRESAMKHNSIGGAIPLGYKTVDKKLVIDETTAPIVREAFQMYADGESVAEICRTFNNRGYKTSKGTRFGKSSFTKIFRNEKYIGVYKYHDYRAEDVIPPIIDKDLWDRVQVRVGKIKKAPARNKARHTYLLTGKLFCGHCGSAMNADGNSQGYLYYRCYGKKNLDKQCNKRNMEKNLIERLVAQDAMSFLTDEYIEKIATIACDRNKQEIESDSPIPVIRDRIRQVDVSLNNLLKAIETGSAPDMLVKRMGELETEKKDMEVQLKKEMAHQVYIDKEQVIFWLEKFREGDINDEEFCQTVIDLFVNSVTVWDEPDDKFKITIAYNLTSIPQKTYRLSKDGRLSDYASNTPAQKSQVPEPAAQSSGYRESQVPAPTG

SEQ ID NO: 4298 - protein, 522 aa, Unknown
  Description of Unknown: Integrase B4299 sequence
  PTHR30461:SF3,SM00857,G3DSA:1.10.10.2600,IPR036162,PF13408, PS51737,G3DSA:3.40.50.1390,IPR025827,IPR006119,IPR038109, PF07508,IPR011109,SSF53041,PF00239,PTHR30461, PS51736,Coil,cd00338
MSNAVIYARYSSGHQREESIEGQIRECTDFAKRNGLTIVEHYIDRAISAKTDDRPSFQKMVADSSKKTFDTIIVYTLDRFARNRYDSAVYKAKLKRNGVRVLSAKENITSDPSGIILESVLEGMAEYYSVELAQKVKRGMTENALACRWASGRIPFGYTIDADKHLHPDPALVPIVQEAFEMYAAGAKIVDIARKINSYHVVTGMGNKFGRSSFDRMIRSETYIGVFKWNDIRKENAVPPIITPELFYKCQARYNARNRKNVARPSAIYLLSGKLRCGCCGGSMCGMSGKSRNGTMHYYYSCYSTRRRTSHCDIGNIRRDEIEHIIAAHAASILKKPINLDIIANQAIKTNSNVKNYRLESLLQQEKDLTQKLENCMKAIDQGLVSITLMDRIKQYEADLQSVKNDISLEKIKSNPIQVTKEHIIFFLEKFALLEGEEFKDRIISTMVKDIVIKKEKDGNYLVTVQYNYANSKELPNEESYSVPESIGSQDVELVDHMGVVTNRLRFYPYYFEETFIFTQAS

SEQ ID NO: 4299 - protein, 522 aa, Unknown
  Description of Unknown: Integrase B4300 sequence
  PTHR30461:SF3,cd00338,SM00857,G3DSA:1.10.10.2600,IPR036162, PS51737,G3DSA:3.40.50.1390,IPR006119,IPR038109,PF07508, IPR011109,SSF53041,PTHR30461,PS51736,Coil, PF00239
MTALEQNSAGKSALQPQMDKYAIYLRKSRADAEAEKLGEGETLARHKKILTELAARKGLYVEKIYHEIVSGETIEARPEIQKLMADCYAGKYRGIIIVEVTRLSRGSQGDAQKIMDCLKFSNRNNGLLVITPTKVYDVAHNPDDEEYMEFELFMSRREYKMIKRRMDRGRTQAVVEGNYMGSYRPYGYDILKTRTSRTLVPNAEEAPIVKQIYEWSAEKGWSAGKIARTLTTMAVPTYTGDPEWSTATVKTILTNPTYSGKVRWNDRMTVKSMVNGELISSRPRSCHTDHYMLYEGKHEALVSEETYRAASRRYYSDRTKANFKLKNPLAGLLRCQACGKMMMHQSYKGRSTPPRFNHRQSTVCKVKSATVEDVMKALIHALKLYIEDFELKIDNLPDVDENSILSQLNALEAEQRKVEKKLAKAFDDYEEGIYTANEFVARKAKHTARLDAIKAQMESLEVSIPEKEEYQEKIMLLSEALDSLLDDALDADVKNEYLKRIIDHIDFSRENNAEFILDVYLK

SEQ ID NO: 4300 - protein, 522 aa, Unknown
  Description of Unknown: Integrase B4301 sequence
  PTHR30461:SF3,SM00857,IPR036162,PF13408,IPR025827, G3DSA:3.40.50.1390,PS51737,IPR006119,PF07508,IPR011109, SSF53041,PTHR30461,Coil,PS51736,cd00338, PF00239
MIAIYTRQSIEKKDSLSIDAQVKACADYCKAQGWEYEIYTQDHGFSGKSLDRPGFQAMMSAVRSGQVNKIVCYKLDRISRSVSDFAQLLQELEQYKCDFISVTENFDTSSPIGRAMVYICMVFAQMERENIQERVKSNYYYRSGLGFWGGGPAPYGYQLKRQQIAGKVHTVLEPDPNEAPWVKKMYEWYLEPGGSAMKILRLLTENQVPTKRGYKWTSRVLMDVLSKPLYTQNSMDVYNYLTQSGAVISNPPEDFDGTLSVDLYGKKDSSQSKHKRCRKGSDMYCNISLHEAIIDSDTWLQVQYKILARPKIGGRTGTSKNSWFTGLMICGVCGRHVSFTHSARTAGYYICSSRKNCGWNSCSSKPASKKKFDPIIVKFIRDHYDSPKTKAAIQQAKLAAKTPQVSIERNNLQMELATINNQIDNLLTSLASGNAVMSKYINDKITELDAKRTPLQAKLLQFDATSSVNDELKRLERIEWAMEQLPLVYTEDTFDLSVQVSQALVNNIVFNADGEVTISFAI

SEQ ID NO: 4301 - protein, 522 aa, Unknown
  Description of Unknown: Integrase B4302 sequence
  cd03768,PTHR30461:SF3,SM00857,G3DSA:1.10.10.2600,IPR036162, PF13408,IPR025827,G3DSA:3.40.50.1390,PS51737,IPR006119, IPR038109,PF07508,SSF53041,IPR011109,PTHR30461, PS51736,Coil,PF00239
MNTIAIYTRKSKFTGKGESIENQIEKCKKFIEFKFNIDSENVNIFIDEGFSGKNENRPQYQLMMEKIKKKEIDSIVIYQLNRLGRNARDIHNTMQLCDDLGVIIYSATEGFDSSTSFGRAVIGILASLAQLEREQLAERVKDNMYTLAKMGRWLGGQSPLGFDGSREYYIDETGKERSITKLKKNEEELKLVKLLYDKYLEEKSLSQVGKWALINHLTGKNGGNLNKNAINVILQNPVYVKSSKEVFDYLANEGYEVCGEPNGNGLLRYGKDDEQIVATAKHKGVIPSDKWIEVQKILKDNVSKAPRMGKTNTALLTGLLRCKCGSTMRISYGQKRKDGTKPFYYICNMKINSGGARCNLKNLNGNLFEKNFIQFLKNYSKETLFTELQKLLNNSKDLESTISSNKIDVEIEKSNKAIKQILNKLKLTDDDELSKILLQEIKVENNKLKVLSKQKEELLNDQSEVVITQSEVLAILDDLDNFQKTFDDLNLEDKQKALKSLIESITLTDDKFIVDFNIKKKN

SEQ ID NO: 4302 - protein, 522 aa, Unknown
  Description of Unknown: Integrase B4303 sequence
  cd03768,PTHR30461:SF3,SM00857,IPR036162,PF13408, PS51737,G3DSA:3.40.50.1390,IPR025827,IPR006119,PF07508, IPR011109,SSF53041,PTHR30461,PS51736,Coil, PF00239
MRFFSYGRKSVFSDKSDSIDNQFRMNREYCESKFSGQVDSWQQFSDEDFTGANTSRPDLQRMLSFIKGGFCDVLVVYQLDRLSRDVRDFANIYALLEEHGVMFISIKENIDTTTPIGRAMMYVTVVFAQMERETIAARVTDNMLGLAKKGYWTGGNPPVGYVRKHIVVNGKKHCSIEVDPDGARYVTQIFDTFLAYNCSLQGMETRFKNQGIRTQSGKFFSTTQLHKMLTMPYCVEATPEVYDFYAAKGCIMDPGSPREMWDGSVGVIIYGRSTEKKKHQAQPPEKWTVCLGKHKPFMPAEKWLAVQSRFTQNKCIKDAKWPVPLLKGVLRCKCGNLMQVSRKKKVDGTCSSWYYCRKRMRQGVDACDMGQIKCDLLDEKVLELFRGITADPALIQKFVKAEAPANVPDLKAAQARVSACERKIGRLAASLALAEDSAASKYIIAEMERLDVELGALKREASLAEMEGHRAAASAKDAKATAAEIAKLIHGLDGFDDKEKNAIARAVIQECTWDGERLFIKL

SEQ ID NO: 4303 - protein, 522 aa, Unknown
  Description of Unknown: Integrase B4304 sequence
  SM00857,G3DSA:1.10.10.2600,IPR036162,PF13408,IPR025827, PS51737,G3DSA:3.40.50.1390,IPR006119,IPR038109,PF07508, SSF53041,IPR011109,PTHR30461,Coil,PS51736, cd00338,PF00239
MNTLERDCIYLRKSRADREAEARGEEETLSRHERILLDLAKRRGCHIGAIYREVVSGETISARPVMQRLLQEVESGMWDGVLVVEVERLARGDSIDQGVVARAFQYSDTKIITPTKTYDPNNEFDEEYFEFGLFMSRREYKTIKRRLNAGRVSSVQEGKYCGNKPPYGYRRVKLEHTKGYSLEPIPEQAEIVKLIYNWYTYGIDGERIGMCKITRKLIDMGVPSLSGKSWSTATVANILENPVYTGKIRWNRRKGMNKIENGNVVKSRPRCDDYILTDGLHEAIISQEIYDLAQYYRSMNPPRPIGASNTVKNPLSGIIKCGKCGHNMVRRPYNSRKQEDTLLCSYTGCNNVSSRLSLVEKALIAGLADLVQSYKINDTLNDTNGVDIIATKEKVLLDKRAELENLNTQKNRQYELLEQGIYTTEVFLERSGATAKQIDDCAAAIERIAADLAHDRELLEQKFNFIPKCEHLLSNYWDWDAPTRNSVLKELLERVDYFKDNKNDFKRGDEITFTLDIYPKIQ

SEQ ID NO: 4304 - protein, 521 aa, Unknown
  Description of Unknown: Integrase B4305 sequence
  PTHR30461:SF3,SM00857,G3DSA:1.10.10.2600,IPR036162,PF13408, PS51737,G3DSA:3.40.50.1390,IPR025827,IPR006119,IPR038109, PF07508,IPR011109,SSF53041,PTHR30461,Coil, PS51736,cd00338,PF00239
MENIIIYLRKSRSDDPALSVTDVLARHEQQLQEYAINTYNRQISEDHIYREIVSGETIADRPVMKQVIKLLETGTVDGVLVIEPQRLSRGDLEDCGKIVNTFRYTGTLVITPPKTYNLNDEYDRKFFEMELMRGNDYLEYTKKILNRGRIASVKQGNYIGSVAPYGYKKIKSGSGKDSYHTLEIVPEEADAVRLMYQLFVKEHYGFTKIARYLDDIGVKPRKTDHWSPAAIKDMLENPVYIGKIRWNYSKVQKTIINGQISKTRPRQKDISQWIYVNGRHEAIIEEAIYNKALEMRGKNPCVRKNKELSNPFAGLLYCGTCGRAMSYKHFKQYRGKSENVCTSMLCNNQAICKTKSIKYDTFYKRVVESLEENVADFEIKLKQEESNGKQFQKDLICSLEAKLNKLKEKDFRQKDAYEDGLYTKEEYATRNAKLQEQISATMESLSKARSNTPPVIDYRERISRFTDCLTALKDNTLSASEKNVLLKTCIDKIVYYNNMESKPGIGRYVDNVFQLDIFLLL

SEQ ID NO: 4305 - protein, 521 aa, Unknown
  Description of Unknown: Integrase B4306 sequence
  SM00857,G3DSA:1.10.10.2600,IPR036162,PF13408,PS51737, G3DSA:3.40.50.1390,IPR025827,IPR006119,IPR038109,PF07508, IPR011109,SSF53041,PF00239,PTHR30461,PS51736, Coil,cd00338
MKNGNYAMYLRKSRADREAEARGEMETLARHEKLLFETAKRMQITVSAVYKEIVSGETISARPVMQKLLAEIEQGIWDGVLVVEVERLARGDTIDQGIVSQAFKLSDTKIITPVKVYDPNNEFDEEYFEFGLFMSRREYNTIKRRLQRGRLASVREGKYVGNRPPYGYERVKIPNDKGFTLSPLPEQAKIVKYVYDLYAYGLDGEEMGTAKIVRKLNDLQIPTQSGGKWIPPTIRDMLYNPVYIGKLRWNRRATTKKVCDGKITYSRPTSKEYEICDGLHPAIIDLETFKICQKKLSKNQSRPVSLNKTIKNPLGGLVICSKCGHRMVRRPYNKTGQRSTLICPYTHCDNVSSPLEDVETMVLEAIADIVKNERIEPTTSVIPSDTIDILKDTLKNQETSLETLQKQQNSLYDLLEQGIYTTDVFLERSNKLKDQITAAASSIQNLKKKISAEQNRLKVQADFIPKCEHLLDVYDTLDAPEKNRILKELIDHIDYLKEEKNVPFTKKDAKVFIHVYPKTPE

SEQ ID NO: 4306 - protein, 521 aa, Unknown
  Description of Unknown: Integrase B4307 sequence
  PTHR30461:SF3,SM00857,G3DSA:1.10.10.2600,IPR036162,PF13408, PS51737,G3DSA:3.40.50.1390,IPR025827,IPR006119,IPR038109, PF07508,SSF53041,IPR011109,PF00239,PTHR30461, PS51736,Coil,cd00338
MSTNRAVIYARYSSNKQTEQSIEGQLRDCYAYAEKHDITIVGEYIDRALSAKTDNRPEFQRMIKDSANGAFNIIIVWKLDRFSRNRYDSAAYKIKLKKNGVKIISAMENISDNPEGILVESLLEGIAEYYSADLSEKVNRGMRETALKCHSTGAPVPLGYKIENKKYIVNEIEAPVVKKIFTMYADGDSAKDICDYLNEHGFKTRRGGKFNKNSLRTMLTNRKYIGIYKYKDIEIPGGMPQIIDNELFEKVGKMMIKNKRNAAASKPKEKYLLSGKVICGLCGDKMNGECGKNKSGRIYRYYKCNKQKRNKNDCPKHTIDKYFLEDTVINAVRSIVSNDKIIDRIAKKAVEAQMYDDTPQIINSLEQKLSETEKQIENILKAIESGIFTISVKDRLLELEKTRDILKSEIIKEKNDNPFLDYDTIKLILSQYSNGNFKDEKFRQKLVDVLIYKVIVFDDKIYILYNFSKDDNTKERYEDIIKLIEKSTAAQNGSPNVKRMRQALCYYGVCLIFVYSLKCFL

SEQ ID NO: 4307 - protein, 521 aa, Unknown
  Description of Unknown: Integrase B4308 sequence
  PTHR30461:SF3,SM00857,G3DSA:1.10.10.2600,IPR036162,PF13408, PS51737,IPR025827,G3DSA:3.40.50.1390,IPR006119,IPR038109, PF07508,IPR011109,SSF53041,PF00239,PTHR30461, PS51736,Coil,cd00338
MTNNKDLQTGVIYARYSSDKQRDESIEGQIRECTEYAQREGILITKIYTDRALSARTDNRPEFLQMIRDSANQSFNYVIVYQLDRFSRSREDSAKYKGILRRNGVRVLSAKEHITNEPAGIILESMLEGMAEYYSVELSQKVKRGMTENALKGKMNGAAIPLGYDLTESHHLTVNAHEAKAVRLIYDLYLKQHSIAKISDILHSKGYLTKKGRKISPSVIKNILSNEKYIGVYSWGDVRIENAVPPIISQKMFDEVQTIMPTRIKNKGRRSEMYNLCGKLICGECGGHYAGSTATSRNKEKHHYYVCTNRRKYHTCTAPNIRRDELEDLVINRTLEILNQPSNIARIVDLVMSGYSNTTQEAKTAIQGINNKIKAIDTELDNCMSAIKQGFITERLKGEIENLENERNNLLEQKANHESAIMPIKFTADHIEYFLERMAKENPTTKAGRSRILDTFIKSVTIYSDRVEIVFNYKNELPAFNNQCATGSHFKVLVGNTYNKANHFYINATAYPITLIVPFGV

SEQ ID NO: 4308 - protein, 521 aa, Unknown
  Description of Unknown: Integrase B4309 sequence
  PTHR30461:SF3,cd00338,SM00857,G3DSA:1.10.10.2600,IPR036162, PF13408,IPR025827,PS51737,G3DSA:3.40.50.1390,IPR006119, IPR038109,PF07508,SSF53041,IPR011109,PTHR30461, PS51736,Coil,PF00239
MGNVMIIPAKRQVGNTSRRQEDKPKLRVAAYCRVSTDSDEQASSYETQVEHYTEYIKKNPEWEFAGIYADDGISGTNTKKREEFNRMIEACKAGEIDMIITKSISRFARNTLDCLKYIRMLKDKNIPVFFEKESINTMDAKGEVLLTIMASLAQQESQSLSQNVKMGLQFRYQNGQVQVNHNHFLVYTKDREGNLVIDPEQAEVVKRIYREYLEGSSMDKIAKGLEKDGILTGAGKKKWWTSTINKILRNEKYIGDALLQKTYTTDFLNKTRVKNNGIVPQYYVENNHEAIIPKDIFLRVQEELVRRRVVKTSANGKKRSYSCNHCFAQLVICGECGDMFRRIHWNNRGCKSIVWRCLSRLEATGLECHARTVNEKVLESVVLEAINRLLGDKAAYQAQLQQNIAQVIRDANKNTSEKIDEQLMALQKELLQKANNKEAYDEIAEQIFKLREQRRQNTVDTTARDAQIERITALQDFINQQNTMLTEFDETLVKRWLKQITVYNDHFTVELKSELKVDVER

SEQ ID NO: 4309 - protein, 521 aa, Unknown
  Description of Unknown: Integrase B4310 sequence
  PTHR30461:SF3,SM00857,G3DSA:1.10.10.2600,IPR036162,PF13408, PS51737,G3DSA:3.40.50.1390,IPR025827,IPR006119,IPR038109, PF07508,SSF53041,IPR011109,PTHR30461,Coil, PS51736,cd00338,PF00239
MENIIIYLRKSRSDDPALSVTDVLARHEQQLQEYAINTYNRQISEDHIYREIVSGETIADRPVMKQVIKLLETGTVDGVLVIEPQRLSRGDLEDCGKIVNTFRYTGTLVITPPKTYNLNDEYDRKFFEMELMRGNDYLEYTKKILNRGRIASVKQGNYIGSVAPYGYKKIKSGSGKDSYHTLEIVPEEADAIRLMYQLFVKEHYGFTKIARYLDDIGVKPRKTDHWSPAAIKDMLENPVYIGKIRWNYSKVQKTIINGQISKTRPRQKDTSQWIYVNGRHEAIIEEAIYNKALEMRGKNPCVRKNKELSNPFAGLLYCGTCGRAMSYKHFKQYRGKSENVCTSMLCNNQAICKTKSIKYDTFYKRVVESLEENVADFEIKLKQEESNGKQFQKDLICSLEAKLNKLKEKDFRQKDAYEDGLYTKEEYATRNAKLQEQISATMESLSKARSNTPPVIDYRERISRFTDCLTALKDNTLSASEKNVLLKTCIDKIVYYNNMESKPGIGRYVDNVFQLDIFLLL

SEQ ID NO: 4310 - protein, 521 aa, Unknown
  Description of Unknown: Integrase B4311 sequence
  PTHR30461:SF3,SM00857,G3DSA:1.10.10.2600,IPR036162,PS51737, G3DSA:3.40.50.1390,IPR006119,IPR038109,PF07508,SSF53041, IPR011109,PF00239,PTHR30461,PS51736,Coil, cd00338
MAEFENIIIYLRKSRSDDPMQTVEDVLAKHESILQDYSIKQWGKPVPENHIFREVVSGETIQDRPVMQQIMKLLETGFISGVLIIEPQRLSRGDLQDCGRIINSFRYTNTVVITPPKTYNLSDEYDRKFFEMELTRGNDYLEYTKKILNRGRIASIKAGNYIGNIAPYGYRKVVIGTGKDKYHTLDIEPKEAEAVRIMFNLYVNKDYGFTNIAHFLDNAGYKPRNSDNWSPAAISSMLNNEIYIGRVVWNRRQTVKKMQDGLIVRTRPRHNDYISVPGKHPAIISEELFYAAKRKRGMTPKVKKFKELTNPLAGLLFCGRCGFAISMKKYADKRSKTGHETITMLCNNQSNCHTKSVMYSLVIAKVKLSLQQAINDFEVHINSNDDSERILQQNIINNLTEELEHLKEKDIRQKDAYEDGIYSKEEFLKRNAKLTEQISITQEKLNNALLEEPRICDYEEKIVRFRDCLNALDDDNVSAAVKNTLLKACIDRILYYNDSPSLPGIGRYVDNPFRLEIFLKL

SEQ ID NO: 4311 - protein, 521 aa, Unknown
  Description of Unknown: Integrase B4312 sequence
  cd03768,PTHR30461:SF3,SM00857,IPR036162,PF13408, PS51737,IPR025827,G3DSA:3.40.50.1390,IPR006119,PF07508, IPR011109,SSF53041,PTHR30461,PS51736,Coil, PF00239
MIAIYARQSIEKKDSVSIEAQIEKCKYYCENQDYKIYKDAGYSGKNINRPQFSKLLEDIKSGLITKVIAYRLDRISRSIADFSQLLILFDEHNVDFVSATENFDTNTPMGRAMINIVMTFAQLERETIVERVTDNYYFRANNGYWAGGYAPYGYEIKHIIGNDGKRHSVLVENKDESKIVKEIYDMYINQNISMRKIAQQLNYQNIPTKKQSGNWGINAVNAILSRPIYTEATTKIYDYFNKRGTCITNNIEHFDGTKTANLYGNSKKNNNVKALRNYDEMFLSLINCVPLISNEDWFKVQNIKGTKKNLPPRTNSSKISFLCGLVKCGKCSSNMVTQGCKNRYGIQYYYLICSTKRNLGRIKCDNKMIDISKLEDIVINDIKKHFNSNEIETKIEKYMKNNKKENINLLKQKEEFENKIIKIDIQIQNLINSIAEGNITISKYINQKIEVLEKEKQNISSQLSTIIEKNNITQDNYLIEYVKNINEKINTKDFEQLKLLCHTIIDKIVITDKNIDIHYKI

SEQ ID NO: 4312 - protein, 521 aa, Unknown
  Description of Unknown: Integrase B4313 sequence
  PTHR30461:SF3,SM00857,G3DSA:1.10.10.2600,IPR036162,PF13408, IPR025827,G3DSA:3.40.50.1390,PS51737,IPR006119,IPR038109, PF07508,IPR011109,SSF53041,PF00239,PTHR30461, PS51736,Coil,cd00338
MKGVIYARYSPGPNQTDQSIEGQLRECKQFAEENNITIVNTYADKKQTGRNDNRVQFQKMLQDSKKKQFDYVIVWKIDRFGRNREEIAKNKAILRMSGVKVLFAKEHIPDGPEGIILESVLEGLAEYYSANLSQNIIRGMRESAMKCKCNGSGLPLGYNVDKEHNYIRNDEEATLIKMIFKMYDDGSKINDICKYLNAHNYKTKRNSKFTHTGVSRILHNRQYIGEYRWKDIITPNGMPRIIDDELFERVAKRLERTKRAPSASRGDVKFLLTGKLFCGYCKSTMIGDSGTGKSGRKFYYYNCRIKKNKHTCKKKTVRKDWLEYEVARITANIVLQDKIIDYVSDKVVEIQKKEHEDKSNLNYYTVKLKETNSAIKNIMKVIESGIFTESMRERLLKLEDERSTYETEIAKEEIMRPTITKEQVVFFLKQFKNGNIEDKDYQAKLIDIFVNKVILYDDKIIITYNYSGEHNETSAKIIEEAAEELINEQEKCSDKLLSSPPNRYWTNTYFFSGGFAVKVML

SEQ ID NO: 4313 - protein, 521 aa, Unknown
  Description of Unknown: Integrase B4314 sequence
  SM00857,G3DSA:1.10.10.2600,IPR036162,PF13408,IPR025827, G3DSA:3.40.50.1390,PS51737,IPR006119,IPR038109,PF07508, IPR011109,SSF53041,PTHR30461,Coil,PS51736, cd00338,PF00239
MPYCMYLRKSRKDFEAESAGQGETLARHKAALLETAQRLHLAVSEIYQEIVSGDSIAARPEMQRLLADVETGKWDGVLVMEVERLARGDTMDQGQVQRTFVYTGTKIITPTRTYDPSDPADAEYFEFGLFMSRREYQTINRRLLAGRERAVREGKWPQGHAPYGYRAVKVPKGKGYMLEIVPEEAEIVKSIFNWYVNGAEYNGAFLRVGARRISTMLNSMGLTTQAGNLWSAPAVRVILKNHAYIGKVTWYKQTLRKSMSNGAVVKKLERTPERTLICDGLHEAIISDELFEAAQARLSADSTGPATKGPLQSPLAGLLYCGLCGCVMARQHEKGKPSYYVCRNPLCRCRGSKLEVVEQRVVATLALWLAGYEITAKAQAQTVDIGALQSALDGAQRELLAYQQQQTRLYDLLERGIYTEQVFLQRQAAITGEVQRLQAAVADTEAAIAKAVRINASAREIVPAVHAVLDAYPTYTTAQEKNDALRMVLSRVEYTRTVGGFGSDPQDFEVKIFPRLPEPVE

SEQ ID NO: 4314 - protein, 521 aa, Unknown
  Description of Unknown: Integrase B4315 sequence
  PTHR30461:SF3,cd00338,SM00857,G3DSA:1.10.10.2600,IPR036162, PF13408,IPR025827,PS51737,G3DSA:3.40.50.1390,IPR006119, IPR038109,PF07508,IPR011109,SSF53041,PTHR30461, PS51736,Coil,PF00239
MPKITKIPASISRYTSAPIDAPVKRKVAAYARVSTDSEEQLTSYAAQISYYTEYIKGREDWEFVGVYTDEGISGCSTKRREGFQRMISDAMAGKIDLIITKSVSRFARNTVDSLTTIRLLKENNVECYFEKENIWTFDGKGELLLTIMSSISQEEARSISENVTWGHRKRFADGKVSVAYSRFLGYDKGSDGKMVVNPEQAEIVKLIYRLFLEGMTPHTIAIHLTEKGIKTPGGKDKWNATTIRRILTNEKYKGDALLQKEFTVDFLTKKTKKNCGEIPMYYIEDDHEAIIDPAVFDMVQQEMERRKTGTSRYSGVSIFSSKIKCGECGGWYGAKVWHSTDQYRKVIYRCNNKYNDERCTTPHIMEEEVKAVFLKSLNKLLANRDELIENVKLICDKLTDTSELEAEKEKYAEEMSLVADMVQAAMLENARIALDQEEYRQKNDVLSARFEAAKKKHDELAMRIEEIETRGQNLRHFQETLESLNGQVTEFDSDLWGSLVDYITVYENGEKTVTFRDGSVI

SEQ ID NO: 4315 - protein, 521 aa, Unknown
  Description of Unknown: Integrase B4316 sequence
  PTHR30461:SF3,cd00338,SM00857,G3DSA:1.10.10.2600,IPR036162, PF13408,IPR025827,G3DSA:3.40.50.1390,PS51737,IPR006119, IPR038109,PF07508,SSF53041,IPR011109,PTHR30461, PS51736,Coil,PF00239
MSIKAVSYCRYSTDNQTENSIMYQMAAAEEYCKKHGMVLIDVYSDEAKTGTNTNREGLQRLIKDCDTSKFDAIIIYDQSRLSRNISDWFELRQLFSSKGKQLYSCNEQLSSDYLNSNAFLSEGIHALFAQNHVIETRRKTLDGVKSKAKQAGFCGGTPPLGYDIVNGEYVINEKEAPAIRKMFEMYALGKSYDDIMQVLYREGFRSKRGNKISSNAIYYLLRNERYVGTYYWNKYQYTVMRKRITRKENPEIVRIENAIPPIIDKETWAMVQEQLSKNKGASTRTKRQYLLSGLIKCGYCGGTYTGFASKNRRSGEETVYYTCSTKERLKACKAKNVRGDEIESFVYYTLKDRIFNQDLAEQVADMIISQSKDIVTFDATSVKREISKKKQAINNLFQAIENGLNAEITTDRINALQDEIKALGLSLEQNMKQNDTVIDREKLIHSLLEDAKKIDLDFEHRRAIIRKYVVKIEITDDTVNLHCIGDSGTTGGATPQYGVLIFAVDRISLKDIVRQIPSPTK

SEQ ID NO: 4316 - protein, 521 aa, Unknown
  Description of Unknown: Integrase B4317 sequence
  PTHR30461:SF3,IPR036162,PS51737,IPR011109,PTHR30461, PF00239,G3DSA:1.10.10.2600,IPR026989,IPR006119,SSF53041, SM00857,IPR025827,cd03770,IPR038109,PS51736, PF14198,PF13408,G3DSA:3.40.50.1390,PF07508,Coil
MLRQTTQQLITALYPRLSHEDELSGESNSISNQKRILETYAKQNGFTNLRWYTDDGYSGANFQRPGFQAMLADIEAGKVGTVIVKDMSRLGRNYLQVGMYTEMIFPQKNVRFIAINDGVDSAQGENDFAPLRNIFNEWLVRDTSKKIKAVKRSKGMSGKPITSKPVYGYLMDKDENFIIDEEAAPVVRQIYSLCLAGNGPTKIARMLTEQQIPTPGTLEYQRTGSTRRYHPGYECKWATNTVVHLLENREYTGCLVNFKTEKPSYKMKHSIDNPIEKQAIFENHHEPIIDLQTWERVQELRKQRKRPNRYDDVGLFSGLLFCADCGHVMYQQRYQTDKRKQDCYICGSYKKRTADCTAHFIRTDLLTAGVLDNLRKVTAYAQKHEARFVKLLIQQNEMGGKRKLAAAAKQLEQVQSRIAELSRYIKRLYEDNVNGKISDERFMEMSADYEAEQRELKDRAAALQGELDKAQERLDTIMEQMKAADGVTEELKRTHQMEWVQRCNNIHNRAEEIILQEMIYS

SEQ ID NO: 4317 - protein, 521 aa, Unknown
  Description of Unknown: Integrase B4318 sequence
  cd00338,SM00857,G3DSA:1.10.10.2600,IPR036162,PF13408, IPR025827,G3DSA:3.40.50.1390,PS51737,IPR006119,IPR038109, PF07508,IPR011109,SSF53041,PTHR30461,PS51736, Coil,PF00239
MSLENVCIYLRKSRADREAEARGEGETLARHERILLDLAKSRNYNIGAIYKEIVSGETISARPVMQQVLHEVEAGMWDGVLVVEVERLARGDTIDQGVVSRAFQYSDTKIITPTKTYDPNNEFDEEYFEFGLFMSRREYKTIKRRLNAGRIASAREGKYGGNKPPYGYRRLKLQNEKGWTLEIEPDQAAVVKLVFEWYVNGVDGDRIGMSKIVRKLNDMGFKTMHGGSWVISTVQSIIRNPVYAGMIRWNSRKSIRSIRDGQVTVSRPMAEDYILAEGRHPAIVSRELFDQAQKIVDQNPARPISSLHVIKNPLAGIVRCGKCGHTMTRKAPSGRQEALLQCPYSSCSTVSSKLSLVENSLIDGIQKLVDGYRLNSDVSDQNFASSIETKKDLLLEKQAELKRLEKKKEKQYDLLEQGIYSTEIFIERSRSVSADINQCLASIHSLEQEIIKEQERLDQQNSFIPRCEDLLEHYWFWDVSTRNQFLQELIEKVVYNKEVKDSKKCDEITFTLDIYPRIQGK

SEQ ID NO: 4318 - protein, 521 aa, Unknown
  Description of Unknown: Integrase B4319 sequence
  SM00857,G3DSA:1.10.10.2600,IPR036162,PF13408,IPR025827, G3DSA:3.40.50.1390,PS51737,IPR006119,IPR038109,PF07508, SSF53041,IPR011109,PTHR30461,Coil,PS51736, cd00338,PF00239
MPYCMYLRKSRKDFEAESAGQGETLARHKAALLETAQRLHLAVSEIYQEIVSGDSIAARPEMQRLLADVEAGKWDGVLVMEVERLARGDTMDQGQVQRTFVYTGTKIITPTRTYDPSDPADAEYFEFGLFMSRREYQTINRRLLAGRERAVREGKWPQGHAPYGYKTVKVPKGKGYMLEVVPEEAEIVKSIFNWYVNGAEYNGAFLRVGARRISTMLNSMGLTTQAGNLWSAPAVRVILKNHAYIGKVTWYKQTLRKSMSNGAVVKKLERTPERTLICDGLHEAIISEELFEAAQARLSADSTGPATKGPLQSPLAGLLYCGLCGCVMARQHEKGKPAYYVCRNPLCRCRGSKLEVVEQRVVATLAHWLTGYEITAKAQAQTVDIGALQSALDGAQRELLAYQQQQTRLYDLLERGIYTEQVFLQRQSAITGEVQRLQAAVSDTEAAIAKAVRINASAREIVPAVHAVLDAYPTYTTAQEKNDALRMVLSRVEYTRTVGGFGSDPQDFEVKIFPRLPEPVE

SEQ ID NO: 4319 - protein, 521 aa, Unknown
  Description of Unknown: Integrase B4320 sequence
  PTHR30461:SF3,SM00857,G3DSA:1.10.10.2600,IPR036162,PF13408, IPR025827,G3DSA:3.40.50.1390,PS51737,IPR006119,IPR038109, PF07508,SSF53041,IPR011109,PTHR30461,Coil, PS51736,cd00338,PF00239
MKAAIYARYSSDNQREESIEAQIRAINEFAERENIQIVKTYIDEARSATTDDRPQFLKMIKESELGLFDTLIVHKLDRFSRNRYDSAFYKKKLKDNNVRLISVLEHLDNSPESIILESVLEGMAEYYSVNLSREVMKGMRETALQCKHNGGLPPLGYDVAKDKTYIINPNEAKAVKLIYELYSNGVGYNLILSRLNELGYKTKKGKFFGKNSLYSILTNEKYNGIYVFNKSSKKINGKRNSHKHKLDEEIIKIKDGMPKIIDDDLWNEVKKKMDNNKAHRGAAQAKKIYLLSGLIYCGKCGHAMTGNSRHSGRNKTLYETYECSNRKRTKQCDMRAINKSLAEKIVIDALYDNIFSKKAIENLTRKILTYAQEQNKTITEDIITYKKELKDVDSKIDNIVEAIADGLYSPVMKEKLTSLESKKNALLIRIDEAEREAILTSPSKEMIKKYLSKDSDIKEKTPQQQKKVVQNYIKKVTIYDDEVITDTIVTCLGIGEAYRTRVHKLQKTNINIKSRNPHRNL

SEQ ID NO: 4320 - protein, 521 aa, Unknown
  Description of Unknown: Integrase B4321 sequence
  SM00857,G3DSA:1.10.10.2600,IPR036162,PF13408,PS51737, G3DSA:3.40.50.1390,IPR025827,IPR006119,IPR038109,PF07508, IPR011109,SSF53041,PF00239,PTHR30461,PS51736, Coil,cd00338
MKNGNYAMYLRKSRADRENEARGEMETLARHEKLLFETAKRMQITVSAVYKEIVSGETISARPVMQKLLTEIEQGVWDGVLVVEVERLARGDTIDQGIVSQAFKLSDTKIITPVKVYDPNNEFDEEYFEFGLFMSRREYNTIKRRLQRGRLASVREGKYVGNRPPYGYERVKIPNDKGFTLSPLPEQAKIVKYVYDLYAYGLDGEEMGTAKIVRKLNDLQIPTQSGGKWISPTIRDMLYNPVYIGKLRWNRRAATKKVCDGKITYSRPTSKEYEICDGLHPAIIDPETFKICQKKLSKNQSRPVGLDKTIKNPLGGLVICSKCGRRMVRRPYNKTGQRSTLICPYTHCDNVSSPLEDVETMVLEAIADIVKNERIEPTTSVIPSDTLDILKDTLKNQETSLETLQKQQNSLYDLLEQGIYTTDVFLERSNTLKEQITAADSSIQNLKKKISAEQNSLKIQADFIPKCEHLLDIYDTLDTPEKNRIMKELIDHIDYLKEEKNVPFTKKYAKVFIHVYPRTPE

SEQ ID NO: 4321 - protein, 521 aa, Unknown
  Description of Unknown: Integrase B4322 sequence
  cd03768,PTHR30461:SF3,SM00857,G3DSA:1.10.10.2600,IPR036162, PF13408,PS51737,IPR025827,G3DSA:3.40.50.1390,IPR006119, IPR038109,PF07508,IPR011109,SSF53041,PTHR30461, PS51736,Coil,PF00239
MNVAIYARKSKATKKGESIATQIELCKKYFAGSDNINFLVYEDEGFSGKNTDRPQFKKLINDAKLKRFSCLICYRLDRIARNVADFSSTYRILEDNNIDFISITEQFDTNSVMGRAMINISATFAQMERETIAERIKDNMLELSKTGRWLGGTPPLGFKSVQIDYDSSGQKKKMFKLEIVPDEIEIVKLIYELYPQYKSTVPIARHLVSNHIKGKNGGDFSRNTVLQILNNPVYCCSDKEAIKYFESKGSIINCIEDNTLGLMVYNKRKGGKKENPIDEWIIATGKHPGVIPSSEWINCQNILEEIRKKSSPRQATGNKFLLSGMLKCKICGSSMCSWSRNSRGHYYRSYRCELKNRAANRCTCKAINADELEEFVIDMLKNLDINSLDIKSKTSSNSNLKQELNILNKTLSENNKLLQGLIKKLALIDDIDILSMIQSEIKKIKSENENIDKRINEINLSMFDVEDTLKKQKIFLECFDMYKKTIDFVDNVETKRKLIMNLVEYFIYDSENGTVEYKIRL

SEQ ID NO: 4322 - protein, 521 aa, Unknown
  Description of Unknown: Integrase B4323 sequence
  PTHR30461:SF3,SM00857,G3DSA:1.10.10.2600,IPR036162,PF13408, IPR025827,G3DSA:3.40.50.1390,PS51737,IPR006119,IPR038109, PF07508,SSF53041,IPR011109,PTHR30461,PS51736, cd00338,PF00239
MARITKIEATKSFIEKKKIRVAAYARVSTRSDEQLLSLETQKEHYDNFISANSEWEYAGLYYDEGVSGTKVEKRDGLLALLKDCEDGKIDRVITKSISRFSRNTADCLEMVRNLARLNIYMYFEKENIDTEHMSSEWMLSILSSIAESESRSISQNNKWSIKHRFEEGTFIISYPPYGYENEEGRMVIVPEEAAVVRDIFNMTINGMGTHVIARELNERGVQSRKGTKWHPSTVRGILQNEKYTGDVIFQKTYTDDNYNRHINYGEKNMYLCKNHHEPIISHEIFDKATAVIHQRAKEKSIETGIGKYHHLYAFSGKIICGECGSTFKRRQHYKPSGNYVAWCCNTHITDNDDCSMMYIRDEDIKTAFLRMIRKLQTVHAKVLKPFIEGLRGANNKERLHQVLALEEQIEKNVEQTTVLTNLLSSGYIEPEIFHAEKNQLTSEADRLAREKQLISKSINGDLTHLDEAQKLLRFVSKKAEITEFEDEMFLEYVDTMTVHSRDEITFNLKCGLNITERLVVV

SEQ ID NO: 4323 - protein, 521 aa, Unknown
  Description of Unknown: Integrase B4324 sequence
  cd03768,PTHR30461:SF3,SM00857,G3DSA:1.10.10.2600,IPR036162, PF13408,PS51737,G3DSA:3.40.50.1390,IPR025827,IPR006119, IPR038109,PF07508,IPR011109,SSF53041,PTHR30461, PS51736,Coil,PF00239
MRKVAIYSRKSRFTGKGESIENQIIKCKKFIQFKFDIDPENTEIFIDEGFSGKNENRPRYQDMINKIKNKEIDSIIIYQLNRLGRNARDIHNTMQMCEDLGAVIYSATEGFDSSTSFGRAVIGILASLAQLEREQIAERVKDNMYNLARKGRWLGGQSPLGFDGTREYYIDENGKERSITKLKKNNEELKLVKTIYEKYLVEQSLSQLEKWSLSNNIKGKNGCDLGKTSINSALQNPVYVKSDDKIFEYLNKHNYETYGEPNGNGLLRFGKNDNKIVAVSKHSGIIDSDTWIKVQEILKSNSEKAPRMGKTNTALLTGILKCGCGAPMIVSHGLKKKDGTKVFYYVCSMKVNSRGTRCKSGNMNGSLLEDKLITYLKNYNRNLLIKQLKESFQNTKQLESKLTVESIDNNINKIHKAIKQLLNKLKLVDDDEVSKIILSEITAEKNKIQELETQKDELLKNQSSLSITQSEILEIIALLDDFNETFDNLTFEQKKMKLKNLLESVTYKDDMFHISFKLKKN

SEQ ID NO: 4324 - protein, 521 aa, Unknown
  Description of Unknown: Integrase B4325 sequence
  PTHR30461:SF3,cd00338,SM00857,G3DSA:1.10.10.2600,IPR036162, PF13408,IPR025827,G3DSA:3.40.50.1390,PS51737,IPR006119, IPR038109,PF07508,SSF53041,IPR011109,PTHR30461, PS51736,Coil,PF00239
MMKAVIYARYSSEKQQEISIEGQLRVCQEFAAREGYEVVDTYTDRALSASRDVERREDFQRMIRDSGRRGFDVVIVYKFSRFARNRYDSAVYKARLRQNGVKVVSACEPISANPEGALIEGIFESLDEFYSKSLAQDVTRGMHENATKALSTGGTIPLGYVSVDKRLQIDPATAPAVRLAFERYAEGMSLARIADELNAQGYRTRAGKAFNRSSFNALLSNRKYIGTYHYNGEVELVGQVPPIVDPGTFRRVQERLRKNTTAPGRTKATINYLLSTKLYCGACGKPMAGESGHNHSGTRYYYYACSGRKRRLGCKMPTLRKDDLERLVVEHARTLLSPDNIKALAHAAAAEYQRQAEDDSAAVSLRRQLDEVTRSLDNLLRMVEQGAISATLVARINELEGRKASISAELADEQRGAPELTEVDILRWLSCFADGCLEDEDYMRNVIDMLVNKIVVQQNPNQKVSVLVAYNLAGRGDEISGSGLVDVVHQARHNPNLCTRATESCMTFLLYHGCAIFQLAA

SEQ ID NO: 4325 - protein, 521 aa, Unknown
  Description of Unknown: Integrase B4326 sequence
  cd03768,PTHR30461:SF3,SM00857,IPR036162,PF13408, IPR025827,G3DSA:3.40.50.1390,IPR006119,PF07508,IPR011109, SSF53041,PTHR30461,PS51736,Coil,PF00239
MRIAIYARKSVFAENSDSVKNQERMAREYAALHFEGDHTFLLYMDEDYTGANTNRPGLKDFMRDVKAGIIDFLIVYQLDRLSRNVRDFSNIYAFMEDHSVGFVSVKENIDTSTPLGKAMMYVSVVFAQMERETISNRVADNMMGLAAAGWWFGGSAPRGYRRIKVTEFGKIHTTLELIPEEANKIRHLYDKFLELNASVQSFETYCKHNGIKARRGGYFSATQIYTILSSPFYTFATPEVWDYYKSRGCIMTDKRERWDGKTGIVIYGRTTERKGKHSKQPPNKWRVSVGRHIPFIPAEIWLATQSQFTHNSFSKKMVHPTTLLKGTIRCKCGCLMGLARRHRKDGLSTWYICPKADRQGKTVCNTSQIKAEIIDEKALSVFRQIEHDPKQIKKYFSELAAPGDKSAQLAKLTREISHTEERIKNLSEILSNNNESRAAKYMISEIEALDADLADKNKQMASLQAQSLLQVDIERQAREKQKEIARLIKNFEELTIDEKNEIAHKVLKECVWNGETLFLRL

SEQ ID NO: 4326 - protein, 521 aa, Unknown
  Description of Unknown: Integrase B4327 sequence
  cd03768,PTHR30461:SF3,SM00857,IPR036162, PF13408,IPR025827,G3DSA:3.40.50.1390,IPR006119, PF07508,IPR011109,SSF53041,PTHR30461, PS51736,Coil,PF00239
MRIAIYARKSVFAENSDSVKNQERMAREYAALHFEGEHTFLLYMDEDYTGANTNRPGLKDFMRDVKAGIIDFLIVYQLDRLSRNVRDFSNIYAFMEDHSVGFVSVKENIDTSTPLGKAMMYVSVVFAQMERETISNRVADNMMGLAAAGWWFGGSAPRGYRRIKVTEFGKIHTTLELIPEEANEIRHLYDKFLELNASVQSFETYCKHNGIKARRGGYFSATQIYTILSSPFYTFATPEVWDYYKSRGCIMTDKRERWDGKTGIVIYGRTTERKGKHSKQPPNKWRVSVGRHIPFIPAEIWLATQSQFTHNSFSKKMVHPTTLLKGTIRCKCGCLMGLARRHRKDGLSTWYICPKADRQGKTVCNTSQIKAEIIDEKALSVFRQIEHDPKQIKKYFSKLADPEDKSAQLAKLTREISHTEERIKNLSEILSNNNESRAAKYMISEIEALDADLADKNKQMASLQAQSLLQVDIERQAREKQKEITRLIRNFEELTIDEKNEIAHKVLKECVWNGETLFLRL

SEQ ID NO: 4327 - protein, 521 aa, Unknown
  Description of Unknown: Integrase B4328 sequence
  PTHR30461:SF3,cd00338,SM00857,G3DSA:1.10.10.2600,IPR036162, PS51737,G3DSA:3.40.50.1390,IPR006119,IPR038109,PF07508, IPR011109,SSF53041,PTHR30461,PS51736,Coil, PF00239
MAEFENVIIYLRKSRSDDPMQTVEDVLAKHESILQDYSIKQWGKPVPENRIFREVVSGETIQDRPVMQQIMKLLETGFISGVLIIEPQRLSRGDLQDCGRIINSFRYTNTVVITPPKTYNLSDEYDRKFFEMELTRGNDYLEYTKKILNRGRIASIKAGNYIGNIAPYGYRKVVIGTGKDKYHTLDIEPKEAEAVRIMFDLYVNKDYGFTNIAHFLDNAGYKPRNSDNWSPAAISSMLNNEIYIGRVVWNRRQTVKKMQDGLIVRTRPRHNDYISVPGRHPAIISEELFYAAKRKRGKTPKVKKFKELTNPLAGLLFCGRCGFAISMKKYADKRSNTGHETITMLCNNQSNCHTKSVMYSLIIAKVKLSLQQAINDFEVHINSNDDSEQILQQNIINNLTEELEHLKEKDIRQKDAYEDGIYSKEEFLKRNAKLTEQISITQEKLNNALLEEPRVCDYKEKIVRFRDCLNALDDDNVSAAVKNTLLKACIDKILYYNDSPSLPGIGRYVDNPFRLEIFLKL

SEQ ID NO: 4328 - protein, 521 aa, Unknown
  Description of Unknown: Integrase B4329 sequence
  SM00857,G3DSA:1.10.10.2600,IPR036162,PF13408,PS51737, G3DSA:3.40.50.1390,IPR025827,IPR006119,IPR038109,PF07508, IPR011109,SSF53041,PTHR30461,Coil,PS51736, cd00338,PF00239
MPYCMYLRKSRKDFEAESAGQGETLARHKAALLETAQRLHLAVSEIYQEIVSGDSIAARPEMQRLLADVETGKWDGVLVMEVERLARGDTMDQGQVQRTFVYTGTKIITPTRTYDPSDPADAEYFEFGLFMSRREYQTINRRLLAGRERAVREGKWPQGHAPYGYRAVKVPKGKGYMLEIVPEEAEIVKSIFNWYVNGAEYNGAFLRVGARRISTMLNSMGLTTQAGNLWSAPAVRVILKNHAYIGKVTWYKQTLRKSMSNGAVVKKLERTPERTLICDGLHEAIISEELFEAAQARLSADSTGPATKGPLQSPLAGLLYCGLCGCVMARQHEKGKPSYYVCRNPLCRCRGSKLEVVEQRVVATLALWLAGYEITAKAQAQTVDIGALQSALDGAQRELLAYQQQQTRLYDLLERGIYTEQVFLQRQAAITGEVQRLQAAVADTEAAIAKAVRINASAREIVPAVHAVLDAYPTYTTAQEKNDALRMVLSRVEYTRTVGGFGSDSQDFEVKIFPRLPEPVE

SEQ ID NO: 4329 - protein, 521 aa, Unknown
  Description of Unknown: Integrase B4330 sequence
  PTHR30461:SF3,SM00857,G3DSA:1.10.10.2600,IPR036162,PS51737, G3DSA:3.40.50.1390,IPR006119,IPR038109,PF07508,SSF53041, IPR011109,PTHR30461,Coil,PS51736,cd00338, PF00239
MTEWEKTGSGVEPYAIYLRKSRADEKAEAMGEGETLARHKKILTDFAARKGLFVAEIYQEIVSGETIAARPEIQRLIRDCYAGKYRGIIIVEVTRLSRGNQGDAQTILDCLRYANRNQGLLVYTPTKVYDVAHSAEDEEFMEFELFMSRREYNMIKKRMERGRRQAIVEGNYMGAYRPYGYNIIKTRTARTLEPNPDEAPIVKMIFNLAVKEHCSTGQIARQLTSMGIPTYTENREWNSGSVKAILQNPIYIGRVRWNERMRVKTMVDGKLISSRPRANGEADYYMEYDGKHEPLVDKKAFTAANNKFHNNKTREGYALLNPLAGLLRCKNCGRMMVYHPYKKQNTAPRYSHASSQLCKVKSAARPEVIAAVAQSLRMYIADFEVRINASDAEAAKESAAQADAMRKQIQDAERKLDKLFDAWESGNISDSEFVSRKAVHNERIALVQAQLRKIESRAPEKELYKEKIQKLTDALRVLEDESLPAETQNQYLKAILDRIEFSREDPDSFILDVFLKDDIID

SEQ ID NO: 4330 - protein, 521 aa, Unknown
  Description of Unknown: Integrase B4331 sequence
  cd03768,PTHR30461:SF3,SM00857,IPR036162,PF13408, IPR025827,G3DSA:3.40.50.1390,IPR006119,PF07508,IPR011109, SSF53041,PTHR30461,PS51736,Coil,PF00239
MRIAIYARKSVFAENSDSVKNQERMAREYAALHFEGDHTFLLYMDEDYTGANTNRPGLKDFMRDVKAGIIDFLIVYQLDRLSRNVRDFSNIYAFMEDHSVGFVSVKENIDTSTPLGKAMMYVSVVFAQMERETISNRVADNMMGLAAAGWWFGGSAPRGYRRIKVTEFGKIHTTLELIPEEANEIRHLYDKFLELNASVQSFETYCKHNGIKARRGGYFSATQIYTILSSPFYTFATPEVWDYYKSRGCIMTDKRERWDGKTGIVIYGRTTERKGKHSKQPPNKWRVSVGRHIPFIPAEIWLATQSQFTHNSFSKKMVHPTTLLKGTIRCKCGCLMGLARRHRKDGLSTWYICPKADRQGKTVCNTSQIKAEIIDEKALSVFRQIEHDPKQIKKYFSELAAPEDKSAQLAKLTREISHTEERIKNLSEILSNNNESRAAKYMISEIEALDADLADKNKQMASLQAQSILQVDIERQAREKQKEITRLIRNFEELTIDEKNEIAHKVLKECVWNGETLFLRL

SEQ ID NO: 4331 - protein, 521 aa, Unknown
  Description of Unknown: Integrase B4332 sequence
  PTHR30461:SF3,cd09865,IPR036162,PS51737,IPR011109, PTHR30461,PF00239,G3DSA:1.10.10.2600,IPR006119,SSF53041, cd00338,SM00857,IPR025827,IPR038109, PS51736,PF13408,G3DSA:3.40.50.1390,PF07508,Coil
MPVVTKIPARLHPATFVPLESTAKRKVAGYARVSTDSEEQQTSYAAQVSYYTDYIQKRLDWDFVGVYTDEGISATNTRHRDGFNRMIADALDGKIDLIVTKSVSRFARNTVDSLTTVRKLKEKGVEVYFEKENIYTLDSKGELLITIMSSLAQEESRSISENVTWGQRKRMADGKVSLPYGRFLGYRKGENGLPEIVPEEAEIVRFIYRSFMHGSTPHHIAETLTFKNILTPGGKEVWTTSTIESILTNEKYKGSALLQKKFTVDFLTKKTKINEGEVPQYYVEESHPAIIPPEEFELVQAEYLRRKRLGRKYNSKSIFTARLICECCGGYYGSKVWHSTSKYRRVIWQCNHKFQNGEKCTTPHLYEEHIKDKFILAMNQILENKDEIIENCLMLSEHFTVSDDTAIEAVTQEMDVVAELTRNLIQQNSVKPMKQELYKSEYEKLVQRYESLKAKRDALVSKKEAMESKLKFILHYAETLRGQDVIKEFSEDLWLKAIDHVTICKDGGMVFLFKDGTEIGV

SEQ ID NO: 4332 - protein, 521 aa, Unknown
  Description of Unknown: Integrase B4333 sequence
  PTHR30461:SF3,SM00857,G3DSA:1.10.10.2600,IPR036162,PF13408, PS51737,G3DSA:3.40.50.1390,IPR025827,IPR006119,IPR038109, PF07508,IPR011109,SSF53041,PTHR30461,Coil, PS51736,cd00338,PF00239
MENIIIYLRKSRSDDPALSVTDVLARHEQQLQEYAINTYNRQISEDHIFREVVSGETIADRPVMKQVIKLLETGTVDGVLVIEPQRLSRGDLEDCGKIVNTFRYTGTLVITPPKTYNLNDEYDRKFFEMELMRGNDYLEYTKKILNRGRIASVKQGNYIGSVAPYGYKKIKSGSGKDSYHTLEIVPEEADAIRLMYQLFVKEHYGFTKIARYLDDIGVKPRKTDHWSPAAIKDMLENPVYIGKIRWNYSKVQKTIINGQISKTRPRQKDTSQWIYVNGRHEAIIEEAIYNKALEMRGKNPCVRKNKELSNPFAGLLYCGTCGRAMSYKHFKQYRGKSENVCTSMLCNNQAICKTKSIKYDTFYKRVVESLEENVADFEIKLKQEESNGKQFQKDLICSLEAKLNKLKEKDFRQKDAYEDGLYTKEEYATRNAKLQEQISATMESLSKAKSNTPPVIDYRERISRFTDCLTALKDNTLSASEKNVLLKTCIDKIVYYNNMESKPGIGRYVDNVFQLDIFLLL

SEQ ID NO: 4333 - protein, 521 aa, Unknown
  Description of Unknown: Integrase B4334 sequence
  cd03768,PTHR30461:SF3,SM00857,IPR036162,PF13408, IPR025827,G3DSA:3.40.50.1390,IPR006119,PF07508,IPR011109, SSF53041,PTHR30461,PS51736,Coil,PF00239
MRIAIYARKSVFAENSDSVKNQERMAREYAALHFEGDHTFLLYMDEDYTGANTNRPGLKDFMRDVKAGIIDFLIVYQLDRLSRNVRDFSNIYAFMEDHSVGFVSVKENIDTSTPLGKAMMYVSVVFAQMERETISNRVADNMMGLAAAGWWFGGSAPRGYRRIKVTEFGKIHTTLELIPEEANEIRHLYDKFLELNASVQSFETYCKHNGIKALRGGYFSATQIYTILSSPFYTFATPEVWDYYKSRGCIMTDKRERWDGKTGIVIYGRTTERKGKHSKQPPNKWRVSVGRHIPFIPAEIWLATQSQFTHNSFSKKMVHPTTLLKGTIRCKCGCLMGLARRHRKDGLSTWYICPKADRQGKTVCNTSQIKAEIIDEKALSVFRQIEHDPKQIKKYFSELAAPEDKSAQLAKLTREISHTEERIKNLSEILSNNNESRAAKYMISEIEALDADLADKNKQMASLQAQSLLQVDIERQAREKQKEITRLIRNFEELTIDEKNEIAHKVLKECVWNGETLFLRL

SEQ ID NO: 4334 - protein, 521 aa, Unknown
  Description of Unknown: Integrase B4335 sequence
  cd00338,SM00857,G3DSA:1.10.10.2600,IPR036162, PS51737,G3DSA:3.40.50.1390,IPR006119,IPR038109, PF07508,IPR011109,SSF53041,PTHR30461, PS51736,Coil,PF00239
MPRQTKKLQTKATKGVIWARVSSREQEDGYSLDAQIENSKKYAERIGIEIIKTFEVTESSTHGDRKQFHDMINWVKRQKQSIAIICDKIDRLQRRVSEVPILEELRKEGKIELHFSRENRVIKKDTNGSDLACYRMIVVMAENYTDCIADNVKRSFNQMRKEGKWAHKAPVGYKNVKDSKGNSDIIVDPDRGFLITALFKEYASGIYTLEQITKKAREIGFTMPKCKKLYKQTIRNILTNRFYAGEMYGKGDYYAHQYKTLIDWKTFNRCQEILEGRINHKEQKHEHLFKGIMKCQKCGAMISPYISIHPAKKKGGEKIAYKYLFCPKCKGTHVNEAKGVEKIIQALNVLKTLPRGVLEKMVACLDDLIYEDHKIEIERKKALERKLASFNDKEARWHELYAEASITRDFHSKKLTELSKEKRAIEEELLNYQHIAKQDFVTLKYLASLFLHADQIWNFPKIEQKQKILKLLCSEILLDGKNIVISIRKPISALAEIGSCQIWQGRQDSNPRHSVLETENQ

SEQ ID NO: 4335 - protein, 521 aa, Unknown
  Description of Unknown: Integrase B4336 sequence
  SM00857,G3DSA:1.10.10.2600,IPR036162,PF13408,PS51737, G3DSA:3.40.50.1390,IPR025827,IPR006119,IPR038109,PF07508, IPR011109,SSF53041,PF00239,PTHR30461,PS51736, Coil,cd00338
MNTLERDCIYLRKSRADREAEARGEEETLARHERILLDLAKRRGCHIGAIYREVVSGETISARPVMQRLLQEVESGMWDGVLVVEVERLARGDSIDQGVVARAFQYSDTKIITPAKTYDPNNEFDEEYFEFGLFMSRREYKTIKRRLNAGRLSSVQEGKYCGNKPPYGYERVKLQGKGFSLRPVPAQAQIVRLMYNWYAYGVSGERLGMQKIARKLNEMGIPTLSGKPWSPATVVNILDNPVYTGKIRWNRRKAVNKIEDGAVVKTRPRSNDYIISDGLHEPIISQELYDLAQCYRQQNPPRPIGVMNAVKNPLSGLVHCGKCGHSMVRRPYANRKQEDTLLCPYTSCDNVSSRLSLVEKAVIAGLAELVQSYKVNDTLNDNNGVDIIAAKEKILVEKRAELDNLTAQKTRQYDLLEQGVYTTEIFLERSGATAKQIRDCSAAIERISSELDHDRELLAQKFNFIPKCEHLLSNYWDWDIPTRNSVLKELIERIDYTKDSKNGFKHGDEITFTLDIYPKIQ

SEQ ID NO: 4336 - protein, 521 aa, Unknown
  Description of Unknown: Integrase B4337 sequence
  PTHR30461:SF3,SM00857,G3DSA:1.10.10.2600,IPR036162,PF13408, PS51737,G3DSA:3.40.50.1390,IPR025827,IPR006119,IPR038109, PF07508,SSF53041,IPR011109,PTHR30461,Coil, PS51736,cd00338,PF00239
MGNVMVIPAKRKIGNTNRKKDTKPKLRVAAYCRVSTDSDEQATSYEAQVEHYTEYIKRNPDWEFAGIYADDGISGTNTKNREEFNRLIKDCETGTIDMIITKSISRFARNTLDCLKYIRRLKEKNIPVFFEKESINTMDAKGEVLITIMASLAQQESQSLSQNVKLGLQFRYQNGQVQINHNRFLGYTKDENGNLVIDPEQAEVVKRIYREYLNGYSMDKIASGLEADGILTGAGKKKWWTSTINKILRNEKYIGDALLQKTYTTDFLNKTRVKNNGIVPQYYVEDDHEAIIPKEIFMMVQEELARRKVVKTSANGKKRSYSSNHCLSQKIICGECDEMYRRIHWYSHGRKTVVWRCISRLESTGVECHARTIHEKDLQEIVVIALNELLGNKSKYQKLLQQNIATVIRASAEETTKEIDKKLIELQKELVKKANDKDSYDKIAEQIFELRDKRQQFTMDTAQRDEQLKRITELQDFIKSQTTDLKEFDETLVVRWLKQITIYPDHCTVELKSGLKVDVEK

SEQ ID NO: 4337 - protein, 521 aa, Unknown
  Description of Unknown: Integrase B4338 sequence
  cd03768,PTHR30461:SF3,SM00857,IPR036162,G3DSA:3.40.50.1390, IPR006119,PF07508,IPR011109,SSF53041,PTHR30461, PS51736,Coil,PF00239
MRIAIYARKSVFAENSDSVKNQERMAREYAALHFEGEHTFLLYMDEDYTGANTNRPGLKDFMRDVKAGIIDFLIVYQLDRLSRNVRDFSNIYAFMEDHSVGFVSVKENIDTSTPLGKAMMYVSVVFAQMERETISNRVADNMMGLAAAGWWFGGSAPRGYRRIKVTEFGKIHTTLELIPEEANEIRHLYDKFLELNASVQSFETYCKHNGIKALRGGYFSASQIYTILSSPFYTFATPEVWDYYKSRGCIMTDKRERWDGKTGIVIYGRTTERKGKHSKQPPNKWRVSVGRHIPFIPAEIWLATQSQFTHNSFSKKMVHPTTLLKGTIRCKCGCLMGLARRPRKDGLSTWYICPKSDRQGKTVCNTSQIKAEIIDEKALSVFRQIEHDPKQIKKYFSELAAPSDKSAQLAKLTREISHTEERIKNLSEILSNNNESRAAKYMISEIEALDADLADKNKQMASLQAQSLLQVDIERQAREKQKEITRLIRNFEELTIDEKNEIAHKVLKECVWNGETLFLRL

SEQ ID NO: 4338 - protein, 521 aa, Unknown
  Description of Unknown: Integrase B4339 sequence
  PTHR30461:SF3,SM00857,G3DSA:1.10.10.2600,IPR036162, PF13408,IPR025827,PS51737,G3DSA:3.40.50.1390, IPR006119,IPR038109,PF07508,SSF53041, IPR011109,PTHR30461,cd00338,PF00239
MPASKNTARKYAAGGGSDNSCGVEPLRAVIYARYSSSGQREESIEGQLRDCYEFAKKHGIIVIGEYIDKAMTGRVDRRPDFQRMMKDSEKGRFNCVLLWKMDRFARNRYDSAMYKYKLKKNGIRIFYAKETIPDGPEGIILESVMEGYAEYYSENLAQNVKRGNYDSALELKTLGKTCLGLKTGPDGRYMIDQAEAAIVRRIFEEYAEGERAKDIYERLNSEGYRTSRGGKFNKNSLRRILSNKKYIGVYEYEDIYVENGIPAIITDRDLFERVQKMLKINHDAPARGKAQNFLLTTKLFCGLCGSPMIGDGGTSHTGKAYAYYSCTKRKRGRSCKKESVPKDWIEDLVVGELVKIVHNDELIEQIADRVMEYQKREKDQSGLHALEIRQKENEKAISNMLAAIEAGIITPSTKTRLMELEADRADIEKGIAHELLAEPEFERDQIIYFLERFRSGDINDEAYRIMLVDTFLNSVYLYDDDHLVLVMNYSGENCKVDLKLVEGAVSGDGCKGSAFAPSSAL

SEQ ID NO: 4339 - protein, 521 aa, Unknown
  Description of Unknown: Integrase B4340 sequence
  cd03768,PTHR30461:SF3,SM00857,IPR036162,PF13408, IPR025827,G3DSA:3.40.50.1390,IPR006119,PF07508,IPR011109, SSF53041,PTHR30461,PS51736,Coil,PF00239
MRIAIYARKSVFAENSDSVKNQERMAREYAALHFEGDHTFLLYMDEDYTGANTNRPGLKDFMRDVKAGIIDFLIVYQLDRLSRNVRDFSNIYAFMEDHSVGFVSVKENIDTSTPLGKAMMYVSVVFAQMERETISNRVADNMMGLAAAGWWFGGSAPRGYRRVKVTEFGKIHTTLELIPEEANEIRHLYDKFLELNASVQSFETYCKHNGIKARRGGYFSATQIYTILSSPFYTFATPEVWDYYKSRGCIMTDKRERWDGKTGIVIYGRTTERKGKHSKQPPNKWRVSVGRHIPFIPAEIWLATQSQFTHNSFSKKMVHPTTLLKGTIRCKCGCLMGLARRHRKDGLSTWYICPKADRQGKTVCNTSQIKAEIIDEKALSVFRQIEHDPKQIKKYFSELAAPEDKSAQLAKLTREIFHTEERIKNLSEILSNNNESRAAKYMISEIEALDADLADKNKQMASLQAQSLLQVDIERQAREKQKEITRLIRNFEELTIDEKNEIAHKVLKECVWNGETLFLRL

SEQ ID NO: 4340 - protein, 521 aa, Unknown
  Description of Unknown: Integrase B4341 sequence
  PTHR30461:SF3,cd00338,SM00857,G3DSA:1.10.10.2600,IPR036162, PF13408,PS51737,IPR025827,G3DSA:3.40.50.1390,IPR006119, IPR038109,PF07508,SSF53041,IPR011109, PTHR30461,PS51736,Coil,PF00239
MSTNRAVIYARYSSNKQTEQSIEGQLRDCYSYAEKHDITIIGEYIDRALSAKTDNRPEFQRMIKDSANGAFNIIIVWKLDRFSRNRYDSAAYKVKLKKNGVKIISAMENISDNPEGILVESLLEGIAEYYSADLSEKVNRGMRETALKCHSTGAPVPLGYKIEDKKYIVNEIESPVVKKIFTMYADGFSAKDICDYLNEHGFKTRRGGQFNKNSLRTMLTNRKYIGIYKYKDIEIPGGIPQIIDNELFEKVGKMMIKNKRNAAASKPKEKYLLSGKVICGLCGDKMNGESGKNKSGRVYRYYKCGKQKRNKNDCPKHTIDKYYLEDTVINAVRSIVCNDKIIDRIAKKAVEAQMYDDTPQIINSLEQKLSETEKQIENILKAIESGIFTISVKDRLLELEKTKDILKSEIIKEKNDNPFLDYDTIKFILSQYSNGDFKDEKFRQKLVDVLIYKVIVFDDKIYILYNFSKDDNTKDRYEDIIKLIEKSTAAQNGSPNQLTFEQLFFIDTRLFCQIICMLKNN

SEQ ID NO: 4341 - protein, 521 aa, Unknown
  Description of Unknown: Integrase B4342 sequence
  PTHR30461:SF3,SM00857,G3DSA:1.10.10.2600,IPR036162,PF13408, IPR025827,PS51737,G3DSA:3.40.50.1390,IPR006119,IPR038109, PF07508,SSF53041,IPR011109,PTHR30461,Coil, PS51736,cd00338,PF00239
MGNVMVIPAKRQIGNTGRKQDAKPKLRVAAYCRVSTDSDEQATSYEAQVEHYTEYIKKNPEWEFAGIYADDGISGTNTKNREEFNRMIEDCEAGTIDMIITKSISRFARNTLDCLKYIRQLKEKNIPVFFEKEAINTMDAKGEVLLTIMASLAQQESQSLSQNVKLGLQFRYQNGQVQVNHNRFLGYTKDEDGNLVIDPEQAEVVKRIYREYLEGYSMDKIAAGLEADGILTGAGKPRWHTSTINKILRNEKYIGDALLQKTYTTDFLNKTRVKNTGIVPQYYVEGNHEAIIPREIYMRVQEELVRRRVVKTSANGKKRSYSCNHCFSQIIICGDCGEMFRRIHWNNRGCKSIVWRCISKLEPTGLECHARTINELDLQEIVLTALNELLGDKSKYQKQLQQNIASVIRASAAITTDGIDEKLMELQQELVKKANNKEAYDEIADQIFALREKRQQASMDTVQRDEQLQRITELQDFIKEQPSDLTTFDEALVKRWLKQITIWDDHCTVELKSGLMVDVER

SEQ ID NO: 4342 - protein, 521 aa, Unknown
  Description of Unknown: Integrase B4343 sequence
  IPR036162,PS51737,IPR011109,PTHR30461,PF00239, G3DSA:1.10.10.2600,IPR006119,SSF53041,cd00338,SM00857, IPR025827,IPR038109,mobidb-lite,PS51736,PF13408, PS50007,G3DSA:3.40.50.1390,PF07508,Coil
MSNITIIPARPQRANSQQNETEKPKLRVAAYCRVSTDSDEQATSYEAQVSHYTEQITRNPEWAFAGIYADDGISGTNTKKREEFNRMIADCMDGKIDMIITKSISRFARNTLDCLKYIRQLKDRNIPVFFEKENINTLDAKGEVLLTIMASLAQQESQSLSQNVKLGLQFRYQRGEVQVNHSRFLGYTKDENGRLVIDPEQAEVVRRIYREYLDGYSTDKIAAGLERDGILTGAGNPRWHTSTVAKILRNEKYMGDALLQKTYTVDYLSKKRIKNNGIMPQYYVENDHEAIIPKDIFMRVQDELVRRRLVKVSPNGRKHGFSSNHVFSQMIVCGECGELFRRVHWNNHGCRSIVWRCLSRLQPTGVICHARTVSEEVLKNVVVQAFNELLGSRSTYQKRLRDNLAVVLRGYEDEQALEIDKRLAELQQELINYASRKEDYNDIADEIFRLREMKQKNFTDTAVRDEQVKRINELNEFIEQQDSEMTEFDESLARRWLKEIVVWDDRFSVELKSGIVVEIEL

SEQ ID NO: 4343 - protein, 521 aa, Unknown
  Description of Unknown: Integrase B4344 sequence
  PTHR30461:SF3,SM00857,G3DSA:1.10.10.2600,IPR036162,PF13408, IPR025827,G3DSA:3.40.50.1390,PS51737,IPR006119,IPR038109, PF07508,IPR011109,SSF53041,PTHR30461,PS51736, cd00338,PF00239
MKTVTKIEANQRTTGSEKKLRVAAYCRVSTDSDDQLESLAEQKKHYETYIQAHENWNFAGLYYDEGISGTKKEKRSELMRLLSDCEAGQIDFIITKSISRFARNTTDCLEMVRQLLAVNVAIYFEKENINTTSMESELVLAVLSSLAENESVSISGNEKWSIRQRFQSGTYKMNPPPYGYRWNGEQLEVNNDQAEIVKRIFAEFLSGKGVMHIARGLDSDKIAPAHGKQWCQSSILRILKNENYTGNAVFQKTFTDESFRRCVNYGQLDKYLVADHHEGIISKEDFDVVAALIDRHSVEKNITKGSHKYQLRYCFSGKIVCGECGATLKHRTHRLGGETYEAWCCSTHIYNKESCSMKFIRDDDIKLAFVTMMNKLVFGHKLILKPYLLTLRSSPTDSSIQRIQQLRLLIEQNTGQQETLTRLMANGFIDRALFGRELNAIMAQTDEYRAEIDTLSSSVTGDGAKLKETERLIKLVERGRMFMEFDADLFSKLVDRICAFSRNEIGFVLKCGLTLRERIGE

SEQ ID NO: 4344 - protein, 521 aa, Unknown
  Description of Unknown: Integrase B4345 sequence
  cd03768,PTHR30461:SF3,SM00857,G3DSA:1.10.10.2600,IPR036162, PF13408,IPR025827,G3DSA:3.40.50.1390,PS51737,IPR006119, IPR038109,PF07508,IPR011109,SSF53041,PTHR30461, PS51736,Coil,PF00239
MIAIYARQSIEKKDSVSIETQIEKCKYYCENQDYKIYKDAGYSGKNINRPQFSKLLEDIKSGIITRVIAYRLDRISRSIADFSQLLIMFDKYNVDFISATENFDTNTPMGRAMINIVMTFAQLERETIVERVTDNYYFRANNGYWAGGYAPYGYSIEHVIGSDGKRHSILIENKNESEIVKKIYDMYTKQNISMRKIAQQLNLKNIPTKKGDSNWGINAVNSILSRPIYTEATTKIYDYFNKCGTCITNNIDAFDGKKTANLYGNAKKNTNVKALRNYDEMFLSLINCVPVISNEDWFRAQNIKGTKKNLAPRSNSSKISFLCGLVKCGKCSSNMVTQGCKNKHGIQYYYLICSTKKNLGRIKCDNKMIDISKLEDIVINDIKKHFNSNEIETKIEKHMKNNKKENINLLKQKEEFENQIIKIDIQIQNLINSIAEGNITISKYINQKIENLEKEKQNISSQLSTIIEKNNITDDNYLIEYVKNINEKINTTDFEQLKLLCHTIIDKIVITDKNIDIHYKI

SEQ ID NO: 4345 - protein, 521 aa, Unknown
  Description of Unknown: Integrase B4346 sequence
  SM00857,IPR036162,PF13408,IPR025827,G3DSA:3.40.50.1390, IPR006119,SSF53041,PTHR30461,cd00338,PF00239
MKVPVWCYARISTLKQIDGFGIQRQINTINQFLQCVELDHRLPFTLDVDNVTQMVAEGKSAFRDKNWNEKTKLGQYRKMVMDGVISDSVLIVENIDRLTRLDPYMAIEIISGLVNRGTTILEIETGMTYSRYIPESITVLVMQCNRANGESKRKSIMMQKSHANRYGKVSKVRPRWFDVVEIDGIKQYRPNETAKAIQRMYNDYINGIGAAHIVRTYGNTDNGKAWTLVTVLRALSDKRVADDARYPPIIDKELYDSVQALKAATNKKGNTHQKNMLNIFSGMSRCPVCNQSIIVKRNSHGNLFTVCLGKRTNKTCEARSISYFALERPLLTAIRGLDFSEVYKHEDKNVLTLRDQWIQNERDIAAFRERLSKASRYEKFVILDELETMNREQEELTIRLKSVDVPKDIQLTFDDDKLDLDTNYRIELNNRIKKLIQHINIVREDVTKSSYTIYCTIKYWTDVISHLVIIDVNIKRTGTGGTNTLTTTLRSVSSLNMDGTVSGNPDSDAWEYWKSFLDNLK

SEQ ID NO: 4346 - protein, 521 aa, Unknown
  Description of Unknown: Integrase B4347 sequence
  cd00338,SM00857,G3DSA:1.10.10.2600,IPR036162, PF13408,IPR025827,PS51737,G3DSA:3.40.50.1390, IPR006119,IPR038109,PF07508,IPR011109, SSF53041,PTHR30461,PS51736,Coil,PF00239
MNSDNQMSERTNAVIYARYSSHSQGEQSIEGQLEKAYSYASSKGYRIVHEYIDRAQSGRTDKRDEFQQMLKDTAKKQFQVIIIWKVDRFGRNREEIALNKIKCKRNGVRVEYVAENIPDSPEGVILESVLEGIAEYYSLQLSQNVRRGQAISVQKCQSVGGVRPLGYITDENKRYAIDPKTSPTVKLIFELYSKGGTVTEIIKRLNKEGLTTAKGKPFTKNSLYSVLNNEKYTGIYIHNGVRIDGGMPQIIEPELFQKVQELMKVNRRAPSHKWSRADYILTDKLFCGKCGSPMVGECGTGKSGMTYNYYICSKRKRFRACDKKAVRQDWIEGIVLREIKAILENDELLKYIAANTYRYYMQQNAAEEELQIIRGKLEEVDSAINNIVKAIEAGMFNPALKKRMDELEDQRENLLTASADIEITQVFKLTEEHILFFLRQFKKADFENIDCQKRLIATFVNSIYLYDDKIVITFNYSGNNHTVSLAEVDNATEGDLFGCCASLSAKKCRYPFGYLHFLLQS

SEQ ID NO: 4347 - protein, 521 aa, Unknown
  Description of Unknown: Integrase B4348 sequence
  SM00857,G3DSA:1.10.10.2600,IPR036162,PF13408,PS51737, G3DSA:3.40.50.1390,IPR025827,IPR006119,IPR038109,PF07508, IPR011109,SSF53041,PF00239,PTHR30461,PS51736, Coil,cd00338
MKNGNYAMYLRKSRADREAEARGEMETLARHEKLLFETAKRMQITVSAVYKEIVSGETISARPVMQKLLAEIEQGIWDGVLVVEVERLARGDTIDQGIVSQAFKLSDTKIITPVKVYDPNNEFDEEYFEFGLFMSRREYNTIKRRLQRGRLASVREGKYVGNRPPYGYERVKIPNDKGFTLSPLPEQAKIVKYVYDLYAYGLDGEEMGTAKIVRKLNDLQIPTQSGGKWIPPTIRDMLYNPVYIGKLRWNRRAATKKVCDGKITYSRPTSKEYEICDGLHPAIIDLETFKICQKKLSKNQSRPVSLNKTIKNPLGGLVICSKCGHRMVRRPYSKTGQRSTLICPYTHCDNVSSPLEDVETMVLEAIADIVKNERIEPTTSVIPSDTIDILKDALKNQETSLETLQKQQNSLYDLLEQGIYTTDVFLERSNTLKDQINTASASIQDLKRKISAEQNRLKVQADFIPKCEYLLDVYDTLDAPEKNRILKELIDHIDYLKEEKNVPFTKKDAKVFIHVYPKTPE

SEQ ID NO: 4348 - protein, 521 aa, Unknown
  Description of Unknown: Integrase B4349 sequence
  PTHR30461:SF3,cd00338,SM00857,G3DSA:1.10.10.2600,IPR036162, PF13408,PS51737,G3DSA:3.40.50.1390,IPR025827,IPR006119, IPR038109,PF07508,SSF53041,IPR011109,PTHR30461, PS51736,Coil,PF00239
MPKNKIMTPNRNGKIAVVYARYSSHNQGEQSIEGQLEAAHAAALSRGYTIVHEYIDRAVSGRTDNREQFQQMLADTAKRQFDVILVWKVDRFGRNREEIAQNKYRCRKNGVRVEYVAETIPDSPEGVILESVLEGFAEYYSLQLSQNVLRGMRVSAEKCQAVGGGCPLGYKVGPDKKYIIDPDTAPTVKLIFKLYAEGQTAPEIVRVLNGKGLRTKRGTAFSKNSLFSVLRNEKYRGIYIFKDIRIEGGMPRMIDDVTFFKVQDLLKVNKRAPAHKWSKAEYLLTDKLFCGKCGSPMAGESGTGRSGRKYNYYLCSKKKQYKTCDKRAVRKDEIENIVINHALALLGDDELLNYIADAVYNYYLAKDESDADLKALESKLKRTETAIANLIRALEAGIFNADTKQRMDELQADKEQLTAAIAETKIMCDYKITREQILYFLRSLRDKDYTDRECQKRLIKTFINSVFVYDDKIVINFNYSGERSAVTVDDVDSVFASLAGTAEDSEQVFVRCARWTTILVQ

SEQ ID NO: 4349 - protein, 521 aa, Unknown
  Description of Unknown: Integrase B4350 sequence
  PTHR30461:SF3,cd00338,SM00857,G3DSA:1.10.10.2600,IPR036162, PS51737,G3DSA:3.40.50.1390,IPR006119,IPR038109,PF07508, IPR011109,SSF53041,PTHR30461,PS51736,Coil, PF00239
MAEFENVIIYLRKSRSDDPMQTVEDVLAKHESILQDYSIKQWGKPVPENRIFREVVSGETIQDRPVMQQIMKLLETGFISGVLIIEPQRLSRGDLQDCGRIINSFRYTNTVVITPPKTYNLSDEYDRKFFEMELTRGNDYLEYTKKILNRGRIASIKAGNYIGNIAPYGYRKVVIGTGKDKYHTLDIEPKEAEAVRIMFNLYVNKDYGFTNIAHFLDNAGYKPRNSDNWSPAAISSMLNNEIYIGRVVWNRRQTVKKMQDGMIVRTRPRHNDYISVPGKHPAIISEELFYAAKKKRGRTPKVKKFTELTNPLAGLLFCGRCGFAISMKKYTDKRSKTGHETITMLCNNQSNCHTKSVMYSLIIAKVKLSLQQAINDFEVHINNNDDSEQILQQNIINNLTEELEHLKEKDIRQKDAYEDGIYSKEEFLKRNAKLTEQISIAQEKLNNALLEEPRVCDYEEKIVRFRDCLNTLDDDNVSATVKNTLLKACIDKILYYNDSPSLPGIGRYVDNPFRLEIFLKL

SEQ ID NO: 4350 - protein, 521 aa, Unknown
  Description of Unknown: Integrase B4351 sequence
  SM00857,G3DSA:1.10.10.2600,IPR036162,PF13408,IPR025827, G3DSA:3.40.50.1390,PS51737,IPR006119,IPR038109,PF07508, SSF53041,IPR011109,PTHR30461,Coil,PS51736, cd00338,PF00239
MPYCMYLRKSRKDFEAESAGQGETLARHKAALLETAQRLHLAVSEIYQEIVSGDSIAARPEMQRLLADVETGKWDGVLVMEVERLARGDTMDQGQVQRTFVYTGTKIITPTRTYDPSDPADAEYFEFGLFMSRREYQTINRRLLAGRERAVREGKWPQGHAPYGYRAVKVPKGKGYMLEVVPKEAEIVKSIFNWYVNGAEYNGAFLRVGARRISTMLNSMGLTTQAGNLWSAPAVRVILKNHAYIGKVTWYKQTLRKSMSNGAVVKKLERTPERTLICDGLHEAIISEELFEAAQARLSADSTGPATKGPLQSPLAGLLYCGLCGCVMARQHEKGKPAYYVCRNPLCRCRGSKLEVVEQRVVATLAHWLAGYEITAKAQAQTVDIGALQSALDGAQRELLAYQQQQTRLYDLLERGIYTEQVFLQRQAAITGEVQRLQTAVADTEAAIAKAVRINASARDIVPAVHAVLDAYPTYTTAQEKNDALRMVLSRVEYTRTVGGFGSDPQDFEVKIFPRLPEPVE

SEQ ID NO: 4351 - protein, 521 aa, Unknown
  Description of Unknown: Integrase B4352 sequence
  SM00857,G3DSA:1.10.10.2600,IPR036162,PF13408,PS51737, IPR025827,G3DSA:3.40.50.1390,IPR006119,IPR038109,PF07508, IPR011109,SSF53041,PTHR30461,Coil,PS51736, cd00338,PF00239
MPYCMYLRKSRKDFEAESAGRGETLARHKAALLETAQRLRLAVSEIYQEIVSGDSIAARPEMQRLLADVETGKWDGVLVMEVERLARGDTMDQGQVQRTFVYTGTKIITPTRTYDPSDPADAEYFEFGLFMSRREYQTINRRLLAGRERAVREGKWPQGHAPYGYRAVKMPKGKGYMLEVVPEEAEIVKSIFNWYVNGAEYNGAFMRVGARRISTMLNSMGLTTQAGNLWSAPAVRVILKNHAYIGKVTWYKQTLRKSMSNGAVVKKLERTPERTLICDGLHEAIISEELFEAAQARLSADSTGPATKGPLQSPLAGLLYCGLCGHVMARQHEKGKPAYYVCRNPLCRCRGSKLEVVEQRVVATLARWLAGYEITAKAQAQTVDIGALQSALDGAQRELLAYQQQQTRLYDLLERGIYTEQVFLQRQSAITGEVQRLQAAVADTEAAIAKAVRINASAREIVPAVHAVLDAYPTYTTAQEKNDALRMVLSRVEYTRTVGGFGSDPQDFEVKIFPRLPEPVE

SEQ ID NO: 4352 - protein, 521 aa, Unknown
  Description of Unknown: Integrase B4353 sequence
  SM00857,G3DSA:1.10.10.2600,IPR036162,PF13408,PS51737, G3DSA:3.40.50.1390,IPR025827,IPR006119,IPR038109,PF07508, SSF53041,IPR011109,PTHR30461,Coil,PS51736, cd00338,PF00239
MSKHKLAVVYARYSSHRQGEQSIEGQLAAARDYATANGLTIIREYVDRAATGRNDNRTAFQEMLKDTSKNQFGTIILWKIDRFGRNREEIAFNKYRCKKNGVKVVYVAESIPDSPEGVILESVLEGMAEYYSLQLSQNILRGQRASAEKCQSTGGNRPLGYLTGADKKFIIDPDTAPTVRLIFDMYAKGNTCTEITKFLNEKGLRTLRGGKFNKNSLRSILKNEKYIGVYKYKNEIRIENGVPAIVDKDTFYKVQDMLKINKRAPAHKWSKSDYILTDKIFCGKCGSKMVGESGTSKTGKKHNYYVCTKKKRQQTCNKKTVKQQYIEDVVISHVHMILQDDELLSFIADSVYAYYIEQNKENNYLESLNKKLSQVNQAISNVMKAIESGIINDITKQRLDELDIQRTEISTEIADLEHAKSLQLTRDQILFFLCCFRNEDIEDRECCKRLIDTFVNAIFVYDDKIIGTFNYSGDKNTVTLAEINDAETLGKVFVHCAQCSTTIKNPNPMPVGHGFGFIILC

SEQ ID NO: 4353 - protein, 521 aa, Unknown
  Description of Unknown: Integrase B4354 sequence
  cd00338,SM00857,G3DSA:1.10.10.2600,IPR036162,PF13408, PS51737,G3DSA:3.40.50.1390,IPR025827,IPR006119,IPR038109, PF07508,IPR011109,SSF53041,PTHR30461,PS51736, Coil,PF00239
MKNGNYAMYLRKSRADREAEARGEMETLARHEKLLFETAKRMQITVSAVYKEIVSGETISARPVMQKLLVEIEQGIWDGVLVVEVERLARGDTIDQGIVSQAFKLSDTKIITPVKVYDPNNEFDEEYFEFGLFMSRREYNTIKRRLQRGRLASVREGKYVGNRPPYGYERVKIPNDKGFTLSPLPEQAKIVKYVYDLYAYGLDGEEMGTAKIVRKLNDLQIPTQSGGKWIPPTIRDMLYNPVYIGKLRWNRRAATKKVCDGKITYSRPTSKEYEICDGLHPAIIDLETFKICQKKLSKNQSRPISLNKTIKNPLGGLVICSKCGHRMVRRPYSKTGQRSTLICPYTHCDNVSSPLEDVETMVLEAIADIVKNERIEPTTSVIPSDTIDILKDALKNQETSLETLQKQQNSLYDLLEQGIYTTDVFLERSNTLKDQINTASASIQDLKRKISAEQNRLKVQADFIPKCEYLLDVYDTLDAPEKNRILKELIDHIDYLKEEKNVPFTKKDAKVFIHVYPKTPE

SEQ ID NO: 4354 - protein, 521 aa, Unknown
  Description of Unknown: Integrase B4355 sequence
  cd00338,SM00857,G3DSA:1.10.10.2600,IPR036162,PF13408, IPR025827,PS51737,G3DSA:3.40.50.1390,IPR006119,IPR038109, PF07508,SSF53041,IPR011109,PTHR30461,PS51736, Coil,PF00239
MPYCMYLRKSRKDFEAESAGQGETLARHKAALLETAQRLHLAVSEIYQEIVSGDSIAARPEMQRLLADVETGKWDGVLVMEVERLARGDTMDQGQVQRTFVYTGTKIITPTRTYDPSDPADAEYFEFGLFMSRREYQTINRRLLAGRERAVREGKWPQGHAPYGYRAVKVPKGKGYMLEIVPEEAEIVKSIFNWYVNGAEYNGAFLRVGARRISTMLNSMGLTTQAGNLWSAPAVRVILKNHAYIGKVTWYKQTLRKSMSNGVVVKKLERTPERTLICDGLHEAIISDELFEAAQARLSADSTGPATKGPLQSPLAGLLYCGLCGCVMARQHEKGKPAYYVCRNPLCRCRGSKLEVVEQRVVATLAHWLTGYEITAKAQAQTVDIGALQSALDGAQRELLAYQQQQTRLYDLLERGIYTEQVFLQRQAAITGEVQRLQAAVADTEAAIAKAVRINASAREIVPAVHAVLDAYPAYTTAQEKNDALRMVLSRVEYTRTVGGFGSDPQDFEVKIFPRLPEPVE

SEQ ID NO: 4355 - protein, 521 aa, Unknown
  Description of Unknown: Integrase B4356 sequence
  SM00857,G3DSA:1.10.10.2600,IPR036162,PF13408,PS51737, G3DSA:3.40.50.1390,IPR025827,IPR006119,IPR038109,PF07508, IPR011109,SSF53041,PTHR30461,Coil,PS51736, cd00338,PF00239
MPYCMYLRKSRKDFEAESAGQGETLARHKAALLETAQRLHLAVSEIYQEIVSGDSIAARPEMQRLLADVETGKWDGVLVMEVERLARGDTMDQGQVQRTFVYTGTKIITPTRTYDPSDPADAEYFEFGLFMSRREYQTINRRLLAGRERAVREGKWPQGHAPYGYRAVKVPKGKGYMLEIVPEEAEIVKSIFNWYVNGAEYNGAFLRVGARRISTMLNSMGLTTQAGNLWSAPAVRVILKNHAYIGKVTWYKQTLRKSMSNGAVVKKLERTPERTLICDGLHEAIISEELFEAAQARLSADSTGPATKGPLQSPLAGLLYCGLCGCVMARQHEKGKPAYYVCRNPLCRCRGSKLEVVEQRVVATLAHWLTGYEITAKAQAQTVDIGALQSALDGAQRELLAYQQQQTRLYDLLERGIYTEQLFLQRQAAITGEVQRLQAAVADTEAAIAKAVRINASAREIVPAVHAVLDAYPTYTTAQEKNDALRMVLSRVEYTRIVGGFGSDPQDFEVKIFPRLPEPVE

SEQ ID NO: 4356 - protein, 521 aa, Unknown
  Description of Unknown: Integrase B4357 sequence
  PTHR30461:SF3,SM00857,G3DSA:1.10.10.2600,IPR036162,PF13408, IPR025827,PS51737,G3DSA:3.40.50.1390,IPR006119,IPR038109, PF07508,IPR011109,SSF53041,PTHR30461,PS51736, cd00338,PF00239
MKTVTKIESNQRTAGSEKKLRVAAYCRVSTGSDDQLESLAEQKKHYETYIQAHENWDFAGLYYDEGISGTKKEKRSELMRLLSDCEAGQIDFIITKSISRFARNTTDCLEMVRKLLAINVAIYFEKENINTTSMESELVLAVLSSLAENESVSISGNEKWSIRQRFQSGTYKMNPPPYGYRWNGKRLEVNNEQAEIVKRIFAEFLSGKGVMHIARGLDSDKIAPARGKHWCQSSILRILKNENYTGNAVFQKTFTDESFRRCVNYGQLDKYLVADHHEGIISKEDFDVVAALIERHAVEKNVTKGSHKYQLRYCFSGKIVCGECGATLKHRTHRLGGETYEAWCCSTHIYNKESCSMKFIRDDDIKLAFVTMMNKLVFGHKLILKPYLLTLRSSSTDSSIQQIQQLRLLIEQNTGQQETLTRLMANGFIDRALFARELNAIMAQTDEYRTEIDTLSSSVTGDGAKLKETERLIRIVERGRMFTEFDADLFSKLVDRICAFSRNEIGFALKCGLTLRERIGE

SEQ ID NO: 4357 - protein, 521 aa, Unknown
  Description of Unknown: Integrase B4358 sequence
  IPR036162,PS51737,IPR011109,PTHR30461,PF00239, G3DSA:1.10.10.2600,IPR006119,SSF53041,cd00338,SM00857, IPR025827,IPR038109,PS51736,mobidb-lite,PF13408, PS50007,G3DSA:3.40.50.1390,PF07508,Coil
MSNITIIPARPQRANSQQNETEKPKLRVAAYCRVSTDSDEQATSYEAQVSHYTEQITRNPEWAFAGIYADDGISGTNTKKREEFNRMIADCMDGKIDMIITKSISRFARNTLDCLKYIRQLKERNIPVFFEKENINTLDAKGEVLLTIMASLAQQESQSLSQNVKLGLQFRYQRGEVQVNHSRFLGYTKDENGRLVIDPEQAEVVRRIYREYLDGYSTDKIATGLERDGILTGAGNPRWHTSTVAKILRNEKYMGDALLQKTYTVDYLSKKRIKNNGIMPQYYVENDHEAIIPKEIFMRVQDELVRRRLVKVSPNGRKHGFRSNHVFSQMIVCGECGELFRRVHWNNHGCRSIVWRCLSRLQPTCVICHARTVNEEVLKNVVVQAFNEMLGSRSTYQKRLRDNLATVLRGYEDEQALEIDKRLAELQQELINHASRKENYNDIADEIFRLREMKQKNFTDTAVRDEQVKRINELNEFIEQQDSELTEFDESLARRWLKEIVVWEDNCTVELKSGIKVEVER

SEQ ID NO: 4358 - protein, 521 aa, Unknown
  Description of Unknown: Integrase B4359 sequence
  PTHR30461:SF3,SM00857,G3DSA:1.10.10.2600,IPR036162,PF13408, IPR025827,PS51737,G3DSA:3.40.50.1390,IPR006119,IPR038109, PF07508,SSF53041,IPR011109,PTHR30461,Coil, PS51736,cd00338,PF00239
MHGAYILARYSTDRQNEDSIEVQVSACRKWCDERSLPVLDVFADEATSGMKGTRPEYARMMWQLEHGGADTVVIYDQSRMFRKLTAWFDFRDQLARLGVDVVSVTQPMIGGDLRDPANFLTEGSMALFNQMWVLQTRQKVVAKMRYMAEQGLYTGGTPPLGYKVVDGRLVIDAAEAETVRLIFGLYVSGMTYREIIRRLNAEGRHTKRGGNFGVNSLHDLLKNPKYVGDLIFGKVAKRPDGSRNSHAAAEDAIVVKGVLPAIVDRETWEKVQLKMQDNKRSTAGRPASAREYPLKGKVFCRECKSAMLVTASNRGAKRYYYYACAAKHRKGLCGNTPIPAGTLEALVADAVRQRLGQPESVDGLIRILREERSKLSGSAVRRLRELQKRDCEIAKQLDAAVNAVLGGLHSPTLAAKVNALEAERAKISHDMQQLRAQVSGAEIDEPRLRELLALAMQDEAAVLSIVVRVEVGKDEIAIWTLLDADPNGNFDFSEDGVQIASPDATLNYNNSGCRSTGTKPI

SEQ ID NO: 4359 - protein, 521 aa, Unknown
  Description of Unknown: Integrase B4360 sequence
  PTHR30461:SF3,SM00857,G3DSA:1.10.10.2600,IPR036162,PF13408, PS51737,G3DSA:3.40.50.1390,IPR025827,IPR006119,IPR038109, PF07508,IPR011109,SSF53041,PF00239,PTHR30461, PS51736,Coil,cd00338
MKKITKIDGVQNNSTVNKELRVAAYCRVSTGSDAQLESLEAQKTHYERYINSREDWKFAGLYFDEGITGTKAEKRPELLRLIADCEARKIDFVITKSISRFSRNTTDCLALVRKLQNLNIPIFFEKENINTGSMESELFLAILSSMAEGESASISENSKWSIKRRFQNGTYKLSYTPYGYDWDGENMIINPAQAAVVKRIFADILSGKSTNAIADELNAEKIPSKKNTNWTSSTIRGILANEKYTGDVIFQKTYTDENFNRHTNYGEVDQYMAQDHHEAIISHADFEAANALVSQRALEKGVKKGSDKYQKRYAFSGKIICGECGDTFKRRVHTCTTYKYVAWACNTHLKDKSTCHMKYVRDDDIKAAFVTMLNKLIYGHRLVLVPYLKTLENSSGDEALQRIQHLELLLDQNSEQRETLTKLMAQGYIDQILYNQEINALLLQAETYRSDIEAITICMTGDSAKVTETNLLLHFVSHANMLTNYSEELFESYADHIEITGRNEIKFVMKCGLTFTERIGD

SEQ ID NO: 4360 - protein, 521 aa, Unknown
  Description of Unknown: Integrase B4361 sequence
  PTHR30461:SF3,cd00338,SM00857,G3DSA:1.10.10.2600,IPR036162, PF13408,IPR025827,PS51737,G3DSA:3.40.50.1390,IPR006119, IPR038109,PF07508,SSF53041,IPR011109,PTHR30461, PS51736,Coil,PF00239
MNKSITVIPARRRVGNTVNKEVKPKLRVAAYCRVSTDSDEQATSYDAQVEHYSNFIQKNEEWEFAGIFADDGISGTNTKKREEFNRMISECMEGHIDMIITKSISRFARNTLDCLRYIRQLKEKNIPVFFEKENINTMDSKGEVLLTIMASLAQQESESLSKNVKMGMQFRFQKGEVQVNHNRFMGYTKDEDGHLIIEPAEAEIVKRIYREYLQGASLKQIGDGLMEDGILTGARKPKWRPESVKKILRNEKYIGDALLQKTYTVDVLTKKRVKNNGIVPQYYVENSHEPIIPRDLYMQVQEEMLRRSNLHSGANRKKRVYSSKYALSSIVYCSKCGEIYRRVAWNNHGKRSTVWRCVNRVEHGPDCCDAPTVKEEELQSVVVKAINMALGGKEDMLADLEENIAMVLALEDETSIESLDAKLEDLQQELLKRANARQDYEYLADEIDHLRERKQKVMADNAERDGTKQRIAEMQQFLAGQTEQIEEYDENLVRRMVEKITVYEEKFMVEFKSGTSVNVER

SEQ ID NO: 4361 - protein, 521 aa, Unknown
  Description of Unknown: Integrase B4362 sequence
  cd03768,PTHR30461:SF3,SM00857,IPR036162,PF13408, IPR025827,G3DSA:3.40.50.1390,IPR006119,PF07508,IPR011109, SSF53041,PTHR30461,PS51736,Coil,PF00239
MRIAIYARKSVFAENSDSVKNQERMAREYAALHFEGDHTFLLYMDEDYTGANTNRPGLKDFMRDVKAGIIDFLIVYQLDRLSRNVRDFSNIYAFMEDHSVGFVSVKENIDTSTPLGKAMMYVSVVFAQMERETISNRVADNMMGLAAAGWWFGGSAPRGYRRIKVTEFGKIHTTLELIPEEANEIRHLYDKFLELNASVQSFETYCKHNGIKARRGGYFSATQIYTILSSPFYTFATPEVWDYYKSRGCIMTDKRERWDGKTGIVIYGRTTERKGKHSKQPPNKWRVSVGRHIPFIPAEIWLATQSQFTHNSFSKKMVHPTTLLKGTIRCKCGCLMGLARRHRKDGLSTWYICPKADRQGKTVCNTSQIKAEIIDEKALSVFRQIEHDPKQIKKYFSELAAPEDKSAQLAKLTREISHTEERIKNLSEILSNNNESRAAKYMISEIEALDADLADKNKQMASLQAQSLLQVDIERQAREKQKEITRLIRNFEELTIDEKNEIAHKVLKECVWNGETLFLRL

SEQ ID NO: 4362 - protein, 521 aa, Unknown
  Description of Unknown: Integrase B4363 sequence
  PTHR30461:SF3,cd00338,SM00857,G3DSA:1.10.10.2600,IPR036162, PF13408,IPR025827,G3DSA:3.40.50.1390,PS51737,IPR006119, IPR038109,PF07508,SSF53041,IPR011109, PTHR30461,PS51736,Coil,PF00239
MKKVTKIEGAQNNITIKKKLRVAAYCRVSTGSDAQLESLEAQKTHYERYINSREDWQFAGLYFDEGITGTKAEKRPELLRLISDCEAKKIDFVITKSISRFSRNTTDCLALVRKLQSLDIPLFFEKENINTGSMESELFLAILSSMAEGESTSISENAKWSIKRRFQNGTFKLSYTPYGYDWNGENIVVNLEQAKIVKRIFADVLSGKGTQAIADELNADGIASKKNSKWTATTIRAILANEKYTGDVIFQKTYTDENFNRHINYGEVDQYMAPDHHEAIISHEDFDAANALVAQRASEKGIEKGNGKYQQRYAFSGKIICGECGDTFKRRIHPCTTYKYVAWTCNTHLKDTTACSMKYIRDDEIKAAFVTMLNKLIYGHRLILAPYLKALENSSGDEAIQRIQHLELLLAQNSEQRETLTKLMAQGYIDQILYNQETNALLLQAETYRSDIEAITICMTGDSAKVTETNLLLHFVSHADMLTAYSEELFESYADHIEVASRHEIRFVMKCGLTFTERIGD

SEQ ID NO: 4363 - protein, 521 aa, Unknown
  Description of Unknown: Integrase B4364 sequence
  PTHR30461:SF3,cd00338,SM00857,G3DSA:1.10.10.2600,IPR036162, PF13408,IPR025827,G3DSA:3.40.50.1390,PS51737,IPR006119, IPR038109,PF07508,IPR011109,SSF53041,PTHR30461, PS51736,Coil,PF00239
MYEDIKTACLYVRFSSHNQTEQSIEGQTRVCRDFCKRHNIRIVEIYADRATSASKDIEKRVQFLKMIKDSEKGLFDAVIVYKLDRFARSRYDSATYKYRLKRNGVQLISATENISNDPEGIILESVLEGMAEFYSAELSQKINRGMRESAYKHNSIGGAVPLGYKIEDKKLVIDPKTAPIVKEAFEKYADGETVAEICRQFNARGYKTSKGTAFGKSSFTKIFRNERYIGVYTFHDYRAEDAIPAIIDKDLWDRVQLRVGKIKNAPARNKAKVVYLLSGKIFCGHCGSKMNGNCNAGNYCYYQCYGKKNGNVDCKKKNIRKEFIEKLVAQDALSLLTDEYIEQIATIACEKNQHEIELDSALPTIRDRIHQVDLSLNHLLKAIESGSAPDMLVKRMGELEKEKKDLQAQAKKESEDIVELDKAQVIYWLEQFRGGSIEDEEFCRMLIDLFVNSVTVWDEDDNTYKVTVAYNLTSLPTKTYRLNKGGTLSDFASNAPAREYATLPSMTMWTPSTEKASLHRS

SEQ ID NO: 4364 - protein, 521 aa, Unknown
  Description of Unknown: Integrase B4365 sequence
  SM00857,G3DSA:1.10.10.2600,IPR036162,PF13408,IPR025827, G3DSA:3.40.50.1390,PS51737,IPR006119,IPR038109,PF07508, SSF53041,IPR011109,PTHR30461,Coil,PS51736, cd00338,PF00239
MPYCMYLRKSRKDFEAESAGQGETLARHKAALLETAQRLHLAVSEIYQEIVSGDSIAARPEMQRLLADVETGKWDGVLVMEVERLARGDTMDQGQVQRTFVYTGTKIITPTRTYDPSDPADAEYFEFGLFMSRREYQTINRRLLAGRERAVREGKWPQGHAPYGYKAVKVPKGKGYMLEVVPEEAEIVKSIFNWYVNGAEYNGAFLRVGARRISTMLNSMGLTTQAGNLWSAPAVRVILKNHAYIGKVTWYKQTLRKSMSNGAVVKKLERTPERTLICDGLHEAIISEELFEAAQARLSADSTGPATKGPLQSPLAGLLYCGLCGCVMARQHEKGKPSYYVCRNPLCRCRGSKLEVVEQRVVATLALWLAGYEITAKAQAQTVDIGALQSALDGAQRELLAYQQQQTRLYDLLERGIYTEQVFLQRQAAITGEVQRLQAAVADTEAAIAKAVRINASAREIVPAVHAVLDAYPAYTTAQEKNDALRMVLSRVEYTRTVGGFGSDPQDFEVKIFPRLPEPVE

SEQ ID NO: 4365 - protein, 520 aa, Unknown
  Description of Unknown: Integrase B4366 sequence
  PTHR30461:SF3,cd00338,SM00857,G3DSA:1.10.10.2600,IPR036162, PF13408,IPR025827,G3DSA:3.40.50.1390,PS51737,IPR006119, IPR038109,PF07508,IPR011109,SSF53041,PTHR30461, PS51736,Coil,PF00239
MARKKNIAAGQNAVIYARYSSHNQREVSIEQQVRECMKHAAELGLHVVGTYEDRAISGKTDKRPNFQRMMRDAEKGKFQAVVAWKSNRIGRNMLQAMVNEAKLEDCGVKVFYAEEDFDDTAAGRFALRNMMNVNQFYSENMAEDITRGLYDNASKCMANGRQPLGYKRGEDGRVVLDEANAAVVREIFTRVAAGDLFVDIARDLNAQGIRTSKGANWNKGSFQSICQNERYRGIYIYGDVRVADGIPRIVSDDLWYRVQEAMRMKKNPVGTRHRVGAEDYLLTGKLRCGHCGSYMTGVSGTSRNGELHYYYTCQKRRTEHACDKKNIRRDVIEPAVAQAIKMYCLTDDVIAWIADRTVEYWEKHDNDLQIEALEQQLEENKKATSNMLKAIEMGIITEATRTRMVELETEQSRLSVQLNAAKEDVVKIDREQIISYLELLQQGDIHDRDFQMELFKNFLVAVYVYDDNRMKLVFSCMGDQNSVEIPLETGEDPPDGGLSPDAKMFVLTPDSSTKKALYFA

SEQ ID NO: 4366 - protein, 520 aa, Unknown
  Description of Unknown: Integrase B4367 sequence
  PTHR30461:SF3,SM00857,G3DSA:1.10.10.2600,IPR036162,PF13408, PS51737,IPR025827,G3DSA:3.40.50.1390,IPR006119,IPR038109, PF07508,SSF53041,IPR011109,PF00239,PTHR30461, PS51736,Coil,cd00338
MKAVIYARYSSEKQQEISIEGQLRVCQEFAAREGYEVVDTYTDRALSASRDVERREDFQRMIRDSARRSFDVVIVYKFSRFARNRYDSAVYKARLRQNGVKVVSACEPISANPEGALIEGIFESLDEFYSKSLAQDVTRGMHENASKALSTGGTIPLGYVSVDKRLQIDPATAPAVRLAFERYAEGMSLARIADELNAQGYRTRAGKAFNRSSFNALLSNRKYIGTYHYNGEVELVGQIPPIVDPGTFRRVQERLRKNTTAPGRTKATINYLLSTKLYCGACGKPMAGESGHNHSGTRYYYYACSGRKRRLGCKMPTLRKDDLERLVVEHARTLLSPDNIKALAHAAAAEYQRQAEDDSAAVSLRRQLDEVTRSLDNLLRMVEQGATSATLVGRINELEGRKASIAAELAEEQRGAPELTEVDILRWLSCFADGCLEDEDYMRNVIDMLVNKIVVQQSPNQKVSVLVAYNLAGRGDEISGSGLVDVVHQARHKPNLCTRATESCMTFLLYHGCAIFQLAA

SEQ ID NO: 4367 - protein, 520 aa, Unknown
  Description of Unknown: Integrase B4368 sequence
  cd03768,PTHR30461:SF3,SM00857,G3DSA:1.10.10.2600,IPR036162, PF13408,PS51737,G3DSA:3.40.50.1390,IPR025827,IPR006119, IPR038109,PF07508,SSF53041,IPR011109,PTHR30461, PS51736,Coil,PF00239
MNVAIYARKSKATKKGESISNQIELCKKYFLNTTNEDVNFLIYEDEGWSGGNINRPQFTKLMNDAKLKRFTALICYRLDRIARNVADFSSTYKILEENNIAFISITEQFDTSTIMGRAMINISATFAQIERETIAERIKDNMLELSKTGRWLGGTPPLGFKSVQIAENNKKMYKLEVVEEEMEIVRLIYKLYPQYKSTVPIARYLVSNHIKGKNGGDFSRNTVLQILKNPVYCCSDSEAIKYFENKGSILNCINNKELGLMVYNKRKGGKKENPIDEWIIATGRHPGIIPSTQWINCQNILEEIKNRTSPRQATGNKFLLSGLLKCAKCGSSMCSWSRTNKGIYYRSYRCELKNRAANRCDSKMINAEELENFIIELLKNLNMEEIISVKKNKTNNTSLKNELTSLNKSLNENEKLLKGLIKKLALIDDIEILAMIQTEIKKIKSENENINKKINEINLSMFDIEDEFRKEQILLESHKLFKDTIDLVQDVETKRNLIMNFIDYFTYDSETNEVGYKIRL

SEQ ID NO: 4368 - protein, 520 aa, Unknown
  Description of Unknown: Integrase B4369 sequence
  PTHR30461:SF3,cd00338,SM00857,G3DSA:1.10.10.2600,IPR036162, PF13408,PS51737,IPR025827,G3DSA:3.40.50.1390,IPR006119, IPR038109,PF07508,IPR011109,SSF53041,PTHR30461, PS51736,Coil,PF00239
MARKKNIAAGLDAVIYARYSSHNQREVSIEQQIAECTKHAAALGLRIVGTYEDRAISGKTDNRPRFQQMMRDAEKGKFQAVVAWKSNRIGRNMLQAMVNEAKLDDYGVKVFYAEEDFDDTAAGRFALRNMMNVNQFYSENMAEDITRGLYDNANKCMANGRQPLGYKRGADGKVMLDEPAAAVVREIFTRVAAGDLFVDIARDLNAKGIKTSKGAAWNKGSFQSICQNERYKGIYIYGNVRIVDGIPRIVSDELWYKVQEAMRMKKNPVGTRHRVGAEDYLLTGKLRCGHCGSYMTGISGTSRNGELHYYYTCQKRRTEHACNKKNVRRDVIEPAIAQAIKMYCLTDDVIEWMADQTVQYWEKHDNDLQIEALEQQLAENKKATSNMLKAIEMGIITEATRSRMVELETENSKLTAQLSAARRDVVKINREDLIDELHILRSKDIHDREVQAELFKDFLVAAYIYDDNRLKLVFSFMGKDNSVEIPLETGEDPPDGEDSPDAKMFVLTPDCSTKKALYFV

SEQ ID NO: 4369 - protein, 520 aa, Unknown
  Description of Unknown: Integrase B4370 sequence
  PTHR30461:SF3,SM00857,G3DSA:1.10.10.2600,IPR036162,PF13408, IPR025827,G3DSA:3.40.50.1390,PS51737,IPR006119,IPR038109, PF07508,IPR011109,SSF53041,PTHR30461,PS51736, cd00338,PF00239
MNKLRAAAYCRVSTDRAEQSGSLASQRSFFDDYIRNSDSMTLVGVFYDEGTSGTTTINRYGFNKMISLAVSGGIDIILTKEVSRFARNTVDTLNITRMLRAKGVGIIFINDNIDTRDSDGELRLSIMATIAQEESRKISERVKWGQQRKMEQGVVFGRSCLGYDVKDGKITVNADSAEIVKRIFTEYTVLLKGAESIADGLNAEQIRTVNGGRWSGAFIRKVLRNVKYVGDLEQKKTCTPDFLTHKKRLNSSEHIYIRNHHEPIISRELWEQTQAEISRRKPTDTSRHSDRYVFSGKVYCGVCGSVMVSRVKTLKNGKIYHALRCSGRIGGKSCNNETLNVTALKACVKRIFTDIPIDKTAVINAVIKGLSRTDKPDIPALRRKIETLNAKKRRAVDLMLDGLITQQELIEQKSYYDSIIEKLSQEISSDRSVFETDKIRKNAEKFLDFTSDPIWLLVIRADYIHGTLTVYLNGIEKGFTTCFTATGRGDSYRVITGNTVRSQGIIPGTMQVPKNYPISK

SEQ ID NO: 4370 - protein, 520 aa, Unknown
  Description of Unknown: Integrase B4371 sequence
  PTHR30461:SF3,cd00338,SM00857,G3DSA:1.10.10.2600,IPR036162, PF13408,PS51737,G3DSA:3.40.50.1390,IPR025827,IPR006119, IPR038109,PF07508,SSF53041,IPR011109,PTHR30461, PS51736,Coil,PF00239
MNNTDLQTGVIYARYSSDKQRDESIEGQIRECTEYAQREGILITKIYTDRALSARTDNRPEFLQMIRDSANQTFNYVIVYQLDRFSRSREDSAKYKGILRRNGVKVLSAKEHITNEPAGIILESMLEGMAEYYSVELSQKVKRGMTENALKGKMNGSAIPLGYDLTESHHLAVNAHEAKAVRLIYDLYLKQHSLAKIADILHSKGYTTKRGGKISYSVIRNILSNEKYIGVYQWGDIRIEDSIPPIIARDVFDEVQQVLPTRIKNKGRRSEMYNLCGRLICGECGGHYMGSTATSRNGEKHHYYVCTNRRKHHTCNAPNIRRDELEDLVINRTLEILKQPQIIARIVDLVMNGYNHTTQEAKTAIQGIQGKIKAIDIELNNCMTAIKQGFINDRLKAEIESLEKERQDLLEQKANHESVISPIKFTAEHIEYFLERMANENPTTKAGRSRILDTFIKNVTIHSDRVEIVFNYKSELPEFSEQSASGSHFSILVGNSYNKANHFYINSTAYPITLIVPFGV

SEQ ID NO: 4371 - protein, 520 aa, Unknown
  Description of Unknown: Integrase B4372 sequence
  SM00857,G3DSA:1.10.10.2600,IPR036162,PS51737,G3DSA:3.40.50.1390, IPR006119,IPR038109,PF07508,IPR011109,SSF53041, PTHR30461,Coil,PS51736,cd00338,PF00239
MQYEEYLIYLRKSRSDASLEAMGVDVLERHEQILLDLAKRMNLSIGGIYREVVSGESISARPEMQKLLSEVESGRWEGVLVMEVERLARGDTVDQGIVQRAFQYSGTKIITPTKTYNPNNEFDEEYFEFGLFMSRREYKTIRRRMRAGVTAAVKEGKWPFNQAPYGWQRVKLEHGRGWILAPDPDEAPVVKLIFRLYTGPDRIGITHICRYLDTRGIKPRNGDTWLECSVMGILRNIVNDQRVGIGRRKVIKQVQNGSVSKVRPHSDYDFTAPGLQPRLIDHDVFLEAQEYLAKNSHKLPESYGIKNPLAGILVCSCCGKKMQRRPASRDGSSGRCPYDVLMCNTRGCPTIGSTLELVERELIQALSDWVAGYQLDPTLEVENKVPEKEQLLSSAVSNHDLLLKQNGNLYDLLEQGVYTTETFLERSHELQKRIKESEVHIEILKKDLEYEKEKIANIENFIPSCKELLSCYWDLSVQDRNKALKMLLESVEYTKTKRNRKGDKDKPTFTLNLKPRIPRI

SEQ ID NO: 4372 - protein, 520 aa, Unknown
  Description of Unknown: Integrase B4373 sequence
  cd03768,PTHR30461:SF3,SM00857,IPR036162, PF13408,IPR025827,G3DSA:3.40.50.1390,PS51737, IPR006119,PF07508,SSF53041,IPR011109, PTHR30461,PS51736,Coil,PF00239
MNFAIYGRKSVYSDHSDSVDNQFRMCQEYIDFRFPKEVKNVEQYSDEDHTGANTDRPDLQRLLSDIRAGAVDVLVVYQLDRLSRNVRDFSNIYSLLEEKHVMFVSIKENIDTATPIGKAMMYVTVVFAQMERETTAARVTDNMRGLAKKGYWTGGNPPIGYRRERITVDGKKHVMIVPDPEGVEYVTKLFDLFLDSKRSLQGMETYFRKEGIRTLSGAFFSTTQIHQILTGPFYVEATPEVYDYFENKGCQMATPREEWDGKHGVMVYGRTTQPKSGKHQKQPPEKWIVCVGIHEPFLPAEKWLAVQSQMGKNKIDKTMKYDVPLLKGVLRCSCGSAMLVSRKKKTDGVSSWYYCLKRMRQGKEVCGRSQIKTDLLDEKVLGIFREIEADPTQIRKYIKISAAAPQDVKAIAAKIKAVEERISRLTVSLSLAQNGAAAKYIVAEMERLDLELQALKRERNMALSAGRERHDAEKDVKETIAEISRLIKGLKDFSATEKNEIVKDVVKECVWDGVELKITL

SEQ ID NO: 4373 - protein, 520 aa, Unknown
  Description of Unknown: Integrase B4374 sequence
  PTHR30461:SF3,cd00338,SM00857,G3DSA:1.10.10.2600,IPR036162, PF13408,PS51737,IPR025827,G3DSA:3.40.50.1390,IPR006119, IPR038109,PF07508,SSF53041,IPR011109,PTHR30461, PS51736,Coil,PF00239
MKAVIYARYSSEKQQEISIEGQLRVCQEFAAREGYEVVDTYTDRALSASRDVERREDFQRMIRDSSRRGFEVVIVYKFSRFARNRYDSAVYKARLRQNGVKVVSACEPISANPEGALIEGIFESLDEFYSKSLAQDVTRGMHENATKALSTGGTIPLGYVSVDKRLQIDPATAPAVRLAFERYAEGMSLARIADELNAQGYRTRAGKAFNRSSFNALLSNRKYIGTYHYNGEVELVGQVPPIVDPGTFRRVQERLRKNTTAPGRTKATINYLLSTKLYCGACGKPMAGESGHNHSGTRYYYYACSGRKRRLGCKMPTLRKDDLERLVVEHARTLLSPDNIKALAHAAAAEYQRQAEDDSAAVSLRRQLDEVTRSLDNLLRMVEQGAVSATLVARINELEGRKASIAAELADEQRGAPELTEVDILRWLSCFADGCLEDEDYMRNVIDMLVNKIVVQQNPNQKVSVLVAYNLSGRGDEISGSGLVDVVHQARHNPNFCTNATESCMTFLLYHGCAIFQLAA

SEQ ID NO: 4374 - protein, 520 aa, Unknown
  Description of Unknown: Integrase B4375 sequence
  PTHR30461:SF3,SM00857,G3DSA:1.10.10.2600,IPR036162,PF13408, IPR025827,G3DSA:3.40.50.1390,PS51737,IPR006119,IPR038109, PF07508,IPR011109,SSF53041,PF00239,PTHR30461, PS51736,Coil,cd00338
MKAVIYARYSSEKQQEISIEGQLRVCQEFAAREGYEVVDTYTDRALSASRDVERREDFQRMIRDSARRGFEVVIVYKFSRFARNRYDSAVYKARLRQNGVKVVSACEPISANPEGALIEGIFESLDEFYSKSLAQDVTRGMHENATKALSTGGTIPLGYVSVDKRLQIDPATAPAVRLAFERYAEGMSLARIADELNAQGYRTRAGKAFNRSSFNALLSNRKYIGTYHYNGEVELVGQVPPIVDPGTFRRVQERLRKNTTAPGRTKATINYLLSTKLYCGACGKPMAGESGHNHSGTRYYYYACSGRKRRLGCKMPTLRKDDLERLVVEHARALLSPGNIKALAHAAAAEYQRQAEDDSAAVSLRRQLDEVTRSLDNLLRMVEQGAISATLVARINELEGRKASIAAELADEQRGAPELTEVDILRWLSCFADGCLEDEDYMRNVIDMLVNKIVVQQNPNQKVSILVAYNLAGRGDEISGSGLVDVVHQARHNPNLCTRATESCMTFLLYHGCAIFQLAA

SEQ ID NO: 4375 - protein, 520 aa, Unknown
  Description of Unknown: Integrase B4376 sequence
  PTHR30461:SF3,SM00857,G3DSA:1.10.10.2600,IPR036162,PF13408, PS51737,IPR025827,G3DSA:3.40.50.1390,IPR006119,IPR038109, PF07508,IPR011109,SSF53041,PF00239,PTHR30461, PS51736,Coil,cd00338
MLAYGYCRYSSDLQNEKSIEQQKMELEEYAKKNNIKIIKYYIDEAQSGRNDTRANFQSMISDACKLKEVQAILVWKTDRFARKAMDNLYYRAKLEKNGVKLISITQPFDSETAEGKLMTTLLAGMDEYFSQNLASNVKRALKNNAQNLQFNGGIPPLGYDIIDKKYVINEREAKIVQEIFDMYITGMSYIDIALKLNMKGYKTKRNKSFAKTSVMSILENEKYTGKYIFNKGTKHSHRGMREDAIVYEDAIPVIISKEVFKKVMERKKTKPHAENSAKNVYLLSGLIKCSCGGSYVGTKSTKKKDGKTYVTGYYICNNRNKLGNCKMPLLYQEKLEEKIVSILTEELLDKNTMQNLVDEVTRQYKVLQSEATEDLSVLENRLKEIQSQMDNIVDAVAKGLANDTLLKRLDKLENVNNNLQEELKFKSNVSDTEINADDIIKILKRDIDGLEDNSKNELKKLIKKWVKKIEVTNDFIAVHFYSEDFLPPKMVARTHYCFCLRLNINDFISRNIQQMRELTD

SEQ ID NO: 4376 - protein, 520 aa, Unknown
  Description of Unknown: Integrase B4377 sequence
  cd03768,PTHR30461:SF3,SM00857,G3DSA:1.10.10.2600,IPR036162, PF13408,PS51737,G3DSA:3.40.50.1390,IPR025827,IPR006119, IPR038109,PF07508,SSF53041,IPR011109,PTHR30461, PS51736,Coil,PF00239
MNVAIYARKSKATKKGESISNQIELCKKYFLNTTNEDVNFLIYEDEGWSGGNINRPQFTKMMNDAKLKRFSALICYRLDRIARNVADFSSTYKILEESNIAFISITEQFDTSTIMGRAMINISATFAQIERETIAERIKDNMLELSRTGRWLGGTPPLGFKSVQITENNKRMYKLEVVEEEIEIVRLIYKLYPEYKSTVPIARYLVSNYIKGKNGGDFSRNTVLQILKNPVYCCSDENAIKYFESKGSTLNCSENNKYGLMVYNKRKGGKKENPIEEWIIATGKHPGIIPGAEWVECQNILSEISSKTSPRKATGNKFLLSGMLKCSRCGSSMCSWSRTSKGIYYRSYRCELKNRSSNRCDSKMVNADELEQFVIDLCKNINIEDIINIKRTKNNNASLKRELTSLNKNLNENDKLLQGLIKKLALIDDIDVLSMIQTEIKKIKTENDNINKRINEINISMFDVEDEENKKQLLLESHKLFINTIDLIEDVEAKRNLIMNFIEYFTYDSETNEVGYKLRL

SEQ ID NO: 4377 - protein, 520 aa, Unknown
  Description of Unknown: Integrase B4378 sequence
  PTHR30461:SF3,SM00857,G3DSA:1.10.10.2600,IPR036162,PF13408, IPR025827,PS51737,G3DSA:3.40.50.1390,IPR006119,IPR038109, PF07508,SSF53041,IPR011109,PF00239,PTHR30461, PS51736,Coil,cd00338
MKAVIYARYSSEKQQEISIEGQLRVCQEFAAREGYEVVDTYTDRALSASRDVERREDFQRMIRDSSRRGFEVVIVYKFSRFARNRYDSAVYKARLRQNGVKVVSACEPISANPEGALIEGIFESLDEFYSKSLAQDVTRGMHENATKALSTGGTIPLGYVSVDKRLQIDPATAPAVRLAFERYADGMSLARIADELNAQGYRTRAGKAFNRSSFNALLSNRKYIGTYHYNGEVELVGQVPPIVDPGTFRRVQERLRKNTTAPGRTKATINYLLSTKLYCDACGKPMAGESGHNHSGTRYYYYACSGRKRRLGCKMPTLRKDDLERLVVEHARTLLSPDNIKALAHAAAAEYQRQAEDDSAAVSLRRQLDEVTRSLDNLLRMVEQGAVSATLVGRINELEGRKASIAAELAEEQRGAPELTEVDILRWLSCFADGCLEDEDYMRNVIDMLVNKIIVQQNPNQKVSVLVAYNLAGRGDEISGSGLVDVVHQARHNPNLCTNATESCMTFLLYHGCAIFQLAA

SEQ ID NO: 4378 - protein, 520 aa, Unknown
  Description of Unknown: Integrase B4379 sequence
  PTHR30461:SF3,SM00857,G3DSA:1.10.10.2600,IPR036162,PF13408, IPR025827,G3DSA:3.40.50.1390,PS51737,IPR006119,IPR038109, PF07508,SSF53041,IPR011109,PTHR30461,PS51736, cd00338,PF00239
MNKLRAAAYCRVSTDRAEQSGSLASQRSFFDDYIRNSDSMTLVGVFYDEGTSGTTTLNRYGFNKMISLAVSGGIDIILTKEVSRFARNTVDTLNITRMLRAKGVGIIFINDNIDTRDSDGELRLSIMATIAQEESRKISERVKWGQQRKMEQGVVFGRSCLGYDVKDGKITVNADSAEIVKRIFTEYTVLLKGAESIADGLNAEQIRTVNGGRWSGAFIRKVLRNVKYVGDLEQKKTCTPDFLTHKKRLNSSEHIYIRNHHEPIISRELWEQTQAEISRRKPTDTSRHSDRYVFSGKVYCGVCGSVMVSRVKKLKNGKIYHALRCSGKIGGKSCNNETLNVTALKACIKRIFTDMPIDKTAVINAVIKGLSRTDKPDIPALRRKIETLNAKKRRAVDLMLDGLITQQELIEQKSYYDSIIEKLSQEISSDRSVFETDKIRKNAERFLDFTSDPLWLLVIRANYIHGTLTVYLKGIEKGFTTCFTATGRGDSYRVITGNTVRSQGIIPGTMQVQKNYPISK

SEQ ID NO: 4379 - protein, 520 aa, Unknown
  Description of Unknown: Integrase B4380 sequence
  PTHR30461:SF3,cd00338,SM00857,G3DSA:1.10.10.2600,IPR036162, PF13408,PS51737,G3DSA:3.40.50.1390,IPR025827,IPR006119, IPR038109,PF07508,IPR011109,SSF53041,PTHR30461, PS51736,Coil,PF00239
MARKKNIAAGQNAVIYARYSSHNQREVSIEQQVRECMKHAAELGLHVVGTYEDRAISGKTDKRPNFQRMMRDAEKGKFQAVVAWKSNRIGRNMLQAMVNEAKLEDCGVKVFYAEEDFGDTAAGRFALRNMMNVNQFYSENMAEDITRGLYDNASKCMANGRQPLGYKRGEDGRVVLDEANAAVVREIFTRVAAGDLFVDIARDLNAQGIKTSKGANWNKGSFQSICQNERYRGIYIYGDVRVVDGIPRIVSDDLWYRVQEAMRMKKNPVGTRHRVGAEDYLLTGKLRCGHCGSYMTGVSGTSRNGELHYYYTCQKRRTEHACDKKNIRRDVIEPAVAQAIKMYCLTDDVIEWMADRTVEYWEKHDNDLQIEALEQQLEENKKATSNMLKAIEMGIITEATRTRMVELETEQSRLSVQLNAAKEDVVKIDREQIISYLELLQQGDIHDRDFQMELFKNFLVAVYVYDDNRMKLVFSCMGDQNSVEIPLETGEDPPDGGLSPDAKMFVLTPDSSTKKALYFV

SEQ ID NO: 4380 - protein, 520 aa, Unknown
  Description of Unknown: Integrase B4381 sequence
  PTHR30461:SF3,cd00338,SM00857,G3DSA:1.10.10.2600,IPR036162, PF13408,IPR025827,G3DSA:3.40.50.1390,PS51737,IPR006119, IPR038109,PF07508,SSF53041,IPR011109,PTHR30461, PS51736,Coil,PF00239
MKAVIYARYSSEKQQEISIEGQLRVCQEFAAREGYEVVDTYTDRALSASRDVERREDFQRMIRDSSRRGFDVVIVYKFSRFARNRYDSAVYKARLRQNGVKVVSACEPISANPEGALIEGIFESLDEFYSKSLAQDVTRGMHENATKALSTGGTIPLGYVSVDKRLQIDPATAPAVRLAFERYADGMSLARIADELNAQGYRTRAGKAFNRSSFNALLSNRKYIGTYHYNGEVELVGQVPPIVDPGTFRRVQERLRKNTTAPGRTKATINYLLSTKLYCGACGKPMAGESGHNHSGTRYYYYACSGRKRRLGCKMPTLRKDDLERLVVEHARALLSPGNIKALAHAAAAEYQRQAEDDSAAVSLRRQLDEVTRSLDNLLRMVEQGAVSATLVGRINELEGRKASIAAELADEQRGAPELTEVDILRWLSCFADGCLEDEDYMRNVIDMLVNKIVVQQNPNQKVSILVAYNLAGRGDEISGSGLVDVVHQARHNPNLCTRATESCMTFLLYHGCAIFQLAS

SEQ ID NO: 4381 - protein, 520 aa, Unknown
  Description of Unknown: Integrase B4382 sequence
  cd00338,SM00857,G3DSA:1.10.10.2600,IPR036162,PS51737, G3DSA:3.40.50.1390,IPR006119,IPR038109,PF07508,SSF53041, IPR011109,PTHR30461,PS51736,Coil,PF00239
MQYEEYLIYLRKSRSDASLEAMGVDVLERHEQILLDLAKRMNLSIGGIYREVVSGESISARPEMQKLLSEVESGRWEGILVMEVERLARGDTVDQGIVQRAFQYSGTKIITPTKTYNPNNEFDEEYFEFGLFMSRREYKTIRRRMRAGVTAAVKEGKWPFNQAPYGWQRVKLEHGRGWVLAPDPDEAPVVKLIFRLYTGPDRIGITHICRYLDNRGIKPRNGDTWLECSVMGILRNIVNDQRVGIGRRKVVKQVQNGSVSKVRPHSDYDFTAPGLQPRLIDHDVFLEAQEYLAKNSHKLPESYGIKNPLAGILVCSCCGKKMQRRPASRDGSSGRCPYDVLMCNTRGCPTIGSTLELVERELIQALSDWVAGYQLDPTLEVENKVPEKEQLLSSAVSNHDLLLKQNGNLYDLLEQGVYTTEIFLERSHELQKRIKESEEHIEILKKDLEYEKEKIANIENFIPSCKELLSCYWDLSAQDRNKALKMLLESVEYTKTKRNRKGDKDNPTFTLNLKPRIPRI

SEQ ID NO: 4382 - protein, 520 aa, Unknown
  Description of Unknown: Integrase B4383 sequence
  cd00338,SM00857,G3DSA:1.10.10.2600,IPR036162, PF13408,PS51737,IPR025827,G3DSA:3.40.50.1390, IPR006119,IPR038109,PF07508,IPR011109, SSF53041,PTHR30461,PS51736,Coil,PF00239
MAKGNRAAIYARFSSHNQRDESIEIQVDKSREFCDESGLSVVRVYSDYAKTGKNTNRAEFQAMLKDAQKGLFDYVVIYKVTRIMRNRDEMALARIMLRKAGVEILYAGETLGEGSTKVLHLGMLEVLAEYESAVDSERIRDGIQKNAQRGMASGQRLYGWDVVNDRFVVNEREAAVMHKMKNMLFSGSTIADIQRAIKTERTRRGKAFSQSTIKRLLSREQNCGVYKYAGVRTTNGMPALWSRQEQDEIASILNGRGHKHRVVDGEQPYALSGKMYCRECGRWFVGTSGTGKSGKTYYYYRCPKCRRTFRRDLIEDAVADTILESIHDPKVRERIIATLEMMIAETAEDDAPKESERITAEIRRIDAAFERIWHAIEDGIAPPGGKDRVEELKARQAALKEELEKALEAESAEDLSLDDYLAWLDTLGAESDPFEIIDTFIRFIQIDGDEVQLFFSFDNWDDDFMPTKKDEPLMNKGSSNFHVVEQKPLAANTIYANSVEIKVTRNWFAIVTFCESNNKK

SEQ ID NO: 4383 - protein, 520 aa, Unknown
  Description of Unknown: Integrase B4384 sequence
  PTHR30461:SF3,cd00338,SM00857,G3DSA:1.10.10.2600,IPR036162, PF13408,IPR025827,PS51737,G3DSA:3.40.50.1390,IPR006119, IPR038109,PF07508,IPR011109,SSF53041,PTHR30461, PS51736,Coil,PF00239
MRAKKKPAMLEPDMQDAVIYTRYSSHNQRDCSIEQQVADCEIFARQNNLRVVKVYADRHLSGTTDNRPQFQQMLKDAAHGHWAYVICWKIDRFARNRYDSATYKFRLKKAGVRVLYAKESIPDGPEGILLESVLEGSAEYYSAALAQNIRRGMKYNAEQCKVNSGSIPFGYCKGPDGRFAIHEANAEVVREIFRKAAAGMPFVDIANDLNSRGLKTSRGGRWNKGSFRLLMNEAYIGVYHFSDTRIEGGMPALIDQGTFWAANERLKANSSVRGRHQDGGDYLLTGKLKCAHCGSYMIGFSGTGKSGELHYYYGCQKRRRERACKKANVPREWIERVVVKAALDYVLRPDVMEWIADAVMEYQEREAASAQLAALTAELEENQKATDNVMKAIEAGIITSTTKQRLLDLEAKAQDLKRAIELEKLSHVRLERDQVLFWLDRFRGGSLQSQEFRRKVIDAFVSVVYLSDDHLRIAFNYSGGSNAEADFDLVMDAEAAAGELSKKFAQGHVASTSKKSHLKT

SEQ ID NO: 4384 - protein, 520 aa, Unknown
  Description of Unknown: Integrase B4385 sequence
  SM00857,G3DSA:1.10.10.2600,IPR036162,PS51737,G3DSA:3.40.50.1390, IPR006119,IPR038109,PF07508,IPR011109,SSF53041, PF00239,PTHR30461,PS51736,Coil,cd00338
MQYEEYLIYLRKSRSDASLEAMGVDVLERHEQILLDLAKRMNLSIGGIYREVVSGESISARPEMQKLLSEVESGRWEGVLVMEVERLARGDTVDQGIVQRAFQYSGTKIITPTKTYNPNNEFDEEYFEFGLFMSRREYKTIRRRMRAGVTAAVKEGKWPFNQAPYGWQRVKLEHGRGWVLAPDPDEAPVVKLIFRLYTGPDRIGITHICRYLDNRGIKPRNGDTWLECSVMGILRNVVNDQRVGIGRRKVIKQVQNGSVSKVRPHSDYDFTAPGLQPRLIDHNIFLEAQEYLAKNSHKLSESYGIKNPLAGILVCSCCGKKMQRRPASRDGSSGRCPYDVLMCNTRGCPTIGSTLELVERELIQALSDWVAGYQLDPTLEVENKVPEKEQLLSSAVSNHDLLLKQNGNLYDLLEQGVYTTEIFLERSHELQKRIKESEAHIEILKKDLEYEKEKIANIENFIPSCKELLSCYWDLSVQDRNKALKMLLESVEYTKTKRNRKGDKDNPTFTLNLKPRIPRI

SEQ ID NO: 4385 - protein, 520 aa, Unknown
  Description of Unknown: Integrase B4386 sequence
  PTHR30461:SF3,SM00857,G3DSA:1.10.10.2600,IPR036162,PF13408, PS51737,IPR025827,G3DSA:3.40.50.1390,IPR006119,IPR038109, PF07508,IPR011109,SSF53041,PTHR30461, PS51736,cd00338,PF00239
MPRKKAPAAEAPRLVAYYRYSGGSRQTEQSIEGQRRDCEAYARAHGMTILREYVDRHISGKTDDRPAFQQLVADSAAHAFDAVICWKTDRLARNRYDSAVYKKKLRDNGVEILYAAESNISGAEGIIIEGLMEALAEYYSAELAEKARRGMRESALKGKALGSSRPLGLTVDADKHYIIEPTGAEAVRYIFEQYAAGLSSSSIVERLNAMGLRTSHGGPFNKSSINRIIQNEMYRGVYVSKKFDVRIEGAIPAIIDNDLWKRAQKMFERNRQSRTPHASRADYILSGKLYCGECGCLMKGVCGRSSGNGQMYHYYACPGRSIGRACTRKNIPQDELEAMVVNSVADLLLEPELLEQIADAIVELQQAEAARPDPEKQALEKSLSDVRSKIQNILTAIENGTSSAALSARLADLEQQESTLSYQLSSLTAKKPLTFTRDQILFLLQQFRVSSSERTKAYCRRLVDTFVDHIELTNTELILYFNISDETIDKNKKAPRSNPSKESSTEKRLVRVARIELTAS

SEQ ID NO: 4386 - protein, 520 aa, Unknown
  Description of Unknown: Integrase B4387 sequence
  PTHR30461:SF3,SM00857,G3DSA:1.10.10.2600,IPR036162,PF13408, IPR025827,G3DSA:3.40.50.1390,PS51737,IPR006119,IPR038109, PF07508,SSF53041,IPR011109,PF00239,PTHR30461, PS51736,Coil,cd00338
MNKIAIYTRKSKFTGKGESIENQIEKCKKFIEFKFNIDSKSVNIFIDEGFSGKNEDRPEYQRMMNQIKSKQINSIVIYQLNRLGRNARDIHNTMQLCDDLGTIIYSATEGFDSSTSFGRAVIGILASLAQLEREQLAERVKDNMYTLAKMGRWLGGQSPLGFDGTREYYIDENGKERSVTELKPNKEELNIVKLIYQKYIEEKSLSQVAKWSLTNHLKGKNGGNITKSAINVILKNPVYVKSTDKVLEYLEKENYEVCGSANGNGLLRYGKDNEQIIAVSKHKGIINADDWMKVQNILKENTDKAPRRGKTNTALLTGILKCNCGSSMNIAHGKLKNGTKTFYYQCAMKVASGGTRCKSKNLNGPLLEEKLIDYLKNYSEIQIIADLENILNKSNELNLKLTAESIDNAIEQCDKSIKVLVNKLKVIEDLEVSKIIIDELTKEKDKKKDLEKQKENLLEDEASKSLSEAEILEVLNLVEHFKNNIDSLDFESKKKLLNEMIESIVIDTDEFIINFNIKKN

SEQ ID NO: 4387 - protein, 520 aa, Unknown
  Description of Unknown: Integrase B4388 sequence
  PTHR30461:SF3,SM00857,G3DSA:1.10.10.2600,IPR036162,PF13408, PS51737,G3DSA:3.40.50.1390,IPR025827,IPR006119,IPR038109, PF07508,IPR011109,SSF53041,PTHR30461,Coil, cd00338,PF00239
MARTATKHPAKPKRGKKLEAEEPGVLYGRYSSHNQKDISVEQQFEKGYGLAGEYGIRIVETYADRAVSGRTDKRKDFQRMMADAAKGKFRYVIAWKSNRMGRNMLEALVNEAKLQELGVRVLYVEEDFDDTAAGRFAARSMMNVNQFYSENMAEDIKRGLYDNASNCMVANGHLPYGYKRDDTLHYVIDEAKAAVIREIFVRVSCGEPLVDIYDSLNARGIKTSYGRPWGRSSFQKILSNERYRGIYIYGDVRKEGGIPRIVSDELYFKVQEVLKTKKNPQGRHRVNGDYLLTGKLFCGNCKSPMIGISGTGRTGKLHYYYVCQKKRSEKTCDKKNVRRDEVEYQIAKAIFDNALQDQVIEWIADSTIAYNDRKEAEGHIGILEDQFADVQRSLKNIMSAIEQGIVTETTKSRLLELESERSEIEGKIAAAKADIVPVNREQLIEWLLSLREGDIHDKKYQARLFDTFLIAAYLYDDGTAKLVFSFAGDKNTVTVPLAEAVDSVEENTAEGSFKLCLAPP

SEQ ID NO: 4388 - protein, 520 aa, Unknown
  Description of Unknown: Integrase B4389 sequence
  PTHR30461:SF3,SM00857,G3DSA:1.10.10.2600,IPR036162,PF13408, IPR025827,G3DSA:3.40.50.1390,PS51737,IPR006119,IPR038109, PF07508,IPR011109,SSF53041,PTHR30461,PS51736, cd00338,PF00239
MPRKKTTAADAPRLVAYYRYSGGSRQTEQSIEGQRRDCEAYARAHGMTILREYVDRHISGKTDDRPAFQQLVADSAAHIFDAVICWKTDRLARNRYDSAVYKKKLRDNGVEILYAAESNISGAEGIIIEGLMEALAEYYSAELAEKARRGMRESALKGKALGSSRPLGLTVDADKHYIIEPTGAEAVRYIFEQYAAGLSSSSIVERLNAMGLRTSHGGPFNKSSINRIIQNEMYRGVYVSKKFDVRIEGAIPAIIDNDLWERAQKMFERNRQSRTPHASRADYILSGKLYCGECGCLMKGVCGRSSGNGQMYHYYACPGRSIGRACTRKNIPQDELEAMVVNAVADLLLEPALLEQIADAIVELQQAEAARPDPEKQALEKSLSDVRSKIQNILTAIENGTSSAALSARLADLEQQESMLSYQLSSLTAKKPLTFTRDQILFLLQQFRVSPSERTKAYCRRLVDTFVDHIELTNTELILYFNLSDETVDKNKKAPRSNPSKESSTEKRLVRVARIELTAS

SEQ ID NO: 4389 - protein, 520 aa, Unknown
  Description of Unknown: Integrase B4390 sequence
  PTHR30461:SF3,cd00338,SM00857,G3DSA:1.10.10.2600,IPR036162, PF13408,PS51737,IPR025827,G3DSA:3.40.50.1390,IPR006119, IPR038109,PF07508,IPR011109,SSF53041,PTHR30461, PS51736,Coil,PF00239
MENAVIYARYSSDKQTEQSIEGQLRICTAYAEQNNFNIVHHYIDRAMSGTNDRRPEFQQMISDSSGKQFRYIIVYKFDRFARNMYDSAIYEHKLEQNGVKVLSATEQVGDGNESLIIKAVLRAMAEMYSRQLSDNVKRGMKESALKANSTGGTIPFGYRLEDKKLVLDDRTAPFAKYIFEEYAAGKAKMDIVRDLKDKGCRKNNGKVLTIQNITYILSNIKYTGVFKFKDIEVEDGCPALVSKEIFGRCKERAERERRKYGKSAQEVDYLLVGKLYCGYCKKPMIGDSGTSRNGDKHHYYTCYTRKSRRRTGETCKKKSEQKEFLEWYVVQQVKEYILDNRRIEIITDAIIKKFKEMFDSSGEEAFLRRLRSIDHEVDDAVEALLKTKNPAALDKINARLEDLQMERNNVEAELSKFRITKDVIPDREDLLEWLKSFQGDALDPEYQKKMIDTFINAIYLYDDKVVICFNLKGGKQVSGIEELEHSDELDECSSSLLNGSPCWTRTNDPAVNSRMLYRLS

SEQ ID NO: 4390 - protein, 520 aa, Unknown
  Description of Unknown: Integrase B4391 sequence
  PTHR30461:SF3,cd00338,SM00857,G3DSA:1.10.10.2600,IPR036162, PF13408,PS51737,G3DSA:3.40.50.1390,IPR025827,IPR006119, IPR038109,PF07508,IPR011109,SSF53041,PTHR30461, PS51736,Coil,PF00239
MARKKNIAAGQNAVIYARYSSHNQREVSIEQQVRECMKHAAELGLHVVGTYEDRAISGKTDKRPNFQRMMRDAEKGKFQAVVAWKSNRIGRNMLQAMVNEAKLEDCGVKVFYAEEDFDDTAAGRFALRNMMNVNQFYSENMAEDITRGLYDNASKCMANGRQPLGYKRGEDGRVVLDEANAAVVREIFTRVAAGDLFVDIARDLNAQGIKTSKGANWNKGSFQSICQNERYRGIYIYGDVRVVDGIPRIVSDDLWYRVQEAMRMKKNPVGTRHRVGAEDYLLTGKLRCGHCGSYMTGVSGTSRNGELHYYYTCQKRRTEHACDKKNIRRDVIEPAVAQAIKMYCLTDDVIEWMADRTVEYWEKHDNDLQIEALEQQLEENKKATSNMLKAIEMGIITEATRTRMVELETEQSRLSVQLNAAKEDVVKIDREQIISYLELLQQGDIHDRDFQMELFKNFLVAVYVYDDNRMKLVFSCMGDQNSVEIPLETGEDPPDGGLSPDAKMFVLTPDSSTKKALYFV

SEQ ID NO: 4391 - protein, 520 aa, Unknown
  Description of Unknown: Integrase B4392 sequence
  SM00857,G3DSA:1.10.10.2600,IPR036162,PS51737,G3DSA:3.40.50.1390, IPR006119,IPR038109,PF07508,IPR011109,SSF53041, PF00239,PTHR30461,PS51736,Coil,cd00338
MQYEEYLIYLRKSRSDASLEAMGVDVLERHEQILLDLAKRMNLSIGGIYREVVSGESISARPEMQKLLSEVESGRWEGVLVMEVERLARGDTVDQGIVQRAFQYSGTKIITPTKTYNPNNEFDEEYFEFGLFMSRREYKTIRRRMRAGVTAAVKEGKWPFNQAPYGWQRVKLEHGRGWVLAPDPDEAPVVKLIFRLYTGPDRIGITHICRYLDNRGIKPRNGDTWLECSVMGILRNVVNDQRVGIGRRKVVKQVQNGSVSKVRPHSDYDFTAPGLQPRLIDHDVFLEAQEYLAKNSHKLPESYGIKNPLAGILVCSCCGKKMQRRPASRDGSSGRCPYDVLMCNTRGCPTIGSTLELVERELIQALSDWVAGYQLDPTLEVENKVPEKEQLLSSAVNNHDLLLKQNGNLYDLLEQGVYTTEIFLERSHELQKRIKESEAHIEILKKDLKYEKEKIANIENFIPSCKELLSCYWDLSAQDRNKALKMLLESVEYTKTKRNRKGDKDNPTFTLNLKPRIPRI

SEQ ID NO: 4392 - protein, 520 aa, Unknown
  Description of Unknown: Integrase B4393 sequence
  SM00857,G3DSA:1.10.10.2600,IPR036162,PF13408, PS51737,IPR025827,G3DSA:3.40.50.1390,IPR006119, IPR038109,PF07508,IPR011109,SSF53041, PTHR30461,Coil,PS51736,cd00338,PF00239
MNESVCIYLRKSRADREAEARGEGETLARHEHILLELAKKNEYHIGAIYKEVVSGETISARPVMQQLLREVESGMWDGVLVVEVERLARGDTIDQGVVSRAFQYSDTKIITPTKIYDPNNEFDEEYFEFGLFMSRREYKTIKRRLNAGRVSSVKEGKYCGSVPPFGYERVKLENDKGFTLKPVPEEAEIVKLIYNWYVYGIDGERLGMFKIVKKLNDMNITTQKGSTWTLSTISTILHNPVYAGKLRWNSRKTIKRIENGSVIRTRPMASEYLLSDGLHEPIISPELFSMAEKLIKENPPHPIGLTNTVKNPLSGLVYCKKCGRTMVRRPHQKDRMKDSLMCPNLACNNISSLLLPVEKAVIDGISDLIQNYKLNNTLQDSSGMDVIAAKEKLLSINQEQLRKLNSQKLKQYELLEQGIYTSEVFLERSEATSKQIKECMNVISGLKEELEHDQQLLEQKNTYIPKCENLLSHYWEWDIKTRNDVLKDLIEKIEYNKDTKNTYGHGDVINFTLDIYPKLQ

SEQ ID NO: 4393 - protein, 520 aa, Unknown
  Description of Unknown: Integrase B4394 sequence
  PTHR30461:SF3,cd00338,SM00857,G3DSA:1.10.10.2600,IPR036162, PF13408,IPR025827,G3DSA:3.40.50.1390,PS51737,IPR006119, IPR038109,PF07508,IPR011109,SSF53041,PTHR30461, Coil,PF00239
MLTNYLIYLRKSRADNPDMTVDEVLAKHETILQDFARSEFGEEIPERFIFREVVSGETIAARPIMQRLMQLLESSNVKGVLVVDPQRLSRGDLEDCGKIVNVFRYTGTQVLTPQRSYNLADEYDRKFFELELTRGNDYLEYTKKILYRGRTASVKRGNYIGSVAPYGYKKITVGSGKDVQHTLEVIPEEAEALRLMCHLYLDEGMGFQAIAHQLDALGFRPRKAPQWSPAAIKGMIENPVYIGKIRWNWRKSEKKMVNGEIILSRPKNKDPHDYIYVDGLHDPIISEDVHRAILAKRGTNPCVRKGAELKNPFAGLLCCGRCGHAMSLKRSTYKRQPGRMTESFLCDNQSNCHTKSVLYAALYDRVVQTLEASISDFEILLKNDDDGFQRSNLAIIQTLESEIEKLHAKDMRQKDAFDDGIYSKDEYLSRNAKVQEQLEKAHQALQEARLATSPIVDYREKIARFTDCLAALRDPDVSAAEKNKFLKTCIKKITYHNHMESKAGIGRYVENVFDLDIELL

SEQ ID NO: 4394 - protein, 520 aa, Unknown
  Description of Unknown: Integrase B4395 sequence
  cd03768,PTHR30461:SF3,SM00857,G3DSA:1.10.10.2600,IPR036162, PF13408,PS51737,G3DSA:3.40.50.1390,IPR025827,IPR006119, IPR038109,PF07508,IPR011109,SSF53041,PTHR30461, PS51736,Coil,PF00239
MNVAIYARKSKATKKGESISNQIELCKKYFLNTTNEDVNFLIYEDEGWSGGNINRPQFTKMINDAKLNRFSTLICYRLDRIARNVADFSSTYKILEENNIAFISITEQFDTSTIMGRAMINISATFAQIERETIAERIKDNMLELSRTGRWLGGISPLGFKSVQITENNKKLYKLEVVNDELEIVKLIFNLYPQYKSTVPVARYLVSNHIKGKNGGDFSKNTVLQILKNPVYCCSDTEAIKYFKGKDSTLNCIDNKELGLMVYNKKKSGKKENPIDEWVVATGKHQGIIPGAEWVNCQKILEEISRKASPRKATGNKFLLSGMLKCAKCGSSMCSWSRTSRGIYYRSYRCELKNRAATRCDSKMVNADDLESFVIELCKNINLEEIINIKKTKNNNSTLKRELTSLNKTLVENDKLLQGLVKKLALIDDIDILTIIQAEIKKIKSENENINKRINEINLSMFDSEDEYKNQQILLESHKLFKDTIDLVKDVEAKRNLIMSFIEYFTYDSQTNEIGYKLRL

SEQ ID NO: 4395 - protein, 520 aa, Unknown
  Description of Unknown: Integrase B4396 sequence
  PTHR30461:SF3,cd00338,SM00857,G3DSA:1.10.10.2600,IPR036162, PF13408,PS51737,G3DSA:3.40.50.1390,IPR025827,IPR006119, IPR038109,PF07508,IPR011109,SSF53041,PTHR30461, PS51736,Coil,PF00239
MARKKNIAAGQDAVIYARYSSHNQREVSIEQQIAECTKYAAALGLRIVGTYEDRAISGKTDNRPRFQQMMRDAGKGKFQAVVAWKSNRIGRNMLQAMVNEAKLDDYDVKVFYAEEDFDDTAAGRFALRNMMNVNQFYSENMAEDITRGLYDNASKCMANGRQPLGYKRGEDGRVVLDDANAAVVREIFTRVAAGDLFVDIARDLNAQGIKTSKGANWNKGSFQSICQNERYRGIYIYGDVRVVDGIPRIVSDDLWYRVQEAMRMKKNPVGTRHRVGAEDYLLTGKLRCGHCGSYMTGVSGTSRNGELHYYYTCQKRRTEHACDKKNIRRDVIEPAVAQAIKMYCLTDDVIAWIADRTVEYWEKHDNDLQIEALEQQLEENKKATSNMLKAIEMGIITEATRTRMVELETEQSRLSVQLNAAKEDVVKIDREQIISYLELLQQGDIHDRDFQMELFKNFLVAVYVYDDNRMKLVFSCMGDQNSVEIPLETGEDPPDGGLSPDAKMFVLTPDSSTKKALYFV

SEQ ID NO: 4396 - protein, 520 aa, Unknown
  Description of Unknown: Integrase B4397 sequence
  SM00857,G3DSA:1.10.10.2600,IPR036162,PS51737,G3DSA:3.40.50.1390, IPR006119,IPR038109,PF07508,IPR011109,SSF53041, PF00239,PTHR30461,PS51736,Coil,cd00338
MNESVCIYLRKSRADREAEEHGEGETLARHERILLDLAKKKEYTVGAIYREVVSGETISARPVMQQLLREVESCMWDGVLVVEVERLARGDTIDQGIVSRAFQYSDTKIITPTKVYDPNNEFDEEYFEFGLFMSRREYKTIKRRLNAGRVSSVKEGKYCGNHPPYGYERIKLEHEKGWSLRPLPEEAEIVRLIFNWYVYGIDGERIGMFKIAKRLNDMNIPTQKGFEWNLSTISTILSNPVYAGKLRWNSRKVVKRIENGNIIRSRPVAKEYILSEGLHEPIISPELFEKAQLLKKENPPRPIGSLNTVKNPLSGLVYCKKCGKIMVRKPYPNNYIKDALICPNISCNNISSRLIPVEKAVVAGIADLVKNYKLNETVQNVPKLDSLTAKEKIIFCKQEELKKLNSQKNKQYELLEQGVYSSDIFLERSAATSKQIEECYQSIAKLKKELEHDRQLLEQKNTFIPKCENLLSHYWDWDIKTRNDVLKELIEKIEYRKDKKNTYGHSDDINFTLDIYPKLQ

SEQ ID NO: 4397 - protein, 520 aa, Unknown
  Description of Unknown: Integrase B4398 sequence
  PTHR30461:SF3,cd00338,SM00857,G3DSA:1.10.10.2600,IPR036162, PF13408,IPR025827,G3DSA:3.40.50.1390,PS51737,IPR006119, IPR038109,PF07508,IPR011109,SSF53041, PTHR30461,Coil,PF00239
MKRVYCLYRVSTKCQVDKDDIPMQKTSCREFAERNGWTILKEFQEKGVSGFKVSASDRDAIQDLKAAAEKKEFDVLLVFMFDRIGRIDDETPFVVEWFIKHGIEVWSVNEGEQRMDNHVDKLMNYIRFWQANGESQKTSARVKTRLNQMTLDGKFTGGVAPFGYKLIKSGEINKKGKELMDIVVDDDEAPIVKKIFEMTVKEGYGSYRMADYLNSHGIRTHNNSKFQCNTVNRILKNRLYCGYLVSGGVESPYIERLHIIYENVYEQAQFILSQRSNKNEEKKQIARTTKGSTLLSGNIYCAHCGQKMVSTSYIDRYDRADGSQYRVRRQRYICTDKTMKRGACDGQSAYVAHRIDGAVLATLRDYLAKIKSTPKDIALEKRYKSEISEYRRKQTKLEKEIKKLKRQVVELSAEIGRSLLGESRFTPDILSTSIDNTNDLLHKKEIELNDIKFKLANQQNAMGKLDFYYSQFRTWADEFDNSTMEQKKMIACQLIREVKVSRGYELEIIFDLNYEQFLSL

SEQ ID NO: 4398 - protein, 520 aa, Unknown
  Description of Unknown: Integrase B4399 sequence
  cd03768,PTHR30461:SF3,SM00857,G3DSA:1.10.10.2600,IPR036162, PF13408,PS51737,G3DSA:3.40.50.1390,IPR025827,IPR006119, IPR038109,PF07508,SSF53041,IPR011109,PTHR30461, PS51736,Coil,PF00239
MNVAIYARKSKATKKGESISNQIELCKKYFLNTTNEDVNFLIYEDEGWSGGNINRPQFTKMMNDAKLKRFSALICYRLDRIARNVADFSSTYKILEESNIAFISITEQFDTSTIMGRAMINISATFAQIERETIAERIKDNMLELSRTGRWLGGTPPLGFKSVQITENNKKMYKLEVIEEEIEIVRLIYKLYPEYKSTVPIARYLVSNYIKGKNGGDFSRNTVLQILKNPVYCLSDEDAIKYFKSKGSTLNCSESNEYGLMVYNKRKGGKKENHIDEWIIATGKHPGIIPGADWVNCQNILEEIKSKSSPRKATGNKFLLSGLLKCSRCGSSMCSWSRTNRGIYYRSYRCELKNRSTNRCDSKMVNADELEQFVIDLCKNINIEDIINIKRTKNNNAALKRELTSLNKNLNENDKLLQGLIKKLALIDDIDVLSMIQTEIKKIKTENDNIDKRINEINISMFDVEDEENKKQLLLESHKLFKNTIDLIEDVEAKRNLIMNFIEYFTYDSETNEVGYKLRL

SEQ ID NO: 4399 - protein, 520 aa, Unknown
  Description of Unknown: Integrase B4400 sequence
  PTHR30461:SF3,SM00857,G3DSA:1.10.10.2600,IPR036162,PF13408, PS51737,G3DSA:3.40.50.1390,IPR025827,IPR006119,IPR038109, PF07508,IPR011109,SSF53041,PF00239,PTHR30461, PS51736,Coil,cd00338
MNAVIYARFSSHNQQEQSIEGQIRYCTEYAKKNDMTIINSYIDRAISGTSDNRPEFLQMIKDSNNHQFNVVLVWKLDRFARNRYDSAIYKNALKKNNVKVVSVTEYLGEGSESVLLEAMLEAMAETYSRQLSENVRRGMRESALKCQVVGGSVPLGFDTVDKKYVINEKEAEIVRFIFDEYVSGTSKKEIVNKLNAKGWRTKNGSTFVFNSLNKILSNRKYIGEYKYEDIVIEHGIPAIINERTFILAQKQLSKNKQNRGTKSAKHEYLLATKIFCGYCGGSMIGETATGKGGGKFGYYVCRNRKKHINDCKKRREKQKELETFIVERTLYMYKNKDFVNEVAQKVVDLYNKECGQNHLKTLELNKKELEKKLEELSDGLLKTTNARVLKKFNEQINDLDNQLAELEIEIAREKAIANATMRCSDVIDFISDIMDGDINDKQFQKKIIDTFINAIYVFDDKLIVYYNGSSTSDKVTFDDLLNDLENKGVKGSTFNTLTPPNKYWMNTYFFSGGFAVRCVL

SEQ ID NO: 4400 - protein, 520 aa, Unknown
  Description of Unknown: Integrase B4401 sequence
  cd03768,PTHR30461:SF3,SM00857,G3DSA:1.10.10.2600,IPR036162, PF13408,PS51737,G3DSA:3.40.50.1390,IPR025827,IPR006119, IPR038109,PF07508,IPR011109,SSF53041,PTHR30461, PS51736,Coil,PF00239
MNVAIYARKSKATKKGESISNQIELCKKYFLNTTNENVNFFIYEDEGWSGGNINRPQFTKMMNDAKLKRFSALICYRLDRIARNVADFSSTYKILEESNIAFISITEQFDTSTIMGRAMINISATFAQIERETIAERIKDNMLELSRTGRWLGGTPPLGFKSVQITENNKRMYKLEVVEEEIEIVRLIYKLYPEYKSTVPIARYLVSNYIKGKNGGDFSRNTVLQILKNPVYCCSDENAIKYFESKGSTLNCSENNKYGLMVYNKRKGGKKENPIEEWIIATGKHPGIIPGAEWVECQNILSEISSKTSPRKATGNKFLLSGMLKCSRCGSSMCSWSRTSKGIYYRSYRCELKNRSSNRCDSKMVNADELEQFVIDLCKNINIEDIINIKITKNNNASLKRELTSLNKNLNENDKLLQGLIKKLALIDDIDVLSMIQTEIKKIKTENDNINKRINEINISMFDVEDEENKKQLLLESHKLFINTIDLIEDVEAKRNLIMNFIEYFTYDSETNEVGYKLRL

SEQ ID NO: 4401 - protein, 520 aa, Unknown
  Description of Unknown: Integrase B4402 sequence
  PTHR30461:SF3,SM00857,G3DSA:1.10.10.2600,IPR036162,PF13408, IPR025827,G3DSA:3.40.50.1390,PS51737,IPR006119,IPR038109, PF07508,IPR011109,SSF53041,PTHR30461,Coil, PS51736,cd00338,PF00239
MNTVIYARYSAGPRQTDQSIEGQLRVCTDFCKQRGLTVIDTYCDRHISGRTDERPEFQRLIADAKRKKFEAVVVYKTDRFARNKYDSAVYKRELKRNGIQIFYAAEAIPDGPEGIILESLMEGLAEYYSAELAQKIKRGMHESALKCQSTGSGRPLGYRVDEQKHFQIDPESAQTVQTIFEQYIKGESNAAICELLNSRGLRTAQGKPFNKNSINRIIKNRKYIGEYRYHDIVVEGGMPAIISKDTFNLAQAEMERRRTRKAPKSPKAEYLLAGRLFCGHCKGPMQGVSGTGKSGNKWYYYYCGNTRGKNKTCDKKQVSRDRLERAVVDFTVRYILQEEVLEELARKVHAAQERQKDTASEIAFYEKKLADNKKSIANVLRAIESGAATQTLPARLQELENEQAVILGEISFLKGKRLAFTEDQILFALMKHLEPYPGESEQDYRRRIISDFVSEVYLYDDRLLIYFNISSENGKLKSADLSNIEGGEFDEGLVRSTKTHRYELFWFKNVFGLTRKLPQR

SEQ ID NO: 4402 - protein, 520 aa, Unknown
  Description of Unknown: Integrase B4403 sequence
  PTHR30461:SF3,cd00338,SM00857,G3DSA:1.10.10.2600,IPR036162, PF13408,IPR025827,PS51737,G3DSA:3.40.50.1390,IPR006119, IPR038109,PF07508,SSF53041,IPR011109,PTHR30461, PS51736,Coil,PF00239
MKAVIYARYSSEKQQEISIEGQLRVCQEFAAREGYEVVDTYTDRALSASRDVERREDFQRMIRDSSRRGFEVVIVYKFSRFARNRYDSAVYKARLRQNGVKVVSACEPISANPEGALIEGIFESLDEFYSKSLAQDVTRGMHENATKALSTGGTIPLGYVSVDKRLQIDPATAPAVRLAFERYADGMSLARIADELNAQGYRTRAGKAFNRSSFNALLSNRKYIGTYHYNGEVELVGQVPPIVDPGTFRRVQERLRKNTTAPGRTKATINYLLSTKLYCGACGKPMAGESGHNHSGTRYYYYACSGRKRRLGCKMPTLRKDDLERLVVEHARTLLSPDNIKVLAHAAAAEYQRQAEDDSAAVSLRRQLDEVTRSLDNLLRMVEQGATSATLVGRINELEGRKAIIAAELADEQRGAPELTEVDILRWLSCFADGCLEDEDYMRNVIDMLVNKIVVQQSPNQKVSVLVAYNLAGRGEEISGSGLVDVVHQARHNPNLCTRATESCMTFLLYHGCAIFQLAA

SEQ ID NO: 4403 - protein, 520 aa, Unknown
  Description of Unknown: Integrase B4404 sequence
  cd00338,SM00857,G3DSA:1.10.10.2600,IPR036162,PF13408, PS51737,IPR025827,mobidb-lite,G3DSA:3.40.50.1390,IPR006119, IPR038109,PF07508,IPR011109,SSF53041,PTHR30461, PS51736,Coil,PF00239
MTADILARYSTDHQNPVTIDVQVAACKAWCKQHGYQVGRVFADEAVSGMKDTRAGYQACIRHLSMGGADLVVIYDQSRMFREFTEWFEFRRLVASFGAGVASVTQPQLGGDLQDPAVFIGEAATAMMNHAQVLVTRQKTIEALRYRARNGKTTGGRPALGYDIGPDKHYIINEGEAETVRLIYRMAADGEGYGHIVDELNRRGLHTKRGRAFTKNSLLEILRNEKYIGVLTYGRAQKGGRGGWNAHTNPRPDAIRLEGGVPPIVERDVWEIVQRRRESRRGCGGRASAKQTYLLTGKVYCGACGAAMVVHSSNDGSLYQYYECGAKHRSHTCTMRNVRVDVLDRSVARAVKQALQDATNRDALIDTVQRAEREAVSLADTVTATATARLQAINEKIERLTDAILDGMYSQALKQKMMNLEEEKRAVETKLREAGRKQQALSAEEIRHIVQQVAAADISTEGGLRQVLSIVTRVTVYPDRFRVTTFSDEFVGDDPAGENPEQFRTGPGSRTGHQEALLHLR

SEQ ID NO: 4404 - protein, 520 aa, Unknown
  Description of Unknown: Integrase B4405 sequence
  cd00338,SM00857,G3DSA:1.10.10.2600,IPR036162,PS51737, G3DSA:3.40.50.1390,IPR006119,IPR038109,PF07508,IPR011109, SSF53041,PTHR30461,PS51736,Coil,PF00239
MQYEEYLIYLRKSRSDASLEAMGVDVLERHEQILLDLAKRMNLSIGGIYREVVSGESISARPEMQKLLSEVESGRWEGVLVMEVERLARGDTVDQGIVQRAFQYSGTKIITPTKTYNPNNEFDEEYFEFGLFMSRREYKTIRRRMRAGVAAAVKEGKWPFNQAPYGWQRVKLEHGRGWVLAPDPDEAPVVKLIFRLYTGPDRIGITHICRYLDNRGIKPRNGDTWLECSVMGILRNVVNDQRVGIGRRKVIKQVQNGSVSKVRPHSDYDFTAPGLQPRLIDHDAFLEAQEYLAKNSHKLPESYGIKNPLAGILVCSCCGKKMQRRPASRDGSSGRCPYDVLMCNTRGCPTIGSTLELVERELIQALSDWVAGYQLDPTLEVENKVPEKEQLLSSAVSNHDLLLKQNGNLYDLLEQGVYTTEIFLERSHELQKRIKESEAHIEILKKDLEYEKEKIANIENFIPSCKELLSCYWDLSVQDRNKALKMLLESVEYTKTKRNRKGDKDNPTFTLNLKPRIPRI

SEQ ID NO: 4405 - protein, 520 aa, Unknown
  Description of Unknown: Integrase B4406 sequence
  SM00857,G3DSA:1.10.10.2600,IPR036162,PF13408, PS51737,IPR025827,G3DSA:3.40.50.1390,IPR006119, IPR038109,PF07508,IPR011109,SSF53041, PTHR30461,Coil,PS51736,cd00338,PF00239
MNESVCIYLRKSRADREAEAHGEGETLARHERILLDLAKKKEYIVGAIYREVVSGETIADRPVMQQLLREVESGMWDGVLVVEVERLARGDTIDQGVVSRAFQYSDTKIITPTKIYDPNNEFDEEYFEFGLFMSRREYKTIKRRLNAGRVSSVKEGKYCGSVPPFGYERVKLENDKGFTLKPVPEEAEIVKLIYNWYVYGIDGERLGMFKIVKKLNDMNITTQKGSTWTLSTISTILHNPVYAGKLRWNSRKTIKRIENGSVIRTRPMASEYLLSDGLHEPIISPELFSMAEKLIKENPPHPIGLTNTVKNPLSGLVYCKKCGRTMVRRPHQKDRMKDSLMCPNLACNNISSLLLPVEKAVIDGISDLIQNYKLNNTLQDSSGMDVIAAKEKLLSINQEQLRKLNSQKVKQYELLEQGIYTSEVFLERSEATSKQIKECMNVISGLKEELEHDQQLLEQKNTYIPKCENLLSHYWEWDIKTRNDVLKDLIEKIEYNKDTKNTYGHGDVINFTLDIYPKLQ

SEQ ID NO: 4406 - protein, 520 aa, Unknown
  Description of Unknown: Integrase B4407 sequence
  cd03768,PTHR30461:SF3,SM00857,G3DSA:1.10.10.2600,IPR036162, PF13408,PS51737,G3DSA:3.40.50.1390,IPR025827,IPR006119, IPR038109,PF07508,IPR011109,SSF53041,PTHR30461, PS51736,Coil,PF00239
MNVAIYARKSKATKKGESISNQIELCKKYFLNTTNENVNFFIYEDEGWSGGNINRPQFTKMMNDAKLKRFSALICYRLDRIARNVADFSSTYKILEESNIAFISITEQFDTSTIMGRAMINISATFAQIERETIAERIKDNMLELSRTGRWLGGTPPLGFKSVQITENNKRMYKLEVVEEEIEIVRLIYKLYPEYKSTVPIARYLVSNYIKGKNGGDFSRNTVLQILKNPVYCCSDENAIKYFESKGSTLNCSENNKYGLMVYNKRKGGKKENPIEEWIIATGKHPGIIPGAEWVECQNILSEISSKTSPRKATGNKFLLSGMLKCSRCGSSMCSWSRTSKGIYYRSYRCELKNRSSNRCDSKMVNADELEQFVIDLCKNINIEDIINIKRTKNNNASLKRELTSLNKNLNENDKLLQGLIKKLALIDDIDVLSMIQTEIKKIKTENDNINKRINEINISMFDVEDEENKKQLLLESHKLFINTIDLIEDVEAKRNLIMNFIEYFTYDSETNEVGYKLRL

SEQ ID NO: 4407 - protein, 520 aa, Unknown
  Description of Unknown: Integrase B4408 sequence
  PTHR30461:SF3,SM00857,G3DSA:1.10.10.2600,IPR036162,PF13408, IPR025827,G3DSA:3.40.50.1390,PS51737,IPR006119,IPR038109, PF07508,IPR011109,SSF53041,PF00239,PTHR30461, PS51736,Coil,cd00338
MNKIAIYTRKSKFTGKGESIENQIEKCKKFIEFKFNIDSKSVNIFIDEGFSGKNEDRPEYQRMMNQIKSKQINSIVIYQLNRLGRNARDIHNTMQLCDDLGTIIYSATEGFDSSTIFGRAVIGILASLAQLEREQLAERVKDNMYTLAKMGRWLGGQSPLGFDGTREYYIDENGKERSVTELKPNKEELNIVKLIYQKYIEEKSLSQVAKWSLTNHLKGKNGGNITKSAINVILKNPVYVKSTDKVLEYLEKENYEVCGSANGNGLLRYGKDNEQIIAVSKHKGIINADDWMKVQNILKENTDKAPRRGKTNTALLTGILKCNCGSSMNIAHGKLKNGTKTFYYQCAMKVASGGTRCKSKNLNGPLLEEKLIDYLKNYSEIQIIADLENILNKSNELNLKLTAESIDNAIEQCDKSIKVLVNKLKVIEDLEVSKIIIDELTKEKDKKKDLEKQKENLLEDEASKSLSEAEILEVLNLVEHFKNNIDSLDFESKKKLLNEMIESIVIDTDEFIINFNIKKN

SEQ ID NO: 4408 - protein, 520 aa, Unknown
  Description of Unknown: Integrase B4409 sequence
  cd00338,SM00857,G3DSA:1.10.10.2600,IPR036162,PS51737, G3DSA:3.40.50.1390,IPR006119,IPR038109,PF07508,IPR011109, SSF53041,PTHR30461,PS51736,Coil,PF00239
MQYEEYLIYLRKSRSDASLEAMGVDVLERHEQILLDLAKRMNLSIGGIYREVVSGESISARPEMQKLLSEVESGRWEGVLVMEVERLARGDTVDQGIVQRAFQYSGTKIITPTKTYNPNNEFDEEYFEFGLFMSRREYKTIRRRMRAGVTAAVKEGKWPFNQAPYGWQRVKLEHGRGWVLAPDPDEAPVVKLIFRLYTGPDRIGITHICRYLDNRGIKPRNGDTWLECSVMGILRNIVNDQRVGIGRRKVVKQVQNGSVSKVRPHSDYDFTAPGLQPRLIDHDVFLEAQEYLARNSHKLPESYGIKNPLAGILVCSCCGKKMQRRPASRDGSSGRCPYDVLMCNTRGCPTIGSTLELVERELIQALSDWVAGYQLDPTLEVENKVPEKEQLLSSAVSNHDLLLKQNGNLYDLLEQGVYTTEIFLERSHELQKRIKESEEHIEILKKDLEYEKEKIANIENFIPSCKELLSCYWDLSVQDRNKALKMLLESVEYTKTKRNRKGDKDNPTFTLNLKPRIPRI

SEQ ID NO: 4409 - protein, 520 aa, Unknown
  Description of Unknown: Integrase B4410 sequence
  cd03768,PTHR30461:SF3,SM00857,G3DSA:1.10.10.2600, IPR036162,PF13408,IPR025827,G3DSA:3.40.50.1390, PS51737,IPR006119,IPR038109,PF07508, SSF53041,IPR011109,PTHR30461,PS51736,Coil,PF00239
MNVAIYARKSKATKKGESISNQIELCKKYFLNTTNEDVNFLIYEDEGWSGGNINRPQFTKLMNDAKLKRFTALICYRLDRIARNVADFSSTYKILEENNIAFISITEQFDTSTIMGRAMINISATFAQIERETIAERIKDNMLELSKTGRWLGGTPPLGFKSVQITENNKKMYKLEVVEEEMELVRLIYKLYPQYKSTVPIARYLVSNHIKGKNGGDFSRNTVLQILKNPVYCCSDSEAIKYFENKGSILNCINNKELGLMVYNKRKAGKKENPIDEWIIATGRHPGIIPSDQWINCQNILEEIKNRTSPRQATGNKFLLSGLLKCARCGSSMCSWSRTNKGIYYRSYRCELKNRAANRCDSKMINAEELENFIIELCKNINIEEIINVKKNKNNNTSLKKELSSLNKSLNDNEKLLQGLIKKLALIDDIDILSMIQTEIKKIKAENENINKRINEINLSMFDIEDEYKNQQILLESHKLFKDTIDLVKDIEAKRNLIMSFIEYFTYDSETNEVGYKIRL

SEQ ID NO: 4410 - protein, 520 aa, Unknown
  Description of Unknown: Integrase B4411 sequence
  PTHR30461:SF3,cd00338,SM00857,G3DSA:1.10.10.2600,IPR036162, PF13408,PS51737,G3DSA:3.40.50.1390,IPR025827,IPR006119, IPR038109,PF07508,IPR011109,SSF53041,PTHR30461, PS51736,Coil,PF00239
MARKKNIAAGLDAVIYARYSSHNQREVSIEQQIAECTKHAAALGLRIVGTYEDRAISGKTDNRPRFQQMMRDAEKGKFQAVVAWKSNRIGRNMLQAMVNEAKLDDYGVKVFYAEEDFDDTAAGRFALRNMMNVNQFYSENMAEDITRGLYDNASKCMANGRQPLGYKRGEDGRVVLDEANAAVVREIFTRVAAGDLFVDIARDLNAQGIKTSKGANWNKGSFQSICQNERYRGIYIYGDVRVADGIPRIVSDDLWYRVQEAMRMKKNPVGTRHRVGAEDYLLTGKLRCGHCGSYMTGVSGTSRNGELHYYYTCQKRRTEHACDKKNIRRDVIEPAVAQAIKMYCLTDDVIAWIADRTVEYWEKHDNDLQIEALEQQLEENKKATSNMLKAIEMGIITEATRTRMVELETEQSRLSVQLNVAKEDVVKIDREQIISYLELLQQGDIHDRDFQMELFKNFLVAVYVYDDNRMKLVFSCMGDQNSVEIPLETGEDPPDGGLSPDAKMFVLTPDSSTKKAPYFM

SEQ ID NO: 4411 - protein, 520 aa, Unknown
  Description of Unknown: Integrase B4412 sequence
  cd03768,PTHR30461:SF3,SM00857,G3DSA:1.10.10.2600,IPR036162, PF13408,PS51737,G3DSA:3.40.50.1390,IPR025827,IPR006119, IPR038109,PF07508,IPR011109,SSF53041,PTHR30461, PS51736,Coil,PF00239
MNVAIYARKSKATKKGESISNQIELCKKYFLNTTNEDVNFLIYEDEGWSGGNINRPQFTKMMNDAKLKRFSTLICYRLDRIARNVADFSSTYKILEENNIAFISITEQFDTSTIMGRAMINISATFAQIERETIAERIKDNMLELSRTGRWLGGISPLGFKSVQITENNKKLYKLEVVNDELEIVKLIFNLYPQYKSTVPVARYLVSNHIKGKNGGDFSKNTVLQILKNPVYCCSDTEAIKYFKGKDSTLNCIDNKELGLMVYNKKKSGKKENPIDEWVVATGKHQGIIPGAEWVNCQNILEEISRKASPRKATGNKFLLSGMLKCARCGSSMCSWSRTSRGIYYRSYRCELKNRAATRCDSKMVNADDLESFVIELCKNINLEEIINIKKTKNNNSTLKRELTSLNKTLVENDKLLQGLVKKLALIDDIDILTIIQAEIKKIKSENENINKRINEINLSMFDSEDEYKNQQILLESHKLFKDTIDLVKDVEAKRNLIMSFIEYFTYDSQTNEIGYKLRL

SEQ ID NO: 4412 - protein, 520 aa, Unknown
  Description of Unknown: Integrase B4413 sequence
  PTHR30461:SF3,cd00338,SM00857,G3DSA:1.10.10.2600,IPR036162, PF13408,IPR025827,G3DSA:3.40.50.1390,PS51737,IPR006119, IPR038109,PF07508,IPR011109,SSF53041,PTHR30461, PS51736,Coil,PF00239
MPRKKAPAAEAPRLVAYYRYSGGSRQTEQSIEGQRRDCEAYARAHGMTILREYVDRHISGKTDDRPAFQQLVADSAAHTFDAVICWKTDRLARNRYDSAVYKKKLRDNGVEILYAAESNISGAEGIIIEGLMEALAEYYSAELAEKARRGMRESALKGKALGSSRPLGLTVDADKHYIIEPTGAEAVRYIFEQYAAGLSSSSIVERLNAMGLRTSHGGPFNKSSINRIIRNEMYRGVYVSKKFDVRIEGAIPAIIDNDLWKRAQNMFERNRQSRTPHASRADYILSGKLYCGECGCLMKGVCGRSSGNGQMYHYYACPGRSIGRACTRKNIPQDELEAMVVNSVADLLLEPELLEQIADAIVELQQAEAARPDPEKQALEKSLSDVRNKIQNILSAIENGTSSAALSARLADLEQQESTLSYQLSSLTAKKPLTFTRDQILFLLQQFRVSPSERTKAYCRRLVDTFVDHIELTNTELILYFNISDETIDKNKKAPRSNPSKESSTEKRLVRVARIELTAS

SEQ ID NO: 4413 - protein, 520 aa, Unknown
  Description of Unknown: Integrase B4414 sequence
  PTHR30461:SF3,SM00857,G3DSA:1.10.10.2600,IPR036162,PS51737, G3DSA:3.40.50.1390,IPR006119,IPR038109,PF07508,IPR011109, SSF53041,PF00239,PTHR30461,PS51736,Coil, cd00338
MSTFDMNESEGSTKIDKYAIYLRKSRADEEAEKYGDEETLSRHKAILTEFAARKGYYIDKIYQEVVSGETIKDRPEIQKLINDCYVGKYKGILVVEITRLSRGNQGDAQTIMDCLKYSNMNNGILVVTPTKVYDVAHSTEDEEFMEFELFMSRKEYKMIKKRMDRGRKQMVVEGNYMGSRRPYGYTIKKTHRSRYLVPHPDEAKIVKQIFHWAANEKMTAGKIMRKLTAMGVPTYTGSSEWNIATIKDILRNPTYIGKVRWNHRMTVKTMRDGELIANRPRTNHTDHYMLYNGKHDALIDEETFKKAGGEFYSDKTKHRHKLINPFATLITCAKCGKVMGYKADYTKPNVAPRIQHAYSQICKVKSALYEDVQNAIIHGLKMYIEDFTMKLDNLSDTNEDSVHAQLEILRKENKKIETKLDDLFDAWEDKIISDNDFVKRKAKHKARQESILEEMIKLEDSIPEKDEYREKIITLTEALEVIKDETIDANAKNKYLKTVIDSIVFSRENNTEFILDITLR

SEQ ID NO: 4414 - protein, 520 aa, Unknown
  Description of Unknown: Integrase B4415 sequence
  cd03768,PTHR30461:SF3,SM00857,G3DSA:1.10.10.2600,IPR036162, PF13408,PS51737,G3DSA:3.40.50.1390,IPR025827,IPR006119, IPR038109,PF07508,IPR011109,SSF53041,PTHR30461, PS51736,Coil,PF00239
MNVAIYARKSKATKKGESISNQIELCKKYFLNTTNEDVNFLIYEDEGWSGGNINRPQFTKMINDAKLNRFSTLICYRLDRIARNVADFSSTYKILEENNIAFISITEQFDTSTIMGRAMINISATFAQIERETIAERIKDNMLELSRTGRWLGGISPLGFKSVQITENNKKLYKLEVVNDELEIVKLIFNLYPQYKSTVPVARYLVSNHIKGKNGGDFSKNTVLQILKNPVYCCSDTEAIKYFKDKDSTLNCIDNKELGLMVYNKKKSGKKENPIDEWVVATGKHQGIIPGAEWVNCQKILEEISRKASPRKATGNKFLLSGMLKCARCGSSMCSWSRTSRGIYYRSYRCELKNRAATRCDSKMVNADDLESFVIELCKNINLEEIINIKKTKNNNSTLKRELTSLNKTLVENDKLLQGLVKKLALIDDIDILTIIQAEIKKIKSENENINKRINEINLSMFDSEDEYKNQQILLESHKLFKDTIDLVKDVEAKRNLIMSFIEYFTYDSQANEIGYKLRL

SEQ ID NO: 4415 - protein, 520 aa, Unknown
  Description of Unknown: Integrase B4416 sequence
  cd03768,PTHR30461:SF3,SM00857,G3DSA:1.10.10.2600,IPR036162, PF13408,PS51737,G3DSA:3.40.50.1390,IPR025827,IPR006119, IPR038109,PF07508,IPR011109,SSF53041,PTHR30461, PS51736,Coil,PF00239
MNVAIYARKSKATKKGESISNQIELCKKYFLNTTNEDVNFLIYEDEGWSGGNINRPQFTKMINDAKLNRFSTLICYRLDRIARNVADFSSTYKILEENNIAFISITEQFDTSTIMGRAMINISATFAQIERETIAERIKDNMLELSRTGRWLGGISPLGFKSVQITENNKKLYKLEVVNDELEIVKLIFNLYPQYKSTVPVARYLVSNHIKGKNGGDFSKNTVLQILKNPVYCCSDTEAIKYFKDKDSTLNCIDNKELGLMVYNKKKSGKKENPIDEWIVATGKHQGIIPGAEWVNCQKILEEISRKASPRKATGNKFLLSGMLKCARCGSSMCSWSRTSRGIYYRSYRCELKNRAATRCDSKMVNADDLESFVIELCKNINLEEIINIKKTKNNNSTLKRELTSLNKTLVENDKLLQGLVKKLALIDDIDILTIIQAEIKKIKSENENINKRINEINLSMFDSEDEYKNQQILLESHKLFKDTIDLVKDVEAKRNLIMSFIEYFTYDSQTNEIGYKLRL

SEQ ID NO: 4416 - protein, 520 aa, Unknown
  Description of Unknown: Integrase B4417 sequence
  PTHR30461:SF3,SM00857,G3DSA:1.10.10.2600,IPR036162,PF13408, PS51737,IPR025827,G3DSA:3.40.50.1390,IPR006119,IPR038109, PF07508,IPR011109,SSF53041,PF00239,PTHR30461, Coil,cd00338
MKRVYCLYRVSTKGQVDKDDIPMQKTSCREFAERNGWTILKEFQEKGVSGFKVSARERDAIQDLKTAAENKEFDVLLVFMFDRIGRIDDETPFVVEWFIKHGIEVWSVNEGEQRMDSHVDKLMNYIRFWQANGESQKTSARVKTRLNQMTMDGKFTGGVAPFGYKLIKSGEINKKGKELMDIVVDDDEAVIVKKIFDMTVKEGYGSYRMADYLNSHGIRTHNNSKFQCNTVNRILKNRLYCGYFVSGGVESPYIEKLQIIDENVFDQAQFILKQRSSKNEEKKQIARTTKGSTLLSGNIYCAHCGQKMVSTSYIDRYDRADGSQYRVRRQRYICTNKAMKRGACDGQSAYVAHKIDGAVLATLKDYLAKIKSTPKDIALEKRYKSEISEYKRKQTKLEKEIDKLKRQVVELSAEIGRSLLGESRFTPDMLSTSIDNTNDILHKKEIELSDIKYKLTNQQNAMGKLDFYYSQFRTWADEFDNSTMEQKKMIVCQLIKEVRVARGYELEIVFDLNYEQFLSK

SEQ ID NO: 4417 - protein, 520 aa, Unknown
  Description of Unknown: Integrase B4418 sequence
  PTHR30461:SF3,SM00857,G3DSA:1.10.10.2600,IPR036162,PF13408, IPR025827,G3DSA:3.40.50.1390,PS51737,IPR006119,IPR038109, PF07508,IPR011109,SSF53041,PTHR30461,Coil, PS51736,cd00338,PF00239
MAVFAQAVRPDFNDDVADVVIYSRYSSLGQNDQSIDGQIEACMRYAAQRGFRVVGQYIDRAMSGTHADSRPEFQRLIRDGKKGIYKYVLVWKLDRFARNRYDSAIYKNELKKHGVKVLSVTEGIDAGSDSIILEAVLEAMAEEYSRQLSQNVRRGMRQNAEKQLTLGGNTPLGYRVEDKRLVVDKDEAEIVRFAFRSYADGMTKTEIAKECNRRGWRTRSGRPFTLSSFSVMLKNQTYIGTYTFKDELAVEDAVPAIVDRATFEKVGAMLERNRRAPGRVKAKEEYQLQGKVFCGYCGAPMVGESGRGRRGATYHYYACATRKKAHTCQKKNEKKDFLEWYVVEQITTHILTDRRIHEIAAGVVAEYNRSFDAAGVRDLERKIRAMDKEMDALVDALIRTTAAPAVAKINERVELLAAQKEEAEVDLAKLKVASRITLSEDEIVAWLRQFIHGDPTDPVFRQRVIDIFVNSIYLYDDKVVMYFNIKDASQVSYIEMQEDLEGLDGSDLNCCGVPKVLEIV

SEQ ID NO: 4418 - protein, 520 aa, Unknown
  Description of Unknown: Integrase B4419 sequence
  PTHR30461:SF3,cd00338,SM00857,G3DSA:1.10.10.2600,IPR036162, PF13408,IPR025827,PS51737,G3DSA:3.40.50.1390,IPR006119, IPR038109,PF07508,IPR011109,SSF53041,PTHR30461, PS51736,Coil,PF00239
MQKRRTKYANSQGDNAVIYARYSSHNQKDTSIEQQIEVCTKYARDNGYRITNIYADRAISGKTDARPQFRLMMQDAREHKFDVVISWKSSRLGRDMLDAMTNDIILRNLGIKCFYTEENFDDTAAGRFALRNMMNVNQFYIENMAEDILRGMRDNAKKCRVNNGSPPLGYRRGDDGKYEIVPEEAETVREIFTKVLAGMAFVDIANELNARGIKTKKGAPWGRSSFSRLLSNERYIGTYKWSDIVIENGMPAIIDREVFEMAQKKIKGERPLRRRHNENGDYLLTGKLFCGKCDSPMTGMSGTSKSGAKHHYYACYSARKDGSCDKKAVKRDWVEKTVALFIKEHVLRDEVIEWMVDQYMVYQKATFESQRIMEMRNQLKDVQSQLDNLVDAIARGMYTDSTKDKLLKLEADKKEIEQDIRLATYNLKEYDREHVRCYFLSFKEGSVESKDYLKRLFDQFVTKIYLYDDEIRIAFSGTKDDSPVSFKIIDEAEELAVSSVRLSSASSHQKRKRRTLLLQE

SEQ ID NO: 4419 - protein, 520 aa, Unknown
  Description of Unknown: Integrase B4420 sequence
  PTHR30461:SF3,SM00857,G3DSA:1.10.10.2600,IPR036162,PF13408, PS51737,IPR025827,G3DSA:3.40.50.1390,IPR006119,IPR038109, PF07508,IPR011109,SSF53041,PF00239,PTHR30461, Coil,cd00338
MKRVYCLYRVSTKGQVDKDDIPMQKTSCREFAERNGWTILKEFQEKGVSGFKVSASDRDAIQDLKSAAEKKEFDVLLVFMFDRIGRIDDETPFVVEWFIKHGIEVWSVNEGEQRMDNHVDKLMNYIRFWQANGESQKTSARVKTRLNQMTLDGKFTGGVAPFGYKLIKSGEINKKGKELMDIVIDDDEAPIVKKIFEMTVKEGYGSYRMADFLNSHGIRTHNNSKFQCNTVNRILKNRLYCGYLVSGGVESPYIERLHIIDENIFDQAQFILKQRSSKNEEKQQIARTTKGSTLLSGNIYCAHCGQKMVSTSYIDRYDRADGSQYRVRRQRYICTNKAMKRGACDGQSAYVAHRIDSAVLATLRDYLAKIKSTPKDIALEKRYKSEISEYRRKQTKLEKEIEKLKRQVVELSAEIGRSLLGESRFTPDILSTSIDNTNDLLHKKEIELSDIKFKLANQQNAMGRLDFYYSQFRTWADEFDNSTMEQKKMIACQLIREVKVSRGYELEIIFDLNYEQFLSL

SEQ ID NO: 4420 - protein, 520 aa, Unknown
  Description of Unknown: Integrase B4421 sequence
  cd03768,PTHR30461:SF3,SM00857,G3DSA:1.10.10.2600,IPR036162, PF13408,IPR025827,PS51737,G3DSA:3.40.50.1390,IPR006119, IPR038109,PF07508,IPR011109,SSF53041,PTHR30461, PS51736,Coil,PF00239
MNVAIYARKSKATKKGESISNQIDLCKKYFTNTTNEDVNFLIYEDEGWSGGNINRPNFTKMINDAKLKRFSTLICYRLDRIARNVADFSSTYRILEENNIAFISITEQFDTSSIMGRGMLNIAATFAQIERETIAERIRDNMLELSRTGRWLGGTPPLGFKSVQITENDKKMYKLEVIEEEMEIVRLIYRLYPKYKSTVPIARYLVSNYIKGKNGGDFSRNTVLQILKNPVYCCSDNESIKYFKNKGSFVNATISSEYGLMVYNKRKGGKKENPIDEWIIATAKHPGIISGSEWVKCQNILEEIKSKSSPRKATGNKFLLSGLLKCARCGSSMCSWSRTSKGIYYRSYRCELKNRAANRCDSKMINADDLESFVIDLCKNIDLRKIINAKDTEKNNLALKKELTALNKNLNENNKLLQGLIKKLALIDDIEILAMIQAEIKNLKSQNNNINKRINEINFSMFDIEDESKTKQLLLESHEHFKKTIDLIDDVEGKRNLITNFIEYFTYDSKTNKIEYKIKL

SEQ ID NO: 4421 - protein, 520 aa, Unknown
  Description of Unknown: Integrase B4422 sequence
  PTHR30461:SF3,SM00857,G3DSA:1.10.10.2600,IPR036162,PF13408, PS51737,IPR025827,G3DSA:3.40.50.1390,IPR006119,IPR038109, PF07508,IPR011109,SSF53041,PF00239,PTHR30461, PS51736,Coil,cd00338
MARKKNIAAGQDAVIYARYSSHNQREVSIEQQIAECTKYAAALGLRIVGTYEDRAISGKTDNRPRFQQMMRDAGKGKFQAVVAWKSNRIGRNMLQAMVNEAKLDDYGVKVFYAEEDFDDTAAGRFALRNMMNVNQFYSENMAEDITRGLYDNASKCMANGRQPLGYKRGEDGRVVLDDANAAVVREIFTRVAAGDLFVDIARDLNAQGIKTSKGANWNKGSFQSICQNERYRGIYIYGDVRVVDGIPRIVSDDLWYRVQEAMRMKKNPVGTRHRVGAEDYLLTGKLHCGHCGSYMTGVSGTSRNGELHYYYTCQKRRTEHACDKKNIRRDVIEPAVAQAIKMYCLTDDVIEWMADRTVEYWEKHDNDLQIEALEQQLEENKKATSNMLKAIEMGIITEATRTRMVELETEQSRLSVQLNAAKEDVVKIDREQIISYLELLQQGDIHDRDFQMELFKNFLVAVYVYDDNRMKLVFSCMGDQNSVEIPLETGEDPPDGGLSPDAKMFVLTPDSSTKKALYFV

SEQ ID NO: 4422 - protein, 520 aa, Unknown
  Description of Unknown: Integrase B4423 sequence
  SM00857,G3DSA:1.10.10.2600,IPR036162,PS51737,G3DSA:3.40.50.1390, IPR006119,IPR038109,PF07508,SSF53041,IPR011109, PF00239,PTHR30461,PS51736,Coil,cd00338
MQYEEYLIYLRKSRSDASLEAMGVDVLERHEQILLDLAKRMNLSIGGIYREVVSGESISARPEMQKLLSEVESGRWEGVLVMEVERLARGDTVDQGIVQRAFQYSGTKIITPTKTYNPNNEFDEEYFEFGLFMSRREYKTIRRRMRAGVTAAVKEGKWPFNQAPYGWQRVKLEHGRGWVLAPDPDEAPVVKLIFRLYTGPDRIGITHICRYLDNRGIKPRNGDTWLECSVMGILRNVVNDQRVGIGRRKVVKQVQNGSVSKVRPHSDYDFTAPGLQPRLIDHDVFLEAQEYLARNSHKLPESYGIKNPLAGILVCSCCGKKMQRRPASRDGSSGRCPYDVLMCNTRGCPTIGSTLELVERELIQALSDWVAGYQLDPTLEVENKVPEKEQLLSSAVSNHDLLLKQNGNLYDLLEQGVYTTEIFLERSHELQKRIKESEAHIEILKKDLEYEKEKIANIENFIPSCKELLSCYWDLSAQDRNKALKMLLESVEYTKTKRNRKGDKDNPTFTLNLKPRIPRI

SEQ ID NO: 4423 - protein, 520 aa, Unknown
  Description of Unknown: Integrase B4424 sequence
  PTHR30461:SF3,cd00338,SM00857,G3DSA:1.10.10.2600,IPR036162, PF13408,PS51737,G3DSA:3.40.50.1390,IPR025827,IPR006119, IPR038109,PF07508,IPR011109,SSF53041, PTHR30461,Coil,PF00239
MLTNYLIYLRKSRADNPDMTVDEVLAKHETILQDFARSEFGEEIPERFIFREVVSGETIAARPIMQRLMQLLESSNVKGVLVVDPQRLSRGDLEDCGKIVNVFRYTGTQVLTPQRSYNLADEYDRKFFEMELTRGNDYLEYTKKILYRGRTASVKRGNYIGSVAPYGYKKITVGSGKDVQHTLEVIPEEAEALRLMCRLYLDDGMGFRAIAHQLDALGFRPRKAPQWSPAAIKDMLENPVYIGKIRWNWRKSEKKMVNGEITLSRPKNKDQHDYIYVDGLHEPIISEDVHRAILAKRGTNPCVRKGSELKNPFAGLLCCGSCGHAMSLKRSTYKRQPGRMTESFLCDNQSNCHTKSVLYAALYDRVVQTLEASISDFEILLKNDDDGFQRSNLAIIQTLESEIEKLHAKDMRQKDAFDDGIYSKDEYLSRNAKVQEQLEKAHQALQEARLATSPIIDYQEKIARFTDCLSALRDPDVSAAEKNKFLKTCIKKITYHNHMESKAGIGRYVENVFDLDIELL

SEQ ID NO: 4424 - protein, 520 aa, Unknown
  Description of Unknown: Integrase B4425 sequence
  PTHR30461:SF3,SM00857,G3DSA:1.10.10.2600,IPR036162,PF13408, IPR025827,G3DSA:3.40.50.1390,PS51737,IPR006119,IPR038109, PF07508,IPR011109,SSF53041,PTHR30461,cd00338, PF00239
MPTSKNTARKYAAGGSSDNSCGVEPLRAVIYARYSSSGQREESIEGQLRDCYDFAKKHGIIVIGEYIDKAMTGRVDRRPDFQRMMKDSEKGRFNCVLLWKMDRFARNRYDSAMYKYKLKKNGIRIFYAKETIPDGPEGIILESVMEGYAEYYSENLAQNVKRGNYDSALELKTLGKTCLGLKTGPDGRYMVDQAEAAIVRRIFEEYAEGERAKDIYERLNSEGYRTSRGGKFNKNSLRRILSNKKYIGVYEYEDIYVENGIPAIITDRDLFERVQKMLKINHDAPARGKAQNFLLTTKLFCGLCGSPMIGDGGTSHTGKAYAYYSCTKRKRGRSCKKESVPKDWIEDLVVGELVKIVHNDELIEQIADRVMEYQKREKDQSGLHALEIRQKENEKAISNMLAAIEAGIITPSTKTRLMELEADRADIEKGIAHELLAEPEFERDQIIYFLERFRSGDINDEAYRIMLVDTFLNSVYLYDDDHLVLVMNYSGENCKVDLKLVEGAVSGDGCKGSAFAPSSA

SEQ ID NO: 4425 - protein, 520 aa, Unknown
  Description of Unknown: Integrase B4426 sequence
  PTHR30461:SF3,cd00338,SM00857,G3DSA:1.10.10.2600,IPR036162, PF13408,IPR025827,G3DSA:3.40.50.1390,PS51737,IPR006119, IPR038109,PF07508,SSF53041,IPR011109,PTHR30461, Coil,PF00239
MLTNYLIYLRKSRADNPDMTVDEVLAKHETILQDFARSEFGEEIPERFIFREVVSGETIAARPIMQRLMQLLESSNVKGVLVVDPQRLSRGDLEDCGKIVNVFRYTGTQVLTPQRSYNLADEYDRKFFELELTRGNDYLEYTKKILYRGRTASVKRGNYIGSVAPYGYKKITVGSGKDVQHTLEVIPEEAEALRLMCRLYLDEGMGFQAIAHQLDALGFRPRKAPQWSPAAIKGMIENPVYIGKIRWNWRKSEKKMVNGEIILSRPKNKDPHDYIYVDGLHEPIISEDVHRAILAKRGTNPCVRKGAELKNPFAGLLCCGRCGHAMSLKRSTYKRQPGRMTESFLCDNQSNCHTKSVLYAALYDRVVQTLEASISDFEILLKNDDDGFQRSNLAIIQTLESEIEKLHAKDMRQKDAFDDGIYSKDEYLSRNAKVQEQLEKAHQALQEARLATSPIVDYREKIARFTDCLAALRDPDVSAAEKNKFLKTCIKKITYHNHMESKAGIGRYVENVFDLDIELL

SEQ ID NO: 4426 - protein, 520 aa, Unknown
  Description of Unknown: Integrase B4427 sequence
  PTHR30461:SF3,cd00338,SM00857,G3DSA:1.10.10.2600,IPR036162, PF13408,PS51737,G3DSA:3.40.50.1390,IPR025827,IPR006119, IPR038109,PF07508,IPR011109,SSF53041,PTHR30461, PS51736,Coil,PF00239
MAKKVRKIPATLNQFTSEPVAVRRKKKVAGYARVSTDREEQATSYEAQMTYYKTYIEGHEDWEFVGMYSDEGITATNTKKRDGFNQMVEDALDGKIDLIITKSVSRFARNTVDSLTTIRKLKEKGIEVYFEKENIWTLDAKGELMITIMSSLAQEESRSISENTTWGKRKQFADGKGSVAYSWFLGYDKDFKINEEQAATVRLIYRLFISGLSLYAITKELESRGIKSPSGKDRWHISTVKSILTNEKYRGDALLQKQYTTDFLQKKRKTNNGEIPQYYVEEHHEAIIPPAQFDFVQAELARREQNGRYSGVSIFSNKIKCGCCGGWYGSKVWHSTDKYRKVIYRCNRKYGKDTPPCNTPHLTEEEIKQLFLKALNALVDAKEETIENLQGLIETVCQTESLDAEQERLEQELRIIAENLANLIQKNASVALNQTEQAEQEEKLRNLYGEKHSRFQELEALIQEKNDTKEILTNFITKLEDLTGEQTEFREELWGGLVDYIRIDEKSSTVVFRGGIEITI

SEQ ID NO: 4427 - protein, 520 aa, Unknown
  Description of Unknown: Integrase B4428 sequence
  PTHR30461:SF3,cd00338,SM00857,G3DSA:1.10.10.2600,IPR036162, PF13408,PS51737,IPR025827,G3DSA:3.40.50.1390,IPR006119, IPR038109,PF07508,IPR011109,SSF53041,PTHR30461, PS51736,Coil,PF00239
MAPKKKQASADAGAYNRAVIYARYSPGPNQREESIEGQIRECKEVAKKHGLMVIHEYADRRLTGTNDERPEFQRMLRDADRGLFDVVITWKNDRFARNRYDSAIYKQRLKRNGVKIIYAKEHIPDGPEGIILESLLEGMAEYYSANLSQNIRRGIRENALEGKHFGGTVPLGYKLDHEKRYILDPEKAPLVREIFERYIAGESIVDMCDDLNRRGYTTAGGKKFVRSSLHRMLANEKYIGVMRYEDIVLKDATPRIITDEQFAAAAKRSERNKISKRAPIYAPVEFLLTGKVYCGHCGQPMGGTGGTGRHGSRFYYYQCNGRKYKKGSCNKKPIKKDILEKSVCDCVVNNIINNDTVINSIIDRCMEIQLQEVDTSPADGLRRELADAEKSLANIMRAIEAGIITASTKARLVELEERCASLRQGIAAAEIVPPKLSRDQMLFLFEKYRGRDVGDTEYMRDVIDTFVDKIYVYDDKIVITFNFSDDNEKEITIKDVEAATSAAPAHGEGVLLLPHHLHQN

SEQ ID NO: 4428 - protein, 520 aa, Unknown
  Description of Unknown: Integrase B4429 sequence
  SM00857,G3DSA:1.10.10.2600,IPR036162,PF13408,PS51737, IPR025827,G3DSA:3.40.50.1390,IPR006119,IPR038109,IPR011109, SSF53041,PF00239,PTHR30461,PS51736,Coil, cd00338
MQSVPCDNPRPGRRVASYARFSSHNQRSESIEIQEDNNLAYCAINDLDVVAMYADEAKTGRTTSRADFQRMVADAKAGLFDYVVIYKVARIMRNRDEMALLRITLRKYGVEILYSGEDIGKGSDGILQLGLKEVLAEWESAQLGERIVDGIQKNAEKCMANGNAMYGWDIVNGYYEVNELEAAVLRRAKSMLSNGKTVAEIVRALDGHKTKRGGPITHNILTKMLKRKQNAGVYSYAGHEKEGGMPALWTMEEQRMIWKMLGDETRPRRKALSADFLLTGKLWCGKCGTPMTGTSGTGKSGATYYYYKDKKGCGRQVRKDVIEDNVADAVRAALSDEATREKIADLFCEYEEGEDATLQSDVIAAELKEIRAAYANILKAIEQGVVPPGAKERIAELQGQEATLNEEMRIAEAIEAVALDRDRVLFWLEQIAAAPDAKTLIDVFVAKVVLMGDDDLHIVMHFDDGEGDEPPASAVLDRGGGVLPDCTRLHHGNISRTPWFGYYVAWRTVVIVTKYRKTPC

SEQ ID NO: 4429 - protein, 520 aa, Unknown
  Description of Unknown: Integrase B4430 sequence
  PTHR30461:SF3,cd00338,SM00857,G3DSA:1.10.10.2600,IPR036162, PF13408,PS51737,IPR025827,G3DSA:3.40.50.1390,IPR006119, IPR038109,PF07508,IPR011109,SSF53041,PTHR30461, PS51736,Coil,PF00239
MARKKNIAAGLDAVIYARYSSHNQREVSIEQQIAECTKHAAALGLRIVGTYEDRAISGKTDNRPRFQQMMRDAEKGKFQAVVAWKSNRIGRNMLQAMVNEAKLDDYGVKVFYAEEDFDDTAAGRFALRNMMNVNQFYSENMAEDITRGLYDNANKCMANGRQPLGYKRGADGKVMLDEPAAAVVREIFTRVAAGDLFVDIARDLNAKGIKTSKGAEWNKGSFQSICQNERYKGIYIYGDVRIVDGIPRIVSDELWYRVQEAMRMKKNPVGTRHRVGAEDYLLTGKLRCGHCGSYMTGVSGTSRNGELHYYYTCQKRRTEHACNKKNVRRDVIEPAIAQAIKMYCLTDDVIEWMADQTVQYWEKHDNDLQIEALEQQLAENKKATSNMLKAIEMGIITEATRSRMVELETENSKLTAQLSAAKRDVVKINRDDLIDELHILRSKDIHDREVQAELFKDFLVAAYIYDDNRLKLVFSFMGKDNSVEIPLETGEDPPDGEDSPDAKMFVLTPDCSTKKALYFV

SEQ ID NO: 4430 - protein, 520 aa, Unknown
  Description of Unknown: Integrase B4431 sequence
  PTHR30461:SF3,SM00857,G3DSA:1.10.10.2600,IPR036162,PS51737, G3DSA:3.40.50.1390,IPR006119,IPR038109,PF07508,SSF53041, IPR011109,PTHR30461,Coil,PS51736,cd00338, PF00239
MLEKNIIIYLRKSRSDDPGMSVEDVLAKHELQLQEYAVSEYGEQIPEDHIFREVVSGETIADRPVMKQVMRLLEAGNITAVLVIEPQRLSRGDLEDCGRIINIFRYTHTLVATPPKTYDLTNEYDRKFFEMELMRGNDYLEYTKKILNRGRIASVKKGNFIGSVAAYGYKKVKIGTGKDACHTLEIIPEQADAVKLMFKLYLEGNGFTNIAKTLDELKIKPLRSETWSPAAISDMLENPVYVGKIRWNYFKTVKKIEDGQIVKSRPINQDPSDWFLVQGKHPAIIDQATFDAVQERRGRTPKIKRFNELKNPFAGLLYCQCGKAMSLKIYNQKKGKCEPTKLMLCNKQSWCKTKSVKYDTFLERIVETLESTIADFEIKLKKDNGDAAQLHKNIVYNLETNLKKLKDKDIRQKDAYEDGIYTKEEYASRNAKLQEQISETTKALCQAKDSVPPTINYKEKIARFTDCLNALNDVSVPAAEKNMLLKACFEKIIYHNDMPSISGHGRWIENKFKLEIFLRL

SEQ ID NO: 4431 - protein, 520 aa, Unknown
  Description of Unknown: Integrase B4432 sequence
  PTHR30461:SF3,SM00857,G3DSA:1.10.10.2600,IPR036162,PF13408, IPR025827,G3DSA:3.40.50.1390,PS51737,IPR006119,IPR038109, PF07508,IPR011109,SSF53041,PTHR30461,PS51736, cd00338,PF00239
MNKLRAAAYCRVSTDRAEQSGSLASQRSFFDDYIRNSDSMTLVGVFYDEGTSGTTTLNRYGFNKMISLAVSGGIDIILTKEVSRFARNTVDTLNITRMLRAKGVGIIFINDNIDTRDSDGELRLSIMATIAQEESRKISERVKWGQQRKMEQGVVFGRSCLGYDVKDGKITVNADSAEIVKRIFTEYTVLLKGAESIADELNAEQIRTVNGGRWSGAFIRKVLRNVKYVGDLEQKKTCTPDFLTHKKRLNSSEHIYIRNHHEPIISRELWEQTQAEISRRKPTDTSRHSDRYVFSGKVYCGVCGSVMVSRVKTLKNGKIYHALRCSGRIGGKSCNNETLNVTALKACVKRIFTDIPIDKTAVINAVIKGLSRTDKPDIPALRRKIETLNAKKRRAVDLMLDGLITQQELIEQKSYYDSIIEKLSQEISSDRSIFETDKIRKNAEKFLDFTSDPIWLLVIRADYIHGTLTVYLNGIEKGFTTCFTATGRGDSYRVITGNTVRSQGIIPGTMQVPKNYPISK

SEQ ID NO: 4432 - protein, 520 aa, Unknown
  Description of Unknown: Integrase B4433 sequence
  SM00857,G3DSA:1.10.10.2600,IPR036162,PS51737,G3DSA:3.40.50.1390, IPR006119,IPR038109,PF07508,IPR011109,SSF53041, PF00239,PTHR30461,PS51736,Coil,cd00338
MQYEEYLIYLRKSRSDASLEAMGVDVLERHEQILLDLAKRMNLSIGGIYREVVSGESISARPEMQKLLSEVESGRWEGVLVMEVERLARGDTVDQGIVQRAFQYSGTKIITPTKTYNPNNEFDEEYFEFGLFMSRREYKTIRRRMRAGVTAAVKEGKWPFNQAPYGWQRVKLEHGRGWVLAPDPDEAPVVKLIFRLYTGPDRIGITHICRYLDNRGIKPRNGDTWLECSVMGILRNVVNDQRVGIGRRKVIKQVQNGSVSKVRPHSDYDFTAPGLQPRLIDHDVFLEAQEYLAKNSHKLPESYGIKNPLAGILVCSCCGKKMQRRPASRDGSSGRCPYDVLMCNTRGCPTIGSTLELVERELIQALSDWVAGYQLDPTLEVENKVPEKEQLLSSAVSNHDLLLKQNGNLYDLLEQGVYTTEIFLERSHELQKRIKESEAHIEILKKDLEYEKEKIANIENFIPSCKELLSCYWDLSAQDRNKALKMLLESVEYTKTKRNRKGDKDNPTFTLNLKPRIPRI

SEQ ID NO: 4433 - protein, 520 aa, Unknown
  Description of Unknown: Integrase B4434 sequence
  PTHR30461:SF3,cd00338,SM00857,G3DSA:1.10.10.2600,IPR036162, PF13408,PS51737,IPR025827,G3DSA:3.40.50.1390,IPR006119, IPR038109,PF07508,IPR011109,SSF53041, PTHR30461,PS51736,Coil,PF00239
MPRKKAPAAEAPRLVAYYRYSGGSRQTEQSIEGQRRDCEAYARAHGMTILREYVDRHISGKTDDRPAFQQLVADSAAHTFDAVICWKTDRLARNRYDSAVYKKKLRDNGVEILYAAESNISGAEGIIIEGLMEALAEYYSAELAEKARRGMRESALKGKALGSSRPLGLTVDADKHYIIEPTGAEAVRYIFEQYAAGLSSSSIVERLNVMGLRTSHGGPFNKSSINRIIQNEMYRGIYVSKKFDVRIEGAIPAIIDNDLWKRAQNMFERNRQSRTPHASRADYILSGKLYCGECGCLMKGVCGRSSGNGQMYHYYACPGRSIGRACTRKNIPQDELEAMVVNSVADLLLEPDLLEQIADAIVELQQAEAARPDPEKQALEKSLSDVRNKIQNILSAIENGTSSAALSARLADLEQQESTLSYQLSSLTAKKPLTFTRDQILFLLQQFRVSPSERTKAYCRRLVDTFVDHIELTNTELILYFNISDETIDKNKKAPRSNPSKESSTEKRLVRVARIELTAS

SEQ ID NO: 4434 - protein, 520 aa, Unknown
  Description of Unknown: Integrase B4435 sequence
  PTHR30461:SF3,cd00338,SM00857,G3DSA:1.10.10.2600,IPR036162, PF13408,IPR025827,G3DSA:3.40.50.1390,PS51737,IPR006119, IPR038109,PF07508,SSF53041,IPR011109,PTHR30461, Coil,PF00239
MKRVYCLYRVSTKGQVDKDDIPMQKTSCREFAERNGWTILKEFQEKGVSGFKVSASDRDAIQDLKAAAEKKEFDVLLVFMFDRIGRIDDETPFVVEWFIKHGIEVWSVNEGEQRLDNHVDKLMNYIRFWQANGESQKTSARVKTRLNQMTLDGKFTGGVAPFGYKLIKSGEINKKGKELMDIVIDDDEAPIVKKIFEMTVKEGYGSYRMADYLNSHGIRTHNNSKFQCNTVNRILKNRLYCGYLVSGGIESPYIKRLHIIDENIFDRAQFILRQRSSKNEEKQQIARTTKGSTLLSGNIYCAHCGQKMVSTSYIDRYDRADGSQSRVRRQRYICTNKAMKRGACDGQSAYVAHKIDGAVLATLKDYLAKIKSTPKDIALEKRYKSEISEYRRKQTKLEKEIEKLKRQVVELSAEIGRSLLGESRFTPDILSASIDNTNDLLHKKEFELSDIKFKLANQQNAMGKLDFYYSQFRTWADEFDNSTMEQKKMIACQLIREVKVSRGYELEIIFDLNYEQFLSL

SEQ ID NO: 4435 - protein, 520 aa, Unknown
  Description of Unknown: Integrase B4436 sequence
  PTHR30461:SF3,IPR036162,PS51737,IPR011109,PTHR30461, PF00239,G3DSA:1.10.10.2600,IPR006119,SSF53041,cd00338, SM00857,IPR025827,IPR038109,mobidb-lite,PS51736, PF13408,G3DSA:3.40.50.1390,PF07508,Coil
MAKRMPAAASDCDGMIGVIYARYSSHSQREESIEDQLRECHEFAARNNIKIIAEYTDSALTGRTDSRPDFQKMIRDSARGKFQVVVTYKVDRFARDRYDSAIYKAKLRKNGVRVLYAKETIPDGPEGIILESVLEGYAEYYSAALSQNILRGLEGNAMKCKTNGVQVLGYYTGEDGCYEIDPDYASVVLSIFQKYDAGVPQKEIIDDLNARGFRTTRGFAFNKNSVTRILRNRKYIGEYSWGDVTVSGGMPQIVPLPLFDSVQRKLDRGSRAPAHKWKVADYILTSKLFCGHCGELMVGRAGTGKSGKKYDYYACVNRTRRHGCDKKPVKKEWIEDIVVKYTKEVVLAEDMIEQIADGVMDFLEREKKSNGELDALEASLKNVESSIRNMMQAIEQGIITKSTKQRLMELEEQRDQISAAIAREKIATPDIERDQIVYFLEKFKEGSLDDPDYRTKLVEAFVSSVYLWDDGRIVINYNYTGENNQLTLRQIEQELVDMDGAEGSPLDSSAPLKLNQSNSV

SEQ ID NO: 4436 - protein, 520 aa, Unknown
  Description of Unknown: Integrase B4437 sequence
  PTHR30461:SF3,cd00338,SM00857,G3DSA:1.10.10.2600,IPR036162, PF13408,IPR025827,G3DSA:3.40.50.1390,PS51737,IPR006119, IPR038109,PF07508,SSF53041,IPR011109,PTHR30461, PS51736,Coil,PF00239
MNVVIYARFSSHNQQEQSIEGQIRYCTEYAKKNDMTIINSYIDRAISGTSDNRPEFLQMIKDSNNHQFNVVLVWKLDRFARNRYDSAIYKNALKKNNVKVVSVTEYLGEGSESVLLEAMLEAMAETYSRQLSENVRRGMRESALKCQVVGGSVPLGFDTVDKKYVINEKEAEIVRFIFDEYVSSTSKKEIVNKLNAKGWRTKNGSTFVFNSLNKILSNRKYIGEYKYEDIVIEHGIPAIIDERTFNLAQKQLSKNKQNRGTKSAKHEYLLATKIFCGYCGGSMIGETATGKGGGKFGYYVCRNRKKHINDCKKRREKQKELETFIVERTLYMYKNKDFVNEVAQKVVDLYNKECGQNHLKTLELNKKELEKKLEELSDGLLKTTNARVLKKFNEQINVIDNQLAELEIEIAREKAIANATMRCSDVIDFISDIMNGDINDKQFQKKIIDTFINAIYVFDDKFIVYYNGSNTSDKVTFDDLLHDLKNKGVEGSTFNTLTPPNKYWMNTYFFSGGFAVRCVL

SEQ ID NO: 4437 - protein, 520 aa, Unknown
  Description of Unknown: Integrase B4438 sequence
  cd00338,SM00857,G3DSA:1.10.10.2600,IPR036162,PF13408, IPR025827,G3DSA:3.40.50.1390,PS51737,IPR006119,IPR038109, PF07508,SSF53041,IPR011109,PTHR30461,PS51736, Coil,PF00239
MKTAVIYARFSSDRQTEQSIEGQVRVCNDYAERNDILIVSQYIDRATTGTNDNREAFQKMMKDSDKKAWDYVLVYKLDRFSRNKFEMAIHRKHLKDNGIKILSAMENIPDSPEGILLESLLEGMNQYYSEELAQKTRRGQRETRLKGLHCAGRLNYGYYTKNKKVFIHEEESPIVKEIFERYAAGERGNEIAISFAERGILYRGKPFSAANIYVILHGEKYTGRYELHGEVYDNIYPRIIEPALYEKCKQKIDANRYGNHIPDYSYLLRRRVYCGECGTRMTSYSGTSKSGRVSKYYKCWNSIGKKNCKAKFIKKDMLDNIVVKTLQETLTGKNLSVIVDEIYRQHNAKLMGENTVKLLEKELTQINKSISNIMRAIEQGIITDTTKERLQELEKSRQELQEKLIFERMQEQTVLDKETIAEYLQEGIKHEPEMMIELLVEKVFVHSDHIEIILHYVDEPIKPKPRIDGKEESLEGNDLRGSLIFTAMTWIDEYSFQGLKKKDLEPKFKGTRNTLVYIEI

SEQ ID NO: 4438 - protein, 520 aa, Unknown
  Description of Unknown: Integrase B4439 sequence
  SM00857,G3DSA:1.10.10.2600,IPR036162,PF13408,IPR025827, G3DSA:3.40.50.1390,PS51737,IPR006119,IPR038109,PF07508, IPR011109,SSF53041,PTHR30461,Coil,PS51736, cd00338,PF00239
MAKKKKPAGGNAIIYARYSSHNQRDVSIEQQIEACRKHAAELGLTITDTYEDRAISGRTDNRPAFQRMMHDAENGRFSYVLAWKSNRMGRNMMQAMVNESRLMDCGVKVYYAEEDFDDSAAGRFALRSMMNVNQFYSDNLAEDVRRGLMDNANKCMANGRQPLGYKRGEDGKVVVDEPAAAIVREVYARVASGELFTDIARDLNRRGIKTADKGEWNKNSFHRLCSNEKYRGIYIYGDVRIEGGIPSIIDDTLWYKVQEALRVKKLKRNGRHRPGEDDYLLTGKLRCGKCGGYMIGMSGRSKTGDIHYYYACQNRRVGHTCDKKNIRRDIIEPAVAQAIKEYCLTDDAIEWIADKTIEYWEEADRNLQLDSIEGDLAAVQSSISNVMKAIEMGVVTETTRDRLIELEKQRTDLKSKLALAKEEVIHVDRKKLISSLLLFRNGDIHDRQYQEDLFNTFLISVYVYDDDDNGHLKLIFNAFGENNTVDLPINFGETGDVPVFSDREKVRASSPSVNQNKAIR

SEQ ID NO: 4439 - protein, 520 aa, Unknown
  Description of Unknown: Integrase B4440 sequence
  PTHR30461:SF3,SM00857,G3DSA:1.10.10.2600,IPR036162,PF13408, PS51737,IPR025827,G3DSA:3.40.50.1390,IPR006119,IPR038109, PF07508,IPR011109,SSF53041,PF00239,PTHR30461, PS51736,Coil,cd00338
MKAVIYARYSSEKQQEISIEGQLRVCQEFAAREGYEVVDTYTDRALSASRDVERREDFQRMIRDSSRRGFEVVIVYKFSRFARNRYDSAVYKARLRQNGVKVVSACEPISANPEGALIEGIFESLDEFYSKSLAQDVTRGMHENAAKALSTGGTIPLGYVSVYKRLQIDPSTAPAVRLAFERYAEGMSLARIADELNAQGYRTRAGKAFNRSSFNALLSNRKYIGTYHYNGEVELVGQVPPIVDPGTFRRVQERLRKNTTAPGRTKATINYLLSTKLYCGACGKPMAGESGHNHSGTRYYYYACSGRKRRLGCKMPTLRKDDLERLVVEHARTLLSPDNIKALAHAAAAEYQRQAEDDSAVVSLRRQLDEVTRSLDNLLRMVEQGATSATLVGRINELEGRKASIAAELAEEQRGAPELTEVDILRWLSCFADGCLEDEDYMRNVIDMLVNKIVVQQNPNQKVSILVAYNLAGRGDEISGSGLVDVVHQARHNPNLCTNATESCMTFLLYHGCAIFQLAA

SEQ ID NO: 4440 - protein, 520 aa, Unknown
  Description of Unknown: Integrase B4441 sequence
  PTHR30461:SF3,SM00857,G3DSA:1.10.10.2600,IPR036162,PF13408, PS51737,IPR025827,G3DSA:3.40.50.1390,IPR006119,IPR038109, PF07508,IPR011109,SSF53041,PTHR30461,Coil, PS51736,cd00338,PF00239
MTNAVIYARYSPGPNQTDQSIEGQIHECTRFCEDNNLRIVGTYIDRKQTGRNDNRADFQKMLRDSSRHGFSTVVVWKIDRFGRNREEIAKNKAVLRMNGVRVLSAKEHIPDGPEGIILESVLEGLAEYYSANLSQNIKRGMRESALKCQFNGSGLSTGYTVDADHKYRIDPDGAAVVRTIFEMYDGGKKIADILRYLQQSNIKTMRGKEYTHYGISRILRNRVYIGEYHWHDIVVPGGVPQIIDNDLFDRVQKRLEANKHAPAARRGDVDFLLTSKLICGNCKSTMIGDCGTGKNGARWYYYTCRAKKTKSSKCRKKSVPKEALEREVTALTAAYVLRDDVIDYIADKVVEIQKSEHDDKSMLRYFESQLKDTNKAIANIMRAIEAGIITETTRSRLEELEDTKRDLETEIIKEKVARPTIEREQVIFFLEKFRGGNVDDKEYQRKIIDTFVHKVILYDDKITITYNYSTDSTKNAENTVESIESAASAAECKCSDKYSSSPPVTRILLLRCSCYFYTHA

SEQ ID NO: 4441 - protein, 520 aa, Unknown
  Description of Unknown: Integrase B4442 sequence
  cd03768,PTHR30461:SF3,SM00857,G3DSA:1.10.10.2600,IPR036162, PF13408,PS51737,G3DSA:3.40.50.1390,IPR025827,IPR006119, IPR038109,PF07508,IPR011109,SSF53041,PTHR30461, PS51736,Coil,PF00239
MNVAIYARKSKATKKGESISNQIELCKKYFLNTTNEDVNFLIYEDEGWSGGNINRPQFTKMINDAKLNRFSTLICYRLDRIARNVADFSSTYKILEENNIAFISITEQFDTSTIMGRAMINISATFAQIERETIAERIKDNMLELSRTGRWLGGISPLGFKSVQITENNKKLYKLEVVNDELEIVKLIFNLYPQYKSTVPVARYLVSNHIKGKNGGDFSKNTVLQILKNPVYCCSDTEAIKYFKGKDSTLNCIDNKELGLMVYNKKKSGKKENPIDEWVVATGKHQGIIPGAEWVNCQKILEEISRKASPRKATGNKFLLSGMLKCARCGSSMCSWSRTSRGIYYRSYRCELKNRAATRCDSKMVNADDLESFVIELCKNINLEEIINIKKTKNNNSTLKRELTSLNKTLVENDKLLQGLVKKLALIDDIDILTIIQAEIKKIKSENENINKRINEINLSMFDSEDEYKNQQILLESHKLFKDTIDLVKDVEAKRNLIMSFIEYFTYDSQANEIGYKLRL

SEQ ID NO: 4442 - protein, 520 aa, Unknown
  Description of Unknown: Integrase B4443 sequence
  PTHR30461:SF3,SM00857,G3DSA:1.10.10.2600,IPR036162,PS51737, G3DSA:3.40.50.1390,IPR006119,IPR038109,PF07508,IPR011109, SSF53041,PTHR30461,Coil,PS51736,cd00338, PF00239
MLEKNIIIYLRKSRSDDPGMSVEDVLAKHELQLQEYAVSEYGEQIPEDHIFREVVSGETIADRPVMKQVMRLLEAGNITAVLVIEPQRLSRGDLEDCGRIINIFRYTHTLVATPPKTYDLTNEYDRKFFEMELMRGNDYLEYTKKILNRGRIASVKKGNFIGSVAAYGYKKVKIGTGKDACHTLEIIPEQADAVKLMFKLYLEGNGFTNIAKTLDELKIKPLRSETWSPAAISDMLENPVYVGKIRWNYFKTVKKIEDGQIVKSRPINQDPSDWFLVQGKHPAIIDQATFDAAQERRGRTPKIKRFNELKNPFAGLLYCQCGKAMSLKIYNQKKGKCEPTKLMLCNKQSWCKTKSVKYDTFLERIVETLESTIANFEIKLKKDNGDAAQLHKNIVYNLETNLKKLKDKDIRQKDAYEDGIYTKEEYASRNAKLQEQISETTKALCQAKDSVPPTINYKEKIARFTDCLNALNDVSVPAAEKNMLLKACFEKIIYHNDMPSISGHGRWIENKFKLEIFLRL

SEQ ID NO: 4443 - protein, 520 aa, Unknown
  Description of Unknown: Integrase B4444 sequence
  PTHR30461:SF3,IPR036162,PS51737,IPR011109,PTHR30461, PF00239,G3DSA:1.10.10.2600,IPR006119,SSF53041,cd00338, SM00857,IPR025827,IPR038109,PS51736,mobidb-lite, PF13408,G3DSA:3.40.50.1390,PF07508,Coil
MAKRIPAAASDCDGMIGVIYARYSSHSQREESIEDQLRECHEFAARNNIKIIAEYTDSALTGRTDSRPDFQKMIRDSARGKFQVVVTYKVDRFARDRYDSAIYKAKLRKNGVRVLYAKETIPDGPEGIILESVLEGYAEYYSAALSQNILRGLEGNAMKCKTNGVQVLGYYTGEDGCYEIDPDYASVVLSIFQKYDAGVPQKEIIDDLNARGFRTTRGFAFNKNSVTRILRNRKYIGEYSWGDVTVSGGMPQIVPLPLFDSVQRKLDRGSRAPAHKWKVADYILTSKLFCGHCGELMVGRAGTGKSGKKYDYYACVNRTRRHGCDKKPVKKEWIEDIVVKYTKEVVLAEDMIEQIADGVMDFLEREKKSNGELDALEASLKNVESSIRNMMQAIEQGIITKSTKQRLMELEEQRDQISAAIAREKIATPDIERDQIVYFLEKFKEGSLDDPDYRTKLVEAFVSSVYLWDDGRIVINYNYTGENNQLTLRQIEQELVDMGGAEGSPLDSSAPLKLNQSNSV

SEQ ID NO: 4444 - protein, 520 aa, Unknown
  Description of Unknown: Integrase B4445 sequence
  cd03768,PTHR30461:SF3,SM00857,G3DSA:1.10.10.2600,IPR036162, PF13408,PS51737,G3DSA:3.40.50.1390,IPR025827,IPR006119, IPR038109,PF07508,IPR011109,SSF53041,PTHR30461, PS51736,Coil,PF00239
MNVAIYARKSKATKKGESISNQIELCKKYFLNTTNEDVNFLIYEDEGWSGGNINRPQFTKMINDAKLNRFSTLICYRLDRIARNVADFSSTYKILEENNIAFISITEQFDTSTIMGRAMINISATFAQIERETIAERIKDNMLELSRTGRWLGGISPLGFKSVQITENNKKLYKLEVVNDELEIVKLIFNLYPQYKSTVPVARYLVSNHIKGKNGGDFSKNTVLQILKNPVYCCSDTEAIKYFKGKDSTLNCIDNKELGLMVYNKKKSGKKENPIDEWIVATGKHQGIIPGAEWVNCQKILEEISRKASPRKATGNKFLLSGMLKCARCGSSMCSWSRTSRGIYYRSYRCELKNRAATRCDSKMVNADDLESFVIELCKNINLEEIINIKKTKNNNSTLKRELTSLNKTLVENDKLLQGLVKKLALIDDIDILTIIQAEIKKIKSENENINKRINEINLSMFDSEDEYKNQQILLESHKLFKDTIDLVKDVEAKRNLIMSFIEYFTYDSQTNEIGYKLRL

SEQ ID NO: 4445 - protein, 520 aa, Unknown
  Description of Unknown: Integrase B4446 sequence
  PTHR30461:SF3,SM00857,G3DSA:1.10.10.2600,IPR036162,PF13408, IPR025827,G3DSA:3.40.50.1390,PS51737,IPR006119,IPR038109, PF07508,SSF53041,IPR011109,PTHR30461,PS51736, cd00338,PF00239
MKRITKIEENRALSIKKKTRVVAYCRVSTASDEQLISLDTQKAHYEDYIKSNAEWEFAGIFYDEGITGTKKECRDGLNSLVAACEKGLVNMIITKSISRFSRNTTDCLELVRKLISLNVTVIFEKENINTGSMESELMLSILSSLAESESVSISENSKWSIQKRFQNGTYIISYPPYGYENVGGEMIVVPEQAEIVKKIFEDTLAGKSTHAIAKELNDCGVTSKKGGKWTPGAINAIIRNEKFTGDVIFQKTYTDSQFSRHTNDGELNQYLCENHHEPIVSHEIFDKANEVLNQRGREKGNGERTERYQNRYGFSGRIKCGECGGVFKRRIHYKPSGSYIAWCCTHHIEDRHSCSMKYITDDGIKTAFLTMMNKLVFAHQSVLKPLLHSLQGFDDKDRLLQIQEYETKLEKNMEKRQVLTSLMAGGLLEPALFSKENNALILEEKHLQEEKKQMINSVSGDRTKIEALETLIKFASGSEMLTEYSDEIFLSYVEGITVLSRKEIVFELKCGLKLKERLVG

SEQ ID NO: 4446 - protein, 520 aa, Unknown
  Description of Unknown: Integrase B4447 sequence
  PTHR30461:SF3,SM00857,G3DSA:1.10.10.2600,IPR036162,PF13408, PS51737,IPR025827,G3DSA:3.40.50.1390,IPR006119,IPR038109, PF07508,IPR011109,SSF53041,PF00239,PTHR30461, PS51736,Coil,cd00338
MARKKNIAAGQDAVIYARYSSHNQREVSIEQQIAECTKYAAALGLRIVGTYEDRAISGKTDNRPRFQQMMRDAGKGKFQAVVAWKSNRIGRNMLQAMVNEAKLDDYGVKVFYAEEDFDDTAAGRFALRNMMNVNQFYSENMAEDITRGLYDNASKCMANGRQPLGYKRGEDGRVVLDDANAAVVREIFTRVAAGDLFVDIARDLNAQGIKTSKGANWNKGSFQSICQNERYRGIYIYGDVRVVDGIPRIVSDDLWYRVQEAMRMKKNPVGTRHRVGAEDYLLTGKLHCGHCGSYMTGVSGTSRNGELHYYYTCQKRRTEHACDKKNIRRDVIEPAVAQAIKMYCLTDDVIEWMADRTVEYWEKHDNDLQIEALEQQLEENKKATSNMLKAIEMGIITEATRTRMVELETEQSRLSVQLNAAKEDVVKIDREQIISYLELLQQGDIHDRDFQMELFKNFLVAVYVYDDNRMKLVFSCMGDQNSVEIPLETGEDPPDGGLSPDAKMFVLTPDSSTKKAPYFV

SEQ ID NO: 4447 - protein, 520 aa, Unknown
  Description of Unknown: Integrase B4448 sequence
  PTHR30461:SF3,SM00857,G3DSA:1.10.10.2600,IPR036162,PF13408, PS51737,G3DSA:3.40.50.1390,IPR025827,IPR006119,IPR038109, PF07508,IPR011109,SSF53041,PTHR30461,PS51736, cd00338,PF00239
MKKITKIGTNEPLAEKKKLKVAAYCRVSTASDEQLISLEAQKAHYDSYIRSNDEWEYVGLYYDEGITGTKKDIRAGLLSMIADCEDGKIEFIITKSISRFARNTTDCLEMVRKLTDLGISIFFEKENINTGSMESELMLSILSSLAESESVSISENSKWSVQKRFQNGTFIISYPPYGYENDNGTMVIVPEQAEIVKEIFAACLAGKGTHAIARELNDRGIKTKKNGKWSAGTVKAILTNEKYTGDVIFQKTYSDSSFNRHINYGERDRFLCENHHEPIISHEDFEKVRAVLDQRAMEKGNGTDTYRYQNRYCFSGKIKCGECGTTFKRRQHYKPSGNYVAWTCGKHLENKKECSMLYISDESIKLAFLTMMNKLTYGHQVILKPLLRTLRGMDDKDRLLRIQELDICIEGNTDRKQILTSLMATGVLEPAVFNKENAALVMEEQKLRAEKEKLVNFVGGDKTRIKELQKLMAFTTKGVMLTAFEDETFLAYVESITVESRTKIVFHLKCGLNLTERLVN

SEQ ID NO: 4448 - protein, 520 aa, Unknown
  Description of Unknown: Integrase B4449 sequence
  PTHR30461:SF3,SM00857,G3DSA:1.10.10.2600,IPR036162,PF13408, PS51737,G3DSA:3.40.50.1390,IPR025827,IPR006119,IPR038109, PF07508,SSF53041,IPR011109,PTHR30461,Coil, PS51736,cd00338,PF00239
MAVFAQAVRPDFNNDVADVVIYSRYSSIGQNDQSIDGQIDACMQYAAQRGFRVVGQYIDRAMSGTHADSRPEFQRLIRDGKKGIFKYVLVWKLDRFARNRYDSAIYKNELKKHGVKVLSVTEGIDAGSDSIILEAVLEAMAEEYSRQLSQNVRRGMRQNAEKQLTLGGNTPLGYRVEDKRLVVDKDEAEIVRFAFRSYADGMTKTEIAKECNRRGWRTRSGRPFTLSSFSVMLKNQTYIGTYTFKDEMAVEDAVPAIVDRATFDKVGTMLERNRRAPGRVKAKEDYQLQGKVFCGYCGSPMVGESGRGKCGNTYHYYACATRKKVHTCQKKNEKKGFLEWYIVEQITTSILTDQRIHEIAAGVVAEYNRSFDAGKVRELEKKIRAMDKEMDTLVDTLIRTTAAPAVAKINERIDLLAVQKEEAEVDLAKLKVASRITLSEDEIIAWLQQFVHGDPMDPDFRQRVIDIFVNSIYLYDDKVVMYFNIKDASQVSYIEMQENLKDLEGSDLNGCGVPKVLEIV

SEQ ID NO: 4449 - protein, 520 aa, Unknown
  Description of Unknown: Integrase B4450 sequence
  SM00857,IPR036162,G3DSA:3.40.50.1390,IPR006119,SSF53041, PTHR30461,Coil,PS51736,cd00338,PF00239
MAKRRAAIYARFSSHNQRSESIEIQVENSTRYCRENGLDVVRVYTDYAKTGRNTDRVEFQRMMDDARLGLFDFVVIYKVTRIMRNRDEMALARIMLRKAGVEILYAGEEIASGSSGVLQLGMLEVLAEWESAIDSERIRDGIQKNAQRCMANGRTLYGWDIVDGFYQVNEREAAVLRKMKNMLFSGSNIAEIVRAVANVRSRNGKPIIHDRARKLLMRPQNGGTYSYAGVVVEGGMPALWPKEEQDMIIAMLSKKRPRRRVDHEEEWPLTGKLWCDKCGKTLAGTSGTSKGGSVYSYYKCRHCGRTFRRDILEDAIVDMTISAVERPEVRKRIASGMAAYNAEIDDAPFESELLRKEIRRIEQAFERVWQAIEDGIAPPGGKERIAELTARKEALEVDYEIAKANEGIEPDMSDLMDWLDNMAQELTPQEILKMFVRAVEITEAEVRLFFAFDYYGDGFTPPKYKDEHPVEGCSSNPTMVELMRKTANSTSTATRAAIQLDTCIVRVSKNWFVVVGTCQK

SEQ ID NO: 4450 - protein, 520 aa, Unknown
  Description of Unknown: Integrase B4451 sequence
  PTHR30461:SF3,IPR036162,PS51737,IPR011109,PTHR30461, PF00239,G3DSA:1.10.10.2600,IPR006119,PS50157,SSF53041, IPR013087,cd00338,SM00857,IPR025827, IPR038109,PS51736,PF13408,G3DSA:3.40.50.1390,PF07508,Coil
MKNVTKINQVDFSVFKKTRVAAYCRVSTDSDEQELSLDTQKNHYESYIKANNEWEYAGVYYDDGVSGTKTAKRDGLLRLVEDCEKGLIDLVITKSISRFSRNTTDCLALVRKLLNYEVYVIFEKENINTGSMESELMLAVLASMAESESRSISENEKWSIKKRFQNGTYVISYPPYGYANVEGEMVIVPEQAEVVKEIFAGCLAGKSTHIIAKELNEKGVPTKKGAKWTGATINGILTNEKYIGDALFQKTITDAFFKRKRNYGEEEQYYCENHHEPIIDKDTFEKAKEAIRQRGLEKGNCSEDTAKYQNRYAMSGKIKCGECGRSFKRRYHYTSHGKSYNAWCCGGHIEDSSSCSMKFIRDDDLKRVFLTMMNKLRFGNDLVLKPLLIFITTSNSKKNIHSMEDIEKDMQSNEEQRKQLNTLLTRGYLERPVFAEAHNKLVMEYEQLSAKRDLLCRMDNSGYTMEQALSDLVSFLNGAEPFTEWDDSLFERFVEKVKVLSRREVEFELKFGLKLKERID

SEQ ID NO: 4451 - protein, 520 aa, Unknown
  Description of Unknown: Integrase B4452 sequence
  SM00857,G3DSA:1.10.10.2600,IPR036162,PF13408,PS51737, G3DSA:3.40.50.1390,IPR025827,IPR006119,IPR038109,PF07508, IPR011109,SSF53041,PTHR30461,Coil,PS51736, cd00338,PF00239
MLEEGQKLKCALYVRTSTTEQKDSLELQARYKNNNFDIDKIYSEEVSGRDILKRPEQIKLLNDCGIEVTSVQKQAVFITNDKKPLYDCIIVSNTSRWGRNVVQVKQIVEALHKKGVKLWFDDLGKFSDSKDLSLTLDMLFVLDENYSQTISHKVKSAMDKRKKEGYILANSRLIGYDRTEEGTLVKNKDSNMVKSIFEDYAYKNLAIRKIAEKYQLSTSTITTLLKNIKYAGFMAYGIKEHGWDFSKLEIVKSDKIEPIISEELFWKVQEVRRSRSRIAEGSRVTRNKIGVNNNTYSLSSKIVCTNCGKNFHRKDRGYWICGTHSKYPKKCTMPTVRENKILRYLKSPYGLKAIRNGLETTLEGELKKLQLESIEPIKNELAELKGKSSKLLDLYMDSLIDKTTFEKRNKLLKDGIEKLENELKIHSNKENYRVKLLELQKEAKSLLDEYEKILESSEPEKIFDRVSKIEVGKIKDVKKRKEVSYIKSVRFKDFKVLEDHQLFDELIREEDTIRVEKQTI

SEQ ID NO: 4452 - protein, 520 aa, Unknown
  Description of Unknown: Integrase B4453 sequence
  PTHR30461:SF3,SM00857,G3DSA:1.10.10.2600,IPR036162,PF13408, PS51737,G3DSA:3.40.50.1390,IPR025827,IPR006119,IPR038109, PF07508,IPR011109,SSF53041,PF00239,PTHR30461, PS51736,Coil,cd00338
MNAVIYARFSSHNQQEQSIEGQIRYCTEYAKKNDMTIINSYIDRAISGTSDNRPEFLQMIKDSNNHQFNVVLVWKLDRFARNRYDSAIYKNALKKNNVKVVSVTEYLGEGSESVLLEAMLEAMAETYSRQLSENVRRGMRESALKCQVVGGSVPLGFDTVDKKYVINEKEAEIVRFIFDEYVSGTSKKEIVNKLNAKGWRTKNGSTFVFNSLNKILSNRKYIGEYKYEDIVIEHGIPAIIDEQTFEQAQKQLAKNKQNRGTKSATHEYLLATKIFCGYCGGSMIGETATGKGGGKFGYYVCRNRKKHINDCKKRREKQKELEAFIVERTLYMYKNKDFVNEVAQKVVDLYNKECGQNHLKTLELNKKELEKKLEELSDGLLKTTNARVLKKFNEQINNLDNQLAELEIEIAREKAIANATMKRSDVIDFISDIMDGNINDKQFQKKIIDTFINAIYVFDDKFIVYYNGSSTSDKVTFDDLIHDLENNGVEGSTFNTLTPPNKYWMNTYFFSGGFAVRCVL

SEQ ID NO: 4453 - protein, 520 aa, Unknown
  Description of Unknown: Integrase B4454 sequence
  PTHR30461:SF3,SM00857,G3DSA:1.10.10.2600,IPR036162,PF13408, IPR025827,PS51737,G3DSA:3.40.50.1390,IPR006119,IPR038109, PF07508,SSF53041,IPR011109,PTHR30461,Coil, PS51736,cd00338,PF00239
MRKNKKEIKKAVIYARFSCDKQRDESIEDQLRVCTEYADSHGILIVDHYCDFAISGRTDHRPQFQNMIEDAAEGTFDAVLVYKTDRFARNRYDSAIYKKKLIDYGVKVISATEEIPDGGGGIIMESMYESLAELYSIQISQNVRRAAKGNALKSHSNGGHRLLGYKTNPVTRRYEICEEEAKIVREIFSKASAGKPLRSIIDYLHTAHGLEMSYCRLTGMLQNERYTGVYIYDGIKNDGGMPAIISRDTFDDVQRFFKIRYHNTNSFSRYPNQKYLFSRRAFCGKCGSSITGETTKKSNGKEYKYYACMGHKMHQTDCDMKRIKADIVERAAINALLVLITQPDIMHAIISKAEKYQDKKPQNNKAENLQQQLAETQHKKENILNALEEGVFSSSIKARLKDLETQELKLKSEIIKEDKKIKFTNISPNQFQFFLEKLKTGEVKSETFVNSLFYELISKVFMFPDRIVLVYKLTNEPQEEINSNDLKNAEFVEMQSESGFRQQKNSERISVRSCSSWLPE

SEQ ID NO: 4454 - protein, 520 aa, Unknown
  Description of Unknown: Integrase B4455 sequence
  PTHR30461:SF3,cd00338,SM00857,G3DSA:1.10.10.2600,IPR036162, PF13408,IPR025827,PS51737,G3DSA:3.40.50.1390,IPR006119, IPR038109,PF07508,IPR011109,SSF53041,PTHR30461, PS51736,Coil,PF00239
MCAKKKPAMLEPDMQDAVIYTRYSSHNQRDCSIEQQVADCEIFARQNNLRVVKVYADRHMSGTTDNRPQFQQMLKDAAHGHWAYVICWKIDRFARNRYDSATYKFRLKKAGVRVLYAKESIPDGPEGILLESVLEGSAEYYSAALAQNIRRGMKYNAEQCKVNSGSIPFGYCKGPDGRFAIHEANAEVVREIFRKAAAGMPFVDIANDLNSRGLKTSRGGRWNKGSFRLLMNEAYIGVYHFSDTRIEGGMPALIDHGTFWAANERLKANSSIRGRHQDGGDYLLTGKLKCAHCGSYMIGFSGTGKSGELHYYYGCQKRRRERACKKANVPREWIERVVVKAALDYVLRPDVMEWIADAVMEYQEREAASAQLAALTAELEENQKATDNVMKAIEAGIITSTTKQRLLDLEAKAQDLKRAIELEKLSHVRLERDQVLFWLDRFRGGSLQSQEFRRKVIDAFVSVVYLSDDHLRIAFNYSGGSNAEADFDLVMDAEAAAGELSKKFAQGHVTSTSKKSHLKT

SEQ ID NO: 4455 - protein, 519 aa, Unknown
  Description of Unknown: Integrase B4456 sequence
  PTHR30461:SF3,SM00857,G3DSA:1.10.10.2600,IPR036162,PF13408, PS51737,G3DSA:3.40.50.1390,IPR025827,IPR006119,IPR038109, PF07508,SSF53041,IPR011109,PTHR30461,Coil, PS51736,cd00338,PF00239
MADFEHVIIYLRKSRSDDPATTVEEVLFRHENILQEYAVREWGARIPEDRIYREVVSGETIKDRPVMQHVMKILETGLVSGVLVVEPQRLSRGDLQDCGHIINSLRYTNTAVITPPKTYDLSDEYDRKFFEMELTRGNDYLEYTKKILNRGRIASVKAGNFIGNSAPYGYRKICVGTGKEKYYTLEIVPEEAEAVRLMFDLYVNKDYGFRNIAHALDMAGYKPRRSAEWSPAAISCMIANETYIGRVVWNRRKTIKKWENDTIVRTRPRQSEYISVPGKHPAIISDELFYAAKAKRNRTPRIKRYVQLLNPLAGLLYCGTCGHAMSRKRTVDKKYGSVSVSFLCNNQSNCHTKSVMYDAVIDRVKETLRQSIEDFEVKVNNKDETDIAYHRAMIANLKSELKKLKEKDMRQKDAYEDGIYTKEEFVVRNAKLAEQISIAQMKLDDAESSTSQLVDYQERLVRFRECLEALDDDAISAADKNTLLKSCIDKIMYYNDSPSLPGIGRYVDNPFRLEIFLKL

SEQ ID NO: 4456 - protein, 519 aa, Unknown
  Description of Unknown: Integrase B4457 sequence
  SM00857,G3DSA:1.10.10.2600,IPR036162,PS51737,G3DSA:3.40.50.1390, IPR006119,IPR038109,PF07508,IPR011109,SSF53041, PF00239,PTHR30461,PS51736,Coil,cd00338
MNIGNQLGKLKKSDQFCIYLRKSRADAEAEKLGEGETLARHERILTELAVKLGLPIGKIYRELVSGETISARKEIQSMINDCYAGMWKGILVVEVTRLSRGNQGDAQTIMDCLRYSNNNNGILVVTPTKTYDIVRSPDDEEYMEFELFMSRREYKMIRKRMMRGKLQAVIEGNYMGSYRPYGYDILKTKTGRTLVPNQEEAPIVKNIFEWTVKEHLTPGKICKRLNTIGVPTYSGDPEWSVSSIKTILTNPTYTGKVRWNDRMQVKTMVDGKLVKSRPRSNHTNQYMLYDGKHEAIIDEITFHAAASHFHSDKTKANLKLMNPFAGILICAKCKKTMIYQGYNKRPNTPPRILHKSSQICNVKSAVLKDVMDAVAHALELYIDDFEMKIDNLPVVDENNILSQLEALQKELIKQEKKLPKLFDAWENGILTDDEFTRRKLINKERIESIKKQMDHLEDSVPTKDEYEEKIMLLSDALKSLLDPTLDADIKNTYLKSIISSIEYSRDNNTEFILDVFLKD

SEQ ID NO: 4457 - protein, 519 aa, Unknown
  Description of Unknown: Integrase B4458 sequence
  PTHR30461:SF3,cd00338,SM00857,G3DSA:1.10.10.2600,IPR036162, PF13408,IPR025827,G3DSA:3.40.50.1390,PS51737,IPR006119, IPR038109,PF07508,IPR011109,SSF53041, PTHR30461,PS51736,Coil,PF00239
MLRAALYARFSSENQREESILAQFRDSTEYCKKHNYAIVAKYADEAKSGTTTIGREQYKLMLKDAQKGKFDVVVFHKIDRNARNELDYYITKHKLEEAGVKYAYSRQDIDSTSPEGQMMESMLVGMAAYYSRNLSNEIKKGLRENAIQGKCTGGRPPYGFSVDADKKLIINEDEAPAVRMIFDLYAAGVHYGVIRKRLFNAGYRNRAGKEFTLASIYEILRNRKYVGDLYLGKTLFRKGKRNTHQVSDNVQYFENVIPAIVSREIFEEVQVKLDQNKRRSGAGNAKAIYALSGLIHCGQCGSAMVAHSTKNSRGIKNYYYRCPKGRLIGEEKCPQKFINRDDIENTVYQLIRKLFTAPDAHSQIKRIIAKNNMSVKVPDYIDQVKRLKKQESDASKRLDKLYDLYMTDRGDEFTSAKMAQIKEEILRLRTQIKEAENRQAIAQSTTFDIDKIIDTFQKQLKQKQSPEFIKTLFELAVKNVIVYPDKIKVVLLVTIPIEHTNMRLFMYSDYFSVRIRRIA

SEQ ID NO: 4458 - protein, 519 aa, Unknown
  Description of Unknown: Integrase B4459 sequence
  SM00857,G3DSA:1.10.10.2600,IPR036162,PF13408,IPR025827, G3DSA:3.40.50.1390,PS51737,IPR006119,IPR038109,PF07508, IPR011109,SSF53041,PF00239,PTHR30461,PS51736, Coil,cd00338
MKASNMNQIDIMYLRKSREDAELEKYGEGETLTRHYNILCELAKRNNIVVSDEYIFREVVSGESIDARPEIQKVLRLVESGIVRNVLVVEIERLARGDTSDQGRIAKTFKYSHTKIITPMKIYDPDNEYDNEYFEFGLFMSRREYLTINRRLNNGKYSSTKEGKFIGSAAPYGYDRLKVENGKGYTLVPNENAKYIKMIYEWVLQGNGAIHIAKMLQDIGAPTTTGANWSSATVRNILQNKTYCGYVSWQRRKTTKSLEDGITKKTRIRNDKAAEYFKGLHEPIIDEETWLKVQEMRERRALPSCNDNKNGLTNPLAGIVKCGYCGRTMQINTHKNKRIRMRCPNLQCACGSIYIDSVEIELISQLKDWLNGYSATVGKETRTTSRTNSVKDMIANLTSELDKISVQMNKACDMLELGVYDKDMFISRSQTLKNRQAEIKEKLSELKTELETINATDSQIQSLPKVQKILDNYFSYDTKTKNMLLKEILDHAVFTKEKGTSLVKDDSFDLEIFPILPRK

SEQ ID NO: 4459 - protein, 519 aa, Unknown
  Description of Unknown: Integrase B4460 sequence
  PTHR30461:SF3,SM00857,G3DSA:1.10.10.2600,IPR036162,PF13408, PS51737,G3DSA:3.40.50.1390,IPR025827,IPR006119,IPR038109, PF07508,IPR011109,SSF53041,PTHR30461,Coil, PS51736,cd00338,PF00239
MADFEHVIIYLRKSRSDDPATTVEEVLSRHENILQEYAVREWGARIPEDRIYREVVSGETIKDRPVMQHVMKILETGLVSGVLVVEPQRLSRGDLQDCGHIINSLRYTNTAVITPPKTYDLSDEYDRKFFEMELTRGNDYLEYTKKILNRGRIVSVKAGNFIGNSAPYGYRKICVGTGKEKYYTLEIVPEEAEAIRLMFDLYVNKDYGFRNIAHALDMAGYKPRRSVEWSPAAISCMIANETYIGRVVWNRRKTIKKWENDTIVRTRPRQSEYISVPGKHPAIISDELFYAAKAKRNRTPRIKRYVQLLNPLAGLLYCGTCGHAMSRKRTVDKKYGSVSVSFLCNNQSNCHTKSVMYDAVIDRVKETLRQSIEDFEVKVNNKDETDIAYHRAMIANLKSELRKLKEKDMRQKDAYEDGIYTKEEFVVRNAKLAEQISIAQLKLDEAESSTTQLVDYQERLVRFRECLEALDDDTISAADKNTLLKSCIDKIMYYNDSPSLPGIGRYVDNPFRLEIFLKL

SEQ ID NO: 4460 - protein, 519 aa, Unknown
  Description of Unknown: Integrase B4461 sequence
  PTHR30461:SF3,cd00338,SM00857,G3DSA:1.10.10.2600,IPR036162, PF13408,PS51737,G3DSA:3.40.50.1390,IPR025827,IPR006119, IPR038109,PF07508,IPR011109,SSF53041,PTHR30461, PS51736,Coil,PF00239
MAQRCVIYARYSSDRQREESIEGQIRVCEDFAQRNDLEVIQTYVDRALTARTDRRPAFQQMISDCKKRQFEYILVYKLNRFSRNRYDSAVYKHKIAQYGVKVLSAMERITDDPSGILLESLIEGIAEYYSAELAENVHRGMTENALEGKANGRAPLGYKKGPDGKLVIDERSAKAVRFIFQSVLEGRTLKKIAGDLNAMGYKNSFGRPFASSNFGNLLRNKKYIGIYHWGNEDVEGVVPPIIERAVFDKVQELIESRKHKSTRKRVENYLLTGRMTCGLCGAAYIGKSGTSHTGAPYAYYCCSNRVHRKGCKGKNYRQDKLEEWIAMETLKALNRPETIRQLAKQIIRIQEAAAGEPDPVVDNLEAELKDYKKRVANSIKAIEAGVISETISRNITEYEEKIKALEKELSRAKLKRQPFTLTQDHIEFFLTSLLAGDPADAKYRSQLIDTLIAGVVIYPDKIEVYYKYQKELPSLRNPLTISEEGSSNGKKLVGKVHLSANLEIRIGKGWFSIVYPIAA

SEQ ID NO: 4461 - protein, 519 aa, Unknown
  Description of Unknown: Integrase B4462 sequence
  PTHR30461:SF3,SM00857,G3DSA:1.10.10.2600,IPR036162,PF13408, PS51737,G3DSA:3.40.50.1390,IPR025827,IPR006119,IPR038109, PF07508,IPR011109,SSF53041,PTHR30461,Coil, PS51736,cd00338,PF00239
MADFEHVIIYLRKSRSDDPATTVEEVLSRHENILQEFAVREWGARIPEDRIYREVVSGETIKDRPVMQHVMKILETGLVSGVLVVEPQRLSRGDLQDCGHIINSLRYTNTAVITPPKTYDLSDEYDRKFFEMELTRGNDYLEYTKKILNRGRIASVKAGNFIGNSAPYGYRKICVGTGKEKYYTLEIVPEEAEAIRLMFDLYVNKDYGFRNIAHALDMAGYKPRRSAEWSPAAISCMIANETYIGRVVWNRRKTIKKWENDTIVRTRPRQSEYISVPGKHPAIISDELFYAAKAKRNRTPRIKRYVQLLNPLAGLLYCGTCGHAMSRKRTVDKKYGSVSVSFLCNNQSNCHTKSVMYDAVIDRVKETLRQSIEDFEVKVNNKDETDIAYHRAMIANLKSELRKLKEKDMRQKDAYEDGIYTKEEFVVRNAKLAEQISIAQLKLDEAESSTTQLVDYQERLVRFRECLEALDDDTISAADKNTLLKSCIDKIMYYNDSPSLPGIGRYVDNPFRLEIFLKL

SEQ ID NO: 4462 - protein, 519 aa, Unknown
  Description of Unknown: Integrase B4463 sequence
  PTHR30461:SF3,cd00338,SM00857,G3DSA:1.10.10.2600,IPR036162, PF13408,PS51737,IPR025827,G3DSA:3.40.50.1390,IPR006119, IPR038109,PF07508,SSF53041,IPR011109,PTHR30461, PS51736,Coil,PF00239
MNEKINAVIYARFSSHNQQEQSVDGQVRYCTQYAEVHNMRIIGTYVDRAMSGTNDNRPDFQKMIKDSENKQFQVVLVWKFDRFARNRYDSAFYRRALKNNGVTVTSATESVGEGSEAIILEAILDAMADAYSKQLAENVKRGMRESALKCQTIGGCTPLGYDVVNKMYVVNKEEAEIVRYIYREYVDGKGKKEIITELNNRGYKTKRGKKFTITSLSQLLKNKRYIGIYVYKDIEIKDGIPAIIDEELFYKVQKVALKNKRDASRKKAKVEYLLSGKLFCGHCGEAMLGESAVNHSGYRYYYYVCGSKKKRLRTCDKKRERKEGIEEYCVRQALGFFSDKKNLHLIAKKVVDLYNSEIDNGQVEILEENKIKLEKQLDELTNALVKTSNVRVLSKLNEQINAIDEQLSTIDIEIAREKSLATAKMSVDDVVGFVEGLIQGGDIKDDKFKKQIINVLINRIYLYDDKIVIYFNGSDNASTVDYTTVCKDLKKFEAEQKVRIRNAMACHRALIFISAHFLF

SEQ ID NO: 4463 - protein, 519 aa, Unknown
  Description of Unknown: Integrase B4464 sequence
  PTHR30461:SF3,cd00338,SM00857,G3DSA:1.10.10.2600,IPR036162, PF13408,IPR025827,G3DSA:3.40.50.1390,PS51737,IPR006119, IPR038109,PF07508,SSF53041,IPR011109,PTHR30461, PS51736,Coil,PF00239
MKKVTKIDKIQPAKNAENKLRVAAYCRVSTATDAQLESLEAQKNHYENYINSRDDWCFAGVYYDGGITGTKASKRPELMRLLADCKAKKIDFVITKSISRFSRNTMDCLKIVRTLLNLNIPVYFEKENINTGSMESELFLSVLSTMAEGESASISSNNRWSIKKRFGNGTYRLSSAPYGYKLESGGLQVVSEQADIVKRIFRELLSGKGMYSIAKELNAEQVPTQKGGRWTSTSVHNILTNEKYTGDCIFQKTYADSNFNRHTNNGELNRYLIQNHHEAIISHEDFNATAALIEQRAAEKGIESGNDKYQQRYAFSEKLICGECGNTFRRRIHKGKYNSYVAWVCNTHLSDTNRCSMLFVRDDALKLAFATMLNKLIFSYRLLLKPYLAAMQSNTADEALLRIQYLENQLDQNAEQRSTLHKLMAQGYIDQIIYTQESNELLLQARDFRSEIEALNNTVAGDTTKVYETERLINYCKRGEMLTDFNESLFELFVDHILIYSRQKIGFVLRCGLTFEEMI

SEQ ID NO: 4464 - protein, 519 aa, Unknown
  Description of Unknown: Integrase B4465 sequence
  SM00857,G3DSA:1.10.10.2600,IPR036162,PS51737,G3DSA:3.40.50.1390, IPR006119,IPR038109,PF07508,SSF53041,IPR011109, PTHR30461,PS51736,cd00338,PF00239
MSYCIYLRKSRADKELCSEEEVLKRHETTLLELAKNRSYNITKIFREVVSGETLAARPQMQQLLSEVENGLWEGVLVMEVERLARGNSVDQGIVSQAFKYSNTLIITPTKTYNPANEFDEEYFEFGLFMSRREYKTINRRLNAGRIAACKEGKYAGGNPPYGFDKEKLKGERGWKLVPVPEEVEIVKLIYKLYLSDEDGTGFSGIANRLNDSKAPTRSGVFWTSTQVKKILTNDVYIGKIHWQKVPEKKIVENGVLVKRRYINSNPLVFEGLHGAVIDEDIFNRVQEIVKSRKKPPNTPERPMQNPFAGVLVCDICGKPLKRRPPDKRRPGHSPSFDCTTPYCPTISSPVNIVENRILEGMKMWLEDYKLKENNNNIVATEYSYNTTRITNCKKELENIQKQLGKTYTLLEQGIYDNETFLERQIFLKNEMSNILSTITKLEEEDNATKARAEYNKTLIPELENLLEVYDTLPDAKSKNVLIKKIFHQIRYSKKTRGNRWAPDKVDDFELEFISKLPSK

SEQ ID NO: 4465 - protein, 519 aa, Unknown
  Description of Unknown: Integrase B4466 sequence
  PTHR30461:SF3,SM00857,G3DSA:1.10.10.2600,IPR036162, PF13408,IPR025827,G3DSA:3.40.50.1390,PS51737, IPR006119,IPR038109,PF07508,SSF53041, IPR011109,PF00239,PTHR30461,PS51736,Coil,cd00338
MYEDIKTACLYVRFSSHNQTEQSIEGQTRVCRDFCKRHNIKIVEIYADRATSASKDIEKRVQFLKMIKDSEKGLFDAVIVYKLDRFARSRYDSATYKYRLKRNGVQLISATENISNDPEGIILESVLEGMAEFYSAELSQKINRGMRESAYKHNSIGGAIPLGYKIEDKKLVIDPKTAPIVKEAFEKYADGETVAEICRQFNARGYKTSKGTAFGKSSFTKIFRNERYIGVYSFHDYRAEDAIPAIIDKDLWDRVQLRVGKIKNAPARNKAKVVYLLSGKIFCGHCGSKMNGNCNAGNYYYYQCYGKKNGNVDCKKKNIRKEFIERLVAQDALSLLTDEYIEQIATIACEKNQHEIELDSALPTIRDRIHQVDLSLNNLLKAIESGSAPDMLVKRMGELEKEKKDLQVQAKKESEDIVELDKAQVIYWLEQFRGGSIEDEEFCRMLIDLFVNSVTVWDEDDNTYKVTVAYNLTSLPTKTYRLNKGGTLSDFASNAPDREAHKDYIVVLHVVPFHGNFRS

SEQ ID NO: 4466 - protein, 519 aa, Unknown
  Description of Unknown: Integrase B4467 sequence
  PTHR30461:SF3,SM00857,G3DSA:1.10.10.2600,IPR036162,PF13408, IPR025827,PS51737,G3DSA:3.40.50.1390,IPR006119,IPR038109, PF07508,SSF53041,IPR011109,PF00239,PTHR30461, PS51736,Coil,cd00338
MNTNQIPVVSYSRFSSDMQHETSIEAQQDAINKYAAANGYTIIEDYVDRAKSATTTAKRDEFNRMIEDSKSGKFKFVIVHKFDRFARNRIDSTIAKAILEKSGVRVLSVLEPTSDTPEGELMEGMFELLAQYYSSNLGREVMKGFKVRAGKCLHNGGKPPIGYDVDPVTEKLVINESEAQTVKTIFQMYIDGHGYEDIINTLNKRGSRTKNGNEFGKNSLHDILRNKKYAGYYIYNRWDGKHNRHKEKSPEEVICIENGCPAIISEEMFNKAEKVMEQRKMSPGAKSAVKTYLLTGLIRCGECGNLMSGTQRKNGKGYMYRSYRCKHKNMVHHCSNKEIRADKIEEFVLLQLQKYIFDDKNITAIVDEVKKQLIQHNAYVVEELRENERALKRLQNRRQNIINAIADGLMQDDFKEVLAQLKNDEKILLERQQELTIRNPDAAFTEDDLRSMISEFSGYVLNRDIPECKKFIAQFVKQVTVYNTKIEVTLRVASILLYGADYTITKSIGRTFLPTPELQ

SEQ ID NO: 4467 - protein, 519 aa, Unknown
  Description of Unknown: Integrase B4468 sequence
  PTHR30461:SF3,SM00857,G3DSA:1.10.10.2600,IPR036162,PF13408, PS51737,G3DSA:3.40.50.1390,IPR025827,IPR006119,IPR038109, PF07508,SSF53041,IPR011109,PTHR30461,Coil, PS51736,cd00338,PF00239
MADFEHVIIYLRKSRSDDPATTVEEVLFKHENILQEFAVREWGARIPEDRIYREVVSGETIKDRPVMQHVMKILETGLVSGVLVVEPQRLSRGDLQDCGHIINSLRYTNTAVITPPKTYDLSDEYDRKFFEMELTRGNDYLEYTKKILNRGRIASVKAGNFIGNSAPYGYRKICVGTGKEKYYTLEIVPEEAEAVRLMFDLYVNKDYGFRSIAHALDMAGYKPRRSAEWSPAAISCMIANETYIGRVVWNRRKTIKKWENDTIVRTRPRQSEYISVPGKHPAIISDELFYAAKAKRNRTPRIKRYVQLLNPLAGLLYCGTCGHAMSRKRTVDKKYGSVSVSFLCNNQSNCHTKSVMYDAVIDRVKETLRQSIEDFEVKVNNKDETDIAYHRAMIANLKSELRKLKEKDMRQKDAYEDGIYTKEEFVVRNAKLAEQISIAQMKLDEAESSTTQLVDYQERLVRFRECLEALDDDTISAADKNTLLKSCIDKIMYYNDSPSLPGIGRYVDNPFRLEIFLKL

SEQ ID NO: 4468 - protein, 519 aa, Unknown
  Description of Unknown: Integrase B4469 sequence
  PTHR30461:SF3,IPR036162,PS51737,IPR011109,PTHR30461, PS00397,PF00239,G3DSA:1.10.10.2600,IPR006119,SSF53041, cd00338,SM00857,IPR025827,IPR038109,SSF161270, PS51736,IPR006118,PF13408,G3DSA:3.40.50.1390,PF07508,Coil
MRNVAIYVRVSTMHQAEQGYSIDSQLVDCRKKAHDLGAITINEYVDKGKSGAFLDRPELQRMLNDIKTEKESYDALIIYKLDRLSRDSMGLAYIIKILQQKNIKIISTDGAQYGANPQDVLTMQIMGSIAQFDNALRKERSIRGKIEKRKQGKLDKITKYGYIFNDEKQNLDIKEDEAIVIRKIFKWFTEDNLSAFRISKKLNTEKIPAPQPKINRKIINKDNIWFESTIRTMLKDETYAGIRHTMIYKFEKISLNNMKKTKRPPEEWISVPVPSIISRETWDKANNIMNRKSTNPRRTQRTWILQGLVYCEKCGQIMNIKQTPKIGKIKENEEKYNFYFKCRTNILNWFGSDKKCPNRQVPIYALEDSVWETLLNIFYSKETLEKYLKETQLKDNVYNLLDKLIEDRNKLSKNKNKIVEWFADGKIDQEIADNKINDLNNKINDLDKKISNLQSTNRSKKSFSINNLYDIFHKIKNPNREQKKEIIHSVVEKIFVERLDNKRSNAYTKPVLKIRIILR

SEQ ID NO: 4469 - protein, 519 aa, Unknown
  Description of Unknown: Integrase B4470 sequence
  PTHR30461:SF3,IPR036162,PS51737,IPR011109,PTHR30461, PS00397,PF00239,G3DSA:1.10.10.2600,IPR006119,SSF53041, cd00338,SM00857,IPR025827,IPR038109,SSF161270, PS51736,IPR006118,PF13408,G3DSA:3.40.50.1390,PF07508,Coil
MRNVAIYVRVSTMHQAEQGYSIDSQLVDCRKKAHDLGAITINEYVDKGKSGAFLDRPELQRMLNDIKTEKESYDALIIYKLDRLSRDSMGLAYIIKILQQKNIKIISTDGAQYGANPQDVLTMQIMGSIAQFDNALRKERSIRGKIEKRKQGKLDKITKYGYIFNDEKQNLDIKEDEAIVIRKIFKWFTEDNLSAFRISKKLNTEKIPAPQPKINRKIINKDNIWFESTIRTMLKDETYAGIRHTMIYKFEKISLNNMKKTKRPPEEWISVPVPSIISREMWDKANNIMNRKSTNPRRTQRTWILQGLVYCEKCGQIMNIKQTPKIGKIKENEEKYNFYFKCRTNILNWFGSDKKCPNRQVPIYTLEDSVWETLLNIFYSKETLEKYLKETQLKDNVYNLLDKLIEDRNKLSKNKNKIVEWFADGKIDQEIADNKINDLNNKINDLDKKISNLQSTNRSKKSFSINNLYDIFHKIKNPNREQKKEIIHSVVEKIFVERLDNKRSNAYTKPVLKIRIILR

SEQ ID NO: 4470 - protein, 519 aa, Unknown
  Description of Unknown: Integrase B4471 sequence
  PTHR30461:SF3,cd00338,SM00857,G3DSA:1.10.10.2600,IPR036162, PF13408,IPR025827,PS51737,G3DSA:3.40.50.1390,IPR006119, IPR038109,PF07508,IPR011109,SSF53041,PTHR30461, Coil,PF00239
MKRVYCLYRVSTVGQVDHDDIPLQRISCRQYAQQKGWTILRELYECGVSGYKVSSEARDAIQELKDEALLQRFDILLVFMFDRLGRRDDETPFVVEWFVKHGIAVWSVNEGEQRFDTHVDKLMNYIRYWQASGESEKTSIRVRLRQEQMIQDGHFRGGMIPYGYRLEYTGRANKKNQPVHDLVIDPFTSENVKLIFSLVSSQGYGANRIAMYLNERNILPRTANAHWHASSIRAILRNPIYIGIMRMGACCSERSFAQYRIISDEQYEAVQKIMLERSLSHTLTRSIPYRTDNAYLLTGLLRCGSCGSRLCGATMSSKGASTQCHRRYYRCYTSSVHRGVCNGQRCYAANRIERMVEQRVVDVLNEILSTPVGVLAEQMDALAYCDDQSALQAAQFEITAIEREVEKLEQQLVKSVIKNDRTLTDAINDAVVKKRQAYIEAEREYRKLADAIAQSAERRENMMLEIRNIRSWAVNYKLLKPEEKRMILPQMIERIVVLKGYGVEIVFRSVIKELCQMKV

SEQ ID NO: 4471 - protein, 519 aa, Unknown
  Description of Unknown: Integrase B4472 sequence
  PTHR30461:SF3,IPR036162,PS51737,IPR011109,PTHR30461, PS00397,PF00239,G3DSA:1.10.10.2600,IPR006119,SSF53041, cd00338,SM00857,IPR025827,IPR038109,SSF161270, PS51736,IPR006118,PF13408,G3DSA:3.40.50.1390,PF07508,Coil
MRNVAIYVRVSTMHQAEQGYSIDSQLVDCRKKAHDLGAITINEYVDKGKSGAFLDRPELQRMLNDIKTEKEYYDALIIYKLDRLSRDSMGLAYIIKILQQKNIKIISTDGAQYGTNPQDVLTMQIMGSIAQFDNALRKERSIRGKIEKRKQGKLDKITKYGYTFNDEKQNLDIKEDEAIVIRKIFKWFTEDNLSAFRISKKLNSEKIPAPQPKINRKIINKDNIWFESTIRTMLKDETYAGIRHTMIYKFEKISLNNMKKTKRPPEEWISVPVPSIISRETWDKANNIMNRKNTNPRRTQRTWILQGLVYCEKCGQIMNIKQTPKIGKIKENEEKYNFYFKCRTNILNWFGSDKKCPNRQVPIYALEDSVWETLLNIFYSKETLEKYLKETQVKDNVYTLLDKLIEDRNKLSKNKNKIVEWFADGKIDQEIADNKINDLNNKINDLDKKISNLQSTNRSKKSFSINNLYDIFHKIKNPNREQKKEIIHSVVEKIFVERLDNKRSNAYTKPVLKIRIILR

SEQ ID NO: 4472 - protein, 519 aa, Unknown
  Description of Unknown: Integrase B4473 sequence
  PTHR30461:SF3,SM00857,G3DSA:1.10.10.2600,IPR036162,PF13408, IPR025827,G3DSA:3.40.50.1390,PS51737,IPR006119,IPR038109, PF07508,SSF53041,IPR011109,PTHR30461,Coil, PS51736,cd00338,PF00239
MADFEHVIIYLRKSRSDDPATTVEEVLSRHENILQEYAVREWGARIPEGRIYREVVSGETIKDRPVMQHVMKILETGLVSGVLVVEPQRLSRGDLQDCGHIINSLRYTNTAVITPPKTYDLSDEYDRKFFEMELTRGNDYLEYTKKILNRGRIASVKAGNFIGNSAPYGYRKICVGTGKEKYYTLEIVPEEAEAVRLMFDLYVNKDYGFRSIAHALDMAGYKPRRSAEWSPAAISCMIANETYIGRVVWNRRKTIKKWENDTIVRTRPRQSEYISVPGKHPAIISDELFYAAKAKRNRTPRIKRYVQLLNPLAGLLYCGTCGHAMSRKRTVDKKYGSVSVSFLCNNQSNCHTKSVMYDAVIDRVKETLRQSIEDFEVKVNNKDETDIAYHRAMIANLKSELRKLKEKDMRQKDAYEDGIYTKEEFVVRNAKLAEQISIAQLKLDEAESSTTQLVDYQERLVRFRECLEALDDDTISAADKNTLLKSCIDKIMYYNDSPSLPGIGRYVDNPFRLEIFLKL

SEQ ID NO: 4473 - protein, 519 aa, Unknown
  Description of Unknown: Integrase B4474 sequence
  PTHR30461:SF3,IPR036162,PS51737,IPR011109,PTHR30461, PS00397,PF00239,G3DSA:1.10.10.2600,IPR006119,SSF53041, cd00338,SM00857,IPR025827,IPR038109,SSF161270, PS51736,IPR006118,PF13408,G3DSA:3.40.50.1390,PF07508,Coil
MRNVAIYVRVSTMHQAEQGYSIDSQLVDCRKKAHDLGAITINEYVDKGKSGAFLDRPELQRMLNDIKTEKEYYDALIIYKLDRLSRDSMGLAYIIKILQQKNIKIISTDGAQYGTNPQDVLTMQIMGSIAQFDNALRKERSIRGKIEKRKQGKLDKITKYGYTFNDEKQNLDIKEDEAIVIRKIFKWFTEDNLSAFRISKKLNSEKIPAPQPKINRKIINKDNIWFESTIRTMLKDETYAGIRHTMIYKFEKISLNNMKKTKRPPEEWISVPVPSIISRETWDKANNIMNRKSTNPRRTQRTWILQGLVFCEKCGQIMNIKQTPKIGKIKENEEKYNFYFKCRTNILNWFGSDKKCPNRQVPIYALEDSVWETLLNIFYSKETLEKYLKETQVKDNVYNLLDKLIEDRNKLSKNKNKIVEWFADGKIDQEIADNKINDLNNKINDLDKKISNLQSTNKSKKSFSINNLYDIFHKIKNPNREQKKEIIHSIVEKIFVERLDNKRSNAYTKPVLKIRIILR

SEQ ID NO: 4474 - protein, 519 aa, Unknown
  Description of Unknown: Integrase B4475 sequence
  PTHR30461:SF3,SM00857,G3DSA:1.10.10.2600,IPR036162,PF13408, IPR025827,G3DSA:3.40.50.1390,PS51737,IPR006119,IPR038109, PF07508,IPR011109,SSF53041,PTHR30461,PS51736, cd00338,PF00239
MAMAQNITFIPAVKTVGTQKPAEKKQKVRVAAYCRVSTEFEEQESSYETQVAHYTSYINGNPEWEMVEVYADNGISGTRTAKREAFNRMIADCEAGRIDMIITKSISRFSRNTVDCLKYTRKLKEMNIAVFFEKENINTLDAKGEVLMTIMAALAQQESESLSANVRLGIQFRNQQGKVQVNHNWFLGYTKDENGKLIIVPEEAEVVRRIYREYLEGASFVKIRRGLEADGILNGAKHTRWHETNIRQILTNEKYIGDALLQKTYTVSVLDKKRSMNDGAMPKYYVEGCHEAIIDKETFLLVQEELARRSALYKGGKKRMYSSKYALSGNVACGHCGNIYRRVTWYVGDTKPVVWRCVSRLTPGEECVGRSVPEEELHAAIASAVNMTYANRDDIIPVLKENIESVVGCDVDEEIEVIDNMIRKSQMDLLDAGKDEARIQEIGERIVSLHERRQDVLTQAALKKDKIDRIKAMIRFIEEQTGEAEYSEILVRRMVEKVTIHEDRITVEFKSGLAIDVDA

SEQ ID NO: 4475 - protein, 519 aa, Unknown
  Description of Unknown: Integrase B4476 sequence
  PTHR30461:SF3,IPR036162,PS51737,IPR011109,PTHR30461, PS00397,PF00239,G3DSA:1.10.10.2600,IPR006119,SSF53041, cd00338,SM00857,IPR025827,IPR038109,SSF161270, PS51736,IPR006118,PF13408,G3DSA:3.40.50.1390,PF07508,Coil
MRNVAIYVRVSTMHQAEQGYSIDSQLADCRKKAHDLGAITINEYVDKGKSGAFLDRPELQRMLNDIKTEKESYDALIIYKLDRLSRDSMGLAYIIKILQQKNIKIISTDGAQYGTNPQDVLTMQIMGSIAQFDNALRKERSIRGKIEKRKQGKLDKITKYGYIFNDEKQNLDIKEDEAIVIRKIFKWFTEDNLSAFRISKKLNTEKIPAPQPKINRKIINKDNIWFESTIRTMLKDETYAGIRHTMIYKFEKISLNNMKKTKRPPEEWISVPVPSIISRETWDKANNIMNRKSTNLRRTQRTWILQGLVFCEKCGQIMNIKQTPKIGKIKENEEKYNFYFKCRTNILNWFGSDKKCPNRQVPIYALEDSVWETLLNIFYSKETLEKYLKETQLKDNVYNLLDKLIEDRNKLSKNKNKIVEWFADGKIDQEIADNKINDLNNKINDLDKKISNLQSTNRSKKSFSINNLYDIFHKIKNPNREQKKEIIHSVVEKIFVERLDNKRSNAYTKPVLKIRIILR

SEQ ID NO: 4476 - protein, 519 aa, Unknown
  Description of Unknown: Integrase B4477 sequence
  PTHR30461:SF3,SM00857,G3DSA:1.10.10.2600,IPR036162,PS51737, G3DSA:3.40.50.1390,IPR006119,IPR038109,PF07508,IPR011109, SSF53041,PTHR30461,PS51736,cd00338,PF00239
MYRELSYRSDEIIEYLRKSRADDPSLSVEDVLQKHESILSDWAERHDCCIPAENKYREVVSGETIDDRPEFLSVLRRIESPAIKAILCVEVQRLSRGDLEDAGRLIKILRYTRTNVITPSKTYDLSDEYDRDIFERELKRGNEYLEYQKKIMSRGRLQAVRQGDYIGSVAPYGYDKTFVLEGKKKHYTLCINPAEASVVRQIFRMRAVEDLGPSRIAKQLNLQGTHPRNNDSWTYNCVKSILQNPVYTGKVFWNRRKVVHSVHSGSVESSRPWSSEYELHDGRHPAIIDSELFGAAQKISGKVTRAKDKVKVRNPFAGLFVCRCGHAMSYHTYPKTGPRILCDMQRVCHTGSCTFEEAEEIVVRILKQAIHDFDVQLKDSAAAMASREETLSSLRLRLAALDKKEISLWDKYAEEQMPKNVFDELNRRVAEDKAAVQASIYSILSEVPTREAIEEKRGRFSAALAALDDSDITAEAKNRMLKSCIEKISYYREPPVRKAGATNRGWIVWDISVDANLCI

SEQ ID NO: 4477 - protein, 519 aa, Unknown
  Description of Unknown: Integrase B4478 sequence
  SM00857,G3DSA:1.10.10.2600,IPR036162,PS51737, G3DSA:3.40.50.1390,IPR006119,IPR038109,PF07508, IPR011109,SSF53041,PF00239,PTHR30461, PS51736,Coil,cd00338
MQYEEYLIYLRKSRSDASLEAMGVDVLERHEQILLDLAKRMNLSIGGIYREVVSGESISARPEMQKLLSEVESGRWEGVLVMEVERLARGDTVDQGIVQRAFQYSGTKIITPTKTYNPNNEFDEEYFEFGLFMSRREYKTIRRRMRAGVTAAVKEGKWPFNQAPYGWQRVKLEHGRGWVLAPDPDEAPVVKLIFRLYTGPDRIGITHICRYLDNRGIKPRNGDAWLECSVMGILRNIVNDQRVGIGRRKVVKQVQNGSVSKVRPHSDYDFTAPGLQPRLIDHDVFLEAQEYLSKNSHKLPESYGIKNPLAGILVCSCCGKKMQRRPASKDGSGRCPYDVLMCNTRGCPTIGSTLDLVERELIQALSDWVAGYQLDPTLEVENKVPEKEQLLSSAVSNHDLLLKQNGNLYDLLEQGVYTTEIFLERSHELQKRIKESEAHIEILKKDLEYEKEKIANIENFIPSCKELLSCYWDLSVQDRNKALKMLLESVEYTKTKRNRKGDKDNPTFTLNLKPRIPRI

SEQ ID NO: 4478 - protein, 519 aa, Unknown
  Description of Unknown: Integrase B4479 sequence
  PTHR30461:SF3,IPR036162,PS51737,IPR011109,PTHR30461, PS00397,PF00239,G3DSA:1.10.10.2600,IPR006119,SSF53041, cd00338,SM00857,IPR025827,IPR038109,SSF161270, PS51736,IPR006118,PF13408,G3DSA:3.40.50.1390,PF07508,Coil
MRNVAIYVRVSTMHQAEQGYSIDSQLVDCRKKAHDLGAITINEYVDKGKSGAFLDRPELQRMLNDIKTEKEYYDALIIYKLDRLSRDSMGLAYIIKILQQKNIKIISTDGAQYGTNPQDVLTMQIMGSIAQFDNALRKERSIRGKIEKRKQGKLDKITKYGYTFNDEKQNLDIKEDEAIVIRKIFKWFTEDNLSAFRISKKLNSEKIPAPQPKINRKIINKDNIWFESTIRTMLKDETYAGIRHTMIYKFEKISLNNMKKTKRPPEEWISVPVPSIISRETWDKANNIMNRKNTNPRRTQRTWILQGLVFCEKCGQIMNIKQTPKIGKIKENEEKYNFYFKCRTNILNWFGSDKKCPNRQVPIYALEDSVWETLLNIFYSKETLEKYLKETQLKDNVYNLLDKLIEDRNKLSKNKNKIVEWFADGKIDQEIADNKINDLNNKINDLDKKISNLQSTNKSKKSFSINNLYDIFHKIKNPNREQKKEIIHSIVEKIFVERLDNKRSNAYTKPVLKIRIILR

SEQ ID NO: 4479 - protein, 519 aa, Unknown
  Description of Unknown: Integrase B4480 sequence
  cd00338,SM00857,G3DSA:1.10.10.2600,IPR036162,PS51737, G3DSA:3.40.50.1390,IPR006119,IPR038109,PF07508,SSF53041, IPR011109,PTHR30461,PS51736,Coil,PF00239
MNIGNQLGKLKKSDQFCIYLRKSRADAEAEKLGEGETLARHERILTELAVKLGLPIGKIYRELVSGETISARKEIQSMINDCYAGMWKGILVVEVTRLSRGNQGDAQIIMDCLRYSNNNNGVLVVTPTKVYDIVQSSDDEEYMEFELFMSRREYKMIRKRMMRGKLQAVVEGNYMGSYRPYGYDILKTKTGRTLVPNPEEAPIVKNIFEWTVKEHLTPGKICKRLTSLGVPTYTGSAEWAIGTVKTILTNPTYTGKVRWNDRMQTKTMVDGKLVKSRPRSNHTEQYMLYDGKHEAIVDEITFHAAAARFHSDKTKANLKLMNPFAGILICAKCKKAMIYQGYNKRPNTPPRILHKSSQICNVKSAMLKDVMNAVAHALELYIDNFEMKIDNLPNIDENSILSRLESLQKELIKQEKKLPKLFDAWEDGILTDDEFTRRKLVNKERIESIQKQMDHLEDSIPTRDEYEEKIMCLSDALKSLLDPTLDADIKNTYLKSIISSIEYSRDNNTEFILDVFLKD

SEQ ID NO: 4480 - protein, 519 aa, Unknown
  Description of Unknown: Integrase B4481 sequence
  PTHR30461:SF3,IPR036162,PS51737,IPR011109,PTHR30461, PS00397,PF00239,G3DSA:1.10.10.2600,IPR006119,SSF53041, cd00338,SM00857,IPR025827,IPR038109,SSF161270 ,PS51736,IPR006118,PF13408,G3DSA:3.40.50.1390,PF07508,Coil
MRNVAIYVRVSTMHQAEQGYSIDSQLADCRKKAHDLGAITINEYVDKGKSGAFLDRPELQRMLNDIKTEKESYDALIIYKLDRLSRDSMGLAYIIKILQQKNIKIISTDGAQYGTNPQDVLTMQIMGSIAQFDNALRKERSIRGKIEKRKQGKLDKITKYGYTFNDEKQNLDIKEDEAIVIRKIFKWFTEDNLSAFRISKKLNTEKIPAPQPKINRKIINKDNIWFESTIRTMLKDETYAGIRHTMIYKFEKISLNNMKKTKRPPEEWISVPVPSIISRETWDKANNIMNRKNTNPRRTQRTWILQGLVYCEKCGQIMNIKQTPKIGKIKENEEKYNFYFKCRTNILNWFGSDKKCPNRQVPIYALEDSVWETLLNIFYSKETLEKYLKETQVKDNVYTLLDKLIEDRNKLSKNKNKIVEWFADGKIDQEIADNKINDLNNKINDLDKKISNLQSTNRSKKSFSINNLYDIFHKIKNPNREQKKEIIHSVVEKIFVERLDNKRSNAYTKPVLKIRIILR

SEQ ID NO: 4481 - protein, 519 aa, Unknown
  Description of Unknown: Integrase B4482 sequence
  SM00857,G3DSA:1.10.10.2600,IPR036162,PS51737,G3DSA:3.40.50.1390, IPR006119,IPR038109,PF07508,SSF53041,IPR011109, PTHR30461,PS51736,cd00338,PF00239
MSYCIYLRKSRADKELCSEEEVLKRHETTLLELAKNRSYNITKIFREVVSGETLAARPQMQQLLSEVENGLWEGVLVMEVERLARGNSVDQGIVAQAFKYSNTLIITPTKTYNPTNEFDEEYFEFGLFMSRREYKTINRRLNAGRIAACKEGKYAGGNPPYGFDKEKLKGERGWKLIPIPEEIEIVKLIYKLYLSDEDGTGFSGIARRLNDSKVPTRSGVFWTSTQVKKILTNDVYIGKIHWQKVPEKKIVENGVLVKRRYINSNPLIFEGLHDAVIDEDIFNRVQEIVKSRKKPPNTPERPMQNPFAGVLVCAVCGKPLKRRPPDKRRPGHSPSFDCITPYCPTISSPVNIVENRILDGMRMWLEDYKPKESSNNTTDMEYTYNTTRIANCRKELENIQKQLGKTYTLLEQGIYDNETFLERQVFLKNEMSNILSTITKLEEEDNATKARAEYNKTLIPELENLLEVYDTLPDAKSKNVLIKKIFHQIRYSKKTRGNRWAPDKVDDFELEFISKLPSK

SEQ ID NO: 4482 - protein, 519 aa, Unknown
  Description of Unknown: Integrase B4483 sequence
  cd03768,PTHR30461:SF3,SM00857,IPR036162,PF13408,IPR025827, G3DSA:3.40.50.1390,PS51737,IPR006119,PF07508,IPR011109, SSF53041,PTHR30461,PS51736,Coil, PF00239
MRIAIYARKSAFSEKSESVNNQDRMCREYAGFHFPGDHTFLNYTDEDFTGANTDRPALKKMLKDIKSGIIDKLIVYQLDRLSRDVRDFSNMYAELEACGVEFVSVKENIDTESPLGKAMMYICVVFAQMERETISNRVTDNMIGLAGAGWWTGGVLPRGYTSRRVSDGGKEHTMLVPDPEKAEELREIFAEFVKLGQSAQRFTTYCKRNNIKIVPGKYLSEGQVHKILRAPYGAPACAETRRFFVDSGATVLGSEKDWDGTCGIMIYGRTRQSKGYSRNPAENWRVCAGKHEPIFSAELWLAAQSQLTSNIYTKKTKYPTQLLKGSLRCPCGRLMKISRYKKRSGGYNAYYTCSRLQSTGKSPDCVSQINANMLDQKALDIFRQIERDPDMINRCSPLLCDADPAAVKKKENEIKRLEDKIGNLSAALAESSGSAAAKYIIAEIEKIDAQIADKKMQLAGLQASALAADRAAAELAAKQKEIAHLVRNLEALDIEEQNKIARSVLKKCVWDGESLFLTF

SEQ ID NO: 4483 - protein, 519 aa, Unknown
  Description of Unknown: Integrase B4484 sequence
  cd00338,SM00857,G3DSA:1.10.10.2600,IPR036162,PS51737, G3DSA:3.40.50.1390,IPR006119,IPR038109,PF07508,IPR011109, SSF53041,PTHR30461,PS51736,Coil,PF00239
MNIGNQLGKLKKSDQFCIYLRKSRADAEAEKLGEGETLARHERILTELAVKLGLPIGKIYRELVSGETISARKEIKSMINDCYAGMWKGILVVEVTRLSRGNQGDAQTIMDCLRYSNNNNGVLVVTPTKVYDIVQSSDDEEYMEFELFMSRREYKMIRKRMMRGKLQAVVEGNYMGSYRPYGYDILKTKTGRTLVPNPEEAPIVKNIFEWTVKEHLTPGKICKRLTSLGVPTYTGSAEWAIGTVKTILTNPTYTGKVRWNDRMQTKTMVDGKLVKSRPRSNHTEQYMLYDGKHEAIVDEITFHAAAARFHSDKTKANLKLMNPFAGILICAKCKKAMIYQGYNKRPNTPPRILHKSSQICNVKSAMLKDVMNAVAHALELYIDNFEMKIDNLPNIDENSILSRLESLQKELIKQEKKLPKLFDAWEDGILTDDEFTRRKLVNKERIESIQKQMDHLEDSIPTRDEYEEKIMCLSDALKSLLDPTLDADIKNTYLKSIISSIEYSRDNNTEFILDVFLKD

SEQ ID NO: 4484 - protein, 519 aa, Unknown
  Description of Unknown: Integrase B4485 sequence
  PTHR30461:SF3,IPR036162,PS51737,IPR011109,PTHR30461, PS00397,PF00239,G3DSA:1.10.10.2600,IPR006119,SSF53041, cd00338,SM00857,IPR025827,IPR038109,SSF161270 ,PS51736,IPR006118,PF13408,G3DSA:3.40.50.1390,PF07508,Coil
MRNIAIYVRVSTMHQAEQGYSIDSQLVDCRKKAHDLGAITINEYVDKGKSGAFLDRPELQRMLNDIKTEKEYYDALIIYKLDRLSRDSMGLAYIIKILQQKNIKIISTDGAQYGTNPQDVLTMQIMGSIAQFDNALRKERSIRGKIEKRKQGKLDKITKYGYTFNDEKQNLDIKEDEAIVIRKIFKWFTEDNLSAFRISKKLNSEKIPAPQPKINRKIINKDNIWFESTIRTMLKDETYAGIRHTMIYKFEKISLNNMKKTKRPPEEWISVPVPSIISRETWDKANNIMNRKSTNPRRTQRTWILQGLVFCEKCGQIMNIKQTPKIGKIKENEEKYNFYFKCRTNILNWFGSDKKCPNRQVPIYALEDSVWETLLNIFYSKETLEKYLKETQLKDNVYNLLDKLIEDRNKLSKNKNKIVEWFADGKIDQEIADNKINDLNNKINDLDKKISNLQSTNRSKKSFSINNLYDIFHKIKNPNREQKKEIIHSVVEKIFVERLDNKRSNAYTKPVLKIRIILR

SEQ ID NO: 4485 - protein, 519 aa, Unknown
  Description of Unknown: Integrase B4486 sequence
  PTHR30461:SF3,IPR036162,PS51737,IPR011109,PTHR30461, PS00397,PF00239,G3DSA:1.10.10.2600,IPR006119,SSF53041, cd00338,SM00857,IPR025827,IPR038109,SSF161270, PS51736,IPR006118,PF13408,G3DSA:3.40.50.1390,PF07508,Coil
MRNVAIYVRVSTMHQAEQGYSIDSQLADCRKKAHDLGAITINEYVDKGKSGAFLDRPELQRMLNDIKTEKESYDALIIYKLDRLSRDSMGLAYIIKILQQKNIKIISTDGAQYGTNPQDVLTMQIMGSIAQFDNALRKERSIRGKIEKRKQGKLDKITKYGYIFNDEKQNLDIKEDEAIVIRKIFKWFTEDNLSAFRISKKLNTEKIPAPQPKINRKIINKDNIWFESTIRTMLKDETYAGIRHTMIYKFEKISLNNMKKTKRPPEEWISVPVPSIISRETWDKANNIMNRKNTNPRRTQRTWILQGLVYCEKCGQIMNIKQTPKIGKIKENEEKYNFYFKCRTNILNWFGSDKKCPNRQVPIYALEDSVWETLLNIFYSKETLEKYLKETQVKDSVYNLLDKLIEDRNKLSKNKNKIVEWFADGKIDQEIADNKINDLNNKINDLDKKISNLQSTNRSKKSFSINNLYDIFHKIKNPNREQKKEIIHSVVEKIFVERLDNKRSNAYTKPVLKIRIILR

SEQ ID NO: 4486 - protein, 519 aa, Unknown
  Description of Unknown: Integrase B4487 sequence
  PTHR30461:SF3,SM00857,G3DSA:1.10.10.2600,IPR036162,PF13408, PS51737,G3DSA:3.40.50.1390,IPR025827,IPR006119,IPR038109, PF07508,IPR011109,SSF53041,PTHR30461,Coil, PS51736,cd00338,PF00239
MADFEHVIIYLRKSRSDDPATTVEEVLSRHENILQEYAVREWGARIPEDRIYREVVSGETIKDRPVMQHVMKILETGLVSGVLVVEPQRLSRGDLQDCGHIINSLRYTNTAVITPPKTYDLSDEYDRKFFEMELTRGNDYLEYTKKILNRGRIASVKAGNFIGNSAPYGYRKICVGTGKEKYYTLEIVPEEAEAIRLMFDLYVNKDYGFRNIAHALDMAGYKPRRSAEWSPAAISCMIANETYIGRVVWNRRKTIKKWENDTIVRTRPRQSEYISVPGKHPAIISDELFYAAKAKRNRTPRIKRYVQLLNPLAGLLYCGTCGHAMSRKRTVDKKYGSVSVSFLCNNQSNCHTKSVMYDAVIDRVKETLRQSIEDFEVKVNNKDETDIAYHRAMIANLKSELRKLKEKDMRQKDAYEDGIYTKEEFVVRNAKLAEQISIAQLKLDEAESSTTQLVDYQERLVRFRECLEALDDDTISAADKNTLLKSCIDKIMYYNDSPSLPGIGRYVDNPFRLEIFLKL

SEQ ID NO: 4487 - protein, 519 aa, Unknown
  Description of Unknown: Integrase B4488 sequence
  PTHR30461:SF3,cd00338,SM00857,G3DSA:1.10.10.2600,IPR036162, PF13408,IPR025827,G3DSA:3.40.50.1390,PS51737,IPR006119, IPR038109,PF07508,IPR011109,SSF53041,PTHR30461, PS51736,Coil,PF00239
MQTAVIYARYSSDKQTEQSIEGQLYDCYNYAKQHGITVVQEYIDRAMTGKNDDRPAFQQMLHESAMHKWDSVIVWKLDRFARNTIDSSVNRQILAKNGVKLLSVMESFGDDASGQMMTHIIEAINEYYSADLREKTIRGMRQSAMKAQTTGHIPLGYKVVDKKLVIDDETRIIPETVFRMYAEGERLTDIAEYLNAHGYRNRRGRPFTTNSFYNMLANEKYIGIYKYDDIVIEGGIPQMIPNEVFEAVREKLITNRKRAAKNTAKADYYLSGKLYCGHCGEPMSGLSGTGRNGVKHYYYRCNGVQKKSGCHKKLENKYLIEDEVCRAARSAFEQMDKAETAETIYQMYLQTVRNEYAPAELEKELTECTKQAENVVNAIAQTGGNQLLYDKVRELEERKEQLSSALRLSQAMTDNVPSVEQITVFIDDILATDINTTEGKKAIADIMISKVYVYDDKLTVIFKDKDGKSVDIPLSAVSDSSSADCAPSALGSQVSFKANQSRGQRVMFVKLFILGDRSP

SEQ ID NO: 4488 - protein, 519 aa, Unknown
  Description of Unknown: Integrase B4489 sequence
  PTHR30461:SF3,IPR036162,PS51737,IPR011109,PTHR30461, PS00397,PF00239,G3DSA:1.10.10.2600,IPR006119,SSF53041, cd00338,SM00857,IPR025827,IPR038109,PS51736, IPR006118,PF13408,G3DSA:3.40.50.1390,PF07508,Coil
MRNVAIYVRVSTMHQAEQGYSIDSQLVDCRKKAHDLGAITINEYVDKGKSGAFLDRPELQRMLNDIKTEKEYYDALIIYKLDRLSRDSMGLAYIIKILQQKNIKIISTDGAQYGTNPQDVLTMQIMGSIAQFDNALRKERSIRGKIEKRKQGKLDKITKYGYTFNDEKQNLDIKEDEAIVIRKIFKWFTEDNLSAFRISKKLNSEKIPAPQPKINRKIINKDNIWFESTIRTMLKDETYAGIRHTMIYKFEKISLNNMKKTKRPPEEWISVPVPSIISRETWDKANNIMNRKNTNPRRTQRTWILQGLVFCEKCGQIMNIKQTPKIGKIKENEEKYNFYFKCRTNILNWFGSDKKCPNRQVPIYALEDSVWETLLNIFYSKETLEKYLKETQLKDNVYNLLDKLIEDRNKLSKNKNKIVEWFADGKIDQEIADNKINDLNNKINDLDKKISNLQSTNKSKKSFSINNLYDIFHKIKNPNREQKKEIIHSVVEKIFVERLDNKRSNAYTKPVLKIRIILC

SEQ ID NO: 4489 - protein, 519 aa, Unknown
  Description of Unknown: Integrase B4490 sequence
  PTHR30461:SF3,IPR036162,PS51737,IPR011109,PTHR30461, PF00239,G3DSA:1.10.10.2600,IPR006119,SSF53041,cd00338, SM00857,IPR025827,IPR038109,PS51736,mobidb-lite, PF13408,G3DSA:3.40.50.1390,PF07508,Coil
MARKKNIAAGLDAVIYARYSSHNQREVSIEQQIAECTKHAAALGLRIVGTYEDRAISGKTDNRPRFQQMMRDAEKGKFQAVVAWKSNRIGRNMLQAMVNEAKLDDYGVKVFYAEEDFDDTAAGRFALRNMMNVNQFYSENMAEDITRGLYDNANKCMANGRQPLGYKRGADGKVMLDEPAAAVVREIFTRVAAGDLFVDIARDLNAKGIKTSKGAAWNKGSFQSICQNERYKGIYIYGNVRIVDGIPRIVSDELWYKVQEAMRMKKNPVGTRHRVGAEDYLLTGKLRCGHCGSYMTGVSGTSRNGELHYYYTCQKRRTEHACSKKNVRRDVIEPAIAQAIKMYCLTDDVIEWMADQTVQYWEKHDNDLQIEALEQQLAENKKATSNMLKAIEMGIITEATRSRMVELETENSKLTAQLSAAKRDVVKINREDLIDELHILRSKDIHDREVQAELFKDFLVAAYIYDDNRLKLVFSFMGKDNSVEIPLETGEDPPDGGDSPDAKMFVLTPDCSTIGSNES

SEQ ID NO: 4490 - protein, 519 aa, Unknown
  Description of Unknown: Integrase B4491 sequence
  PTHR30461:SF3,SM00857,G3DSA:1.10.10.2600,IPR036162,PF13408, PS51737,G3DSA:3.40.50.1390,IPR025827,IPR006119,IPR038109, PF07508,IPR011109,SSF53041,PTHR30461,Coil, PS51736,cd00338,PF00239
MADFEHVIIYLRKSRSDDPATTVEEVLFRHENILQEYAVREWGARIPEDRIYREVVSGETIKDRPVMQHVMKILETGLVSGVLVVEPQRLSRGDLQDCGHIINSLRYTNTAVITPPKTYDLSDEYDRKFFEMELTRGNDYLEYTKKILNRGRIASVKAGNFIGNSAPYGYRKICVGTGKEKYYTLEIVPEEAEAIRLMFDLYVNKDYGFRNIAHALDMAGYKPRRSAEWSPAAISCMIANETYIGRVVWNRRKTIKKWENDTIVRTRPRQSEYISVPGKHPAIISDELFYAAKAKRNRTPRIKRYVQLLNPLAGLLYCGTCGHAMSRKRTVDKKYGSVSVSFLCNNQSNCHTKSVMYDAVIDRVKETLRQSIEDFEVKVNNKDETDIAYHRAMIANLKGELKKLKEKDMRQKDAYEDGIYTKEEFVVRNAKLAEQISIAQLKLDEAESSTTQLIDYQERLVRFRECLEALDDDTISAADKNTLLKSCIDKIMYYNDSPSLPGIGRYVDNPFRLEIFLKL

SEQ ID NO: 4491 - protein, 519 aa, Unknown
  Description of Unknown: Integrase B4492 sequence
  PTHR30461:SF3,SM00857,G3DSA:1.10.10.2600,IPR036162,PF13408, IPR025827,PS51737,G3DSA:3.40.50.1390,IPR006119,IPR038109, PF07508,SSF53041,IPR011109,PF00239,PTHR30461, PS51736,Coil,cd00338
MRAFIYGRFSSHKQQELSIEAQIDICREYAEKHNITVVGEYVDRARSARTENRADFRRLIRDACTGVVDCVLVWRYDRFFRDRAESALYRKQLEAAGVHLISVTEFIPDGSAGVITQGMIETVAEYFSAKLSEDVTRGMNKAAQHCQITGGAPLGYRPGPNKRWQIDPVGAELVKRCFEWYDSGKSMGELADHFNKEGHKTAKGNSFNKSSFTTILRNKKYIGIYEYDGTVSIAGGVPRIIEDDLFFRVQRKLDANRHRPGAYKAEVPYLLSGKLFCGKCGSPMTGTAGTGKSGVRHYYYICNNRRAKKCDKKNVRLDLIEEAVLQSALDVLTDDNISYISAEVERRCSENSGNKALVASLRVQLTEVEKQLKNIGNAIAQGIITETTKQMLMDAEADRAALRQQIDRATVQASLEVKAEAVACWLDGFRHGDRKSPEFRKDVFGALVHSVFVYDDYMKIIFNVDSAGAALVPFSAVQNAATSDFVGALPGSYLGGSGVPSVFVTTRFVRIVVTVKDTS

SEQ ID NO: 4492 - protein, 519 aa, Unknown
  Description of Unknown: Integrase B4493 sequence
  SM00857,G3DSA:1.10.10.2600,IPR036162,PS51737,G3DSA:3.40.50.1390, IPR006119,IPR038109,PF07508,SSF53041,IPR011109, PTHR30461,Coil,PS51736,cd00338,PF00239
MQQYEEYLIYLRKSRSDASLEAMGVDVLERHEQILLDLTKRMNLSIGGIYREVVSGESISARPEMQRLLSEVEAGRWKGVVVMEVERLARGDTIDQGIVQRAFQYSGTQIVTPAKTYNPNNEFDEEYFEFGLFMSRREYKTIRRRMRAGVTAAVKEGKWPFNKAPYGWQRVKLEHARGWVLAPDPEEAPVVKLIFQLYTGPDRIGITNICRYLDNRGVKPRNGDTWTECSIMGILRNIVNDQRVGIGRRKIVKQVQNGSVSKVRPHSDYDFTAPGLQPRLIDHDVFLEAQTHLGKNSHKLPESYGIKNPLAGIVVCPCCGKKMMRRPASKTPGGAPYDVLKCNTRNCPTIGSALDLVEREVIQALSDWVAGYQLDPTLEVENKVPEKEQLLSSAISNHDVLLKQNGNLYDLLEQGVYTTEIFLERSHELQKRIKESEAHIEILKKDLEYEKEKIANVENFIPSCKELLSCYWELSAQDRNKALKMLLESVEYTKTKRNQKGDKDNPTFTLNLKPRIPRI

SEQ ID NO: 4493 - protein, 519 aa, Unknown
  Description of Unknown: Integrase B4494 sequence
  PTHR30461:SF3,SM00857,G3DSA:1.10.10.2600,IPR036162,PF13408, PS51737,IPR025827,G3DSA:3.40.50.1390,IPR006119,IPR038109, PF07508,SSF53041,IPR011109,PF00239, PTHR30461,PS51736,Coil,cd00338
MRAFIYGRFSSHKQQELSIEAQIDICREYAEKHNITVVGEYVDRARSARTENRADFRRLIRDACTGVVDCVLVWRYDRFFRDRAESALYRKQLEAAGVHLISVTEFIPDGSAGVITQGMIETVAEYFSAKLSEDVTRGMNKAAQHCQITGGAPLGYRPGPNKRWQIDPVGAELVKRCFEWYDSGKSMGELADHFNKEGHKTAKGNSFNKSSFTTILRNKKYIGIYEYDGTVSIAGGVPRIIEDDLFFRVQRKIDANRHRPGAYKAEVPYLLSGKLFCGKCGSPMTGTAGTGKSGVRHYYYICNNRRAKKCDKKNVRLDLIEEAVLHSALDVLTDDNISYISAEVERRCSENSGNKALVASLRVQLTEVEKQLKNIGNAIAQGIITETTKQMLMDAEADRAALRQQIDRATVQASLEVKAEAVACWLDGFRHGDRKSPEFRKDVFGALVHSVFVYDDHMKIIFNVDSAGAALVPFSAVQNAATSDFVGTLPGLYLDRSGVPEKNDPNLFLVRDRFGLFLF

SEQ ID NO: 4494 - protein, 519 aa, Unknown
  Description of Unknown: Integrase B4495 sequence
  PTHR30461:SF3,SM00857,G3DSA:1.10.10.2600,IPR036162,PF13408, PS51737,G3DSA:3.40.50.1390,IPR025827,IPR006119,IPR038109, PF07508,IPR011109,SSF53041,PTHR30461,Coil, PS51736,cd00338,PF00239
MADFEHVIIYLRKSRSDDPATTVEEVLFRHENILQEYAVREWGARIPEDRIYREVVSGETIKDRPVMQHVMKILETGLVSGVLVVEPQRLSRGDLQDCGHIINSLRYTNTAVITPPKTYDLSDEYDRKFFEMELTRGNDYLEYTKKILNRGRIASVKAGNFIGNSAPYGYRKICVGTGKEKYYTLEIVPEEAEAIRLMFDLYVNKDYGFRNIAHALDMAGYKPRRSAEWSPAAISCMIANETYIGRVVWNRRKTIKKWENDTIVRTRPRQSEYISVPGKHPAIISDELFYAAKAKRNRTPRIKRYVQLLNPLAGLLYCGTCGHAMSRKRTVDKKYGSVSVSFLCNNQSNCHTKSVMYDAVIDRVKETLRQSIEDFEVKVNNKDETDIAYHRAMIANLKSELRKLKEKDMRQKDAYEDGIYTKEEFVVRNAKLAEQISIAQLKLDEAESSTTQLVDYQERLVRFRECLEALDDDTISAADKNTLLKSCIDKIMYYNDSPSLPGIGRYVDNPFRLEIFLKL

SEQ ID NO: 4495 - protein, 519 aa, Unknown
  Description of Unknown: Integrase B4496 sequence
  PTHR30461:SF3,IPR036162,PS51737,IPR011109,PTHR30461, PS00397,PF00239,G3DSA:1.10.10.2600,IPR006119,SSF53041, cd00338,SM00857,IPR025827,IPR038109,SSF161270, PS51736,IPR006118,PF13408,G3DSA:3.40.50.1390,PF07508,Coil
MRNVAIYVRVSTMHQAEQGYSIDSQLVDCRKKAHDLGAITINEYVDKGKSGAFLDRPELQRMLNDIKTEKEYYDALIIYKLDRLSRDSMGLAYIIKILQQKNIKIISTDGAQYGTNPQDVLTMQIMGSIAQFDNALRKERSIRGKIEKRKQGKLDKITKYGYTFNDEKQNLDIKEDEAIVIRKIFKWFTEDNLSAFRISKKLNSEKIPAPQPKINRKIINKDNIWFESTIRTMLKDETYAGIRHTMIYKFEKISLNNMKKTKRPPEEWISVPVPSIISRETWDKANNIMNRKSTNPRRTQRTWILQGLVFCEKCGQIMNIKQTPKIGKIKENEEKYNFYFKCRTNILNWFGSDKKCPNRQVPIYALEDSVWETLLNIFYSKETLEKYLKETQLKDNVYNLLDKLIEDRNKLSKNKNKIVEWFADGKIDQEIADNKINDLNNKINDLDKKISNLQSTNKSKKSFSINNLYDIFHKIKNPNREQKKEIIHSIVEKIFVERLDNKRSNAYTKPVLKIRIILR

SEQ ID NO: 4496 - protein, 519 aa, Unknown
  Description of Unknown: Integrase B4497 sequence
  PTHR30461:SF3,SM00857,G3DSA:1.10.10.2600,IPR036162,PF13408, PS51737,IPR025827,G3DSA:3.40.50.1390,IPR006119,IPR038109, PF07508,IPR011109,SSF53041,PF00239,PTHR30461, PS51736,Coil,cd00338
MRVSVNLNAQKPDTTTNAVIYARYSSHGQTEQSIEGQLAKGHEYAAAQGYTVVHEYIDRAMTGRNDNREAFQKMLSDTGKHQFQVVIVWKVDRFGRNREEIAFNKHTCKKNGVRVEYVAESLPNSPEAVILESVLEGMAEYYSIQLSQNIRRGQLESAKKCQCVGGSVPLGYTLDSDKHFVIDPQTAPVVKKIFDLYAEGATISEITGQLNEQGIRTARKQLFTKNSLTKLLKNEKYIGVYTYKDIVRVEGGVPAIVDESTFDRVQELLKINRRAPSHTWTKVEYLLTDKLFCGHCGSPMVGESGFSHTGAKYSYYGCIKRRREKACDKKPVRQDWIEALVLDETVKLLHDDELMEYIIDRTWEYYQVTDKVQEEKAVLEAQLAEVDKAINNLVRAIEAGIFNAATKSRMDELDAQKAALTASLADLELTSGIRITRDHIEYFLLRLRDLDVKDRECQKRLVQTFVNAVFIYDDGRVKITYNYSGQSSTIALNQIASAEKGKGFVCCLPCSLLCCANPC

SEQ ID NO: 4497 - protein, 519 aa, Unknown
  Description of Unknown: Integrase B4498 sequence
  PTHR30461:SF3,cd00338,SM00857,G3DSA:1.10.10.2600,IPR036162, PF13408,IPR025827,G3DSA:3.40.50.1390,PS51737,IPR006119, IPR038109,PF07508,IPR011109,SSF53041,PTHR30461, PS51736,Coil,PF00239
MLNAVIYARFSSDMQREESIDAQVRACKAYAKSKGYTVVKEYVDEAKSGRSTLTRDAYNQMMADAMENKFDVIIFHKIDRNSRNELNYFIFKDKLEKLGIRYEYAAQPIDTDSPEGQVMETVMVGMAAYYSRNLAKETKKGMNENAYKAIFNGGYAPLGYKIVDKHYVIDEKEAEAVRLIFNLYLGGKGYGEICLALAARGYTTRSGKNFPKNSLHDILRNERYMGTYTFNRVPKTKRRNSHSYARPNDFISIPDAIPAIVSKETFLAAQEKMLLNKKRKGGAYTAKRDYLLSGKFFCGYCGSAMQGYSCCTRGNMYYYYSCARKDRVPADRCKQKMIRAEVIEHWIMSTLEREIFSDAGIQRVADSMSTAFGNANKEVKNATTILLQRKAAAERKLNNLYQVIEDGDADEFDMQRLKKAKEELRNINSEICETAVKSAPDIDTSKIISLLKNMREEIFAKKNSHYAKQAIELLVKRVTIMDKTITLSLTTEGCLSLLVPRTRIAVSSDEWKITANLAA

SEQ ID NO: 4498 - protein, 519 aa, Unknown
  Description of Unknown: Integrase B4499 sequence
  cd00338,SM00857,G3DSA:1.10.10.2600,IPR036162,PS51737, G3DSA:3.40.50.1390,IPR006119,IPR038109,PF07508,IPR011109, SSF53041,PTHR30461,PS51736,Coil,PF00239
MNIGNQLGKLKKSDQFCIYLRKSRADAEAEKLGEGETLARHERILTELAVKLGLPIGKIYRELVSGETISARKEIKSMINDCYAGMWKGILVVEVTRLSRGNQGDAQTIMDCLRYSNNNNGVLVVTPTKVYDIVQSSDDEEYMEFELFMSRREYKMIRKRMMRGKLQAVVEGNYMGSYRPYGYDILKTKTGRTLVPNPEEAPIVKNIFEWTVKEHLTPGKICKRLTSLGVPTYTGSAEWAIGTVKTILTNPTYTGKVRWNDRMQTKTMVDGKLVKSRPRSNHTEQYMLYDGKHEAIVDEITFHAAAARFHSDKTKANFKLMNPFAGILICAKCKKAMIYQGYNKRPNTPPRILHKSSQICNVKSAMLKDVMNAVAHALELYIDNFEMKIDNLPNIDENSILSRLESLQKELIKQEKKLPKLFDAWEDGILTDDEFTRRKLVNKERIESIQKQMDHLEDSIPTRDEYEEKIMCLSDALKSLLDPTLDADIKNTYLKSIISSIEYSRDNNTEFILDVFLKD

SEQ ID NO: 4499 - protein, 519 aa, Unknown
  Description of Unknown: Integrase B4500 sequence
  PTHR30461:SF3,IPR036162,PS51737,IPR011109,PTHR30461, PS00397,PF00239,G3DSA:1.10.10.2600,IPR006119,SSF53041, cd00338,SM00857,IPR025827,IPR038109,SSF161270 ,PS51736,IPR006118,PF13408,G3DSA:3.40.50.1390,PF07508,Coil
MRNVAIYVRVSTMHQAEQGYSIDSQLADCRKKAHDLGAITINEYVDKGKSGAFLDRPELQRMLNDIKTEKEYYDALIIYKLDRLSRDSMGLAYIIKILQQKNIKIISTDGAQYGANPQDVLTMQIMGSIAQFDNALRKERSIRGKIEKRKQGKLDKITKYGYTFNDEKQNLDIKEDEAIVIRKIFKWFTEDNLSAFRISKKLNSEKIPAPQPKINRKIINKDNIWFESTIRTMLKDETYAGIRHTMIYKFEKISLNNMKKTKRPPEEWISVPVPSIISRETWDKANNIMNRKNTNPRRTQRTWILQGLVFCEKCGQIMNIKQTPKIGKIKENEEKYNFYFKCRTNILNWFGSDKKCPNRQVPIYALEDSVWETLLNIFYSKETLEKYLKETQLKDNVYNLLDKLIEDRNKLSKNKNKIVEWFADGKIDQEIADNKINDLNNKINDLDKKISNLQSTNKSKKSFSINNLYDIFHKIKNPNREQKKEIIHSIVEKIFVERLDNKRSNAYTKPVLKIRIILR

SEQ ID NO: 4500 - protein, 519 aa, Unknown
  Description of Unknown: Integrase B4501 sequence
  cd00338,SM00857,G3DSA:1.10.10.2600,IPR036162,PS51737, G3DSA:3.40.50.1390,IPR006119,IPR038109,PF07508,IPR011109, SSF53041,PTHR30461,PS51736,Coil,PF00239
MNIGNQLGKLKKSDQFCIYLRKSRADAEAEKLGEGETLARHERILTELAVKLGLPIGKIYRELVSGETISARKEIKSMINDCYAGMWKGILVVEVTRLSRGNQGDAQTIMDCLRYSNNNNGILVVTPTKTYDIVRSPDDEEYMEFELFMSRREYKMIRKRMMRGKLQAVVEGNYMGSYRPYGYDILKTKTGRTLVPNQEEAPIVKNIFEWTVKEHLTPGKICKRLNTIGVPTYSGDPEWSVSSIKTILTNPTYTGKVRWNDRMQVKTMVDGKLVKSRPRSNHTNQYMLYDGKHEAIIDEITFHAAASHFHSDKTKANLKLMNPFAGILICAKCKKTMIYQGYNKRPNTPPRILHKSSQICNVKSAVLKDVMDAVAHALELYIDDFEMKIDNLPVVDENNILSQLEALQKELIKQEKKLPKLFDAWENGILTDDEFTRRKLINKERIESIKKQMDHLEDSVPTKDEYEEKIMLLSDALKSLLDPTLDADIKNTYLKSIISSIEYSRDNNTEFILDVFLKD

SEQ ID NO: 4501 - protein, 519 aa, Unknown
  Description of Unknown: Integrase B4502 sequence
  cd00338,SM00857,G3DSA:1.10.10.2600,IPR036162, PS51737,G3DSA:3.40.50.1390,IPR006119,IPR038109, PF07508,IPR011109,SSF53041,PTHR30461, PS51736,Coil,PF00239
MEQYCLYLRKSRSDQEAEARGEGETLARHEQALLKLAKHQHLNVLTIYREVVSGETIAARPMMQQLLHEVEQGVWSGVLVMEVERLARGDTIDQGIVAQAFKFSDTKIITPMKTYDPNNEFDEEYFEFGLFMSRREYKTINRRLQRGRTASINEGKYVGNIPPYGYQRIKLENDKGFTLQPDPQEAEVVKMIFQWYAGNSGEQLGPSLIAQRLDQLGIKPRKNDTWSEATIRGILINPVYIGMVKWQTRAQVKKSINGTVKKTRPRNHHPLLIKGLHPAIIDEQLYDQVSNRLACYAPAPINRSQTIQNPLASIIVCAKCGHKMIRRPYVNKPSMLICRQPNCDNIGASLELVEKMLLAALKEWVKDMKVSTDTLDLQPVNTLSLKNNQLTIISNDLKVAYTQMDRTYDLLEQGVYSTEKFLERSNALSEKIQSLQTQQKQLEVEIKKEEEEVAQRSTYLPKIEKLVDIYWAIDEPGARNDLLKEVLDHVTYSKEARMKKNHSDAGFTLKIYPLIMPKK

SEQ ID NO: 4502 - protein, 519 aa, Unknown
  Description of Unknown: Integrase B4503 sequence
  PTHR30461:SF3,SM00857,G3DSA:1.10.10.2600,IPR036162,PF13408, IPR025827,PS51737,G3DSA:3.40.50.1390,IPR006119,IPR038109, PF07508,IPR011109,SSF53041,PTHR30461,Coil, PS51736,cd00338,PF00239
MADFEHVIIYLRKSRSDDPATTVEEVLSRHENILQEYAVREWGARIPEDRIYREVVSGETIKDRPVMQHVMKILETGLVSGVLVVEPQRLSRGDLQDCGHIINSLRYTNTAVITPPKTYDLSDEYDRKFFEMELTRGNDYLEYTKKILNRGRIASVKAGNFIGNSAPYGYRKICVGTGKEKYYTLEIVPKEAEAIRLMFDLYVNKDYGFRSIAHALDMAGYKPRRSAEWSPAAISCMIANETYIGRVVWNRRKTIKKWENDTIVRTRPRQSEYISVPGKHPAIISDELFYAAKAKRNRTPRIKRYVQLLNPLAGLLYCGTCGHAMSRKRTVDKKYGSMSVSFLCNNQSNCHTKSVMYDAVIDRVKETLRQSIEDFEVKVNNKDETDIAYHRAMIANLKSELRKLKEKDMRQKDAYEDGIYTKEEFVVRNAKLAEQISIAQMKLDEAESSTTQLVDYQERLVRFRECLEALDDDTISAADKNTLLKSCIDKIMYYNDSPSLPGIGRYVDNPFRLEIFLKL

SEQ ID NO: 4503 - protein, 519 aa, Unknown
  Description of Unknown: Integrase B4504 sequence
  PTHR30461:SF3,IPR036162,PS51737,IPR011109,PTHR30461, PS00397,PF00239,G3DSA:1.10.10.2600,IPR006119,SSF53041, cd00338,SM00857,IPR025827,IPR038109,SSF161270, PS51736,IPR006118,PF13408,G3DSA:3.40.50.1390,PF07508,Coil
MRNVAIYVRVSTMHQAEQGYSIDSQLVDCRKKAHDLGAITINEYVDKGKSGAFLDRPELQRMLNDIKTEKEYYDALIIYKLDRLSRDSMGLAYIIKILQQKNIKIISTDGAQYGTNPQDVLTMQIMGSIAQFDNALRKERSIRGKIEKRKQGKLDKITKYGYTFNDEKQNLDIKEDEAIVIRKIFKWFTEDNLSAFRISKKLNSEKIPAPQPKINRKIINKDNIWFESTIRTMLKDETYAGIRHTMIYKFEKISLNNMKKTKRPPEEWISVPVPSIISRETWDKANNIMNRKNTNPRRTQRTWILQGLVYCEKCGQIMNIKQTPKIGKIKENEEKYNFYFKCRTNILNWFGSDKKCPNRQVPIYTLEDSVWETLLNIFYSKETLEKYLKETQVKDNVYNLLDKLIEDRNKLSKNKNKIVEWFADGKIDQEIADNKINDLNNKINDLDKKISNLQSTNRSKKSFSINNLYDIFHKIKNPNREQKKEIIHSVVEKIFVERLDNKRSNAYTKPVLKIRIILR

SEQ ID NO: 4504 - protein, 519 aa, Unknown
  Description of Unknown: Integrase B4505 sequence
  PTHR30461:SF3,IPR036162,PS51737,IPR011109,PTHR30461, PS00397,PF00239,G3DSA:1.10.10.2600,IPR006119,SSF53041, cd00338,SM00857,IPR025827,IPR038109,SSF161270, PS51736,IPR006118,PF13408,G3DSA:3.40.50.1390,PF07508,Coil
MRNVAIYVRVSTMHQAEQGYSIDSQLVDCRKKAHDLGAITINEYVDKGKSGAFLDRPELQRMLNDIKTEKEYYDALIIYKLDRLSRDSMGLAYIIKILQQKNIKIISTDGAQYGTNPQDVLTMQIMGSIAQFDNALRKERSIRGKIEKRKQGKLDKITKYGYIFNDEKQNLDIKEDEAIVIRKIFKWFTEDNLSAFRISKKLNSEKIPAPQPKINRKIINKDNIWFESTIRTMLKDETYAGIRHTMIYKFEKISLNNMKKTKRPPEEWISVPVPSIISRETWDKANNIMNRKNTNPRRTQRTWILQGLVYCEKCGQIMNIKQTPKIGKIKENEEKYNFYFKCRTNILNWFGSDKKCPNRQVPIYALEDSVWETLLNIFYSKETLEKYLKETQVKDNVYTLLDKLIEDRNKLSKNKNKIVEWFADGKIDQEIADNKINDLNNKINDLDKKISNLQSTNRSKKSFSINNLYDIFHKIKNPNRKQKKEIIHSVVEKIFVERLDNKRSNAYTKPVLKIRIILR

SEQ ID NO: 4505 - protein, 519 aa, Unknown
  Description of Unknown: Integrase B4506 sequence
  SM00857,G3DSA:1.10.10.2600,IPR036162,PF13408,IPR025827, G3DSA:3.40.50.1390,PS51737,IPR006119,IPR038109,PF07508, IPR011109,SSF53041,PF00239,PTHR30461,PS51736, Coil,cd00338
MNTNQIPVVSYSRFSSDMQHETSIEAQQDAINKYAAANGYTIIEDYVDRAKSATTTAKRDEFNRMIEDSKSGKFKFVIVHKFDRFARNRIDSTIAKAILEKSGVRVLSVLEPTSDTPEGELMEGMFELLAQYYSSNLGREVMKGFKVRAGKCLHNGGKPPLGYDVDPVTEKLVINESEAQTVKTIFQMYIDGHGYEDIINTLNKRGSRTKNGNEFGKNSLHDILRNKKYAGYYIYNRWDGKHNRHKEKSPEEVICIENGCPAIISEEMFNKAEKVMEQRKMSPGAKSAVKTYLLTGLIRCGECGNLMSGTQRKNGKGYMYRSYRCKHKDMVHHCSNKEIRADKIEEFVLLQLQKYIFDDKNIPAIVDGVKKQLIQHNAYVVEELRANERALKRLQNRRQNIINAIADGLMQDDFKEVLAQLKNDEKILLERQQELTIRNPDAAFTEDDLRNMISEFSGYVFNRDIPECKKFIAQFVKQVTVYNTKIEVTLRVASILLYGADYTITKSIGRTFLPTPELQ

SEQ ID NO: 4506 - protein, 519 aa, Unknown
  Description of Unknown: Integrase B4507 sequence
  PTHR30461:SF3,cd00338,SM00857,G3DSA:1.10.10.2600,IPR036162, PF13408,PS51737,G3DSA:3.40.50.1390,IPR025827,IPR006119, IPR038109,PF07508,IPR011109,SSF53041,PTHR30461, PS51736,Coil,PF00239
MKKVTKIDKIQNVTSKKQKLRVAAYCRVSTSNDAQLESLETQKAHYESYIASRDDWQFAGLYFDEGITGTKKDKRPELMRLMQDCAAKKIDFIITKSISRFSRNTTDCLELVRKLQELDVPIYFEKENINTGSMESELFLTILSSMAEGESTSISENSKWSIKKRFQNGTFKLSYAPYGYRWDGRTLRIIPEQAEVVKRIFADVLSGKGTDAIAKALDDEGVPTKRGGKWTSTSVRGILSNEKYTGDVIFQKTYTDDSFNRHTNKGELDMYYVADHHEAIISKEDFEAAGLLITQRAAEKGIKRESQKYQQRYAFSGKIICNECGDTFRRRMHSSTYGKYVAWCCNTHLADKDKCSMLYLRDDDLKVAFITVLNKLIYSHKLVLKPYAAALQNNSGDESLVRIQHLERLLEQNTEQRETLTRLVAQGYIDQVLYNSETNALLTQANTYREDIEVINATMSGDSSRFFEAERLLHFAERGSMLEEYGEDLFERFVDHIQVYSRHEVGFVMKCGLTFKEMI

SEQ ID NO: 4507 - protein, 519 aa, Unknown
  Description of Unknown: Integrase B4508 sequence
  cd00338,SM00857,G3DSA:1.10.10.2600,IPR036162,PS51737, G3DSA:3.40.50.1390,IPR006119,IPR038109,PF07508,IPR011109, SSF53041,PTHR30461,PS51736,Coil,PF00239
MNIGNQLGKLKKSDQFCIYLRKSRADAEAEKLGEGDTLARHERILTELAVKLGLPIGKIYRELVSGETISARKEIQSMINDCYAGMWKGILVVEVTRLSRGNQGDAQTIMDCLRYSNNNNGILVVTPTKTYDIVRSPDDEEYMEFELFMSRREYKMIRKRMMRGKLQAVIEGNYMGSYRPYGYDILKTKTGRTLVPNQEEAPIVKNIFEWTVKEHLTPGKICKRLNTIGVPTYSGDPEWSVSSIKTILTNPTYTGKVRWNDRMQVKTMVDGKLVKSRPRSNHTNQYMLYDGKHEAIIDEITFHAAASHFHSDKTKANLKLMNPFAGILICAKCKKTMIYQGYNKRPNTPPRILHKSSQICNVKSAVLKDVMDAVAHALELYIDDFEMKIDNLPVVDENNILSQLEALQKELIKQEKKLSKLFDAWENGILTDDEFTRRKLINKERIESIKKQMDHLEDSVPTKDEYEEKIMLLSDALKSLLDPTLDADIKNTYLKSIISSIEYSRDNNTEFILDVFLKD

SEQ ID NO: 4508 - protein, 519 aa, Unknown
  Description of Unknown: Integrase B4509 sequence
  PTHR30461:SF3,cd00338,SM00857,G3DSA:1.10.10.2600,IPR036162, PF13408,PS51737,G3DSA:3.40.50.1390,IPR025827,IPR006119, IPR038109,PF07508,IPR011109,SSF53041, PTHR30461,PS51736,Coil,PF00239
MKNKHDIKDIRAAVYIRYSSENQRDGYSVEYQLDECKKYIEQQGFIFEKSYIDEAVSGKSADKRTAFFELLADVKNGLYDVVIVYKYSRFARNLLEATLYRQQIEKNGAKLISAMERIDDSTPEGRMMRNIIMTMDEYYSDNLSTFVQSSMYTAAKSGKYLGGILPYGFSVNENGEFIENKAEADIVRRVFELRASGAMPADILRIFRNEGIRGRNGKPFTQQLLNKIVRSEKYIGVYKYAVKGYEPIRIENAFAPIVPRDLWDKVQHVVDNLNVKRAAKGRSRKNIYPLTGKIFCACCGEPFTGNSKGNGLAYYTCRGQDKLQICKNGSVKKDILENYVFGKIKELILCENHVEDIAQIVFDMLNKSTSGDIDAEISDLKKEKADIERKLENLLDLMLDGTISKDILQKKSAALQDELKIVESALKSKEYTAAETVTYDGIHAFLVDMIKQLENADDHVKKAIASQFIDKITINSDDINVRLTVSPFFVGDKLNDGWALFTISPKRSKSRSGGLTRLK

SEQ ID NO: 4509 - protein, 519 aa, Unknown
  Description of Unknown: Integrase B4510 sequence
  PTHR30461:SF3,SM00857,G3DSA:1.10.10.2600,IPR036162,PF13408, PS51737,G3DSA:3.40.50.1390,IPR025827,IPR006119,IPR038109, PF07508,SSF53041,IPR011109,PTHR30461,Coil, PS51736,cd00338,PF00239
MADFEHVIIYLRKSRSDDPATTVEEVLFRHENILQEYAVKEWGARIPEDRIYREVVSGETIKDRPVMQHVMKILETGLVSGVLVVEPQRLSRGDLQDCGHIINSLRYTNTAVITPPKTYDLSDEYDRKFFEMELTRGNDYLEYTKKILNRGRIASVKAGNFIGNSAPYGYRKICVGTGKEKYYTLEIVPEEAEAVRLMFDLYVNKDYGFRSIAHALDMAGYKPRRSAEWSPAAISCMIANETYIGRVVWNRRKTIKKWENDTIVRTRPRQSEYISVPGKHPAIINDELFYAAKAKRNRTPRIKRYVQLLNPLAGLLYCGTCGHAMSRKRTVDKKYGSVSVSFLCNNQSNCHTKSVMYDAVIDRVKETLRQSIEDFEVKVNNKDETDIAYHRAMIANLKSELRKLKEKDMRQKDAYEDGIYTKEEFVVRNAKLAEQISIAQLKLDEAESSTTQLVDYQERLVRFRECLEALDDDTISAADKNALLKSCIDKIMYYNDSPSLPGIGRYVDNPFRLEIFLKL

SEQ ID NO: 4510 - protein, 519 aa, Unknown
  Description of Unknown: Integrase B4511 sequence
  PTHR30461:SF3,SM00857,G3DSA:1.10.10.2600,IPR036162,PS51737, G3DSA:3.40.50.1390,IPR006119,IPR038109,PF07508,IPR011109, SSF53041,PTHR30461,PS51736,cd00338,PF00239
MYRELSYRSDEIIEYLRKSRADDPSLSVEDVLQKHESILSDWAERHDCCIPAENKYREVVSGETIDDRPEFLSVLRRIESPAIKAILCVEVQRLSRGDLEDAGRLIKILRYTRTNVITPSKTYDLSDEYDRDIFERELKRGNEYLEYQKKIMSRGRLQAVRQGDYIGSVAPYGYDKTFVLEGKKKHYTLCVNPAEASVVRQIFRMRAVEDLGPSRIAKQLNLQGTHPRNNDSWTYNCVKSILQNPVYTGKVFWNRRKVVHSVHSGSVESSRPWSSEYELHNGRHPAIIDSELFGAAQKISGKVTRVKDKVKVRNPFAGLFVCRCGHAMSYHTYPKTGPRILCDMQRVCHTGSCTFEEAEEIVVRILKQAIHDFDVQLKDSAAAMASREETLSSLRLRLAALDKKEISLWDKYAEEQMPKNVFDELNRRVAEDKAAVQASIDSILSEVPTREAIEEKRGRFSAALAALDDSDITAEAKNRMLKSCIEKISYYREPPVRKAGAPNRGWIVGDISVDANLCI

SEQ ID NO: 4511 - protein, 519 aa, Unknown
  Description of Unknown: Integrase B4512 sequence
  PTHR30461:SF3,SM00857,G3DSA:1.10.10.2600,IPR036162,PF13408, IPR025827,G3DSA:3.40.50.1390,PS51737,IPR006119,IPR038109, PF07508,IPR011109,SSF53041,PTHR30461, Coil,PS51736,cd00338,PF00239
MADFEHVIIYLRKSRSDDPATTVEEVLSRHENILQEYAVKEWGARIPEDRIYREVVSGETIKDRPVMQHVMKILETGLVSGVLVVEPQRLSRGDLQDCGHIINSLRYTNTAVITPPKTYDLSDEYDRKFFEMELTRGNDYLEYTKKILNRGRIASVKAGNFIGNSAPYGYRKICVGTGKEKYYTLEIVPEEAEAIRLMFDLYVNKDYGFRSIAHALDMAGYKPRRSAEWSPAAISCMIANETYIGRVVWNRRKTIKKWENDTIVRTRPRQSEYISVPGKHPAIISDELFYAAKAKRNRTPRIKRYVQLLNPLAGLLYCGTCGHAMSRKRTVDKKYGSVSVSFLCNNQSNCHTKSVMYDAVIDRVKETLRQSIEDFEVKVNNKDETDIAYHRAMIANLKSELRKLKEKDMRQKDAYEDGIYTKEEFVVRNAKLAEQISIAQMKLDEAESSTTQLVDYQERLVRFRECLEALDDDTISAADKNTLLKSCIDKIMYYNDSPSLPGVGRYVDNPFRLEIFLKL

SEQ ID NO: 4512 - protein, 519 aa, Unknown
  Description of Unknown: Integrase B4513 sequence
  PTHR30461:SF3,IPR036162,PS51737,IPR011109,PTHR30461, PF00239,G3DSA:1.10.10.2600,IPR006119,SSF53041,cd00338, SM00857,IPR025827,IPR038109,mobidb-lite,PS51736, PF13408,G3DSA:3.40.50.1390,PF07508,Coil
MARKKNIAAGQNAVIYARYSSHNQREVSIEQQVRECMKHAAELGLHVVGTYEDRAISGKTDKRPNFQRMMRDAEKGKFQAVVAWKSNRIGRNMLQAMVNEAKLEDCGVKVFYAEEDFDDTAAGRFALRNMMNVNQFYSENMAEDITRGLYDNASKCMANGRQPLGYKRGEDGRVVLDEANAAVVREIFTRVAAGDLFVDIARDLNAQGIKTSKGANWNKGSFQSICQNERYRGIYIYGDVRVADGIPRIVSDDLWYRVQEAMRMKKNPVGTRHRIGAEDYLLTGKLRCGHCGSYMTGVSGTSRNGELHYYYTCQKRRTEHACDKKNIRRDVIEPAVAQAIKMYCLTDDVIEWMADRTVEYWEKHDNDLQIEALEQQLEENKKATSNMLKAIEMGIITEATRTRMVELETEQSRLSVQLNAAKEDVVKIDREQIISYLELLQQGDIHDRDFQMELFKNFLVAVYVYDDNRMKLVFSCMGDQNSVEIPLETGEDPPDGGLSPDAKMFVLTPDSSTKKHCTS

SEQ ID NO: 4513 - protein, 519 aa, Unknown
  Description of Unknown: Integrase B4514 sequence
  PTHR30461:SF3,cd00338,SM00857,G3DSA:1.10.10.2600,IPR036162, PF13408,PS51737,G3DSA:3.40.50.1390,IPR025827,IPR006119, IPR038109,PF07508,IPR011109,SSF53041,PTHR30461, PS51736,Coil,PF00239
MYEDIKTACLYVRFSSHNQTEQSIEGQTRVCRDFCKRHNIRIVEIYADRATSASKDIEKRVQFLKMIKDSEKGLFDAVIVYKLDRFARSRYDSATYKYRLKRNGVQLISATENISNDPEGIILESVLEGMAEFYSAELSQKINRGMRESAYKHNSIGGAIPLGYKIEDKKLVIDPKTAPIVKEAFEKYADGETVAEICRQFNARGYKTSKGTAFGKSSFTKIFRNERYIGVYTFHDYRAEDAIPAIIDKDLWDRVQLRVGKIKNAPARNKAKVVYLLSGKIFCGHCGSKMNGNCNAGNYYYYQCYGKKNGNVDCKKKNIRKEFIERLVAQDALSLLTDEYIEQIATIACEKNQHEIELDSALPTIRDRIHQVDLSLNNLLKAIESGSAPDMLVKRMGELEKEKKDLQVQAKKESEDIIELDKAQVIYWLEQFRGGNIEDEEFCRMLIDLFVNSVTVWDEDDNTYKVTVAYNLTSLPTKTYRLNKGGTLSDFTSNAPDWEAHKDCIVVLHVVPLHGNFRS

SEQ ID NO: 4514 - protein, 519 aa, Unknown
  Description of Unknown: Integrase B4515 sequence
  PTHR30461:SF3,SM00857,G3DSA:1.10.10.2600,IPR036162,PF13408, PS51737,G3DSA:3.40.50.1390,IPR025827,IPR006119,IPR038109, PF07508,SSF53041,IPR011109,PF00239,PTHR30461, PS51736,Coil,cd00338
MADFEHVIIYLRKSRSDDPATTVEEVLSRHENILQEYAVREWGARIPEDRIYREVVSGETIKDRPVMQHVMKILETGLVSGVLVVEPQRLSRGDLQDCGHIINSLRYTNTAVITPPKTYDLSDEYDRKFFEMELTRGNDYLEYTKKILNRGRIASVKAGNFIGNSAPYGYRKICVGTGKEKYYTLEIVPEEAEAVRLMFDLYVNKDYGFRSIAHALDMAGYKPRRSAEWSPAAISCMIANETYIGRVVWNRRKTIKKWENDTIVRTRPRQSEYISVPGKHPAIISDELFYAAKAKRNRTPRIKRYVQLLNPLAGLLYCGTCGHAMSRKRTVDKKYGSVSVSFLCNNQSNCHTKSVMYDAVIDRVKETLRQSIEDFEVKVNNKDETDIAYHRAMIANLKSELRKLKEKDMRQKDAYEDGIYTKEEFVVRNAKLAEQISIAQLKLDEAESSTTQLVDYQERLVRFRECLEALDDDTISAADKNTLLKSCIDKIMYYNDSPSLPGIGRYVDNPFRLEIFLKL

SEQ ID NO: 4515 - protein, 519 aa, Unknown
  Description of Unknown: Integrase B4516 sequence
  PTHR30461:SF3,cd00338,SM00857,G3DSA:1.10.10.2600,IPR036162, PF13408,IPR025827,G3DSA:3.40.50.1390,PS51737,IPR006119, IPR038109,PF07508,IPR011109,SSF53041,PTHR30461, PS51736,Coil,PF00239
MKKVTKIAETTSANVKLKKIRVAAYCRVSTDSDAQLESLEAQKTHYENYITSRDDWEFAGLYYDEGITGTKKDKRPELLRLIDDCKAGKVDFVITKSISRFSRNTTDCLELVRKLLALHIPIYFEKENINTGSMESELFLAILSSMAEGESVSISENNKWSIQKRFESGTYKVSYPPYGYDWDGEQMIINPEQAAVVKEIFAALLSGKGTHAIADDLNRRGISTKRNGRWTATTIRGMLSNEKYVGDCLFQKTYSDSRFVRHNNHGEQTQYMVKDHHEAIISREDFEAAHAFIHQRATEKGVVKGSDKYQNRYTFSGKIICGECGDTFKRRIHSCTGYKYTAWCCSTHIKDKDKCHMLFVKDDDLKQAFVTMMNKLVYAHRIILKPYVDALKNTSSDDSLRRIQEIQTLLAQNTEKRETLTKLMTQGIIDPILFNKETNELLSQADSFRDEINTLKNAVSGDVTKVTAATALLHFTEKGGILQEFDDDLFNKYVNRIIVRSRNEVRFELKCGLTLRERI

SEQ ID NO: 4516 - protein, 519 aa, Unknown
  Description of Unknown: Integrase B4517 sequence
  PTHR30461:SF3,IPR036162,PS51737,IPR011109,PTHR30461, PF00239,G3DSA:1.10.10.2600,IPR006119,SSF53041,cd00338, SM00857,IPR025827,IPR038109,PS51736,mobidb-lite, PF13408,G3DSA:3.40.50.1390,PF07508,Coil
MARKKNIAAGLDAVIYARYSSHNQREVSIEQQIAECTKHAAALGLRIVGTYEDRAISGKTDNRPRFQQMMRDAEKGKFQAVVAWKSNRIGRNMLQAMVNEAKLDDYGVKVFYAEEDFDDTAAGRFALRNMMNVNQFYSENMAEDIIRGLYDNANKCMANGRQPLGYKRGADGKVMLDEPAAAVVREIFTRVAAGDLFVDIARDLNAKGIKTSKGAAWNKGSFQSICQNERYKGIYIYGNVRIVDGIPRIVSDELWYRVQEAMRMKKNPVGTRHRVGAEDYLLTGKLRCGHCGSYMTGVSGTSRNGELHYYYTCQKRRTEHACNKKNVRRDVIEPAIAQAIKMYCLTDDVIEWMADQTVQYWEKHDNDLQIEALEQQLAENKKATSNMLKAIEMGIITEATRSRMVELETENSKLTAQLSAAKRDVVKINREDLIHELHILRSKDIQDREVQAELFKDFLVAAYIYDDNRLKLVFSFMGKDNSVEIPLETGEDPPDGEDSPDAKMFVLTPDSSTKKHCTS

SEQ ID NO: 4517 - protein, 519 aa, Unknown
  Description of Unknown: Integrase B4518 sequence
  PTHR30461:SF3,cd00338,SM00857,G3DSA:1.10.10.2600,IPR036162, PF13408,PS51737,G3DSA:3.40.50.1390,IPR025827,IPR006119, IPR038109,PF07508,SSF53041,IPR011109,PTHR30461, PS51736,Coil,PF00239
MKKVTKIDKVPNVTSKKQKLRVAAYCRVSTSNDAQLESLETQKAHYESYITSRDDWQFAGLYFDEGITGTKKDKRPELMRLMQDCAAKKIDFIITKSISRFSRNTTDCLELVRKLQELDVPIYFEKENINTGSMESELFLTILSSMAEGESTSISENSKWSIKKRFQNGTFKLSYAPYGYRWDGRTLRIIPEQAEVVKRIFADVLSGKGTDAIAKALDDEGVPTKRGGKWTSTSVRGILANEKYTGDVIFQKTYTDDSFNRHTNKGELDMYYVADHHEAIISKEDFEAAGLLITQRAAEKGIKRESQIYQQRYAFSGKIICNECGDTFRRRMHSSTYGKYVAWCCNTHLADKDKCSMMFLRDDDLKVAFITVLNKLIYSHKLVLKPYAAALQNNSGDESLVRIQHLERLLEQNTEQRETLTRLMAQGYIDQVLYNSETNALLTQANTYREDIEVINATMSGDSSRFFEAERLLHFAERGSMLEEYSEDLFERFVDHIQVYSRQEVGFVMKCGLTFKEMI

SEQ ID NO: 4518 - protein, 519 aa, Unknown
  Description of Unknown: Integrase B4519 sequence
  SM00857,G3DSA:1.10.10.2600,IPR036162,PS51737,G3DSA:3.40.50.1390, IPR006119,IPR038109,PF07508,IPR011109,SSF53041, PF00239,PTHR30461,PS51736,Coil,cd00338
MNIGNQLGKLKKSDQFCIYLRKSRADAEAEKLGEGETLARHERILTELAVKLGLPIGKIYRELVSGETISARKEIQSMINDCYAGMWKGILVVEVTRLSRGNQGDAQTIMDCLRYSNNNNGILVVTPTKTYDIVRSPDDEEYMEFELFMSRREYKMIRKRMMRGKLQAVIEGNYMGSYRPYGYDILKTKTGRTLVPNQEEAPIVKNIFEWTVKEHLTPGKICKRLNTIGVPTYSGDPEWSVSSIKTILTNPTYTGKVRWNDRMQVKTMVDGKLVKSRPRSNHTNQYMLYDGKHEAIIDEITFHAAASHFHSDKTKANLKLMNPFAGILICAKCKKTMIYHGYNKRPNTPPRILHKSSQICNVKSAVLKDVMDAVAHALELYIDDFEMKIDNLPVVDENNILSQLEALQKELIKQEKKLPKLFDAWENGILTDDEFTRRKLINKERIESIKKQMDHLEDSVPTKDEYEEKIMLLSDALKSLLDPTLDADIKNTYLKSIISSIEYSRDNNTEFILDVFLKD

SEQ ID NO: 4519 - protein, 519 aa, Unknown
  Description of Unknown: Integrase B4520 sequence
  PTHR30461:SF3,IPR036162,PS51737,IPR011109,PTHR30461, PS00397,PF00239,G3DSA:1.10.10.2600,IPR006119,SSF53041, cd00338,SM00857,IPR025827,IPR038109, PS51736,IPR006118,PF13408,G3DSA:3.40.50.1390,PF07508,Coil
MRNVAIYVRVSTMHQAEQGYSIDSQLVDCRKKAHDLGAITINEYVDKGKSGAFLDRPELQRMLNDIKTEKEYYDALIIYKLDRLSRDSMGLAYIIKILQQKNIKIISTDGAQYGTNPQDVLTMQIMGSIAQFDNALRKERSIRGKIEKRKQGKLDKITKYGYTFNDEKQNLDIKEDEAIVIRKIFKWFTEDNLSAFRISKKLNSEKIPAPQPKINRKIINKDNIWFESTIRTMLKDETYAGIRHTMIYKFEKISLNNMKKTKRPPEEWISVPVPSIISRETWDKANNIMNRKSTNPRRTQRTWILQGLVFCEKCGQIMNIKQTPKIGKIKENEEKYNFYFKCRTNILNWFGSDKKCPNRQVPIYALEDSVWETLLNIFYSKETLEKYLKETQLKDNVYNLLDKLIEDRNKLSKNKNKIVEWFADGKIDQEIADNKINDLNNKINDLDKKISNLQSTNKSKKSFSINNLYDIFHKIKNPNREQKKEIIHSVVEKIFVERLDNKRSNAYTKPVLKIRIILR

SEQ ID NO: 4520 - protein, 519 aa, Unknown
  Description of Unknown: Integrase B4521 sequence
  SM00857,G3DSA:1.10.10.2600,IPR036162,PF13408,PS51737, G3DSA:3.40.50.1390,IPR025827,IPR006119,IPR038109,PF07508, IPR011109,SSF53041,PTHR30461,Coil,PS51736, cd00338,PF00239
MHLFKEIQSDREAEAHGEGETLARHQRILLDLAKKKEYIVGAIYREVVSGETIADRPVMQQLLHEVESGMWDGVLVVEVERLARGDTIDQGVVSRAFQYSDTKIITPTKIYDPNNEFDEEYFEFGLFMSRREYKTIKRRLNAGRISSVKEGKYCGNKPPYGYERIKLAREKGYTLRPVPAQAEIVKMIYTWYAGDGCEQIGVAKIVRKLNDMGIKSALGGDWTPASIQGILTNPVYIGKIRWNGRKTVKTIQNGQVVKTRPRSRNVLICEGLHPSIISDDLYNSVQEIRQKNPPRPISIKNTVRNPLAGIVYCSKCGRAMVRRPHQKRGQEDTLMCPYTSCPTVSSKLSLVEKAVLDGIKEITEKYKLNNDINVPYNTINSGIVSKQNLIREKESELESLNVQKAKQYDLLERGIYTTEVFLERSKTIARSIQSCSDIITKLREEIEHDENIKAQQSNFIPRCEELLNNYWDLNIESRNRMLKNLVEKVVYSKNIKNTYGKGNEINFELDIFPKIQKND

SEQ ID NO: 4521 - protein, 519 aa, Unknown
  Description of Unknown: Integrase B4522 sequence
  PTHR30461:SF3,SM00857,G3DSA:1.10.10.2600,IPR036162,PF13408, PS51737,G3DSA:3.40.50.1390,IPR025827,IPR006119,IPR038109, PF07508,IPR011109,SSF53041,PTHR30461,PS51736, cd00338,PF00239
MARSAKKIEYAPAEQIGVIYARYSSHNQKEESIEQQIAECTEFAEKNGIRIIGIYADKAVSGRSDRRPNFQRMMRDAEKRHFQIVVAYKSNRIARNMLNALQYEARLDLFGIKTLYAKEEFGNTAAGRFALRTMMNVNQFYSENMGEDIKRGMVDNANECKVNGMLPLGYVKSNEGKYAVAPDEAAVVREIFDSFLKDVPVAEIARSLNQRGIRTKLGREWNKNSFHIMLKNDNYIGVVVEDGIPPILEREVFAAVQEKLANKKKTAGRRSANGEYLLTGKLFCGYCGSYMIGVSGTGENGTVHHYYQCQKRHAESRCEKKNVRRDFIEKLIARLTQEYILQDDTIEWIADSTMSFQAMARRESGIAQLEHDLADKRKIAKNIMSAIEQGIITETTKARLLEVEAETRDLERSLSVAKAAAQPVERERVVFSLEQMREGNVGSKEHQKKLIDTFVKSVTLWDDRIQIDYYHTPGKHKFSYSLEELTSKVENESNAADVRAESLEVHHQAAPKKMPLRKA

SEQ ID NO: 4522 - protein, 519 aa, Unknown
  Description of Unknown: Integrase B4523 sequence
  SM00857,G3DSA:1.10.10.2600,IPR036162,PS51737,G3DSA:3.40.50.1390, IPR006119,IPR038109,PF07508,SSF53041,IPR011109, PTHR30461,Coil,PS51736,cd00338,PF00239
MQQYEEYLIYLRKSRSDASLEAMGVDVLERHEQILLDLAKRMNLSIGGIYREVVSGESISARPEMQRLLSEVEAGRWKGVVVMEVERLARGDTIDQGIVQRAFQYSGTQIVTPAKTYNPNNEFDEEYFEFGLFMSRREYKTIRRRMRAGVTAAVKEGKWPFNKAPYGWQRVKLEHARGWVLAPDPEEAPVVKLIFQLYTGPDRIGITNICRYLDNRGVKPRNGDTWTECSIMGILRNIVNDQRVGIGRRKIVKQVQNGSVSKVRPHSDYDFTAPGLQPRLIDHDVFLEAQTHLGKNSHKLPESYGIKNPLAGIVVCPCCGKKMMRRPASKTPGGASYDVLKCNTRNCPTIGSALDLVEREVIQALSDWVAGYQLDPTLEVENKVPEKEQLLSSAISNHDVLLKQNGNLYDLLEQGVYTTEIFLERSHELQKRIKESEAHIEVLKKDLEYEKEKIANVENFIPSCKELLSCYWELSAQDRNKALKMLLENVEYTKTKRNQKGDKDNPTFTLNLKPRIPRI

SEQ ID NO: 4523 - protein, 519 aa, Unknown
  Description of Unknown: Integrase B4524 sequence
  cd00338,SM00857,G3DSA:1.10.10.2600,IPR036162, PS51737,G3DSA:3.40.50.1390,IPR006119,IPR038109, PF07508,IPR011109,SSF53041,PTHR30461, PS51736,Coil,PF00239
MNIGNQLGKLKKSDQFCIYLRKSRADAEAEKLGEGETLARHERILTELAVKLGLPIGKIYRELVSGETISARKEIQSMINDCYAGMWKGILVVEVTRLSRGNQGDAQTIMDCLRYSNNNNGILVVTPTKTYDIVRSPDDEEYMEFELFMSRREYKMIRKRMMRGKLQAVVEGNYMGSYRPYGYDILKTKTGRTLVPNQEEAPIVKNIFEWTVKEHLTPGKICKRLNTIGVPTYSGDPEWSVSSIKTILTNPTYTGKVRWNDRMQVKTMVDGKLVKSRPRSNHTNQYMLYDGKHEAIIDEITFHAAASHFHSDKTKANLKLMNPFAGILICAKCKKTMIYQGYNKRPNTPPRILHKSSQICNVKSAVLKDVMDAVAHALELYIDDFEMKIDNLPVVDENNILSQLEALQKELIKQEKKLPKLFDAWENGILTDDEFTRRKLVNKERIESIKKQMDHLEDSIPTKDEYEEKIMCLSDALKSLLDPTLDADIKNTYLKSIISSIEYSRDNNTEFILDVFLKD

SEQ ID NO: 4524 - protein, 519 aa, Unknown
  Description of Unknown: Integrase B4525 sequence
  PTHR30461:SF3,cd00338,SM00857,G3DSA:1.10.10.2600,IPR036162, PF13408,PS51737,G3DSA:3.40.50.1390,IPR025827,IPR006119, IPR038109,PF07508,IPR011109,SSF53041,PTHR30461, PS51736,Coil,PF00239
MYEDIKTACLYVRFSSHNQTEQSIEGQTRVCRDFCKRHNIRIVEIYADRATSASKDIEKRVQFLKMIKDSEKGLFDAVIVYKLDRFARSRYDSATYKYRLKRNGVQLISATENISNDPEGIILESVLEGMAEFYSAELSQKINRGMRESAYKHNSIGGAIPLGYKIEDKKLVIDPKTAPIVKEAFEKYADGETVAEICRQFNARGYKTSKGTAFGKSSFTKIFRNERYIGVYSFHDYRAEDAIPAIIDKDLWDRVQLRVGKIKNAPARNKAKVVYLLSGKIFCGHCGSKMNGNCNAGNYYYYQCYGKKNGNVDCKKKNIRKEFIERLVAQDALSLLTDEYIEQIATIACEKNQHEIELDSALPTIRDRIHQVDLSLNNLLKAIESGSAPDMLVRRMGELEKEKKELQVQAKKESEDIVELDKAQVIYWLEQFRGGSIEDEEFCRMLIDLFVNSVTVLDEDDGSYKVTVAYNLTSLPTKTYRLNKGGTLSDFTSNAPDWEAHKDCIVVLHVVPLHGNFRS

SEQ ID NO: 4525 - protein, 519 aa, Unknown
  Description of Unknown: Integrase B4526 sequence
  PTHR30461:SF3,IPR036162,PS51737,IPR011109,PTHR30461, PS00397,PF00239,G3DSA:1.10.10.2600,IPR006119,SSF53041, cd00338,SM00857,IPR025827,IPR038109,SSF161270, PS51736,IPR006118,PF13408,G3DSA:3.40.50.1390,PF07508,Coil
MRNVAIYVRVSTMHQAEQGYSIDSQLVDCRKKAHDLGAITINEYVDKGKSGAFLDRPELQRMLNDIKTEKEYYDALIIYKLDRLSRDSMGLAYIIKILQQKNIKIISTDGAQYGTNPQDVLTMQIMGSIAQFDNALRKERSIRGKIEKRKQGKLDKITKYGYTFNDEKQNLDIKEDEAIVIRKIFKWFTEDNLSAFRISKKLNSEKIPAPQPKINRKIINKDNIWFESTIRTMLKDETYAGIRHTMIYKFEKISLNNMKKTKRTPEEWISVPVPSIISRETWDKANNIMNRKNTNPRRTQRTWILQGLVYCEKCGQIMNIKQTPKIGKIKENEEKYNFYFKCRTNILNWFGSGKKCPNRQVPIYALEDSVWETLLNIFYSKETLEKYLKETQVKDNVYTLLDKLIEDRNKLSKNKNKIVEWFADGKIDQEIADNKINDLNNKINDLDKKISNLQSTNRSKKSFSINNLYDIFHKIKNPNREQKKEIIHSVVEKIFVERLDNKRSNAYTKPVLKIRIILR

SEQ ID NO: 4526 - protein, 519 aa, Unknown
  Description of Unknown: Integrase B4527 sequence
  PTHR30461:SF3,SM00857,G3DSA:1.10.10.2600,IPR036162,PF13408, PS51737,G3DSA:3.40.50.1390,IPR025827,IPR006119,IPR038109, PF07508,SSF53041,IPR011109,PTHR30461,Coil, PS51736,cd00338,PF00239
MADFEHVIIYLRKSRSDDPATTVEEVLFRHENILQEYAVKEWGARIPEDRIYREVVSGETIKDRPVMQHVMKILETGLVSGVLVVEPQRLSRGDLQDCGHIINSLRYTNTAVITPPKTYDLSDEYDRKFFEMELTRGNDYLEYTKKILNRGRIASVKAGNFIGNSAPYGYRKICVGTGKEKYYTLEIVPEEAEAIRLMFDLYVNKDYGFRSIAHALDMAGYKPRRSAEWSPAAISCMIANETYIGRVVWNRRKTIKKWENDTIVRTRPRQSEYISVPGKHPAIISDELFYAAKAKRNRTPRIKRYVQLLNPLAGLLYCGTCGHAMSRKRTVDKKYGSVSVSFLCNNQSNCHTKSVMYDAVIDRVKETLRQSIEDFEVKVNNKDETDIAYHRAMITNLKGELKKLKEKDMRQKDAYEDGIYTKEEFVVRNAKLAEQISIAQLKLDEAESSTTQLVDYQERLVRFRECLEALDDDTISAADKNALLKSCIDKIMYYNDSPSLPGIGRYVDNPFRLEIFLKL

SEQ ID NO: 4527 - protein, 519 aa, Unknown
  Description of Unknown: Integrase B4528 sequence
  PTHR30461:SF3,SM00857,G3DSA:1.10.10.2600,IPR036162,PF13408, IPR025827,G3DSA:3.40.50.1390,PS51737,IPR006119,IPR038109, PF07508,IPR011109,SSF53041,PTHR30461,Coil, PS51736,cd00338,PF00239
MADFEHVIIYLRKSRSDDPATTVEEVLSRHENILQEYAVREWGARIPEDRIYREVVSGETIKDRPVMQHVMKILETGLVSGVLVVEPQRLSRGDLQDCGHIINSLRYTNTAVITPPKTYDLSDEYDRKFFEMELTRGNDYLEYTKKILNRGRIASVKAGNFIGNSAPYGYRKICVGTGKEKYYTLEIVSEEAEAIRLMFDLYVNKDYGFRNIAHALDMAGYKPRRSAEWSPAAISCMIANETYIGRVVWNRRKTIKKWENDTIVRTRPRQSEYISVPGKHPAIISDELFYAAKAKRNRTPRIKRYVQLLNPLAGLLYCGTCGHAMSRKRTVDKKYGSVSVSFLCNNQSNCHTKSVMYDAVIDRVKETLRQSIEDFEVKVNNKDETDIAYHRAMIANLKSELRKLKEKDMRQKDAYEDGIYTKEEFVVRNAKLAEQISIAQLKLDEAESSTTQLVDYQERLVRFRECLEALDDDTISAADKNTLLKSCIDKIMYYNDSPSLPGIGRYVDNPFRLEIFLKL

SEQ ID NO: 4528 - protein, 519 aa, Unknown
  Description of Unknown: Integrase B4529 sequence
  SM00857,G3DSA:1.10.10.2600,IPR036162,PS51737,G3DSA:3.40.50.1390, IPR006119,IPR038109,PF07508,IPR011109,SSF53041, PTHR30461,Coil,PS51736,cd00338,PF00239
MYELGEYLIYLRKSRSDSELEKMGVDVLERHEQILLNLAKQMKLSIGGIYREVVSGDSISARPEMQKLLSEVESGRWKGVLVMEIERLARGDTVDQGIVQRAFQYSGTLIVTPAKVYNPDNEFDEEYFEFGLFMSRREYKTIKRRMQTGRYAAVREGKWPYNTAPYGFNRKKLSKEKGWTLELNKDEAPVVRLIFSLYTGPNRVGITKIKHELNQRGIKPRKSDKWTESTIRDILRNVVYDQQVKIGERKVVMVIQDGSPAKTRPRADDYIIVPGRQPRLIAHEIFLEAQSYLGRGKPKAPSSYGVKNPLAGLMVCSECKKKMMRRPASPDGKYVPYDLLMCTTEHCPTIGSPLDLVEEMVVQALSDWVKDYKLSGKATYVSNIPEKEAILRTAKETHEQLLQQKEKLYDFLEQGIYSTETFLERSSSLQQRISESSQSIQLLEKDLEEEKERELNVEMFLPACEGLLDYYWNLSAQERNQALRQVIDSIEYKKLVKNKKGDVRNANFELTIKPKIPRK

SEQ ID NO: 4529 - protein, 519 aa, Unknown
  Description of Unknown: Integrase B4530 sequence
  PTHR30461:SF3,cd00338,SM00857,G3DSA:1.10.10.2600,IPR036162, PF13408,PS51737,G3DSA:3.40.50.1390,IPR025827,IPR006119, IPR038109,PF07508,IPR011109,SSF53041, PTHR30461,PS51736,Coil,PF00239
MTKDLQTGVIYARYSSDKQRDESIEGQIRECTEYAQREGILITKIYTDRALSARTDNRPEFLQMIRDSAHQSFNYVIVYQLDRFSRSREDSAKYKGILRRNGVRVLSAKEHITNEPAGIILESMLEGMAEYYSVELSQKVKRGMTENALKGKMNGSAVPLGYDLTESHHLAVNAHEAKAVRLIYDLYLKQHSIAKISDILHSKGYLTKRGRKISPSVIKTILSNEKYIGVYSWGDIRIEGSIPPIISKKVFDEVQQVMPTRIKNKGRRSEMYNLCGKLVCGECGGHYMGSTATSRNKEKHYYYVCTNRRKYHTCTAPNIRRDELEDLVINRTLEILNQPSNIARIVDLVMSGYNNTTKEAKIAMQGINDKIKAIDTELNNCMTAIKQGFITERLKGEIENLESERNNLLEQKANQESALIPIKFTADHIEYFLERMAKENPTTKAGRSRILDTFIKSVTIYSDRVEIVFNYKNDLPVFNTQCATGSHFEVLVGNLHNKANHFYINSTAYPITLIVPFGF

SEQ ID NO: 4530 - protein, 519 aa, Unknown
  Description of Unknown: Integrase B4531 sequence
  PTHR30461:SF3,SM00857,G3DSA:1.10.10.2600,IPR036162,PS51737, G3DSA:3.40.50.1390,IPR006119,IPR038109,PF07508,IPR011109, SSF53041,PTHR30461,PS51736,cd00338,PF00239
MYRELSYRSDEIIEYLRKSRADDPSLSVEDVLQKHESILSDWAERHDCCIPAENKYREVVSGETIDDRPEFLSVLRRIESPAIKAILCVEVQRLSRGDLEDAGRLIKILRYTRTNVITPSKTYDLSDEYDRDIFERELKRGNEYLEYQKKIMNRGRLQAVRQGDYIGSVAPYGYDKTFVLEGKKKHYTLCINPAEASVVRQIFRMRAVEDLGPSRIAKQLNLQGTHPRNNDSWTYNCVKSILQNPVYTGKVFWNRRKVVHSVHSGSVESSRPWSSEYELHDGRHPAIIDSELFGTAQKISGKVTRAKDKVKVRNPFAGLFVCRCGHAMSYHTYPKTGPRILCDMQRVCHTGSCTFGEAEEIVVRILKQAIHDFDVQLKDSAAAMASREGTLSSLRLRLAALDKKEISLWDKYAEEQMPKNIFDELNRRVAEDKAAVQASIDSILSEVPTREAIEEKRGRFSAALAALDDSDITAEAKNRMLKSCIEKISYYREPPVRKAGAPNRGWIVGDISVDANLCI

SEQ ID NO: 4531 - protein, 519 aa, Unknown
  Description of Unknown: Integrase B4532 sequence
  PTHR30461:SF3,SM00857,G3DSA:1.10.10.2600,IPR036162,PF13408, PS51737,G3DSA:3.40.50.1390,IPR025827,IPR006119,IPR038109, PF07508,IPR011109,SSF53041,PF00239, PTHR30461,PS51736,Coil,cd00338
MYEDIKTACLYVRFSSHNQTEQSIEGQTRVCRDFCKRHNIRIVEIYADRATSASKDIEKRVQFLKMIKDSEKGLFDAVIVYKLDRFARSRYDSATYKYRLKRNGVQLISATENISNDPEGIILESVLEGMAEFYSAELSQKINRGMRESAYKHNSIGGAIPLGYKIEDKKLVIDPKTAPIVKEAFEKYADGETVAEICRQFNARGYKTSKGTAFGKSSFTKIFRNERYIGVYTFHDYRAEDAIPAIIDKDLWDRVQLRVGKIKNAPARNKAKVVYLLSGKIFCGHCGSKMNGNCNAGNYYYYQCYGKKNGNVDCKKKNIRKEFIERLVAQDALSLLTDEYIEQIATIACEKNQHEIELDSALPTIRDRIHQVDLSLNNLLKAIESGSAPDMLVKRMGELEKEKKDLQAQAKKESEDIVELDKAQVIYWLEQFRDGSIEDEEFCRMLIDLFVNSVTVWDEDDNTYKVTVAYNLTSLPTKTYRLNKGGTLSDFTSNAPDREAHKDYIVVLHVVPFHGNFRS

SEQ ID NO: 4532 - protein, 519 aa, Unknown
  Description of Unknown: Integrase B4533 sequence
  PTHR30461:SF3,cd00338,SM00857,G3DSA:1.10.10.2600,IPR036162, PF13408,PS51737,G3DSA:3.40.50.1390,IPR025827,IPR006119, IPR038109,PF07508,IPR011109,SSF53041,PTHR30461, PS51736,Coil,PF00239
MARKKNIAAGLDAVIYARYSSHNQREVSIEQQIAECTKHAAALGLRIVGTYEDRAISGKTDNRPRFQQMMRDAEKGKFQAVVAWKSNRIGRNMLQAMVNEAKLDDYGVKVFYAEEDFDDTAAGRFALRNMMNVNQFYSENMAEDITRGLYDNANKCMANGRQPLGYKRGADGKVMLDEPAAAVVREIFTRVAAGDLFVDIARDLNAKGIKTSKGAAWNKGSFQSICQNERYKGIYIYGNVHIVDGIPRIVSDELWYKVQEAMRMKKNPVGTRHRVGAEDYLLTGKLRCGHCGSYMTGISGTSRNGELHYYYTCQKRRTEHACNKKNVRRDVIEPAIAQAIKMYCLTDDVIEWMADQTVQYWEKHDNDLQIEALEQQLAENKKATSNMLKAIEMGIITEATRSRMVELETENSKLTAQLSAAKRDVVKINREDLIDELHILRSKDIHDREVQAELFKDFLVAAYIYDDNRLKLVFSFMDKDNSVEIPLETGEDPPDGGDSPDAKMFVLPLECSTKKHCTS

SEQ ID NO: 4533 - protein, 519 aa, Unknown
  Description of Unknown: Integrase B4534 sequence
  PTHR30461:SF3,cd00338,SM00857,G3DSA:1.10.10.2600,IPR036162, PF13408,PS51737,IPR025827,G3DSA:3.40.50.1390,IPR006119, IPR038109,PF07508,IPR011109,SSF53041,PTHR30461, mobidb-lite,Coil,PF00239
MPRKPAKHPAKPKRGKKLEIEEPGVLYGRYSSHNQKDISVEQQFEKGYELAAEYGIRIIDTYADRAVSGRTDKRRDFQRMMTDAAKGKFRYVIAWKSNRMGRNMLEALINEARLQDLGVRVLYVEEDFDDTAAGRFAARSMMNVNQFYSENMAEDIKRGLYDNAANCMVANGHLPYGYKADETLHYAIDEPKAAVIREIFTRVSCGEAFVDIMASLNVRGIKTSYGRPWGRSSFQKILSNERYRGIYIYGDVRKEGGIPRIISDELYFKVQEVITTKKNPQGRHRVNGDYLLTGKLFCGHCKSPMTGVSGTGRSGNLHYYYVCQKRRTEKTCDKKNVRRDEIELQVAQAIKDYALKDDVIEWIADSTVAYNERKEAESKVGILEDQLAGTEHGIKNIMSAIEQGIITETTKSRLVELESERATIKANIAAARADIVTVSRDDIISGLEMFRDGDVHDKKYQERLFDTFLVAVYAYDDDLRLVFSFSGNKNTIQIPIESAVNAVENNEAECSFKLCSAPP

SEQ ID NO: 4534 - protein, 519 aa, Unknown
  Description of Unknown: Integrase B4535 sequence
  PTHR30461:SF3,IPR036162,PS51737,IPR011109,PTHR30461, PF00239,G3DSA:1.10.10.2600,IPR006119,SSF53041,cd00338, SM00857,IPR025827,IPR038109,mobidb-lite,PS51736, PF13408,G3DSA:3.40.50.1390,PF07508,Coil
MARKKNIAAGQDAVIYARYSSHNQREVSIEQQVSECMKHAAELGLHVVGTYEDRAISGKTDNRPRFQQMMRDAEKGKFQAVVSWKSNRIGRNMLQAMVNEAKLDDYGVKVFYAEEDFDDTAAGRFALRNMMNVNQFYSENMAEDITRGLYDNASKCMANGRQPLGYKRGEDGRVVLDEANAAVVREIFTRVAAGDLFVDIARDLNAQGIKTSKGANWNKGSFQSICQNERYRGIYIYGDVRVADGIPRIVSDDLWYRVQEAMRMKKNPVGTRHRVGAEDYLLTGKLRCGHCGSYMTGVSGTSRNGELHYYYTCQKRRTEHACDKKNIRRDVIEPAVAQAIKMYCLTDDVIAWIADRTVEYWEKHDNDLQIEALEQQLEENKKATSNMLKAIEMGIITEATRTRMVELETEQSRLSVQLNAAKEDVVKIDREQIISYLELLQQGDIHDRDFQMELFKNFLVAVYVYDDNRMKLVFSCMGDQNSVEIPLETGEDPPDGGLSPDAKMFVLTPDSSTKKHCTS

SEQ ID NO: 4535 - protein, 519 aa, Unknown
  Description of Unknown: Integrase B4536 sequence
  PTHR30461:SF3,IPR036162,PS51737,IPR011109,PTHR30461, PS00397,PF00239,G3DSA:1.10.10.2600,IPR006119,SSF53041, cd00338,SM00857,IPR025827,IPR038109,SSF161270, PS51736,IPR006118,PF13408,G3DSA:3.40.50.1390,PF07508,Coil
MRNVAIYVRVSTMHQAEQGYSIDSQLVDCRKKAHDLGAITINEYVDKGKSGAFLDRPELQRMLNDIKTEKESYDALIIYKLDRLSRDSMGLAYIIKILQQKNIKIISTDGAQYGTNPQDVLTMQIMGSIAQFDNALRKERSIRGKIEKRKQGKLDKITKYGYIFNDEKQNLDIKEDEAIVIRKIFKWFTEDNLSAFRISKKLNTEKIPAPQPKINRKIINKDNIWFESTIRTMLKDETYAGIRHTMIYKFEKISLNNMKKTKRPPEEWISVPVPSIISRETWDKANNIMNRKSTNPRRTQRTWILQGLVFCEKCGQIMNIKQTPKIGKIKENEEKYNFYFKCRTNILNWFGSDKKCPNRQVPIYTLEDSVWETLLNIFYSKETLEKYLKETQLKDNVYNLLDKLIEDRNKLSKNKNKIVEWFADGKIDQEIADNKINDLNNKINDLDKKISNLQSTNRSKKSFSINNLYDIFHKIKNPNREQKKEIIHSVVEKIFVERLDNKRSNAYTKPVLKIRIILR

SEQ ID NO: 4536 - protein, 519 aa, Unknown
  Description of Unknown: Integrase B4537 sequence
  SM00857,G3DSA:1.10.10.2600,IPR036162,PF13408,IPR025827, G3DSA:3.40.50.1390,PS51737,IPR006119,IPR038109,PF07508, SSF53041,IPR011109,PTHR30461,PS51736,cd00338, PF00239
MSLANDYKGISDRVTVIAATTGNKTDKIRVAAYCRVSTDKTDQVNSFITQMRYYTDYIKSNPKMILIDIYADEGISGTLMDKRDEFKRLLKDCKNRKIDRVLVKSVTRFARNSLECIEAVRELKSYGVSVFFENDKIDTENMNSEMLLYIKSAFAQNESMSLSKRMVQSIRMRMEEGTYKLGIAPYGYKLVDGELVVEPDEARNIRKIFDLYLSGIGANAIVKYMQAHETGDMLWNIGRINYVLENERYTGNMIMGKTYTPNVLPLRNRPNKGQMDSFYYSDTHEGIITKEEFDKVKEIKKMRQKTFCRGAKEKAFFSGKIKCRHCGWAYRSIVRNDKMLWSCSKKGLSIDVCHTPNRSNEQIERAFVSMYNKVRQNEKSLIDETIAQLQMLKVRINRGNDEIMQIDKDISVLSAQESLFTTLYSEGSFNEDLYFEKTDTIKKKISELKTRRAHLVSEDDDERCIERLRELKRNLQQFPVGITEFDKEIFNGIIKQIYIEESGAITFVLKGDLEFSAEV

SEQ ID NO: 4537 - protein, 518 aa, Unknown
  Description of Unknown: Integrase B4538 sequence
  cd00338,SM00857,G3DSA:1.10.10.2600,IPR036162,PS51737, G3DSA:3.40.50.1390,IPR006119,IPR038109,PF07508,IPR011109, SSF53041,PTHR30461,PS51736,Coil,PF00239
MSYCIYLRKSRKDLEAEQHGEGETLARHEHTLLSVAKRQNLIIGAIYREVVSGETIADRPVIQQVLHEVESGLWDGVLVMEVERLARGDTIDQGMVQRAFQYSNTLIITPLKTYNPANEFDQEYFEFGLFMSRREYKTIKRRMQAGRYAAVQEGKWPFNSAPYGWDRKKLESEKGWTLILNETEAPVVKLIFSLFTGSDRVGVTFIVHHLNDRGIKPRNGGKWTESTIREILSNPVNDKKVAIGKRKQSVQIVDGSPVKTRPRSGNYDIIVEGRQPRLIEHDMFAEAQSYLGLGTPKPPESYGTKNPLAGLLICNECKKRLQRRPAANPAFKNGAKYDMLICKTDGCPTVGSPLTLVEKQLIACLEDWVSGYELKSLLPESNVPEKQKLVDAAQHNHALLIQQNERLHDLLEQGVYSTQTFLERSQKLQERIRESTTQLAILEKDLEYEKEKDANINNFLPACKSLLAYYWELSIPERNKALKILLEGVEYKKTEKNKRGKKDTPTFELTLKPRIPRI

SEQ ID NO: 4538 - protein, 518 aa, Unknown
  Description of Unknown: Integrase B4539 sequence
  cd00338,SM00857,G3DSA:1.10.10.2600,IPR036162, PF13408,PS51737,G3DSA:3.40.50.1390,IPR025827, IPR006119,IPR038109,PF07508,IPR011109, SSF53041,PTHR30461,Coil,PF00239
MQENETYVIYLRKSRADSEKSSLEEVFAKHESELQSLAERTLGNRIPEDKIFREVVSGETITDRPVISQILKVMESKKIKGVFVVDPQRLTRGDLLDKGHLINVFKYTNTKIITPYKTFDLNNDFDLKLFKMELDKGSDYLEYYKMIQARGRIASVRSGQYIGSTAPYGYDKYSYKENKHTVNTLKPNSDEATVVQLIYHLYVNESLSYAAIANKLNAMNIKPRKSTSWSPYSLKEILHNPVYIGKVRWNRRKTVMKYKNESLLKTRPIALNNSIISDGIHKAIIDETLFDSAQNRSGKSPRNHSSSKLKNPLAGLMFCGNCGRAMSYKTYKNNAGSEKQPPRYLCNNQSNCHTKSVKATDVINQIIGALECYIEDFKVELENDDGNSFNVRSQIISVLNKQLQDLEIREETQYEMLENKIYTPELFKKRRQKLLEEREILLDKLQEAKVQEPVKIDYQEKIISFTDTVEALKNPDIDILQKNMLLKKCIKKITYTTDEEKGNRWRESTFEIDITPLI

SEQ ID NO: 4539 - protein, 518 aa, Unknown
  Description of Unknown: Integrase B4540 sequence
  cd03768,PTHR30461:SF3,SM00857,IPR036162,PF13408, IPR025827,G3DSA:3.40.50.1390,PS51737,IPR006119,PF07508, IPR011109,SSF53041,PTHR30461,PS51736,Coil, PF00239
MFTVGIYARKSVYRDNSDSVQVQVRLGKEYAGIIFKDKELEFRVYDSDEGFSGKNTNRPDFQRMMNDVENGLLNAVVVYKLDRISRNVQQFSAMYEILHQHQVAFISVKESFDTSTPMGRTVMYILAAFAQLERENTSERVTDGMLALGTAGKWTGGICPSGMKSVRMQCGDKYHSYLQIDPDTIWRPKMLYELLLDGNPITRIERYCRDHGIKSQTGKYLNTSQIYNILTNPVYCQNSIEAYYYFCDLGCKLPEASGFDGNHGLIGYGKTKTGTNSQHKRTSSEWTIAIGIHDYVIPADKWIAAQKRLGTNKMIRTAKYEAGILKGVLKCSCGGSMEVRTYTKNNIQFSYYYCRRMQRYGKEYCNSGYTPVKKLDSVFLNKLKQIQLDPARVTMDHPEDVFTQSSADLKKILHNLEASIMNLTNALTQAMGSSASEYIIRQIEELDHQKQITEAALRDAKIKEAQRIQNTNAVDQIYQSICYLLDHFDDIDYHGKNELIRKIVKNCIFDGENLKITF

SEQ ID NO: 4540 - protein, 518 aa, Unknown
  Description of Unknown: Integrase B4541 sequence
  SM00857,G3DSA:1.10.10.2600,IPR036162,PS51737,G3DSA:3.40.50.1390, IPR006119,IPR038109,PF07508,IPR011109,SSF53041, PTHR30461,PS51736,cd00338,PF00239
MNIGNQLGKLKKSDQFCIYLRKSRADAEAEKLGEGETLARHERILTELAVKLGLPIGKIYREIVSGETISARKEIQSMINDCYAGMWKGILVVEVTRLSRGNQGDAQIIMDCLRYSNNNNGVLVVTPTKVYDIVQSSDDEEYMEFELFMSRREYKMIRKRMMRGKLQAVVEGNYMGSYRPYGYDILKTKTGRTLVPNPEEAPIVKNIFEWTVKEHLTPGKICKRLTSLGVPTYTGSAEWAIGTVKTILTNPTYTGKVRWNDRMQTKTLVNGNLVSSRPRAHTSQYMLYEGKHKGIVDEITFHAASSRFYSDKTKANLKLMNPLAGILICAKCKKAMIYQGYLKRPNTLPRILHKTSQVCNVKSAVLKDVVDAVAHALELYIDDFEMKIDNLPDVDENSILSQLEVLQKELIKQEKKLPKLFDAWEDGILTDEEFTRRKLINKERIESIKKQMDHLEDSVPTKDEYEEKIMLLSDALKSLLDPTLDADIKNTYLKSIISSIEYSRDNNTEFILDVFLKD

SEQ ID NO: 4541 - protein, 518 aa, Unknown
  Description of Unknown: Integrase B4542 sequence
  PTHR30461:SF3,SM00857,G3DSA:1.10.10.2600,IPR036162, PF13408,IPR025827,PS51737,G3DSA:3.40.50.1390, IPR006119,IPR038109,PF07508,IPR011109, SSF53041,PF00239,PTHR30461,PS51736,Coil,cd00338
MLSFNNIIIYLRKSRSDDPTQSVEEVLARHEHILQEYCMKEYGEYIPENRIYREVVSGETIQDRPIIQQVLRLLESGGIDGVLVVEPQRLSRGDLENCGHIVNSFRYTNTLVITPTKTYNLQDEYDRKFFEMELTRGNDYLEYTKKILARGRLASVMQGNYINAIRPYGYNKVVIGTGKDKIHTLEIFKEENDVLLLMKHLYLDENYGLVRIAHTLDNLGIKAPNCEHWSPSTIKRMLSNPLYNGKIVWNRRKTVVKWKDGKKVKSKPLNKSDDVIIVQGKHPATFDDETFNAILKRMENSPKIKRSSKLRNPFAGLLFCSTCGSAMILRRSGRKSGVYSLTCNRQSICHTKSVQYKAVLLKVKQSLAEAISDFEVKMSNNDTTASELHAINISTLENELEQLYRKDLIQKDAFEDGIYSKAEYMQRNAQLQTQIATVTDKLNRAREDAPEPVSYEERIVCFRDCLNALDDDTVSAEVKNTLLKACISKIVYYNDSPSISGIGRYVDNPFRLEIFLKL

SEQ ID NO: 4542 - protein, 518 aa, Unknown
  Description of Unknown: Integrase B4543 sequence
  cd03768,PTHR30461:SF3,SM00857,IPR036162,PF13408, IPR025827,G3DSA:3.40.50.1390,IPR006119,PF07508,SSF53041, IPR011109,PTHR30461,PS51736,Coil,PF00239
MRIAIYARKSAFSDKSESVHNQDRMCREYCALHFPGEHIFLNYTDEDKTGANTNRPALQKMMRDVHAGIIDLLIVYQLDRLTRDVRDYCNLSAELNSCGVQFTSVKESVDTSTPIGEALTTLSAVFAQMERKTLSNRVYDNMMGLARSGWWTGGNLPCGYTTQRVVENGKPHTLLVPDPEKAEQLLNVFKLFVERGSSFRSFASFALTNDCFDVFGVPSTSQVRRVITSPYGAPANKDLRDYYLSIGANVVGAESDWDGTHGVMRYGVTDQRNGNATNPLTAWIVCPGRHEPILPADLWLAAQDQVKSNMFCKQAKYPPVLLKGILRCKCGRMMSPVRSRYKGKVYISYRCTRTGEVGRKSPDCVSACRDYVLDEKVLSVFREIERDPEVIKKYSPAAPTADQDVLHKKEKEIESLQKKIGNLSSALAINPESTAAKYIIADMESLDSQIQKKQMELAGLRANRLTAAQAEKELAAKQKEIARLVRNLDDLPPEEQNKIARSVLRKCVWDGETLFLEF

SEQ ID NO: 4543 - protein, 518 aa, Unknown
  Description of Unknown: Integrase B4544 sequence
  cd03768,PTHR30461:SF3,SM00857,IPR036162,PF13408,PS51737,G3DSA:3 .40.50.1390,IPR025827,IPR006119,PF07508,IPR011109,SSF53041, PTHR30461,PS51736,Coil,PF00239
MRIAIYARKSAFSDKSESVHNQDRMCREYCALHFPGEHVFVNYADEDKTGANVNRPALQKMMRDVHAGIIDLLIVYQLDRLTRDVRDYCNLSAELNDCGVHFTSVKEAVDTSTPIGEALSTLSAVFAQMERKTLSNRVYDNMMGLAMAGWWTGGNLPCGYTTRRVVENGKPHTLLVPDPEKAEQLLNVFKLFVERGSSFRSFASFALTNDCFHVFGVPSTSQVRRVITSPYGAPANRDLRDYYLSIGANVVGTESDWDGTHGVMRYGVTDQRNGNATNPRTAWIVCPGRHEPILPADLWLAAQDQVKSNMFCKQAKHPPVLLKGILRCKCGRMMSPVRSRYKGKVYISYRCTRTGEVGRKSPDCVSACRDYVLDEKVLSVFREIERDPDVIKKYSPAVPATDQDSLHKKEKEIELLQKKIGNLSSALAINPESTAAKYIIADMESLDSQIQKKQMELASLRASRLTAAQAEKELFEKQKEIARLVRNLDDLPPEEQNKIARSVLRKCVWDGETLFLEF

SEQ ID NO: 4544 - protein, 518 aa, Unknown
  Description of Unknown: Integrase B4545 sequence
  PTHR30461:SF3,cd00338,SM00857,G3DSA:1.10.10.2600,IPR036162, PF13408,PS51737,G3DSA:3.40.50.1390,IPR025827,IPR006119, IPR038109,PF07508,SSF53041,IPR011109,PTHR30461, PS51736,Coil,PF00239
MARKTDKPLSNIAVIYARFSSHNQREESIEQQVAECKLFAAQQGLEVTEIYSDSAQSGRTENRSQFLRLQRDAKKGKFTNIVAYKSNRIARNMVNALTFENDMEKLGVKLYYAKEEFGNNAAGRFALRMMMNVNQFYSENMAEDIRRGMEDNAMKCKVNGPAPYGYKSGKSGTYEIDEPAAAVVREIFTRVACGDSFVDIYTDLNNRGLKTRKGNKWGRSSFQSILKCEKYTGVYIYDNIRVEGGMPEIISKEMFLKVQRILGTKGNPQGRHRINGDYLLTGKLFCGECGHHMMGLSGTGKNGLLHYYYGCSGKKEKPRCSKKNVRRDELEYEVARLVQTYILQDDVITWLADTLTKYQEEHSSDGDMAILNTQLSETEKSIKNLMAAIEQGIITPSTKERLMELESEKSKIENNITLLKADTITVSKEQIGGWLDSFRDGNIKDKRFQKRLFDSFLSAVYVYDDNRVRIVFNLCGLNKGDIDTKLMLGDTEAIEKISDCSYKRCYGSPDLIKVEHLF

SEQ ID NO: 4545 - protein, 518 aa, Unknown
  Description of Unknown: Integrase B4546 sequence
  SM00857,IPR036162,PF13408,IPR025827,G3DSA:3.40.50.1390, IPR006119,SSF53041,PTHR30461,Coil,PS51736, cd00338,PF00239
MEKKRAAIYARFSSHNQRSESIEIQVENSTRYCQENGLDVVRIYTDYAKTGRNTDRAEFQRMMDDARLGLFDFVVIYKVTRIMRNRDEMALARIMLRKSGVEILYAGEEIASGSSGVLQLGMLEVLAEWESAIDSERIRDGIQKNAQRCMANGRTLYGWDIVEGRYRVNDREAAWLRKMKNKLFSGATMAEVVRSVDAMRTRQGKKVNQDTATKLLLRPQNGGTYCYAGVVVEGGMPALWPKHEQDMIISMLKSRHKPHRRVDTAEEWPLSGKLWCACCDSTLTGTSGTSATGKTYAYYKCNKCGRTFRRDVLEDAIVDVVCEAVKRPEIRGNIAALMADWSKDNAEETPLESERIKGEIRRIDAAFENIWQAIESGIAPPGGKDRVQELTERKNELEAEYHMAKAHESLEPDYEEIRQWLDEIAQNLMPQEILKMFIRAAEIEGDVVKLFFAFDYYGNDFTPPKYRHELFSNENSSCNSPMVEPKRKTANAHKITLKSCYVQVSRNWFVIVSNLKNT

SEQ ID NO: 4546 - protein, 518 aa, Unknown
  Description of Unknown: Integrase B4547 sequence
  SM00857,G3DSA:1.10.10.2600,IPR036162,PF13408, IPR025827,PS51737,G3DSA:3.40.50.1390,IPR006119, IPR038109,PF07508,IPR011109,SSF53041, PF00239,PTHR30461,Coil,cd00338
MQENETYVIYLRKSRADSEKSSLEEVFAKHESELQSLAERTLGNRIPEDKIFREVVSGETITDRPVISQILKVMESKKIKGVFVVDPQRLTRGDLLDKGHLINVFKYTNTKIITPYKTFDLNNDFDLKLFKMELDKGSDYLEYYKMIQARGRIASVRSGQYIGSTAPYGYDKYSYKENKHTVNTLKPNSDEATVVQLIYHLYVNESLSYAAIANKLNTMNIKPRKSTSWSPYSLKEILHNPVYIGKVRWNRRKTVMKYKNESLLKTRPIALNDSIISDGIHEAIIDETLFDSAQECNGKTPRNHSSSKLINPLAGLIFCGNCGRAMSYKTYKNNAGSEKQSPRYLCNNQSNCHTKSAKATDVINQIISALECYIEDFKVKLENDDGNSFNVRSQIISVLNKQLQDLEVREETQYEMLENKIYTPELFKKRRQKLLEEREVLLDKLQEAKVQEPVKIDYQEKIISFTDTVEALKNPDIDILQKNMLLKKCIKKITYTTDKEKGNRWRESTFEIDITPLI

SEQ ID NO: 4547 - protein, 518 aa, Unknown
  Description of Unknown: Integrase B4548 sequence
  PTHR30461:SF3,SM00857,G3DSA:1.10.10.2600,IPR036162,PF13408, IPR025827,PS51737,G3DSA:3.40.50.1390,IPR006119,IPR038109, PF07508,SSF53041,IPR011109,PTHR30461,Coil, PS51736,cd00338,PF00239
MKTVTKIMPDKPKKKKLRVAAYCRVSTSFDDQLTSLETQKSHYEEYIKSKRGWELAGIYFDEGITGTKKEVRPGLQQLITDCELGKIDYIITKSLSRFARNTTDCIEMVRKLMNLGIPIYFEKENIDTGSMQDEFLVTLMGSLAEQESRSISDNQKWSYQERFKSGNYKAGYAPYGYTVTDGKYIVNEEEAIWVRYIFEQCLAGKGAYTIADDLNKRQAPTKRGGKWAESTVRAVLRNEKYIGDCLVQKTYMDDEFKRHVNHGERDQYYLQDDHQPIISRKTFEAAARMLDFLGKEKNVDPQGGRSLNRYPFSGKIVCGHCGKHFQRRMQYTGSLVYPSWACRQHLADVSKCPQKSVKETALQQAFIVLMNKLSFGRKPILETLKRALNGNTFQQDPEKMEAINRRLTECRIQQEQLADFLHKGYLPSHAYNTEMAKLKIEMDTLEKQRSVQRSPEQMAQQKNLDELIQYLKEFPMQTAFDGEAFTRFVDHILVLSQTEFTFHLKCGLNLTERVKTDG

SEQ ID NO: 4548 - protein, 518 aa, Unknown
  Description of Unknown: Integrase B4549 sequence
  SM00857,G3DSA:1.10.10.2600,IPR036162,PS51737,G3DSA:3.40.50.1390, IPR006119,IPR038109,PF07508,IPR011109,SSF53041, PTHR30461,Coil,PS51736,cd00338,PF00239
MSYAIYLRKSQADLEAEASGAGETLSRHRMALLELAKRMQLEIGAVYEEIVSGETIAARPQMQKLLSEVGTGKWEGVLVMEVERLARGDSIDQGIVSQAFKFSGTKIITPLKIYDPTNEMDEEYLEFGLFMSRREYNTIKRRMVAGRIASVKEGKYMGKVDPFGYRRIKLEHEKGWSLDVVPEQAEIIRKIYEMYLAPGGSVTAVARYLKSIGSKTRLGADWSRASVIQTLKNPLYCGYVTWGHKPTRKAVEDGHITKKRYLSNDYVKVRGRHTPLVAEDDWNAAQKKLRDTTGYKVRSDRTMRNPFQKLMYCADCGHAMQLSTSTRNGRPNYSIFCPWPHCTNVSSRLDTLDNAVQDALRGWLQSYKVQVSHEQQTLPQESDTKAAIANSRSELTRVDEQMQRAFDFVEQGIYTPEQFLERRRVLSGRRDELSAAIQKLEDTLQSIRRIYDMSADVIPRIESVLNAYPSAETAEEKNKLLCSVLRRIIYQKHPSEAGNAGKYELNLDFLPIIPSVED

SEQ ID NO: 4549 - protein, 518 aa, Unknown
  Description of Unknown: Integrase B4550 sequence
  PTHR30461:SF3,SM00857,G3DSA:1.10.10.2600,IPR036162, G3DSA:3.40.50.1390,IPR006119,IPR038109,PF07508,SSF53041 ,IPR011109,PTHR30461,cd00338,PF00239
MASENDKNHRVRVAQYLRMSTDHQQYSLHNQSEYIKDYAEKNNMEIAYTYDDAGKSGVSIIGRHSLQQLLSDVEQKKIDIQAVLFYDVSRFGRFQNSDEAAYYSFLFERNGVDLIYCSEPIPTKDFPLESSVILNIKRSSAAYHSRNLSDKVFIGQVNLIKLGYHQGGMAGYGLRRLLVDENGIAKEILSFRKRKSIQTDRVILIPGPKNEIKIVNRIYDLFIDNNVPEFIIAERLNEQNIPAENGTLWTRAKIHQILTNEKYIGNNIYNKTSSKLKSRLVKNPKHEWVRCDKAYKPIISKKKYNKAQEIIQLRSIHLTNEDLLEKLKQKLESNGKLSGFIIDEDDTGPSSSVYRTRFGGLLRAYTLIGYKPEHDYSYIQINEALRSFYSGIIEDFKGEILKSNCYIDEYKYAPMLYINDEFLISVLITKCTHMKSGKLRWKVRFDNSQKADITIVIRMDSQNISPLDFYIIPKIENEYSKMWMTETNNIRLDLYRFDNLDKLLQIITRMKVRELYAA

SEQ ID NO: 4550 - protein, 518 aa, Unknown
  Description of Unknown: Integrase B4551 sequence
  SM00857,G3DSA:1.10.10.2600,IPR036162,PS51737,G3DSA:3.40.50.1390, IPR006119,IPR038109,PF07508,IPR011109,SSF53041, PTHR30461,PS51736,cd00338,PF00239
MNIGNQLGKLKKSDQFCIYLRKSRADAEAEKLGEGETLARHERILTELAVKLGLPIGKIYREIVSGETISARKEIQSMINDCYAGMWKGILVVEVTRLSRGNQGDAQIIMDCLRYSNNNNGVLVVTPTKVYDIVQSSDDEEYMEFELFMSRREYKMIRKRMMRGKLQAVVEGNYMGSYRPYGYDILKTKTGRTLVPNPEEAPIVKNIFEWTVKEHLTPGKICKRLTSLGVPTYTGSAEWAIGTVKTILTNPTYTGKVRWNDRMQTKTLVNGNLVSSRPRAHTSQYMLYEGKHKGIVDEITFHAASSRFYSDKTKANLKLMNPLAGILICAKCKKAMIYQGYLKRPNTLPRILHKTSQVCNVKSAVLKDVVDAVAHALELYIDDFEMKIDNLPDVDENSILSQLEVLQKELIKQEKKLPKLFDAWEDGILTDEEFTRRKLINKERIESIKKQMDHLEDSVPTKDEYEEKIMFLSDALKSLLDPTLDADTKNTYLKSIISSIEYSRDNNTEFILDVFLKD

SEQ ID NO: 4551 - protein, 518 aa, Unknown
  Description of Unknown: Integrase B4552 sequence
  PTHR30461:SF3,cd00338,SM00857,G3DSA:1.10.10.2600, IPR036162,PF13408,IPR025827,PS51737, G3DSA:3.40.50.1390,IPR006119,IPR038109,PF07508, SSF53041,IPR011109,PTHR30461,PS51736,Coil,PF00239
MIKAVIYARYSCDNQREESIEGQLRECKEFATRKGYTLVGSYIDRAMSAKTDNRPEFQRMIKESAKELFDVVIVWKLDRFARNRYDSAHYKATLRRNGVKVVSATEVISEGAEGIILESVLEGYAEYYSAELSEKVIRGMTENALKCQYNGGYIPVGYKVDENKHYQIDELTAPFVKEAFLMYVNGRHIKKIVEYFNENGIRSSRNKPMTKTTVSTILQNRKYIGEYQYRDIVVSDGIPAIISRELFALAQQRTEQNKYAPSASRSEIKYLLTGKLMCGDCGSVYAGESGTGRTGQKYHYYKCVKAKKRDGCERKAIKKDEVEEAVIEATVENIFVDEVIEEIADRVISWQEKESTLVPLYQRELAEVEKSIANLLSAIEQGIITSATKNRMAELESLKIDLEVKIAREEIQTQILTKDQVKFWLKNMEKLDLASIDNRQRIINTFVNSIYVYEDRFEVNFNCREGFETIPLDIERFVSRLEIVGEPYLCNKIDAHLEKLVFTSFFCVLRVKISGVKP

SEQ ID NO: 4552 - protein, 518 aa, Unknown
  Description of Unknown: Integrase B4553 sequence
  SM00857,G3DSA:1.10.10.2600,IPR036162,PS51737,G3DSA:3.40.50.1390, IPR006119,IPR038109,PF07508,IPR011109,SSF53041, PTHR30461,Coil,PS51736,cd00338,PF00239
MNLAEQLGLTESDQFCIYLRKSRADAEAEKLGEGETLARHERILTEFATREGLPIGKIYREIVSGETIAARKEIQSMINDCYAGMWKGILVVEVTRLSRGNQGDAQTIMDCLRYSNNNNGILVVTPTKTYDIVRSPDDEEYMEFELFMSRREYKMIRKRMMRGKLQAVVEGNYMGSYRPYGYDILKTKTGRTLVPNQEEAPIVKNIFEWTVKEHLTPGKICKRLNTIGVPTYSGDPEWSVSSIKTILTNPTYTGKVRWNDRMQVKTMVDGKLVKSRPRSNHTNQYMLYDGKHEAIIDEITFHAAASHFHSDKTKANLKLMNPLAGILICAKCKKAMIYQGYNKRPNTPPRILHKSSQICNVKSAVLKDVMDAVAHALELYIDDFEMKIDNLPVVDENNILSQLEALQKELIKQEKKLPKLFDAWENGILTDNEFTRRKLVNKERIESIKKQMDHLEDSIPTKDEYEEKIMCLSDALKSLLDPTLDADIKNTYLKSIISSIEYSRDNNTEFILDVFLKD

SEQ ID NO: 4553 - protein, 518 aa, Unknown
  Description of Unknown: Integrase B4554 sequence
  cd03768,PTHR30461:SF3,SM00857,IPR036162, PF13408,IPR025827,G3DSA:3.40.50.1390,PS51737, IPR006119,PF07508,SSF53041,IPR011109, PTHR30461,PS51736,Coil,PF00239
MRIAIYARKSAFSDKSESVHNQDRMCREYCALHFPGEHIFLNYTDEDKTGANTNRPALQKMMRDVHAGIIDLLVVYQLDRLTRDVRDYCNLSAELNDCGVHFTSVKESVDTSTPIGEALSTLSAVFAQMERKTLSNRVYDNMMGLARAGWWTGGNLPCGYTTRRVVENGKPHTLLVPDPEKADQLVNVFKLFVERGSSFHSFASFALTNDCFDVFGIPSTSQVRRVITSPYGVPANKDLRDYYLSLGANVIGTESDWDGTHGVMRYGVTDQRNGNATNPRTAWIVCPGRHEPILPADLWLAAQDQVKSNMFCKQAKHPPVLLKGILRCKCGRMMSPVRSRYKGKVYISYRCTRTGEVGRKSPDCVSACRDYVLDEKVLSVFREIERDPEVIKKYSPAAPATDQDALHKKEKEIESLQKKIGNLSSALAINPESTAAKYIIADMESLDSQIQKKQMELAGLQANRLTAAQAEKELFEKQKEIARLVQNLDDLPPEEQNKIARSVLRKCVWDGETLFLEF

SEQ ID NO: 4554 - protein, 518 aa, Unknown
  Description of Unknown: Integrase B4555 sequence
  PTHR30461:SF3,SM00857,G3DSA:1.10.10.2600,IPR036162,G3DSA:3.40.50 .1390,IPR006119,IPR038109,PF07508,IPR011109,SSF53041, PTHR30461,cd00338,PF00239
MASENDKNHKVRVAQYLRMSTDHQQYSLHNQSEYIKDYAEKNNMEIAYTYDDAGKSGVSIIGRHSLQQLLSDVEQKKIDIQAVLFYDVSRFGRFQNSDEAAYYSFLFERNGVDLIYCSEPIPTKDFPLESSVILNIKRSSAAYHSRNLSEKVFIGQVNLIKLGYHQGGMAGYGLRRLLVDENGIAKEILGFRKRKSIQTDRVILIPGPKNEIKIVNSIYDLFIDDNMPEFIIAERLNEQNIPAENGTLWTRAKIHQILTNEKYIGNNIYNKTSSKLKSRLVKNPKNEWVRCDKAYKPIISKKKYNKAQEIIQLRSVHLTNDELLEKLKQKLESNGKLSGFIIDEDDTGPSSSVYRTRFGGLLRAYTLIGYKPEHDYSYIQINEALRSFYSGIIEDFKGEILKSNCYIDEYKYAPMLYINDELLISVLITKCTPMKSGKLRWKVRFDNSQKADITIVIRMDSQNISPLDFYIIPKIENEYSKMCMTETNNIRLDLYRFDNLDKLLQIITRMKVRELYAA

SEQ ID NO: 4555 - protein, 518 aa, Unknown
  Description of Unknown: Integrase B4556 sequence
  SM00857,G3DSA:1.10.10.2600,IPR036162,PS51737, G3DSA:3.40.50.1390,IPR006119,IPR038109,PF07508, SSF53041,IPR011109,PTHR30461,Coil, PS51736,cd00338,PF00239
MKTYTPTDYALYLRKSRADLEAEAHGEGDTLARHEHILMELAKSRALPIGAIYREIVSGERIANRPVMQQLLSEVEDGRWKGVLVTETSRLARGDTIDQGIVAQAFKFSGTLIVTPSKTYDPTQEADEEWMEFGLFMSRQEYRMIRRRQLAGTRASKKEGHYVPGRPPYGYERYKLDGRGWSLRPVEPQAGVIRTIYDMYLSGKGFSEIANELNAMKIRTPLDKKWVPATTRAILQNPHYAGFIPSAMKVNTKIVQKGKLITKRPVNKNCELYEGIHEAIIPRDVWYSVQQRMKDTVTPRVPRKYQQMNPLAGLVYCDQCGKLMSRHPYRREDKVRFSCENPSCSTVSSLFEDVESLVLQSLREFLHEIELSSPALLDTKSEEIALQNIEKQLTDINRRLQRTYELLEDGVYSKETFLQRQSAISQDQTALLNTKHEIERKLHNKQTDIEAQKNSAPLIRHVLDVYPTLEDPKEQNLLLKQVIRRIDYHKTVRVYGKAKSDLHLTIHPKIAIPQTSNI

SEQ ID NO: 4556 - protein, 518 aa, Unknown
  Description of Unknown: Integrase B4557 sequence
  SM00857,G3DSA:1.10.10.2600,IPR036162,PS51737,G3DSA:3.40.50.1390, IPR006119,IPR038109,PF07508,IPR011109,SSF53041, PTHR30461,PS51736,cd00338,PF00239
MNIGNQLGKLKKSDQFCIYLRKSRADAEAEKLGEGETLARHERILTELAVKLGLPIGKIYREIVSGETISARKEIQSMINDCYAGMWKGILVVEVTRLSRGNQGDAQIIMDCLRYSNNNNGVLVVTPTKVYDIVQSSDDEEYMEFELFMSRREYKMIRKRMMRGKLQAVVEGNYMGSYRPYGYDILKTKTGRTLVPNPEEAPIVKNIFEWTVKEHLTPGKICKRLTSLGVPTYTGSAEWAIGTVKTILTNPTYTGKVRWNDRMQTKTLVNGNLVSSRPRAHTSQYMLYEGKHEGIVDEITFHAASSRFYSDKTKANLKLMNPLAGILICAKCKKAMIYQGYLKRPNTLPRILHKTSQVCNVKSAVLKDVVDAVAHALELYIDDFEMKIDNLPDVDENSILSQLEVLQKELIKQEKKLPKLFDAWEDGILTDEEFTRRKLINKERIESIKKQMDHLEDSVPTKDEYEEKIMLLSDALKSLLDPTLDADIKNTYLKSIISSIEYSRDNNTEFILDVFLKD

SEQ ID NO: 4557 - protein, 518 aa, Unknown
  Description of Unknown: Integrase B4558 sequence
  PTHR30461:SF3,cd00338,SM00857,G3DSA:1.10.10.2600, IPR036162,PF13408,PS51737,IPR025827, G3DSA:3.40.50.1390,IPR006119,IPR038109,PF07508, IPR011109,SSF53041,PTHR30461,PS51736,Coil,PF00239
MKTAYGYGRFSTDRQREESIEAQEIAIRNFCKQNNISLIAFYADRGLSGTNDNREQFQNMLDDADKGGVDYVIVHKLDRFARNRYDSVIVRKRLADHGVKLLSVLERVNDDSPEDIILLSVLEGMSEYYSKNLSREVKKGMYRNVEKGIYNGGFLPYGYKVNVNNETHFVEIDENEAAIVREIYSLYLENNGYVTIANKLNERGLKTKRGNIWTADTIGKLLKNEKYKGTYFHGKTKVIKNGRRQKVIKNKDWKQEETYPVIIDAEIWEAAKRRRTMNKPKGGKKHEYLLVGYAKCKKCGANYIGSSSAPYNDHVYRFYTCSRHNRKKCDAKIINADMLETIVIDFIKEKFFESESLDQYINDCIKLLNTDINNDDKIEAINKEIKSCTKKLDRLVELYIDDNISQEKYCDKKNELDCRVKSLEHELNLITIDRPVISKKEVKKIVNNFIKNMDDSFKYKKMLIDTFLDSVTIDDETFEITLIYNLFSKTEKIICNIDNASPYSSKKAFTASPPLQIN

SEQ ID NO: 4558 - protein, 518 aa, Unknown
  Description of Unknown: Integrase B4559 sequence
  cd03768,PTHR30461:SF3,SM00857,IPR036162,PF13408, IPR025827,G3DSA:3.40.50.1390,IPR006119,PF07508,SSF53041, IPR011109,PTHR30461,PS51736,Coil,PF00239
MRIAIYARKSAFSDKSESVHNQDRMCREYCALHFPGEHIFLNYTDEDKTGANVNRPALQKMMRDVHAGIIDLLVVYQLDRLTRDVRDYCNLSAELNDCGVHFTSVKESVDTSTPIGEALSTLSAVFAQMERKTISNRVYDNMMGLARAGWWTGGNLPCGYTTRRVVENGKPHTLLVPDPEKAEQLVTVFKLFVERGSSFHSFASFALTNDCFDVFGIPSTSQVRRVITSPYGAPANKDLRDYYLSIGANVIGAESDWDGTHGVMRYGVTDQRNGTATNPRESWIVCPGRHEPILPADLWLAAQNQVKSNMFCKQAKHPPVLLKGILRCKCGRMMSPVRSRYKGKVYISYRCTRTGEVGRKSPDCVSACRDYVLDEKVLSVFREIERDPEVIKKYSPAAPATDHDALRKKEKEIESLQKKIGNLSSALAINPESTAAKYIIADMESLDSQIQKKQMELAGLQANRLTAAQAEKELFEKQKEIARLVQNLDDLPPEEQNKIARSVLRKCVWDGETLFLEF

SEQ ID NO: 4559 - protein, 518 aa, Unknown
  Description of Unknown: Integrase B4560 sequence
  cd00338,SM00857,G3DSA:1.10.10.2600,IPR036162, PS51737,G3DSA:3.40.50.1390,IPR006119,IPR038109, PF07508,SSF53041,IPR011109,PTHR30461, PS51736,Coil,PF00239
MQYEEYLIYLRKSRSDASLEAMGVDVLERHEQILLDLAKRMNLSIGGIYREVVSGESISARPEMQRLLSEVEAGRWKGVVVMEVERLARGDTIDQGIVQRAFQYSGTQIVTPAKTYNPNNEFDEEYFEFGLFMSRREYKTIRRRMRAGVTAAVKEGKWPFNKAPYGWQRVKLEHARGWVLAPDPEEAPVVKLIFQLYTGPDRIGITNICRYLDNRGVKPRNGDTWTECSIMGILRNIVNDQRVGIGRRKIVKQVQNGSVSKVRPHSDYDFTAPGLQPRLIDHDVFLEAQTHLGKNSHKLPESYGIKNPLAGIVVCSCCGKKMMRRPASKTPGGAPYDVLKCNTRNCPTIGSALDLVEREVIQALSDWVAGYQLDPTLEVENKVPEKEQLLSSAISNHDVLLKQNGNLYDLLEQGVYTTEIFLERSHELQKRIKESEAHIEVLKKDLEYEKEKITNVENFIPSCKELLSCYWELSAQDRNKALKMLLESVEYTKTKRNKYGDKDNPTFTLNLKPRIPRI

SEQ ID NO: 4560 - protein, 518 aa, Unknown
  Description of Unknown: Integrase B4561 sequence
  cd00338,SM00857,G3DSA:1.10.10.2600,IPR036162,PS51737, G3DSA:3.40.50.1390,IPR006119,IPR038109,PF07508,SSF53041, IPR011109,PTHR30461,PS51736,Coil,PF00239
MQYEEYLIYLRKSRSDASLEAMGVDVLERHEQILLDLAKRMNLSIGGIYREVVSGESISARPEMQRLLSEVEAGRWKGVVVMEVERLARGDTIDQGIVQRAFQYSGTQIVTPAKTYNPNNEFDEEYFEFGLFMSRREYKTIRRRMRAGVTAAVKEGKWPFNKAPYGWLRVKLEHARGWVLAPDPEEAPVVKLIFQLYTGPNRIGITNICKYLDNRGIKPRNGDTWTECSIMGILRNIVNDQRVGIGRRKIVKQVQNGSVSKVRPHSDYDFTAPGLQPRLIDHDVFLEAQTHLGKNSHKLPESYGIKNPLAGIVVCSCCAKKMMRRPASKTPGGAPYDVLKCNTRNCPTIGSALDLVEREVIQALSDWVAGYQLDPTLEVENKVPEKEQLLSSAISNHDVLLKQNGNLYDLLEQGVYTTEIFLERSHELQKRIKESEAHIEVLKKDLEYEKEKIANVENFIPSCKELLSCYWELSAQDRNKALKMLLESVEYTKTKRNQKGDKDNPTFTLNLKPRIPRI

SEQ ID NO: 4561 - protein, 518 aa, Unknown
  Description of Unknown: Integrase B4562 sequence
  SM00857,G3DSA:1.10.10.2600,IPR036162,PF13408, PS51737,IPR025827,G3DSA:3.40.50.1390,IPR006119, IPR038109,PF07508,IPR011109,SSF53041, PF00239,PTHR30461,Coil,cd00338
MQENETYVIYLRKSRADSEKSSLEEVFAKHESELQSLAERTLGNRIPEDKIFREVVSGETITDRPVISQILKVMESKKIKGVFVVDPQRLTRGDLLDKGHLINVFKYTNTKIITPYKTFDLNNDFDLKLFKMELDKGSDYLEYYKMIQARGRIASVRSGQYIGSTAPYGYDKYSYKENKHTVNTLKPNSDEATVVQLIYHLYVNESLSCAAIANKLNTMNIKPRKSTSWSPYSLKEILHNPVYIGKVRWNRRKTVMKYKNESLLKTRPIALNDSIISDGIHEAIIDEALFDSAQECNGKTPRNHSSSKLINPLAGLIFCGNCGRAMSYKTYKNNAGSEKQPPRYLCNNQSNCHTKSAKATDVINQIISALECYIEDFKVKLENDDGNSFNVRSQIISVLNKQLQDLEVREETQYEMLENKIYTPELFKKRRQKLLEEREVLLDKLQEAKVQEPVKIDYQEKIISFTDTVEALKNPDIDILQKNMLLKKCIKKITYTTDKEKGNRWRESTFEIDITPLI

SEQ ID NO: 4562 - protein, 518 aa, Unknown
  Description of Unknown: Integrase B4563 sequence
  PTHR30461:SF3,IPR036162,PS51737,IPR011109,PTHR30461, PS00397,PF00239,G3DSA:1.10.10.2600,IPR006119,SSF53041, cd00338,SM00857,IPR025827,IPR038109,PS51736, IPR006118,PF13408,G3DSA:3.40.50.1390,PF07508,Coil
MENQIKTAALYIRVSTDKQEELSPDSQKRLLLEYAKNHDMIVSQKHIYVENGISGRKADKRPKFQQMIAAAKSEEHPFDVILLWKFSRFARNQEESIVYKSMLRNKCHVDVVSISEPLIEGPFGGLIERIIEWMDEFYSIRLSGDVTRGMTENALRGAYQCRPPLGYRIPYHKATPEIIPEEAEIVRLIFDKYVNGRMSIFAITKYLNSLGLKTNRGKPFEKRSVEYILQNPGYAGDVRWNRTVNETKEVRDPSEWIIRPGHHPAIISKGLFLAAQKRFQAEYRPKNAKPAEVSKHWLSGLLKCPACGRSLSSCVMHRKTAPDTFSFQCYGYLKGKCGHNCYVRAEEIEPAVIRALEDAIQRGSVTYTVKKNREKERNGEKELETLRKNLDRITQKEARAREAYMDGIDTKEEYRQNKERLLQERAELEKMISRLEQAEPEENANDARMMENISSVLDILRSGDFSVQEKNAALKSIVDRIVFYKDRGHIDVDYYLVEFPENPLFSGKFSIHTHLRSG

SEQ ID NO: 4563 - protein, 518 aa, Unknown
  Description of Unknown: Integrase B4564 sequence
  cd03768,PTHR30461:SF3,SM00857,IPR036162,PF13408, PS51737,G3DSA:3.40.50.1390,IPR025827,IPR006119,PF07508, IPR011109,SSF53041,PTHR30461,PS51736,Coil, PF00239
MRIAIYARKSAFSDKSESVHNQDRMCREYCALHFPGEHVFVNYADEDKTGANTNRPALQKMMRDVHAGIIDLLVVYQLDRLTRDVRDYCNLSAELNDCGVHFTSVKEAVDTSTPIGEALSTLSAVFAQMERKTLSNRVYDNMMGLARAGWWTGGNLPCGYTARRVVENGKPHTLLVPDPEKAEQLVTVFNLFVERGSSFCSFASFAQTNDCFDVFGIPSASQVRRVITSPYGAPSNKDLRDYYLSIGANVIGAESDWDGTHGVMRYGVTDQRNGNATNPRTAWIVCPGRHEPILPADLWLAAQDQVKSNMFCKQAKHPPVLLKGILRCKCGRMMSPVRSRYKGKVYISYRCTRTGEVGRKSPDCVSACRDYVLDEKVLSVFREIERDPDVIKKYSPAAPATDQDALHKKEKEIETLQKKIGNLSSALAINPESTAAKYIIADMESLDSQIQKKQMELAGLQANRLTAAQAEKELFEKQKEIARLVQNLDDLPPEEQNKIARSVLRKCVWDGETLFLEF

SEQ ID NO: 4564 - protein, 518 aa, Unknown
  Description of Unknown: Integrase B4565 sequence
  cd03768,PTHR30461:SF3,SM00857,IPR036162,PF13408, IPR025827,G3DSA:3.40.50.1390,PS51737,IPR006119,PF07508, IPR011109,SSF53041,PTHR30461,PS51736,Coil, PF00239
MFTVGIYARKSVYRDNSDSVQVQVRLGKEYAGIIFKDKELEFRVYDSDEGFSGKNTNRPDFQRMMNDVENGLLNAVVVYKLDRISRNVQQFSAMYEILHQHQVAFISVKESFDTSTPMGRTVMYILAAFAQLERENTSERVTDGMLALGTAGKWTGGICPSGMKSVRMQCGDKYHSYLQIDPDTIWRPKLLYELLLDGNPITRIERYCRDHGIKSQTGKYLNTSQIYNILTNPVYCQNSIEAYYYFCDLGCKLPEASGFDGNHGLIGYGKTKTGTNSQHKRTSSEWTIAIGIHDYVLPADKWIAAQKRLGTNKMIRTAKYEAGILKGVLKCSCGGSMEVRTYTKNNIQFSYYYCRRMQRYGKEYCNSGYTPVKKLDSIFLEKLKQIQLDPARVTIDHLEDVFTQSPTDLKKTLHNLESSIMNLTNVLTQAMGSSASEYIIKQIEELDRQKQITEAALRDAELKEAQQVQKTNAIDQIYQSICYLLNHFDDIDYHGKNELIRKIVKSCIFDGENLKITF

SEQ ID NO: 4565 - protein, 518 aa, Unknown
  Description of Unknown: Integrase B4566 sequence
  SM00857,G3DSA:1.10.10.2600,IPR036162,PF13408,IPR025827, G3DSA:3.40.50.1390,PS51737,IPR006119,IPR038109,PF07508, IPR011109,SSF53041,PTHR30461,Coil,PS51736, cd00338,PF00239
MQEAIKKDVKIIRPTKGLCGDKKLRVAAYCRVSTSSVDQENSFIAQVKYYNDFLNRSENMELVDIYADEGITGTSTNKRDDFNRMIKDSSLGKIDRIFVKSVSRFARNSLECIENIRLLKSYGTTVLFENDAIDTETMNSEMILYIKSAFAQSESLSGSKRVSTAIRMKMENGEFYNYTAPFGYKAENKTLIPIPEEAEIVIRIFREYIGGKGIGKIVADLNKDSVPGKPWVKERVRYILTNEKYCGDSLYQKSYTPPVLPLRNISNRGEVPKYYVEGTHAAIIDKETFHTVKQMFDRNMLIYGKRQKREIENFAGRLICGDCGRVYKKRIVGSQPTWICSKNGVAGQRCKTHPLSEGALKKSFVFMYNRLQQHRELIIKEAYQKLLELRKAFFNSSSAVLDIDTELAELAEQNAMYVRFHSQKIIDEVTFIEQTGEIKQRINELRSRRIKLMNNNEEERCIELLREAMQELEELPQAILLFNFNIFDKLVNKVAVMPDSLVFELRCGIKLREEIIWN

SEQ ID NO: 4566 - protein, 518 aa, Unknown
  Description of Unknown: Integrase B4567 sequence
  PTHR30461:SF3,cd00338,SM00857,G3DSA:1.10.10.2600,IPR036162, PS51737,G3DSA:3.40.50.1390,IPR006119,IPR038109,PF07508, IPR011109,SSF53041,PTHR30461,PS51736,Coil, PF00239
MGGRAAIYARFSSHNQRGESIEIQVEKSRAYCAENDLRVVATYCDFAQTGTNTDRAEFQRMMADAKRGLFDFVVIYKVTRIMRNRDEMAMARIMLRRCRVEILYAGEDISDGSAGVLQLGMLEVLAEYESALDGERIRDGIQKNAERCMANGCVRYGWDIVDGRYVVNEEEAAAIRLGVRMVLSGKSVADVVRAWEPYRTKRGGKWRFQTVRRILMRRENGGEYRYAGVVVPGGMPAIVPMDDEERVIRMLEDSHRPRAKTEAWDFPLTGKLYDGRDGGLMTGTSGTGKSGRPYHYYRCRSCGRTVRRDVVEKRVADAVREALGSADSRERIARMLADAEEERADEKPLSETIKGELAKIETAFSNIWAAIESGIAPPGGKERIDALKQRQALLKDELRTAEALEAARLDYDRALFWLEGMAAAEVDDAQLLRTFVARVVLGGPDDDDGLRVAFTFDDSAGLGDNPSLPGAIGPGGEVFDRMNASSTISNRQVEKCLYLPFYCLQIPRRIELCAGRER

SEQ ID NO: 4567 - protein, 518 aa, Unknown
  Description of Unknown: Integrase B4568 sequence
  PTHR30461:SF3,cd00338,SM00857,G3DSA:1.10.10.2600,IPR036162, PF13408,IPR025827,G3DSA:3.40.50.1390,PS51737,IPR006119, IPR038109,PF07508,IPR011109,SSF53041,PTHR30461, PS51736,Coil,PF00239
MVAIYVRQSLDKKDSLSIESQINDCITLCKRNGWDDYQVYKDKGWSAKNLDRPEFQKMNNDVEAGKIKAVVCYKIDRISRSIRDLVNLIEDYHELGVHFVSFADNINTAAPGGLMMATLFGSLAQMEREAIIARVTDNYYYRCELGYWGGGPAPYGFNLKKIVENGQKHTVLEINEREAAVVKQFFKWYLEPDGTIYEILKKADKAGITTRKGGAWTSRVVSELLSKPMYAPNSMDIYNFYAAQGVRVRVTPEQCDGKLSLNVFGRRDRGSKHPKRSRPVNEMTLAICKNPPIIDSDTFLKTQFKKKAKLQVSPRTGTAKTTMLSGLVKCAICGRAMSPSGSSRGVRYFTCSGKRNYAAGTCTSKSIKVSALEKIVIDDILRYATNPKVIDMFHAMQGSKLTAEQSHEVNLLQQEAAKLDIEIDNLLDACSAGNTTAIEYLNKRIEKIDTRKHEILTRINEIKRDTENVISLFSGIEIENVPYILAHGSIAEKKNVCQFLLSSVLFTNADDVKVYYKM

SEQ ID NO: 4568 - protein, 518 aa, Unknown
  Description of Unknown: Integrase B4569 sequence
  PTHR30461:SF3,cd00338,SM00857,G3DSA:1.10.10.2600,IPR036162, PF13408,IPR025827,G3DSA:3.40.50.1390,PS51737,IPR006119, IPR038109,PF07508,SSF53041,IPR011109,PTHR30461, PS51736,Coil,PF00239
MSKLYCMYLRKSRADLEAEARGEGETLSRHRRTLTELAIRMHLPLGEVYDEIATGESIAARPQMQRMLADIEAGMWAGVLCMDVDRLARGDSIDQGIISQTFLYSNAIIITPGKTYDPRNESDSEFFEMKMFFSRREYAQIRKRLQAGRMRSVLDGRYMGTRPPYGYKRVKIQGDKGWTLEIVPEKAEIVRMIYDWYVNGMDGRPVGCGAIATRLNDMGLRTDMGNRFDPSCILNIITNPAYVGMVRWNQRTTVVSLQNGQRIKSRPKSDEPIIVRGLHAPILTQEIYDAAQERHAGRYVPKTPETLALSNPLAGLVVCHECGHTLQRKPSPRGCWIFCPTRRCKTIGILEDVFERAVLEHLQNWLVTYSDENAPSAPAKNAADAVAEQLQRQKQTLQTQLSRLYDLLEQGVYTTEVFLARQRELTERLSALDEKLAAAQKPPELDMEACIRQALPRVKAVLDAYPLAETAAEKNALLKSVIERIDYQKTKRSTRWQNSLDFLQMTIYPRVPAGEIQG

SEQ ID NO: 4569 - protein, 518 aa, Unknown
  Description of Unknown: Integrase B4570 sequence
  PTHR30461:SF3,SM00857,G3DSA:1.10.10.2600,IPR036162,PS51737, G3DSA:3.40.50.1390,IPR006119,IPR038109,PF07508,IPR011109, SSF53041,PF00239,PTHR30461,PS51736,Coil, cd00338
MNYRSFEMRLLVYLRKSRSDVEEERKAAAEGREYDTLARHRRNLMDVIKREGHILVEPPYEELVSGDSIIERPEVQKMLNRMDEGDIDGVLVIDIDRLGRGDMYDSGILDRAFRYNNIKLITPTEIYDPEEENWELVFGVKSLVARQELKSINKRLQGGRRDKAKMGRSISKKPPYGYLRDENLKLYPDPDTAWVIQKIFEMTVKGNGRQAIAKKLDEWSVAPPDTNRNHWSPSTITAIVKNEVYIGKIIWGKITYLKRGGQYTRRKMKPEEWIVKDEAHEPLVTKELFDAANAAHSGRFRPSTKANNVLSNPLAGILKCELCGYTMLYQPRKDRPNSMIYCTKAQCRGKQKGAMLYLVENRILVSLEQYIKEFEIPKQQDAKNNSSIIQFQEKALDKKKKEIAEANKQKSALHDFLEKGVYDINTFMERQKVLVDRIEKLKDETRLIVEDMEKEKFREKNTKQFIPLVKSVLTAYRETDDIEKKNRLLKSVLERATFLRKKEWTKIDQFVIQLYPKI

SEQ ID NO: 4570 - protein, 518 aa, Unknown
  Description of Unknown: Integrase B4571 sequence
  PTHR30461:SF3,SM00857,G3DSA:1.10.10.2600,IPR036162,G3DSA:3.40.50 .1390,IPR006119,IPR038109,PF07508,SSF53041,IPR011109, PTHR30461,PS51736,cd00338,PF00239
MASENDKNHKVRVAQYLRMSTDHQQYSLHNQSEYIKDYAEKNNMEIAYTYDDAGKSGVSIIGRHSLQQLLSDVEQKKIDIQAVLFYDVSRFGRFQNSDEAAYYSFLFERNGVDLIYCSEPIPTKDFPLESSVILNIKRSSAAYHSRNLSEKVFIGQANLIKLGYHQGGMAGYGLRRLLVDENGIAKEILGFRKRKSIQTDRVILIPGPKNEIKIVNSIYDLFIDDNMPEFIIAERLNEQNIPAENGTLWTRAKIHQILTNEKYIGNNIYNKTSSKLKSRLVKNPKNEWVRCDKAYKPIISKKKYNKAQEIIQLRSVHLTNEELLEKLKQKLESNGKLSGFIIDEDDTGPSSSVYRTRFGGLLRAYTLIGYKPEHDYSYIQINEALRSFYSGIIEDFKGEILKSNCYIDEYKYAPMLYINDEFLISVLITKCTHMKSGKLRWKVRFDNSQKADITIVIRMDSQNISPLDFYIIPKIENEYSKMWMTETNNIRLDLYRFDNLDKLLQIITRMKVRELYAA

SEQ ID NO: 4571 - protein, 518 aa, Unknown
  Description of Unknown: Integrase B4572 sequence
  SM00857,G3DSA:1.10.10.2600,IPR036162,PS51737, G3DSA:3.40.50.1390,IPR006119,IPR038109,PF07508, SSF53041,IPR011109,PTHR30461,Coil, PS51736,cd00338,PF00239
MQYEEYLIYLRKSRSDASLEAMGVDVLERHEQILLDLAKRMNLSIGGIYREVVSGESISARPEMQRLLSEVEAGRWKGVVVMEVERLARGDTIDQGIVQRAFQYSGTQIVTPAKTYNPNNEFDEEYFEFGLFMSRREYKTIRRRMRAGVTAAVKEGKWPFNKAPYGWQRVKLEHARGWVLAPDPEEAPVVKLIFQLYTGPNRIGITNICRYLDNRGVKPRNGDTWTECSIMGILRNIVNDQRVGIGRRKIVKQVQNGSVNKVRPHSDYDFTAPGLQPRLIDHDVFLEAQTHLGKNSHKLPESYGIKNPLAGIVVCSCCGKKMMRRPASKTPGGAPYDVLKCNTRNCPTIGSALDLVEREVIQALSDWVAGYQLDPTLEVENKVPEKEQLLSSAISNHDVLLKQNGNLYDLLEQGVYTTEIFLERSHELQKRIKESEVHIEVLKKDLEYEKEKIANVENFIPSCKELLSCYWELSAQDRNKALKMLLESVEYTKTKRNKYGDKDNPTFTLNLKPRIPRI

SEQ ID NO: 4572 - protein, 518 aa, Unknown
  Description of Unknown: Integrase B4573 sequence
  SM00857,G3DSA:1.10.10.2600,IPR036162,PS51737,G3DSA:3.40.50.1390, IPR006119,IPR038109,PF07508,SSF53041,IPR011109, PTHR30461,Coil,PS51736,cd00338,PF00239
MKTYTPTDYALYLRKSRADLEAEAHGEGDTLARHEHILMELAKSRALPIGAIYREIVSGERIANRPVMQQLLSEVEDGRWKGVLVTETSRLARGDTIDQGIVAQAFKFSGTLIVTPSKTYDPTQEADEEWMEFGLFMSRQEYRMIRRRQLAGTRASKKEGHYVPGRPPYGYERYKLDGRGWSLRPVEPQAGVIRTIYDMYLSGKGFSEIANELNAMKIRTPLDKKWVPATTRAILQNPHYAGFIPSAMKVNTKIVQKGKLITKRPVNKNCELYEGIHEAIIPRDVWYSVQQRMKDTVTPRVPRKYQQMNPLAGLVYCDQCGKLMSRHPYRREDKVRFGCENPSCSTVSSLFEDVESLVLQSLREFLHKIELSSPALLDTKSEEIALQNIEKQLTDINRRLQRTYELLEDGFYSKETFLQRQSAISQDQTALLNTKHEIERKLHNKQTDIEAQKNSAPLIRHVLDVYPTLEDPKEQNLLLKQVIRRIDYHKTVRVYGKAKSDLHLTIHPKIAIPQTSNI

SEQ ID NO: 4573 - protein, 518 aa, Unknown
  Description of Unknown: Integrase B4574 sequence
  SM00857,G3DSA:1.10.10.2600,IPR036162,PF13408, IPR025827,PS51737,G3DSA:3.40.50.1390,IPR006119, IPR038109,PF07508,SSF53041,IPR011109, PF00239,PTHR30461,Coil,cd00338
MQENETYVIYLRKSRADSEKSSLEEVFAKHESELQSLAERTLGNRIPEDKIFREVVSGETITDRPVISQILKVMESKKIKGVFVVDPQRLTRGDLLDKGHLINVFKYTNTKIITPYKTFDLNNDFDLKLFKMELDKGSDYLEYYKMIQARGRIASVRSGQYIGSTAPYGYDKYSYKENKHTVNTLKPNSDEATVVQLIYHLYVNESLSYAAIANKLNTMNIKPRKSTSWSPYSLKEILHNPVYIGKVRWNRRKTVMKYKNESLLKTRPIALNDSIISDGIHEAIIDEALFDSAQECNGKTPRNHSSSKLINPLAGLIFCGNCGRAMSYKTYKNNAGSEKQPPRYLCNNQSNCHTKSAKATDVINQIISALECYIEDFKVKLENDDGNSFNVRSQIISVLNKQLQDLEVREETQYEMLENKIYTPELFKKRRQKLLEEREVLLDKLQEAKVQEPVKIDYQEKIISFTDTVEALKNPDIDILQKNMLLKKCIKKITYTTDKEKGNRWRESTFEIDITPLI

SEQ ID NO: 4574 - protein, 518 aa, Unknown
  Description of Unknown: Integrase B4575 sequence
  SM00857,G3DSA:1.10.10.2600,IPR036162,PS51737,G3DSA:3.40.50.1390, IPR006119,IPR038109,PF07508,IPR011109,SSF53041, PF00239,PTHR30461,PS51736,Coil,cd00338
MEKLINNNMEYYCAYLRKSRKDMEAEAHGQGETLARHEKRLKDYADSVGIKISKFYREVVSGETISARPVMQQLLTDVENGMWTGVLVVEVERLARGNTLDQGIVSNAFQYSNTKIITPLKTYDPNNDYDEEYFEFGLFMSRREYKKINQRLHEGILASVKEGKHVGTSAPYGYNKYKLPKQKGYSLKINEYEANMIKLIYNFYCSGNGLEFICNELNRLGFKPRRSNEFTKSSITHILTNPVYIGKIKYTDKATTKKVVNGNIVRVKNENKNVIYVDGLHEPIIDLNTWNKVQNIRNSNLISRTKVDYTLKNPMASILKCGLCGRSLSRITYSNRNDIRICCRKCKENVGSNINFVEDKLLQSLKLLLEDYKVKLINNDNSDIETLLKINEDNILNYKTELEKLKLQLNKTYDLLEQEVYTKDIFIERSNLLKQQIKETNNKITELEYEKNNIMSQKNNKEILVPKIENVIDSYYETDDIKMKNNLLKDVLEKVEYTKINPSDKDDFKLKLFPKIQA

SEQ ID NO: 4575 - protein, 518 aa, Unknown
  Description of Unknown: Integrase B4576 sequence
  PTHR30461:SF3,SM00857,IPR036162,G3DSA:3.40.50.1390,IPR006119, PF07508,IPR011109,SSF53041,PTHR30461,Coil, PS51736,cd00338,PF00239
MSIMSFSNIIIYLRKSRADDPTMTVEEVLAKHESILQDYCVNEFGQPIPESRIYREVVSGETIQDRPVMQRVLRLLESGNIDGVLVVEPQRLSRGDLEDCGHIINSFRYTNTAVITPTKTYNLQDEYDRKFFEMELTRGNDYLEYTKKILARGRLAAVMSGQYIGSVRPYGYNKVVYGSGKNKIRTLEKFKKENDILVLMKRLYLDNDYTPEEIARTFDSMGIESPRGKHWTASAVRRLLASPINNGKIVWNKRQTVVEWKNGKQVKSRAKSNKDDVIIVQGKHPATYDDETYTAIMAKLSIHSVKVTNQRGLRNPFAGILFCQCGRAMSLRSTHNGHSVILICNDHFYCHTRSVAFNPVLDKVKEALSEAITDFSVKISNKEHTESELYALNISTLENKLEQLYKKDLVQKDAYEDGVYSKAEYIQRNTQLQEQISAIANSLKEMRAKAPEVINYKDCIIRFQDCLNALEDNNVSIEVKNALLKACISKIVYHSVNSNSEYSGRTKNPFNLEVFFKL

SEQ ID NO: 4576 - protein, 518 aa, Unknown
  Description of Unknown: Integrase B4577 sequence
  cd03768,PTHR30461:SF3,SM00857,IPR036162,PF13408, PS51737,G3DSA:3.40.50.1390,IPR025827,IPR006119,PF07508, IPR011109,SSF53041,PTHR30461,PS51736,Coil, PF00239
MRIAIYARKSAFSDKSESVHNQDRMCREYCALHFPGEHIFLNYTDEDKTGANTNRPALQNMMRDVHAGIIDLLIVYQLDRLTRDVRDYCNLSAELNDCGVHFTSVKESVDTSTPIGEALTTLSAVFAQMERKTLSNRVYDNMMGLARSGWWTGGNLPCGYTTQRVVENGKPHTLLVPDPEKAEQLVTVFNLFVERGSSFCSFASFAQTNDCFDAFGIPSASQVRRVITSPYGSPANKDLRDYYLSLGANVIGAESDWDGTHGVMRYGVTDQRNGTATNPRESWIVCPGRHEPILPADLWLAAQDQVKSNVFCKQAKHPPVLLKGILRCKCGRMMSPVRSRYKGKVYISYRCTRTGEVGRKSPDCVSACRDYVLDEKVLSVFREIERDPEVIKKYSPAAPATDQDALRKKEKEIESLQKKIGNLSSALAINPESTAAKYIIADMESLDSQIQKKQMELAGLQANRLTAAQAEKELFEKQKEIARLVQNLDDLPPEEQNRIARSVLRKCVWDGETLFLEF

SEQ ID NO: 4577 - protein, 518 aa, Unknown
  Description of Unknown: Integrase B4578 sequence
  cd00338,SM00857,G3DSA:1.10.10.2600,IPR036162,PS51737, G3DSA:3.40.50.1390,IPR006119,IPR038109,PF07508,IPR011109, SSF53041,PTHR30461,PS51736,Coil,PF00239
MQYEEYLIYLRKSRSDASLEAMGVDVLERHEQILLDLAKRMNLSIGGIYREVVSGESISARPEMQRLLSEVEAGRWKGVVVMEVERLARGDTIDQGIVQRAFQYSGTQIVTPAKTYNPNNEFDEEYFEFGLFMSRREYKTIRRRMRAGVTAAVKEGKWPFNKAPYGWQRVKLEHARGWVLAPDPEEAPVVKLIFQLYTGPDRIGITNICRYLDNRGVKPRNGDTWTECSIMGILRNIVNDQRVGIGRRKIVKQVQNGSVSKVRPHSDYDFTAPGLQPRLIDHDVFLEAQTHLGKNSHKLPESYGIKNPLAGIVVCSCCGKKMMRRPASKTPGGAPYDVLKCNTRNCPTIGSALDLVEREVIQALSDWVAGYQLDPTLEVENKVPEKEQLLSSAISNHDMLLKQNGNLYDLLEQGVYTTEIFLERSHELQKRIKESEAHIEVLKKDLEYEKEKIANVENFIPSCKELLSCYWELSAQDRNKALKMLLESVEYTKTKRNKYRDKDNPTFTLNLKPRIPRI

SEQ ID NO: 4578 - protein, 518 aa, Unknown
  Description of Unknown: Integrase B4579 sequence
  SM00857,G3DSA:1.10.10.2600,IPR036162,PF13408, IPR025827,PS51737,G3DSA:3.40.50.1390,IPR006119, IPR038109,PF07508,SSF53041,IPR011109, PF00239,PTHR30461,Coil,cd00338
MQENETYVIYLRKSRADSEKSSLEEVFAKHESELQSLAERTLGNRIPEDKIFREVVSGETITDRPVISQILKVMESKKIKGVFVVDPQRLTRGDLLDKGHLINVFKYTNTKIITPYKTFDLNNDFDLKLFKMELDKGSDYLEYYKMIQARGRIASVRSGQYIGSTAPYGYDKYSYKENKHTVNTLKPNSDEATVVQLIYHLYVNESLSYAAIANKLNTMNIKPRKSTSWSPYSLKEILHNPVYIGKVRWNRRKTVMKYKNESLLKTRPIALNDSIISDGIHEAIIDEALFDSAQECNGKTPRNHSSSKLINPLAGLIFCGNCGRAMSYKTYKNNAGSEKQSPRYLCNNQSNCHTKSAKATDVINQIISALECYIEDFKVKLENDDGNSFNVRSQIISVLNKQLQDLEVREETQYEMLENKIYTPELFKKRRQKLLEEREVLLDKLQEAKVQEPVKIDYQEKIISFTDTVEALKNPDIDILQKNMLLKKCIKKITYTTDKEKGNRWRESTFEIDITPLI

SEQ ID NO: 4579 - protein, 518 aa, Unknown
  Description of Unknown: Integrase B4580 sequence
  SM00857,G3DSA:1.10.10.2600,IPR036162,PF13408,PS51737, G3DSA:3.40.50.1390,IPR025827,IPR006119,IPR038109,PF07508, SSF53041,IPR011109,PTHR30461,Coil,PS51736, cd00338,PF00239
MDLYAQYLRKSRADVEAEQHGEGETLARHKHMLDALAQKMGIEVTKVYREIVSGETIAARPVMQQLLQDVESGMYKGVLVVEVERLARGDTIDQGIVSQTFKYSDTQIITPTKIYNPNNEFDEEYFEFGLFMSRREYKTINRRIQAGRLESAKEGKFPSWNAPFGYKVVKLVNEKGYTLEPLESEADAVKKIFDMYVNEHAGTTTIAHTLTEMGYKPRKTDHFTTHTIISILDNPLYAGYMVWGRRKETTIMKNGIVTKTRPRLRPCDEYEKYEGRHEGLVSKELWQKAHEMRIAKINTSPKRATQLTNPLCGLIYCSKCGQRMQRRPAGSRQPADVIMCQNTACDNRAAYMRLIEERIIDSLKTWLNEYDVSENEEQKITDNIAVMKKNINKYEQELTTVTKQLNNAYDLLEQGVYTTDIFFQRSATLKDRIESLNTQIESVKKEILEEEKRQTAKIQFVPKLKKIIECYWSLDTPKSKNDILKEVIERVVYTKNVKGHGHEDEFSIIVYPVVPKHK

SEQ ID NO: 4580 - protein, 518 aa, Unknown
  Description of Unknown: Integrase B4581 sequence
  PTHR30461:SF3,SM00857,G3DSA:1.10.10.2600,IPR036162,PF13408, IPR025827,G3DSA:3.40.50.1390,PS51737,IPR006119,IPR038109, PF07508,IPR011109,SSF53041,PF00239,PTHR30461, PS51736,Coil,cd00338
MLSFNNIIIYLRKSRSDDPTQSVEEVLARHEHILQEYCMKEYGECIPENRIYREVVSGETIQDRPIIQQVLRLLESGSIDGVLVVEPQRLSRGDLENCGHIVNSFRYTNTLVITPTKTYNLQDEYDRKFFEMELTRGNDYLEYTKKILARGRLASVMQGNYINAIRPYGYNKIVIGTGKDKIHTLEIFKEESDVLLLMKHLYLDENYGLVRIAHTLDDLSIKAPKGDHWSASTISRILSNPLYNGKIVWNKRKTVVKWKDGKKVKSKPLNRGDDVIIVQGKHPAIFDDETFNAILKRMENSPKVKRSSKLRNPFAGLLFCSTCGSAMILRRSGRKSGVYSLTCNRQSICHTKSVQYKAVLLKVKQSLAEAISDFEVKMSNNNTTASELHAINISTLENELEQLYRKDLIQKDAFEDGTYSKAEYMQRNAQLQTQIAAVTDKLNRARKDAPEPVSYEERIVCFRDCLNALDDDTVSAEVKNTLLKACISKIVYYNDSPSISGIGRYVDNPFRLEIFLKL

SEQ ID NO: 4581 - protein, 518 aa, Unknown
  Description of Unknown: Integrase B4582 sequence
  SM00857,G3DSA:1.10.10.2600,IPR036162,PF13408,IPR025827, G3DSA:3.40.50.1390,PS51737,IPR006119,IPR038109,PF07508, SSF53041,IPR011109,PTHR30461,Coil,PS51736, cd00338,PF00239
MDSIMNSADRRTWACCAYLRKSREDEERERMGKGETLARHRRIIESLAMENGHEIREWYPEVVSGETIAARHEIKRLLVDLADGKWDAVYVVEASRLGRGGGSDQEKIINAFRYTDTALITEMKVYDPHNRGDMRQLKSELRSSEDELDAISTRLKRGKYQAAKEGVWQATGKEPFGWRSIRVNGMWTLEPSERHGVLMHIYDLLEAGENYCSIARILNEEGEPTPRGGEHWRHQTVKAIAENPVNCGMNRYGARVMVREFDKETFEGRKMKKNNANPQLTRGLWFGNGTLSIERFERLVGKSVASARLHKDRELKNPLAGLLRCAECGYAMQMHMMSSGKSKAYFFQHAKKDAGRLRSCKGCRGARADQVMAMVAEALRKAADDVEIELAKPTNDSFEAQRKALEASLKKEKLARKRASDAYEAGVYDLAESKQRRQKIDNRIEALETKLAKAKPKRYDRQTVVTLRECIDMLEDDEVPVKAKNDFLKQVVERIEYSNDTAPYVLPNKPHLEIFLKG

SEQ ID NO: 4582 - protein, 518 aa, Unknown
  Description of Unknown: Integrase B4583 sequence
  SM00857,G3DSA:1.10.10.2600,IPR036162,PF13408,IPR025827, PS51737,G3DSA:3.40.50.1390,IPR006119,IPR038109,PF07508, IPR011109,SSF53041,PF00239,PTHR30461,Coil, cd00338
MQENETYVIYLRKSRADSEKSSLEEVFAKHESELQSLAERTLGNRIPEDKIFREVVSGETITDRPVISQILKVMESKKIKGVFVVDPQRLTRGDLLDKGHLINVFKYTNTKIITPYKTFDLNNDFDLKLFKMELDKGSDYLEYYKMIQARGRIASVRSGQYIGSTAPYGYDKYSYKENKHTVNTLKPNSDEATVVQLIYHLYVNESLSYAAIANKLNTMNIKPRKSTSWSPYSLKEILHNPVYIGKVRWNRRKTVMKYKNESLLKTRPIALNDSIISDGIHEAIIDETLFDSAQECNGKTPRNHSSSKLINPLAGLIFCGNCGRAMSYKTYKNDAGSEKQSPRYLCNNQSNCHTKSAKATDVINQIISALECYIEDFKVKLENDDGNSFNVRSQIISVLSKQLQDLEVREETQYEMLENKIYTPELFKKRRQKLLEEREVLLDKLQEAKVQEPVKIDYQEKIISFTDTVEALKNPDIDILQKNMLLKKCIKKITYTTDKEKGNRWRKSTFEIDITPLI

SEQ ID NO: 4583 - protein, 518 aa, Unknown
  Description of Unknown: Integrase B4584 sequence
  cd03768,PTHR30461:SF3,SM00857,IPR036162,G3DSA:3.40.50.1390, IPR006119,PF07508,IPR011109,SSF53041,PTHR30461, PS51736,Coil,PF00239
MRIAIYARKSAFSDKSESVHNQDRMCREYCALHFPGEHIFLNYTDEDKTGANTNRPALQKMMRDVHAGIIDLLIVYQLDRLTRDVRDYCNLSAELNDCGVHFTSVKESVDTSTPIGEALSTLSAVFAQMERKTISNRVYDNMMGLARAGWWTGGNLPCGYTTRRVVENGKPHTLLVPDPEKAGQLVTVFKLFVKRGSSFHSFASFALTNGCFDVFGIPSTSQVRRVITSPYGAPANNALRDYYLSLGANVIGAESDWDGTHGVMRYGVTDQRNGTTTNPRESWIVCPGRHDPILPADLWLAAQDQVKSNMFCKQAKHPPVLLKGILSCKCGRMMSPVRSRYKDKVYISYRCTRTGEVGRKSPDCVSACRDYVLDEKVLSVFREIERDPEVIKKYSPAAPATDQDALRKKEKEIESLQKKIGNLSSALAINPESTAAKYIIADMESLDSQIQKKQMELAGLQANRLTAAQAEKELFEKQKEIARLVQNLDDLPPEEQNRIARSVLRKCVWDGETLFLEF

SEQ ID NO: 4584 - protein, 518 aa, Unknown
  Description of Unknown: Integrase B4585 sequence
  PTHR30461:SF3,cd00338,SM00857,G3DSA:1.10.10.2600, IPR036162,PF13408,PS51737,G3DSA:3.40.50.1390, IPR025827,IPR006119,IPR038109,PF07508, IPR011109,SSF53041,PTHR30461,mobidb-lite,Coil,PF00239
MPKKAPKHPAKPKRGKKLEIEEPGVLYGRYSSHNQKDISVEQQFEKGYELAAEYGIKIVDTYADRAVSGRTDKRRDFQRMMADAAKGKFCYVIAWKSNRMGRNMLEALINETKLQELGVRVLYVEEDFDDTAAGRFAARSMMNVNQFYSENMAEDIKRGLYDNAANCMVANGHLPYGYKADETLHYTIDEPKAAVIREIFTRVATGEALVDITSSLNARGIVTSYGRPWGRSSFQKILSNERYRGIYIYGDVRIEGGIPRIVSDELYFKVQEVLTTKKNPQGRHRINGDYLLTGKLFCGHCKAPMVGVSGTSKTGNLHQYYVCQRRRTEKDCDKKNVRRDDIELQIAEAIKNTALKDEIIEWIADSTMAYNERKEAESKVGILEDQLAGTERSIKNVMAAIEQGIITATTKDRLVELESERTAIQAKIAAARADIVTISRDDLISGLEMFREGDVHDKKYQARLFDTFLVAVYLYDDDMKIVFSFSGDKNTIRIPLNQSIDNIENCAESSYKLCLGPP

SEQ ID NO: 4585 - protein, 518 aa, Unknown
  Description of Unknown: Integrase B4586 sequence
  SM00857,G3DSA:1.10.10.2600,IPR036162,PS51737,G3DSA:3.40.50.1390, IPR006119,IPR038109,PF07508,IPR011109,SSF53041, PTHR30461,Coil,PS51736,cd00338,PF00239
MTLAEQLRLTESDQFCIYLRKSRADAEAEKLGQGETLARHERILTDFAAREGLPVGKIYREIVSGETIAARDEIQNLIRESYEGMWRGVIVVEVTRLSRGNQGDAQTIMDCLRYSHNNKGMLVVTPTKCYDIVHSSDDEEYMEFELFMSRREYKMIHKRMERGRIQAVVEGNYMGSYRPYGYDILKNRTGRTLIPNPEEAPIVKNIFEWTVREHLTPGKICKRLTSLGVPTYTGSAEWAIGTVKTILTNPTYTGKVRWNDRMQVKTMVDGKLVKSRPRSNHTDQYMLYDGKHEAIVDEITFHAAASRFHSDKTKSNLKLMNPFAGVLICAKCKKAMIYQGYNKRPNTPPRILHKSSQICNVKSAVLKDVMDAVAHALELYIDDFEMKIDNLPEVDENSILSQLESLQKELIKQEKKLPKLFDAWEDGILTDEEFTRRKLVNKERIESIKKQMDHLEDSVPTKDEYEEKIMLLSDALKSLLDPTLDADIKNTYLKSIISSIEYSRDNNTEFILDVFLKD

SEQ ID NO: 4586 - protein, 518 aa, Unknown
  Description of Unknown: Integrase B4587 sequence
  PTHR30461:SF3,SM00857,G3DSA:1.10.10.2600,IPR036162,PF13408, PS51737,IPR025827,G3DSA:3.40.50.1390,IPR006119,IPR038109, PF07508,IPR011109,SSF53041,PF00239, PTHR30461,PS51736,Coil,cd00338
MLSFNNIIIYLRKSRSDDPTQSVEEVLARHEHILQEYCMKEYGECIPENRIYREVVSGETIQDRPIIQQVLRLLESGSIDGVLVVEPQRLSRGDLENCGHIVNSFRYTNTLVITPTKTYNLQDEYDRKFFEMELTRGNDYLEYTKKILARGRLASVMQGNYINAIRPYGYNKVVIGTGKDKIHTLEIFKEESDVLLLMKHLYLDENYGLVRIAHTLDDLSIKAPKGDHWSASTISRILSNPLYNGKIVWNKRKTVVKWKDGKKVKSKPLNRGDDVIIVQGKHPAIFDDETFNAILKRMENSPKVKRSSKLRNPFAGLLFCSTCGSAMILRRSGRKSGIYSLTCNRQSICHTKSVQYKDVLLKVKQSLAEAISDFEVKMSNNNTTASELHAINISTLENELEQLYRKDLIQKDAFEDGTYSKAEYMQRNAQLQTQIAAVTDKLNHAREDAPEPVSYEERIVCFRDCLNALDDDTVSAEVKNTLLKACISKIVYYNDSPSISGIGRYVDNPFRLEIFLKL

SEQ ID NO: 4587 - protein, 518 aa, Unknown
  Description of Unknown: Integrase B4588 sequence
  cd00338,SM00857,G3DSA:1.10.10.2600,IPR036162,PS51737, G3DSA:3.40.50.1390,IPR006119,IPR038109,PF07508,SSF53041, IPR011109,PTHR30461,PS51736,Coil,PF00239
MQYEEYLIYLRKSRSDASLEAMGVDVLERHEQILLDLAKRMNLSIGGIYREVVSGESISARPEMQRLLSEVEAGRWKGVVVMEVERLARGDTIDQGIVQRAFQYSGTQIVTPAKTYNPNNEFDEEYFEFGLFMSRREYKTIRRRMRAGVTAAVKEGKWPFNKAPYGWQRVKLEHARGWVLAPDPEEAPVVKLIFQLYTGPDRIGVTNICRYLDNRGVKPRNGDTWTECSIMGILRNIVNDQRVGIGRRKIVKQVQNGSVSKVRPHSDYDFTAPGLQPRLIDHDVFLEAQTHLGKNSHKLPESYGIKNPLAGIVVCSCCGKKMMRRPASKTPGGAPYDVLKCNTRNCPTIGSALDLVEREVIQALSDWVAGYQLDPTLEVENKVPEKEQLLSSAISNHDVLLKQNGNLYDLLEQGVYTTEIFLERSHELQKRIKESEAHIEVLKKDLEYEKEKIANVENFIPSCKELLSCYWELSAQDRNKALKMLLESVEYTKTKRNQKGDKDNPTFTLNLKPRIPRI

SEQ ID NO: 4588 - protein, 518 aa, Unknown
  Description of Unknown: Integrase B4589 sequence
  PTHR30461:SF3,SM00857,G3DSA:1.10.10.2600,IPR036162,PF13408, IPR025827,G3DSA:3.40.50.1390,PS51737,IPR006119,IPR038109, PF07508,SSF53041,IPR011109,PF00239, PTHR30461,PS51736,Coil,cd00338
MNTVIYARYSAGPRQTDQSIEGQLRVCTDFCKQRGLTVIDTYCDRHISGRTDERPEFQRLIADAKRKKFEAVVVYKTDRFARNKYDSAVYKRELKRNGIQIFYAAEAIPDGPEGIILESLMEGLAEYYSAELAQKIKRGMHESALKCQSTGSERPLGYRVDEQKHFQIDPESAQTVQTIFEQYIKGESNAAICELLNSRGLRTAQGKPFNKNSINRIIKNRKYIGEYRYHDIVVEGGMPAIISKDTFNLAQAEMERRRTRKAPKSPKAEYLLAGRLFCGHCKGPMQGVSGTGKSGNKWYYYYCGNTRGKNKTCDKKQVSRDRLERAVVDFTVRYILQEDFLEELARKVHAAQERQNDTASEIAFYEKKLADNKKYIANVLRAIESGAATQTLPARLQELENEQAVILGELSFLKGKHLAFTEDQIFFALMKHLEPYPGESEQDYRRRIISDFVSEVYLYDDRLLIYFNISSEDGKLKSADLSNIEGSEFDEGLVSSTKGVLHEPFYFVGGFAVTIWFK

SEQ ID NO: 4589 - protein, 518 aa, Unknown
  Description of Unknown: Integrase B4590 sequence
  cd03768,PTHR30461:SF3,SM00857,IPR036162,PS51737, G3DSA:3.40.50.1390,IPR006119,PF07508,IPR011109,SSF53041, PTHR30461,PS51736,Coil,PF00239
MRIAIYARKSAFSDKSESVHNQDRMCREYCALHFPGEHVFVNYADEDKTGANTNRPALQKMMRDVHAGIIDLLIVYQLDRLTRDVRDYCNLSAELNDCGVHFTSVKESVDTSTPIGEALSTLSAVFAQMERKTISNRVYDNMMGLARAGWWTGGNLPCGYTTQRVVENGKPHTLLVPDPEKAEQLVTVFKLFVERGSSFHSFASFALTNDCFDVFGVPSTSQVRRVITSPYGVPANKDLRDYYLSLGANVVGTESDWDGAHGVMRYGVTDQRNGTATNPRESWIVCPGRHEPILPADLWLAAQNQVKSNMFCKQAKYPPVLLKGILSCKCGRMMSPVRSRYKDKVYISYRCTRTGEVGRKSPDCVSACRDYVLDEKVLSVFREIERDPEVIKKYSPAAPATDQDALHKKEKEIESLQKKIGNLSSALAINPESTAAKYIIADMESLDSQIQKKQMELAGLQANRLTAAQAEKELFEKQKEIARLVQNLDDLPPEEQNKIARSVLRKCVWDGETLFLEF

SEQ ID NO: 4590 - protein, 518 aa, Unknown
  Description of Unknown: Integrase B4591 sequence
  PTHR30461:SF3,SM00857,G3DSA:1.10.10.2600,IPR036162,G3DSA:3.40. 50.1390,IPR006119,IPR038109,PF07508,IPR011109,SSF53041, PTHR30461,cd00338,PF00239
MASENEKNHRVRVAQYLRMSTDHQQYSLHNQSEYIKDYAEKNNMEIAYTYDDAGKSGVSIVGRHSLQQLLSDVEQKKIDIQAVLFYDVSRFGRFQNSDEAAYYSFLFERNGVDLIYCSEPIPTKDFPLESSVILNIKRSSAAYHSRNLSEKVFIGQVNLIKLGYHQGGMAGYGLRRLLVDENGIAKEILSFRKRKSIQTDRVILIPGPKNEIKIVNRIYDLFIDNNVPEFIIAERLNEQNIPAENGTLWTRAKIHQILTNEKYIGNNIYNKTSSKLKSRLVKNPKHEWVRCDKAYKPIISKKKYNKAQEIIQLRSIHLTNEDLLEKLKQKLESNGKLSGFIIDEDDTGPSSSVYRTRFGGLLRAYTLIGYKPEHDYSYLKINEALRSFYSEIIEDFKGEILKSNCHIDEYKYAPMLYINDEFLISVLVTKCIHMKSGKLRWKVRFDNSQKADITIVIRMNSQNISPLDFYIIPKIENEYNKMCMTETNNIRLDLYRFDNLDKLLQIITRMKVRELYAA

SEQ ID NO: 4591 - protein, 518 aa, Unknown
  Description of Unknown: Integrase B4592 sequence
  cd00338,SM00857,G3DSA:1.10.10.2600,IPR036162,PS51737, G3DSA:3.40.50.1390,IPR006119,IPR038109,PF07508,IPR011109, SSF53041,PTHR30461,PS51736,Coil,PF00239
MPKAISYIRFSTKIQSVGDSTKRQSKYINDWLKRNPDYYLDESLRFQDLGISGFSGANARSGAFGEFLAAVESGYIEAGSVLLVESLDRVSRQDIDTAGEQLRKILRSGVEVVTLVDNEWYTKESLKDSLSMIKAMLVMERAHEESAMKSTRLRSVWAAKRERAAKGEIMSKRCAAWLKVSEDRSHFEFIPENVKAVQRVFQLRLEGLSHVKIAKQMNDEGFSTLNQFKSVKGGWSQSSVTELLSNRSVIGFKVPSKSMAVKGVSEIPNYYPSIITDEQFYAVQQLKQGSGRKPSSDLPLLTNLFKGVLRCSECGFIMVVAGVSAKRSGIYKCSMKSEGRCNSVGFSRLQTDRALVQGLLYNTNRLALNRDNGSAIGSLQSELEHLQKQRERLIKLAMLADDTESMAKDLKALNSQIKDAEKAVSEVHQREQSSQLETISHLDLTVKKDRIEAQIIIKRIVKEIRLNTAGKKCDVFLHNGLKLLNFPLDRALDGEIFLEVLPVLEADEFDFDTYRMIE

SEQ ID NO: 4592 - protein, 518 aa, Unknown
  Description of Unknown: Integrase B4593 sequence
  PTHR30461:SF3,SM00857,G3DSA:1.10.10.2600,IPR036162, G3DSA:3.40.50.1390,IPR006119,IPR038109,PF07508, IPR011109,SSF53041,PTHR30461,cd00338,PF00239
MASENDKNHKVRVAQYLRMSTDHQQYSLHNQSEYIKDYAEKNNMEIAYTYDDAGKSGVSIIGRHSLQQLLSDVEQKKIDIQAVLFYDVSRFGRFQNSDEAAYYSFLFERNGVDLIYCSEPIPTKDFPLESSVILNIKRSSAAYHSRNLSEKVFIGQVNLIKLGYHQGGMAGYGLRRLLVDENGIAKEILGFRKRKSIQTDRVILIPGPKNEIKIVNSIYDLFIDDNMPEFIIAERLNEQNIPAENGTLWTRAKIHQILTNEKYIGNNIYNKTSSKLKSRLVKNPKNEWVRCDKAYKPIISKKKYNKAQEIIQLRSVHLTNEELLEKLKQKLESNGKLSGFIIDEDDTGPSSSVYRTRFGGLLRAYTLIGYKPEHDYSYIQINEALRSFYSGIIEDFKGEILKSNCYIDEYKYAPMLYINDELLISVLITKCTPMKSGKLRWKVRFDNSQKADITIVIRMDSQNISPLDFYIIPKIENEYSKMCMTETNNIRLDLYRFDNLDKLLQIITRMKVRELYAA

SEQ ID NO: 4593 - protein, 518 aa, Unknown
  Description of Unknown: Integrase B4594 sequence
  PTHR30461:SF3,cd00338,SM00857,G3DSA:1.10.10.2600,IPR036162, PF13408,PS51737,G3DSA:3.40.50.1390,IPR025827,IPR006119, IPR038109,PF07508,IPR011109,SSF53041,PTHR30461, PS51736,Coil,PF00239
MYEDIKTACLYVRFSSHNQTEQSIEGQTRVCQEFCQRHNIKIVEIYADRATSASKNTEKRVSFLKMIKDSEKGLFDAVVVYKLDRFARSRYDSATYKYRLKKNGVQLISATENITNSPEGIILESVLEGMAEFYSAELSQKINRGMRESAYKHNSIGGALPLGYKTVDKKLVIDEKTAPIVREAFTMYAEGHSVAEICRIFNARGYKTSKGTEFGKNSFSKIFRNERYIGTYTYHDYRAEDAIPAIIDRDLWDRVQLRLKKVKNSPGRNKAKRVYLLSGKLFCGHCGESMNGNCNGNKYAFYECYGKKSKYNGCQKRNLRKEYIERLVAQDALSLLTDENIEHLATVACERNDYEIETGSPIPVIRDRIHQTEVSINNLTKAIETGATPDALVKRMVELEREKKDLSTQLKKEEELIVPLEKEQVIFWLEKFKDGDIEDEEFCRLLIDLFVNSVTVWDEDNDMLKVTIAYNLTSLPTKTYRLTKDGTLSDFTGNAPAPKTVCFWQRQLHRVPVPFRRC

SEQ ID NO: 4594 - protein, 518 aa, Unknown
  Description of Unknown: Integrase B4595 sequence
  PTHR30461:SF3,SM00857,G3DSA:1.10.10.2600,IPR036162,PF13408, IPR025827,G3DSA:3.40.50.1390,PS51737,IPR006119,IPR038109, PF07508,IPR011109,SSF53041,PF00239,PTHR30461, PS51736,Coil,cd00338
MNVVLYMRYSSDRQTEQSIEGQKRVCMDFCERQGYNVVGEYIDRATSAYKETAKRTNFYRMIRDSSNGLWQGVVVYKLDRFARNRYDSATYKVRLKKNGVKVISATENISDSPEGVILESVLEGMAEFYSKELSQKVSRGLNESAHKCNSTGGAIPLGYKTVDKKLTVDEPNAQIVKEAFDLYAGGATISEICEKFNSQGYRTKKGTEFNKNSFKSMFRNEKYIGTYTYKDIRIEGGIPAIIDKETFETVRKKLSANAQAPARGKARVNYLLSQKLFCGHCGANMIGESGRSKTGETYYYYSCSTRKRFHSCKKRTIRKDLIERIVAENAMRLITPEMINTIADMAIKCNREDIESDAIIPALTADLKEINTSIKNLLKMVERGVESETLDSRLKELEKRKKDTESRLDAAKSEYLTLDKTVIVGWLSQFLSGDIEDEDFRRHLIDTLINSVTVWDEPDGGYKITTVYNLKGNTQTYRVNADGSSDLERNSPPRKRQFSCEDCRFFLFCMFIFSFFFF

SEQ ID NO: 4595 - protein, 518 aa, Unknown
  Description of Unknown: Integrase B4596 sequence
  SM00857,G3DSA:1.10.10.2600,IPR036162,PS51737,G3DSA:3.40.50.1390, IPR006119,IPR038109,PF07508,IPR011109,SSF53041, PTHR30461,PS51736,cd00338,PF00239
MNIGNQLGKLKKSDQFCIYLRKSRADAEAEKLGEGETLARHERILTELAVKLGLPIGKIYREIVSGETISARKEIQSMINDCYAGMWKGILVVEVTRLSRGNQGDAQIIMDCLRYSNNNNGVLVVTPTKIYDIVQSSDDEEYMEFELFMSRREYKMIRKRMMRGKLQAVVEGNYMGSYRPYGYDILKTKTGRTLVPNPEEAPIVKNIFEWTVKEHLTPGKICKRLTSLGVPTYTGSAEWAIGTVKTILTNPTYTGKVRWNDRMQTKTLVNGNLVSSRPRAHTNQYMLYEGKHEGIVDEITFHAASSRFYSDKTKANLKLMNPLAGILICAKCKKAMIYQGYLKRPNTPPRILHKTSQVCNVKSAVLKDVVDAVAHALELYIDDFEMKIDNLPDVDENSILSQLEVLQKELIKQEKKLPKLFDAWEDGILTDEEFTRRKLINKERIESIKKQMDHLEDSVPTKDEYEEKIMLLSDALKSLLDPTLDADIKNTYLKSIISSIEYSRDNNTEFILDVFLKD

SEQ ID NO: 4596 - protein, 518 aa, Unknown
  Description of Unknown: Integrase B4597 sequence
  PTHR30461:SF3,cd00338,SM00857,G3DSA:1.10.10.2600, IPR036162,PS51737,G3DSA:3.40.50.1390,IPR006119, IPR038109,PF07508,IPR011109,SSF53041, PTHR30461,PS51736,Coil,PF00239
MGGRAAIYARFSSHNQRGESIEIQVEKSRAYCAENDLRVVATYCDFAQTGTNTDRAEFQRMMADAKRGLFDFVVIYKVTRIMRNRDEMAMARIMLRRCRVEILYAGEDISDGSAGVLQLGMLEVLAEYESARDGERIRDGIQKNAERCMANGCVRYGWDIVDGRYVVNEEEAAAIRLGVRMVLSGKSVADVVRAWEPYRTKRGGKWRFQTVRRILMRRENGGEYRYAGVVVPGGMPAIVPMDDEERVVRMLEDSHRPRAKTEAWDFPLTGKLYDGRDGGLMTGTSGTGKSGRPYHYYRCRSCGRTVRRDVVEKRVADAVREALGSADSRERIARMLADAEEERADEKPLSETIKGELAKIETAFSNIWAAIESGIAPPGGKERIDALKQRQALLKDELRTAEALEAARLDYDRALFWLEGMAAAEVDDAQLLRTFVARVVLGGPDDDDGLRVAFTFDDSAGLGDNPSLPGAIGPGGEVFDRMNASSTNSYKQVEKCLYLLFYYLQIPRRIELCAGRGR

SEQ ID NO: 4597 - protein, 518 aa, Unknown
  Description of Unknown: Integrase B4598 sequence
  PTHR30461:SF3,cd00338,SM00857,G3DSA:1.10.10.2600,IPR036162, PS51737,G3DSA:3.40.50.1390,IPR006119,IPR038109,PF07508, IPR011109,SSF53041,PTHR30461,PS51736,Coil, PF00239
MGGRAAIYARFSSHNQRGESIEIQVEKSRAYCAENDLRVVATYCDFAQTGTNTDRAEFQRMMADARRGLFDFVVIYKVTRIMRNRDEMAMARIMLRRCRVEILYAGEDISDGSAGVLQLGMLEVLAEYESALDGERIRDGIQKNAERCMANGCVRYGWDIVDGRYAVNEEEAAAIRLGVRMVLSGKSVADVVRAWEPYRTKRGGKWRFQTVRRILMRRENGGEYRYAGVVVPGGMPAIVPMDDEERVIRMLEDSHRPRAKTEAWDFPLTGKLYDGRDGGLMTGTSGTGKSGRPYHYYRCRSCGRTVRRDVVEKRVADAVREALGSADSRERIARMLADAEEERADEKPLSETIKGELAKIETAFSNIWAAIESGIAPPGGKERIDALKQRQALLKDELRTAEALEAARLDYDRALFWLEGMAAAEVDDAQLLRTFVARVVLGGPDDDDGLRVAFTFDDSAGLGDNPSLPGAIGPGGEVFDRMNASSTNSYRQVEKCLYLLFYYLQIPRRIELYAGRER

SEQ ID NO: 4598 - protein, 518 aa, Unknown
  Description of Unknown: Integrase B4599 sequence
  PTHR30461:SF3,SM00857,G3DSA:1.10.10.2600,IPR036162,G3DSA:3.40.50 .1390,IPR006119,IPR038109,PF07508,IPR011109,SSF53041, PTHR30461,cd00338,PF00239
MASENDKNHRVRVAQYLRMSTDHQQYSLHNQSEYIKDYAEKNNMEIAYTYDDAGKSGVSIVGRHSLQQLLSDVEQKKIDIQAVLFYDVSRFGRFQNSDEAAYYSFLFERNGVDLIYCSEPIPTKDFPLESSVILNIKRSSAAYHSRNLSEKVFIGQVNLIKLGYHQGGMAGYGLRRLLVDENGIAKEILSFRKRKSIQTDRVILIPGPKNEIKIVNRIYDLFIDNNVPEFIIAERLNEQNIPAENGTLWTRAKIHQILTNEKYIGNNIYNKTSSKLKSRLVKNPKHEWVRCDKAYKPIISKKKHNKAQEIIQLRSIHLTNEDLLEKLKQKLESNGKLSGFIIDEDDTGPSSSVYRTRFGGLLRAYTLIGYKPEHDYSYLKINEALRSFHSEIIEDFKGEILKSNCHIDEYKYAPMLYINDEFLISVLVTKCIHMKSGKLRWKVRFDNSQKADITIVIRMNSQNISPLDFYIIPKIENEYNKMCMTETNNIRLDLYRFDNLDKLLQIITRMKVRELYAA

SEQ ID NO: 4599 - protein, 518 aa, Unknown
  Description of Unknown: Integrase B4600 sequence
  cd03768,PTHR30461:SF3,SM00857,IPR036162, PF13408,IPR025827,G3DSA:3.40.50.1390,PS51737, IPR006119,PF07508,SSF53041,IPR011109, PTHR30461,PS51736,Coil,PF00239
MRIAIYARKSAFSDKSESVHNQDRMCREYCALHFPGEHIFLNYTDENTTGANTNRSALQKMMRDVHAGIIDLLIVYQLDRLTRDVRDYCNLSAELNDCGVHFTSVKEAVDTSTPIGEALSTLSAVFAQMERKTISNRVYDNMMGLARAGWWTGGNLPCGYTTRRVVENGKPHTLLVPDPEKAEQLVTVFNLFVERGSSFCSFASFAQTNNCFDVFGIPSASQVRRVITSPYGAPANKDLRDYYLSIGANVIGTESDWDGTHGVMRYGVTDQRNGNATNPRTAWIVCPGRHEPILPADLWLAAQDQVKSNMFCKQAKHPPVLLKGILRCKCGRMMSPVRSRYKGKVYISYRCTRTGEVGRKSPDCVSACRDYVLDEKVLSVFREIERDPDVIKKYSPAAPATDQDALHKKEKEIESLQKKIGNLSSALAINPESTAAKYIIADMESLDSQIQKKQMELAGLQANRLTAAQAEEELAAKQKEIARLVRNLDDLPPEEQNKIARSVLRKCVWDGETLFLEF

SEQ ID NO: 4600 - protein, 518 aa, Unknown
  Description of Unknown: Integrase B4601 sequence
  SM00857,G3DSA:1.10.10.2600,IPR036162,PS51737,G3DSA:3.40.50.1390, IPR006119,IPR038109,PF07508,IPR011109,SSF53041, PF00239,PTHR30461,PS51736,Coil,cd00338
MKNEYCIYLRKSRGDSQLESKGVDILERHEHTLLDLARQTNLTITAIYREVVSGDSISARPEMQKLLSEVESGKWKGVLVMEVERLARGDTIDQGVVQRAFQYTNTLIVTPTKVYDPANEFDEEYFEFGLFMSRREYKTIKRRMQAGRYAAAREGKWPFNSAPFGFQRLKLQREKGWSLALEEKEVPVVQLVYSKFTGPDRVGITYIRRYLNDHQITTRSGKLWTDSMIREMLSNPVYDQKVAIGRRKRVTVLENGQPVKKRPRCEDYEVYQGKHPRIIDHGVWIEAQSYLGLGKPKLPEQYGVKNPLAGLIVCGECKKRMLRRPAAPPGSTHGASYDSILCNTQGCATVGCSLDLLERAVIEALSEWVKDYELDDIVPESKVPELMELLESAKAEKSTLLSQKEKLFDLLERGTYSSDVFLERSHSLQERINAADDKILDLQKEIEYEQNNDAHIHSFIPSCKGLLSCYWDLSVPDRNKALKMLLDSVEYKKTKKNKKGHRDDASFELTIKPRIPRI

SEQ ID NO: 4601 - protein, 518 aa, Unknown
  Description of Unknown: Integrase B4602 sequence
  PTHR30461:SF3,cd00338,SM00857,IPR036162,PF13408, IPR025827,G3DSA:3.40.50.1390,mobidb-lite,PS51737,IPR006119, PF07508,SSF53041,IPR011109,PTHR30461, PS51736,Coil,PF00239
MVAIYVRQSLDKKDSLSIDSQIEDCITLCKRNGWNDYKVYRDKGWSAKNLDRPSFQQMNEDVLNGKIEAVVCYKIDRISRSIRDLVNLIEDYNEIGVHFVSYSDNINTAAPGGMMLATLFGSLAQMEREAIIARVTDNYYYRCEQGFWGGGPAPYGYRLKKVVVNGQKHTVLDQDPAEAAVVRQFFDWYLEPGGTVYKILQRAADQNILTRKGKSWTSRVVSDILSKPVYAPNTMDIYNYYASQGVKLRIAPEQCDGTQSVNVFGKRDRGSKHPKRSRPASEMTFAIARHQPIIDSDQFLRVQLKKKATLTTTPRTGTSHITILSGLVRCGDCGRAMSPSGSNRGVRYFICSGRRNYASNACNSPSIKMDALEDIVLAHTLQHYSLPEIIQVLDKFKNHTLSPQESVRVNTLKQELAKTENEISSLIDACLVSNPTAISYLNDRIEKLDREKKKIIEKITALKNSKSDLQELLRNIDIENLPEIFAGDDFDLKKYVCHQLIRKITFYNQEHIKIEYTV

SEQ ID NO: 4602 - protein, 518 aa, Unknown
  Description of Unknown: Integrase B4603 sequence
  PTHR30461:SF3,SM00857,G3DSA:1.10.10.2600,IPR036162,G3DSA:3.40.50 .1390,IPR006119,IPR038109,PF07508,SSF53041,IPR011109, PTHR30461,cd00338,PF00239
MASENDKNHRVRVAQYLRMSTDHQQYSLHNQSEYIKDYAEKNNMEIAYTYDDAGKSGVSIVGRHSLQQLLSDVEQKKIDIQAVLFYDVSRFGRFQNSDEAAYYSFLFERNGVDLIYCSEPIPTKDFPLESSVILNIKRSSAAYHSRNLSEKVFIGQVNLIKLGYHQGGMAGYGLRRLLVDENGIAKEILSFRKRKSIQTDRVILIPGPKNEIKIVNRIYDLFIDNNVPEFIIAERLNEQNIPAENGTLWTRAKIHQILTNEKYIGNNIYNKTSSKLKSRLVKNPKHEWVRCDKAYKPIISKKKYNKAQEIIQLRSIHLTNEDLLEKLKQKLESNGKLSGFIIDEDDTGPSSSVYRTRFGGLLRAYTLIGYKPEHDYSYLKINEALRSFHSEIIEDFKGEILKSNCHIDEYKYAPMLYINDEFLISVLVTKCIHMKSGKLRWKVRFDNSQKADITIVIRMNSQNISPLDFYIIPKIENEYNKMCMTETNNIRLDLYRFDNLDKLLQIITRMKVRELYAA

SEQ ID NO: 4603 - protein, 518 aa, Unknown
  Description of Unknown: Integrase B4604 sequence
  SM00857,G3DSA:1.10.10.2600,IPR036162,PS51737, G3DSA:3.40.50.1390,IPR006119,IPR038109,PF07508, IPR011109,SSF53041,PF00239,PTHR30461, PS51736,Coil,cd00338
MQYEEYLIYLRKSRSDASLEAMGVDVLERHEQILLDLAKRMNLSIGGIYREVVSGESISARPEMQKLLSEVETGRWKGVVVMEVERLARGDTIDQGIVQRAFQYSGTQIVTPAKTYNPNNEFDEEYFEFGLFMSRREYKTIRRRMRAGVTAAVKEGKWPFNMAPYGWQRVKLEHGRGWVLAPDPEEAPVVKLIFQLYTGPDRIGITNICRYLDNRGVKPRNGDTWTECSIMGILRNIVNDQRVGIGRRKIVKQVQNGSVSKVRPHSDYDFTAPGLQPRLIDHDVFLEAQTHLGKNSHKLPESYGIKNPLAGIVVCSCCGKKMMRRPASKTSGGAPYDVLKCNTRNCPTIGSALDLVEREVIQALSDWVAGYQLDPTLEVENKVPEKEQLLSSAISNHDVLLKQNGNLYDLLEQGVYTTEIFLERSHELQKRIKESEAHIEVLKKDLEYEKEKIANVENFIPSCKELLSCYWELSAQDRNRALKMLLESVEYTKTKRNQKGDKDNPTFTLNLKPRIPRI

SEQ ID NO: 4604 - protein, 518 aa, Unknown
  Description of Unknown: Integrase B4605 sequence
  PTHR30461:SF3,SM00857,IPR036162,G3DSA:3.40.50.1390,IPR006119, PF07508,SSF53041,IPR011109,PTHR30461,Coil, PS51736,cd00338,PF00239
MSIMSFNNIIIYLRKSRADDPTMTVEEVLAKHESILQDYCIAEFGQPMPESRIYREVVSGETIQDRPVMQRVLRLLESGNIDGVLVVEPQRLSRGDLEDCGHIINSFRYTNTAVITPTKTYNLQDEYDRKFFEMELTRGNDYLEYTKKILARGRLAAVMSGQYIGSVRPYGYNKVVYGSGKNRIRTLEKFKKENDILILMKRLYLDNDYTPEEIARTFDSMGIEPPKGKHWTASAVRRLLASPINNGKIVWNKRQTVVEWKNGKQVKSRAKSNKDDVIIVQGKHPATYDDETYAAIMAKLSIHSVKVTNQRGLRNPFAGILFCQCGRAMSLRSTHNGHSVILICNDHFYCHTRSVAFNPVLEKVKEALSEAITDFSVKISNKEQTESELYALNISTLENKLEQLYKKDLVQKDAYEDGVYSKAEYIQRNAQLQEQISAIANSLKEMRAKAPEVINYKDCIIRFQDCLNALEDNNVSIEVKNALLKACISKIVYHSINSNPEYSGRTKNPFNLEVFFKL

SEQ ID NO: 4605 - protein, 518 aa, Unknown
  Description of Unknown: Integrase B4606 sequence
  cd00338,SM00857,G3DSA:1.10.10.2600,IPR036162, PS51737,G3DSA:3.40.50.1390,IPR006119,IPR038109, PF07508,SSF53041,IPR011109,PTHR30461, PS51736,Coil,PF00239
MQYEEYLIYLRKSRSDASLEAMGVDVLERHEQILLDLAKRMNLSIGGIYREVVSGESISARPEMQRLLSEVEAGRWKGVVVMEVERLARGDTIDQGIVQRAFQYSGTQIVTPAKTYNPNNEFDEEYFEFGLFMSRREYKTIRRRMRAGVTAAVKEGKWPFNKAPYGWQRVKLEHARGWVLAPDPEEAPVVKLIFQLYTGPDRIGITNICRYLDNRGVKPRNGDTWTECSIMGILRNIVNDQRVGIGRRKIVKQVQNGSVNKVRPHSDYDFTAPGLQPRLIDHDVFLEAQTHLGKNSHKLPESYGIKNPLAGIVVCSCCGKKMMRRPASKTPGGASYDVLKCNTRNCPTIGSALDLVEREVIQALSDWVAGYQLDPTLEVENKVPEKEQLLSSAINNHDVLLKQNGNLYDLLEQGVYTTEIFLERSHKLQKRIKESEAHIEVLKKDLEYEKEKIANIENFIPSCMELLSCYWELSAQDRNKALKMLLENVEYTKTKRNQKGDKDNPTFTLNLKPRIPRI

SEQ ID NO: 4606 - protein, 518 aa, Unknown
  Description of Unknown: Integrase B4607 sequence
  cd00338,SM00857,G3DSA:1.10.10.2600,IPR036162,PS51737, G3DSA:3.40.50.1390,IPR006119,IPR038109,PF07508,IPR011109, SSF53041,PTHR30461,PS51736,Coil,PF00239
MQYEEYLIYLRKSRSDASLEAMGVDVLERHEQILLDLAKRMNLSIGGIYREVVSGESISARPEMQRLLSEVEAGRWKGVVVMEVERLARGDTIDQGIVQRAFQYSGTQIVTPAKTYNPNNEFDEEYFEFGLFMSRREYKTIRRRMRAGVTAAVKEGKWPFNKAPYGWLRVKLEHARGWVLAPDPEEAPVVKLIFQLYTGPDRIGITNICRYLDNRGVKPRNGDTWTECSIMGILRNIVNDQRVGIGRRKIVKQVQNGSVSKVRPHSDYDFTAPGLQPRLIDHDVFLEAQTHLGKNSHKLPESYGIKNPLAGIVVCSCCGKKMMRRPASKTPGGAPYDVLKCNTRNCPTIGSALDLVEREVIQALSDWVAGYQLDPTLEVENKVPEKEQLLSSAISNHDVLLKQNGNLYDLLEQGVYTTEIFLERSHELQKRIKESEAHIEVLKKDLEYEKEKIANIENFIPSCMELLSCYWELSAQDRNKALKMLLENVEYTKTKRNQKGDKDNPTFTLNLKPRIPRI

SEQ ID NO: 4607 - protein, 518 aa, Unknown
  Description of Unknown: Integrase B4608 sequence
  cd00338,SM00857,G3DSA:1.10.10.2600,IPR036162, PF13408,PS51737,IPR025827,G3DSA:3.40.50.1390, IPR006119,IPR038109,PF07508,SSF53041, IPR011109,PTHR30461,PS51736,Coil,PF00239
MKTYTPTDYALYLRKSRADLEAEAHGEGDTLARHEHILMELAKSRALPIGAIYREIVSGERIANRPVMQQLLSEVEDGRWKGVLVTETSRLARGDTIDQGIVAQAFKFSGTLIVTPSKTYDPTQEADEEWMEFGLFMSRQEYRMIRRRMTAGMQAAKREGRYISNVPPYGYERYKLDGRGWSLRPIESQAKVVRMIFDLYLSGLGYCEIEKRLNALHIPAPKSDKWSARTIPGILRNAHYIGCIPAAFRPGKKVVKDGQITVTRPRNHNCELYKGLHEPIIDRAVWDQVQARLGKNAAVRTPGNRQQSNPLAGLIICDCCGKRMQRRPQTGTGSQTQIQCTTRGCATVAHNADELEQLVLDSLRTFLARLEVGTPAAPDLSAERRALSEIEKQLTDLDSRLRRTFELVEDGTYTREIFLSRQAELTAERERLTADRTAIQHKIEQAQHEYDARTGLAPAVRHVLDTYNTDLPAADRNKLLKQVIDRIDYHKRTRTRWTKESDLSLTLHPVVFSSTTNR

SEQ ID NO: 4608 - protein, 518 aa, Unknown
  Description of Unknown: Integrase B4609 sequence
  SM00857,G3DSA:1.10.10.2600,IPR036162,PS51737,G3DSA:3.40.50.1390, IPR006119,IPR038109,PF07508,IPR011109,SSF53041, PTHR30461,Coil,PS51736,cd00338,PF00239
MKTYTPTDYALYLRKSRADLEAEAHGEGDTLARHEHILMELAKSRALPIGAIYREIVSGERIANRPVMQQLLSEVEDGRWKGVLVTETSRLARGDTIDQGIVAQAFKFSGTLIVTPAKTYDPTQEADEEWMEFGLFMSRQEYRMIRRRQLAGTRASKKEGHYVPGRPPYGYERYKLDGRGWSLRPVEPQAGVIRTIYDMYLSGKGFSEIANELNAMKIRTPLDKKWVPATTRAILQNPHYAGFIPSAMKVNTKIVQKGKLITKRPVNKNCELYEGIHEAIIPRDVWYSVQQRMKDTVTPRVPRKYQQMNPLAGLVYCDQCGKLMSRHPYRREDKVRFGCENPSCSTVSSLFEDVESLVLQSLREFLHEIELSSPTLLDTKSEEIALQNIEKQLTDINHRLQRTYELLEDGVYSKETFLQRQSAISQDQTALLNTKHEIERKLHNKQTDIEAQKNSAPLIRHVLDVYPTLEDPKEQNLLLKQVIRRIDYHKTVRVYGKAKSDLHLTIHPKIAIPQTSNI

SEQ ID NO: 4609 - protein, 518 aa, Unknown
  Description of Unknown: Integrase B4610 sequence
  PTHR30461:SF3,cd00338,SM00857,G3DSA:1.10.10.2600,IPR036162, PF13408,IPR025827,G3DSA:3.40.50.1390,PS51737,IPR006119, IPR038109,PF07508,IPR011109,SSF53041, PTHR30461,PS51736,Coil,PF00239
MSKLYCMYLRKSRADLEAEARGEGETLSRHRRTLTELAIRMHLPLGEVYDEIATGESIAARPQMQRMLADIEAGMWAGVLCMDVDRLARGDSIDQGIISQTFLYSNAIIITPGKTYDPRNESDSEFFEMKMFFSRREYAQIRKRLQAGRMRSVLDGRYMGTRPPYGYKRVKIQGDKGWTLEIVPEKAEIVRMIYDWYVNGMDGRPVGCGAIATRLNDMGLRTDMGNRFDPSCILNIITNPAYIGMVRWNQRTTVVSLQNGQRIKSRPRSDEPIIVRGLHAPILTQEIYDAAQERHAGRYVPKTPETLALSNPLAGLVVCHECGHTLQRKPSPRGCWIFCPTRRCKTIGILEDVFERAVLEHLQNWLVTYSDENAPSAPAKNAADAVAEQLQRQKQTLQTQLSRLYDLLEQGVYTTEVFLTRQRELTERLSALEEKLAAAQKPPELDMEACIRQALPRVKAVLDAYPLAETAAEKNALLKSVIEKIDYQKTKRSTRWQNSLDFLQMTIYPRVPAGEIQR

SEQ ID NO: 4610 - protein, 518 aa, Unknown
  Description of Unknown: Integrase B4611 sequence
  PTHR30461:SF3,SM00857,IPR036162,PF13408,PS51737, IPR025827,G3DSA:3.40.50.1390,IPR006119,IPR011109,SSF53041, PTHR30461,Coil,PS51736,cd00338,PF00239
MQLVPCDRPRPGRRAVSYARFSSHNQRSESIEIQEDNNLAYCAINDLDVVAMYADEAKSGRNTARADFQRMVADAKAGLFDFVVIYKVTRIMRNRDEMALLRITLRKYGVEILYSGEDIGTGSDGILQLGLKEVLAEWESAQLSERIVDGIQKNAERGMANGRTLYGWNIVDGYYEVSELEASVLRRAKSMLFNGKTVAEIVRALDGHKTKRGKPIKQNTLTKMLKRKQNAGVYSYAGVEIEGGMPALWTMEDQRMIWKILGDETRPRRKALSADFLLTGKLYCGKCDTPMTGTSGTSKTGATYYYYKDKKGCGRQVRKDVIEDNVADAVRAALSDEATREKIADLVCEYSESEDPTPQSDVILAELKEIRASYANILKAIEQGVIPPGSKERIADLQQQEETLNEELRIAEAIEAVALDRDRVLFWLEQVAEAPDAKTLIDVFVARVVLLGDDLHIVMHFDDNDGPPVGRIIDEDRGGVLPNGTRLHHNEISRTPWFGYYVAWRTLVIVTKYRKTPC

SEQ ID NO: 4611 - protein, 518 aa, Unknown
  Description of Unknown: Integrase B4612 sequence
  PTHR30461:SF3,SM00857,G3DSA:1.10.10.2600,IPR036162,PF13408, IPR025827,G3DSA:3.40.50.1390,PS51737,IPR006119,IPR038109, PF07508,SSF53041,IPR011109,PF00239, PTHR30461,PS51736,Coil,cd00338
MSSVDKIAVIYARYSSHGQTEQSIEGQIAAAQKYAEQHGYTIIHIYADRAMTGRNDDREQFQKMLSDTAMHQFGVILLWKIDRFGRNREEIAFNRYRCKKNGVRVERVAEDVPDGPEGVILDSVLEGMAEYYSLQLAQNVRRGQRESAKKSMSIGGNKMLGYVVNPETKRYESDPKTASYVTEIFKRYANGETISEIVAWLNAQGIRTTRGSEFTVNSLHRLLKNEKYTGVYIFHDIRNEGGMPALTDRATFDKVQEMLKVNRRAPVRVWSKTEYLLTDKLFCGHCGAIMVGESGHGRNGTKHSYYTCLNRKKKKSCDKKPVRQDVIEPLVLRAIGKLLENPATLENIADQVWAAYERSDTSGDTIKALDKQIADVDRALSNVMKAIEMGIINEMTKTRMDELTNQKQALSQSRAEAGLTGGFKLTRDMILFFLQEMAALDMADRDSQKRLIKTFVNAIYLYDDHFDIAFNYTDNGKVAVRMQEINDAASGEVFGCCAQSPTKEKDVETHVLTSFLFV

SEQ ID NO: 4612 - protein, 518 aa, Unknown
  Description of Unknown: Integrase B4613 sequence
  PTHR30461:SF3,cd00338,SM00857,IPR036162,PF13408, IPR025827,G3DSA:3.40.50.1390,IPR006119,SSF53041,PTHR30461, PS51736,Coil,PF00239
MEYSICKNPRLGKRGVSYARFSSHNQRSESIEIQHDANLAFMAIQDLDLVGVFSDEAKSGRNTNREDFQRMLTWAREGRMDFVVIYKVTRIMRNRDEMAMLRVELRKYGVEILYSGEDIGKGSDAVLQLGLKEVLAEWESAQLGERIVDGINKNAERCMANGNTLYGWDIADGFYVVNDLEASVLRRAKSMLFNGKTVAEIVRALEGHTTKRGKPIKHNTLTKLLKRKQNAGVYSYAGHEQEGGMPALWTMEEQRMIWKILGDDTRPRKKAANADYLLTGKLWCGKCDTPMTGTSGTGKSGTVYYYYQDKKGCGRKVRKDVIEENVAEAVLAALSKEATREKIADLMCEFEEWEDPTPMTEVIEAELKEIAQNHANILKAIEQGIIPDGAKERIETLKAREEVLRDELRIAKSMEAATADRDRVLFWLENIAEVADTKTLIDVFVSKVVLLGDDLHIVMHFDDNEGPPGGNAVLDRGGGVLPDCTTLHHGDISRTPWLGYYVAWRTLVIVTRYKKTPS

SEQ ID NO: 4613 - protein, 518 aa, Unknown
  Description of Unknown: Integrase B4614 sequence
  SM00857,G3DSA:1.10.10.2600,IPR036162,PF13408, IPR025827,G3DSA:3.40.50.1390,PS51737,IPR006119, IPR038109,PF07508,IPR011109,SSF53041, PF00239,PTHR30461,Coil,cd00338
MQENETYVIYLRKSRADSEKFSLEEVFAKHESELQSLAERTLGNRIPVDKIFREVVSGETITDRPVISHILKVMESKKIKGVFVVDPQRLTRGDLLDKGHLINVFKYTNTKIITPYKTFDLNNDFDLKLFKMELDKGSDYLEYYKMIQARGRIASVRSGQYIGSTAPYGYDKYSYKENKHTVNTLKPNSDEATVVQLIYHLYVNESLSYAAIANKLNTMNIKPRKSTSWSPYSLKEILHNPVYIGKVRWNRRKTVMKYKNESLLKTRPIALNDFIISDGIHEAIIDEALFDSAQNRSGKSPRNHSSSKLKNPIAGLMFCGNCGRAMSYKTYKNNAGSEKQPPRYLCNNQSNCHTKSVKATDVINQIISALECYIEDFKVKLENDDGNSFNVRSRIISVLNKQLQDLEVREETQYEMLENKIYTPELFKKRRQKLLEEREVLLDKLQEAKVQEPVKIDYQEKIISFTDTVEALKNPDIDILQKNMLLKKCIKKITYTTDKEKGNRWRESTFEIDITPLI

SEQ ID NO: 4614 - protein, 518 aa, Unknown
  Description of Unknown: Integrase B4615 sequence
  PTHR30461:SF3,SM00857,IPR036162,G3DSA:3.40.50.1390,IPR006119, PF07508,IPR011109,SSF53041,PTHR30461,Coil, PS51736,cd00338,PF00239
MSIMSFNNIIIYLRKSRADDPTMTVEEVLAKHESILQDYCIAEFDQPMPESRIYREVVSGETIQDRPVIQRVLRLLESGNIDGVLVVEPQRLSRGDLEDCGHIINSFRYTNTMVITPTKTYNLQDEYDRKFFEMELTRGNDYLEYTKKILARGRLAAVMSGQYIGSVRPYGYTKIVYGSGKNRIRTLEKFKKENDILILMKRLYLDEDYTPEEIARAFDNMGIEPPRGKHWTASAVRRLLASPINNGKIVWNKRQTVVEWRNGKQVKSRAKSNKDDVIIVQGKHPATYDDETYTAIMAKLSIHSVKVTNQRGLRNPFAGILFCQCGRAMSLRSTHGGHSVILICNDHSYCRTRSVAFNPVLDKVKEALSEAITDFTVKISNKEQTDSELYALNISTLENKLEQLYKKDLVQKDAYEDGVYSKAEYIQRNTQLQEQISVIANSLEEMRAKAPEVINYKDCIIRFQDCLNALEDNNVSIEVKNALLKACISKIVYHSVNSNPEYSGRTKNPFNLEVFFKL

SEQ ID NO: 4615 - protein, 518 aa, Unknown
  Description of Unknown: Integrase B4616 sequence
  SM00857,G3DSA:1.10.10.2600,IPR036162,PS51737, G3DSA:3.40.50.1390,IPR006119,IPR038109,PF07508, IPR011109,SSF53041,PTHR30461,PS51736, cd00338,PF00239
MNIGNQLGKLKKSDQFCIYLRKSRADAEAEKLGEGETLARHERILTELAVKLGLPIGKIYREIVSGETISARKEIQSMINDCYAGMWKGILVVEVTRLSRGNQGDAQIIMDCLRYSNNNNGVLVVTPTKVYDIVQSSDDEEYMEFELFMSRREYKMIRKRMMRGKLQAVVEGNYMGSYRPYEYDILKTKTGRTLVPNPEEAPIVKNIFEWTVKEHLTPGKICKRLTSLGVPTYTGSAEWAIGTVKTILTNPTYTGKVRWNDRMQTKTLVNGNLVSSRPRAHTSQYMLYEGKHKGIVDEITFHAASSRFYSDKTKANLKLMNPLAGILICAKCKKAMIYQGYLKRPNTLPRILHKTSQVCNVKSAVLKDVVDAVAHALELYIDDFEMKIDNLPDVDENSILSQLEVLQKELIKQEKKLPKLFDAWEDGILTDEEFTRRKLINKERIESIKKQMDHLEDSVPTKDEYEEKIMLLSDALKSLLDPTLDADIKNTYLKSIISSIEYSRDNNTEFILDVFLKD

SEQ ID NO: 4616 - protein, 518 aa, Unknown
  Description of Unknown: Integrase B4617 sequence
  PTHR30461:SF3,SM00857,G3DSA:1.10.10.2600,IPR036162,PF13408, IPR025827,G3DSA:3.40.50.1390,PS51737,IPR006119,IPR038109, PF07508,IPR011109,SSF53041,PF00239,PTHR30461, PS51736,Coil,cd00338
MLSFNNIIIYLRKSRSDDPTQSVEEVLARHEHILQEYCMKEYGECIPENRIYREVVSGETIQDRPIIQQVLRLLESGSIDGVLVVEPQRLSRGDLENCGHIVNSFRYTNTLVITPTKTYNLQDEYDRKFFEMELTRGNDYLEYTKKILARGRLASVMQGNYINAIRPYGYNKVVIGTGKDKIHTLEIFKEESDVLLLMKHLYLDENYGLVRIAHTLDDLSIKAPKGDHWSASTISRILSNPLYNGKIVWNKRKTVVKWKDGKKVKSKPLNRGDDVIIVQGKHPAIFDDETFNAILKRMENSPKVKRSNKLRNPFAGLLFCSTCGSAMILRRSGRKSGVYSLTCNRQSICHTKSVQYKAVLLKVKQSLAEAISDFEVKMSNNNTTASELHAINISTLENELEQLYRKDLIQKDAFEDGIYSKAEYMQRNAQLQTQIAAATDKLNRAREDAPEPVSYEERIVCFRDCLNALDDDTVSAEVKNTLLKACISKIVYYNDSPSISGIGRYVDNPFRLEIFLKL

SEQ ID NO: 4617 - protein, 518 aa, Unknown
  Description of Unknown: Integrase B4618 sequence
  SM00857,G3DSA:1.10.10.2600,IPR036162,PF13408,IPR025827, G3DSA:3.40.50.1390,PS51737,IPR006119,IPR038109,PF07508, SSF53041,IPR011109,PTHR30461,Coil,PS51736, cd00338,PF00239
MAKKKKPAGGNAIIYARYSSHNQRDVSIEQQIEACRKHAAELGLTITDTYEDRAISGRTDNRPAFQRMMHDAENGRFSYVLAWKSNRMGRNMMQAMVNESRLMDCGVKVYYAEEDFDDSAAGRFALRSMMNVNQFYSDNLAEDVRRGLMDNANKCMANGRQPLGYKRGEDGKVVVDEPAAAIVREVYARVASGELFTDIARDLNRRGIKTADKGEWNKNSFHRLCSNEKYRGIYIYGDVRIEGGIPSIIDDTLWYKVQEALRVKKLKRNGRHRPGEDDYLLTGKLRCGKCGGYMIGMSGRSKTGDIHYYYACQNRRVGHTCDKKNIRRDIIEPAVAQAIKEYCLTDDAIEWIADKTIEYWEEADRNLQLDSIEGDLAAVQSSISNVMKAIEMGVVTETTRDRLIELEKQRTDLKSKLALAKEEVIHVDRKKLISSLLLFRNGDIHDRQYQEDLFNTFLISVYVYDDDDNGHLKLIFNAFGENNTVDLPINFGETGDVPVFSDREKVRASSPSVNQEAI

SEQ ID NO: 4618 - protein, 518 aa, Unknown
  Description of Unknown: Integrase B4619 sequence
  cd00338,SM00857,G3DSA:1.10.10.2600,IPR036162,PF13408, PS51737,G3DSA:3.40.50.1390,IPR025827,IPR006119,IPR038109, PF07508,SSF53041,IPR011109,PTHR30461,Coil, PF00239
MQENETYVIYLRKSRADSEKFSLEEVFAKHESELQSLAERTLGNRIPVDKIFREVVSGETITDRPVISHILKLMESKKIKGVFVVDPQRLTRGDLLDKGHLINVFKYTNTKIITPYKTFDLNNDFDLKLFKMELDKGSDYLEYYKMIQARGRIASVRSGQYIGSTAPYGYDKYSYKENKHTVNTLKPNSDEATVVQLIYHLYVNESLSYAAIANKLNAMNIKPRKSTSWSPYSLKEILHNPVYIGKVRWNRRKTVMKYKNESLLKTRPIALNNSIISDGIHKAIIDETLFDSAQNRSGKSPRNHSSSKLKNPLAGLMFCGNCGRAMSYKTYKNNVGSEKQPPRYLCNNQSNCHTKSVKATDVINQIIGALECYIEDFKVELENDDGNSFNVRSQIISVLNKQLQDLEIREETQYEMLENKIYTPELFKKRRQKLLEEREILLDKLQEAKVQEPVKIDYQEKIISFTDTVEALKNPDIDILQKNMLLKKCIKKITCTTDEEKGNRWRESTFEIDITPLI

SEQ ID NO: 4619 - protein, 518 aa, Unknown
  Description of Unknown: Integrase B4620 sequence
  PTHR30461:SF3,cd00338,SM00857,G3DSA:1.10.10.2600,IPR036162, PF13408,IPR025827,G3DSA:3.40.50.1390,PS51737,IPR006119, IPR038109,PF07508,IPR011109,SSF53041,PTHR30461, PS51736,Coil,PF00239
MDITNNLKAAAAYGRYSSHLQNEQSIEGQFADIYAKAQKEGYTIIKEYVDEAMTGRNDNRPAFQQMIKDSKKGIFEAVFVWAIDRFARNRYLAAIYKHELRKNGVKLIYAAENIPDGPEGIMLEGILESAAEYFSEYNAQKSMRGKRETALKGKYNGGGILWGYKLNKDNHYIIDKKVAPIIQNIFKQYAAGISSIKIAENLNNSGIKTCNNTDWDNRKVLQLLKRKGYGGFYCWSDYCLDDKIPAIIDKKTFEMVQEKMKKNKAKAATFKAKDYYVLSGKLYCGKCDCKMVGNRSRVSRKTNQKMSYYVCSGKKLYKKCDLKSFRKEFVEDLVINEIKNFLSDSERLEIIAERIYELLEKETASFKLSDALKAQLNDIEKSLKNLLYAIEKGIISETTQKRLEELEKQKKALMLKIRQEELNEQKTIISKEQILFFLERLRLADTENKQTQEKLVETFVNKIYIDENCLRIIFNISGDNNETKIDLKAVQQAEKDKAEFNPSSVLDTSHRCYYTYYS

SEQ ID NO: 4620 - protein, 518 aa, Unknown
  Description of Unknown: Integrase B4621 sequence
  cd00338,SM00857,G3DSA:1.10.10.2600,IPR036162,PS51737, G3DSA:3.40.50.1390,IPR006119,IPR038109,PF07508,SSF53041, IPR011109,PTHR30461,PS51736,Coil,PF00239
MKNLINNNMENYCAYLRKSRKDMDAEAHGQGETLARHEKRLKDYANSVGIKISKFYREVVSGETISARPVMQQLLTDVENGMWSGVLVVEVERLARGNTLDQGIVSNAFQYSNTKIITPLKTYDPNNDYDEEYFEFGLFMSRREYKKINQRLHEGILSSVNEGKHVGAAAPYGYDKYKLPKQKGYSLKINDYEANMIRSIYDLYCSGNGLEFICNELDRLGYKPRRGNSFAKSTITNILTNPVYIGKIKYTDKATIKKVINGNIVRVKNENKNEIYVDGLHQPIIDLDMWNKAQNIRKKNLTNRTKIDYTLKNPMASIIKCGLCGGALSRITYSNRNDIRICCRKCKENVGSNIDSVENKLLQSLKILLNDYKIKIINNDNSDIEMLLKITENNILNLKNELNKLKIQLNKTYDLLEQEIYTKDIFIERSSLLKQQIKDTNNNIIKLESQKKQIIAKKNNREILIPKIENVIDSYFETNDIKMKNELLKSVLEKVEYTKITPKDKDDFKLKLFPKIQA

SEQ ID NO: 4621 - protein, 518 aa, Unknown
  Description of Unknown: Integrase B4622 sequence
  PTHR30461:SF3,SM00857,G3DSA:1.10.10.2600,IPR036162, G3DSA:3.40.50.1390,IPR006119,IPR038109,PF07508,SSF53041, IPR011109,PTHR30461,cd00338,PF00239
MASGNEKNHRVRVAQYLRMSTDHQQYSLHNQSEYIKDYAEKNNMEIAYTYDDAGKSGVSIVGRHSLQQLLSDVEQKKIDIQAVLFYDVSRFGRFQNSDEAAYYSFLFERNGVDLIYCSEPIPTKDFPLESSVILNIKRSSAAYHSRNLSEKVFIGQVNLIKLGYHQGGMAGYGLRRLLVDENGIAKEILNFRKRKSIQTDRVILIPGPKNEIKIVNRIYDLFIDSNVPEFIIAERLNEQSIPAENGTSWTRAKIHQILTNEKYIGNNIYNKTSSKLKSKLVKNPKHEWIRCDKAYKPIISKKKYNKAQEIIQLRSIHLTNEDLLEKLKEKLESNGKLSGFIIDEDDTGPSSSVYRTRFGGLLRAYTLIGYKPEHDYSYLQINEALRSFYSEIIEDFKGEILKSNCHIDEYKYYPMLYINDEFLISVLVTKCIHMKSGKLRWKVRFDNSQKADITIVIRMNSQNISPLDFYIIPKIENEYSKMCMMETNNIRLDLYRFDNLDKFLQIITRMKVRELYAA

SEQ ID NO: 4622 - protein, 518 aa, Unknown
  Description of Unknown: Integrase B4623 sequence
  SM00857,G3DSA:1.10.10.2600,IPR036162,PS51737,G3DSA:3.40.50.1390, IPR006119,IPR038109,PF07508,SSF53041,IPR011109, PTHR30461,Coil,PS51736,cd00338,PF00239
MQYEEYLIYLRKSRSDASLEAMGVDVLERHEQILLDLAKRMNLSIGGIYREVVSGESISARPEMQRLLSEVEAGRWKGVVVMEVERLARGDTIDQGIVQRAFQYSGTQIVTPAKTYNPNNEFDEEYFEFGLFMSRREYKTIRRRMRAGVTAAVKEGKWPFNKAPYGWQRVKLEHARGWVLAPDPEEAPVVKLIFQLYTGPDRIGITNICRYLDNRGVKPRNGDTWTECSIMGILRNIVNDQRVGIGRRKIVKQVQNGSVSKVRPHSDYDFTAPGLQPRLIDHDVFLEAQTHLGKNSHKLPESYGIKNPLAGIVVCSCCGKKMMRRPASKTPGGASYDVLKCNTRNCPTIGSALDLVEREVIQALSDWVAGYQLDPTLEVENKVPEKEQLLSSAISNHDVLLKQNGNLYDLLEQGVYTTEIFLERSHELQKRIKESEVHIEVLKKDLEYEKEKIANVENFIPSCKELLSCYWELSAQDRNKALKMLLESVEYTKTKRNKYGDKDNPTFTLNLKPRIPRI

SEQ ID NO: 4623 - protein, 518 aa, Unknown
  Description of Unknown: Integrase B4624 sequence
  PTHR30461:SF3,cd00338,SM00857,G3DSA:1.10.10.2600,IPR036162, PF13408,PS51737,G3DSA:3.40.50.1390,IPR025827,IPR006119, IPR038109,PF07508,SSF53041,IPR011109, PTHR30461,PS51736,Coil,PF00239
MARKTDKPLSNIAVIYARFSSHNQREESIEQQVAECKLFAAQQGLEVTEIYSDAAQSGRTENRSQFLRLQRDAKKGKFTNIVAYKSNRIARNMVNALTFENDMEKLGVKLYYAKEEFGNNAAGRFALRMMMNVNQFYSENMAEDIRRGMEDNAMKCKVNGPAPYGYKSGKSGTYEIDEPAAAVVREIFTRVACGDSFVDIYTDLNNRGLKTRKGNKWGRSSFQSILKCEKYTGVYIYDNIRVEGGMPEIISKEMFLKVQRILGTKGNPQGRHRINGDYLLTGKLFCGECGHHMMGLSGTGKNGLLHYYYGCSGKKEKPRCSKKNVRRDELEYEVARLVQTYILQDDVITWLADTLTKYQEEHSSDGDMAILNTQLSETEKSIKNLMAAIEQGIITPSTKERLMELESEKSKIENNITLLKADTITVSKEQIGGWLDSFRDGNIKDKRFQKRLFDSFLSAVYVYDDNRVRIVFNLCGLNKGDIDTKLMLGDTEAIEKISDCSYKRCYGSPDLIKVEHLF

SEQ ID NO: 4624 - protein, 518 aa, Unknown
  Description of Unknown: Integrase B4625 sequence
  PTHR30461:SF3,SM00857,G3DSA:1.10.10.2600,IPR036162,PS51737, G3DSA:3.40.50.1390,IPR006119,IPR038109,PF07508,IPR011109, SSF53041,PF00239,PTHR30461,PS51736,Coil, cd00338
MKNEYCIYLRKSRGDSALEAMGVDVLERHERTLLDLAKQMNLSITAIYREVVSGDSISARPEMQKLLSEVESGKWKGVLVMEVERLARGDTIDQGIVQRAFQYTDTLIVTPVKVYNPANEFDEEYFEFGLFMSRREYKTIKRRMQAGRYAAAKEGKWPFNAAPYGFRRFKLSKEKGWTLALEEDEVPIVRLVYARYTGPDRVGITTIRRYLNDHQMFTRSGKLWTDSMIREMLANPVYDQMVAIGRRKCITALEDGQPVKKRPRCDDYEIYHAKHPRIIDHDVWMEAQSYLGRGKPKLPEQYSVKNPLAGLIVCSQCKKKMLRRPAAPSGSKHGADYDSILCNTQGCLTVGCSLDLLEHSVIDALSEWVKDYELDHVTPESKVPELTDLLESTEKEKSALLSQKENLFNLLEQGVYSSEVFLERSHVLQERINAVDDKILDLQKEIEYEKNNDAHIHSFIPSCKGLLSCYWDLSVAEKNKALKMLLHSVEYKKLKKNKKGYKDDASFELTIKPRIPRI

SEQ ID NO: 4625 - protein, 517 aa, Unknown
  Description of Unknown: Integrase B4626 sequence
  PTHR30461:SF3,cd00338,SM00857,G3DSA:1.10.10.2600,IPR036162, PF13408,PS51737,IPR025827,G3DSA:3.40.50.1390,IPR006119, IPR038109,PF07508,SSF53041,IPR011109,PTHR30461, PS51736,Coil,PF00239
MCAKKKPAMLEPDMQDAVIYTRYSSHNQKDCSIEQQVADCEIFARQNNLRVVKVYADRHLSGTTDNRPQFQQMLKDAAHGHWAYVICWKIDRFARNRYDSATYKFRLKKAGVRVLYAKESIPDGPEGILLESVLEGSAEYYSAALAQNIRRGMKYNAEQCKVNSGSIPFGYCKGPDGRFAIHEANAEVVREIFRKAAAGMPFVDIANDLNSRGLKTSRGGRWNKGSFRLLMNEAYIGVYHFSDTRIEGGMPALIDQGTFWAANERLKANSSVRGRHQDGGDYLLTGKLKCAHCGSYMIGFSGTGKSGELHYYYGCQKRRRERACKKANVPREWIERVVVKAALDYVLRPDVMEWIADAVMEYQEREAASAQLAALTAELEENQKATDNVMKAIEAGIITSTTKQRLLDLEAKAQDLKRAIELEKLSHVRLERDQVLFWLDRFRGGSLQSQEFRRKVIDAFVSVVYLSDDHLRIAFNYSGGSNAEADFDLVMDAEAAAGELSKKFAQGHVASTNIKAT

SEQ ID NO: 4626 - protein, 517 aa, Unknown
  Description of Unknown: Integrase B4627 sequence
  PTHR30461:SF3,SM00857,G3DSA:1.10.10.2600,IPR036162,PF13408, PS51737,IPR025827,G3DSA:3.40.50.1390,IPR006119,IPR038109, PF07508,IPR011109,SSF53041,PF00239,PTHR30461, PS51736,Coil,cd00338
MARSKKTECLPLERIGVIYARYSSHNQKEESIEQQVEECTSFALLNGIKIVHVYADKALSGRTDKRPQFQRLMRDAEKRSFSVVVAYKSNRIARDMLNALKYEDRLGKYGIETLYAKEEFGNTAAGRFALRTMMNVNQFYSENMAEDIKRGMLDNAENCKVNGALPLGYVSGPDKRYAIEPKEAEIVRGIYDKVLEGVSFADIANDLNACGVRTKHGSLWNKCSFHRILTNDVYIGVYRHSGVVKEGGVPPILEREVFIAMQKYLETKKNPRGRHRENGDYLLTGKLRCGYCESFMVGVSGTSKTGDKHYYYTCNSRHAGSGCKKENVRRDTIEYTVAALTQQVVFKEDIIEWIATAAVKLAKEASGQNEIDAMEAELAEDRKATKNIMAAIEQGIFTATTKSRLLELEADIASLEQSIRDAKAISEGKLLEKERVVYFLTSLREGNLHSKTYQKRLIDTFVRAVYLWDDRIGIDYYYAGKDSMVKYSLSEIEADIGENIREVLKDSLTGHHDCRTL

SEQ ID NO: 4627 - protein, 517 aa, Unknown
  Description of Unknown: Integrase B4628 sequence
  PTHR30461:SF3,SM00857,G3DSA:1.10.10.2600,IPR036162,PF13408, IPR025827,G3DSA:3.40.50.1390,PS51737,IPR006119,IPR038109, PF07508,SSF53041,IPR011109,PTHR30461,Coil, PS51736,cd00338,PF00239
MPRKKKLQEVGGLRLVAYYRYSGGSGQTEQSIEGQRRDCEAYAKLHGMTIQHEYIDRHISGKTDDRVSFQQMIRDSDKGAFDMVICWKTDRFARNRYDSAVYKKRLRDNGVEIIYAAESNISGAEGIIIEGLMESLAEYYSAELAEKMRRGMRESALKCQAINRCRPLGFTTDAGKKFIIDERTAPAVRFIFEHYAAGESAAYIVEQLNEKGYRTSQGNEFNKSSINRIIQNEMYRGVYISKAYDVRIEGGVPAIVDDDLWRRAQAMAKLNKQKRAKYSSKADYFLSGKLYCGECGCLMKGISGHSSTNGEVYRYYACSNPKCKKHNIPKEELEGTVIQAIIDNLLQPEAMEALAEAMVAVQEADADKPNAEREAIQQELADVRRRSKNILDAIENGTANPHLTARLDELTERENTLRFQLSTLTDEKPLRFTKEEYLFLLEQFLIDPAERNEDYGRRVVHTFVTSMEVSDSKLLIYFNISEENADKNKNASPSELQKESSTVKRLVRVARIELTAS

SEQ ID NO: 4628 - protein, 517 aa, Unknown
  Description of Unknown: Integrase B4629 sequence
  PTHR30461:SF3,cd00338,SM00857,G3DSA:1.10.10.2600,IPR036162, PF13408,PS51737,G3DSA:3.40.50.1390,IPR025827,IPR006119, IPR038109,PF07508,IPR011109,SSF53041,PTHR30461, PS51736,Coil,PF00239
MYEEIKTACLYLRYSSSNQTEQSIEGQMHVCQDFCQRHNIRIVEMYIDRATSASKDIEKRVEFLKMIKDSEKGNFDAVIVYKLDRFARSRYDSATYKYRLKRNGVQLVSATENITQDPEGIILESVLEGMAEFYSAELSQKINRGMRESAMKHNSIGGAIPLGYKTVDKKLVIDETTAPIVREAFQMYADGESVAEICRTFNNRGYKTSKGTRFGKSSFTKIFRNEKYIGVYKYHDYRAEDVIPPIIDKDLWDRVQVRVGKIKKAPARNKAKHTYLLTGKLFCGHCGSAMNADGNSQGYLYYRCYGKKNLDKQCNKRNMEKNLIERLVAQDAMSFLTDEYIEKIATIACDRNKQEIESDSPIPVIRDRIRQVDVSLNNLLKAIETGSAPDMLVKRMGELETEKKDMEVQLKKEMAHQVYIEKEQVIFWLEKFREGDINDEEFCQTVIDLFVNSVTVWDEPDDKFRITIAYNLTSIPQKTYRLSKDGRSSDYASNTPCKKACQCSIWHHISQLFFCFL

SEQ ID NO: 4629 - protein, 517 aa, Unknown
  Description of Unknown: Integrase B4630 sequence
  PTHR30461:SF3,SM00857,G3DSA:1.10.10.2600,IPR036162,PF13408, PS51737,G3DSA:3.40.50.1390,IPR025827,IPR006119,IPR038109, PF07508,IPR011109,SSF53041,PF00239,PTHR30461, PS51736,Coil,cd00338
MNVVLYMRYSSDRQTEQSIEGQKRVCMDFCERQGYNVVGEYIDRATSAYKETAKRTNFCRMIRDSSNGLWQGVVVYKLDRFARNRYDSATYKVRLKKNGVKVISATENISDSPEGVILESVLEGMAEFYSKELSQKVSRGLNESAHKCNSTGGAIPLGYKTVNKKLTVDEPNAQIVKEAFDLYAGGATISEICEKFNSQGYRTKKGTEFNKNSFKSMFRNEKYIGTYTYKDIRIEGGIPAIIDKETFETVQKRLSANAQAPARGKARVNYLLSQKLFCGHCGANMTGDSGRSKTGETYYYYSCSTRKRFHSCKKRTIRKDLIERIVAENAMRLITPEMINTIADMAIKCNREDIESDAIIPALTADLKEINTSIKNLLKMVERGVESETLDLRLKELEKRKKDTESRLDAAKSEYLTLDKTVIVGWLSQFLSGDIEDEDFRRHLIDTLINSVTVWDEPDGGYKITTVYNLKGNTQTYRVNADGSSDMKRNSPPKEYNPNSLFFFKSLFGYTTKYRVE

SEQ ID NO: 4630 - protein, 517 aa, Unknown
  Description of Unknown: Integrase B4631 sequence
  PTHR30461:SF3,SM00857,G3DSA:1.10.10.2600,IPR036162,PF13408, PS51737,G3DSA:3.40.50.1390,IPR025827,IPR006119,IPR038109, PF07508,IPR011109,SSF53041,PF00239,PTHR30461, PS51736,Coil,cd00338
MNVVLYMRYSSDRQTEQSIEGQKRVCMDFCERQGYNVVGEYIDRATSAYKETAKRTNFCRMIRDSSNGLWQGVVVYKLDRFARNRYDSATYKVRLKKNGVKVISATENISDSPEGVILESVLEGMAEFYSKELSQKVSRGLNESAHKCNSTGGAIPLGYKTVDKKLTVDEPNAQIVKEAFDLYAGGATISEICEKFNSQGYRTKKGTEFNKNSFKTMLRNEKYIGTYTYKDIRIEGGIPAIIDKETFETVQKRLSANAQAPARGKARVNYLLSQKLFCGHCGANMTGDSGRSKTGETYYYYSCSTRKRFHSCKKRTIRKDLIERIVAENAMRLITPEMINTIADMAIKCNREDIESDAIIPALTADLKEINTSIKNLLKMVERGVESETLDSRLKELEKRKKDTELRLDAAKSEYLTLDKTVIVGWLSQFLSGDIEDEDFRRHLIDTLINSVTVWDEPDGGYKITTVYNLKGNTQTYRVNADGSSDMKRNSPPKEYNPNSLFFFKSLFGYTIKYRVE

SEQ ID NO: 4631 - protein, 517 aa, Unknown
  Description of Unknown: Integrase B4632 sequence
  PTHR30461:SF3,SM00857,G3DSA:1.10.10.2600,IPR036162,PF13408, PS51737,G3DSA:3.40.50.1390,IPR025827,IPR006119,IPR038109, PF07508,SSF53041,IPR011109,PTHR30461,Coil, PS51736,cd00338,PF00239
MPRKKKLQEVGGLRLVAYYRYSGGSGQTEQSIEGQRRDCEAYAKLHGMTIQHEYIDRHISGKTDDRVSFQQMIRDSDKGAFDMVICWKTDRFARNRYDSAVYKKRLRDNGVEIIYAAESNISGAEGIIIEGLMESLAEYYSAELAEKMRRGMRESALKCQAINRCRPLGFTTDAGKKFIIDERTAPAVRFIFEHYAAGESAAYIVEQLNEKGYRTSQGNEFNKSSINRIIQNEMYRGVYISKAYDVRIEGGVPAIVDDELWRRAQAMAKLNKQKRAKYSAKADYFLSGKLYCGECGCLMKGISGHSSTNGEVYRYYACSNPKCKKHNVPKEELEGKVIQAIIDNLLQPEAMEALAEAMVAVQETDADKPNAEREAIQQELADVRRRSKNILDAIENGTANPHLTARLDELTERENTLRFQLSTLTDEKPLRFTKEEYLFLLEQFLIDPAERNEDYGRRVVHTFVTSMEVSDSKLLIYFNISEENADKNKNASPSELQKESSTVKRLVRVARIELTAS

SEQ ID NO: 4632 - protein, 517 aa, Unknown
  Description of Unknown: Integrase B4633 sequence
  PTHR30461:SF3,cd00338,SM00857,G3DSA:1.10.10.2600,IPR036162, PF13408,PS51737,IPR025827,G3DSA:3.40.50.1390,IPR006119, IPR038109,PF07508,IPR011109,SSF53041,PTHR30461, PS51736,Coil,PF00239
MPRKKKLQEVGGRRLVAYYRYSGGSHQTEQSIEGQRRDCETYARIHGMVILHEYIDRHISGKTDDRPEFQQMIADAGKGMFDYVICWKTDRIARSRYDSIIYKKKLRDNGVELLYAAEANVEGSGGIIVEGLMEALAEYYSAELAEKVRRGMRESALKGKAIGSSRPLGLTVDKDKKYIIDPAGAAAVRYIFEQYAAGAASSSIVAHLNEQGLCTSRGNPFNKSSVVRIIQNEVYRGVYVSPKFDVRIEGAVPAIIDDDLWERAQKMFVRNRQSRSPRNDRADYILSGKLFCGECGTAMKGVSGRSSNGEVYFYYNCPCKDCHRRNIPKDELEGLVIRTVCNDVLQPDVMDRIADSVIEAQTAELNQPNPEKEALQHELADVQRKAKNLLSALENGTAGAMLTNRLAELEQQADTLSYQLSSLESEPKFPVFSKEEILYLLEQFLIAPSEKTKAYRRRLIDTFVSKIEVSNTELTIYFNISEEDCGKMKKAPQLNQPEGCSTEKQMVRVARIELTAS

SEQ ID NO: 4633 - protein, 517 aa, Unknown
  Description of Unknown: Integrase B4634 sequence
  PTHR30461:SF3,SM00857,G3DSA:1.10.10.2600,IPR036162,PF13408, PS51737,IPR025827,G3DSA:3.40.50.1390,IPR006119,IPR038109, PF07508,IPR011109,SSF53041,PTHR30461,PS51736, cd00338,PF00239
MNVIKIPAKPQKGNTAAKTEIKKLRVAAYCRVSTDNEEQASSYESQIQHYTEYINSKPEWEMVKVYADEGISATSTKGREQFNAMIEDCKKGLIDMILTKSISRFARNTVDCLNYIRMLKGMNIPVFFEKEAINTMDTRGEVLLTIMASLAQQESESLSKNTKMGIQYRFQQGKVMVNARCFLGYDKDEDGHLVINPEQAEIVKRIFREYLEGKSCKKIAQGLERDGILTSRGKSKWHDTTIRKILENEKYMGDVLLQKTCTVDFLNKKRVKNTGMQPQYYVEDDHEAIIPKEIFLMVQEEIARRSEQNACFGRRKNFSANHPFSKIVFCADCGEEFRRIHWNNRGKKSIVWRCLTRLKQKDQCHARTVNEETLIEAFLDALNEIVGNSDDYMTRLKENLETAINEVHPESAAALAAKMAKLQQELIDRTERRENYDDITEEILRLRELQEQTAMDDTAKSEHKKRIRELLKFIERQKSKVCVFDGSLVKKLLEKVNVYDDYLEFRFKSGVTVSVEK

SEQ ID NO: 4634 - protein, 517 aa, Unknown
  Description of Unknown: Integrase B4635 sequence
  PTHR30461:SF3,SM00857,G3DSA:1.10.10.2600,IPR036162,PF13408, IPR025827,G3DSA:3.40.50.1390,PS51737,IPR006119,IPR038109, PF07508,IPR011109,SSF53041,PTHR30461,PS51736, cd00338,PF00239
MQRAVIYARFSSDMQREESIDAQVRACKAYAKNKGYIVVDTYADEAKSGRDVTKRDAYNQMLADAMEDKFDVIIFHKIDRNSRNELNYFTFKDKLERLGISYEYAAQPIDTISPEGQVMETIMVGMSAYYSRNLAKETKKGLNENAYKALFNGGCPPLGYKIVDKKYVIDESEAAAVRLIFELYLAGKGYAEICRALDSKGFTTKSGKPFGKNSLYDILGNEKYIGTYTFNKIPKGKGKRNMHSQKRPDDYISIEDALPAIISKEDFFIVQAKRERNRCHAAKYTAKHDYLLSGKVFCGECGSAMVGHRVRQRYYYYGCTRKEQTPTSKCQQRMIRAEVLEHWVMQILERVVFTVSGMRRIADAIAKGYQEEESRHAAEQEALAKRKAAAEKKLNNIYKIFEEGEADEFDRQRLNQIKAELREINKSICEASVKSVESLDNKKIVAFLTTIKSEIFVKNNIDYARRAIDLLVTNVTVTGTVIKVTLSTQNVCAYLVPRTRTQTSGYKFSISIDTKAA

SEQ ID NO: 4635 - protein, 517 aa, Unknown
  Description of Unknown: Integrase B4636 sequence
  PTHR30461:SF3,SM00857,G3DSA:1.10.10.2600,IPR036162,PF13408, PS51737,G3DSA:3.40.50.1390,IPR025827,IPR006119,IPR038109, PF07508,SSF53041,IPR011109,PTHR30461,PS51736, cd00338,PF00239
MAKITKIEATQAIKKKIRVAAYARVSTSSDEQLLSLETQKEHYDSFIKANPDMEYAGLYYDEGISGTKVEKRDGLLRLLKDCEDGKIDRVITKSISRFSRNTTDCLEMVRSLSRLGIYLYFEKENIDTEHMSSELMLSILSSIAESESRSISENTKWSIKHRYEAGTFIIAYPPYGYENEDGKMVIVPEEAEVVKEIFQRTISGQGSYVIAKWLNEAGIPSKRGNVWHSSTVKSILKNEKYTGDVIFQKTYTDDNFNRHMNYGERNMYLCKNHHEPIISHEVFEMTAEVMAQRGKEKGIEVGDAKYLNRYALSGKIICGECGATFKRRTHYKPSGDYIAWTCCSHIKDKTSCSMLYIKDEDVKRALVRMMRKLKACHEQILKPFVAGLKGTNNKERLHQVLELESQIEKNLEQQNIMVNLMSAGYIEPELYHAERSALFMEADRLAKEKDFISKGINGDLTHLEEAQKLLRYMAKKNNAIDYDDVLMQDYVERIIVQSRDEVCFELKCGLKLIERLV

SEQ ID NO: 4636 - protein, 517 aa, Unknown
  Description of Unknown: Integrase B4637 sequence
  PTHR30461:SF3,SM00857,G3DSA:1.10.10.2600,IPR036162,PF13408, PS51737,G3DSA:3.40.50.1390,IPR025827,IPR006119,IPR038109, PF07508,IPR011109,SSF53041,PTHR30461,Coil, PS51736,cd00338,PF00239
MATVKEIAPHALQPEHLRVAAYCRVSSDSEDQLHSYAAQIRNYTEVIAQHDGWELVDVYADEGLTGTRMDKRDDFNRMMRDCRKGKIDRILVKSVARFARNTKECLASLRELSGMGVTVRFEKENIDTGTLTTELMVSVSGSLAQQESLSISANQRLSYQHRMECGEFITCSAPYGYRIKDKKNLEILPEEAAAVRWAFDAYLKGNSSKWIAEQLTAKGIPTQNGAEKWQETSIRYLLTNEKYIGDTLCQKSYSCGFPFVQKRNRGERMQYYVENSHPAIIDRDTFEKVQELLRKKAQKEKRRRERSPFALKILCGNCGTMFLRRTSKNGYVTWVCRTHDRSADACHVGRIPESEIRAAFLRMYRKLKCNADMILKPAMEQMNALDAILQQNNPKTLTINRAIAEATEESHKISTLRVNGLLDADTCTARMNVISAKLAQLRRERRRLAENEALDEVMDALRKVRQTILDGPEQMDDFDDDRFESLVEKIIAESQTEIRFRLYGGLELRERLEVAVR

SEQ ID NO: 4637 - protein, 517 aa, Unknown
  Description of Unknown: Integrase B4638 sequence
  PTHR30461:SF3,SM00857,G3DSA:1.10.10.2600,IPR036162,PF13408, IPR025827,G3DSA:3.40.50.1390,PS51737,IPR006119,IPR038109, PF07508,IPR011109,SSF53041,PF00239,PTHR30461, PS51736,Coil,cd00338
MARSKKTECLPLERIGVIYARYSSHNQKEESIEQQVEECTSFALLNGIKIVHVYADKALSGRTDKRPQFQRLMRDAEKRSFSVVVAYKSNRIARDMLNALKYEDRLGKYGIETLYAKEEFGNTAAGRFALRTMMNVNQFYSENMAEDIKRGMLDNAENCKVNGALPLGYVSGPDKRYAIEPKEAEIVRGIYDKVLEGVSFADIANDLNACGVRTKHGSLWNKCSFHRILTNDVYIGVYRHSGVVKEGGVPPILEREVFIAMQKYLERKKNPRGRHRENGDYLLTGKLRCGYCESFMVGISGTSKTGDKHYYYSCNGRRSGSGCKKENVRRDSIEYAVAALTQQVVFKEDVIEWIATAAVKLAKEASGQDEIDAMEAELAENRKATKNIMAAIEQGIFTATTKNRLLELEADIASLEQSIRDAKAISEGKLLEKERVVYFLTSLREGNLHSKTYQKRLIDTFVRTVYLWDDYIGIDYYYAGKDSVVKYSLSEIESDIGENIREVLKDSLTGHHDCRTL

SEQ ID NO: 4638 - protein, 517 aa, Unknown
  Description of Unknown: Integrase B4639 sequence
  PTHR30461:SF3,SM00857,G3DSA:1.10.10.2600,IPR036162,PF13408, IPR025827,PS51737,G3DSA:3.40.50.1390,IPR006119,IPR038109, PF07508,IPR011109,SSF53041,PTHR30461,PS51736, cd00338,PF00239
MQRAVIYARFSSDMQREESIDAQVRACKAYAKNKGYIVVDTYVDEAKSGREITKRDAYNKMMADAMEDKFDVIIFHKIDRNSRNELNYFKFKDKLERLGINYEYAAQPIDTDSPEGQVMETVMVGMAAYYSRNLSKETKKGLNENAYKALFNGGCPPLGYKIVDKKYAIDENEAAAVRLIFELYLAGKGYAEICRVLDSKGFTTKGGKPFGKNSLYDILGNEKYIGTYTFNKIPKGKGKRNMHSQKRPDDYISIENALPAIISKEDFAAVQLKRERNRRRAAKYTAKHDYLLSGKVFCGECGSAMVGHRVRQRYYYYGCTRKEQTPASKCQQRMIRADVLDHWVMQILERVVFTVSGMRRIADAIAKGYQDEESRQAAEQEALAKRKAAAEKKMNNIYKIFEEGEADEFDRQRLKQIKAELREINKSICETSVKSVENLDNKKIVAFLTTIKSEIFVKNNMDYAKRAIDLLVSNVTVTGTVIKVTLSTQNVCAYMVPRTRTQTSGYKFSISIDTKAA

SEQ ID NO: 4639 - protein, 517 aa, Unknown
  Description of Unknown: Integrase B4640 sequence
  SM00857,G3DSA:1.10.10.2600,IPR036162,PS51737,G3DSA:3.40.50.1390, IPR006119,IPR038109,PF07508,SSF53041,IPR011109, PTHR30461,Coil,PS51736,cd00338,PF00239
MTRKVAIYLRMSLDMDGKGAGIERQREDCRTLAANRGWEVVDEYVDNSISASKSNVRRPAYDRMEADYEAGRFDTIVCWHFDRLTRQPMQMEQWLNRAEQGNLQVVTCTGDYNLTDHTGRLMVRVLAAVARNEIENKSARQKRATIQKAHKGGPSAGIPPYGYDDEYNVIEDRAETVRGIFKAIQAGVSMADIVRALNGEAGRDHEVPWLKPCPSPGVVRWQRDNAKRAERGLEPKAKLKKTRWTHHMVLRIAINPSYAAYRMHMPQDIRDKPEHRGAGSETAPGKRACIVRDDDGEPVQGQWEPIVDKDLWWSVSEILCDPKRDKRRHNRSGRAGLGSGTYICGECGHYMTTLGQSYRCRQCGITRRSAKIDQLVCRVIERRLSREDAVEALTARSKPTEESKAIEEQIRDQEAKIKRAEADYDDGVITGRDLKRNRDKATAEIENLRQQQVATLPEATQSVLVGMSDPAEGFKKSSMVTKRSIIEALLEVKVYKAVRGRKQFDPGTVDIVWKTDA

SEQ ID NO: 4640 - protein, 517 aa, Unknown
  Description of Unknown: Integrase B4641 sequence
  PTHR30461:SF3,SM00857,IPR036162,G3DSA:3.40.50.1390,IPR006119, SSF53041,PF00239,PTHR30461,PS51736,Coil, cd00338
MPKGTRAAIYARFSSHNQRSESIDIQVEKSREYCAQNGLDVVRVYSDYAQTGRNVKRADFQRMMEDAKLGIFDYVVIYKVTRIMRNRDEMALARIRLRKAGVEILYAGESLGEGSTRVLNLGMLEVLAEWESAIDSERIRDGINKNAQRGMANGRTHYGWDIVNGYYEVNEREAAVMHRMKNMLFAGSTVAEIKRAVAGERGKRGKPLTHGVITKLLRREQNCGVYDYAGVRIEDGMPALWSREDQDMINSILGSNGRKHNKTRDTNDYPLSGKMWRPECGQYYVGTCGTSKTGRVYHYYKCKKCKRTFRRDAVEEAVLDTVLETIKKPDIRQRIVDVMALYNEMNEEKEEPESKRIEREIRRIDTAFERIWQAIEDGIAPPGGKERVAMLREQKAALEADLRQAQASEGANLSGEAIAAWLDSIAQEPDAAEIIETFVRLIEVDGDELKLYFAFDYWGDDFQPKQKKANPEKGSPNNPMVEPQKIFANPTIAANGREIKVSTNWFCIITLFSSKKS

SEQ ID NO: 4641 - protein, 517 aa, Unknown
  Description of Unknown: Integrase B4642 sequence
  SM00857,G3DSA:1.10.10.2600,IPR036162,PF13408,IPR025827, G3DSA:3.40.50.1390,PS51737,IPR006119,IPR038109,PF07508, IPR011109,SSF53041,PTHR30461,PS51736,cd00338, PF00239
MVAAAYARYSTERQNETSILAQLQAIEAYCAQHDLTLYKHQYIDQAFSGTNTDRPAFQQLLSDANRHCFDAVVIYDISRGSRDVVDWFAFRRQMQQLGIAVYSVTNTLGDLDDPNAFLTEMITAGLGQHMVLQTRQKSIAGKRIKAAQGLFCGGVAPYGYRIENARYVIDEREAPAVRLIFDMYVNGHSYGDIIAALSASGFCTRSGRRFSSTALHDILSNQRYSGRFVWFERVERHMHKHVGKPGDPITVEDAIPRIISDEIFERVQKRMETKIIRKRGKREYMLSGLLKCGLCGASLAGTTVTSKGIEYPRYSCIRRHKEHNCDLVTLKADILDKAVAQIIREKILNRDLIEQTAQLVIDRYSASKEDTSKLQARVAASSAKIYRLISMAADLPETPPEMRQQIIDETARKKALEAQLVAAQKSELPVTKDDVIALLERDCDRLAETPSLLREMALTYIKQITVYNDRLDICYYLIPGLKNNNPSDTDGLLTGALPRYESRLLYNLTIPRPDLAA

SEQ ID NO: 4642 - protein, 517 aa, Unknown
  Description of Unknown: Integrase B4643 sequence
  PTHR30461:SF3,SM00857,G3DSA:1.10.10.2600,IPR036162,PF13408, PS51737,G3DSA:3.40.50.1390,IPR025827,IPR006119,IPR038109, PF07508,IPR011109,SSF53041,PTHR30461,Coil, PS51736,cd00338,PF00239
MATVKEIAPHALQPEHLRVAAYCRVSSDSEDQLHSYAAQIRNYTEVIAQHDGWELVDVYADEGLTGTRMDKRDDFNRMMRDCRKGKIDRILVKSVARFARNTKECLASLRELSGMGVTVRFEKENIDTGTLTTELMVSVSGSLAQQESLSISANQRLSYQHRMECGEFITCSAPYGYRIKDKKNLEILPEEAAAVRWAFDAYLKGNSSKWIAEQLTAKGIPTQNGAEKWQETSIRYLLTNEKYIGDTLCQKSYSCGFPFVQKRNRGERMQYYVENSHPAIIDRDTFEKVQELLRKKAQKEKRRRERSPFALKILCGNCGTMFLRRTSKNGYVTWVCRTHDRSADACHVGRIPESEIRAAFLRMYRKLKCNADMILKPAMEQMNALDAILQQNNPKTLTINRAIAEATEESHKISTLRVNGLLDADTCTARMNVISAKLAQLRRERRRLAENEALDEVMDALRKVRQTILDGPEQMDDFDDDLFESLVEKIIAESQTEIRFRLYGGLELRERLEVAVR

SEQ ID NO: 4643 - protein, 517 aa, Unknown
  Description of Unknown: Integrase B4644 sequence
  PTHR30461:SF3,SM00857,G3DSA:1.10.10.2600,IPR036162,PF13408, IPR025827,G3DSA:3.40.50.1390,PS51737,IPR006119,IPR038109, PF07508,SSF53041,IPR011109,PF00239,PTHR30461, PS51736,Coil,cd00338
MKKAVIYARYSSHKQNEESIEGQLRECYQFAEKNGFTVTHEYIDRAISGKTADRPSFQELIADSSKGKFEAVIMYTLDRFARNRYDSAMYKAKLKKNGVKLYYAKQPMPDTPEGIILESVLEGYAEYYSENLSRGVKRGMHEVALQGRVTGKAPLGYVADKNKKYQIDPETAQAVKYIFQMYSEGITQREISLYLNSHGYRTATGRKFGKSSYHSILTNEKYMGVYRYGDVVIENCIPPIISKELFDKVQERMRCENHKGARNKAKETYLLSGKIYCGHCGKPMIGESGTSRHGNIYRYYKCSCRKANPKSCDKKPEKKEPLEDLIVRKTITRVFTDENIEIISDKVIDLLKEDLEQVSHVKQLENTLEETKNKIQNILTAIEQGIIVKSTLERLHELEKEKDEIESNLSIEKSRYNNLPTKNQIMFYLYSLKNGNVDNGHFRRQLVRSIINSIFVYDNPDGGKKIVVNFNLPNNEIDTLSLSDSDMNLLGAPIPTNPNIFVNKDWFTIVFDIKEIG

SEQ ID NO: 4644 - protein, 517 aa, Unknown
  Description of Unknown: Integrase B4645 sequence
  PTHR30461:SF3,cd00338,SM00857,G3DSA:1.10.10.2600,IPR036162, PF13408,IPR025827,PS51737,G3DSA:3.40.50.1390,IPR006119, IPR038109,PF07508,IPR011109,SSF53041,PTHR30461, PS51736,Coil,PF00239
MCAKKKPATLEPDMQDAVIYTRYSSHNQRDCSIEQQVADCEIFARQNNLRVVKVYADRHLSGTTDNRPQFQQMLKDAAHGHWAYVICWKIDRFARNRYDSATYKFRLKKAGVRVLYAKESIPDGPEGILLESVLEGSAEYYSAALAQNIRRGMKYNAEQCKVNSGSIPFGYCKGPDGRFAIHEANAEVVREIFRKAAAGMPFVDIANDLNSRGLKTSRGGRWNKGSFRLLMNEAYIGVYHFSDTRIEGGMPALIDQGTFWAANERLKANSSVRGRHQDGGDYLLTGKLKCAHCGSYMIGFSGTGKSGELHYYYGCQKRRRERACKKANIPREWIERVVVKAALDYVLRPDVMEWIADAVMEYQEREAASAQLAALTAELEENQKATDNVMKAIEAGIITSTTKQRLLDLEAKAQDLKRAIELEKLSHVRLERDQVLFWLDRFRGGSLQSQEFRRKVIDAFVSVVYLSDDHLRIAFNYSGGSNAEADFDLVMDAEAAAGELSKKFAQGHVASTNIKAT

SEQ ID NO: 4645 - protein, 517 aa, Unknown
  Description of Unknown: Integrase B4646 sequence
  PTHR30461:SF3,SM00857,G3DSA:1.10.10.2600,IPR036162,PF13408, IPR025827,PS51737,G3DSA:3.40.50.1390,IPR006119,IPR038109, PF07508,IPR011109,SSF53041,PTHR30461,PS51736, cd00338,PF00239
MKKLTKIKIRDAVHQKKKLKVAAYCRVSTASDKQLVSLDVQKEHYENYIRSNEEWEFAGIYYDEGITGTKKDIRAGLLSMIADCEAGKIEFIVTKSISRFARNTMDCLEMVRKLTGLGVAIYFEKENINTGSMESELMLSILSSFAEKESVSISENNKWSVQKRFQKGTFIISYPPYGYYNNNGTMSIVPEEAEVVKEIFAACLAGKGTLAIAKELNDKGIKAKKNGKWYAGSIKNILTNEKYTGDVIFQKTYTDDSLNRHINYGERDRFLCKDHHEPIICHEVFDRVRAVLDQRAMDKGNGIETFRYKKRYCFSGKIKCGECGKTFKRRQHYKPSGNYVAWTCETHLENKEKCSMLYINDESVKLAFLTMMNKLIYSNKEILKPLYRKICHVYEKDRLLKINELETRINENADRKHILANLMAKGILDTAILNKENAALAMEEQTLWSEKEKLVVLDNKRVKELRKLVDFAAKSKMLKVFREETFIDFVERITVESRLTLVFHLKCGLNLKERLVK

SEQ ID NO: 4646 - protein, 517 aa, Unknown
  Description of Unknown: Integrase B4647 sequence
  PTHR30461:SF3,SM00857,IPR036162,G3DSA:3.40.50.1390,mobidb-lite, IPR006119,SSF53041,PF00239,PTHR30461,PS51736, Coil,cd00338
MPKGTRAAIYARFSSHNQRSESIDIQVEKSREYCAENGLDVVRVYSDYAQTGRDVKRVEFQRMMEDAKLGIFDYVVIYKVTRIMRNRDEMALARIRLRKAGVEILYAGESLGEGSTRVLNLGMLEVLAEWESAIDSERIRDGINKNAQRGMANGRTHYGWDIVNGYYEVNEREAAVMHRMKNMLFAGSTVAEIKRAVAGERGKRGKPLTHGVITKLLRREQNCGVYDYAGVRIEDGMPALWSREDQDMINSILGSNGRKHNKTRDTNDYPLSGKMWCPECGQYYVGTCGTSKTGRVYHYYKCKKCRRTFRRDAVEEAVLDTVLETIKKPDVRQRIVDAMALYDEMNEEKEEPESKRIEREIKRIDAAFERIWQAIEDGIAPPGGKERVDMLREQKAALEADLRQAQASESAHLSGEDIAAWLDHIAQEPDAAEIIDTFVRLIEVDGDELKLYFAFDYWGDDFQPKQKKTNPEKGSSNNPMVEPQKIFANPTIAANGREIKVSTNWFCIITLFSSKKS

SEQ ID NO: 4647 - protein, 517 aa, Unknown
  Description of Unknown: Integrase B4648 sequence
  PTHR30461:SF3,SM00857,G3DSA:1.10.10.2600,IPR036162, PF13408,IPR025827,G3DSA:3.40.50.1390,PS51737, IPR006119,IPR038109,PF07508,IPR011109, SSF53041,PTHR30461,Coil,PS51736,cd00338,PF00239
MLYAIYLRKSRADLEAEAMGQGETLARHRAALLDYAAHHGLEIGAVYEEIISGESIDARPKMKQLLREVEQGRWAGVLCMDIDRLARGNSADQARVSNTFRISGTLIITPSKVYDQSRESDEEYVDFELFMARREYKAISRRIMRGRIASVKEGHFIGSTPPYGYDKVKVEKGRGFTLLPNSESDTVKQIYSMCISGMGCNAIARRLDMMGVTPRKGSSWSSASIQDILKNPVYCGKIRWQYRREEKSLTDGIVTTRRRENPDCIIAQGLHPALISEEEFDQAQQFLNSRRIPHKKESTELRNPLSGLVYCGMCGSMMTRLGTGSRNHSDTLRCPNRNCGNVSAKLELVESALVEGVARWLNDCRVNVSRKPAADTAKAERTAAEKVRAELAKLDSQREKIYSFLEQGVYSAGEFRERMESLEKRRTQLSENLRQAEQAVSEAEGNRQLYAQIIPSVERVMDIYAQSTPEEKNRLLKTIISRAEYIKTERNTRGNADRCNFTLNVIPLFPEIKTGAE

SEQ ID NO: 4648 - protein, 517 aa, Unknown
  Description of Unknown: Integrase B4649 sequence
  PTHR30461:SF3,cd00338,SM00857,G3DSA:1.10.10.2600,IPR036162, PF13408,PS51737,G3DSA:3.40.50.1390,IPR025827,IPR006119, IPR038109,PF07508,IPR011109,SSF53041,PTHR30461, PS51736,Coil,PF00239
MCAKKKPAMLEPDMQDAVIYTRYSSHNQRDCSIEQQVADCEIFARQNNLRVVKVYADRHLSGTTDNRPQFQQMLKDASHGHWAYVICWKIDRFARNRYDSATYKFRLKKAGVRVLYAKESIPDGPEGILLESVLEGSAEYYSAALAQNIRRGMKFNAEQCKVNSGSIPFGYCKGPDGRFAIHEANAEVVREIFRKAAAGMPFVDIANDLNSRGLKTSRGGRWNKGSFRLLMNEAYIGVYHFSDTRIEGGMPALIDQGTFWAANERLKANSSVRGRHQDGGDYLLTGKLKCAHCGSYMIGFSGTGKNGELHYYYGCQKRRRERACKKANVPREWIERVVVKAALDYVLRPDVMEWIADAVMEYQEREAASAQLAALTAELEENQKATENVMKAIEAGIITSTTKQRLLDLEAKAQDLKRAIELEKLSHVRLERDQVLFWLDRFRGGSLQSQEFRRKVIDAFVSVVYLSDDHLRIAFNYSGGSNAEADFDLVMDAEAAAGELSKKFAQGHVTSTNIKAT

SEQ ID NO: 4649 - protein, 517 aa, Unknown
  Description of Unknown: Integrase B4650 sequence
  PTHR30461:SF3,SM00857,G3DSA:1.10.10.2600,IPR036162,PF13408, PS51737,IPR025827,G3DSA:3.40.50.1390,IPR006119,IPR038109, PF07508,IPR011109,SSF53041,PTHR30461,Coil, PS51736,cd00338,PF00239
MASVTKLTKPQSKVQATLQVAAYCRVSTNSDEQEDSLANQQDHFKSYIQQQPNWLLHKIYYDNGISGTKAQNRPGLQALLKDCQNGQVDLVLTKSISRFSRNTTDCLRIIRQLKQLDIPVIFEKENINTDSMDSELILSVLGSLAQDESQSIAHNVRLGYQQRASNGVFHYSLPPYGYQKDANRDLIIDPIERKVVLRIFNWTIEGKSPGQIAQTLNEQAISTKRNGKWHDSTIRGILQNTVYLGTTEFQKTFTDDEYHRHPNQGEQGKIIIEEHHPAIIDQATFTQVQKIIMLKRKFYPQAKAKPQRHTFSRKIYCGNCQKLFKRQSRSGKVCWGCQTHIKSAKDCPVKSIREDALHLAFCTMVNKLIFSQKFLLEPLVEQLQADQNQEQAAKLSQVETELKEAKDKQDNLQQLRKQELIEKDFFTKQDAELEQEIANLQSEIERLKQLLGDQNSKLPLTHELLKLCQRSNYLTAFNAELFEQIIESITVDQDHNLTFHLKCGLNLTEGSKHHVKA

SEQ ID NO: 4650 - protein, 517 aa, Unknown
  Description of Unknown: Integrase B4651 sequence
  PTHR30461:SF3,SM00857,G3DSA:1.10.10.2600,IPR036162,PF13408, PS51737,G3DSA:3.40.50.1390,IPR025827,IPR006119,IPR038109, PF07508,IPR011109,SSF53041,PTHR30461,Coil, PS51736,cd00338,PF00239
MPRKKKLQEVGGLRLVAYYRYSGGSGQTEQSIEGQRRDCEAYAKLHGMTIQHEYIDRHISGKTDDRVSFQQMIRDSDKGAFDMVICWKTDRFARNRYDSAVYKKRLRDNGVEIIYAAESNISGAEGIIIEGLMESLAEYYSAELAEKMRRGMRESALKCQAINRCRPLGFTTDAGKKFIIDERTAPAVRFIFEHYAAGESAAYIVEQLNEKGYRTSQGNEFNKSSINRIIQNEMYRGVYISKAYDVRIEGGVPAIVDDELWWRAQAMAKLNKQKRAKYSAKADYFLSGKLYCGECGCLMKGISGHSSTNGEVYRYYACSNPRCKKHNIPKEELEGKVIQAIIDNLLQPEAMEALAEAMVAVQEADADKPNAEREAIQQELADVRRRSKNILDAIENGTANPHLTARLDELTERENTLRFQLSTLTDEKPLRFTKEEYLFLLEQFLIDPAERNEDYGRRVVHTFVTSMEVSDSKLLIYFNISEENADKNKNASPSELQKESSTVKRLVRVARIELTAS

SEQ ID NO: 4651 - protein, 517 aa, Unknown
  Description of Unknown: Integrase B4652 sequence
  PTHR30461:SF3,cd00338,SM00857,G3DSA:1.10.10.2600,IPR036162, PF13408,PS51737,G3DSA:3.40.50.1390,IPR025827,IPR006119, IPR038109,PF07508,IPR011109,SSF53041,PTHR30461, PS51736,Coil,PF00239
MCAKKKPAMLEPDMQDAVIYTRYSSHNQRDCSIEQQVADCEIFARQNNLRVVKVYADRHLSGTTDNRPQFQQMLKDASHGHWAYVICWKIDRFARNRYDSATYKFRLKKAGVRVLYAKESIPDGPEGILLESVLEGSAEYYSAALAQNIRRGMKFNAEQCKVNSGSIPFGYCKGPDGRFAIHEANAEVVREIFRKAAAGMPFVDIANDLNSRGLKTSRGGRWNKGSFRLLMNEAYIGVYHFSDTRIEGGMPALIDQGTFWAANERLKANSSVRGRHQDGGDYLLTGKLKCAHCGSYMIGFSGTGKNGELHYYYGCQKRRRERACKKANVPREWIERVVVKAALDYVLRPDVMEWIADAVMEYQEREAASAQLAALTAELEENQKATDNVMKAIEAGIITSTTKQRLLDLEAKAQDLKRAIELEKLSHVRLERDQVLFWLDRFRGGSLQSQEFRRKVIDAFVSVVYLSDDHLRIAFNYSGGSNAEADFDLVMDAEAAAGELSKKFAQGHVASTNIKAT

SEQ ID NO: 4652 - protein, 517 aa, Unknown
  Description of Unknown: Integrase B4653 sequence
  PTHR30461:SF3,SM00857,IPR036162,G3DSA:3.40.50.1390,IPR006119, SSF53041,PF00239,PTHR30461,PS51736,Coil, cd00338
MPKGTRAAIYARFSSHNQRSESIDIQVEKSREYCNEHGLDVVRVYSDYAQTGRDVQRVEFQRMMKDAKLGIFDYVVIYKVTRIMRNRDEMALARIKLRKAGVEILYAGESLGEGSMRVLNLGMLEVLAEWESAIDSERIRDGINKNAQRGMANGRTHYGWDIVNGYYEVNEREAAVMHRMKNMLFAGSTVAEIKRAVAGERGKRGKPLTHGVITKLLRREQNCGVYDYAGVRIEDGMPALWSREDQDMINSILGSNGRKHNKTRDTNDYPLSGKMWCPECGQYYVGTCGTSKTGRVYHYYKCKKCRRTFRRDAVEEAVLDTVLETIKKPDVRQRIVDAMALYDEMNEEKEEPESKSIEREIKRIDAEFERIWQAIEDGIAPPGGKERVDMLREQKAALEADLRQAQASESAHLSGEDIAAWLDHIAQEPDAAEIIETFVRLIEVDGDELKLYFAFDYWGDDFQPKQKKTNPEKGSSNVPMVEPQKIFANPTIAANGREIKVSNNWFCIVTLFNSKKS

SEQ ID NO: 4653 - protein, 517 aa, Unknown
  Description of Unknown: Integrase B4654 sequence
  PTHR30461:SF3,SM00857,G3DSA:1.10.10.2600,IPR036162, PF13408,IPR025827,G3DSA:3.40.50.1390,PS51737, IPR006119,IPR038109,PF07508,IPR011109, SSF53041,PTHR30461,PS51736,cd00338,PF00239
MQRAVIYARFSSDMQREESIDAQLRACKAYAKNKGYIVVDTYVDEAKSGREITKRDAYNKMMADAMEDKFDVIIFHKIDRNSRNELNYFTFKDKLERLGISYEYAAQPIDTISPEGQVMETIMVGMSAYYSRNLAKETKKGLNENAYKALFNGGCPPLGYKIVDKKYVIDENEAAAVRLIFELYLAGKGYAEICRVLDSKGFTTKGGKPFGKNSLYDILGNEKYIGTYTFNKIPKGKGKRNMHSQKRPDDYISIENALPAIISKEDFFIVQAKRERNRCHAAKYTAKHDYLLSGKVFCGECGSAMVGHRVRQRYYYYGCTRKEQTPTSKCQQRMIRAEVLEHWVMQILERVVFTVSGMRRIADAIAKGYQEEESRHAAEQEALAKRKAAAEKKLNNIYKIFEEGEADEFDRQRLNQIKVELREINKSICEASVKSVESLDNKKIVAFLTTIKSEIFVKNNMDYAKRAIDLLVTNVTVTGTVIKVTLSTQNVCAYLVPRTRTQTSGYKFSISIDTKAA

SEQ ID NO: 4654 - protein, 517 aa, Unknown
  Description of Unknown: Integrase B4655 sequence
  PTHR30461:SF3,SM00857,G3DSA:1.10.10.2600,IPR036162,PF13408, IPR025827,PS51737,G3DSA:3.40.50.1390,IPR006119,IPR038109, PF07508,IPR011109,SSF53041,PTHR30461,Coil, PS51736,cd00338,PF00239
MEQFDVNEIIMYLRKSRADAENETVEEVLARHENLLQDYALKTFGHIIPAANIYKEVASGETIESRPEIKKILSLAANNRNYKALLVVEPQRITRGDMLDCGTIIRVFKYNNIKIITPSKSFDLQDTYDLKYFQMTLQQGNEYLEYIKFILNRGRISSVKEGCFIGQKPPYGYEKAKKGKQFTLKPSDCADVVRLIFDLYVNKNMGCNQIASELDHRGIKPRFNEYWSAASIREMLKNPVYIGKIRWNYKRTVIHTDEHGSTKKMRIRDNDNAMIVDGLHEAIIDEELFNKAQEKTGKNSRSRTSGELRNPFATLLKCGNCGYSMSYRTYKNKDGTQRGEPRMLCTHQIHCHTPSVGYNEFEKALISALRLRLEDFQIKISGENGGTADIQESILKNLNKELETLEKQQTKLYDFLERGIYAEDVFLKRNSALSVRRAELNKAIEMQSNAIPETVYYEDKIYKISQAIEMLQNPDLSAAEKNAFLKTFIDHIEYFSELPGKGNRFLENKFSLEIFFL

SEQ ID NO: 4655 - protein, 517 aa, Unknown
  Description of Unknown: Integrase B4656 sequence
  PTHR30461:SF3,cd00338,SM00857,G3DSA:1.10.10.2600,IPR036162, PF13408,IPR025827,G3DSA:3.40.50.1390,PS51737,IPR006119, IPR038109,PF07508,SSF53041,IPR011109,PTHR30461, PS51736,Coil,PF00239
MYLVAYARYSSDNQREESITAQLRAIHNWADANGHIIVKEYIDEALSARTDKRPNFLKMIEDSKTEDWNGVVVHKLDRFSRNRYNSAVYKKTLKDNNKKLFSVLEKLDDSPESIIMEAMLEGLSEYYSANLAREVKKGLNENALDCKHNGGTPPLGYSVLNSHYVINEQEAVIIKLIFDMYRTNHSYVEICLELNLRGYKTKRNKNFSKNSIHDILVNEKYIGNYTFGYGNRAKKRGQPNPDMIKIEGGMPAIIDKNVFFEVQEKMKGRKHMGGTYKAKQVYILSGILKCGICGEKYVGAKKNKFWSVYECSGHKKGVCDNKAIKKEEIEKIVVDELKTKLKKLFNNTELLEKVNSTYKDLYDNAENNLKVEEEKLINVKAQINNINKAVMDGLYSPEMKDQMNSLQTKKELIEHSIYLIKNISEKNEITSNDLNKIINTDLLKLESDNLEDIKEIVQKYVKEVLITPENINIKIVLDDTNINTKHKGDTDVCDSPPPKFEKRTAIILNLAVLFFFI

SEQ ID NO: 4656 - protein, 517 aa, Unknown
  Description of Unknown: Integrase B4657 sequence
  SM00857,G3DSA:1.10.10.2600,IPR036162,PS51737,G3DSA:3.40.50.1390, IPR006119,IPR038109,PF07508,IPR011109,SSF53041, PF00239,PTHR30461,PS51736,Coil,cd00338
MSYCIYLRKSRKDLEAEQAGQGETLARHERTLLSLARQRNLIIGNIYREIVSGESIAARPVMQKLLKEVESGIWDGVLVMEIERLARGDTIDQGTVQRAFQYSNTYIITPQKTYDPSNEFDEEYFEFGLFMSRREYKTIKRRMQAGRYAAAKEGKWPFNAAPYGYRRVKLQNEKGWTLAFDDSEASVCRMIFSMFTGPDRKGITIIRRYLNQHGIKPRNGDLWTDSSIRCILSNPAYDGKVAIGRRKVVPTIENGLPTKTRPRSNDYAVYEGRHPALISHAIYAEAQSYLGHGTPKLPESYGVKNPLAGLIICKECGKRMQRRPATNPWVKNGAKYDMLICHTDSCPTVGSPLDLVERELIHALEDWVSGYELQETLPESRVPELEQMLESAKQEHDTSEKQKSRLYDLLEQGVYDSETFLLRSRALQDRLEESLAGVTRLEQELESERKIQANITNFLPACHDLLSCYWSLDAPDRNKALKILIDSVDYRKTSRNKKGEAEKASFELTIKPRIPRI

SEQ ID NO: 4657 - protein, 517 aa, Unknown
  Description of Unknown: Integrase B4658 sequence
  PTHR30461:SF3,SM00857,G3DSA:1.10.10.2600,IPR036162,PS51737, G3DSA:3.40.50.1390,IPR006119,IPR038109,PF07508,SSF53041, IPR011109,PTHR30461,PS51736,cd00338, PF00239
MLFNYTQPEEKIKAAAYVRMSTEHQKYSPENQMAAIKEYADKHNYEIIKTYSDGGKSGLNISGRASLQQMLADVQGRQQQYKVILVLDVTRWGRFQDADESAYLEFMCKKAGVRVQYCAEQFTNDDSPVSTIIKSVKRTMAAEYSRELSGKVFAGQSRLITLGYKQGGPAGYGLRRMLIDEYGNHKGMLARGEHKSIATDRVILVPGPEEEQENVRWMYKAFVYDGKNEGAIADELNHRGIKTDLDKDWTKATVREVLSNEKYIGNNIFNRISYKLKIKRVRNPEDIWVRKDNAFQGIVDPSLFFMAKGIFAARCRKLSDEEMLQKLKELQDRKGYLSAIVIDEAEDMPSSAAYSGRFGGLTRAYQLIGFNPGRDFRYIEINRYLRELHQENIQSTIQGLINCGADIKLNESQNLLNVNNMFTASLVICRCNALSNGKYRWKVRFDTVLNPDVTIAIRMKANNSDTLDYYLLPSLDFKIPNIKLDEQNTGFIDSYRFENLDYLYEMAKCISIRGQLR

SEQ ID NO: 4658 - protein, 517 aa, Unknown
  Description of Unknown: Integrase B4659 sequence
  PTHR30461:SF3,SM00857,G3DSA:1.10.10.2600,IPR036162,PF13408, PS51737,G3DSA:3.40.50.1390,IPR025827,IPR006119,IPR038109, PF07508,IPR011109,SSF53041,PF00239,PTHR30461, PS51736,Coil,cd00338
MARSKKTECLPLERIGVIYARYSSHNQKEESIEQQVEECTSFALLNGIKIVHVYADKALSGRTDKRPQFQRLMRDAEKRSFSVVVAYKSNRIARDMLNALKYEDRLGKYGIETLYAKEEFGNTAAGRFALRTMMNVNQFYSENMAEDIKRGMLDNAENCKVNGALPLGYVSGPDKRYAIEPKEAEIVRGIYDKVLEGVSFVDIANDLNACGVRTKHGSLWNKCSFHRILTNDVYIGVYRHSGVVKEGGVPPILEREVFIAMQKYLETKKNPRGRHRENGDYLLTGKLRCGYCESFMVGVSGTSKTGDKHYYYTCNSRHAGNGCKKENVRRDTIEYTVAALTQQVVFKEDIIEWIATAAVKLAKEASGQNEIDAMEAELAEDRKATKNIMAAIEQGIFTATTKSRLLELEADIASLEQSIRDAKAISEGKLLEKERVVYFLTSLREGNLHSKTYQKRLIDTFVRAVYLWDDRIGIDYYYAGKDSMVKYSLSEIEADIGENIREVLKDSLTGHHDCRTL

SEQ ID NO: 4659 - protein, 517 aa, Unknown
  Description of Unknown: Integrase B4660 sequence
  PTHR30461:SF3,SM00857,G3DSA:1.10.10.2600,IPR036162,PF13408, PS51737,G3DSA:3.40.50.1390,IPR025827,IPR006119,IPR038109, PF07508,IPR011109,SSF53041,PF00239,PTHR30461, PS51736,Coil,cd00338
MNVVLYMRYSSDRQTEQSIEGQKRVCMDFCERQGYNVVGEYIDRATSAYKETAKRTNFCRMIRDSSNGLWQGVVVYKLDRFARNRYDSATYKVRLKKNGVKVISATENISDSPEGVILESVLEGMAEFYSKELSQKVSRGLNESAHKCNSTGGAIPLGYKTVNKKLTVDELNAQIVKEAFDLYAGGATISEICEKFNSQGYRTKKGTEFNKNSFKTMLRNEKYIGTYTYKDIRIEGGIPAIIDKETFETVQKRLSANAQAPARGKARVNYLLSQKLFCGHCGANMIGDSGRSKTGETYNYYSCSTRKRFHSCKKRTIRKDLIERIVAENAMRLITPEMINTIADMAIKCNREDIESDAIIPALTADLKEINTSINNLLKMVERGVESETLDSRLQELEKRKKDTESRLDAAKSEYLTLDKTVIVGWLSQFLAGDIEDEDFRRHLIDTLINSVTVWDEPDGGYKITTVYNLKGNTQTYRVNADGSSDMKRNSPPKEYNPNSLFFFKSLFGYTTKYRVE

SEQ ID NO: 4660 - protein, 517 aa, Unknown
  Description of Unknown: Integrase B4661 sequence
  PTHR30461:SF3,SM00857,G3DSA:1.10.10.2600,IPR036162,PF13408, PS51737,G3DSA:3.40.50.1390,IPR025827,IPR006119,IPR038109, PF07508,IPR011109,SSF53041,PF00239,PTHR30461, PS51736,Coil,cd00338
MTKNKKTDTVSEKCKAVIYARFSSDKQREESIEGQIRECTQFAKSQNLEIIGTYIDRALSARSDNRPDFLRMIADSSKGLFQYVVVYQLDRFSRSRYDSAVYKHKLKKNGVRVLSAKERIGDDPSSIILESMLEGYAEYYSAELSQKVKRGMTENVLEHKWTGGYVPLGYCLAPDKTLQIDPVGAEAVKIIYDKWIAGCRIMEIIRYLNDHNYVTSRKAKFRYSSLNRILTNPIYTGLYQWGSIEVADYAPAIITQKQFALAQEKIHHIKAHPRAKRRSANYALTGMIYCGVCGSPMTGQSGHSKSSALYHYYRCSTKNNYHDRGKKLNIKCTNRNISRDKLEDLVLQTTINILMNPEAVRMIAKQAVAAQEKDPAATEIDRIKEDKKLIQKKLNNSIKAVEAGIISTTLAANISQYEKEIADLDIKMEKIKLLSTPVKIDEIAVEFFLKSLLLNKKEHDKYRLDMFQTFIRRVVVYPDKVEIQYNYTATPHILENPVTKMMTGFSGCSRCERLVTR

SEQ ID NO: 4661 - protein, 517 aa, Unknown
  Description of Unknown: Integrase B4662 sequence
  PTHR30461:SF3,cd00338,SM00857,IPR036162,PF13408, IPR025827,G3DSA:3.40.50.1390,PS51736,IPR006119,SSF53041, PTHR30461,mobidb-lite,Coil,PF00239
MPKGTRAAIYARFSSHNQRSESIDIQVEKSREYCAQNGLDVVRVYSDYAQTGRDVQRVEFQRMMADAKLGLFDYVVIYKVTRIMRNRDEMALARIRLRKAGVEILYAGESLGEGSTRVLNLGMLEVLAEWESAIDSERIRDGINKNAQRGMANGRTHYGWDIVNGYYDVNEREAAVMHRMKNMLFAGSTVAEIKRAVAGERGKRGKPLTHGVITKLLRREQNCGVYDYAGVRIEDGMPALWSREDQDMINSILGSNGRKHNKTRDTNDYPLSGKMWCPECDQYYVGTCGTSKTGRVYHYYKCKKCKRTFRRDAVEEAVLDTVLETIKKPDIRQRIVDVMALYNEMNEEKEEPESKRIEREIKRIDTAFERIWQAIEDGIAPPGGKERVAMLREQKAALEADLRQAQANEGANLSGEAIAAWLDHIAQEPDAAEIIETFVRLIEVDGDELKLYFAFDYWGDDFQPKQKKTNPEKGSPNNPMVEPQKIFANPTIAANGREIKVSTNWLCIITLFSSKKS

SEQ ID NO: 4662 - protein, 517 aa, Unknown
  Description of Unknown: Integrase B4663 sequence
  PTHR30461:SF3,SM00857,G3DSA:1.10.10.2600,IPR036162, PF13408,IPR025827,G3DSA:3.40.50.1390,PS51737, IPR006119,IPR038109,PF07508,IPR011109, SSF53041,PTHR30461,PS51736,cd00338,PF00239
MQRAVIYARFSSDMQREESIDAQVRACKAYAKNKGYIVVDTYADEAKSGRDVTKRDAYNQMLADAMEDKFDVIIFHKIDRNSRNELNYFTFKDKLERLGISYEYAAQPIDTISPEGQVMETIMVGMSAYYSRNLAKETKKGLNENAYKALFNGGCPPLGYKIVDKKYVIDESEAAAVRLIFELYLAGKGYAEICRALDSKGFTTKSGKPFGKNSLYDILGNEKYIGTYTFNKIPKGKGKRNMHSQKRPDDYISIEDALPAIISKEDFFIVQAKRERNRCHAAKYTAKHDYLLSGKVFCGECGSAMVGHRVRQRYYYYGCTRKEQTPTSKCQQRMIRAEVLEHWVMQILERVVFTVSGMRRIADAIAKGYQEEESRHAAEQEALAKRKAAAEKKLNNIYKIFEEGEADEFDRQRLNQIKAELREINKSICEVSVKSVESLDNKKIVAFLTTIKSEIFVKNNIDYARRAIDLLVTNVTVTGTVIKVTLSTQNVCAYLVPRTRTQTSGYKFSISIDTKAA

SEQ ID NO: 4663 - protein, 517 aa, Unknown
  Description of Unknown: Integrase B4664 sequence
  PTHR30461:SF3,SM00857,G3DSA:1.10.10.2600,IPR036162,PF13408, IPR025827,G3DSA:3.40.50.1390,PS51737,IPR006119,IPR038109, PF07508,IPR011109,SSF53041,PF00239,PTHR30461, PS51736,Coil,cd00338
MNVVLYMRYSSDRQTEQSIEGQKRVCMDFCERQGYNVVGEYIDRATSAYKETAKRTNFCRMIRDSSNGLWQGVVVYKLDRFARNRYDSATYKVRLKKNGVKVISATENISDSPEGVILESVLEGMAEFYSKELSQKVSRGLNESAHKCNSTGGAIPLGYKTVDKKLTVDEPSAQIVKEAFDLYAGGATISEICEKFNSQGYRTKKGTEFNKNSFKSMFKNEKYIGTYTYKDIRIEGGIPAIIDKETFETVQKKLSANAQAPARGKARVNYLLSQKLFCGHCGANMIGDSGRSKTGETYNYYSCSTRKRFHSCKKRTIRKDLIERIVAENAMRLITPEMINTIADMAIKCNREDIESDAIIPALTADLKEINTSIKNLLKMVERGVESETLDSRLKELEKRKKDTESRLDAAKSEYLTLDKTVIVGWLSQFLSGDIEDEDFRRHLIDTLINSVTVWDEPDGGYKITTVYNLKGNTQTYRVNADGSSDMKRNSSPKEYNPNSLFFFKSLFGYTIKYRVE

SEQ ID NO: 4664 - protein, 517 aa, Unknown
  Description of Unknown: Integrase B4665 sequence
  PTHR30461:SF3,cd00338,SM00857,G3DSA:1.10.10.2600,IPR036162, PF13408,PS51737,IPR025827,G3DSA:3.40.50.1390,IPR006119, IPR038109,PF07508,IPR011109,SSF53041,PTHR30461, PS51736,Coil,PF00239
MCAKKKPAMLEPDMQDAVIYTRYSSHNQRDCSIEQQVADCEIFARQNNLRVVKVYADRHLSGTTDNRPQFQQMLKDATHGHWAYVICWKIDRFARNRYDSATYKFRLKKAGVRVLYAKESIPDGPEGILLESVLEGSAEYYSAALAQNIRRGMKYNAEQCKVNSGSIPFGYCKGPDGRFAIHEANAEVVREIFRKAAAGMPFVDIANDLNSRGLKTSRGGRWNKGSFRLLMNEAYIGVYHFSDTRIEGGMPALIDQGTFWAANERLKANSSVRGRHQDGGDYLLTGKLKCAHCGSYMIGFSGTGKSGELHYYYGCQKRRRERACKKANVPREWIERVVVKAALDYVLRPDVMEWIADAVMEYQEREAASAQLAALTAELEENQKATDNVMKAIEAGIITSTTKQRLLDLEAKAQDLKRAIELEKLSHVRLERDQVLFWLDRFRGGSLQSQEFRRKVIDAFVSVVYLSDDHLRIAFNYSGGSNAEADFDLVMDAEAAAGELSKKFAQGHVASTNIKAT

SEQ ID NO: 4665 - protein, 517 aa, Unknown
  Description of Unknown: Integrase B4666 sequence
  PTHR30461:SF3,SM00857,G3DSA:1.10.10.2600,IPR036162,PF13408, IPR025827,G3DSA:3.40.50.1390,PS51737,IPR006119,IPR038109, PF07508,IPR011109,SSF53041,PTHR30461,PS51736, cd00338,PF00239
MQRAVIYARFSSDMQREESIDAQVRACKTYAKNKGYIVVDTYADEAKSGREITKRDAYNKMMADAMEDKFDVIIFHKIDRNSRNELNYFTFKDKLERLGISYEYAAQPIDTVSPEGQVMETIMVGMSAYYSRNLAKETKKGLNENAYKALFNGGCPPLGYKIVDKKYVIDENEAAAVRLIFELYLAGKGYAEICRALDSKGFTTKSGKPFGKNSLYDILGNEKYIGTYTFNKIPKGKGKRNMHSQKRPDDYISIEDALPAIISKEDFFIVQAKRERNRCHAAKYTAKHDYLLSGKVFCGECGSAMVGHRVRQRYYYYGCTRKEQTPTSKCQQRMIRAEVLEHWVMQILERVVFTVSGMRRIADAIAKGYQEEESRHAAEQEALAKRKAAAEKKLNNIYKIFEEGEADEFDRQRLNQIKVELREINKSIYEASVKSVESLDNKKIVAFLTTIKSEIFVKNNIDYARRAIDLLVTNVTVTGTVIKVTLSTQNVCAYLVPRTRTQPSAYNFSISIDTKAA

SEQ ID NO: 4666 - protein, 517 aa, Unknown
  Description of Unknown: Integrase B4667 sequence
  PTHR30461:SF3,SM00857,G3DSA:1.10.10.2600,IPR036162,PF13408, PS51737,G3DSA:3.40.50.1390,IPR025827,IPR006119,IPR038109, PF07508,IPR011109,SSF53041,PF00239,PTHR30461, PS51736,Coil,cd00338
MTKNKKTDTVSEKCKAVIYARFSSDKQREESIEGQIRECTQFAKSQNLEIIGTYIDRALSARSDNRPDFLRMIADSSKGLFHYVVVYQLDRFSRSRYDSAVYKHKLKKNGVRVLSAKERIGDDPSSIILESMLEGYAEYYSAELSQKVKRGMTENVLEHKWTGGYVPLGYCLAPDKTLQIDPIGAEAVKIIYDKWLAGCRIMEIIRYLNDHNYVTSRKAKFRYSSLNRILTNPIYTGLYQWGSIEVADYAPAIITQKQFALAQEKIHHIKAHPRAKRRSANYALTGMIYCGVCGSPMTGQSGHSKSGALYHYYRCSTKNNYHNRGKKLNVKCTNRNISREKLEDLVLQTTINILMNPEAVHMIAKQAVAVQQKDPASMELDRIKEDKKSIQKKLNNSIKAVEAGIISATLAANISQYEKEIADLDIKMEKIKLSSTPVKIDEIAVEFFLKSLLLNKKEHDKYRLDMFQTFIRRVIVYPDKVEIQYNYTATPHILENPVTKMMTGNPGCSRCERLVTR

SEQ ID NO: 4667 - protein, 517 aa, Unknown
  Description of Unknown: Integrase B4668 sequence
  PTHR30461:SF3,cd00338,SM00857,G3DSA:1.10.10.2600,IPR036162, PF13408,IPR025827,PS51737,G3DSA:3.40.50.1390,IPR006119, IPR038109,PF07508,IPR011109,SSF53041,PTHR30461, PS51736,Coil,PF00239
MARSKKTECLPLERIGVIYARYSSHNQKEESIEQQVEECMNFASLNGIKIVHVYADKALSGRTDKRPQFQRLMRDAEKRSFSVVVAYKSNRIARDMLNALKYEDRLGKYGIETLYAKEEFGNTAAGRFALRTMMNVNQFYSENMAEDIKRGMLDNAENCKVNGALPLGYVSGPDKRYAIEPKEAEIVRRIYDKVLEGVSFADIANDLNACGVRTKHGSLWNKCSFHRILTNDVYIGVYRHSGVVKEGGVPPILEREVFIAMQKYLETKKNPRGRHRENGDYLLTGKLRCGYCESFMVGVSGTSKTGDKHYYYTCNGRHAGSGCKKENVRRDTIEYTVAALTQQVVFKEDIIEWIATAAVKLAKEASGQNEIDAMEAELAEDRKATKNIMAAIEQGIFTATTKSRLLELEADIASLEQSIRDAKAISEGKLLEKERVVYFLTSLREGNLHSKTYQKRLIDTFVRAVYLWDDRIGIDYYYAGKDSMVKYSLSEIEADIGENIREVLKDSLTGHHDCRTL

SEQ ID NO: 4668 - protein, 517 aa, Unknown
  Description of Unknown: Integrase B4669 sequence
  PTHR30461:SF3,SM00857,G3DSA:1.10.10.2600,IPR036162,PF13408, IPR025827,G3DSA:3.40.50.1390,PS51737,IPR006119,IPR038109, PF07508,SSF53041,IPR011109,PF00239,PTHR30461, PS51736,Coil,cd00338
MTAVIYARYSSDNQREESIEGQIRECTAYAEKNGITIVKHYIDRAISAKTDNRPQFQQMIKDSDKKLFDIVLVWKLDRFARNRYDSARYKTQLKKNGVKLMSATEIISEGPEGIILESVLEGYAEYYSADLAEKVVRGQTENILKGRCNGGRGTFGYTLDSERKFHIDPLASPFVLESFTKYRDGLTMKEIRDWLNENGIKNPVGGEFTYNSVEHMLKNRRYIGELKFRDVVVPDAIPPIVPLELFDDVQEKIAKNKKAPARRKAEDDYLLTTKLHCGCCGALMFGESGTSRTGEVHRYYKCATAKKKKGCKKKTVRKQWLEDLVVNQTMQLVRDDAAMESIIAKVMELQDRENTNLPLYEKQLRDAESGIQNMLNAIQAGILTSSTKERLEQLEETKRELEARIAEEKLAKPKIKEEFIRFWLMRFRKLDMSLKDQRQALVDTFINSIYLYDDKVLITFNYKEGTQTITFEEAAEAASKGNGSDLDCFTAPKTSTHCVLVFLFVRGSRPRTTLFII

SEQ ID NO: 4669 - protein, 517 aa, Unknown
  Description of Unknown: Integrase B4670 sequence
  PTHR30461:SF3,SM00857,G3DSA:1.10.10.2600,IPR036162,PF13408, IPR025827,G3DSA:3.40.50.1390,PS51737,IPR006119,IPR038109, PF07508,IPR011109,SSF53041,PF00239,PTHR30461, PS51736,Coil,cd00338
MTAVIYARYSSDNQREESIEGQIRECTAYAEKNGITIVKHYIDRAISAKTDNRPEFQQMIKDSDKKLFDIVLVWKLDRFARNRYDSARYKTQLKKNGVKLMSATEIISEGPEGIILESVLEGYAEYYSADLAEKVVRGQTENILKGRCNGGRGTFGYTLDSERKFHIDPLTSPFVLESFKKYNEGSTMKEIRDWLNENGIKNPVGGAFTYNSVEHMLKNRRYIGELKFRDVVVPDAIPPIIPLELFEDVQEKIAKNKKAPARRKAEDDYLLTTKLFCGYCGALMFGESGTSRTGEVHRYYKCATAKKHKGCKKKTVRKQWLEDLVVNQTMQLVKDDAAMESIIAKVMELQNKENTNIPLYEKQLRDAESGIQNMLNAIQAGILTSSTKERLEQLEETKRELEARIAEEKLAKPKVTEEFIRFWLLRFRKLDMSLKDQRQALVDTFINAIYLYDDKVLITFNYKEGTQTITFEEAAQAASKRNGSDLDCFTAPKTSTHCVLVFLFVRGSRPRTTLFII

SEQ ID NO: 4670 - protein, 517 aa, Unknown
  Description of Unknown: Integrase B4671 sequence
  PTHR30461:SF3,cd00338,SM00857,G3DSA:1.10.10.2600,IPR036162, PF13408,PS51737,G3DSA:3.40.50.1390,IPR025827,IPR006119, IPR038109,PF07508,IPR011109,SSF53041,PTHR30461, PS51736,Coil,PF00239
MCAKKKPAMLEPDMQDAVIYTRYSSHNQRDCSIEQQVADCEIFARQNNLRVVKVYADRHLSGTTDNRPQFQQMLKDASHGHWAYVICWKIDRFARNRYDSATYKFRLKKAGVRVLYAKESIPDGPEGILLESVLEGSAEYYSAALAQNIRRGMKYNAEQCKVNSGSIPFGYCKGPDGRFAIHEANAEVVREIFRKAAAGMPFVDIANDLNSRGLKTSRGGRWNKGSFRLLMNEAYIGVYHFSDTRIEGGMPALIDQGTFWAANERLKANSSVRGRHQDGGDYLLTGKLKCAHCGSYMIGFSGTGKNGELHYYYGCQKRRRERACKKANVPREWIERVVVKAALDYVLRPDVMEWIADAVMEYQEREAASAQLAALTAELEENQKATDNVMKAIEAGIITSTTKQRLLDLEAKAQDLKRAIELEKLSHVRLERDQVLFWLDRFRGGSLQSQEFRRKVIDAFVSVVYLSDDHLRIAFNYSGGPNAEADFDLVMDAETAAGELSKKFAQGHVTSTNIKAT

SEQ ID NO: 4671 - protein, 517 aa, Unknown
  Description of Unknown: Integrase B4672 sequence
  PTHR30461:SF3,SM00857,G3DSA:1.10.10.2600,IPR036162,PF13408, PS51737,IPR025827,G3DSA:3.40.50.1390,IPR006119,IPR038109, PF07508,IPR011109,SSF53041,PTHR30461,Coil, PS51736,cd00338,PF00239
MATVKEIAPHALQPEHLRVAAYCRVSSDSEDQLHSYAAQICNYTEVIAQHDGWDLVDVYADEGMTGTRVDKRDDFNRMMRDCRKGKIDCILVKSVARFARNTKECLASLRELSGMGVTVRFEKENIDTGTLTTELMVSVSGSLAQQESLSISANQRLSYQHRMECGEFITCSAPYGYRIKDKKNLEILPEEAAAVRWAFDAYLKGNSSKWIAEQLTAKGIPTQNGAEKWQETSIRYLLTNEKYIGDTLCQKSYSCGFPFVQKRNRGERMQYYVENSHPAIIDRDTFEKVQELLRKKAQKEKRHRERSPFALKILCGNCGTMFLRRTSKNGYVTWVCRTHDRSADACHVGRIPESEIRAAFLRMYRKLKCNADTILKPAMEQMNALDTVLQQNNPKTLTINRAIAEATEESHKISTLRVNGLLDADTCTARMNVISAKLAQLRRERRRLAENETLDEVMDALRKVRQTILDGPEQMDDFDDDLFESLVEKIIAESQTEIRFRLYGGLELRERLEVAVR

SEQ ID NO: 4672 - protein, 517 aa, Unknown
  Description of Unknown: Integrase B4673 sequence
  PTHR30461:SF3,cd00338,SM00857,G3DSA:1.10.10.2600,IPR036162, PF13408,PS51737,G3DSA:3.40.50.1390,IPR025827,IPR006119, IPR038109,PF07508,SSF53041,IPR011109,PTHR30461, PS51736,Coil,PF00239
MCAKKKPAMLEPDMQDAVIYTRYSSHNQRDCSIEQQVADCEIFARQNNLRVVKVYADRHLSGTTDNRPQFQQMLKDAAHGHWAYVICWKIDRFARNRYDSATYKFRLKKAGVRVLYAKESIPDGPEGILLESVLEGSAEYYSAALAQNIRRGMKYNAEQCKVNSGSIPFGYRKGPDGRFAIHEANAEVVREIFRKAAAGMPFVDIANDLNSRGLKTSRGGRWNKGSFRLLMNEAYIGVYHFSDTRIEGGMPALIDQGTFWAVNERLKANSSVRGRHQDGGDYLLTGKLKCAHCGSYMIGFSGTGKNGELHYYYGCQKRRRERACKKANVPREWIERVVVKAALDYVLRPDVMEWIADAVMEYQEREAASAQLAALTAELEENQKVTDNVMKAIEAGIITSTTKQRLLDLEAKAQDLKRAIELEKLSHVRLERDQVLFWLDRFRGGSLQSQEFRRKVIDAFVSVVYLSDDHLRIAFNYSGGSNAEADFDLVMDAEAAAGELSKKFAQGHVASTNIKAT

SEQ ID NO: 4673 - protein, 517 aa, Unknown
  Description of Unknown: Integrase B4674 sequence
  PTHR30461:SF3,SM00857,G3DSA:1.10.10.2600,IPR036162,PS51737, G3DSA:3.40.50.1390,mobidb-lite,IPR006119,IPR038109,SSF53041, IPR011109,PF00239,PTHR30461,PS51736,Coil, cd00338
MPKGTRAAIYARFSSHNQRSESIDIQVEKSREYCNEHGLDVVRVYSDYAQTGRDVQRVEFQRMMKDAKLGIFDYVVIYKVTRIMRNRDEMALARIKLRKAGVEILYAGESLGEGSTRVLNLGMLEVLAEWESAIDSERIRDGINKNAQRGMANGRTHYGWDIVNGYYEVNEREAAVMHRMKNMLFAGSTVAEIQRAVAGERGKRGKPLTHGVITKLLRREQNCGVYDYAGVRIEDGMPALWSREDQDMINSILGSNGRKHNKTRDTNDYPLSGKMWCPECGQYYVGTCGTSKTGRVYHYYKCKKCRRTFRRDAVEEAVLDTVLETIKKPDVRQRIVDAMALYDEMNEEKEEPESKRIEREIKRIDAAFERIWQAIEDGIAPPGGKERVDMLREQKAALEADLRQAQASESAHLSGEAIAAWLDHIAQEPDAAEIIETFVRLIEVDGDELKLYFAFDYWGDDFQPKQKKTNPEKGSPNNPMVEPQKIFANPTIAANGREIKVSNNWFCIVTLFNSKKS

SEQ ID NO: 4674 - protein, 517 aa, Unknown
  Description of Unknown: Integrase B4675 sequence
  PTHR30461:SF3,SM00857,G3DSA:1.10.10.2600,IPR036162,PF13408, PS51737,IPR025827,G3DSA:3.40.50.1390,IPR006119,IPR038109, PF07508,SSF53041,IPR011109,PTHR30461,Coil, PS51736,cd00338,PF00239
MPRKKKLQEVGGLRLVAYYRYSGGSGQTEQSIEGQRRDCEAYAKLHGMTIQHEYIDRHISGKTDDRVSFQQMIRDSDKGAFDMVICWKTDRFARNRYDSAVYKKRLRDNGVEIIYAAESNISGAEGIIIEGLMESLAEYYSAELAEKMRRGMRESALKCQAINRCRPLGFTTDAGKKFIIDERTAPAVRFIFEHYAAGESAAYIVDQLNEKGYRTSQGNEFNKSSINRIIQNEMYRGVYISKAYDVRIEGGVPAIVDDELWRRAQAMAKLNKQKRAKYSAKADYFLSGKLYCGECGCLMKGISGHSSTNGEVYRYYACSNPKCKKHNVPKEELEGKVIQAIIDNLLQPEAMEALAEAMVAVQETDADKPNAEREAIQQELADVRRRSKNILDAIENGTANPHLTARLDELTERENTLRFQLSTLTDEKPLRFTKEEYLFLLEQFLIDPAERNEDYGRRVVHTFVTSMEVSDSKLLIYFNISEETADKNKNASPSELQKESSTVKRLVRVARIELTAS

SEQ ID NO: 4675 - protein, 517 aa, Unknown
  Description of Unknown: Integrase B4676 sequence
  PTHR30461:SF3,SM00857,G3DSA:1.10.10.2600,IPR036162,PF13408, IPR025827,G3DSA:3.40.50.1390,PS51737,IPR006119,IPR038109, PF07508,IPR011109,SSF53041,PF00239,PTHR30461, PS51736,Coil,cd00338
MKTAVIYARYSSDKQTEQSIEGQLYDCYNYAKQHGITVVQEYIDRAMTGKNDDRPAFQQMLHESAMHKWDSVIVWKLDRFARNTIDSAVNRQILAKNGVKLLSVMESFGDDASGQMMTHIIEAINEYYSADLREKTIRGMRQSAMKAQTTGHIPLGYKVVDKKLVIDDETRIIPETVFRMYAEGERLTDIAEHLNAQGYRNRRGRPFTTNSFYNMLANEKYIGIYKYDDIVIEGGIPQMIPNEVFEAVREKLITNRKRAAKNTAKADYYLSGKLYCGHCGEPMSGLSGTGRNGVKHYYYRCNGVQKKSGCHKKLENKYLIEDEVCRAARSAFEQMDKAETAETIYQMYLQTVRNEYAPAELEKELTECTKQAENVVNAIAQTGGNQLLYDKVRELEERKEQLSSALRLSQAMTDNVPSVEQITVFIDDILATDINTTEGKKAIADIMISKVYVYDDKLTVIFKDKDGKSVDIPLSAVSDSSSADCAPSALGSHIVQIRTLHRVRIFLCFIRGRLCLG

SEQ ID NO: 4676 - protein, 517 aa, Unknown
  Description of Unknown: Integrase B4677 sequence
  PTHR30461:SF3,SM00857,IPR036162,G3DSA:3.40.50.1390,IPR006119, PF07508,SSF53041,IPR011109,PTHR30461,PS51736, cd00338,PF00239
MLLNYTKMEEKTKAAAYVRMSTEHQKYSPANQMAAIRDYADKHGYEIIQIYSDEGKSGLNIAGRASLQRMIDDVQNKNVKYKAILVLDVTRWGRFQDADESAYYEYICKRSGVRVQYCAEQFENDDSPISTIVKGVKRTMAAEYSRELSGKVFTGQSRLITLGYRQGGPAGYGLRRMLIDEHGNHKGILARGEHKSIATDRVILVPGSEEEQENVRWMYRAFVCEGRNEGWIADELNRRGVRTDLNKEWTKATVREVLSNEKYIGNNIFNRISFKLKIKRVRNPEDMWIRKDQAFQGIVDPSLFFMAKGIFAARCRKLSDEEMLQKLKELQDKKGYLSAIVIDEAEDMPSSAAYSGRFGGLVRAYRLIGFDPGRDFRYVEINRYLRELHQENIQDTIQKLMNCGAKVKLNESGNLLNVNDMFSASLVICRCNSLNNGKYRWKVRFDTILNPDVTIAVRMKADNASVLDYYLLPSLDFRLPNIKLDEHNAGFIDSYRFENMDYLYEMAKCISIREVKQ

SEQ ID NO: 4677 - protein, 517 aa, Unknown
  Description of Unknown: Integrase B4678 sequence
  PTHR30461:SF3,cd00338,SM00857,G3DSA:1.10.10.2600, IPR036162,PF13408,IPR025827,G3DSA:3.40.50.1390, PS51737,IPR006119,IPR038109,PF07508, SSF53041,IPR011109,PTHR30461,PS51736,Coil,PF00239
MCAKKKPAMLEPDMQDAVIYTRYSSHNQRDCSIEQQVADCEIFARQNNLRVVKVYADRHLSGTTDNRPQFQQMLKDAAHGHWAYVICWKIDRFARNRYDSATYKFRLKKAGVRVLYAKESIPDGPEGILLESVLEGSAEYYSAALAQNIRRGMKYNAEQCKVNSGSIPFGYRKGPDGRFAIHEANAEVVREIFRKAAAGMPFVDIANDLNSRGLKTSRGGRWNKGSFRLLMNEAYIGVYHFSDTRIEGGMPALIDQGTFWAANERLKANSSVRGRHQDGGDYLLTGKLKCAHCGSYMIGFSGTGKNGELHYYYGCQKRRRERACKKANVPREWIERVVVKSALDYVLRPDVMEWIADAVMEYQEREAASAQLAALTAELEENQKATDNVMKAIEAGIITSTTKQRLLDLEAKAQDLKRAIELEKLSHVRLERDQVLFWLDRFRGGSLQSQEFRRKVIDAFVSVVYLSDDHLRIAFNYSGGSNAEADFDLVMDAEAAAGELSKKFAQGHVTSTSTKAT

SEQ ID NO: 4678 - protein, 516 aa, Unknown
  Description of Unknown: Integrase B4679 sequence
  PTHR30461:SF3,SM00857,G3DSA:1.10.10.2600,IPR036162,PF13408, PS51737,IPR025827,G3DSA:3.40.50.1390,IPR006119,IPR038109, PF07508,IPR011109,SSF53041,PF00239,PTHR30461, PS51736,Coil,cd00338
MARKKIKKGDGQRLVAYYRYSGGSGQTEQSIEGQRRDCEAYARLHGMTIQHEYIDRHISGKTDDRGAFQQMIADSDKGAFDYVICWKTDRFARNRYDSAVYKKRLRDNGVEILYAAESNISGSEGIIIEGLMEALAEYYSAELSEKMRRGMRESALKGRAISRCRALGLTTDSDKHFIIDPKTAPIVHFIFERYAAGDSSMSIVEQLNAKGLRTSQGNQFNKCSIPRIIQNEAYRGVYVSKAYNVRIEGAIPAIIDDELWERAQIMLKLNQQKRTKNAAKADYFLSGKLFCKECGSPMKGVSGHSSTNGEVYRYYACSNPKCHKHNIPKDDLEGKVVQSICDHLLQPESMDALADAMIEVQKQDAVKPNAERLAVEENLADVRRRSKNILDAIENGTANPQLYARLDELTERENTLSYQLATLQNEKAIVFTKEQFLFLLEQFCIEPSERSEEYGRRLINTFVTNMEVSDSELFIYFNVSEETVNKTKNAPQKNFQKESSSEMRLVRVARIELTAS

SEQ ID NO: 4679 - protein, 516 aa, Unknown
  Description of Unknown: Integrase B4680 sequence
  PTHR30461:SF3,SM00857,G3DSA:1.10.10.2600,IPR036162,PS51737, G3DSA:3.40.50.1390,IPR006119,IPR038109,PF07508,IPR011109, SSF53041,PTHR30461,Coil,PS51736,cd00338, PF00239
MSYCIYLRKSRKDLEAEQHGEGETLARHERALLSLAKKNNLIISSIYREVVSGETIAARPVMQQLLHEVEQNLWDGVLVMEVERLARGDTIDQGVVQRAFQYSNTLIITPSKTYDPANEFDEEYFEFGLFMSRREYKTIKRRMQNGRYAAISEGKWPYNSAPYGFRRMKLEKEKGWTLAFDENEAPVVRLIFSMFTGPERVGIRSITRTLNSYGTKPRNSKLWSESTVRGILSNVVYDQCVKIGERKVVRTVENGVLTTARPRTSDYTIVPGRHPRLIDHDVFAEAQSYLGCGSPKPAGSNIIKNPLAGIIVCSECKKKMIRRPPSGTASRVPYDLMLCSTYDCPTIGSPLDLVEREVYNALSDWVEGYRLSGQMPSKSLIPEKEVLLESAQQTLDQLLRQKGTMYDLLEQGVYSTEVFLERSDSLQNRISEAESNVAQLKLELDKERQREANIEQFLPACEDLLSCYWDLSIPERNRLLKLLIESIEYKKLTKNKRGHLNEPNFELTIKPRIPRK

SEQ ID NO: 4680 - protein, 516 aa, Unknown
  Description of Unknown: Integrase B4681 sequence
  PTHR30461:SF3,cd00338,SM00857,IPR036162,PF13408, IPR025827,G3DSA:3.40.50.1390,PS51737,IPR006119,PF07508, IPR011109,SSF53041,PTHR30461,PS51736,Coil, PF00239
MKAIYVRQSLDKKDSLSIDAQIEDCINLCKRSGWNDYKVYKDKGWSAKNLDRPAFRQLNQDVQNGLIDGVICYKIDRISRSIRDFVNLIVDYQDLGVHFISFADNINTAAPGGMMMATLFVSLAQMEREAIITRVTDNYYYRCELGFWGGGPAPYGFRLVKTTENGQKHTILDPVPEEAEVIRTFFAWYLEPGATVRSIMNRAHLAGMQTRSGSDWTSRVLSDMLSKPLYAPNSMDIYNFYASQGVRVKISPEQCDGKQSLNIFGLRDRNSAHPKRSRPVSEMTLAIAKHKPIVDSDTYLKVQYKKKSRLAVTPRAGTSRTAVLSGLVRCGYCGRAMSPSGAKNGRYFTCSGRRNYAKGVCQGKSVKMDFLDDYVLNDLADFISQPEIKSMFKDGKAQRIPSSEQAKINEYKQRIATIDIDIQKLLDACLTSGDVAVKYLNERIDLLDTEKQNLQAEILAIQNKSNRKLELEGLDINSAPTALAGGEFDTKKYLCNFFIEQIIFYDRDNVQIRYKM

SEQ ID NO: 4681 - protein, 516 aa, Unknown
  Description of Unknown: Integrase B4682 sequence
  PTHR30461:SF3,IPR036162,PS51737,IPR011109,PTHR30461, PS00397,PF00239,G3DSA:1.10.10.2600,IPR006119,SSF53041, cd00338,SM00857,IPR025827,IPR038109,PS51736, IPR006118,PF13408,G3DSA:3.40.50.1390,PF07508,Coil
MSKKVMRKSTESTDRIRTGAAYIRVSTDDQLEYSPESQLEEIKKYCLQHNILLPSEYIFVEEDGRSGRKSSNRYAFQNMIATAKTKPKPFDVVVLWKFSRFARNQDESTFYKSMLRKKLGIDVVSVSEPLIDGMYGRLIEMIIEWQDEFYSVNLSGEVRRSMLSRARKGLYNGKMPLGYTKAPNENPVIEEQAAAIVRKIFDMYASGSDINYITRDLNDHGYKTKTGKRFDQEGVIYILENPFYIGKVRYNMRESSATSTLRDPEEWIISDSHHPPIIDQNTWDIVQERRERSKKIMQRYEHPVSHTKHWLSGLVKCPVCGKSLSHKEGYPRKSTHGGSYISGEGFQCLGYMKGLHTGSQYISAKKLTDAVISSLHEVLESVTDVSFELVRTYEPTVELDRQRYQRELASLDRKLERIKEAYLNEIDTLEDYKRNKEMIEKRRADLEALLSELTTAASGPENYKEQFLSRVQSVLDIIESDAPNDLKAEALRGIVRKIVFYKDTNTLEFHYYLMVE

SEQ ID NO: 4682 - protein, 516 aa, Unknown
  Description of Unknown: Integrase B4683 sequence
  PTHR30461:SF3,SM00857,G3DSA:1.10.10.2600,IPR036162,PF13408, PS51737,IPR025827,G3DSA:3.40.50.1390,IPR006119,IPR038109, PF07508,IPR011109,SSF53041,PTHR30461,PS51736, cd00338,PF00239
MQRAVIYARFSSDMQREESIDAQVRACKAYAKNKGYIVVDTYADEAKSGRDVTKRDAYNQMLADAMEDKFDIIIFHKIDRNSRNELNYFTFKDKLEKLGIRYEYAAQPIDALSPEGQMMETMMVGMAAYYSRNLAKETKKGLNENAYKALFNGGCPPLGYKIVDKKYVIDEQEAAAVRLIFELYLNGYGYAAICMELSAKGYTTKAGKAFAKNSLHDILCNEKYIGTYTFNKIPRKKGGRNSHAAERPEDFISIENAFPAIISKDDWALVRAKMDRNRHRAASYTAKEKYLLSGKVFCGHCGSAMVGHRIRKRYCYYGCTRKEQTPTSKCPQKMIRAEVLEHWVLQILERVVFTVGGMRRIADAIVDAYEAEQKEQAGSQATLLQRKAVAEKKLNNLYKIFEEGNADEFDRQRLNQIKAELREINKSICETSVKPAKLLSKQKIAAILAAMKDEIFVKKNSYYVQQAVDLLVDHVTITDKVLKITLSTQNVCAYLVPRNRDGMSVYTFTIAINLAA

SEQ ID NO: 4683 - protein, 516 aa, Unknown
  Description of Unknown: Integrase B4684 sequence
  PTHR30461:SF3,IPR036162,PS51737,IPR011109,PTHR30461, PS00397,PF00239,G3DSA:1.10.10.2600,IPR006119,SSF53041, cd00338,SM00857,IPR025827,IPR038109,IPR006118, PF13408,G3DSA:3.40.50.1390,PF07508,Coil
MAKKVMRKSAESTDRIRTGAAYIRVSTDDQLEYSPESQLEEIKRYCLQHNILLPSEFIFVEEDGRSGRKSSNRYAFQNMIATAKTKPKPFDVIVLWKFSRFARNQDESTFYKSMLRKKLGIDVVSVSEPLIDGMYGRLIEMIIEWQDEFYSVNLSGEVRRSMLSRARKGLYNGKMPLGYTKAPNENPVIEEQESAIVRKIFDMYATGSDINYITRDLNDHGYKTKTGKRFDQEGVIYILENPFYIGKVRYNMRESSATSTLRDPEEWIISDSHHEPIIDMDTWNIVQERREHSKKLMQRYEHPVSHTKHWLSGLVKCPVCGKSLSHKEGYPRKSTHGGSYISGEGFQCLGYMKGLHTGSQYISAKKLTSAVITSLHEVLESVTDVSFELVRTYEPTVELDRQRYQRELASLDRKLERIKEAYLNEIDTLEDYKRNKEMIEKRRADLEALLSELTTAASGPENYKEQFLSRVQSVLDIIESDAPNDLKAEALRGIVRKIVFYKDTNTLEFHYYLMVE

SEQ ID NO: 4684 - protein, 516 aa, Unknown
  Description of Unknown: Integrase B4685 sequence
  PTHR30461:SF3,SM00857,G3DSA:1.10.10.2600,IPR036162,PF13408, IPR025827,G3DSA:3.40.50.1390,PS51737,IPR006119,IPR038109, PF07508,IPR011109,SSF53041,PTHR30461,Coil, PS51736,cd00338,PF00239
MARRKKVSPGNRLVAYYRYSGGSQQTEQSIEGQRRDCEAYARQHGLTIVHEYIDRHISGRGVESRLAFQQMIADSSKHLFDLVICWKTDRFARNRYDSAVYKKKLRDNGVRILYAAESSVEGPEGIILEGLMESLAEYYSAELAQKMRRGMRESALKGKAINPNRPLGLTTDEHKRFIIDEKNAPTIRFIFEHYAAGESSASIVDQLNAAGLRTSKGNSFNKCSIPRIIQNEAYHGVYICKAYDVRIDGAVPAIIDDDLWKRAQKMLTLNKQHRAPHSSHADYLLSGKLFCGCCHSLMRGISGHNCRNDVYYYYACGNKADGGTCKKKNIPKDVAENLVVNAICENILRPDTLEDLADAIAAAQQADVNQPDPERAMLEQNLADVRRKINNIIESIENGTASSRLSARLADLEQQESTLNYQLESLKEVHPPVLDRERILFLLEQFLISPNERTEDYNRRIIDTFVNRIEITDTEMLIYFNLSEASASEKQKNSQSNNCSTGNHLVRVARIELTAS

SEQ ID NO: 4685 - protein, 516 aa, Unknown
  Description of Unknown: Integrase B4686 sequence
  PTHR30461:SF3,SM00857,IPR006118,G3DSA:1.10.10.2600,IPR036162, PS51737,G3DSA:3.40.50.1390,Coil,IPR006119,IPR038109, PF07508,SSF53041,IPR011109,PTHR30461,PS00397, PS51736,cd00338,PF00239
MSKKVMRKSTESTDRIRTGAAYIRVSTDDQLEYSPESQLEEIKKYCLQHNILLPSEFIFVEEDGRSGRKSSNRYAFQNMIATAKTKPKPFDVIVLWKFSRFARNQDESTFYKSMLRKKLGIDVVSVSEPLIDGMYGRLIEMIIEWQDEFYSVNLSGEVRRSMLSRARKGLYNGKMPLGYTKAPNENPVIEEQAAAIVRKIFDMYASGSDINYITRDLNDHGYKTKTGKRFDQEGVIYILENPFYIGKVRYNMRESSATSALRDPEEWIISDSFHDPIIDMDTWNIVQERRERSKKLMQRYEHPVSHTKHWLSGLVKCPVCGKSLSHKEGYPRKSTHGGSYVSGEGFQCLGYMKGLHTGSQYISAKKLTGAVISSLHEVLESVTDVSFELVRTYEPTVELDRQRYQRELASLDRKLERIKDAYLNEIDTLEDYKRNKDMIEKRRADLEALLSELTTAASGPENYKEQFLNRVQSVLDIIESDAPNDLKAEALRGIVRKIVFYKDTNTLEFHYYLMVE

SEQ ID NO: 4686 - protein, 516 aa, Unknown
  Description of Unknown: Integrase B4687 sequence
  PTHR30461:SF3,IPR036162,PS51737,IPR011109,PTHR30461, PS00397,PF00239,G3DSA:1.10.10.2600,IPR006119,SSF53041, cd00338,SM00857,IPR025827,IPR038109,PS51736, IPR006118,PF13408,G3DSA:3.40.50.1390,PF07508,Coil
MSKKVMRKSTESTDRIRTGAAYIRVSTDDQLEYSPESQLEEIKKYCLQHNILLPSEYIFVEEDGRSGRKSSNRYAFQNMIATAKTKPKPFDVVVLWKFSRFARNQDESTFYKSMLRKKLGIDVVSVSEPLIDGMYGRLIEMIIEWQDEFYSVNLSGEVRRSMLSRARKGLYNGKMPLGYTKAPNENPVIEEQEAAIIRKIFDMYASGSDINYITRDLNDYGYKTKTGKRFDQEGVIYILENPFYIGKVRYNMRESSATSTLRDPEEWIISDSHHEPIIDMDTWNIVQERREHSKKLMQRYEHPVSHTKHWLSGLVKCPVCGKSLSHKEGYPRKSTHGGSYISGEGFQCLGYMKGLHTGSQYISAKKLTSAVITSLHEVLESVTDVSFELVRTYEPTVELDRQRYQRELASLDRKLERIKEAYLNEIDTLEDYKRNKEMIEKRRADLEALLSELTTAASGPENYKEQFLSRVQSVLDIIESDAPNDLKAEALRGIVRKIVFYKDTNTLEFHYYLMVE

SEQ ID NO: 4687 - protein, 516 aa, Unknown
  Description of Unknown: Integrase B4688 sequence
  PTHR30461:SF3,cd00338,SM00857,IPR036162,PF13408, IPR025827,G3DSA:3.40.50.1390,PS51737,IPR006119,PF07508, IPR011109,SSF53041,PTHR30461,PS51736,Coil, PF00239
MKAIYVRQSLDKKDSLSIDAQIEDCINLCKRSGWNDYKVYKDKGWSAKNLDRPAFRQLNQDVQNGLIDGVICYKIDRISRSIRDFVNLIVDYQDLGVHFISFADNINTAAPGGMMMATLFVSLAQMEREAIITRVTDNYYYRCELGFWGGGPAPYGFRLVKTTENGQKHTILDPVPEEAEVIRTFFAWYLEPGATVRSIMNRAHLAGMQTRSGSDWTSRVLSDMLSKPLYAPNSMDIYNFYASQGVRVKISPEQCDGKQSLNIFGMRDRNSAHPKRSRPVSEMTLAIAKHKPIVDSDTYLKVQYKKKSRLAVTPRAGTSRTAVLSGLVRCGYCGRAMSPSGAKNGRYFTCSGRRNYAKGVCQGKSVKMDFLDDYVLNDLADFISQPEIKSMFKDGKAQRIPSSEQAKINEYKQRIATIDIDIQKLLDACLTSGDVAVKYLNERIDLLDTEKQNLQAEILAIQNKSNRKLELEGLDINSAPTALAGGEFDTKKYLCNFFIEQIIFYDRDNVQIRYKM

SEQ ID NO: 4688 - protein, 516 aa, Unknown
  Description of Unknown: Integrase B4689 sequence
  PTHR30461:SF3,IPR036162,PS51737,IPR011109,PTHR30461, PS00397,PF00239,G3DSA:1.10.10.2600,IPR006119,SSF53041, cd00338,SM00857,IPR025827,IPR038109,PS51736, IPR006118,PF13408,G3DSA:3.40.50.1390,PF07508,Coil
MSKKVMRKSTESTDRIRTGAAYIRVSTDDQLEYSPESQLEEIKKYCLQHNILLPSEYIFVEEDGRSGRKSSNRYAFQNMIATAKTKPKPFDVVVLWKFSRFARNQDESTFYKSMLRKKLGIDVVSVSEPLIDGMYGRLIEMIIEWQDEFYSVNLSGEVRRSMLSRARKGLYNGKMPLGYTKAPNENPVIEEQAAAIVRKIFDMYASGSDINYITRDLNDHGYKTKTGKRFDQKGVIYILENPFYIGKVRYNMRESSATSTLRDPEEWIISDSHHPPIIDQNTWDIVQERRERSKKIMQRYEHPVSHTKHWLSGLVKCPVCGKSLSHKEGYPRKSTHGGSYISGEGFQCLGYMKGLHTGSQYISAKKLTDAVISSLHEVLESVTDVSFELVRTYEPTVELDRQRYQRELASLDRKLERIKEAYLNEIDTLEDYKRNKEMIEKRRADLEALLSELTTAASGPENYKEQFLSRVQSVLDIIESDAPNDLKAEALRGIVRKIVFYKDTNTLEFHYYLMVE

SEQ ID NO: 4689 - protein, 516 aa, Unknown
  Description of Unknown: Integrase B4690 sequence
  PTHR30461:SF3,SM00857,G3DSA:1.10.10.2600,IPR036162,PS51737, G3DSA:3.40.50.1390,IPR006119,IPR038109,PF07508,SSF53041, IPR011109,PTHR30461,Coil,PS51736,cd00338, PF00239
MSYCIYLRKSRKDLEAEQHGEGETLARHERALLSLAKKNNLIISNIYREVVSGETIAARPVMQQLLHEVEQNLWDGVLVMEVERLARGDTIDQGVVQRAFQYSNTLIITPSKTYDPANEFDEEYFEFGLFMSRREYKTIKRRMQNGRYAAISEGKWPYNSAPYGFRRTKLEKEKGWTLAFDENEAPVVRLIFSMFTGPERVGIRSITRTLNSYGTKPRNSKLWSESTVRGILSNVVYDQCVKIGERKVVRTVENGVLTTTRPRTSDYTIVSGRHPRLIDHDVFAEAQSYLGCGSPKPAGSNIIKNPLAGIIVCSECKKKMIRRPPSGTASRVPYDLMLCSTYDCPTIGSPLDLVEREVYNALSDWVEGYRLSGQMPSKSLIPEKEVLLESAQQTLDQLLRQKGTMYDLLEQGVYSTEVFLERSDSLQNRISEAESNVAQLKLELDKERQREANIEQFLPACEDLLSCYWDLSIPERNRLLKLLIESIEYKKLTKNKRGHLNEPNFELTIKPRIPRK

SEQ ID NO: 4690 - protein, 516 aa, Unknown
  Description of Unknown: Integrase B4691 sequence
  SM00857,IPR006118,G3DSA:1.10.10.2600,IPR036162,PS51737, G3DSA:3.40.50.1390,PS00397,IPR006119,IPR038109,PF07508, IPR011109,SSF53041,PTHR30461,Coil,PS51736, cd00338,PF00239
MSKKVMRKSPEVTEQIRTGAAYIRVSTDDQLEYSPESQLEEIKRYCLQHNILLPSEFIFVEEEGRSGRKSSNRYAFQNMIAMAKTKPKPFDVIVLWKFSRFARNQDESTFYKSMLRKKLGIDVVSVSEPLIDGMYGRLIEMIIEWQDEFYSVNLSGEVRRSMLSRARKGLYNGKMPLGYTKPPNENPVIEEQEAAIVRKIFDMYASGSDINYITRGLNDHGYKTKTGKKFDQEGVIYILENPFYIGKVRYNMRESSATSTLRDPDEWIIADSFHEPIIDMETWNIVQERRERSKKLAGRYEHPVSHAKHWLSGLVKCPVCGKSLSHKEGYPRKSTNGTTYLSGEGFQCLGYMKGLHSGSQFISAKKLTDSVITSLRDVLESTTDVSFELVRTYEPTIELDCQRYQRELASLDRKLERIREAYMNEIDTLEDYKRNKEMIEKRRADLEALLADMTTAASGPENYKEQFLNRVQSVLDIIESDAPNDLKAEALRGIVRKIVFYKDTNTLEFHYYLMVE

SEQ ID NO: 4691 - protein, 516 aa, Unknown
  Description of Unknown: Integrase B4692 sequence
  PTHR30461:SF3,SM00857,G3DSA:1.10.10.2600,IPR036162,PF13408, IPR025827,G3DSA:3.40.50.1390,PS51737,IPR006119,IPR038109, PF07508,IPR011109,SSF53041,PTHR30461,PS51736, cd00338,PF00239
MSSVDKIAVVYARYSSHGQTEQSIEGQIAAAQKYAEQHGYTIIHVYADRAMTGRNDDREEFQRMLSDTATHQFGVILLWKIDRFGRNREEIAFNRYRCKKNGVRVERVAEDVPDGPEGVILDSVLEGMAEYYSLQLAQNVRRGQRESAKKSQTVGGCKIIGYNVDPDTKRYEVDPKTAPFVTEVFKRYANGETISEIVAWLNAQGVRTTRGGEFTVNSLHRLLKNEKYTGVYIFHDIRNEGGMPALIDRATFDKAQEMLKVNRRAPARVWSKTEYLLTDKLFCGHCGAMMVGESGHGRNGTKHNYYTCWNRKKKKLCDKKPVRQDVIEPLVLRSIGKLLENPATLENIADQVWAAYERSDTSGDTIKALDKQIADVDRALSNVMKAIEMGIINEMTKARMDELTDQKQALSAGRAEAGLAGGFKLTRDMILFFLQEIAALDMADRDSQKRLIKTFVNAIYLYDDHFDIAFNYTDKGKVVVRMQEINDAACGEVFGRCAQSPAKRGCCTSSKKERPK

SEQ ID NO: 4692 - protein, 516 aa, Unknown
  Description of Unknown: Integrase B4693 sequence
  PTHR30461:SF3,SM00857,G3DSA:1.10.10.2600,IPR036162,PF13408, PS51737,G3DSA:3.40.50.1390,IPR025827,IPR006119,IPR038109, PF07508,IPR011109,SSF53041,PF00239,PTHR30461, PS51736,Coil,cd00338
MKAVIYARFSSHNQREESIEGQVRACQRFAKEHDMTVIEIYADRGLSGLHADNRPEFQRMIADSDRHKFQALIMWNLDRFSRDKYDTAVYKSRLKKNGVTLYYSDQNIPDTPEGIILESLLEGFAQYYSANLSRNAKRGLQENARKCLWNGGGLPLGYTIDETKHFVIDPAGAACVRLIFQMYADNHSIKEIVSILNEKGYRTVKGNKFRLGSIQGVLRNRKYIGEYHASGITVPNGVPAIVDVELFNAVQEKIGVVSAAKARNKAEIPYLLTTKVFCGHCGSPMIGESGTGKGGSTYRYYKCCCRKNRKGQCDKRTEQKEWLEETVVAQTVEKFLHPDVIEDVSNACAAVLEQDCQNNALLKALNAQLADVEKSSRNLIKAIEAGVFTASMRERLAELEQQKEDITVQIAREQLRKPQLSAEQIAFFLRSFLDGDAHDPNFQERIIESLVRRVDVYDEGPGNRKLTVFYNLKKNNHSSVSVKCSDSESVGLPKGRLHKQPIFFFASCRRARIGRQ

SEQ ID NO: 4693 - protein, 516 aa, Unknown
  Description of Unknown: Integrase B4694 sequence
  PTHR30461:SF3,SM00857,IPR006118,G3DSA:1.10.10.2600,IPR036162, PS51737,G3DSA:3.40.50.1390,Coil,IPR006119,IPR038109, PF07508,IPR011109,SSF53041,PTHR30461,PS00397, PS51736,cd00338,PF00239
MSKKVMRKSTESTDRIRTGAAYIRVSTDDQLEYSPESQLEEIKKYCLQHNILLPSEYIFVEEDGRSGRKSSNRYAFQNMIATAKTKPKPFDVVVLWKFSRFARNQDESTFYKSMLRKKLGIDVVSVSEPLIDGMYGRLIEMIIEWQDEFYSVNLSGEVRRSMLSRARKGLYNGKMPLGYTKAPNENPVIEEQAAAIVRKIFDMYASGSDINYITRDLNDHGYKTKTGKRFDQEGVIYILENPFYIGKVRYNMRESSATSTLRDPEEWIISNSHHPPIIDQNTWDIVQERRERSKKIMQRYEHPVSHTKHWLSGLVKCPVCGKSLSHKEGYPRKSAHGGSYISGEGFQCLGYMKGLHTGSQYISAKKLTCAVISSLHEVLESVTDVSFELVRTYEPTVELDRQRYQCELASLDRKLERIKDAYLNEIDTLEDYKRNKEMIEKRRADLEVLLSELTTAASGPENYKEQFLSRVQSVLDIIESDAPNDLKAEALRGIVRKIVFYKDTNTLEFHYYLMVE

SEQ ID NO: 4694 - protein, 516 aa, Unknown
  Description of Unknown: Integrase B4695 sequence
  PTHR30461:SF3,IPR036162,PS51737,IPR011109,PTHR30461, PS00397,PF00239,G3DSA:1.10.10.2600,IPR006119,SSF53041, cd00338,SM00857,IPR025827,IPR038109,PS51736, IPR006118,PF13408,G3DSA:3.40.50.1390,PF07508,Coil
MAKKVIRKSAESTDRIRTGAAYIRVSTDDQLEYSPESQLEEIKRYCLQHNILLPSEYIFIEEDGRSGRKSSNRYAFQNMIATAKTKPKPFDVVVLWKFSRFARNQDESTFYKSMLRKKLGIDVVSVSEPLIDGMYGRLIEMIIEWQDEFYSVNLSGEVRRSMLSRARKGLYNGKMPLGYTKAPNENPVIEEQEAAIVRKIFDMYATGSDINYITRDLNDHGYKTKTGNHFDQEGVIYILENPFYIGKVRYNMRESSATSTLRDPEEWIISDSFHEPIIDMDTWNIVQKRREHSKKLMQRYEHPVSHTKHWLSGLVKCPVCGKSLSHKEGYPRKSTHGGSYISGEGFQCLGYMKGLHTGSQYISAKKLTSAVITSLHEVLESVTDVSFELVRTYEPTVELDRQRYQRELASLDRKLERIKEAYLNEIDTLEDYKRNKEMIEKRRADLEALLSELTTAASGPENYKEQFLSRVQSVLDIIESDAPNDLKAEALRGIVRKIVFYKDTNTLEFHYYLMVE

SEQ ID NO: 4695 - protein, 516 aa, Unknown
  Description of Unknown: Integrase B4696 sequence
  PTHR30461:SF3,IPR036162,PS51737,IPR011109,PTHR30461, PS00397,PF00239,G3DSA:1.10.10.2600,IPR006119,SSF53041, cd00338,SM00857,IPR025827,IPR038109,PS51736, IPR006118,PF13408,G3DSA:3.40.50.1390,PF07508,Coil
MAKKVIRKSAESTDRIRTGAAYIRVSTDDQLEYSPESQLEEIKRYCLQHNILLPSEYIFVEEDGRSGRKSSNRYAFQNMIATAKTKPKPFDVIVLWKFSRFARNQDESTFYKSMLRKKLGIDVVSVSEPLIDGMYGRLIEMIIEWQDEFYSVNLSGEVRRSMLSRARKGLYNGKMPLGYTKAPNENPVIEEQAAAIVRKIFDMYASGSDINYITRDLNDHGYKTKTGKRFDQEGVIYILENPFYIGKVRYNMRESSATSTLRDPEEWIISDSHHPPIIDQNTWDIVQERRERSKKLMQRYEHPVSHTKHWLSGLVKCPVCGKSLSHKEGYPRKSTHGGSYISGEGFQCLGYMKGLHTGSQYISAKKLTSAVITSLHEVLESVTDVSFELVRTYEPTVELDRQRYQRELASLDRKLERIKEAYLNEIDTLEDYKRNKEMIEKRRADLEALLSELTTAASGPENYKEQFLSRVQSVLDIIESDAPNDLKAEALRGIVRKIVFYKDTNTLEFHYYLMVD

SEQ ID NO: 4696 - protein, 516 aa, Unknown
  Description of Unknown: Integrase B4697 sequence
  IPR036162,PS51737,IPR011109,PTHR30461,PS00397, PF00239,G3DSA:1.10.10.2600,IPR006119,SSF53041,cd00338, SM00857,IPR025827,IPR038109,PS51736,IPR006118, PF13408,G3DSA:3.40.50.1390,PF07508,Coil
MAKKVIRKSAESTDRIRTGAAYIRVSTDDQLEYSPESQLEEIKRYCLQHNILLPSEYIFVEEDGRSGRKSSNRYAFQNMIATAKTKPKPFDVIVLWKFSRFARNQDESTFYKSMLRKKLGIDVVSVSEPLIDGMYGRLIEMIIEWQDEFYSVNLSGEVRRSMLSRARKGLYNGKMPLGYTKAPNENPVIEEQEAAIVRKIFDMYATGSDINYITRDLNDHGYKTKTGNHFDQEGVIYILENPFYIGKVRYNMRESSATSTLRDPKEWIISDSFHEPIIDMDTWNIVQERREHSKKLMQRYEHPVSHTKHWLSGLVKCPVCGKSLSHKEGYPRKSTHGGSYISGEGFQCLGYMKGLHTGSQYISAKKLTDAVISSLHEVLESVTDVSFELVRTYEPTVELDRQRYQRELASLDRKLERIREAYMNEIDTLEDYKRNKEMIEKRRADLEVLLSELTTAASGPENYKEQFLSRVQSVLDVIESDAPNDLKAEALRGIVRKIVFYKDTNTLEFHYYLMVE

SEQ ID NO: 4697 - protein, 516 aa, Unknown
  Description of Unknown: Integrase B4698 sequence
  PTHR30461:SF3,cd00338,SM00857,G3DSA:1.10.10.2600,IPR036162, PF13408,IPR025827,G3DSA:3.40.50.1390,PS51737,IPR006119, IPR038109,PF07508,SSF53041,IPR011109,PTHR30461, PS51736,Coil,PF00239
MLIRKIDAQKPTVSKKLRVAAYCRVSTDQEDQKESLEAQKAHYESWIKRHSDWEFAGVFYDLGISGTKADSRDGLQALLYACRTGSVDYVLTKSVSRFSRNTADCLSIVRELLSCNISIYFEKENIDTSSMESELMLSLLSSMAQDESESISKNVKWTIQQKIEAGTFKFGYPPYGYTRDADGNFIIDPKEADVIRLIFSYALSGMGTYKIAQMLEKRKIPTRKGGKWAGSTVKGILVNEKYYGAAAFQKTYTDSNFQRHHNHGEVDSFYAEEHHEPLISKEAFDKVQLLLQKHAEERKIEKNIGKYHKKYPFSGRIVCGECGDKFKRQTQSVGIAWACTTHLYDKASCSMKFIKDAAIKAAFVTMLNKLIFGYKFILFPYLDALKLSDADNNLLNILDIKAELQKNMDRKQDLRKLRVNGFLDSVMYTQELRQIEKQNEEYRTALKNQERTAVNGSIKETEKLIRFIETFGIQSEFSDEVFTEYVDSIIVYSRICIGFRLNCGLTLKEELCTGTE

SEQ ID NO: 4698 - protein, 516 aa, Unknown
  Description of Unknown: Integrase B4699 sequence
  PTHR30461:SF3,SM00857,G3DSA:1.10.10.2600,IPR036162,PF13408, IPR025827,PS51737,G3DSA:3.40.50.1390,IPR006119,IPR038109, PF07508,IPR011109,SSF53041,PF00239,PTHR30461, PS51736,Coil,cd00338
MARKKKVSPGNRLVAYYRYSGGSQQTEQSIEGQRRDCEAYARQHGLTIVHEYIDRHISGRGVESRLAFQQMIADSSKHLFDLVICWKTDRFARNRYDSAVYKKKLRDNGVRILYAAESSVEGPEGIILEGLMESLAEYYSAELAQKMRRGMRESALKGKAINPNRPLGLTTDEHKRFIIDEKNAPTIRFIFEHYAAGESSASIVDQLNAAGLRTSKGNSFNKCSIPRIIQNEAYHGVYICKAYDVRIDGAIPAIIDDDLWKRAQKMLTLNKQHRAPHSSHADYLLSGKLFCGCCHSLMRGISGHNCRNDVYYYYACGNKADGGTCKKKNIPKDVAENLVVNAICENILRPDTLEDLADAIAAAQQADVNQPDPERAMLEQNLADVRRKINNIIESIENGTASSRLSARLADLEQQESTLNYQLESLKEVHPPVLDRERILFLLEQFLISPNERTEDYNRRIIDTFVNRIEITDTEMLIYFNLSEASASEKQKNSQPNSCSTGNHLVRVARIELTAS

SEQ ID NO: 4699 - protein, 516 aa, Unknown
  Description of Unknown: Integrase B4700 sequence
  PTHR30461:SF3,IPR036162,PS51737,IPR011109,PTHR30461, PS00397,PF00239,G3DSA:1.10.10.2600,IPR006119,SSF53041, cd00338,SM00857,IPR025827,IPR038109,PS51736, IPR006118,PF13408,G3DSA:3.40.50.1390,PF07508,Coil
MAKKVIRKSAESTDRIRTGAAYIRVSTDDQLEYSPESQLEEIKRYCLQHNILLPSEYIFVEEDGRSGRKSSNRYAFQNMIATAKTKPKPFDVIVLWKFSRFARNQDESTFYKSMLRKKLGIDVVSVSEPLIDGMYGRLIEMIIEWQDEFYSVNLSGEVRRSMLSRARKGLYNGKMPLGYTKAPNENPVIEEQEAAIVRKIFDMYATGSDINYITRDLNDHGYKTKTGNHFDQEGVIYILENPFYIGKVRYNMRESSATSTLRDPEEWIISDSFHEPIIDMDTWNIVQERREHSKKLMQRYEHPVSHTKHWLSGLVKCPVCGKSLSHKEGYPRKSTHGGSYISGEGFQCLGYMKGLHTGSQYISAKKLTSAVITSLHEVLESVTDVSFELVRTYEPTVELDRQRYQRELASLDRKLERIKEAYLNEIDTLEDYKRNKDMIEKRRADLEVLLSELTTAASGPENYKEQFLSRVQSVLDIIESDAPNDLKAEALRGIVRKIVFYKDTNTLEFHYYLMVE

SEQ ID NO: 4700 - protein, 516 aa, Unknown
  Description of Unknown: Integrase B4701 sequence
  PTHR30461:SF3,SM00857,G3DSA:1.10.10.2600,IPR036162,PF13408, PS51737,G3DSA:3.40.50.1390,IPR025827,IPR006119,IPR038109, PF07508,IPR011109,SSF53041,PF00239,PTHR30461, PS51736,Coil,cd00338
MKAVIYARFSSHNQREESIEGQVRACQRFAKEHDMTVIEIYADRGLSGLHADNRPEFQRMIADSDRHKFQALIMWNLDRFSRDKYDTAVYKSRLKKNGVTLYYSDQNIPDTPEGIILESLLEGFAQYYSANLSRNAKRGLQENARKCLWNGGGLPLGYTIDETKHFVIDPAGATCVRLIFQMYADNHSIKEIVSTLNEKGYRTVKGNKFRLGSIQGVLRNRKYIGEYHASGITVPNGVPAIVDVELFNAVQEKIGVVSTAKARNKAEIPYLLTTKVFCGHCGSPMIGESGTGKGGSTYRYYKCSCRKNRKGQCDKRTEQKEWLEETVVAQTVEKFLHPNVIEDVSNACAAVLEQDCQNNALLKALNAQLADVEKSSRNLIKAIEAGVFTASMRERLAELEQQKEDITVQIAREQLRKPQLSAEQIAFFLRSFLDGDAHDPNFQERIIESLVRRVDVYDEGSGNRKLTVFYNLKKNNHSSVSVKCSDSESVGLPKGRLQKQPIFLFASCRRTRIGRQ

SEQ ID NO: 4701 - protein, 516 aa, Unknown
  Description of Unknown: Integrase B4702 sequence
  PTHR30461:SF3,SM00857,G3DSA:1.10.10.2600,IPR036162,PF13408, PS51737,IPR025827,G3DSA:3.40.50.1390,IPR006119,IPR038109, PF07508,IPR011109,SSF53041,PTHR30461,Coil, PS51736,cd00338,PF00239
MARKKKVSPGNRLVAYYRYSGGSQQTEQSIEGQRRDCEAYARQHGLTIVHEYIDRHISGRGVESRLAFQQMIADSSKHLFDLVICWKTDRFARNRYDSAVYKKKLRDNGVRILYAAESSVEGPEGIILEGLMESLAEYYSAELAQKMRRGMRESALKGRAINPSRPLGLTTDEHKRFIIDEKNAPTIRFIFEHYAAGESSASIVEQLNAAGLRTSKGNAFNKCSIPRIIQNEAYHGVYICKAYDVRIDGAIPAIIDDDLWKRAQKMLTLNKQHRAPHSSHADYLLSGKLFCGCCHSLMRGISGHNCRNDVYYYYACGNKADGGTCKKKNIPKDVAENLVVNAICENVLRPDTLEDLADAIAAAQQADVNQPDPERAMLEQNLADVHRKINNIIESIENGTASSRLSARLADLEQQESTLNYQLESMKEIHPPVLDRERILFLLEQFLISPNERTEDYNRRIIDTFVNRIEITDTEMLIYFNLSEASASEKQKNSQPNSCSTGNHLVRVARIELTAS

SEQ ID NO: 4702 - protein, 516 aa, Unknown
  Description of Unknown: Integrase B4703 sequence
  PTHR30461:SF3,SM00857,IPR006118,G3DSA:1.10.10.2600,IPR036162, PS51737,G3DSA:3.40.50.1390,Coil,IPR006119,IPR038109, PF07508,IPR011109,SSF53041,PTHR30461,PS00397, PS51736,cd00338,PF00239
MAKKVMRKSAESTDRIRTGAAYIRVSTDDQLEYSPESQLEEIKKYCLQHNILLPSEYIFVEEDGRSGRKSSNRYAFQNMIATAKTKPKPFDVVVLWKFSRFARNQDESTFYKSMLRKKLGIDVVSVSEPLIDGMYGRLIEMIIEWQDEFYSVNLSGEVRRSMLSRARKGLYNGKMPLGYTKAPNENPVIEEQEAAIVRKIFDMYASGSDINYITRDLNDHGYKTKTGKRFDQEGVIYILENPFYIGKVRYNMRESSATSTLRDPEEWIISDSHHPPIIDQNTWDIVQERRERSKKIMQRYEHPVSHTKHWLSGLVKCPICGKSLSHKEGYPRKAPNGSTYISGEGFQCLGYMKGLHTGSQYISAKKLTGAVISSLHEVLENVTDVSFELVRTYEPTVELDRQRYQRELASLDRKLERIKEAYLNEIDTLEDYKRNKEMIEKRRADLEVLLSELTTAASGPENYKERFLSRVQSVLDIIESDAPNDLKAEALRGIVRKIVFYKDTNTLEFHYYLMVE

SEQ ID NO: 4703 - protein, 516 aa, Unknown
  Description of Unknown: Integrase B4704 sequence
  PTHR30461:SF3,IPR036162,PS51737,IPR011109,PTHR30461, PS00397,PF00239,G3DSA:1.10.10.2600,IPR006119,SSF53041, cd00338,SM00857,IPR025827,IPR038109,PS51736, IPR006118,PF13408,G3DSA:3.40.50.1390,PF07508,Coil
MSKKVMRKSTESTDRIRTGAAYIRVSTDDQLEYSPESQLEEIKKYCLQHNILLPSEYIFVEEDGRSGRKSSNRYAFQNMIATAKTKPKPFDVIVLWKFSRFARNQDESTFYKSMLRKKLGIDVVSVSEPLIDGMYGRLIEMIIEWQDEFYSVNLSGEVRRSMLSRARKGLYNGKMPLGYTKAPNENPVIEEQEAAIVRKIFDMYATGSDINYITRDLNDHGYKTKTGNHFDQEGVIYILENPFYIGKVRYNMRESSATSTLRDPEEWIISDSHHEPIIDMDTWNIVQERREHSKKLMQRYEHPVSHTKHWLSGLVKCPVCGKSLSHKEGYPRKSTHGGSYISGEGFQCLGYMKGLHTGSQYISAKKLTSAVITSLHEVLESVTDVSFELVRTYEPTVELDRQRYQRELASLDRKLERIKEAYLNEIDTLEDYKRNKEMIEKRRADLEILLSELTTAASGPENYKEQFLSRVQSVLDIIESDAPNDLKAEAIRGIVRKIVFYKDTNTLEFHYYLMVE

SEQ ID NO: 4704 - protein, 516 aa, Unknown
  Description of Unknown: Integrase B4705 sequence
  PTHR30461:SF3,IPR036162,PS51737,IPR011109,PTHR30461, PS00397,PF00239,G3DSA:1.10.10.2600,IPR006119,SSF53041, cd00338,SM00857,IPR025827,IPR038109,PS51736, IPR006118,PF13408,G3DSA:3.40.50.1390,PF07508,Coil
MSKNVIRKSAESTDRIRTGAAYIRVSTDDQLEYSPESQLEEIKRYCLQHNILLPSEYIFVEEDGRSGRKSSNRYAFQNMIATAKTKPKPFDVIVLWKFSRFARNQDESTFYKSMLRKKLGIDVVSVSEPLIDGMYGRLIEMIIEWQDEFYSVNLSGEVRRSMLSRARKGLYNGKMPLGYTKAPNENPVIEEQEAAIVRKIFDMYASGSDINYITRDLNDHGYKTKTGKRFDQEGVIYILENPFYIGKVRYNMRESSATSTLRDPEEWIISDSHHPPIIYQNTWDIVQERRERSKKIMQRYEHPVSHTKHWLSGLVKCPICGKSLSHKEGYPRKAPNGSTYISGEGFQCLGYIKGLHAGSQYISAKKLTGAVISSLHEVLESVTDVSFELVRTYEPTVELDRQRYQRELASLDRKLERIKEAYLNEIDTLEDYKRNKEMIEKRRADLEILLSELTTAASGPENYKEQFLSRVQSVLDIIESDAPNDLKAEALRGIVRKIVFYKDTNTLEFHYYLMVE

SEQ ID NO: 4705 - protein, 516 aa, Unknown
  Description of Unknown: Integrase B4706 sequence
  PTHR30461:SF3,SM00857,IPR006118,G3DSA:1.10.10.2600,IPR036162, PS51737,G3DSA:3.40.50.1390,Coil,IPR006119,IPR038109, PF07508,IPR011109,SSF53041,PTHR30461,PS00397, PS51736,cd00338,PF00239
MSKKVMRKSSEVTEQIRTGAAYIRVSTDDQLEYSPESQLEEIKRYCLQHNILLPSEFIFVEEEGRSGRKSSNRYAFQNMIAMAKTKPKPFDVIVLWKFSRFARNQDESTFYKSMLRKKLGIDVVSVSEPLIDGMYGRLIEMIIEWQDEFYSVNLSGEVRRSMLSRARKGLYNGKMPLGYTKPPNENPVIEEQEAAIVRKIFDMYASGSDINYITRELNDHGYKTKTGKKFDQEGVIYILENPFYIGKVRYNMRESSATSTLRDPDEWIIADSFHEPIIDMETWNIVQERRERSKKLAGRYEHPVSHVKHWLSGLVKCPVCGKSLSHKEGYPRKSTNGTTYLSGEGFQCLGYMKGLHSGSQFISAKKLTDSVITSLRDVLESTTDVSFELVRTYEPTIELDCQRYQRELASLDRKLERIREAYLNEIDTLEDYKRNKEMIEKRRADLEALLSELTTAASGPENYKEQFLSRVQSVLDIIESDAPNDLKAEALRGIVRKIVFYKDTNTLEFHYYLMVE

SEQ ID NO: 4706 - protein, 516 aa, Unknown
  Description of Unknown: Integrase B4707 sequence
  SM00857,G3DSA:1.10.10.2600,IPR036162,PF13408,PS51737, G3DSA:3.40.50.1390,IPR025827,IPR006119,IPR038109,PF07508, SSF53041,IPR011109,PTHR30461,Coil,PS51736, cd00338,PF00239
MKDAVIYARYSSDRQREESIEGQIRVCQDYAKRNGFHIINIYTDRALTGRSDKRPGFQMMIRDAATHTFQYVIVYKLNRFSRDRYDSANYKHKLKKQGVKLLSAMENISDDPAGILLESVIEGISEYYSAELSENVIRGMTQSALEGKWPGGNIPLGYKLDEENRLIIDEEKAPIVRAVFQMFLDGMSVPRIVQELNNKKYTTNAGKEFSRSRVYYILHNERYIGVFMWKDIRKDDLIPPIVSKDTFYLAQEKVKKMKKHPYRTNGKYLLSGKIFCAACGSKVAGTSGKSCMGAKYYYYACSHHHKSSRYPYCETKNIRADVLEDLIYSKTNEIISNKAAVQAIARQAVKLQGNTSASLEVQALENRISDVSKKVQNCVRAIESGIISDAVSVSLSENERILAALKDELAKAKLLQESGSLTEEKICYFFEKIGQKAKETEKYKNILLTSLVRAVFICNDYIEIQYNYAEQLPILTNPVRIENSSCECTNGGHILHSHELNNLIFYERYFCIRIAV

SEQ ID NO: 4707 - protein, 516 aa, Unknown
  Description of Unknown: Integrase B4708 sequence
  SM00857,IPR006118,G3DSA:1.10.10.2600,IPR036162,PS51737, G3DSA:3.40.50.1390,PS00397,IPR006119,IPR038109,PF07508, IPR011109,SSF53041,PTHR30461,Coil,PS51736, cd00338,PF00239
MAKKVMRKSAESMDRIRTGAAYIRVSTDDQLEYSPESQLEEIKRYCLQHNILLPSEFIFVEEDGRSGRKSSNRYAFQNMIAMAKTKPKPFDVIVLWKFSRFARNQDESTFYKSMLRKKLGIDVVSVSEPLIDGMYGRLIEMIIEWQDEFYSVNLSGEVRRSMLSRARKGLYNGKMPLGYTKAPNENPVIEEQEAAIVRKIFDMYASGSDINYITRDLNDHGYKTKTGKKFDQEGVIYILENPFYIGKVRYNMRESSATSALRDPDEWIVADSFHEPIIDMETWNIVQERRERSKKLAGRYEHPVSHAKHWLSGLVKCPVCGKSLSHKEGYPRKSTNGITYLSGEGFQCLGYMKGLHSGSQFISAKKLTDSVITSLRDVLESATDVSFELVRTYEPTIELDRQRYQRELASLDRKLERIREAYMNEIDTLEDYKRNKEMIEKRRADLEALLDDMTTAASGPENYKEQFLNRVQSVLDIIESDAPNDLKAEALRGIVRKIVFYKDTNTLEFHYYLMVE

SEQ ID NO: 4708 - protein, 516 aa, Unknown
  Description of Unknown: Integrase B4709 sequence
  PTHR30461:SF3,SM00857,G3DSA:1.10.10.2600,IPR036162,PF13408, IPR025827,G3DSA:3.40.50.1390,PS51737,IPR006119,IPR038109, PF07508,IPR011109,SSF53041,PTHR30461,Coil, PS51736,cd00338,PF00239
MNAVIYARYSPGPRQTDQSIEGQVRDCMAYAKENNITVLNVYADKHISGSDFTHRAEFNHMIADSEKRQFEAVIVWKIDRFGRDREEIALNKIRLKRNGVRILYAKESIPDGPEGIILESLMEGLAEYYIEDLRQKVKRGQRESALKGKAVSGQAPYGYYIDEDKHYQEKKEESWVVRYVFEHSSAGETATDILAQLQQLGVKNRKGESITKNGIYTMLRNRKYIGECTYDGIPIPIPALIDQKLWDSVHARMKHRPRKPAAFKAPERYLLSCRIFCGECGSLMVGESGRGKSGKIYHYYKCAAQKRKGGSDCMLKTYRKNDLENYVIRCTVQDVLRDDVIDYIADEVVAISKKSDQEQRLASYQASLRDAQKSLKNVMAAIENGILTPSTKDRLMELENQVEEYKTLIAKEKIRKTTITKDQVVYWLNLFRSGDLADEGFRLRLLDVFVHSVYIYNDKVVIAYNYSDDDHSEPLDPDVFRCSNIHHRVRDRVPYSNFLFFPHTFVYVSYEKIPSA

SEQ ID NO: 4709 - protein, 516 aa, Unknown
  Description of Unknown: Integrase B4710 sequence
  PTHR30461:SF3,IPR036162,PS51737,IPR011109,PTHR30461, PS00397,PF00239,G3DSA:1.10.10.2600,IPR006119,SSF53041, cd00338,SM00857,IPR025827,IPR038109,PS51736, IPR006118,PF13408,G3DSA:3.40.50.1390,PF07508,Coil
MAKKVMRKSAESTDRIRTGAAYIRVSTDDQLEYSPESQLEEIKRYCLQHNILLPSEYIFVEEDGRSGRKSSNRYAFQNMIAMAKTKPKPFDVIVLWKFSRFARNQDESTFYKSMLRKKLGIDVVSVSEPLIDGMYGRLIEMIIEWQDEFYSVNLSGEVRRSMLSRARKGLYNGKMPLGYTKAPNENPVIEEHEAAIIRKIFDMYASGSDINYITRDLNDHGYKTKTGKRFDQEGVIYILENPFYIGKVRYNMRESSATSTLRDPEEWIISDSHHPPIIDQNTWDIVQERRERSKKIMQRYEHPVSHTKHWLSGLVKCPICGKSLSHKEGYPRKAPNGSTYISGEGFQCLGYMKGLHTGSQYISAKKLTSAVITSLHEVLESVTDVSFELVRTYEPTVELDRQRYQRELASLDRKLERIKEAYLNEIDTLEDYKRNKEMIEKRRADLEVLLSELTTAASGPENYKEQFLSRVQSVLDIIESDAPNDLKAEALRGIVRKIVFYKDTNTLEFHYYLMVE

SEQ ID NO: 4710 - protein, 516 aa, Unknown
  Description of Unknown: Integrase B4711 sequence
  PTHR30461:SF3,cd00338,SM00857,IPR036162,PF13408, PS51737,IPR025827,G3DSA:3.40.50.1390,IPR006119,PF07508, IPR011109,SSF53041,PTHR30461,PS51736,Coil, PF00239
MKAIYVRQSLDKKDSLSIDAQIEDCINLCKRNGWNDYKVYKDKGWSAKNLDRPAFRQLNQDVQNGLIDGVICYKIDRISRSIRDFVNLIVDYQDLGVHFISFADNINTAAPGGMMMATLFVSLAQMEREAIITRVTDNYYYRCELGFWGGGPAPYGFRLAKTTENGQKHTILEPVPEEAEVIRTFFAWYLEPGATVRSIMNRAHLAGMQTRSGSDWTSRVLSDMLSKPLYAPNSMDIYNFYASQGVRVKISPEQCDGKQSLNIFGMRDRNSAHPKRSRPVSEMTLAIAKHKPIVDSDTYLKVQYKKKSRLAVTPRAGTSRTAVLSGLVRCGYCGRAMSPSGAKNGRYFTCSGRRNYAKGVCQGKSVKMDFLDDYVLNDLADFISQPEIKSMFKDGKAQRIPSSEQAKINEYKQRIATIDIDIQKLLDACLTSGDVAVKYLNERIDLLDTEKQNLQAEILAIQNKSNRKLELEGLDINSAPTALAGGEFDTIKYLCNFFIEQIIFYDRDNVQIRYKM

SEQ ID NO: 4711 - protein, 516 aa, Unknown
  Description of Unknown: Integrase B4712 sequence
  PTHR30461:SF3,cd00338,SM00857,IPR036162,PF13408, PS51737,IPR025827,G3DSA:3.40.50.1390,IPR006119,PF07508, IPR011109,SSF53041,PTHR30461,PS51736,Coil, PF00239
MKAIYVRQSLDKKDSLSIDAQIEDCINLCKRSGWNDYKVYKDKGWSAKNLDRPAFRQLNQDVQNGLIDGVICYKIDRISRSIRDFVNLIVDYQDLGVHFISFADNINTAAPGGMMMATLFVSLAQMEREAIITRVTDNYYYRCELGFWGGGPAPYGFRLAKTTENGQKHTILEPVPEEAEVIRTFFAWYLEPGATVRSIMNRAHLAGMQTRSGSDWTSRVLSDMLSKPLYAPNSMDIYNFYASQGVRVKISPEQCDGKQSLNIFGMRDRNSAHPKRSRPVSEMTLAIAKHKPIVDSDTYLKVQYKKKSRLAVTPRAGTSRTAVLSGLVRCGYCGRAMSPSGAKNGRYFTCSGRRNYAKGVCQGKSVKMDFLESYVLNDLADFISQPEIKSMFKDGKAQRIPSSEQAKINEYKQRIATIDIDIQKLLDACLTSSDVAVKYLNERIDLLDTEKQNLQAEILAIQNKSNRKLELEGLDINSAPTALAGGEFDTKKYLCNFFIEQIIFYDRDNVQIRYKM

SEQ ID NO: 4712 - protein, 516 aa, Unknown
  Description of Unknown: Integrase B4713 sequence
  PTHR30461:SF3,SM00857,G3DSA:1.10.10.2600,IPR036162,PS51737, G3DSA:3.40.50.1390,IPR006119,IPR038109,PF07508,IPR011109, SSF53041,PTHR30461,Coil,PS51736,cd00338, PF00239
MSYCIYLRKSRKDLEAEQHGEGETLARHERALLSLAKKNNLIISNIYREVVSGETIAARPVMQQLLHEVEQNLWDGVLVMEVERLARGDTIDQGVVQRAFQYSNTLIITPSKTYDPANEFDEEYFEFGLFMSRREYKTIKRRMQNGRYAAISEGKWPYNSAPYGFRRVKLEKEKGWTLAFDENEAPVVRLIFSMFTGPERVGIRSITRTLNSYGTKPRNSKLWSESTVRGILSNVVYDQCVKIGERKVVRTVENGVLTTARPRTSDYTIVSGRHPRLIDHDVFAEAQSYLGCGSPKPAGSNIIKNPLAGIIVCSECKKKMIRRPPSGTASRVPYDLMLCSTYDCPTIGSPLDLVEREVYNALSDWVEGYRLSGQMPSKSLIPEKEVLLESAQQTLDQLLRQKGTMYDLLEQGVYSTEVFLERSDSLQNRISEAESTVAQLKLELDKERQREANIEQFLPACEDLLSCYWDLSIPERNRLLKLLIESIEYKKLTKNKRGHLNEPNFELTIKPRIPRK

SEQ ID NO: 4713 - protein, 516 aa, Unknown
  Description of Unknown: Integrase B4714 sequence
  PTHR30461:SF3,SM00857,G3DSA:1.10.10.2600,IPR036162,PF13408, PS51737,G3DSA:3.40.50.1390,IPR025827,IPR006119,IPR038109, PF07508,IPR011109,SSF53041,PF00239,PTHR30461, PS51736,Coil,cd00338
MKAVIYARFSSHNQREESIEGQVRACQRFAKEHDMTVIEIYADRGLSGLHADNRPEFQRMIADSDRHKFQALIMWNLDRFSRDKYDTAVYKSRLKKNGVTLYYSDQNIPDTPEGIILESLLEGFAQYYSANLSRNAKRGLQENARKCLWNGGGLPLGYTIDETKHFVIDPAGAACVRLIFQMYADNHSIKEIVSTLNEKGYRTVKGNKFRLGSIQGVLRNRKYIGEYHASGITVPNGVPAIVDVELFNAVQEKIGVVSAAKARNKAEIPYLLTTKVFCGHCGSPMIGESGTGKGGSTYRYYKCSCRKNRKGQCDKRTEQKEWLEETVVAQTVEKFLHPDVIEDVSNACAAVLEQDCQNNALLKALNAQLADVEKSSRNLIKAIEAGVFTSSMRERLAELEQQKEDITVQIAREQLRKPQLSAEQIAFFLRSFLDGDAHDPNFQERIIESLVRRVDVYDEGPGNRKLTVFYNLKKNNHSSVSVKCSDSESVGLPKRSVAKAADFLLTSCRRTRIGRQ

SEQ ID NO: 4714 - protein, 516 aa, Unknown
  Description of Unknown: Integrase B4715 sequence
  PTHR30461:SF3,IPR036162,PS51737,IPR011109,PTHR30461, PS00397,PF00239,G3DSA:1.10.10.2600,IPR006119,SSF53041, cd00338,SM00857,IPR025827,IPR038109,IPR006118, PF13408,G3DSA:3.40.50.1390,PF07508,Coil
MAKKVMRKSAESTDPIRTGAAYIRVSTDDQLEYSPESQLEEIKRYCLQHNILLPSEFIFVEEDGRSGRKSSNRYAFQNMIATAKTKPKPFDVIVLWKFSRFARNQDESTFYKSMLRKKLGIDVVSVSEPLIDGMYGRLIEMIIEWQDEFYSVNLSGEVRRSMLSRARKGLYNGKMPLGYTKAPNENPVIEEQEAAIVRKIFDMYATGSDINYITRDLNDHGYKTKTGNHFDQEGVIYILENPFYIGKVRYNMRESSATSTLRDPEEWIISDSHHEPIIDMDTWNIVQERREHSKKLMQRYEHPVSHTKHWLSGLVKCPVCGKSLSHKEGYPRKSTHGGSYISGEGFQCLGYMKGLHTGSQYISAKKLTSAVITSLHEVLESVTDVSFELVRTYEPTVELDRQRYQRELASLDRKLERIKEAYLNEIDTLEDYKRNKEMIEKRRADLEILLSELTTAASGPENYKEQFLSRVQSVLDIIESDAPNDLKAEAIRGIVRKIVFYKDTNTLEFHYYLMVE

SEQ ID NO: 4715 - protein, 516 aa, Unknown
  Description of Unknown: Integrase B4716 sequence
  PTHR30461:SF3,SM00857,G3DSA:1.10.10.2600,IPR036162,PS51737, G3DSA:3.40.50.1390,IPR006119,IPR038109,PF07508,IPR011109, SSF53041,PTHR30461,Coil,PS51736,cd00338, PF00239
MSYCIYLRKSRKDLEAEQHGEGETLARHERALLSLAKKNNLIISNIYREVVSGETIAARPVMQQLLHEVEQNLWDGVLVMEVERLARGDTIDQGVVQRAFQYSNTLIITPSKTYDPANEFDEEYFEFGLFMSRREYKTIKRRMQNGRYAAISEGKWPYNSAPYGFRRTKLEKEKGWTLAFDENEAPVVRLIFSMFTGPERVGIRSITRTLNSYGTKPRNSKLWSESTVRGILSNVVYDQCVKIGERKVVRTVENGVITTARPRTSDYTIVSGRHPRLINHDVFAEAQSYLGCGSPKPAGSNIIKNPLAGIIVCSECKKKMIRRPPSGTASRVPYDLMLCSTYDCPTIGSPLDLVEREVYNALSDWVEGYRLSGQMPSKSLIPEKEVLLESAQQTLDQLLRQKGTMYDLLEQGVYSTEVFLERSASLQNRISEAESNVAQLKLELDKERQREANIEQFLPACEDLLSCYWDLSIPERNRLLKLLIESIEYKKLTKNKRGHLNEPNFELTIKPRIPRK

SEQ ID NO: 4716 - protein, 516 aa, Unknown
  Description of Unknown: Integrase B4717 sequence
  PTHR30461:SF3,SM00857,IPR006118,G3DSA:1.10.10.2600,IPR036162, PS51737,G3DSA:3.40.50.1390,Coil,IPR006119,IPR038109, PF07508,SSF53041,IPR011109,PTHR30461,PS00397, PS51736,cd00338,PF00239
MAKKVMRKSAESTDRIRTGAAYIRVSTDDQLEYSPESQLEEIKRYCLQHNILLPSEYIFVEEDGRSGRKSSNRYAFQNMIATAKTKPKPFDVIVLWKFSRFARNQDESTFYKSMLRKKLGIDVVSVSEPLIDGMYGRLIEMIIEWQDEFYSVNLSGEVRRSMLSRARKGLYNGKMPLGYTKAPNENPVIEEQAAAIVRKIFDMYASGSDINYITRDLNDHGYKTKTGKRFDQEGVIYILENPFYIGKVRYNMRESSATSTLRDPEEWIISDSHHPPIIDQNTWDIVQERRERSKKIMQRYEHPVSHTKHWLSGLVKCPICGKSLSHKEGYPRKAPNGSTYISGEGFQCLGYMKGLHTGSQYISAKKLTGAVISSLHEVLESVTDVSFELVRTYEPTVELDRQRYQRELASLDRKLERIKEAYLNEIDTLEDYKRNKEMIEKRRADLEVLLSELTTAASGPENYKERFLSRVQSVLDIIESDAPNDLKAEALRGIVRKIVFYKDTNTLEFHYYLMVE

SEQ ID NO: 4717 - protein, 516 aa, Unknown
  Description of Unknown: Integrase B4718 sequence
  PTHR30461:SF3,SM00857,G3DSA:1.10.10.2600,IPR036162,PF13408, PS51737,IPR025827,G3DSA:3.40.50.1390,IPR006119,IPR038109, PF07508,SSF53041,IPR011109,PF00239,PTHR30461, PS51736,Coil,cd00338
MPKNKKSDNVNEKCKAVIYARFSSDKQREESIEGQIRECTQFAKSQNLEIIGTYIDRALSARSDNRPDFLRMIADSSKGLFQYVVVYQLDRFSRSRYDSAVYKHKLKKNGVRVLSAKERIGDDPSSIILESMLEGYAEYYSAELSQKVKRGMTENVLEHKWTGGYVPLGYSLAPDKTLQIDPSGAEAVKIIYEKWLSGYRIMDIIRYLNEHNYVTSRKSKFRYNSLNRILTNPIYTGLYRWGTIEVADYAPAIITQKQFALAQEKIHHIKAHPRAKRRSANYALTGMIYCGVCGAPMTGQSGHSKSGALYHYYRCSTKNNYHNRGKKLNVKCTNRNISREKLEDLVLQTTINILMNPEAVHMIAKQAVAVQQKDPASMELDRIKEDKKIIQKKLNNSIKAVEAGIISTTLAANISQYEKEIADLDIKMEKIKLSSTPVKIDEIAVEFFLKNLLLQKKEHDKYRLDMFQTFIRRVIVYPDKVEIQYNYTATPILENPVTKMMTGNSECSRCERLVTR

SEQ ID NO: 4718 - protein, 516 aa, Unknown
  Description of Unknown: Integrase B4719 sequence
  PTHR30461:SF3,SM00857,G3DSA:1.10.10.2600,IPR036162,PF13408, PS51737,IPR025827,G3DSA:3.40.50.1390,IPR006119,IPR038109, PF07508,IPR011109,SSF53041,PTHR30461,Coil, PS51736,cd00338,PF00239
MARKKKVSPGNRLVAYYRYSGGSQQTEQSIEGQRRDCEAYARQHGLTIVHEYIDRHISGRGVESRLAFQQMIADSSKHLFDLVICWKTDRFARNRYDSAVYKKKLRDNGVRILYAAESSVEGPEGIILEGLMESLAEYYSAELAQKMRRGMRESALKGRAINPSRPLGLTTDEHKRFIIDEKNAPTIRFIFEHYAAGESSASIVEQLNAAGLRTSKGNAFNKCSIPRIIQNEAYHGVYICKAYDVRIDGAIPAIIDDDLWKRAQKMLTLNKQHRAPHSSHADYLLSGKLFCGCCHSLMRGISGHNCRNDVYYYYACGNKADGGTCKKKNIPKDVAENLVVNAICENILRPDTLEDLADAIAAAQQADVNQPDPERAMLEQNLADVHRKINNIIESIENGTASSRLSARLADLEQQESTLNYQLESLKEVHPPVLDRERILFLLEQFLISPNERTEDYNRRIIDTFVNRIDITDTEMLIYFNLSEASASEKQKNSQPNSCSTGNHLVRVARIELTAS

SEQ ID NO: 4719 - protein, 516 aa, Unknown
  Description of Unknown: Integrase B4720 sequence
  PTHR30461:SF3,IPR036162,PS51737,IPR011109,PTHR30461, PS00397,PF00239,G3DSA:1.10.10.2600,IPR006119,SSF53041, cd00338,SM00857,IPR025827,IPR038109,IPR006118, PF13408,G3DSA:3.40.50.1390,PF07508,Coil
MAKKVMRKSAESTDPIRTGAAYIRVSTDDQLEYSPESQLEEIKRYCLQHNILLPSEFIFVEEDGRSGRKSSNRYAFQNMIATAKTKPKPFDVIVLWKFSRFARNQDESTFYKSMLRKKLGIDVVSVSEPLIDGMYGRLIEMIIEWQDEFYSVNLSGEVRRSMLSRARKGLYNGKMPLGYTKAPNENPVIEEQEAAIVRKIFDMYATGSDINYITRDLNDHGYKTKTGNHFDQEGVIYILENPFYIGKVRYNMRESSATSTLRDPEEWIISDSHHEPIIDMDTWNIVQERREHSKRLMQRYEHPVSHTKHWLSGLVKCPVCGKSLSHKEGYPRKSTHGGSYISGEGFQCLGYMKGLHTGSQYISAKKLTSAVITSLHEVLESVTDVSFELVRTYEPTVELDRQRYQRELASLDRKLERIKEAYLNEIDTLEDYKRNKEMIEKRRADLEILLSELTTAASGPENYKEQFLSRVQSVLDIIESDAPNDLKAEAIRGIVRKIVFYKDTNTLEFHYYLMVE

SEQ ID NO: 4720 - protein, 516 aa, Unknown
  Description of Unknown: Integrase B4721 sequence
  PTHR30461:SF3,cd00338,SM00857,G3DSA:1.10.10.2600,IPR036162, PF13408,IPR025827,G3DSA:3.40.50.1390,PS51737,IPR006119, IPR038109,PF07508,IPR011109,SSF53041,PTHR30461, Coil,PF00239
MSQETKEKVYLYARVSTTSEEQLTSFNTQSNYKSSDYEIIEVFADYGKTATKVFNRPNFIEMLKRCNVLVEKHKGNIIFVSGDSKPQVNKIIVSHSSRFMRNQILMKQCLLALQQNNVEVIFLDMGRSSFDNDIDFILNVFFLLDEQESRNTQYKVKKGLEKAREQRNYLPPCQKMLGFDYINGENKLIQNQYAPKAKYIFEAYSEGKSMREIAKEMDMKPNRIMEIIRNERYCGYVGYQKYYYDEKSETNKKAREYDIVPNDRIEAIISKELWDKCQEIRKSRTLRGKGVKNGVYAMSGKIRCSVCGKNFFHKGTNKKGDLWECSSKKNNGDCNSACFNEDTLKKFLLSPRGINEFKLTIEQIIDEILSKYKVKDKSSLETKLERNIGILDRTKELYMDGEISKENYNTRSTKLKAEIKDIEEEIKNIDNFNSYYDETHRLKDDYIDILNSLKIKLENGESEDVFKNHIEYIVVGRAYDEEKEKIIPTVEEVKFKDFTSLYKILEKAVFTTTGVF

SEQ ID NO: 4721 - protein, 516 aa, Unknown
  Description of Unknown: Integrase B4722 sequence
  PTHR30461:SF3,SM00857,G3DSA:1.10.10.2600,IPR036162,PF13408, IPR025827,PS51737,G3DSA:3.40.50.1390,IPR006119,IPR038109, PF07508,IPR011109,SSF53041,PTHR30461,Coil, PS51736,cd00338,PF00239
MQRAVIYARYSPGPNQTEQSIEGQVRECTKYAELHDLRIVGTYIDRKISGKTDNRREFQRMIDDSEKHIFDIIILYHTDRFARNRYDSAIYKHKLKENGVELRYATTDIPKGPEGIILESIMEGWAEYYSAELSRKIKRGMRESALKCHSTGAGRCLGYRTAEDKSLVIEPEGAKAVQTVFDMYIKGKSHADICRYLNDCGFRTAQGKLFNKNSVTHIIRNKRYIGVYTYDDITIEDGIPAIISKDTFHLAQLEAARRKTAKRPKEPKAEYLLSGKAFCGHCQKPLVGVSGTGKSGNKWYYYYCQESRAKRGCTKKPVKRAWLEREVVKRTVAEVLQPEVIQHIAKKCYDLQMEYRQDNSDVLFYELKLKDVRKAIKNTMHAIESGVKTKTLPARLQELENEEEALEAELAIAKASDFVITADQIEFLLTQFAEPWECESEEEYHRRIIKCFVHKVFLFDDKLLIYYNVSRDGKTREQSEAELLEEALGEGFDKRSSGSTMQKRHPIWDGVFAWLR

SEQ ID NO: 4722 - protein, 516 aa, Unknown
  Description of Unknown: Integrase B4723 sequence
  PTHR30461:SF3,SM00857,G3DSA:1.10.10.2600,IPR036162,PF13408, IPR025827,PS51737,G3DSA:3.40.50.1390,IPR006119,IPR038109, PF07508,IPR011109,SSF53041,PTHR30461,Coil, PS51736,cd00338,PF00239
MARRKKVSPGNRLVAYYRYSGGSQQTEQSIEGQRRDCEAYARQHGLTIVHEYIDRHISGRGVESRLAFQQMIADSSKHLFDLVICWKTDRFARNRYDSAVYKKKLRDNGVRILYAAESSVEGPEGIILEGLMESLAEYYSAELAQKMRRGMRESALKGKAINPNRPLGLTTDEHKRFIIDEKNAPTIRFIFEHYAAGESSASIVDQLNAAGLRTSKGNSFNKCSIPRIIQNEAYHGVYICKAYDVRIDGAIPAIIDDDLWKRAQKMLTLNKQHRAPHSSHADYLLSGKLFCGCCHSLMRGISGHNCRNDVYYYYACGNKADGGTCKKKNIPKDVAENLVVNAICENILRPDTLEDLADAIAAAQQADVNQPDPERAMLEQNLADVRRKINNIIESIENGTASSRLSARLADLEQQESTLNYQLESLKEVHPPVLDRERILFLLEQFLISPNERTEDYNRRIIDTFVNRIEITDTEMLIYFNLSEASASEKQKNSQPNSCSTGNHLVRVARIELTAS

SEQ ID NO: 4723 - protein, 516 aa, Unknown
  Description of Unknown: Integrase B4724 sequence
  PTHR30461:SF3,SM00857,G3DSA:1.10.10.2600,IPR036162,PS51737, G3DSA:3.40.50.1390,IPR006119,IPR038109,PF07508,SSF53041, IPR011109,PTHR30461,Coil,PS51736,cd00338, PF00239
MSYCIYLRKSRKDLEAEQHGEGETLARHERALLSLAKKNNLIISNIYREVVSGETIAARPVMQQLLHEVEQNLWDGVLVMEVERLARGDTIDQGVVQRAFQYSNTLIITPSKTYDPANEFDEEYFEFGLFMSRREYKTIKRRMQNGRYAAISEGKWPYNSAPYGFRRMKLEKEKGWTLAFDENEAPVVRLIFSMFTGPERVGIRSITRTLNSYGTKPRNSKLWSESTVRGILSNVVYDQCVKIGERKVVRTVENGVLTTARPRTSDYTIVSGRHPRLIDHDVFAEAQSYLGCGSPKPAGSNIIKNPLAGIIVCSECKKKMIRRPPSGTASRVPYDLMLCSTYDCPTIGSPLDLVEREVYNALSGWVEGYRLSGQMPSKSLIPEKEVLLESAQQTLDQLLRQKGTMYDLLEQGVYSTEVFLERSDSLQNRISEAESNVAQLKLELDKERQREANIEQFLPACEDLLSCYWDLSIPERNRLLKLLIESIEYKKLTKNKSGHLNEPNFELTIKPRIPRK

SEQ ID NO: 4724 - protein, 516 aa, Unknown
  Description of Unknown: Integrase B4725 sequence
  PTHR30461:SF3,SM00857,G3DSA:1.10.10.2600,IPR036162,PS51737, G3DSA:3.40.50.1390,IPR006119,IPR038109,PF07508,IPR011109, SSF53041,PTHR30461,Coil,PS51736,cd00338, PF00239
MSYCIYLRKSRKDLEAEQHGEGETLARHERALLSLAKKNNLIISNIYREVVSGETIAARPVMQQLLHEVEQNLWDGVLVMEVERLARGDTIDQGVVQRAFQYSNTLIITPSKTYDPANEFDEEYFEFGLFMSRREYKTIKRRMQNGRYAAISEGKWPYNSAPYGFRRTKLEKEKGWTLAFDENEAPVVRLIFSMFTGPERVGIRSITRTLNSYGTKPRNSKLWSESTVRGILSNVVYDQCVKIGERKVVRTVENGVLTTTRPRTSDYTIVSGRHPRLIDHDVFAEAQSYLGCGSPKPAGSNIIKNPLAGIIVCSECKKKMIRRPPSGTASRVPYDLMLCSTYDCPTIGSPLDLVEREVYNALSDWVEGYRLSGQTPSKSLIPEKEVLLESAQQTLDQLLRQKGTMYDLLEQGVYSTEVFLERSASLQSRISEAQSNVAQLKLELDKERQREANIEQFLPACEDLLSCYWDLSIPERNRLLKLLIESIEYKKLTKNKRGHLNEPNFELTIKPRIPRK

SEQ ID NO: 4725 - protein, 516 aa, Unknown
  Description of Unknown: Integrase B4726 sequence
  SM00857,IPR006118,G3DSA:1.10.10.2600,IPR036162,PS51737, G3DSA:3.40.50.1390,PS00397,IPR006119,IPR038109,PF07508, IPR011109,SSF53041,PTHR30461,Coil,PS51736, cd00338,PF00239
MSKKVMRKSTESTDRIRTGAAYIRVSTDDQLEYSPESQLEEIKKYCLQHNILLPSEFIFVEEDGRSGRKSNNRYAFQNMIAMAKTKPKPFDVIVLWKFSRFARNQDESTFYKSMLRKKLGIDVVSVSEPLIDGMYGRLIEMIIEWQDEFYSVNLSGEVRRSMLSRARKGLYNGKMPLGYTKAPNENPVIEEQEAAIVRKIFDMYASGSDINYITRDLNDHGYKTKTGKKFDQEGVIYILENPFYIGKVRYNMRESSATSALRDPDEWIVADSFHEPIIDMETWNIVQERRERSKKLAGRYEHPVSHAKHWLSGLVKCPVCGKSLSHKEGYPRKSTNGITYLSGEGFQCLGYMKGLHSGSQFISAKKLTDSVITSLRDVLESATDVSFELVRTYEPTIELDRQRYQRELASLDRKLERIREAYMNEIDTLEDYKRNKEMIEKRRADLEALLDDMTTAASGPENYKEQFLNRVQSVLDIIESDAPNDLKAEALRGIVRKIVFYKDTNTLEFHYYLMVE

SEQ ID NO: 4726 - protein, 516 aa, Unknown
  Description of Unknown: Integrase B4727 sequence
  PTHR30461:SF3,SM00857,G3DSA:1.10.10.2600,IPR036162,PS51737, G3DSA:3.40.50.1390,IPR006119,IPR038109,PF07508,IPR011109, SSF53041,PTHR30461,Coil,PS51736,cd00338, PF00239
MSYCIYLRKSRKDLEAEQHGEGETLARHERALLSLAKKNNLIISNIYREVVSGETIAARPVMQQLLHEVEQNLWDGVLVMEVERLARGDTIDQGVVQRAFQYSNTLIITPSKTYDPANEFDEEYFEFGLFMSRREYKTIKRRMQNGRYAAISEGKWPYNSAPYGFRRVKLEKEKGWTLAFDENEAPVVRLIFSMFTGPERVGIRSITRTLNSYGTKPRNSKLWSESTVRGILSNVVYDQCVKIGERKVVRTVENGVLTTTRPRTSDYTIVSGRHPRLIDHDVFAEAQSYLGCGSPKPAGSNIIKNPLAGIIVCSECKKKMIRRPPSGTASRVPYDLMLCSTYDCPTIGSPLDLVEREVYNALSDWVEGYRLSGQMPSKSLIPEKEVLLESAQQTLDQLLRQKGTMYDLLEQGVYSTEVFLERSDSLQNRISEAESNVAQLKLELDKERQREANIEQFLPACEDLLSCYWDLSIPERNRLLKLLIESIEYKKLTKNKRGHLNEPNFELTIKPRIPRK

SEQ ID NO: 4727 - protein, 516 aa, Unknown
  Description of Unknown: Integrase B4728 sequence
  PTHR30461:SF3,SM00857,IPR006118,G3DSA:1.10.10.2600,IPR036162, PS51737,G3DSA:3.40.50.1390,Coil,IPR006119,IPR038109, PF07508,IPR011109,SSF53041,PTHR30461,PS00397, PS51736,cd00338,PF00239
MSKKVMRKSTESTDRIRTGAAYIRVSTDDQLEYSPESQLEEIKKYCLQHNILLPSEYIFVEEDGRSGRKSSNRYAFQNMIATAKTKPKPFDVVVLWKFSRFARNQDESTFYKSMLRKKLGIDVVSVSEPLIDGMYGRLIEMIIEWQDEFYSVNLSGEVRRSMLSRARKGLYNGKMPLGYTKAPNENPVIEEQAAAIVRKIFDMYASGSDINYITRDLNDHGYKTKTGKRFDQEGVIYILENPFYIGKVRYNMRESSATSTLRDPEEWIISDSHHPPIIDQNTWDIVQERRERSKKIMQRYEHPVSHTKHWLSGLVKCPICGKSLSHKEGYPRKAPNGSTYISGEGFQCLGYMKGLHTGSQYISAKKLTGAVISSLHEVLESVTDVSFELVRTYEPTVELDRQRYQRELASLDRKLERIKEAYLNEIDTLEDYKRNKEMIEKRRADLEVLLSELTTAASGPENYKERFLSRVQSVLDIIESDAPNDLKAEALRGIVRKIVFYKDTNTLEFHYYLMVE

SEQ ID NO: 4728 - protein, 516 aa, Unknown
  Description of Unknown: Integrase B4729 sequence
  PTHR30461:SF3,cd00338,SM00857,IPR036162,PF13408, IPR025827,PS51737,G3DSA:3.40.50.1390,IPR006119,PF07508, IPR011109,SSF53041,PTHR30461,PS51736,Coil, PF00239
MKAIYVRQSLDKKDSLSIDAQIEDCINLCKRNGWNDYKVYKDKGWSAKNLDRPAFRQLNQDVQNGLIDGVICYKIDRISRSIRDFVNLIVDYQDLGVHFISFADNINTAAPGGMMMATLFVSLAQMEREAIITRVTDNYYYRCELGFWGGGPAPYGFRLVKTTENGQKHTILEPVPEEAEVIRTFFAWYLDPGATVRSIMNRAHLAGMQTRSGADWTSRVLSDMLSKPLYAPNSMDIYNFYASQGVRVKISPEQCDGKQSLNIFGMRDRNSAHPKRSRPVSEMTLAIAKHKPIVDSDTYLKVQYKKKSRLAVTPRAGTSRTAVLSGLVRCGYCGRAMSPSGAKNGRYFTCSGRRNYAKGVCQGKSVKMDFLDDYVLNDLADFISQPDIKSMFKDGKAQRIPSSEQAKINEYKQRIATIDIDIQKLLDACLTSGDVAVKYLNERIDLLDTEKQNLQAEILAIQNKSNRKLELEGLDINSAPTALAGGEFDTKKYLCNFFIEQIIFYDRDNVQIRYKM

SEQ ID NO: 4729 - protein, 516 aa, Unknown
  Description of Unknown: Integrase B4730 sequence
  PTHR30461:SF3,SM00857,G3DSA:1.10.10.2600,IPR036162,PF13408, IPR025827,PS51737,G3DSA:3.40.50.1390,IPR006119,IPR038109, PF07508,SSF53041,IPR011109,PTHR30461,Coil, PS51736,cd00338,PF00239
MARRKKVSPGNRLVAYYRYSGGSQQTEQSIEGQRRDCEAYARQHGLTIVHEYIDRHISGRGVESRLAFQQMIADSSKHLFDLVICWKTDRFARNRYDSAVYKKKLRDNGVRILYAAESSVEGPEGIILEGLMESLAEYYSAELAQKMRRGMRESAFKGKAINPNRPLGLTTDEHKRFIIDEKNAPTIRFIFEHYAAGESSASIVDQLNAAGLRTSKGNSFNKCSIPRIIQNEAYHGVYICKAYDVRIDGAIPAIIDDDLWKRAQKMLTLNKQHRAPHSSHADYLLSGKLFCGCCHSLMRGISGHNCRNDVYYYYACGNKADGGTCKKKNIPKDVAENLVVNAICENILRPDTLEDLADAIAAAQQADVNKPDPERAMLEQNLADVRRKINNIIESIENGTASSRLSARLADLEQQESTLNYQLESLKEVHPPVLDRERILFLLEQFLISPNERTEDYNRRIIDTFVNRIEITDTEMLIYFNLSEASASEKQKNSQPNNCSTGNHLVRVARIELTAS

SEQ ID NO: 4730 - protein, 516 aa, Unknown
  Description of Unknown: Integrase B4731 sequence
  PTHR30461:SF3,IPR036162,PS51737,IPR011109,PTHR30461, PS00397,PF00239,G3DSA:1.10.10.2600,IPR006119,SSF53041, cd00338,SM00857,IPR025827,IPR038109,PS51736, IPR006118,PF13408,G3DSA:3.40.50.1390,PF07508,Coil
MAKKVIRKSAESTDRIRTGAAYIRVSTDDQLEYSPESQLEEIKRYCLQHNILLPSEYIFVEEDGRSGRKSSNRYAFQNMIATAKTKPKPFDVVVLWKFSRFARNQDESTFYKSMLRKKLGIDVVSVSEPLIDGMYGRLIEMIIEWQDEFYSVNLSGEVRRSMLSRARKGLYNGKMPLGYTKAPNENPVIEEQEAAIVRKIFDMYASGSDINYITRDLNDHGYKTKTGKRFDQEGVIYILENPFYIGKVRYNMRESSATSTLRDPEEWIISDSYHPPIIDQNTWDIVQERRERSKKIMQRYEHPVSHTKHWLSGLVKCPICGKSLSHKEGYPRKAPNGSTYISGEGFQCLGYIKGLHAGSQYISAKKLTGAVISSLHEVLESVTDVSFELVRTYEPTVELDRQRYQRELASLDRKLERIKEAYLNEIDTLEDYKRNKEMIEKRRADLEALLSELTTAASGPENYKEQFLSRVQSVLDIIESDAPNDLKAEALRGIVRKIVFYKDTNTLEFHYYLMVE

SEQ ID NO: 4731 - protein, 516 aa, Unknown
  Description of Unknown: Integrase B4732 sequence
  PTHR30461:SF3,SM00857,IPR006118,G3DSA:1.10.10.2600,IPR036162, PS51737,G3DSA:3.40.50.1390,Coil,IPR006119,IPR038109, PF07508,IPR011109,SSF53041,PTHR30461,PS00397, PS51736,cd00338,PF00239
MSKKVMRKSSEVTEQIRTGAAYIRVSTDDQLEYSPESQLEEIKKYCLQHNILLPSEFIFVEEDGRSGRKSSNRYAFQNMIATAKTKPKPFDVIVLWKFSRFARNQDESTFYKSMLRKKLGIDVVSVSEPLIDGMYGRLIEMIIEWQDEFYSVNLSGEVRRSMLSRARKGLYNGKMPLGYTKAPNENPVIEEQESAIVRKIFDMYATGSDINYITRDLNNHGYKTKTGNHFDQEGVIYILENPFYIGKVRYNMRESSATSTLRDPEEWIISDSFHDPIIDMDTWNIVQERRERSKKLMQRYEHPVSHTKHWLSGLVKCPVCGKSLSHKEGYPRKSAHGESYISGEGFQCLGYMKGLHTGSQYISAKKLTCAVISSLHEVLESVTDASFELVRTYEPTVELDRQRYQRELASLDRKLERIKDAYLNEIDTLEDYKRNKDMIEKRRADLEALLSELTTAASGPENYKEQFLNRVQSVLDIIESDAPNDLKAEALRGIVRKIVFYKDTNTLEFHYYLMVE

SEQ ID NO: 4732 - protein, 516 aa, Unknown
  Description of Unknown: Integrase B4733 sequence
  SM00857,IPR006118,G3DSA:1.10.10.2600,IPR036162,PS51737, G3DSA:3.40.50.1390,PS00397,IPR006119,IPR038109,PF07508, IPR011109,SSF53041,PTHR30461,Coil,PS51736, cd00338,PF00239
MAKKVMRKSAESTDRIRTGAAYIRVSTDDQLEYSPESQLEEIKRYCLQHNILLPSEYIFVEEDGRSGRKSSNRYAFQNMIAMAKTKPKPFDVIVLWKFSRFARNQDESTFYKSMLRKKLGIDVVSVSEPLIDGMYGRLIEMIIEWQDEFYSVNLSGEVRRSMLSRARKGLYNGKMPLGYTKAPNENPVIEEHEAAIIRKIFDMYASGSDINYITRDLNDHGYKTKTGKRFDQEGVIYILENPFYIGKVRYNMRESSATSTLRDPEEWIISDSHHPPIIDQNTWDIVQERRERSKKIMQRYEHPVSHTKHWLSGLVKCPICGKSLSHKEGYPRKAPNGSTYISGEGFQCLGYIKGLHTGSQYISAKKLTCAVISSLHEVLESVTDVSFELVRTYEPTVELDRQRYQRELASLDRKLERIKEAYLNEIDTLEDYKRNKEMIEKRHADLEVLLSELTTAASGPENYKEQFLSRVQSVLDIIESDAPNDLKAEALRGIVRKIVFYKDTNTLEFHYYLMVE

SEQ ID NO: 4733 - protein, 516 aa, Unknown
  Description of Unknown: Integrase B4734 sequence
  PTHR30461:SF3,SM00857,G3DSA:1.10.10.2600,IPR036162,PF13408, PS51737,G3DSA:3.40.50.1390,IPR025827,IPR006119,IPR038109, PF07508,IPR011109,SSF53041,PTHR30461,Coil, PS51736,cd00338,PF00239
MARKKKVSPGNRLVAYYRYSGGSQQTEQSIEGQRRDCEAYARQHGLTIVHEYIDRHISGRGVESRLAFQQMIADSSKHLFDLVICWKTDRFARNRYDSAVYKKKLRDNGVRILYAAESSVEGPEGIILEGLMESLAEYYSAELAQKMRRGMRESALKGRAINPSRPLGLTTDEHKRFIIDEKNAPTIRFIFEHYAAGESSAFIVEQLNAAGLRTSKGNAFNKCSIPRIIQNEAYHGVYICKAYDVRIDGAIPAIIDDDLWKRAQKMLTLNKQHRAPHSSHADYLLSGKLFCGCCHSLMRGISGHNCRNDVYYYYACGNKVDGGTCKKKNIPKDVAENLVVNAICENVLRPDTLEDLADAIAAAQQADVNQPDPERAMLEQGLADVRRKINNIIESIENGTASSRLSARLADLEQQESTLNYQLESMKEIHPPVLDRERILFLLEQFLISPNERTEDYNRRIIDTFVNRIEITDTEMLIYFNLSEASASEKQKNSQSNSCSTGNHLVRVARIELTAS

SEQ ID NO: 4734 - protein, 516 aa, Unknown
  Description of Unknown: Integrase B4735 sequence
  cd00338,SM00857,G3DSA:1.10.10.2600,IPR036162,PF13408, PS51737,G3DSA:3.40.50.1390,IPR025827,IPR006119,IPR038109, PF07508,IPR011109,SSF53041,PTHR30461,PS51736, Coil,PF00239
MPKGTRAAIYARFSSHNQRSESIDIQVEKSREYCAENGLDVVRVYSDYAQTGRDVKRVEFQRMMEDAKLGIFDYVVIYKVTRIMRNRDEMALARIRLRKAGVEILYAGESLGEGSTRVLNLGMLEVLAEWESAIDSERIRDGIQKNAARGMANGRTHYGWDIVDGYYQINEREAAVMRRMKNMLCSGSTVAEITRAVAGERGKRGKPLTHNTISKLLKREQNCGVYDYAGVRIEGGMPELWSREEQDMINSILKTNGRKHSKTATTDDYPLSGKLWCPECGQFYTGTSGTSKTGRVYHYYRCKKCRRTLRRDVIEDAVLDAIYETVKQEDMRKRIIEGMVLYNDEREEEIEPASKQIEREIKRIDAAFERIWQAIEDGIAPPGGKERVDMLREQKAALETDLREAQAREGATLTEEALTSWLDHLAEEPDTEQIIDMFVRMIEVDGEQLNLYFAFDFWDDDFMPQKKTNPEKGSSNNPMVEPQIICSNPTIAANGREIKVSHNWFCIITLISTQKS

SEQ ID NO: 4735 - protein, 516 aa, Unknown
  Description of Unknown: Integrase B4736 sequence
  PTHR30461:SF3,SM00857,G3DSA:1.10.10.2600,IPR036162,PS51737, G3DSA:3.40.50.1390,IPR006119,IPR038109,PF07508,IPR011109, SSF53041,PTHR30461,Coil,PS51736,cd00338, PF00239
MSYCIYLRKSRKDLEAEQHGEGETLARHERALLSLAKKNNLIISSIYREVVSGETIAARPVMQQLLREVEQNLWDGVLVMEVERLARGDTIDQGVVQRAFQYSNTLIITPSKTYDPANEFDEEYFEFGLFMSRREYKTIKRRMQNGRYAAISEGKWPYNSAPYGFRRTKLEKEKGWTLAFDENEAPVVRLIFSMFTGPERVGIRSITRTLNSYGTKPRNSKLWSESTVRGILSNVVYDQCVKIGERKVVRTVENGVLTTTRPRTSDYTIVSGRHPRLIDHDVFAEAQSYLGCGSPKPAGSNIIKNPLAGIIVCSECKKKMIRRPPSGTASRVPYDLMLCSTYDCPTIGSPLDLVEREVYNALSDWVEGYRLSGQMPSKSLIPEKEVLLESAQQTLDQLLRQKGTMYDLLEQGIYSTEVFLERSDSLQNRISEAESNVAQLKLELDKERQREANIEQFLPACEDLLSCYWDLSIPERNRLLKLLIESIEYKKLTKNKRGHLNEPNFELTIKPRIPRK

SEQ ID NO: 4736 - protein, 516 aa, Unknown
  Description of Unknown: Integrase B4737 sequence
  SM00857,G3DSA:1.10.10.2600,IPR036162,PF13408,PS51737, IPR025827,G3DSA:3.40.50.1390,IPR006119,IPR038109,PF07508, IPR011109,SSF53041,PTHR30461,Coil,PS51736, cd00338,PF00239
MKDAVIYARYSSDRQREESIEGQIRVCQDYAKRNGFHIINIYTDRALTGRSDKRPGFQMMIRDAATHTFQYVIVYKLNRFSRDRYDSANYKHKLKKQGVKLLSAMENISDDPAGILLESVIEGISEYYSAELSENVIRGMTQSALEGKWPGGNIPLGYKLDEENRLMIDEGKAPIVRAVFQMFLDGMSVPRIVQELNDKKYTTNAGKEFSRSRVYYILHNERYIGVFMWKDIRKDDLIPPIVSKDTFYLAQAKVKKMKKHPYRTNGKYLLSGKIFCAACGSKVTGTSGKSCMGAKYYYYACSHHHKSSRYPYCETKNIRADVLEDLIYSKTNEIISNKAAVQAIARQAVKLQGNTSASLEVQALENRISDVSKKVQNCVRAIESGIISDAVSVSLSENERILAALSDELAKAKLLQESGSLTEEKICYFFEKIGQKAKETEKYKNILLTSLVRAVFVCNDYIEIQYNYAEQLPILTNPVRIENSSCESTNGGHILHTHELNNLIFYERYFCIRIAV

SEQ ID NO: 4737 - protein, 516 aa, Unknown
  Description of Unknown: Integrase B4738 sequence
  SM00857,IPR006118,G3DSA:1.10.10.2600,IPR036162,PS51737, G3DSA:3.40.50.1390,Coil,IPR006119,IPR038109,PF07508, SSF53041,IPR011109,PTHR30461,PS00397,PS51736, cd00338,PF00239
MSGKKKLAEDAEPLRTGAAYIRVSTDDQLEYSPESQLEEIKKYCSQHNIILPSEYIFVEEDGRSGRKSDNRYAFQNMIATAKSKPKPFEVIVLWKFSRFARNQDESTFYKSMLRKKLGIDVVSVSEPLIDGMYGRLIEMIIEWQDEFYSVNLSGEVRRSMLSRARKGLYNGKMPFGYTKVPGENPQIEEQEATVVRRVFDMYAAGNDITSIARDLNAHGLVTRSGKQFDQEGIIYMLDNPFYIGKIRYNMRVSSSTSTLRDPEEWIISDSYHEPIIDSATWELVQNRRTRSKQLKRRYEHPVSHTKHWLSGMIKCPICGKSLSHKEGYPRHQPNGKSYISGEGFQCLGYMKGLHSGSQFVSAKKVVGAVTSSLRGMLDSTSNISFDLVRTCAPTIELDQQRYQRELLSLDKKLNRCREAYINEVDTLEDYKRNKAMIEKRRGELLALLDGLTTAAAKPNPEDYKEQFLRQVKSVLDVLEDDVPNNLKAEALRSIIRDIVFYKNEDSFEFHYYLMID

SEQ ID NO: 4738 - protein, 516 aa, Unknown
  Description of Unknown: Integrase B4739 sequence
  PTHR30461:SF3,SM00857,G3DSA:1.10.10.2600,IPR036162,PF13408, PS51737,IPR025827,G3DSA:3.40.50.1390,IPR006119,IPR038109, PF07508,IPR011109,SSF53041,PTHR30461,PS51736, cd00338,PF00239
MQRAVIYARFSSDMQREESIDAQVRACKTYAKNKGYIVVDTYADEAKSGRDVTKRDAYNQMLADAMEDKFDIIIFHKIDRNSRNELNYFTFKDKLEKLGIRYEYAAQPIDALSPEGQMMETMMVGMAAYYSRNLAKETKKGLNENAYKALFNGGCPPLGYKIVDKKYVIDEQEAAAVRLIFELYLNGYGYAAICMELSAKGYTTKAGKAFAKNSLHDILCNEKYIGTYTFNKIPRKKGGRNSHAAERPEDFISIENAFPAIISKDDWALVRAKMDRNRHRAASYTAKEKYLLSGKVFCGHCGSAMVGHRIRKRYCYYGCTRKEQTPTSKCPQKMIRAEILEHWVLQILERVVFTVGGMRRIADAIVDAYEAEQKEQAGSQATLLQRKAVAEKRLNNLYKIFEEGNADEFDRQRLNQIKAELREINKSICETSVKPAKLLSKQKIAAILAAMKDEIFVKKNSYYVQQAVDLLVDHVTITDKVLKITLSTQNVCAYLVPRTRIAVSSDTWKISANLAA

SEQ ID NO: 4739 - protein, 516 aa, Unknown
  Description of Unknown: Integrase B4740 sequence
  PTHR30461:SF3,SM00857,G3DSA:1.10.10.2600,IPR036162,PF13408, PS51737,IPR025827,G3DSA:3.40.50.1390,IPR006119,IPR038109, PF07508,IPR011109,SSF53041,PTHR30461,PS51736, cd00338,PF00239
MNRAVIYARYSSDMQREESVEAQIRACKYYAQQNGIDIIGIYADRAKSGMYHSEKREEFQALLNAAPRKEYDIVLVHKLNRFGRAGVKALNDRDYLERLGIEIISVTERLENTPEGRLMLYVITGMNEYYSRNLAGEVLKGLRENAYKGITTGGTPALGYNLGADKKLVINEQEAAAVRLIFKMYISGAGYGEIIDELNSRGFRTKRGAKFGKNSIYDILRNERYTGRFTYGKTKTVNGHRSQHKKEKEYISIEGGCPAIISADEWERVQRLMDVKKHDAASGKAKELYILSGKLFCGHCGARMVGNSRVSRGERYLYYDCNAKLRKKTCTKHAVKKNEIEQAVIQKLNQLAFSDDLIERFVDEAYKAQDNEMPDISGKIADIDKKISNLVTAIESGADIGPIKQRMADLSAQKDALLSSNVPKGDFLTRDEIRSRFKKFLNIADLPPAQQKFIISEYVTRIDVFDSDGGGHFCRITLSNNTSVDTDVLGSSAPKGSICGCCFFPKLRGTSSRFHM

SEQ ID NO: 4740 - protein, 516 aa, Unknown
  Description of Unknown: Integrase B4741 sequence
  PTHR30461:SF3,SM00857,G3DSA:1.10.10.2600,IPR036162,PS51737, G3DSA:3.40.50.1390,IPR006119,IPR038109,PF07508,IPR011109, SSF53041,PTHR30461,Coil,PS51736,cd00338, PF00239
MSYCIYLRKSRKDLEAEQHGEGETLARHERALLSLAKKNNLIISNIYREVVSGETIAARPVMQQLLHEVEQNLWDGVLVMEVERLARGDTIDQGVVQRAFQYSNTLIITPSKTYDPANEFDEEYFEFGLFMSRREYKTIKRRMQNGRYAAISEGKWPYNSAPYGFRRVKLEKEKGWTLAFDENEAPVVRLIFSMFTGPERVGIRSITRTLNSYGTKPRNSKLWSESTVRGILSNVVYDQCVKIGERKVVRTVENGVLTTTRPRTSDYTIVSGRHPRLIDHDVFAEAQSYLGCGFPKPAGSNIIKNPLAGIIVCSECKKKMIRRPPSGTASRVPYDLMLCSTYDCPTIGSPLDLVEREVYNALSDWVEGYRLSGQMPSKSLIPEKEVLLESAQQTLDQLLRQKGTMYDLLEQGVYSTEVFLERSDSLQNRISEAESNVAQLKLELDKERQREANIEQFLPACEDLLSCYWDLSIPERNRLLKLLIESIEYKKLTKNKRGHLNEPNFELTIKPRIPRK

SEQ ID NO: 4741 - protein, 516 aa, Unknown
  Description of Unknown: Integrase B4742 sequence
  SM00857,G3DSA:1.10.10.2600,IPR036162,PF13408,PS51737, G3DSA:3.40.50.1390,IPR025827,IPR006119,IPR038109,PF07508, IPR011109,SSF53041,PTHR30461,Coil,PS51736, cd00338,PF00239
MKDAVIYARYSSDRQREESIEGQIRVCQDYAKRNGFNIINIYTDRALTGRSDKRPGFQMMIRDAATHTFQYVIVYKLNRFSRDRYDSANYKHKLKKQGVKLLSAMENISDDPAGILLESVIEGISEYYSAELSENVIRGMTQSALEGKWPGGNIPLGYKLDEENRLIIDEEKAPIVRAVFQMFLDGMSVPRIVQELNNKKYTTNAGKEFSRSRVYYILHNERYIGVFMWKDIRKDDLIPPIVSKDTFYLAQEKVRKMKKHPYRTSGKYLLSGKIFCATCGSKVTGTSGKSCMGAKYYYYACSHHHKSSRYPYCETKNIRADVLEDLIYSKTNEIISNKAAVQAIARQAVKLQGSTSASLEVQALENRISDVSKKVQNCVRAIESGIISDAVSVSLSENERILAALRDELAKEKLLQESGSLTEEKICYFFEKIGQKAKETEKYKNILLTSLVRAVFICNDYIEIQYNYAEQLPILTNPVRIENSSCESTNGGHILHTHELNNLIFFDKYFCIRIAV

SEQ ID NO: 4742 - protein, 516 aa, Unknown
  Description of Unknown: Integrase B4743 sequence
  PTHR30461:SF3,IPR036162,PS51737,IPR011109,PTHR30461, PS00397,PF00239,G3DSA:1.10.10.2600,IPR006119,SSF53041, cd00338,SM00857,IPR025827,IPR038109,PS51736, IPR006118,PF13408,G3DSA:3.40.50.1390,PF07508,Coil
MVKKVIRKSAESTDRIRTGAAYIRVSTDDQLEYSPESQLEEIKRYCLQHNILLPSEYIFVEEDGRSGRKSSNRYAFQNMIATAKTKPKPFDVIVLWKFSRFARNQDESTFYKSMLRKKLGIDVVSVSEPLIDGMYGRLIEMIIEWQDEFYSVNLSGEVRRSMLSRARKGLYNGKMPLGYTKAPNENPVIEEQEAAIVRKIFDMYATGSDINYITRDLNDHGYKTKTGNHFDQEGVIYILENPFYIGKVRYNMRESSATSTLRDPEEWIISDSFHEPIIDMDTWNIVQERREHSKKLMQRYEHPVSHTKHWLSGLVKCPVCGKSLSHKEGYPRKSTHGGSYISGEGFQCLGYMKGLHTGSQYISAKKLTSAVITSLHEVLESVTDVSFELVRTYEPTVELDRQRYQRELTSLDRKLERIREAYMNEIDTLEDYKRNKEMIEKRRADLEVLLSELTTAASGPENYKEQFLSRVQSVLDIIESDAPNDLKAEALRGIVRKIVFYKDTNTLEFHYYLMVE

SEQ ID NO: 4743 - protein, 516 aa, Unknown
  Description of Unknown: Integrase B4744 sequence
  PTHR30461:SF3,SM00857,IPR006118,G3DSA:1.10.10.2600,IPR036162, PS51737,G3DSA:3.40.50.1390,PS00397,IPR006119,IPR038109, PF07508,SSF53041,IPR011109,PTHR30461,Coil, PS51736,cd00338,PF00239
MVKKVIRKSAESTDRIRTGAAYIRVSTDDQLEYSPESQLEEIKRYCLQHNILLPSEYIFVEEDGRSGRKSSNRYAFQNMIATAKTKPKPFDVIVLWKFSRFARNQDESTFYKSMLRKKLGIDVVSVSEPLIDGMYGRLIEMIIEWQDEFYSVNLSGEVRRSMLSRARKGLYNGKMPLGYTKAPNENPVIEEQEAAIVRKIFDMYATGSDINYITRDLNDHGYKTKTGNHFDQEGVIYILENPFYIGKVRYNMRESSATSTLRDPEEWIISDSFHPPIIDQNTWDIVQERREHSKKLMQRYEHPVSHTKHWLSGLVKCPVCGKSLSHKEGYPRKSTHGGSYVSGEGFQCLGYMKGLHTGSQYISAKKLTGAVISSLHEVLESVTDVSFELVRTYEPTVELDRQRYQRELASLDRKLERIKEAYLNEIDTLEDYKRNKEMIEKRRADLEVLLSELTTAASGSENYKEQFLNRVHSVLDIIESDAPNDLKAEALRGIVRKIVFYKDTNTLEFHYYLMVE

SEQ ID NO: 4744 - protein, 516 aa, Unknown
  Description of Unknown: Integrase B4745 sequence
  PTHR30461:SF3,SM00857,G3DSA:1.10.10.2600,IPR036162,PF13408, PS51737,G3DSA:3.40.50.1390,IPR025827,IPR006119,IPR038109, PF07508,IPR011109,SSF53041,PF00239,PTHR30461, PS51736,Coil,cd00338
MARKKIKKGDGQRLVAYYRYSGGSGQTEQSIEGQRRDCEAYARLHGMTIQHEYIDRHISGKTDDRGAFQQMIADSDKGAFDYVICWKTDRFARNRYDSAVYKKRLRDNGVEILYAAESNISGSEGIIIEGLMEALAEYYSAELSEKMRRGMRESALKGRAISRCRALGLTTDSDKRFVIDPKTAPIVRFIFERYAAGDSSMSIVEQLNAKGLRTSQGNQFNKCSIPRIIQNEAYRGVYVSKAYNVRIEGAIPAIIDDELWERAQTMLKLNQQKRTKNAAKADYFLSGKLFCKECGSPMKGVSGHSSTNGEVYRYYACSNPECHKHNIPKDDLEGKVVQSICDHLLQPESMDALADAMIEVQKQDAVKPNAERLAVEENLADVRRRSKNILDAIENGTANPQLYARLDELTERENTLSYQLATLQNEKAIVFTKEQFLFLLEQFCIEPSERSEEYGRRLINTFVTNMEVSNSELFIYFNVSEETVNKTKNAPQKNFQKESSSEMRLVRVARIELTAS

SEQ ID NO: 4745 - protein, 516 aa, Unknown
  Description of Unknown: Integrase B4746 sequence
  IPR036162,PS51737,IPR011109,PTHR30461,PS00397, PF00239,G3DSA:1.10.10.2600,IPR006119,SSF53041,cd00338, SM00857,IPR025827,IPR038109,PS51736,IPR006118, PF13408,G3DSA:3.40.50.1390,PF07508,Coil
MAKKVMRKSAESTDRIRTGAAYIRVSTDDQLEYSPESQLEEIKRYCLQHNILLPSEYIFVEEDGRSGRKSSNRYAFQNMIAMAKTKPKPFDVIVLWKFSRFARNQDESTFYKSMLRKKLGIDVVSVSEPLIDGMYGRLIEMIIEWQDEFYSVNLSGEVRRSMLSRARKGLYNGKMPLGYTKAPNENPVIEEHEAAIIRKIFDMYASGSDINYITRDLNDHGYKTKTGKRFDQEGVIYILENPFYIGKVRYNMRESSATSTLRDPEEWIISDSHHPPIIDQNTWDIVQERRERSKKIMQRYEHPVSHTKHWLSGLVKCPICGKSLSHKEGYPRKAPNGSTYISGEGFQCLGYMKGLHTGSQYISAKKLTSAVITSLHEVLESVTDVSFELVRTYEPTVELDRQRYQRELTSLDRKLERIREAYMNEIDTLEDYKRNKEMIEKRRADLEVLLSELTTAASGPENYKEQFLSRVQSVLDIIESDAPNDLKAEALRGIVRKIVFYKDTNTLEFHYYLMVE

SEQ ID NO: 4746 - protein, 516 aa, Unknown
  Description of Unknown: Integrase B4747 sequence
  PTHR30461:SF3,SM00857,G3DSA:1.10.10.2600,IPR036162,PF13408, PS51737,IPR025827,G3DSA:3.40.50.1390,IPR006119,IPR038109, PF07508,IPR011109,SSF53041,PTHR30461,Coil, PS51736,cd00338,PF00239
MARKKKVSPGNRLVAYYRYSGGSQQTEQSIEGQRRDCEAYARQHGLTIVHEYIDRHISGRGVESRLAFQQMIADSSKHLFDLVICWKTDRFARNRYDSAVYKKKLRDNGVRILYAAESSVEGPEGIILEGLMESLAEYYSAELAQKMRRGMRESALKGRAINPSRPLGLTTDEHKRFIIDEKNAPTIRFIFEHYAAGESSASIVEQLNAAGLRTSKGNAFNKCSIPRIIQNEAYHGVYICKAYDVRIDGAIPAIIDDDLWKRAQKMLTLNKQHRAPHSFHADYLLSGKLFCGCCHSLMRGISGHNCRNDVYYYYACGNKADGGTCKKKNIPKDVAENLVVNAICENILRPDTLEDLADAIAAAQQTDVNQPDPERAMLEQNLADVHRKINNIIESIENGTASSRLSARLADLEQQESTLNYQLESLKEVHPPVLDRERILFLLEQFLISPNERTEDYNRRIIDTFVNRIEITDTEMLIYFNLSEASASEKQKNSQPNSCSTGNHLVRVARIELTAS

SEQ ID NO: 4747 - protein, 516 aa, Unknown
  Description of Unknown: Integrase B4748 sequence
  PTHR30461:SF3,cd00338,SM00857,G3DSA:1.10.10.2600,IPR036162, PF13408,PS51737,G3DSA:3.40.50.1390,IPR025827,IPR006119, IPR038109,PF07508,IPR011109,SSF53041,PTHR30461, PS51736,Coil,PF00239
MYAVYLRKSRADLEAEAMGQGETLARHRAALREYAQSHGMEIGAVYEEIVSGESIDARPKMKQLLREVEQGRWAGVLCMDIDRLARGDSSDQARVSNTFRISGTLIITPSKVYDQSRESDEEYVDFELFMARREYKAISRRIMRGRIASVKEGHFIGSTPPYGYDKVRVEKGRGYTLSPNSESDTVKQIYSMCNSGMGCNAIAGRLNMMGIEPRKGKSWSGASVQDILRNPVYCGKIRWQYRKEEKSLADGIVTTHRRENPDCIIAQGLHPALISEEEFNNAQQFLNSRRIPHKKENTELRNPLSGLVYCGLCGSMMTRLGTGSRNSSDILRCPNRDCNNVSAKLALVESALVEGVARWLNDYRVNVSRKPAADTAKAERTAAEKVRAELAKLDSQRERIYLFLEQGVYSAGEFRERMEALEKRRTQLSENLRQAEQAVSEAEGDRQLYARIIPRAERVMDIYAQSTPEEKNRLLKTIISRAEYIKTERNTRGNADRGNFTLNVIPLFPEIKTGAE

SEQ ID NO: 4748 - protein, 516 aa, Unknown
  Description of Unknown: Integrase B4749 sequence
  PTHR30461:SF3,IPR036162,PS51737,IPR011109,PTHR30461, PS00397,PF00239,G3DSA:1.10.10.2600,IPR006119,SSF53041, cd00338,SM00857,IPR025827,IPR038109,PS51736, IPR006118,PF13408,G3DSA:3.40.50.1390,PF07508,Coil
MAKKVIRKSAESTDRIRTGAAYIRVSTDDQLEYSPESQLEEIKRYCLQHNILLPSEYIFVEEDGRSGRKSSNRYAFQNMIATAKTKPKPFDVIVLWKFSRFARNQDESTFYKSMLRKKLGIDVVSVSEPLIDGMYGRLIEMIIEWQDEFYSVNLSGEVRRSMLSRARKGLYNGKMPLGYTKAPNENPVIEEQEAAIVRKIFDMYATGSDINYITRDLNDHGYKTKTGNHFDQEGVIYILENPFYIGKVRYNMRESSATSTLRDPEEWIISDSFHEPIIDMDTWNIVQERREHSKKLMQRYEHPVSHTKHWLSGLVKCPVCGKSLSHKEGYPRKSTHGGSYISGEGFQCLGYMKGLHTGSQYISAKKLTSAVITSLHEVLESVTDVSFELVRTYEPTVELDRQRYQRELTSLDRKLERIREAYMNEIDTLEDYKRNKEMIEKRRADLEVLLSELTTAASGPENYKEQFLSRVQSVLDIIESDAPNDLKAEALRGIVRKIVFYKDTNTLEFHYYLMVE

SEQ ID NO: 4749 - protein, 516 aa, Unknown
  Description of Unknown: Integrase B4750 sequence
  PTHR30461:SF3,SM00857,G3DSA:1.10.10.2600,IPR036162,PS51737, G3DSA:3.40.50.1390,IPR006119,IPR038109,PF07508,IPR011109, SSF53041,PTHR30461,Coil,PS51736,cd00338, PF00239
MSYCIYLRKSRKDLEAEQHGEGETLARHERALLSLAKKNNLIISNIYREVVSGETIAARPVMQQLLREVEQNLWDGVLVMEVERLARGDTIDQGVVQRAFQYSNTLIITPSKTYDPANEFDEEYFEFGLFMSRREYKTIKRRMQNGRYAAISEGKWPYNSAPYGFRRTKLEKEKGWTLAFDENEAPVVRLIFSMFTGPERVGIRSITRTLNSYGTKPRNSKLWSESTVRGILSNVVYDQCVKIGERKVVRTVENGVITTARPRTSDYTIVSGRHPRLINHDVFAEAQSYLGCGSPKPAGSNIIKNPLAGIIVCSECKKKMIRRPPSGTASRVPYDLMLCSTYDCPTIGSPLDLVEREVYNALSDWVEGYRLSGQMPSKSLIPEKEVLLESAQQTLDQLLRQKGTMYDLLEQGVYSTEVFLERSASLQSRISEAQSNVAQLKLELDKERQREANIEQFLPACEDLLSCYWDLSIPERNRLLKLLIESIEYKKLTKNKRGHLNEPNFELTIKPRIPRK

SEQ ID NO: 4750 - protein, 516 aa, Unknown
  Description of Unknown: Integrase B4751 sequence
  PTHR30461:SF3,SM00857,G3DSA:1.10.10.2600,IPR036162,PF13408, IPR025827,PS51737,G3DSA:3.40.50.1390,IPR006119,IPR038109, PF07508,IPR011109,SSF53041,PF00239,PTHR30461, PS51736,Coil,cd00338
MQQAVIYARYSPGPNQTEQSIEGQVRECTKYAELHDLRIVGTYIDRKISGKTDNRREFQRMIDDSEKHIFDVIILYHTDRFARNRYDSAIYKHKLKENGVELRYATTDIPKGPEGIILESIMEGWAEYYSAELSRKIKRGMRESALKCHSTGAGRCLGYRTAEDKSLVIEPEGAKAVQTVFDMYIKGKSHADICRYLNDCGFRTAQGKLFNKNSVTHIIRNKRYIGVYTYDDITIEDGIPAIISKDTFHLAQLEAARRKTAKRPKEPKAEYLLSGKAFCGHCQKPLVGVSGTGKSGNKWYYYYCQESRAKRGCTKKPVKRDWLEREVVKRTVAEVLQPEVIQHIAKKCYDLQMEYRQDNSDVLFYELKLKDVRKAIKNTMHAIESGVKTKTLPARLQELENEEEALEAELAIAKASDFVITADQIEFLLTQFAEPWECESEEEYHRRIIKCFVHKVFLFDDKLLIYYNVSRDGKTREQSEAELLEEALGEGFDKRSSGSTMQKRHPIWDGVFAWLR

SEQ ID NO: 4751 - protein, 516 aa, Unknown
  Description of Unknown: Integrase B4752 sequence
  PTHR30461:SF3,SM00857,G3DSA:1.10.10.2600,IPR036162,PS51737, G3DSA:3.40.50.1390,IPR006119,IPR038109,PF07508,IPR011109, SSF53041,PTHR30461,Coil,PS51736,cd00338, PF00239
MSYCIYLRKSRKDLEAEQHGEGETLARHERALLSLAKKNNLIISNIYREVVSGETIAARPVMQQLLHEVEQNLWDGVLVMEVERLARGDTIDQGVVQRAFQYSNTLIITPSKTYDPANEFDEEYFEFGLFMSRREYKTIKRRMQNGRYAAISEGKWPYNSAPYGFRRTKLEKEKGWTLAFDENEAPVVRLIFSMFTGPERVGIRSITRTLNSYGTKPRNSKLWSESTVRGILSNIVYDQCVKIGERKVVRTVENGVLTTTRPRTSDYTIVSGRHPRLIDHDVFAEAQSYLGCGSPKPAGSNIIKNPLAGIIVCSECKKKMIRRPPSGTASRVPYDLMLCSTYDCPTIGSPLDLVEREVYNALSDWVEGYRLSGQMPSKSLIPEKEVLLESAQQTLDQLLRQKGTMYDLLEQGVYSTEVFLERSDSLQNRISEAESNVAQLKLELDKERQREANIEQFLPACEDLLSCYWDLSIPERNRLLKLLIESIEYKKLTKNKRGHLNEPNFELTIKPRIPRK

SEQ ID NO: 4752 - protein, 516 aa, Unknown
  Description of Unknown: Integrase B4753 sequence
  PTHR30461:SF3,SM00857,IPR006118,G3DSA:1.10.10.2600,IPR036162, PS51737,G3DSA:3.40.50.1390,Coil,IPR006119,IPR038109, PF07508,SSF53041,IPR011109,PTHR30461,PS00397, PS51736,cd00338,PF00239
MAKKVIRKSAESTDRIRTGAAYIRVSTDDQLEYSPESQLEEIKRYCLQHNILLPSEYIFVEEDGRSGRKSSNRYAFQNMIATAKTKPKPFDVVVLWKFSRFARNQDESTFYKSMLRKKLGIDVVSVSEPLIDGMYGRLIEMIIEWQDEFYSVNLSGEVRRSMLSRARKGLYNGKMPLGYTKAPNENPVIEEQEAAIVRKIFDMYASGSDINYITRDLNDHGYKTKTGKRFDQEGVIYILENPFYIGKVRYNMRESSATSTLRDPEEWIISDSHHPPIIDQNTWDIVQERRERSKKIMQRYEHPVSHTKHWLSGLVKCPICGKSLSHKEGYPRKAPNGSTYISGEGFQCLGYIKGLHTGSQYISAKKLTCAVISSLHEVLESVTDVSFELVRTYEPTVELDRQRYQRELASLDRKLERIKEAYLNEIDTLEDYKRNKEMIEKRRADLEVLLSELTTAASGPENYKEQFLSRVQSVLDIIESDAPNDLKAEALRGIVRKIVFYKDTNTLEFHYYLMVE

SEQ ID NO: 4753 - protein, 516 aa, Unknown
  Description of Unknown: Integrase B4754 sequence
  PTHR30461:SF3,SM00857,G3DSA:1.10.10.2600,IPR036162,PF13408, PS51737,IPR025827,G3DSA:3.40.50.1390,IPR006119,IPR038109, PF07508,IPR011109,SSF53041,PTHR30461,Coil, PS51736,cd00338,PF00239
MARKKKVSPGNRLVAYYRYSGGSQQTEQSIEGQRRDCEAYARQHGLTIVHEYIDRHISGRGVESRLAFQQMIADSSKHLFDLVICWKTDRFARNRYDSAVYKKKLRDNGVRILYAAESSVEGPEGIILEGLMESLAEYYSAELAQKMRRGMRESALKGRAINPSRPLGLTTDEHKRFIIDEKNAPTIRFIFEHYAAGESSASIVEQLNAAGLRTSKGNAFNKCSIPRIIQNEAYHGVYICKAYDVRIDGAIPAIIDDDLWKRAQKMLTLNKQHRAPHSSHADYLLSGKLFCGCCHSLMRGISGHNCRNDVYYYYACGNKADGGTCKKKNIPKDVAENLVVNAICENILRPDTLEDLADAIAAAQQADVNQPDPERAMLEQNLADVHRKINNIIESIENGTASSRLSARLADLEQQESTLNYQLESLKEVHPPVLDRERILFLLEQFLISPNERTEDYNRRIIDTFVNRIDITDTEMLIYFNLSEASASEKQKNSQSNSCSTGNHLVRVARIELTAS

SEQ ID NO: 4754 - protein, 516 aa, Unknown
  Description of Unknown: Integrase B4755 sequence
  SM00857,G3DSA:1.10.10.2600,IPR036162,PS51737,G3DSA:3.40.50.1390, IPR006119,IPR038109,PF07508,IPR011109,SSF53041, PF00239,PTHR30461,PS51736,Coil,cd00338
MLENINTNMEYYAAYLRKSRKDAEAELQGQGETLIRHQKRLEEYAASVGIKISKFYKEVVSGETIASRPVMQQLLADVENGMWTGILVIEVERLARGNTLDQGIVSNAFQFSNTKIITPLKTYDPNNEYDEEYFEFGLFMSRREYKKINQRLHAGILSSVNEGKFIASVAPYGYNKYKLKSKGYSLEINPEESKMIRLIFQLYVDGKGLSYISNKLKELGFKPRKSLTFSKSTITNILTNPVYIGKIQYIDKATTKKVVNSKIVRVPNENKNIIYVNGLHEPIIDLNTWNKVQNIRENNLSNRTKVDYTLKNPMSSILKCGLCGKSLERVTYSSRDDVRILCRRCKENVGSNIEIVEDRLLQSLQLLLNEYKISLTNNDNSDIDELLALNQQSINSYCEELEKTKMQLTKTYDLLEQDIYTKEVFVERSNILKNQIKEITQNITNLENERKKILNNKNSKEILVPKIENVIDAYYETNNIELKNQLLKSVIEKVTYEKINPQSKDDFKLTIYPKIY

SEQ ID NO: 4755 - protein, 516 aa, Unknown
  Description of Unknown: Integrase B4756 sequence
  PTHR30461:SF3,cd00338,SM00857,IPR036162,PF13408, PS51737,G3DSA:3.40.50.1390,IPR025827,IPR006119,PF07508, IPR011109,SSF53041,PTHR30461,PS51736, Coil,PF00239
MKAIYVRQSLDKKDSLSIDAQIEDCINLCKRSGWNDYKVYKDKGWSAKNLDRPAFRQLNQDVQNGLIDGVICYKIDRISRSIRDFVNLIVDYQDLGVHFISFADNINTAAPGGMMMATLFVSLAQMEREAIITRVTDNYYYRCELGFWGGGPAPYGFRLVKTTENGQKHTILEPVPEEAEVIRTFFAWYLEPGATVRSIMNRAHLARMQTRSGSDWTSRVLSDMLSKPLYAPNSMDIYNFYASQGVRVKISPEQCDGKQSLNIFGMRDRNSAHPKRSRPVSEMTLAIAKHKPIVDSDTYLKVQYKKKSRLAVTPRAGTSRTAVLSGLVKCGYCGRAMSPSGSKNGRYFTCSGRRNYAKGVCQGKSVKMDFLDDYVLNDLADFISQPEIKSMFKDGKAQRIPSSEQAKINEYKQRIATIDIDIQKFLDACLTSGDVAVKYLNERIDLLDTEKQNLQAEILAVQNKSNRKLELEGLDINSAPTALAGGEFDTKKYLCNFFIEQIIFYDRDNVQIRYKI

SEQ ID NO: 4756 - protein, 516 aa, Unknown
  Description of Unknown: Integrase B4757 sequence
  PTHR30461:SF3,SM00857,G3DSA:1.10.10.2600,IPR036162,PF13408, PS51737,IPR025827,G3DSA:3.40.50.1390,IPR006119,IPR038109, PF07508,IPR011109,SSF53041,PTHR30461,Coil, PS51736,cd00338,PF00239
MARKKKVSPGNRLVAYYRYSGGSQQTEQSIEGQRRDCEAYARQHGLTIVHEYIDRHISGRGVESRLAFQQMIADSSKHLFDLVICWKTDRFARNRYDSAVYKKKLRDNGVRILYAAESSVEGPEGIILEGLMESLAEYYSAELAQKMRRGMRESALKGRAINPSRPLGLTTDEHKRFIIDEKNAPTIRFIFEHYAAGESSASIVEQLNAAGLRTSKGNAFNKCSIPRIIQNEAYHGVYICKAYDVRIDGAIPAIIDDDLWKRAQKMLTLNKQHRAPHSFHADYLLSGKLFCGCCHSLMRGISGHNCRNDVYYYYACGNKADGGTCKKKNIPKDVAENLVVNAICENILRPDTLEDLADAIAAAQQADVNQPDLERAMLEQNLADVHRKINNIIESIENGTASSRLSARLADLEQQESTLNYQLESLKEVHPPVLDRERILFLLEQFLISPNERTEDYNRRIIDTFVNRIEITDTEMLIYFNLSEASASEKQKNSQPNSCSTGNHLVRVARIELTAS

SEQ ID NO: 4757 - protein, 516 aa, Unknown
  Description of Unknown: Integrase B4758 sequence
  PTHR30461:SF3,SM00857,G3DSA:1.10.10.2600,IPR036162,PS51737, G3DSA:3.40.50.1390,IPR006119,IPR038109,PF07508,IPR011109, SSF53041,PTHR30461,Coil,PS51736,cd00338, PF00239
MSYCIYLRKSRKDLEAEQHGEGETLARHERALLSLAKKNNLIISSIYREVVSGETIAARPVMQQLLHEVEQNLWDGVLVMEVERLARGDTIDQGVVQRAFQYSSTLIITPSKTYDPANEFDEEYFEFGLFMSRREYKTIKRRMQNGRYAAISEGKWPYNSAPYGFRRTKLEKEKGWTLAFDENEAPVVRLIFSMFTGPERVGIRSITRTLNSYGTKPRNSKLWSESTVRGILSNVVYDQCVKIGERKVVRTVENGVLTTTRPRTSDYTIVSGRHPRLIDHDVFAEAQSYLGCGSPKPAGSNIIKNPLAGIIVCSECKKKMIRRPPSGTASRVPYDLMLCSTYDCPTIGSPLDLVEREVYNALSDWVEGYRLSGQMPSKSLIPEKEVLLESAQQTLDQLLRQKGTMYDLLEQGVYSTEVFLERSSSLQNRISEAESNVAQLKLELDKERQREANIEQFLPACEDLLSCYWDLSIPERNRLLKLLIESIEYKKLTKNKRGHLNEPNFELTIKPRIPRK

SEQ ID NO: 4758 - protein, 516 aa, Unknown
  Description of Unknown: Integrase B4759 sequence
  PTHR30461:SF3,SM00857,G3DSA:1.10.10.2600,IPR036162,PS51737, G3DSA:3.40.50.1390,IPR006119,IPR038109,PF07508,IPR011109, SSF53041,PTHR30461,Coil,PS51736,cd00338, PF00239
MSYCIYLRKSRKDLEAEQHGEGETLARHERALLALAKKNNLIISNIYREVVSGETIAARPVMQQLLREVEQNLWDGVLVMEVERLARGDTIDQGVVQRAFQYSNTLIITPSKTYDPANEFDEEYFEFGLFMSRREYKTIKRRMQNGRYAAISEGKWPYNSAPYGFRRVKLEKEKGWTLAFDENEAPVVRLIFSMFTGPERVGIRSITRTLNSYGTKPRNSKLWSESTVRGILSNVVYDQCVKIGERKVVRTVENGVLTTTRPRTSDYTIVSGRHPCLIDHDVFAEAQSYLGCGSPKPAGSNIIKNPLAGIIVCSECKKKMIRRPPSGTASRVPYDLMLCSTYDCPTIGSPLDLVEREVYNALSDWVEGYRLSGQTPSKSLIPEKEVLLESAQQTLDQLLRQKGTMYDLLEQGVYSTEVFLERSASLQSRISEAQSNVAQLKLELDKERQREANIEQFLPACEDLLSCYWDLSIPERNRLLKLLIESIEYKKLTKNKRGHLNEPNFELTIKPRIPRK

SEQ ID NO: 4759 - protein, 516 aa, Unknown
  Description of Unknown: Integrase B4760 sequence
  PTHR30461:SF3,SM00857,G3DSA:1.10.10.2600,IPR036162,PS51737, G3DSA:3.40.50.1390,IPR006119,IPR038109,PF07508,IPR011109, SSF53041,PTHR30461,Coil,PS51736,cd00338, PF00239
MSYCIYLRKSRKDLEAEQHGEGETLARHERALLSLAKKNNLIISNIYREVVSGETIAARPVMQQLLREVEQNLWDGVLVMEVERLARGDTIDQGVVQRAFQYSNTLIITPSKTYDPANEFDEEYFEFGLFMSRREYKTIKRRMQNGRYAAISEGKWPYNSAPYGFRRTKLEKEKGWTLAFDENEAPVVRLIFSMFTGPERVGIRSITRTLNSYGTKPRNSKLWSESTVRGILSNVVYDQCVKIGERKVVRTVENGILTTTRPRTSDYTIVSGRHPRLIDHDVFAEAQSYLGCGSPKPAGSNIIKNPLAGIIVCSECKKKMIRRPPSGTASRVPYDLMLCSTYDCPTIGSPLDLVEREVYNALSDWVEGYRLSGQTPSKSLIPEKEVLLESAQQTLDQLLRQKGTMYDLLEQGVYSTEVFLERSASLQSRISEAQSNVAQLKLELDKERQREANIEQFLPACEDLLSCYWDLSIPERNRLLKLLIESIEYKKLTKNKRGHLNEPNFELTIKPRIPRK

SEQ ID NO: 4760 - protein, 516 aa, Unknown
  Description of Unknown: Integrase B4761 sequence
  PTHR30461:SF3,cd00338,SM00857,IPR036162,PF13408, PS51737,G3DSA:3.40.50.1390,IPR025827,IPR006119,PF07508, IPR011109,SSF53041,PTHR30461,PS51736,Coil, PF00239
MKAIYVRQSLDKKDSLSIDAQIEDCINLCKRSGWNDYKVYKDKGWSAKNLDRPAFRQLNQDVQNGLIDGVICYKIDRISRSIRDFVNLIVDYQDLGVHFISFADNINTAAPGGMMMATLFVSLAQMEREAIITRVTDNYYYRCELGFWGGGPAPYGFRLAKTTENGQKHTILEPVPEEAEVIRTFFAWYLEPGATVRSIMNRAHLAGMQTRSGSDWTSRVLSDMLSKPLYAPNSMDIYNFYASQGVRVKISPEQCDGKQSLNIFGMRDRNSAHPKRSRPVSEMTLAIAKHKPIVDSATYLKVQYKKKSRLAVTPRAGTSRTAVLSGLVKCGYCGRAMSPSGAKNGRYFTCSGRRNYAKGVCQGKSVKMDFLDDYVLNDLADFISQPEIKSMFKDGKAQRIPSSEQAKINEYKQRIATIDIDIQKLLDACLTSGDVAVKYLNERIDLLDTEKQNLQAEILAIQNKSNRKLELEGLDINSAPTALAGGEFDTKKYLCNFFIEQIIFYDRDNVQIRYKM

SEQ ID NO: 4761 - protein, 516 aa, Unknown
  Description of Unknown: Integrase B4762 sequence
  PTHR30461:SF3,IPR036162,PS51737,IPR011109,PTHR30461, PS00397,PF00239,G3DSA:1.10.10.2600,IPR006119,SSF53041, cd00338,SM00857,IPR025827,IPR038109,PS51736, IPR006118,PF13408,G3DSA:3.40.50.1390,PF07508,Coil
MVKKVIRKSAESTDRIRTGAAYIRVSTDDQLEYSPESQLEEIKRYCLQHNILLPSEYIFVEEDGRSGRKSSNRYAFQNMIATAKTKPKPFDVIVLWKFSRFARNQDESTFYKSMLRKKLGIDVVSVSEPLIDGMYGRLIEMIIEWQDEFYSVNLSGEVRRSMLSRARKGLYNGKMPLGYTKAPNENPVIEEQAAAIVRKIFDMYASGSDINYITRDLNDHGYKTKTGKRFDQEGVIYILENPFYIGKVRYNMRESSATSTLRDPEEWIISDSHHPPIIDQNTWDIVQERRKRSKKIMQRYEHPVSHTKHWLSGLVKCPICGKSLSHKEGYPRKAPNGSTYISGEGFQCLGYMKGLHTGSQYISTKKLTDAVISSLHEVLESVTDVSFELVRTYEPTVELDRQRYQRELASLDRKLERIKEAYLNEIDTLEDYKRNKEMIEKRRADLEALLSELTTATSGPENYKEQFLSRVQSVLDIIESDAPNDLKAEALRGIVRKIVFYKDTNTLEFHYYLMVE

SEQ ID NO: 4762 - protein, 516 aa, Unknown
  Description of Unknown: Integrase B4763 sequence
  PTHR30461:SF3,SM00857,G3DSA:1.10.10.2600,IPR036162,PS51737, G3DSA:3.40.50.1390,IPR006119,IPR038109,PF07508,IPR011109, SSF53041,PF00239,PTHR30461,PS51736,Coil, cd00338
MSYCIYLRKSRKDLEAEQHGEGETLARHERALLSLAKKNNLIISNIYREVVSGETIAARPVMQQLLHEVEQNLWHGVLVMEVERLARGDTIDQGVVQRAFQYSNTLIITPSKTYDPANEFDEEYFEFGLFMSRREYKTIKRRMQNGRYAAISEGKWPYNSAPYGFRRTKLEKEKGWTLAFDENEAPVVRLIFSMFTGPERVGIRSITRTLNSYGTKPRNSKLWSESTVRGILSNVVYDQCVKIGERKVVRTVENGVITTARPRTSDYTIVSGRHPRLIDHDVFAEAQSYLGCGSPKPAGSNIIKNPLAGIIVCSECKKKMIRRPPSGTASRVPYDLMLCSTYDCPTIGSPLDLIEREVYNALSDWVEGYRLSGQTPSKSLIPEKEVLLESAQQTLDQLLRQKGAMYDLLEQGVYSTEVFLERSDSLQNRISEAESNVAQLKLELDKERQREANIEQFLPACEDLLSCYWDLSIPERNRLLKLLIESIEYKKLTKNKRGHLNEPNFELTIKPRIPRK

SEQ ID NO: 4763 - protein, 516 aa, Unknown
  Description of Unknown: Integrase B4764 sequence
  PTHR30461:SF3,cd00338,SM00857,G3DSA:1.10.10.2600,IPR036162, PF13408,IPR025827,G3DSA:3.40.50.1390,PS51737,IPR006119, IPR038109,PF07508,SSF53041,IPR011109,PTHR30461, PS51736,Coil,PF00239
MKAEEVLIYLRKSRSDSPDETVEEVLARHERQLQEYAVRSYGLPVPEQNIYREVVSGETIEDRPEVQKVLARIENPDIKGVLIIEPQRLSRGDWEDGGRILSSFRYSYTLIITPHKTYDLQDKFDYKFFKMELSQGNDYLEYTKEILNRGRIASVREGNFIGSIAPFGYKKAVIDKSHTLVPDPQEAPGVEMIFNLFVHDNIGWAKIGYALDNAGIKPRKSKFWNPSQVKTILVNPVYTGKVTWNHYKTITIVENGKLKKCRPTSDDYLIAEGKHQALISEDLFQKAQEKLGRNTREPFSRELVNPLAGLLYCKNCGTAMTRRTYRHSDGSVRSAPRLLCNNQVRCGTKSSSFDDVYSALISALREMISDFSFKLSHDQSRSLFEIQTNIINNLNNELENLEKKQDELYDLLEDGIYSKEVFLKRNEKLAESRSELEQKIKKAKENTARPINYQERIIKFEQVLQALQDDDIPPKEKNRLLKQIIQRIDYSRDSTNRTRWDTSKPTLEIHLKDFQN

SEQ ID NO: 4764 - protein, 516 aa, Unknown
  Description of Unknown: Integrase B4765 sequence
  SM00857,G3DSA:1.10.10.2600,IPR036162,PF13408,PS51737, G3DSA:3.40.50.1390,IPR025827,IPR006119,IPR038109,PF07508, IPR011109,SSF53041,PTHR30461,Coil,PS51736, cd00338,PF00239
MKDAVIYARYSSDRQREESIEGQIRVCQDYAKRNGFNIINIYTDRALTGRSDKRPGFQMMIRDAATHTFQYVIVYKLNRFSRDRYDSANYKHKLKKQGVKLLSAMENISDDPAGILLESVIEGISEYYSAELSENVIRGMTQSALEGKWPGGNIPLGYKLDEENRLIIDEEKAPIVRAVFQMFLDGMSVPRIVQELNDKKYTTNAGKEFSRSRVYYILHNERYIGVFMWKDIRKDDLIPPIVSKDTFYLAQAKVKKMKKHPYRTNGKYLLSGKIFCATCGSKVTGTSGKSCMGAKYYYYACSHHHKSSRYPYCETKNIRADVLEELIYSKTNEIISNKAAVQAIARQAVKLQGSTSASLEVQALENRISDVSKKVQNCVRAIESGIISDAVSVSLSENERILTALRDELAKAKLLQESGSLTEEKICYFFEKIGQKAKETEKYKNILLTSLVRAVFICNEYIEIQYNYAEQLPILTNPVRIENSSCESTNGGRILHIYELNKLIFHERYFCIRIAV

SEQ ID NO: 4765 - protein, 516 aa, Unknown
  Description of Unknown: Integrase B4766 sequence
  PTHR30461:SF3,SM00857,G3DSA:1.10.10.2600,IPR036162,PS51737, G3DSA:3.40.50.1390,IPR006119,IPR038109,PF07508,IPR011109, SSF53041,PTHR30461,Coil,PS51736,cd00338, PF00239
MSYCIYLRKSRKDLEAEQHGEGETLARHERALLSLAKKNNLIISNIYREVVSGETIAARPVMQQLLHEVEQNLWDGVLVMEVERLARGDTIDQGVVQRAFQYSNTLIITPSKTYDPANEFDEEYFEFGLFMSRREYKTIKRRMQNGRYAAISEGKWPYNSAPYGFRRVKLEKEKGWTLAFDENEAPVVRLIFSMFTGPERVGIRSITRTLNSYGTKPRNSKLWSESTVRGILSNVVYDQCVKIGERKVVRTVENGVLTTARPRTSDYTIVSGRHPRLIDHDVFAEAQSYLGCGSPKPAGSNIIKNPLAGIIVCSECKKKMIRRPPSGTASRVPYDLMLCSTYDCPTIGSPLDLVEREVYNALSDWVEGYRLSGQMPSKSLIPEKEVLLESAQQTLDQLLRQKGTMYDLLEQGVYSTEVFLERSDSLQNRISEAESNVAQLKLELDKERQREANIEQFLPACEDLLSCYWDLSIPERNRLLKLLIESIEYKKLTKNKRGHLNEPNFELTIKPRIPRK

SEQ ID NO: 4766 - protein, 516 aa, Unknown
  Description of Unknown: Integrase B4767 sequence
  PTHR30461:SF3,SM00857,G3DSA:1.10.10.2600,IPR036162,PS51737, G3DSA:3.40.50.1390,IPR006119,IPR038109,PF07508,IPR011109, SSF53041,PTHR30461,Coil,PS51736,cd00338, PF00239
MSYCIYLRKSRKDLEAEQHGEGETLARHERALLSLAKKNNLIISNIYREVVSGETIAARPVMQQLLHEVEQNLWHGVLVMEVERLARGDTIDQGVVQRAFQYSNTLIITPSKTYDPANEFDEEYFEFGLFMSRREYKTIKRRMQNGRYAAISEGKWPYNSAPYGFRRTKLEKEKGWTLAFDENEAPVVRLIFSMFTGPERVGIRSITRTLNSYGTKPRNSKLWSESTVRGILSNVVYDQCVKIGERKVVRTIENGVLTTARPRTNDYTIVSGRHPRLIDHDVFAEAQSYLGCGSPKPAGSNIIKNPLAGIIICSECKKKMIRRPPSGTASRVPYDLMLCSTYDCPTIGSPLDLVEREVYNALSDWVEGYRLSGQMPSKSLIPEKEVLLESAQQTLDQLLRQKGTMYDLLEQGVYSTEVFLERSDSLQNRISEAESNVAQLKLELDKERQREANIEQFLPACEDLLSCYWDLSIPERNRLLKLLIESIEYKKLTKNKRGHLNEPNFELTIKPRIPRK

SEQ ID NO: 4767 - protein, 516 aa, Unknown
  Description of Unknown: Integrase B4768 sequence
  PTHR30461:SF3,SM00857,G3DSA:1.10.10.2600,IPR036162,PF13408, IPR025827,G3DSA:3.40.50.1390,PS51737,IPR006119,IPR038109, PF07508,SSF53041,IPR011109,PTHR30461,Coil, PS51736,cd00338,PF00239
MKAVIYARYSSHKQNEESIEGQLRECYQFAEKNGFTVTHEYIDRAISGKTADRPSFQELIADSSKGKFEAVIMYTLDRFARNRYDSAMYKAKLKKNGVKLYYAKQPMPDTPEGIILESVLEGYAEYYSENLSRGVKRGMHEVALQGRVTGKAPLGYVADENKKYQIDPETAQAVKYIFQMYSEGITQREISLYLNSHGYRTATGKKFGKSSYHSILTNEKYMGIYRYGDVVIENGIPPIISKELFTKVQERMRCENHKGARNKAKETYLLSGKLYCGHCGKPMIGESGTSRHGNIYRYYKCSCRKANPMSCDKKPEKKEPLEDLVVRKTITRVFTDENIEIISDKVIDLLKEDLEQVSHVKQLENTLEETKNKIQNILSAIEQGIIVKSTLERLHELEKEKDEIESNLSIEKSRYSNLPTKNQIMFYLYSLKNGNVDNGHFRRQLVRSIINSIFVYDNPDGGKKIVVNFNLLNNEIDTLSLSDSDMNLLGAPIPTNPNIFVNKDWFTIVFDIKEIG

SEQ ID NO: 4768 - protein, 516 aa, Unknown
  Description of Unknown: Integrase B4769 sequence
  PTHR30461:SF3,SM00857,G3DSA:1.10.10.2600,IPR036162,PF13408, PS51737,IPR025827,G3DSA:3.40.50.1390,IPR006119,IPR038109, PF07508,IPR011109,SSF53041,PTHR30461,PS51736, cd00338,PF00239
MNRAVIYARYSSDMQREESVEAQIRACKYYAQQNGIDIIGIYADRAKSGMYHSEKREEFQALLNAAPRKEYDIVLVHKLNRFGRAGVKALNDRDYLERIGIEIISVTERLENTPEGRLMLYVITGMNEYYSRNLAGEVLKGLRENAYKGITTGGTPALGYNLGADKKLVINEQEAAAVRLIFKMYISGAGYGEIIDELNSRGFRTKRGAKFGKNSIYDILRNERYTGRFTYGKTKTVNGHRSQHKKEKEYISIEGGCPAIISADEWERVQRLMDVKKHDAASGKAKELYILSGKLFCGHCGARMVGNSRVSRGERYLYYDCNAKLRKKTCTKHAVKKNEIEQAVIQKLNQLAFSDDLIERFVDEAYKAQDNEMPDISGKIADIDKKISNLVTAIESGADIGPIKQRMADLSAQKDALLSSNVPKGDFLTRDEIRSRFKKFLNIADLPPAQQKFIISEYVTRIEVFDYDGGGHFCRITLSNNTSVDTDVLGSSAPKGSICGCCFFPKSRGTSSRFHM

SEQ ID NO: 4769 - protein, 516 aa, Unknown
  Description of Unknown: Integrase B4770 sequence
  PTHR30461:SF3,SM00857,G3DSA:1.10.10.2600,IPR036162,PS51737, G3DSA:3.40.50.1390,IPR006119,IPR038109,PF07508,IPR011109, SSF53041,PTHR30461,Coil,PS51736,cd00338, PF00239
MSYCIYLRKSRKDLEAEQHGEGETLARHERALLSLAKKNNLIISNIYREVVSGETIAARPVMQQLLHEVEQNLWDGVLVMEVERLARGDTIDQGVVQRAFQYSNTLIITPSKTYDPANEFDEEYFEFGLFMSRREYKTIKRRMQNGRYAAISEGKWPYNSAPYGFRRVKLEKEKGWTLAFDENEAPVVRLIFSMFTGPERVGIRSITRTLNSYGTKPRNSKLWSESTVRGILSNVVYDQCVKIGERKVVRTVENGVLTTARPRTSDYTIVSGRHPRLIDHDVFAEAQSYLGCGSPKPAGSNIIKNPLAGIIVCSECKKKMIRRPPSGTASRVPYDLMLCSTYDCPTIGSPLDLVEREVYNALSDWVEGYRLSGQMPSKSLIPEKEVLLESAQQTLDQLLRQKGTMYDLLEQGVYSTEVFLERSDSLQNRISEAESNVTQLKLELDKERQREANIEQFLPACEDLLSCYWDLSIPERNRLLKLLIESIEYKKLTKNKRGHLNEPNFELTIKPRIPRK

SEQ ID NO: 4770 - protein, 516 aa, Unknown
  Description of Unknown: Integrase B4771 sequence
  PTHR30461:SF3,SM00857,G3DSA:1.10.10.2600,IPR036162,PF13408, PS51737,IPR025827,G3DSA:3.40.50.1390,IPR006119,IPR038109, PF07508,IPR011109,SSF53041,PTHR30461,PS51736, cd00338,PF00239
MQRAVIYARFSSDMQREESIDAQVRACKAYAKNKGYIVVDTYADEAKSGRDVTKRDAYNQMLADAMEDKFDIIIFHKIDRNSRNELNYFTFKDKLEKLGIRYEYAAQPIDALSPEGQMMETMMVGMAAYYSRNLAKETKKGLNENAYKALFNGGCPPLGYKIVDKKYVIDEQEAAAVRLIFELYLNGYGYAAICRELSAKGYTTKAGKAFAKNSLHDILCNEKYIGTYTFNKIPRKKGGRNSHAAERPEDFISIENAFPAIISKDDWALVRAKMDRNRHRAASYTAKEKYLLSGKVFCGHCGSAMVGHRIRKRYCYYGCTRKEQTPTSKCPQKMIRAEVLEHWVLQILERVVFTVGGMRRIADAIVDAYEAEQKEQAGSQATLLQRKAVAEKKLNNLYKIFEEGNADEFDRQRLNQIKAELREINKSICETSVKPAKLLSKQKIAAILAAMKDEIFVKKNSYYVQQAVDLLVDHVTITDKVLKITLSTQNVCAYLVPRNRNGMSVYTFTIAINLAA

SEQ ID NO: 4771 - protein, 516 aa, Unknown
  Description of Unknown: Integrase B4772 sequence
  PTHR30461:SF3,SM00857,G3DSA:1.10.10.2600,IPR036162,PF13408, PS51737,IPR025827,G3DSA:3.40.50.1390,IPR006119,IPR038109, PF07508,IPR011109,SSF53041,PTHR30461,PS51736, cd00338,PF00239
MNRAVIYARYSSDMQREESVEAQIRACKYYAQQNGIDIIGIYADRAKSGMYHSEKREEFQALLNAAPRKEYDIVLVHKLNRFGRAGVKALNDRDYLERLGIEIISVTERLENTPEGRLMLYVITGMNEYYSRNLAGEVLKGLRENAYKGITTGGTPALGYNLGADKKLVINEQEAAAVRLIFKMYISGAGYGEIIDELNSRGFRTKRGAKFGKNSIYDILRNERYTGRFTYGKTKTVNGHRSQHKKEKEYISIEGGCPAIISADEWERVQRLMDVKKHDATSGKAKELYILSGKLFCGHCGARMVGNSRVSRGERYLYYDCNAKLRKKTCTKHAVKKNEIEQAVIQKLNQLAFSDDLIERFVDEAYKAQDNEMPDISGKIADIDKKISNLVTAIESGADIGPIKQRMADLSAQKDALLSSNVPKGDFLTRDEIRSRFKKFLNIADLPPAQQKFIISEYVTRIEVFDYDGGGHFCRITLSNNTSVDTDVLGSSAPKGSICGCCFFPKLRGTSSRFHM

SEQ ID NO: 4772 - protein, 516 aa, Unknown
  Description of Unknown: Integrase B4773 sequence
  PTHR30461:SF3,SM00857,G3DSA:1.10.10.2600,IPR036162,PF13408, PS51737,IPR025827,G3DSA:3.40.50.1390,IPR006119,IPR038109, PF07508,SSF53041,IPR011109,PF00239,PTHR30461, PS51736,Coil,cd00338
MKACLYLRYSSSSQTEQSIEGQQRVCLDYCKRQGITVVATYIDRATSASKHTEKRHEFLRMIKDAEKGLFDAVIVYKLDRFARNRYDSANYKYRLKKVGVRLISATENLTDSPESIILESVLEGMAEFYSAELAQKVSRGMQESAYKCQVTGGTIPLGYKIENKHFVIDPRTAPIVQEAFRLYDEGKSISMISEIFNNKGYRTTRGYAFNKNSFKSMFRNEKYIGVYQYKEHRVEGGVPAIVDKALFDRVQEKLKLTASAPARGKAKVDYLLSGKLFCGHCGEQMNGDTGTNAQGVTYNYYSCYGHKQHRCQKKSIRKELIEDVVVQDALTLLTPDIMNLIADATMQEYYKEIQIEGKIPALEEHLQELDAALKNITAAIERGVVPETLLNRMVELEKEKKSCLKELEYEKQKKDAITKQDVLEFLTRIAQGNIKTEAAKKRIINLFVNSVTLWDEPDGWFKITTAYNVTDIPSKTYRIKSDTGKGSDLERNGGPLGVNPNFIIFNLLLIQTKRHR

SEQ ID NO: 4773 - protein, 516 aa, Unknown
  Description of Unknown: Integrase B4774 sequence
  IPR036162,PS51737,IPR011109,PTHR30461,PS00397, PF00239,G3DSA:1.10.10.2600,IPR006119,SSF53041,cd00338, SM00857,IPR025827,IPR038109,PS51736,IPR006118, PF13408,G3DSA:3.40.50.1390,PF07508,Coil
MSKKVMRKSTESTDRIRTGAAYIRVSTDDQLEYSPESQLEEIKKYCLQHNILLPSEYIFVEEDGRSGRKSSNRYAFQNMIAMAKTKPKPFDVIVLWKFSRFARNQDESTFYKSMLRKKLGIDVVSVSEPLIDGMYGRLIEMIIEWQDEFYSVNLSGEVRRSMLSRARKGLYNGKMPLGYTKAPNENPVIEEQEAAIVRKIFDMYATGSDINYITRDLNDHGYKTKTGNHFDQEGVIYILENPFYIGKVRYNMRESSATSTLRDPEEWIISDSFHEPIIDMDTWNIVQERREHSKKLMQRYEHPVSHTKHWLSGLVKCPVCGKSLSHKEGYPRKSTHGGSYISGEGFQCLGYMKGLHTGSQYISAKKLTSAVITSLHEVLENVTDVSFELVRTYEPTIELDRQRYQRELASLDRKLERIREAYMNEIDTLEDYKRNKEMIEKRRADLEALLDDMTTAASGPENYKEQFLNRVQSVLDIIESDAPNDLKAEALRGIVRKIVFYKDTNTLEFHYYLMVE

SEQ ID NO: 4774 - protein, 516 aa, Unknown
  Description of Unknown: Integrase B4775 sequence
  cd00338,SM00857,G3DSA:1.10.10.2600,IPR036162,PF13408, PS51737,G3DSA:3.40.50.1390,IPR025827,IPR006119,IPR038109, PF07508,IPR011109,SSF53041,PTHR30461,PS51736, Coil,PF00239
MKDAVIYARYSSDRQREESIEGQIRVCQDYAKRNGFHIINIYTDRALTGRSDKRPGFQMMIRDAATHTFQYVIVYKLNRFSRDRYDSANYKHKLKKQGVKLLSAMENISDDPAGILLESVIEGISEYYSAELSENVIRGMTQSALEGKWPGGNIPLGYKLDKENRLIIDEEKAPIVRAVFQMFLDGMSVPRIVQELNNKKYTTNAGKEFSRSRVYYILHNERYIGVFMWKDIRKDDLIPPIVSKDTFYLAQAKVKKMKKHPYRTNGKYLLSGKIFCAACGSKVAGTSGKSCMGAKYYYYACSHHHKSSRYPYCETKNIRADVLEDLIYSKTNEIISNKAAVQAIARQAVKLQGSTSASLEVQALENRISDVSKKVQNCVRAIESGIISDAVSVSLSENERILAALKDELAKAKLLQESGSLTEEKICYFFEKIGQKAKETEKYKNILLTSLVRAVFICNDYIEIQYNYAEQLPILTNPVRIENSSCESTNGGHILHTHELNNLIFYERYFCIRIAV

SEQ ID NO: 4775 - protein, 516 aa, Unknown
  Description of Unknown: Integrase B4776 sequence
  PTHR30461:SF3,SM00857,G3DSA:1.10.10.2600,IPR036162,PF13408, IPR025827,PS51737,G3DSA:3.40.50.1390,IPR006119,IPR038109, PF07508,IPR011109,SSF53041,PF00239,PTHR30461, PS51736,Coil,cd00338
MARKKKVSPGNRLVAYYRYSGGSQQTEQSIEGQRRDCEAYARQHGLTIVHEYIDRHISGRGVESRLAFQQMIADSSKHLFDLVICWKTDRFARNRYDSAVYKKKLRDNGVRILYAAESSVEGPEGIILEGLMESLAEYYSAELAQKMRRGMRESALKGKAINPNRPLGLTTDEHKRFIIDEKNAPTIRFIFEHYAAGESSASIVDQLNAAGLRTSKGNSFNKCSIPRIIQNEAYHGVYICKAYDVRIDGAVPAIIDDDLWKRAQKMLTLNKQHRAPHSSHADYLLSGKLFCGCCHSLMRGISGHNCRNDVYYYYACGNKADGGTCKKKNIPKDVAENLVVNAICENILRPDTLEDLADAIAAAQQADVNQPDPERAMLEQNLADVRRKINNIIESIENGTASSRLSARLADLEQQESTLNYQLESLKEVHPPVLDRERILFLLEQFLISPNERTEDYNRRIIDTFVNRIEITDTEMLIYFNLSEASASEKQKNSQPNSCSTGNHLVRVARIELTAS

SEQ ID NO: 4776 - protein, 516 aa, Unknown
  Description of Unknown: Integrase B4777 sequence
  PTHR30461:SF3,cd00338,SM00857,G3DSA:1.10.10.2600,IPR036162, PF13408,PS51737,G3DSA:3.40.50.1390,IPR025827,IPR006119, IPR038109,PF07508,IPR011109,SSF53041,PTHR30461, PS51736,Coil,PF00239
MKTAVIYARYSSDKQTEQSIEGQLYDCYNYAKQHGITVVQEYIDRAMTGKNDDRPAFQQMLHDSAQHKWDSVLVWKLDRFARNTIDSAVNRQILAKNGVRLLSVMESFGDDASGQMMTHIIEAINEYYSADLREKTIRGMRQSAMKAQTTGHIPLGYKVVDKKLVIDDETRIIPETVFRMYAEGERLTDIANHLNSQGYRNRRGRLFTTNSFYNMLANEKYIGIYKYDDIVIEGGIPQMIPNEVFDAVREKLITNRKRAAKNTAKADYYLSGKLYCGHCGEPMSGLSGTGRNGVKHYYYRCNGVQKKSGCHKKLEKKYLIEDEVCRAARSAFEQMDKAETAETIYQMYLQTVRNEYAPAELEKELTECTKQAENVVNAIAQTGGNQLLYDKVRELEERKEQLGSALRLSQAMTDNVPSVEQITVFIDDILATDINTTEGKKAIADIMISKVYVYDDKLTVIFKDKDGKSVDIPLSAVSDSSSADCAPSALGSQIIVKVTLLNRNESNVCKALFYVI

SEQ ID NO: 4777 - protein, 516 aa, Unknown
  Description of Unknown: Integrase B4778 sequence
  cd00338,SM00857,G3DSA:1.10.10.2600,IPR036162,PF13408, PS51737,IPR025827,G3DSA:3.40.50.1390,IPR006119,IPR038109, PF07508,IPR011109,SSF53041,PTHR30461,PS51736, Coil,PF00239
MKDAVIYARYSSDRQREESIEGQIRVCQDYAKRNGFHIINIYTDRALTGRSDKRPGFQMMIRDAATHTFQYVIVYKLNRFSRDRYDSANYKHKLKKQGVKLLSAMENISDDPAGILLESVIEGISEYYSAELSENVIRGMTQSALEGKWPGGNIPLGYKLDEENRLMIDEGKAPIVRAVFQMFLDGMSVPRIVQELNDKKYTTNAGKEFSRSRVYYILHNERYIGVFMWKDIRKDDLIPPIVSKDTFYLAQAKVKKMKKHPYRTNGKYLLSGKIFCAACGSKVTGTSGKSCMGAKYYYYACSHHHKSSRYPYCETKNIRADVLEDLIYSKTNEIISNKAAVQAIARQAVKLQGSTSASLEVQALENRISDVSKKVQNCVRAIESGIISDAVSVSLSENERILAALKDELAKAKLLQESGSLTEEKICYFFEKIGQKAKETEKYKNILLTSLVRAVFICNDYIEIQYNYAEQLPILTNPVRIENSSCESTNGGRILHIYELNKLIFHERYFCIRIAV

SEQ ID NO: 4778 - protein, 516 aa, Unknown
  Description of Unknown: Integrase B4779 sequence
  PTHR30461:SF3,SM00857,G3DSA:1.10.10.2600,IPR036162,PF13408, PS51737,G3DSA:3.40.50.1390,IPR025827,IPR006119,IPR038109, PF07508,IPR011109,SSF53041,PF00239,PTHR30461, PS51736,Coil,cd00338
MKAVIYARFSSHNQREESIEGQVRACQRFAKEHDMTVIEIYADRGLSGLHADNRPEFQRMIADSDRHKFQALIMWNLDRFSRDKYDTAVYKSRLKKNGVTLYYSDQNIPDTPEGIILESLLEGFAQYYSANLSRNAKRGLQENARKCLWNGGGLPLGYTIDETKHFVIDPAGAACVRLIFQMYADNHSIKEIVSTLNEKGYRTVKGNKFRLGSIQGVLRNRKYIGEYHASGITVPNGVPAIVDVELFNAVQEKIGVVSAAKARNKAEIPYLLTTKVFCGHCGSPMIGESGTGKGGSTYRYYKCSCRKNRKGQCDKRTEQKEWLEETVVAQTVEKFLHPDVIEDVSNACAAVLEQDCQNNALLKALNAQLADVEKSSRNLIKAIEAGVFTASMRERLAELEQQKEDITVQIAREQLRKPQLSAEQIAFFLRSFLDGDARDPNFQERIIESLVRRVDVYDEGPGNRKLTVFYNLKKNNHSSVSVKCSDSESVGLPKGRLRKQPIFFFASCRRTRIGRQ

SEQ ID NO: 4779 - protein, 516 aa, Unknown
  Description of Unknown: Integrase B4780 sequence
  PTHR30461:SF3,cd00338,SM00857,IPR036162,PF13408, IPR025827,G3DSA:3.40.50.1390,PS51737,IPR006119,PF07508, SSF53041,IPR011109,PTHR30461,PS51736,Coil, PF00239
MKAIYVRQSLDKKDSLSIAAQIDDCINLCKRNGWNDYKVYKDKGWSAKNLERPAFQKLNRDVQSGLIDGVVCYKIDRISRSIRDFVNLIVDYQELGVHFISFADNINTAAPGGMMMATLFVSLAQMEREAIITRVTDNYYYRCELGFWGGGPAPYGFHLKKIVDNGQKHTVLEPDPEEADTVRRLYDWYLEPGATIRSIMNRAHLAGMRTRGGGHWTSRVLSELLSRPLYAPNTMDIFNYFASQGVRVRVSPDQCDGKQSFNLFGLRDRNSAHPKRSRPVNEMTFAISKHESIIDSDTFLKVQFKKKAKLAVTPRAGTSHHTVLSGLVKCGYCGRAMSPSGSKGGRYFTCSGRRNYALGVCKGKSVKIDTLDQIVLHDLADYISRPDIKAKFKNGKTQSLEASEQAKINTYQQDIAAIDISIQKLVDACTTSGDVAVKYLNERIEQMDAEKQKLQAEIFQIKNKSFRKLELDGMNIDNAPASLESGSFEEKKYLCNFFIEKIIFTAKDDVQIKYTV

SEQ ID NO: 4780 - protein, 516 aa, Unknown
  Description of Unknown: Integrase B4781 sequence
  IPR036162,PS51737,IPR011109,PTHR30461,PS00397, PF00239,G3DSA:1.10.10.2600,IPR006119,SSF53041,cd00338, SM00857,IPR025827,IPR038109,PS51736,IPR006118, PF13408,G3DSA:3.40.50.1390,PF07508,Coil
MSKKVMRKSTESTDRIRTGAAYIRVSTDDQLEYSPESQLEEIKKYCLQHNILLPSEYIFVEEDGRSGRKSSNRYAFQNMIAMAKTKPKPFDVIVLWKFSRFARNQDESTFYKSMLRKKLGIDVVSVSEPLIDGMYGRLIEMIIEWQDEFYSVNLSGEVRRSMLSRARKGLYNGKMPLGYTKAPNENPVIEEQEAAIVRKIFDMYASGSDINYITRDLNDHGYKTKTGKRFDQEGVIYILENPFYIGKVRYNMRESSATSTLRDPEEWIISDSHHPPIIDQNTWDIVQERRERSKKIMQRYEHPVSHTKHWLSGLVKCPICGKSLSHKEGYPRKAPNGSTYISGEGFQCLGYIKGLHAGSQYISAKKLTGAVISSLHEVLESVTDVSFELVRTYEPTVELDRQRYQRELASLDRKLERIKEAYLNEIDTLEDYKRNKEMIEKRRADLEALLDDMTTAASGPENYKEQFLNLVQSVLDIIESDAPNDLKAEALRGIVRKIVFYKDTNTLEFHYYLMVE

SEQ ID NO: 4781 - protein, 516 aa, Unknown
  Description of Unknown: Integrase B4782 sequence
  PTHR30461:SF3,IPR036162,PS51737,IPR011109,PTHR30461, PF00239,G3DSA:1.10.10.2600,IPR006119,SSF53041,cd00338, SM00857,IPR025827,IPR038109,mobidb-lite,PS51736, PF13408,G3DSA:3.40.50.1390,PF07508,Coil
MYEDIKTACLYVRFSSHNQTEQSIEGQTRVCRDFCKRHNIRIVEIYADRATSASKDIEKRVQFLKMIKDSEKGLFDAVIVYKLDRFARSRYDSATYKYRLKRNGVQLISATENISNDPEGIILESVLEGMAEFYSAELSQKINRGMRESAYKHNSIGGAIPLGYKIEDKKLVIDPKTAPIVKEAFEKYADGETVAEICRQFNARGYKTSKGTAFGKSSFTKIFRNERYIGVYTFHDYRAEDAIPAIIDKDLWDRVQLRVGKIKNAPARNKAKVVYLLSGKIFCGHCGSKMNGNCNAGNYCYYQCYGKKNGNVDCKKKNIRKEFIERLVAQDALSLLTDEYIEQIATIACEKNQHEIELDSALPTIRDRIHQVDLSLNHLLKAIESGSAPDMLVKRMGELEKEKKDLQAQAKKESEDIVELDKAQVIYWLEQFRGGSIEDEEFCRMLIDLFVNSVTVWDEDDNTYKVTVAYNLTSLPTKTYRLNKGGTLSDFASNAPASDARNPRSVLPSVRRAGQR

SEQ ID NO: 4782 - protein, 516 aa, Unknown
  Description of Unknown: Integrase B4783 sequence
  PTHR30461:SF3,SM00857,G3DSA:1.10.10.2600,IPR036162,PS51737, G3DSA:3.40.50.1390,IPR006119,IPR038109,PF07508,SSF53041, IPR011109,PTHR30461,Coil,PS51736,cd00338, PF00239
MSYCIYLRKSRKDLEAEQHGEGETLARHERALLSLAKKNNLIISNIYREVVSGETIAARPVMQQLLREVEQNLWDGVLVMEVERLARGDTIDQGVVQRAFQYSNTLIITPSKTYDPANEFDEEYFEFGLFMSRREYKTIKRRMQNGRYAAISEGKWPYNSAPYGFRRTKLEKEKGWTLAFDENEAPVVRLIFSMFTGPERVGIRSITRTLNSYGTKPRNSKLWSESTVRGILSNVVYDQCVKIGERKVVRTVENGVLTTTRPRTSDYTIVSGRHPRLIDHDVFAEAQSYLGCGSPKPAGSNIIKNPLAGIIVCSECKKKMIRRPPSGTASRVPYDLMLCSTYDCPTIGSPLDLVEREVYNALSDWVEGYRLSGQTPSKSLIPEKEVLLESAQQTLDQLLRQKGTMYDLLEQGVYSTEVFLERSASLQSRISEAQSNVAQLKLELDKERQREANIEQFLPACEDLLSCYWDLSIPERNRLLKLLIESIEYKKLTKNKRGHLNEPNFELTIKPRIPRK

SEQ ID NO: 4783 - protein, 516 aa, Unknown
  Description of Unknown: Integrase B4784 sequence
  PTHR30461:SF3,SM00857,IPR006118,G3DSA:1.10.10.2600,IPR036162, PS51737,G3DSA:3.40.50.1390,Coil,IPR006119,IPR038109, PF07508,SSF53041,IPR011109,PTHR30461,PS00397, PS51736,cd00338,PF00239
MSKKVMRKSTESTDRIRTGAAYIRVSTDDQLEYSPESQLEEIKRYCLQHNILLPSEYIFVEEDGRSGRKSSNRYAFQNMIATAKTKPKPFDVIVLWKFSRFARNQDESTFYKSMLRKKLGIDVVSVSEPLIDGMYGRLIEMIIEWQDEFYSVNLSGEVRRSMLSRARKGLYNGKMPLGYTKAPNENPVIEEQAAAIVRKIFDMYASGSDINYITRDLNDHGYKTKTGKRFDQEGVIYILENPFYIGKVRYNMRESSATSTLRDPEEWIISDSHHPPIIDQNTWDIVQERRERSKKIMQRYEHPVSHTKHWLSGLVKCPICGKSLSHKEGYPRKAPNGSTYISGEGFQCLGYMKGLHTGSQYISAKKLIGAVISSLHEVLESVTDVSFELVRTYEPTVELDRQRYQRELASLDRKLERIKEAYLNEIDTLEDYKRNKEMIEKRRADLEILLSELTTAASGPENYKEQFLSRVQSVLDIIESDAPNDLKAEALRGIVRKIVFYKDTNTLEFHYYLMVE

SEQ ID NO: 4784 - protein, 516 aa, Unknown
  Description of Unknown: Integrase B4785 sequence
  PTHR30461:SF3,SM00857,G3DSA:1.10.10.2600,IPR036162,PS51737, G3DSA:3.40.50.1390,IPR006119,IPR038109,PF07508,SSF53041, IPR011109,PF00239,PTHR30461,PS51736,Coil, cd00338
MTMDRSAHSRLAVTYRRISSLNQVDNNSMCAQEQAIKDYAKKNHLKIVEAFHDLAKSGTSVQNRTGYQQMMEYLEKHPEVTCVLLHHLDRLHRNVRNQLNDIYTLKCKGIAVVTTDGLNSMDEDCMSEILDEAASAEKYSRRLSKETMKGLRVNAEQMLHNGGLPPYGYTVGSDKKLYIDEAKAPAVRKMFEMYAAGMSYKQIAQWLDDNGFTTVKGGNFKSTSIKTILENEKYCGTYFWNKRASKDFRGMRNSHQQKEDYYQVHGAIEPIVSEELFDKVQERLHDNKNRICNYNGKNYYPFNGKVFCGKCGKKLSGHVQYSRTNKNNDLVKQYRFSCSCPAVKTVNEKYLDDMVINGLRACIFSPENYEELVDKLNAYGKIQERVIDLQIEVLRSDKENAEKRCSNLMDIAENGDGTKSIVDKIKKLDKRMAKIDRRISEYEAAKKVFKAEDIDRIRDRFTEYVMENRNEDVLGFLEDTVDRIEVDDTVRVHLKKNICVDRETKKGFRQERSIKK

SEQ ID NO: 4785 - protein, 516 aa, Unknown
  Description of Unknown: Integrase B4786 sequence
  PTHR30461:SF3,SM00857,G3DSA:1.10.10.2600,IPR036162,PF13408, PS51737,IPR025827,G3DSA:3.40.50.1390,IPR006119,IPR038109, PF07508,IPR011109,SSF53041,PTHR30461,Coil, PS51736,cd00338,PF00239
MARKKKVSPGNRLVAYYRYSGGSQQTEQSIEGQRRDCEAYARQHGLTIVHEYIDRHISGRGVESRLAFQQMIADSSKHLFDLVICWKTDRFARNRYDSAVYKKKLRDNGVRILYAAESSVEGPEGIILEGLMESLAEYYSAELAQKMRRGMRESALKGRAINPSRPLGLTTDEHKRFIIDEKNAPTIRFIFEHYAAGESSASIVEQLNAAGLRTSKGNAFNKCSIPRIIQNEAYHGVYICKAYDVRIDGAIPAIIDDDLWKRAQKMLTLNKQHRAPHSSHADYLLSGKLFCGCCHSLMRGISGHNCRNDVYYYYACGNKADGGTCKKKNIPKDVAENLVVNAICENILRPDTLEDLADAIAAAQQADVNQPDPERAMLEQNLADVHRKINNIIESIENGTASSRLSARLADLEQQESALNYQLESLKEVHPLVLDRERILFLLEQFLISPNERTEDYNRRIIDTFVNRIEITDTEMLIYFNLSEASASEKQKNSQPNSCSTGNHLVRVARIELTAS

SEQ ID NO: 4786 - protein, 516 aa, Unknown
  Description of Unknown: Integrase B4787 sequence
  PTHR30461:SF3,cd00338,SM00857,IPR036162,PF13408, IPR025827,G3DSA:3.40.50.1390,PS51737,IPR006119,PF07508, SSF53041,IPR011109,PTHR30461,PS51736,Coil, PF00239
MKAIYVRQSLDKKDSLSIDAQIEDCINLCKRNGWNDYKVYKDKGWSAKNLDRPAFRQLNQDVQNGLIDGVICYKIDRISRSIRDFVNLIVDYQDLGVHFISFADNINTAAPGGMMMATLFVSLAQMEREAIITRVTDNYYYRCELGFWGGGPAPYGFRLVKTTENGQKHTILEPVPEEAEVIRTFFAWYLEPGATVRSIMNRAHLAGMQTRSGSDWTSRVLSDMLSKPLYAPNSMDIYNFYASQGVRVKISPEQCDGKQSLNIFGMRDRNSAHPKRSRPVSEMTLAIAKHKPIVDSDTYLKVQYKKKSRLAVTPRAGTSRTAVLSGLVKCGYCGRAMSPSGAKNGRYFTCSGRRNYAKGVCQGKSVKMDFLDDYVLNDLADFISQPEIKSMFKDGKAQRIPSSEQAKINEYKQRIATIDIDIQKLLDACLTSGDVAVKYLNERIDLLDTEKQNLQAEILAIQNKSNRKLELEGLDINSAPTALAGGEFDTKKYLCNFFIEQIIFYDRDNVQIRYKM

SEQ ID NO: 4787 - protein, 516 aa, Unknown
  Description of Unknown: Integrase B4788 sequence
  IPR036162,PS51737,IPR011109,PTHR30461,PS00397, PF00239,G3DSA:1.10.10.2600,IPR006119,SSF53041,cd00338, SM00857,IPR025827,IPR038109,PS51736,IPR006118, PF13408,G3DSA:3.40.50.1390,PF07508,Coil
MSKKVMRKSTESTDRIRTGAAYIRVSTDDQLEYSPESQLEEIKKYCLQHNILLPSEYIFVEDEGRSGRKSSNRYAFQNMIATAKTKPKPFDVVVLWKFSRFARNQDESTFYKSMLRKKLGIDVVSVSEPLIDGMYGRLIEMIIEWQDEFYSVNLSGEVRRSMLSRARKGLYNGKMPLGYTKAPNENPVIEEQEAAIVRKIFDMYASGSDINYITRDLNDHGYKTKTGKRFDQEGVIYILENPFYIGKVRYNMRESSATSTLRDPEEWIISDSHHPPIIDQNTWDIVQERRERSKKIMQRYEHPVSHTKHWLSGLVKCPICGKSLSHKEGYPRKAPNGSTYISGEGFQCLGYIKGLHAGSQYISAKKLTGAVISSLHEVLESVTDVSFELVRTYEPTVELDRQRYQRELTSLDRKLERIREAYMNEIDTLEDYKRNKEMIEKRRADLEVLLSELTTAASGPENYKEQFLSRVQSVLDIIESDAPNDLKAEALRGIVRKIVFYKDTNTLEFHYYLMVE

SEQ ID NO: 4788 - protein, 516 aa, Unknown
  Description of Unknown: Integrase B4789 sequence
  PTHR30461:SF3,cd00338,SM00857,G3DSA:1.10.10.2600,IPR036162, PF13408,IPR025827,G3DSA:3.40.50.1390,PS51737,IPR006119, IPR038109,PF07508,IPR011109,SSF53041,PTHR30461, PS51736,Coil,PF00239
MLRAALYARFSSENQREESILAQFRDSTEYCKKHNYAIVAKYADEAKSGTTTIGREQYKLMLKDAQKGKFDVVVFHKIDRNARNELDYYITKHKLEEAGVKYAYSRQDIDSTSPEGQMMESMLVGMAAYYSRNLSNEIKKGLRENAIQGKCTGGRPPYGFSVDPDKKLIIDEKEAAAVRMIFDWYSAGVHYGVIRKRLFNAGYRNRAGKEFTIASIYEILRNRKYVGDLYLGKTLFRKGKRNTHQTSDNVQYFENVIPAIVSREIFEEVQVKLDQNKRRSGAGNAKAIYALSGLIHCGQCGSAMVAHSTKNSRGIKNYYYRCPKGRLLGEEKCPQKFINRDDIESTVYQLIRKLFTAPDAHDQIKRIIAKNNMTVKVPDYTEQIKRLKKQESDASKRLDKLYDLYMTDREDEFTSAKMAQIKEEILRLRTQIKEAENRQAIAQSTTFDIDKIIDTFQKQLKQKQSPEFIKTLFELAVKNVIVYPDKIKVVLLVTQEKSCRLPLILQFKIPLIKKAI

SEQ ID NO: 4789 - protein, 516 aa, Unknown
  Description of Unknown: Integrase B4790 sequence
  PTHR30461:SF3,SM00857,G3DSA:1.10.10.2600,IPR036162,PF13408, IPR025827,G3DSA:3.40.50.1390,PS51737,IPR006119,IPR038109, PF07508,SSF53041,IPR011109,PF00239,PTHR30461, PS51736,Coil,cd00338
MRVSVNLNAQKPDTTTNAVIYARYSSHGQTEQSIEGQLAKGHEYAAAQGYTVVHEYIDRAMTGRNDNREAFQKMLSDTGKHQFQVVIVWKVDRFGRNREEIAFNKHTCKKNGVRVEYVAESLPNSPEAVILESVLEGMAEYYSIQLSQNIRRGQLESAKKCQCVGGSVPLGYTLDSDKHFVIDPQTAPVVKKIFDLYAEGATISEITGQLNEQGIRTARKQLFTKNSLTKLLKNEKYIGVYTYKDIVRVEGGVPAIVDKSTFDRVQELLKINRRAPSHTWTKVEYLLTDKLFCGHCGSPMVGESGFSHTGAKYSYYGCIKRRREKACDKKPVRQDWIEALVLDETVKLLHDDELMEYIIDRTWEYYQVTDKVQEEKAVLEAQLAEVDKAINNLVRAIEAGIFNAATKSRMDELDAQKAALTASLADLELTSGIRITRDHIEYFLLRLRDLDVKDRECQKRLVQTFVNAVFIYDDGRVKITYNYSGQSSTITLNQIASAEKGKGFVCCLPCSTDGQG

SEQ ID NO: 4790 - protein, 516 aa, Unknown
  Description of Unknown: Integrase B4791 sequence
  PTHR30461:SF3,SM00857,G3DSA:1.10.10.2600,IPR036162,PS51737, G3DSA:3.40.50.1390,IPR006119,IPR038109,PF07508,SSF53041, IPR011109,PF00239,PTHR30461,PS51736,Coil, cd00338
MSYCIYLRKSRKDLEAEQHGEGETLARHERALLSLAKKNNLIISNIYREVVSGETIAARPVMQQLLHEVEQNLWHGVLVMEVERLARGDTIDQGVVQRAFQYSNTLIITPSKTYDPANEFDEEYFEFGLFMSRREYKTIKRRMQNGRYAAISEGKWPYNSAPYGFRRTKLEKEKGWTLAFDENEAPVVRLIFSMFTGPERVGIRSITRTLNSYGTKPRNSKLWSESTVRGILSNVVYDQCVKIGERKVVRTVENGVITTARPRTSDYTIVSGRHPRLIDHDVFAEAQSYLGCGSPKPAGSNIIKNPLAGIIVCSECKKKMIRRPPSGTASRVPYDLMLCSTYDCPTIGSPLDLIEREVYNALSDWVEGYRLSGQTPSKSLIPEKEVLLESAQQTLDQLLRQKGTMYDLLEQGVYSTEVFLERSDSLQNRISEAESNVAQLKLELDKERQREANIEQFLPACEDLLSCYWDLSIPERNRLLKLLIESIEYKKLTKNKRGHLNEPNFELTIKPRIPRK

SEQ ID NO: 4791 - protein, 516 aa, Unknown
  Description of Unknown: Integrase B4792 sequence
  PTHR30461:SF3,cd00338,SM00857,G3DSA:1.10.10.2600,IPR036162, PF13408,PS51737,IPR025827,G3DSA:3.40.50.1390,IPR006119, IPR038109,PF07508,IPR011109,SSF53041,PTHR30461, PS51736,Coil,PF00239
MARKKIKKGDGQRLVAYYRYSGGSGQTEQSIEGQRRDCEAYARLHGMTIQHEYIDRHISGKTDDRGAFQQMIADSDKGAFDYVICWKTDRFARNRYDSAVYKKRLRDNGVEILYAAESNISGSEGIIIEGLMEALAEYYSAELSEKMRRGMRESALKGRAISRCRALGLTTDSDKRFVIDPKTAPIVRFIFERYAAGDSSMSIVEQLNAKGLRTSQGNQFNKCSIPRIIQNEAYRGVYVSKAYNVRIEGAIPAIIDDELWERAQIMLKLNQQKRTKNAAKADYFLSGKLFCKECGSPMKGVSGHSSTNGEVYRYYACSNPKCHKHNIPKDDLEGKVVQSICDHLLQPESMDALADAMIEVQKQDAVKPNAERLAVEENLADVRRRSKNILDAIENGTANPQLYARLDELTERENTLSYQLATLQNEKAIVFTKEQFLFLLEQFCIEPSERSEEYGRRLINTFVTNMEVSDSELFIYFNVSEETVNKTKNAPQKNFQKESSSEMRLVRVARIELTAS

SEQ ID NO: 4792 - protein, 516 aa, Unknown
  Description of Unknown: Integrase B4793 sequence
  PTHR30461:SF3,SM00857,G3DSA:1.10.10.2600,IPR036162,PF13408, IPR025827,G3DSA:3.40.50.1390,PS51737,IPR006119,IPR038109, PF07508,IPR011109,SSF53041,PF00239,PTHR30461, PS51736,Coil,cd00338
MARKKKVSPGNRLVAYYRYSGGSQQTEQSIEGQRRDCEAYARQHGLTIVHEYIDRHISGRGVESRLAFQQMIADSSKHLFDLVICWKTDRFARNRYDSAVYKKKLRDNGVRILYAAESSVEGPEGIILEGLMESLAEYYSAELAQKMRRGMRESALKGKAINPNRPLGLTTDEHKRFIIDEKNAPTIRFIFEHYAAGESSASIVDQLNAAGLRTSKGNSFNKCSIPRIIQNEAYHGVYICKAYDVRIDGAIPAIIDDDLWKRAQKMLTLNKQHRAPHSSHADYLLSGKLFCGCCHSLMRGISGHNCRNDVYYYYACGNKADGGTCKKKNIPKDVAENLVVNAICENILRPDTLEDLADAIAAAQQADVNQPDPERAMLEQNLADVHRKINNIIESIENGTASSRLSARLADLEQQESTLNYQLESLKEVHPPVLDRERILFLLEQFFISPNERTEDYNRRIIDTFVNRIEITDTEMLIYFNLSEASASEKQKNSQPNSCSTGNHLVRVARIELTAS

SEQ ID NO: 4793 - protein, 516 aa, Unknown
  Description of Unknown: Integrase B4794 sequence
  PTHR30461:SF3,SM00857,G3DSA:1.10.10.2600,IPR036162,PS51737, G3DSA:3.40.50.1390,IPR006119,IPR038109,PF07508,IPR011109, SSF53041,PF00239,PTHR30461,PS51736,Coil, cd00338
MSYCIYLRKSRKDLEAEQHGEGETLARHERALLSLAKKNNLIISSIYREVVSGETIAARPVMQQLLHEVEQNLWDGVLVMEVERLARGDTIDQGVVQRAFQYSNTLIITPSKTYDPANEFDEEYFEFGLFMSRREYKTIKRRMQNGRYAAISEGKWPYNSAPYGFRRTKLEKEKGWTLAFDENEAPVVRLIFSMFTGPERVGIRSITRTLNSYGTKPRNSKLWSESTVRGILSNVVYDQCVKIGERKVVRTVENGVLTTTRPRTSDYTIVSGRHPRLIDHDVFAEAQSYLGCGSPKPAGSNIIKNPLAGIIVCSECKKKMIRRPPSGTASRVPYDLMLCSTYDCPTIGSPLDLVEREVYNALSDWVEGYRLSGQMPSKSLIPEKEVLLESAQQTLDQLLRQKGTMYDLLEQGVYSTEVFLERSASLQSRISEAQSNVAQLKLELDKERQREANIEQFLPACEDLLSCYWDLSIPERNRLLKLLIESIEYKKLTKNKRGHLNEPNFELTIKPRIPRK

SEQ ID NO: 4794 - protein, 516 aa, Unknown
  Description of Unknown: Integrase B4795 sequence
  PTHR30461:SF3,IPR036162,PS51737,IPR011109,PTHR30461, PF00239,G3DSA:1.10.10.2600,IPR006119,SSF53041,cd00338, SM00857,IPR025827,IPR038109,mobidb-lite,PS51736, PF13408,G3DSA:3.40.50.1390,PF07508,Coil
MQKNNNIGNRCVIYARYSCSNQTEQSIEGQMHDCEQFAARNNLQIVNSYIDRATTATTDKRPQFLKMIADSKQCVFDVVLVWKLDRFSRNRYDSAMYKKKLKDNGVRVMSAMENITDSPEGVLMESVLEGFAEYFSKDLSQKVKRGMRETAAKHKITNRIPFGYCKSEEDTYIPDPHTANAVCKVFDMYITGFRKSDIADWLNSNGYKTSYGNQFTLTAITPLIKNTRYIGKYYYADNEYTDETQRIVTDDIFYKAQQKAIANQHGGSCKAIERYLLSNKLYCGYCHNKMIGECGKNQNGLAYHYYTCVGRKRKHICNRKNIKKKDIEQYVINAISCLLNDEYAINKIIETAINYQQNDVEHINEIKDIESTIKEIERKISNILSAIEAGIFTDSTKNRLQELENQKTRLTQELNYKNQSSTKIPRTTLKQILKNLDLSEAATNPEKQNIIDLLIHRVYLWQDKILIVFNQSNLCDNEISVDDTDVNTIIKTLSEPNASSSDSVEYGTPDQSRTGD

SEQ ID NO: 4795 - protein, 516 aa, Unknown
  Description of Unknown: Integrase B4796 sequence
  PTHR30461:SF3,IPR036162,PS51737,IPR011109,PTHR30461, PS00397,PF00239,G3DSA:1.10.10.2600,IPR006119,SSF53041, cd00338,SM00857,IPR025827,IPR038109,PS51736, IPR006118,PF13408,G3DSA:3.40.50.1390,PF07508,Coil
MSKKVMRKSSEVTEQIRTGAAYIRVSTDDQLEYSPESQLEEIKKYCLQHNILLPSEFIFVEEDGRSGRKSSNRYAFQNMIAMAKTKPKPFDVIVLWKFSRFARNQDESTFYKSMLRKKLGIDVVSVSEPLIDGMYGRLIEMIIEWQDEFYSVNLSGEVRRSMLSRARKGLYNGKMPLGYTKAPNENPVIEEQEAAIVRKIFDMYATGSDINYITRALNDHGHKTKTGNHFDQEGVIYILENPFYIGKVRYNMRESSATSTLRDPEEWIISDSFHEPIIDMDTWNIVQERRERSKKLMQRYEHPVSHTKHWLSGLVKCPVCGKSLSHKEGYPRKSAHGGSYISGEGFQCLGYMKGLHTGSQYISAKKLTSAVITSLHEVLESVTDVSFELVRTYDPTVELDRQRYQRELASLDRKLERIKEAYLNEIDTLEDYKRNKEMIEKRRADLEALLDDMTTAASGPENYKEQFLNRVQSVLDIIESDAPNDLKAEALRGIVRKIVFYKDTNTLEFHYYLMVD

SEQ ID NO: 4796 - protein, 516 aa, Unknown
  Description of Unknown: Integrase B4797 sequence
  SM00857,IPR006118,G3DSA:1.10.10.2600,IPR036162,PS51737, G3DSA:3.40.50.1390,Coil,IPR006119,IPR038109,PF07508, IPR011109,SSF53041,PTHR30461,PS00397,PS51736, cd00338,PF00239
MAKKVMRKSAESTDRIRTGAAYIRVSTDDQLEYSPESQLEEIKKYCLQHNILLPSEFIFVEEEGRSGRKSSNRYAFQNMIAMAKTKPKPFDVIVLWKFSRFARNQDESTFYKSMLRKKLGIDVVSVSEPLIDGMYGRLIEMIIEWQDEFYSVNLSGEVRRSMLSRARKGLYNGKMPLGYTKPPNENPVIEEQEAAIVRKIFDMYASGSDINYITRWLNDHGYKTKTGKKFDQEGVIYILENPFYIGKVRYNMRESSATSTLRDPDEWIIADSFHEPIIDMETWNIVQERRERSKKLAGRYEHPVSHAKHWLSGLVKCPVCGKSLSHKEGYPRKSTNGTTYLSGEGFQCLGYMKGLHSGSQFISAKKLTDSVITSLRDVLESTTDVSFELVRTYEPTIELDCQRYQRELASLDRKLERIREAYMNEIDTLEDYKRNKEMIEKRRADLEALLADMTTAASGPENYKEQFLNRVQSVLDIIESDAPNDLKAEALRGIVRKIVFYKDTNTLEFHYYLMVE

SEQ ID NO: 4797 - protein, 516 aa, Unknown
  Description of Unknown: Integrase B4798 sequence
  PTHR30461:SF3,SM00857,G3DSA:1.10.10.2600,IPR036162,PF13408, IPR025827,G3DSA:3.40.50.1390,PS51737,IPR006119,IPR038109, PF07508,SSF53041,IPR011109,PTHR30461,Coil, PS51736,cd00338,PF00239
MEERAKAVIYARFSSDKQREESIDGQIRECTAYAESQNLEVIGAYIDRALSARSDNRPDFLRMIADSARKTFQYVIVYQLDRFSRSRYDSAIYKNKLKKNGVRVLSAKEHIGDDPSSIILESMLEGYAEYYSAELSQKVKRGMTENILEGKWVGCRVPLGYKLTADKKLQIVPRDADAVRLIYKMYNSNERIIDIVRYLNAHRYKTAAGRTFNRSSLTKILGNKIYIGTYTWDSHVIEHFAPPILADGVWEAAQKRTKQHKQHPRPKRRSADYALTGLIYCGECGNPMTGQSGRSKNGSMYRYYRCSTKNNYHSRGKKQHIKCKSRNISREKVEDLVLDETVRILSSPKAVKIIAKQAANVQKIDPTAQEQARIAQERKTIQAKLENSIAAVEKGLCSKTIAENIERYESRISELDQQIDELKFAYAPIRIDAVAVEFFLKSLLDKKKDHDKYRLDMFRTFIRQVIIYSDKVEIRYNYTNCPPILKNPVSIALTGSPECSDKAFLVHQKNKKKLSH

SEQ ID NO: 4798 - protein, 516 aa, Unknown
  Description of Unknown: Integrase B4799 sequence
  SM00857,IPR006118,G3DSA:1.10.10.2600,IPR036162,PS51737, G3DSA:3.40.50.1390,PS00397,IPR006119,IPR038109,PF07508, IPR011109,SSF53041,PTHR30461,Coil,PS51736, cd00338,PF00239
MSKKVMRKSPEVTEQIRTGAAYIRVSTDDQLEYSPESQLEEIKRYCLQHNILLPSEFIFVEEEGRSGRKSSNRYAFQNMIAMAKTKPKPFDVIVLWKFSRFARNQDESTFYKSMLRKKLGIDVVSVSEPLIDGMYGRLIEMIIEWQDEFYSVNLSGEVRRSMLSRARKGLYNGKMPLGYTKPPNENPVIEEQEAAIVRKIFDMYASGSDINYITRGLNNHGYKTKTGKKFDQEGVIYILENPFYIGKVRYNMRESSATSTLRDPDEWIIADSFHEPIIDMETWNIVQERRERSKKLAGRYEHPVSHAKHWLSGLVKCPVCGKSLSHKEGYPRKSTNGTTYLSGEGFQCLGYMKGLHSGSQFISAKKLTDSVITSLRDVLESTTDVSFELVRTYEPTIELDCQRYQRELASLDRKLERIREAYMNEIDTLEDYKRNKEMIEKRRADLEALLADMTTAASGPENYKEQFLNRVQSVLDIIESDAPNDLKAEALRGIVRKIVFYKDTNTLEFHYYLMVE

SEQ ID NO: 4799 - protein, 516 aa, Unknown
  Description of Unknown: Integrase B4800 sequence
  PTHR30461:SF3,SM00857,G3DSA:1.10.10.2600,IPR036162,PF13408, IPR025827,G3DSA:3.40.50.1390,PS51737,IPR006119,IPR038109, PF07508,IPR011109,SSF53041,PTHR30461,Coil, PS51736,cd00338,PF00239
MARKKKVSPGNRLVAYYRYSGGSQQTEQSIEGQRRDCEAYARQHGLTIVHEYIDRHISGRGVESRLAFQQMIADSSKHLFDLVICWKTDRFARNRYDSAVYKKKLRDNGVRILYAAESSVEGPEGIILEGLMESLAEYYSAELAQKMRRGMRESALKGRAINPSRPLGLTTDEHKRFIIDEKNAPTIRFIFEHYAAGESSASIVDQLNAAGLRTSKGNSFNKCSIPRIIQNEAYHGVYICKAYDVRIDGAIPAIIDDDLWKRAQKMLTLNKQHRAPHSSHADYLLSGKLFCGCCHSLMRGISGHNCRNDVYYYYACGNKADGGTCKKKNIPKDVAENLVVNAICENILRPDTLEDLADAIAAAQQADVNQPDPERAMLEQNLADVHRKINNIIESIENGTASSRLSARLADLEQQESTLNYQLESLKEIHPPVLDRECILFLLEQFLISPNERTEDYNRRIIDTFVNRIEITDTEMLIYFNLSEASASEKQKNSQPNSCSTGNHLVRVARIELTAS

SEQ ID NO: 4800 - protein, 516 aa, Unknown
  Description of Unknown: Integrase B4801 sequence
  SM00857,IPR006118,G3DSA:1.10.10.2600,IPR036162,PS51737, G3DSA:3.40.50.1390,IPR006119,IPR038109,PF07508,IPR011109, SSF53041,PF00239,PTHR30461,PS00397,Coil, cd00338
MSKRIRYNIPDSEDQVRTGATYIRVSTDDQLECSPESQLEEIQRYCYEHNIILSQEFIFIEEDGKSGRKSKNRYAFQNMIALAKMKPRPFDVIVLWKFSRFARNQDESVFYKSILRKTLGIDVVSVSEPLIAGAYGRLVESIIEWQDEFYCINLSGEVRRSMLSRARKGLYNGKMPLGYSKAPDENPVIVPEEAAIVRKIFDMYAAGSDINYITRWLNEHEYKTKNGRKFTQEAVIYILENPFYIGKIRYNMRESSDTSTLRDPAEWIIVDSFHEPIIDMETWNIVQERRARSKQLQRPYEHPVSHAKHWLSGLVKCPICGKSLSHKEGYPRTEANGKIYISGEGFQCLGYMKGLHGGSQYVSAKKLTKAVIASLHSVLDSSTDVSYALVRKVEPTDVLDQQRWEHELSSLDRKMERIREAYLNEIDTLEDYKRNKEMLEKRRIDLQKLLDNLAASSSAAPADYKEQFLSQIQSVLNIIESDAPNTLKAEALRGVVQKIVFYKDTNTLEFHYYLMI

SEQ ID NO: 4801 - protein, 516 aa, Unknown
  Description of Unknown: Integrase B4802 sequence
  PTHR30461:SF3,SM00857,G3DSA:1.10.10.2600,IPR036162,PF13408, IPR025827,PS51737,G3DSA:3.40.50.1390,IPR006119,IPR038109, PF07508,SSF53041,IPR011109,PTHR30461,PS51736, cd00338,PF00239
MNGVIYARYSSENQREESIDGQLRECTAFAQHNDIQIVGEYIDRAFSAKTDNRPSFQKMIKDSAKGEFDVILVWKLDRFARNRYDSAHYKNILKKNGVKVVSATEAISSGAEGIILESVLEGMAEYYSAELAEKVSRGMKENALKCKYNGGSVPLGYYIDESKHFQIDPSVAPFVVECFEHYADGMTMKQLRDELNMKGVKNSRGGKISIDVISRMLTNRKYLGEYTFQDITIKDGIPAIISTSLFEKVQDRLAKTKKAPSSHKADDDYILTTKLFCGKCKSFMVGESGTNAQGKKYRYYKCVNHKKHQGCDMKSIRKDLIENMTIKYIQEFLNDEDLINTLIDLAYDAQHKENEQLPLLRKQLAQTEKGIKNIVDAIEQGISTKSTRERLLDLEQRKNDIEMSISKESIENPMLTKKQFKFWFDQLKKLDISKSEQRQKLVDLFVNSIIIYDDKIKFFFNYKKSTKTITFDELNNCSDLPDSPRPKIKDIREGVFYFLYNQTRLELAARQKKIRV

SEQ ID NO: 4802 - protein, 516 aa, Unknown
  Description of Unknown: Integrase B4803 sequence
  PTHR30461:SF3,IPR036162,PS51737,IPR011109,PTHR30461, PS00397,PF00239,G3DSA:1.10.10.2600,IPR006119,SSF53041, cd00338,SM00857,IPR025827,IPR038109,PS51736, IPR006118,PF13408,G3DSA:3.40.50.1390,PF07508,Coil
MAKKVMRKSAESTDRIRTGAAYIRVSTDDQLEYSPESQLEEIKKYCLQHNILLPSEFIFVEEDGRSGRKSSNRYAFQNMIAMAKTKPKPFDVIVLWKFSRFARNQDESTFYKSMLRKKLGIDVVSVSEPLIDGMYGRLIEMIIEWQDEFYSVNLSGEVRRSMLSRARKGLYNGKMPLGYTKAPNENPVIEEQEAAIIRKIFDMYASGSDINYITRDLNDHGYKTKTGKRFDQEGVIYILENPFYIGKVRYNMRESSATSTLRDPEEWIISDSFHEPIIDMDTWNIVQERRERSKKLMQRYEHPVSHTKHWLSGLVKCPVCGKSLSHKEGYPRKSTHGGSYISGEGFQCLGYMKGLHTGSQYISAKKLTSAVITSLHEVLESVTDVSFELVRTYEPTVELDRQRYQRELASLDRKLERIKEAYLNEIDTLEDYKRNKEMIEKRRADLEALLSELTTAASGPENYKEQFLSRVQSVLDIIESDAPNDLKAEALRGIVRKIVFYKDTNTLEFHYYLMVD

SEQ ID NO: 4803 - protein, 516 aa, Unknown
  Description of Unknown: Integrase B4804 sequence
  PTHR30461:SF3,SM00857,G3DSA:1.10.10.2600,IPR036162,PF13408, IPR025827,G3DSA:3.40.50.1390,PS51737,IPR006119,IPR038109, PF07508,IPR011109,SSF53041,PTHR30461,PS51736, cd00338,PF00239
MARAAKQDNNSEIIDGVIYARYSEGPNQTEASIEGQVRECKEYAKRNGIRIINVYSDSKHTGTNDNRAEFQKMLRDSRRGGFSVVVVWKIDRFGRNRAEMAQNKALLKLQGVKVVSAKEYIPDSPEGIILESVLEGMAEYYSANLSQNIKRGMKENALHCKSNGSGKSLGYIVDKDGYFEIEPNEATIVKTIFQKYDEGMKIADIWREIVASGAKTKRGKDFTQYGISRVLSNRAYIGEYRYGDIVTPGGMPRIIDDDLFNRVQERRALSKKAPASRRSNSDVDFLLTGKVFCGHCKGTMRGMSGTSKTGRKFYYYACHDKISKHNKCTKKNVKKEWLETEVTRITRDDILNKETIEFIADRVVEIQRLEQEDKSMLRYYEQQLRDTQSAINNIMKAIEAGIITSSTKSRLFELEEQKSIIEGEIEREKITTPVIEKEQVIFSLERFFGGDINNKEYQRNIIDMFVNKVILYDNKIIITYNISSQNEISVDVVEQAAFAALDECSSKLSLAPPAGA

SEQ ID NO: 4804 - protein, 516 aa, Unknown
  Description of Unknown: Integrase B4805 sequence
  PTHR30461:SF3,SM00857,G3DSA:1.10.10.2600,IPR036162,PF13408, IPR025827,G3DSA:3.40.50.1390,PS51737,IPR006119,IPR038109, PF07508,IPR011109,SSF53041,PTHR30461,Coil, PS51736,cd00338,PF00239
MARKKKVSPGNRLVAYYRYSGGSQQTEQSIEGQRRDCEAYARQHGLTIVHEYIDRHISGRGVESRLAFQQMIADSSKHLFDLVICWKTDRFARNRYDSAVYKKKLRDNGVRILYAAESSVEGPEGIILEGLMESLAEYYSAELAQKMRRGMRESALKGKAINPNRPLGLTTDEHKHFIIDEKNAPTIRFIFEHYAAGESSASIVDQLNAAGLRTSKGNSFNKCSIPRIIQNEAYHGVYICKAYDVRIDGAIPAIIDDDLWKRAQKMLTLNKQHRAPHSSHADYLLSGKLFCGCCHSLMRGISGHNCRNDVYYYYACGNKADGGTCKKKNIPKDVAENLVVNAICENILRPDTLEDLADAIAAAQQADVNQPDPERAMLEQNLADVRRKINNIIESIENGTASSRLSARLADLEQQESTLNYQLESLKEVHPPVLDRERILFLLEQFLISPNERTEDYNRRIIDTFVNRIEITDTEMLIYFNLSEASASEKQKNSQPNSCSTGNHLVRVARIELTAS

SEQ ID NO: 4805 - protein, 516 aa, Unknown
  Description of Unknown: Integrase B4806 sequence
  PTHR30461:SF3,IPR036162,PS51737,IPR011109,PTHR30461, PS00397,PF00239,G3DSA:1.10.10.2600,IPR006119,SSF53041, cd00338,SM00857,IPR025827,IPR038109,PS51736, IPR006118,PF13408,G3DSA:3.40.50.1390,PF07508,Coil
MVKKVIRKSAESTDRIRTGAAYIRVSTDDQLEYSPESQLEEIKRYCLQHNILLPSEYIFVEEDGRSGRKSSNRYAFQNMIATAKTKPKPFDVIVLWKFSRFARNQDESTFYKSMLRKKLGIDVVSVSEPLIDGMYGRLIEMIIEWQDEFYSVNLSGEVRRSMLSRARKGLYNGKMPLGYTKAPNENPVIEEQEAAIVRKIFDMYATGSDINYITRDLNDHGYKTKTGNHFDQEGVIYILENPFYIGKVRYNMRESSATSTLRDPEEWIISDSFHEPIIDMDTWNIVQERRKHSKKLMQRYEHPVSHTKHWLSGLVKCPVCGKSLSHKEGYPRKSTHGGSYISGEGFQCLGYMKGLHTGSQYISAKKLTSAVITSLHEVLESVTDVSFELVRTYEPTVELDRQRYQRELASLDRKLERIREAYMNEIDTLEDYKRNKEMIEKRRADLEVLLSELTTAASGPENYKEQFLSRVQSVLDIIESDAPNDLKAEALRGIVRKIVFYKDTNTLEFHYYLMVE

SEQ ID NO: 4806 - protein, 516 aa, Unknown
  Description of Unknown: Integrase B4807 sequence
  cd00338,SM00857,G3DSA:1.10.10.2600,IPR036162,PF13408, PS51737,G3DSA:3.40.50.1390,IPR025827,IPR006119,IPR038109, PF07508,SSF53041,IPR011109,PTHR30461,PS51736, Coil,PF00239
MKDAVIYARYSSDRQREESIEGQIRVCQDYAKRNGFNIINIYTDRAFTGRSDKRPGFQMMIRDAATHTFQYVIVYKLNRFSRDRYDSANYKHKLKKQGVKLLSAMENISDDPAGILLESVIEGISEYYSAELSENVIRGMTQSALEGKWPGGNIPLGYKLDEENRLIIDEEKAPIVRAVFQMFLDGMSVPRIVQELNNKKYTTNAGKEFSRSRVYYILHNERYIGVFMWKDIRKDDLIPPIVSKDTFYLAQSKVKKMKKHPYRTNGKYLLSGKIFCAACGSKVAGTSGKSCMGAKYYYYACSHHHKSSRYPYCETKNIRADVLEELIYSKTNEIISNKAAVQAIARQAVKLQGSTSASLEVQALENRISDVSKKVQNCVRAIESGIISDAVSVSLSENERILAALKDELAKAKLLQESGSLTEEKICYFFEKIGQKAKETEKYKNILLTSLVRAVFICNDYIEIQYNYAEQLPILTNPVRIENSSCECTNGGHILHTHELNNLIFYERYFCIRIAV

SEQ ID NO: 4807 - protein, 516 aa, Unknown
  Description of Unknown: Integrase B4808 sequence
  PTHR30461:SF3,SM00857,G3DSA:1.10.10.2600,IPR036162,PS51737, G3DSA:3.40.50.1390,IPR006119,IPR038109,PF07508,SSF53041, IPR011109,PTHR30461,Coil,PS51736,cd00338, PF00239
MSYCIYLRKSRKDLEAEQHGEGETLARHERALLSLAKKNNLIISNIYREVVSGETIAARPVMQQLLREVEQNLWDGVLVMEVERLARGDTIDQGVVQRAFQYSNTLIITPSKTYDPANEFDEEYFEFGLFMSRREYKTIKRRMQNGRYAAISEGKWPYNSAPYGFRRMKLEKEKGWTLAFDENEAPVVRLIFSMFTGPERVGIRSITRTLNSYGTKPRNSKLWSESTVRGILSNVVYDQCVKIGERKVVRTVENGVLTTARPRTSDYTIVSGRHPRLIDHDVFAEAQSYLGCGSPKPAGSNIIKNPLAGIIVCSECKKKMIRRPPSGTASRVPYDLMLCSTYDCPTIGSPLDLVEREVYNALSDWVEGYRLSGQTPSKSLIPEKEVLLESAQQTLDQLLRQKGTMYDLLEQGVYSTEVFLERSASLQSRISEAQSNVAQLKLELDKERQREANIEQFLPACEDLLSCYWDLSIPERNRLLKLLIESIEYKKLTKNKRGHLNEPNFELTIKPRIPRK

SEQ ID NO: 4808 - protein, 516 aa, Unknown
  Description of Unknown: Integrase B4809 sequence
  PTHR30461:SF3,SM00857,G3DSA:1.10.10.2600,IPR036162,PF13408, PS51737,G3DSA:3.40.50.1390,IPR025827,IPR006119,IPR038109, PF07508,IPR011109,SSF53041,PF00239,PTHR30461, PS51736,Coil,cd00338
MKAVIYARFSSHNQREESIEGQVRACQRFAKEHDMTVIEIYADRGLSGLHADNRPEFQRMIADSDRHKFQALIMWNLDRFSRDKYDTAVYKSRLKKNGVTLYYSDQNIPDTPEGIILESLLEGFAQYYSANLSRNAKRGLQENARKCLWNGGGLPLGYTIDETKHFVIDPAGAACVRLIFQMYADNHSIKEIVSTLNEKGYRTVKGNKFRLGSIQGVLRNRKYIGEYHASGITVPNGVPAIVDVELFNAVQEKIGVVSAAKARNKAEIPYLLTTKVFCGHCGSPMIGESGTGKGGSTYRYYKCSCRKNRKGQCDKRTEQKEWLEETVVAQTVEKFLHPDVIEDVSNACAAVLEQDCQNNALLKALNAQLADVEKSSRNLIKAIEAGVFTSSMRERLAELEQQKEDITVQIAREQLRKPQLSAEQIAFFLRSFLDGDAHDPNFQERIIESLVRRVDVYDEGPGNRKLTVFYNLKKNNHSSVSVKCSDSESVGLPKGRLRKQPIFLFASCRRTRIGRQ

SEQ ID NO: 4809 - protein, 516 aa, Unknown
  Description of Unknown: Integrase B4810 sequence
  PTHR30461:SF3,cd00338,SM00857,G3DSA:1.10.10.2600,IPR036162, PF13408,PS51737,IPR025827,G3DSA:3.40.50.1390,IPR006119, IPR038109,PF07508,IPR011109,SSF53041,PTHR30461, Coil,PF00239
MYEEIKTACLYLRYSSSNQTEQSIEGQMHVCQDFCKRHNIRIVEMYIDRATSASKDIEKRVEFLKMIKDSEKGNFNAVIVYKLDRFARSRYDSATYKYRLKRNGVQLISATENITQDPEGIILESVLEGMAEFYSAELSQKINRGMRESAMKHNSIGGAIPLGYKTVDKKLVIDETTAPIVREAFQMYADGESVAEICRTFNNRGYKTSKGTRFGKSSFTKIFRNEKYIGVYKYHDYRAEDVIPPIIDKDLWDRVQVRVGKIKKAPARNKARHTYLLTGKLFCGHCGSAMNADGNSQGYLYYRCYGKKNLDKQCNKRNMEKNLIERLVAQDAMSFLTDEYIEKIATIACDRNKQEIESDSPIPVIRDRIRQVDVSLNNLLKAIETGSAPDMLVKRMGELETEKKDMEVQLKKEMAHQVYIDKEQVIFWLEKFREGDINDEEFCQTVIDLFVNSVTVWDEPDDKFKITIAYNLTSIPQKTYRLSKDGRLSDYASNTPEIKDPITYPTPVNKVIDPAD

SEQ ID NO: 4810 - protein, 516 aa, Unknown
  Description of Unknown: Integrase B4811 sequence
  SM00857,G3DSA:1.10.10.2600,IPR036162,PF13408,PS51737, IPR025827,G3DSA:3.40.50.1390,IPR006119,IPR038109,PF07508, IPR011109,SSF53041,PTHR30461,Coil,PS51736, cd00338,PF00239
MKDAVIYARYSSDRQREESIEGQIRVCQDYAKRNGFHIINIYTDRALTGRSDKRPGFQMMIRDAATHTFQYVIVYKLNRFSRDRYDSANYKHKLKKQGVKLLSAMENISDDPAGILLESVIEGISEYYSAELSENVIRGMTQSALEGKWPGGNIPLGYKLDEENRLIIDEGKAPIVRAVFKMFLDGMSVHRIVQELNNKKYTTNAGKEFSRSRVYYILHNERYIGVFMWKDIRKDNLIPPIVSKDTFYLAQAKVKKMKKHPYRTNGKYLLSGKIFCAACGSKVAGTSGKSCMGTKYYYYGCSHHHKSSRYPYCDTKNIRADVLEDMVYSKTNEIISNKAAVQAIARQAVKLQGNSSASLEVQALENRIADVSKKVQNCVKAIERGIISDAVSVSLSENERVLAALKDELAKAKLLQESGSLTEEKICYFFEKIGQKAKETEKYKNILLTSLVRAVFVCNDYIEIQYNYAEQLPILTNPVRIENSSCESTNGGHILHTHELNNLIFFDKYFCIRIAV

SEQ ID NO: 4811 - protein, 516 aa, Unknown
  Description of Unknown: Integrase B4812 sequence
  PTHR30461:SF3,SM00857,G3DSA:1.10.10.2600,IPR036162,PF13408, PS51737,G3DSA:3.40.50.1390,IPR025827,IPR006119,IPR038109, PF07508,SSF53041,IPR011109,PTHR30461,PS51736, cd00338,PF00239
MQRAVIYARFSSDMQREESIDAQVRACKAYAKNKGYIVVDTYADEAKSGRDVTKRDAYNQMLADAMEDKFDVIIFHKIDRNSRNELNYFTFKDKLEKLGIRYEYAAQPIDALSPEGQMMETMMVGMAAYYSRNLAKETKKGLNENAYKALFNGGCPPLGYKIVDKKYVIDEQEAAAVRLIFELYLNGYGYAAICMELSAKGYTTKAGKAFAKNSLHDILCNEKYIGTYTFNKIPRKKGGRNSHAAERPEDFISIENAFPAIISKDDWALVRAKMDRNRHRAASYTAKEKYLLSGKVFCGHCGSAMVGHRIRKRYCYYGCTRKEQTPTSKCPQKMIRAEVLEHWVLQILERVVFTVGGMRRIADAIVDAYEAEQKEQAGSQATLLQRKAVAEKKLNNLYKIFEEGNADEFDRQRLNQIKAELREINKAICETSVKPARTLSKQKIAAILAAMKDEIFVKKNSYYVQQAVDLLVDHVTITDKVLKITLSTQNVCAYLVPRNRDGMSVYTFTIAINLAA

SEQ ID NO: 4812 - protein, 516 aa, Unknown
  Description of Unknown: Integrase B4813 sequence
  PTHR30461:SF3,SM00857,IPR006118,G3DSA:1.10.10.2600,IPR036162, PS51737,PS00397,G3DSA:3.40.50.1390,IPR006119,IPR038109, PF07508,IPR011109,SSF53041,PTHR30461,Coil, PS51736,cd00338,PF00239
MSKKVMRKSTESTDRIRTGAAYIRVSTDDQLEYSPESQLEEIKRYCLQHNILLPSEYIFVEEDGRSGRKSSNRYAFQNMIATAKTKPKPFDVIVLWKFSRFARNQDESTFYKSMLRKKLGIDVVSVSEPLIDGMYGRLIEMIIEWQDEFYSVNLSGEVRRSMLSRARKGLYNGKMPLGYTKAPNENPVIEEQAAAIVRKIFDMYASGSDINYITRDLNDHGYKTKTGKRFDQEGVIYILENPFYIGKVRYNMRESSATSTLRDPEEWIISDSHHPPIIDQNTWDIVQERRERSKKIMQRYEHPVSHTKHWLSGLVKCPICGKSLSHKEGYPRKAPNGSTYISGEGFQCLGYMKGLHTGSQYISAKKLTGAVISSLHEVLESVTDVSFELVRTYEPTVELGRQRYQRELASLDRKLERIKDAYLNEIDTLEDYKRNKDMIEKRRADLEALLSELTTAASGPENYKEQFLSRVQSVLDIIESDAPNDLKAEALRGIVRKIVFYKDTNTLEFHYYLMVE

SEQ ID NO: 4813 - protein, 516 aa, Unknown
  Description of Unknown: Integrase B4814 sequence
  PTHR30461:SF3,SM00857,G3DSA:1.10.10.2600,IPR036162,PF13408, IPR025827,G3DSA:3.40.50.1390,PS51737,IPR006119,IPR038109, PF07508,IPR011109,SSF53041,PF00239,PTHR30461, PS51736,Coil,cd00338
MKAVIYARFSSHNQREESIEGQVRACQRFAKEHDMTVIEIYADRGLSGLHADNRPEFQRMIADSDRHKFQALIMWNLDRFSRDKYDTAVYKSRLKKNGVTLYYSDQNIPDTPEGIILESLLEGFAQYYSANLSRNAKRGLQENARKCLWNGGGLPLGYTIDETKHFVIDPAGAACVRQIFQMYADNHSIKEIVSTLNEKGYRTVKGNKFRLGSIQGVLRNRKYIGEYHASGITVPNGVPAIVDVELFNAVQEKIGVVSAAKARNKAEIPYLLTTKVFCGHCGSPMIGESGTGKGGSTYRYYKCSCRKNRKGQCDKRTEQKEWLEETVVAQTVEKFLHPDVIEDVSNACVAVLEQDCQNNALLKALNAQLADVEKSSRNIIKAIEAGVFTASMRERLAELEQQKEDITVQIAREQLRKPQLSAEQIAFFLRSFLDGDAHDPNFQERIIESLVRRVDVYDEGPGNRKLTVFYNLKKNNHSSVSVKCSDSESVGLPKGRLQKQPIFLFASCRRTRIGRQ

SEQ ID NO: 4814 - protein, 515 aa, Unknown
  Description of Unknown: Integrase B4815 sequence
  SM00857,G3DSA:1.10.10.2600,IPR036162,PS51737,G3DSA:3.40.50.1390, IPR006119,IPR038109,PF07508,IPR011109,SSF53041, PF00239,PTHR30461,PS51736,Coil,cd00338
MQYLIYLRKSRADQEAELRGEGETLARHEKALLELARHQHLPIADIYREVVSGETIASRPMMQQLLSEVEQGVWDGVLVMEVERLARGDTIDQGIVAQAFKLSDTKIITPIKTYDPNNEFDEEYFEFGLFMSRREYKTIKRRLNNGRQASVKEGKYVGNRPPYGYERIKIENDKGFTLKPLEKEAQVLRMMFRWYAYGAHGISTIADQLNEMAIPSKTGKQWVYPTVRDILQNPVYVGKIRWGWRGQRKRVKNGSVSVSRPRSDDYLLADGIHPPIIDQQLFDQVQKKFSMHKPLPTSAREMKNPLAGLVICAKCGAKMQRRPYQRENIRTGLICPNNKCRNVSAPFDDVEQKLIEALAEYIKEEKLRISNGHTQIDDSVLQILQNQLADLREETVDLNKQNDNIHDFLEKGIYDVDTYLQRSQKISSRITEIEEKQKTLQQEIIEENKRIESATSIIPMTEQLLLQYENMSALEKNSMLKEVLRCVKYERECSIRDGGTADNFTLYLYPKISHK

SEQ ID NO: 4815 - protein, 515 aa, Unknown
  Description of Unknown: Integrase B4816 sequence
  PTHR30461:SF3,SM00857,G3DSA:1.10.10.2600,IPR036162,PF13408, IPR025827,G3DSA:3.40.50.1390,PS51737,IPR006119,IPR038109, PF07508,IPR011109,SSF53041,PF00239, PTHR30461,PS51736,Coil,cd00338
MNNLKAVIYARYSSDKQRDESIEGQIRECKAFAEREGIIITGIYTDKALSARTDNRPEFLQMIEDSKKHLFDYVLVYQLDRFSRSREDSAVYKAILKKNGVKVVSAKENITNDPAGIILESVLEGMAEYYSAELSQKVKRGMTDNALQGKVNGTPTPLGYDKTEDKRLIINEREARIVRTIFDLYIKGHSIPSICSHLNSKGYLSKHGSKFSYAVVRRILSNEKYIGTMRWNDIVIEDAIPSIISKEIFDKVQQQKGRIIKKKGARSEFYNLCGKLYCGKCGGHYTGNTATSHTGAKHHYYSCTNRRKHKTCTGKNIKRDILEDIIINKTIHILNEPNTIAQLAKMATEASSTMLGDAELELKRIDARIKELQSELENYMKAIAKGFISDTLQKQIENAEAELQDHMTRKTNHEIKAHPIKLTAEHIEFFLYKMAKENPTTNTGRARILDTFIHSATIYDDRVEITFNYNNDLPQFKGQVIDGSFSVDVVVQMTQKANLFKYVNHRYPLRLIMPL

SEQ ID NO: 4816 - protein, 515 aa, Unknown
  Description of Unknown: Integrase B4817 sequence
  SM00857,IPR036162,PF13408,IPR025827,G3DSA:3.40.50.1390, IPR006119,SSF53041,PTHR30461,Coil,PS51736, cd00338,PF00239
MVKRRAAIYARFSSHNQRSESIEIQVDAGTRYIAENGLELVKIYADYAKTGRNTDRREYKQMMNDARLGLFDYVVIYKVPRIMRNRDEMALTRIMLRKAGVEILYAGEEIASGSAGVLQLGMLEVLAEWESAIDSERIIDGIQKNAQRCMANGRTLYGWDIVEGRYVINDREAAVLHKMKNMVFAGSIIAEVVRAVANVRTRQGKPINHDRAKKLLLRPQNGGTYSYAGHVVEGGMPALWPKAEQDMLISILGNPRPRRRVDHAAEWPLTGKLYCAECGNTLAGTSGTSKGGTVYSYYKCKKCKRTFRRDILEDAIVDMTICALERPDVRKRIADGMATYEATMEDAPLESERLRKEIKRIDAAFERIWQAIEDGIAPPGGKERIEDLKARKDALETEYQIAKANENIEPGFSELMDWLDNVAEEMNPQEILTMFVRAVQIDKTEVRLYFAFDYYGDNFTPPKQDEHPAGEGCSSDSPMVEPSITKANTVISLETCYLQINRNWFAVIGNLQNTR

SEQ ID NO: 4817 - protein, 515 aa, Unknown
  Description of Unknown: Integrase B4818 sequence
  cd00338,SM00857,G3DSA:1.10.10.2600,IPR036162, PF13408,PS51737,G3DSA:3.40.50.1390,IPR025827, IPR006119,IPR038109,PF07508,IPR011109, SSF53041,PTHR30461,PS51736,Coil,PF00239
MSVDIKWQVPKAQPEASELAVVYARYSSHSQGEQSIEGQLSNARDYAAAHGYTIVHEYVDRAKSGRTDNRAEFQQMLKDTAKRQFSVIILWKVDRFGRNREEIAINKMKCRKNGVRVEYVAETIPDSPEGVILESVLEGFAEYYSLQLSQNIRRGRAESAEKCQSLGGNRPLGYKTGPDKKFVIDENTAPTVKMIFTMYADGKTVTEIVDKLNEMGLRTLRGGPFTKNSLHSILKNKKYIGVYEYQGREIKDGVPRIIEDDVFNKVQEMLKINKRAPAKTWSRADYILTDKLFCGKCGALMFGESGTSKTGVKHNYYICSNKKRFRSCDKKAVRQADIEDTVLNATHELLQDDELLDYIVDRTWEYYLAQDNSQEELRNLQRQLAQTDTAISNLIRAIEAGILTEETKKRMDELTQQKADLKASIADREIARGFHLQKSHIAFYLRSLRDADWSDKEAQKRLIQTFVNAVFVYDDHITLTYNFSGDKSTITLHDMQRFEDGKEFGCRASRSTNTI

SEQ ID NO: 4818 - protein, 515 aa, Unknown
  Description of Unknown: Integrase B4819 sequence
  cd00338,SM00857,G3DSA:1.10.10.2600,IPR036162,PS51737, G3DSA:3.40.50.1390,IPR006119,IPR038109,PF07508,SSF53041, IPR011109,PTHR30461,PS51736,Coil,PF00239
MQYLIYLRKSRADREAELRGEGETLARHEKALLELARRQHLPIADIYREVVSGETIASRPMMQQLLSEVEQGVWDGVLVMEVERLARGDTIDQGIVAQAFKLSDTKIITPIKTYDPNNEFDEEYFEFGLFMSRREYKTIKRRLNNGRQASVKEGKYVGNRPPYGYERIKIENDKGYTLKPLEKEAQVVRMMFRWYAYGAHGISTIAEQLNEMAIPSKTGKQWVYPTVRDILQNPVYVGKIRWGWRGQRKRVKNGSVSVSRPRSDDYLLADGIHPPIVDQQLFDQVQKKFSMHKPLPASAREMKNPLAGLVICAKCGAKMQRRPYQRENIRTGLICPNNKCRNVSAPFDDVEQMLIEVLAEYIKEEKLRISNGHTQIDDSVLQILQNQLADLREETVDLNKQNDNIHDFLEKGIYDVDTFLQRSQKISSRITEIEEKQKTLQQEIIEENKRIESATSIIPMTEQLLLQYENMSALEKNSMLKEVLRCVKYERECSIRDGGTADNFTLYLYPKISHK

SEQ ID NO: 4819 - protein, 515 aa, Unknown
  Description of Unknown: Integrase B4820 sequence
  PTHR30461:SF3,cd00338,SM00857,G3DSA:1.10.10.2600,IPR036162, PS51737,G3DSA:3.40.50.1390,IPR006119,IPR038109,PF07508, SSF53041,IPR011109,PTHR30461,Coil, PF00239
MKAVILARVSSKEQEDGYSLDAQISRLSDYANKKGLEVIKTFTLTESSTQGDRKKFQEVLKFCSSQKETIALIADAVDRVQRSFKESTYLDELRKKEKIELHFYREGMVVGKNASSSDLLRWDFLVIGAKSYVLALAENVKRSINFKIEHGEWCGKAPIGYLNRRNAHGKSEICLDPVRAPIIKKLFQEYSLGKTSFKELANLADKWDLKSNSPKARKLTSKTLYDTLTNPFYCGKMRIKGQLYPHIYEPLISEDLWNKCQEVRLGYKKQPVKYASKEFLYRGLITCYNTGKIVTTDQKRGHINYLICYDKTGKRIYCHEETITKQVQQILDSIIIPEPILTGLNQILRDSKKNEALLHEQAVTSLRKDLDITKKRIENLVDMYLDKKIDDEIYSSKINQLKNEKTSLENKIAAHSVSDDKFNETIINLFDIVNHAGKKFANSSNIEVKRRILKLIIRTMKLDRGNLGYELAWPFSELPKSDDCYLWRTLVDNLRTNHRDKILLIGQQLPNLLTF

SEQ ID NO: 4820 - protein, 515 aa, Unknown
  Description of Unknown: Integrase B4821 sequence
  PTHR30461:SF3,SM00857,G3DSA:1.10.10.2600,IPR036162,PF13408, IPR025827,G3DSA:3.40.50.1390,PS51737,IPR006119,IPR038109, PF07508,IPR011109,SSF53041,PTHR30461,Coil, PS51736,cd00338,PF00239
MPEIRYIPAVGAPENAKLPVAAYCRVSSDSDDQLNSLSAQVREYTKQITAEPDWEFAGIYADEGITGTSTKKRNEFKRLMRDCEAGKVKRVLVKSVSRFARNTTDCLQYLRQLSALGVTVYFEKEGIDTAKMSSDVILTMTGAFAQEESNALSTNMRWSYQKRMQAGMFVGNIAPYGYDWKNGTLIINEAEARIVRWIFHSYLDGLNRAEIAAQLNAMQNEPSNRPIWYKTTVNYILANERYIGDALLQKKYTVQGTIGLEKRNHGEMPQYYVEDTHPAIISEDTFRRAQAMRIRQTTYLGPHIGSHIFQKRIRCAECGRTLRRKPRKSGLVSWVCLSHDENKALCPTPPIFESNIEKAAIMMYRILRFGIKDILHPMLYQLEQLQGRTVSDSTAINELNQSIASLSEQRHMLNRLLSKGFMEPDTCQAQVNAISQQLADLNRRRRSLIEAQVEDDAIENTQLLIDILEDAPENLVSLEDGGVFDMIVDKVIIDKDKNITFRLINGLELGGDFDG

SEQ ID NO: 4821 - protein, 515 aa, Unknown
  Description of Unknown: Integrase B4822 sequence
  cd00338,SM00857,G3DSA:1.10.10.2600,IPR036162,PF13408, IPR025827,PS51737,G3DSA:3.40.50.1390,IPR006119,IPR038109, PF07508,IPR011109,SSF53041,PTHR30461,PS51736, Coil,PF00239
MSYLIYLRKSRKDLENPLMTTEEILNRHECILLDLAKKMNLSIGDIYREIVSGDSIAARPVMQKLLREVESGMWEGVLVVEVERLARGDTVDQGIVQRTFQYSETLIITPQKTYNPSSESDQTFFEFGLFMSRQEYKTIKRRLKSGVMSAVREGKWPYNSAPYGYRRYKLENQKGWSLEFDDQERPIAELIYHLFCDEKRGLGYISDYLEARNIKSRTGGRFTESFLREFLRNPVNDGKVFYGRRKVVTKIVNGSSVRTRPRADEYIEVAGLHDPLIPHDLFLKAQERFRVSTPRNPSSYTVKNPLSGLLVCSECGHKLQRRPASTSKRGAPYDVLMCKTRGCPTVGSAVEVIEGEVLYALEDIVRGYEADVPSVPSLVPQKEELLHNAILHRTDLNKQQERIYTLLEQGIYSTDVFLDRSKALEKQMQEVNHSIEVLKNELEEEKIKYNNWKSFVPTCKQLLEIYWTLTPDAKNSALKEVIDRIEYKKLTRNPKGMCDVATFELTLYPKIPMKS

SEQ ID NO: 4822 - protein, 515 aa, Unknown
  Description of Unknown: Integrase B4823 sequence
  SM00857,G3DSA:1.10.10.2600,IPR036162,PS51737,G3DSA:3.40.50.1390, IPR006119,IPR038109,PF07508,IPR011109,SSF53041, PF00239,PTHR30461,PS51736,Coil,cd00338
MYQSYEFKPEEILVYLRKSRSDDPYLSVEDVLQKHEEIIREWIGRNLVHDIPAKNFYREVVSGETIADRPEFCKVLRQVESPGIKGVLVVEVQRLSRGDLEDAGRLIKILRYTHTKVITPQKIYDIEDDYDRDFFERELKRGNEYLEYTKKILARGKYQSVKDGWYIASKPPFGFVRVTVQDGKRKRPTLDFGPDAPTVRYIFDRLNAGVLPYTVAKELKAMGANSPAGKPWTVQMLLDIAKNDHYDQMIAWKRRGDVSRVKDGEVVKSRPRSKDYELFPARHPRMIDHDVFVHVQELLKNRSRKRDSYEQVNPVAGIAYCGICGRAMMYHTGLRNGKFKYNPRLVCSGLTNCEAASCLFSEYSQALVSSLLCSIEDCKIELEEESDGREKEAQIQMLEKQVQTLELKELHLWEKYADGEMPKEIFDKLNLKNTESKGNAEKALEQLRSEKPQREHLQKKIAMLSDAIKAIESTSLSAKEKNAFLKTVIERIEYSRTHEEAKSHVPFRMSVKLRI

SEQ ID NO: 4823 - protein, 515 aa, Unknown
  Description of Unknown: Integrase B4824 sequence
  cd00338,SM00857,G3DSA:1.10.10.2600,IPR036162, PF13408,PS51737,IPR025827,G3DSA:3.40.50.1390, IPR006119,IPR038109,PF07508,IPR011109, SSF53041,PTHR30461,PS51736,Coil,PF00239
MSYLIYLRKSRKDLENPFMTTEEILNRHECILLDLAKKMNLSVGDIYREIVSGDSISARPVMQKLLREVESGMWEGVLVVEVERLARGDTVDQGIVQRTFQYSETLIITPQKTYNPSSESDQTFFEFGLFMSRQEYKTIKRRLKSGVMSAVREGKWPYNSAPYGYRRYKLANQKGWSLEFDDQERPIAELIYHLFCDEKRGFGYISDYLEARNIKSRTGGRFTESFLREFLRNPVNDGKVFYGRRKVVTKIVNGSSVRTRPRADEYIEVAGLHDPLIPHDLFLKAQERFRVSTPRNPSSYTVKNPLSGLLVCSECGRKLQRRPASTSKRGAPYDVLMCKTRGCPTVGSAVEVIEREVLHALEGIVRGYEADVPSVPSLVPQKEELLHNAVLHRADLNKQQERIYTLLEQGIYSTDVFLDRSKALEKQMQEVDHSIDVLKNELEEEKIKYNNWKSFVPTCKQLLEIYWTLTPDAKNSALKEVIDRIEYKKLTRNPKGMCDVATFELTLYPKVPMKS

SEQ ID NO: 4824 - protein, 515 aa, Unknown
  Description of Unknown: Integrase B4825 sequence
  SM00857,G3DSA:1.10.10.2600,IPR036162,PF13408,IPR025827, G3DSA:3.40.50.1390,PS51737,IPR006119,IPR038109,PF07508, SSF53041,IPR011109,PTHR30461,PS51736,cd00338, PF00239
MAFCMYLRKSRADMEAEAHGEGETLARHRATLEQLSRRLKKPIAEVYQEIVSGESIADRPQMQRLLADVSAKKWEGVYVMEVERLARGDTMDQGLVFHAFRYSDTLIITPMRTYNPCDPADEEYFEFSLFMSRREYKTTARRMQAGKIAAAREGKSFNGRAAYGYRTVKCADGRGVTFEQVDDEAPVLYQIRDWLLNGVDGEPCGLTRIARMLNDAHVPTRQHAAWTSAYLHHLITNPVYAGYIRMGARKTERVATPSGVQKRLVRQDDPQLFRGQHPPYFSDAEFDAMRAKLRTRCFPIRGDAEMINPFCGLLFCGECGRAMMVNRDAARNRTRIRCKTPGCGTVQSVLPPVEAALLETLRQWVDDPGSFVIPDAPPEENPVLLQSTADSLRVERGKVAQQIERAQDLLEQGVYTVEQYSERFAKHSARLREIDASLADLQHRIDARPQYCTLDEISPAIRALLDDYDAMSALQRNGLLKQCISRIVYHKSKSTATSGSSAPANFVLDVFPRLK

SEQ ID NO: 4825 - protein, 515 aa, Unknown
  Description of Unknown: Integrase B4826 sequence
  SM00857,G3DSA:1.10.10.2600,IPR036162,PS51737,G3DSA:3.40.50.1390, IPR006119,IPR038109,PF07508,SSF53041,IPR011109, PF00239,PTHR30461,PS51736,Coil,cd00338
MNIGKLKKSDQFCIYLRKSRADAEAEKLGEGETLARHERILTELAVKLGLPIGKIYRELVSGETISARKEIQSMINDCYAGMWKGILVVEVTRLSRGNQGDAQIIMDCLRYSNNNNGVLVVTPTKVYDIVQSSDDEEYMEFELFMSRREYKMIRKRMMRGKLQAVVEGNYMGSYRPYGYDILKTKTGRTLVPNPEEAPIVKNIFEWTVKEHLTPGKICKRLTSLGIPTYTGSAEWAIGTVKTILTNPTYTGKVRWNDRMQTKTMVDGKLVKSRPRSNHTEQYMLYDGKHEAIVDEITFHAAAARFHSDKTKANLKLMNPFAGILICAKCKKAMIYQGYNKRPNTPPRILHKSSQICNVKSAMLKDVMNAVAHALELYIDNFEMKIDNLPNIDENSILSRLESLQKELIKQEKKLPKLFDAWEDGILTDDEFTRRKLVNKERIESIQKQMDHLEDSIPTRDEYEEKIMCLSDALKSLLDPTLDADIKNTYLKSIISSIEYSRDNNTEFILDVFLKD

SEQ ID NO: 4826 - protein, 515 aa, Unknown
  Description of Unknown: Integrase B4827 sequence
  cd00338,SM00857,G3DSA:1.10.10.2600,IPR036162, PF13408,IPR025827,G3DSA:3.40.50.1390,PS51737, IPR006119,IPR038109,PF07508,IPR011109, SSF53041,PTHR30461,PS51736,Coil,PF00239
MSYLIYLRKSRKDLENPFMTTEEILNRHECILLDLAKKMNLSIGDIYREIVSGDSISARPVMQKLLREVESGMWEGVLVVEVERLARGDTVDQGIVQRTFQYSETLIITPQKTYNPSSESDQTFFEFGLFMSRQEYKTIKRRLKSGVMSAVREGKWPYNSTPYGYRRYKLENQKGWSLEFDDQERPIAELIYRLFVDEKKGFGYISDYLEAHNIKSRTGRRFTDSFLRDFIRNPVNDGKVFYGRRKVVTKIVNGSSVRTRPRADEYIEVDGLHDPLIPHDLFLKAQERFHTSTPRKPSTYTVKNPFSGLLVCSECGRKLQRRPASASKRGVPYDMLMCNTRGCPTIGSAVEVVEREVLRALEDIVRGYEADVPSVPSLVPQKEELLHNAILHRADLNKQQERIYALLEQGIYSTDVFLDRSKTLEKQMQEVEHSIEIFKKELEEEKIKYDNWKSFVPTCKQLLEIYWTLTPDARNAALKEVIDRIEYKKLTRNPKGMYDVAAFELTLYPKIPSKS

SEQ ID NO: 4827 - protein, 515 aa, Unknown
  Description of Unknown: Integrase B4828 sequence
  cd00338,SM00857,G3DSA:1.10.10.2600,IPR036162,PF13408, IPR025827,PS51737,G3DSA:3.40.50.1390,IPR006119,IPR038109, PF07508,SSF53041,IPR011109,PTHR30461,PS51736, Coil,PF00239
MSVDIKWQVPKAQPEASELAVVYARYSSHSQGEQSIEGQLSNARDYAAAHGYTIVHEYVDRAKSGRTDNRAEFQQMLKDTAKRQFSVIILWKVDRFGRNREEIAINKMKCRKNSVRVEYVAETIPDSPEGVILESVLEGFAEYYSLQLSQNIRRGRAESAEKCQSLGGNRPLGYKTGPDKKFVIDENTAPTVKMIFTMYADGKTVTEIVDKLNELGLRTLRGGPFTKNSLHSILKNKKYIGIYEYQGREIKDGVPRIIEDDVFNKVQEMLKINKRAPAKTWSRADYILTDKLFCGKCGALMFGESGTSKTGAKHNYYICSNKKRFRSCDKKAVRQADIEDTVLNATHELLQDDELLDYIVDRTWEYYLAQDNSQEELRNLQRQLAQTDTAISNLIRAIEAGILTEETKKRMDELTQQKADLKASIADREIARGFHLQKSHIAFYLRSLRDADWSDKEAQKRLIQTFVNAVFVYDDHITLTYNFSGDKSTITLHDMQRFEDGEEFGCRASRSTNTI

SEQ ID NO: 4828 - protein, 515 aa, Unknown
  Description of Unknown: Integrase B4829 sequence
  cd00338,SM00857,G3DSA:1.10.10.2600,IPR036162,PF13408, IPR025827,PS51737,G3DSA:3.40.50.1390,IPR006119,IPR038109, PF07508,IPR011109,SSF53041,PTHR30461,PS51736, Coil,PF00239
MSYLIYLRKSRKDLENPFMTTEEILNRHECILLDLAKKMNLSIGDIYREIVSGDSIAARPVMQKLLREVESGMWEGVLVVEVERLARGDTVDQGIVQRTFQYSETLIITPQKTYNPSSESDQTFFEFGLFMSRQEYKTIKRRLKSGVMSAIHEGKWPYNSAPYGYRRYKLENQKGWSLEFDDQERPIAELIYHLFCDEKRGLGYISDYLEARNIKSRTGGRFTESFLREFLRNPVNDGKVFYGRRKVVTKIVNGSSVRTRPRADEYIEVAGLHDPLIPHDLFLKAQERFRVSTPRNPSSYTVKNPLSGLLVCSECGRKLQRRPASTSKRGAPYDVLMCKTRGCPTVGSAVEVIEREVLHALEGIVRGYEADVPSVPSLVPQKEELLHNAVLHRADLNKQQERIYTLLEQGIYSTDVFLDRSKALEKQMQEVEHSIEIFKNELEEEKIKHDNWKSFVPTCKQLLDIYWTLTPDARNAALKEVIDRIEYKKLTRNPKGMCDVATFELTLYPKIPSKS

SEQ ID NO: 4829 - protein, 515 aa, Unknown
  Description of Unknown: Integrase B4830 sequence
  SM00857,G3DSA:1.10.10.2600,IPR036162,PF13408,IPR025827, PS51737,G3DSA:3.40.50.1390,IPR006119,IPR038109,PF07508, IPR011109,SSF53041,PF00239,PTHR30461,PS51736, Coil,cd00338
MSYLVYLRKSRKDLENPFMTTEEILNRHECILLDLAKKMNLSIGDIYREIVSGDSISARPVMQKLLREVESGMWEGVLVVEVERLARGDTVDQGIVQRTFQYSETLIITPQKTYNPSSESDQTFFEFGLFMSRQEYKTIKRRLKSGVMSAVREGKWPYNSAPYGYRRYKLANQKGWSLEFDDQERPIAELIYHLFCDEKRGLGYISDYLEARNIKSRTGGRFTESFLREFLRNPANDGKVFYGRRKVVTKIVNGSSVRTRPRADEYIEVAGLHDPLIPHDLFLKAQERFRVSTPRNPSSYAVKNPLSGILVCSECGHKLQRRPASTSKRGAPYDVLMCKTRGCPTIGSAVEVVEREVLRALEDIVRGYEADVPSVPSLIPQKEELLHNAILHRADLNKQQERIYTLLEQGIYSTDVFLDRSKAMESQMQEAEHSIEIFKKELEEEKIKYDNWKSFVPTCKQLLKLYWTLTPDARNAALKEVIDRIEYKKLTRNPKGMYDVATFELTLYPKIPSKS

SEQ ID NO: 4830 - protein, 515 aa, Unknown
  Description of Unknown: Integrase B4831 sequence
  cd00338,SM00857,G3DSA:1.10.10.2600,IPR036162,PF13408, PS51737,G3DSA:3.40.50.1390,IPR025827,IPR006119,IPR038109, PF07508,SSF53041,IPR011109,PTHR30461,PS51736, Coil,PF00239
MDQVGVIYARFSSHAQREESIEDQLRECHAFAERNGIRIVEEYCDQALTGKTDARPAFQRMVRDSAKGRFSIVITYKVDRFARNRYDSATYKARLKKNGVRVLYAKETIPDGPEGIILESVLEGYAEYYSANLAQNITRGLEGNALNCRTNGVVVLGYKKSDDDHYEIDETTAPIVREIFEKYAAGVKQMEICEELNARCLRTTRGGPFNKNSLVRILKNRKYIGEYHYMDVTVPGGMPAIISVELFEDVQQKLKRGRRAPSKDWSRADFLLTGKLFCGECGEPMVGTSGHGRSGRKYNYYICGAKKRRQGCKKENVAQDWIEEVVLTYTMEVVLQDDTIQEIADGVMDFLAREAADDGVLVSLEARLAEVKTSVKNLMKAIEAGIITKATTERMMELENERVELEDAIAIEKIKEPEIERDQVVFFLEKFRDGDLNDPAFRLRLVEAFVSSVYLWDDGRIDINYNYTGQGSKVSLDQAADIVSKIAGGDGSDLDSSGPLELNKITLCLLEFLLI

SEQ ID NO: 4831 - protein, 515 aa, Unknown
  Description of Unknown: Integrase B4832 sequence
  PTHR30461:SF3,SM00857,G3DSA:1.10.10.2600,IPR036162,PF13408, PS51737,G3DSA:3.40.50.1390,IPR025827,IPR006119,IPR038109, PF07508,IPR011109,SSF53041,PTHR30461,Coil, PS51736,cd00338,PF00239
MKIKKIEAQPQEVKKLRVAAYCRVSTDNDDQKESLEAQKAHYETWIKRHSNWDFAGIFYDFGITGTKADVRDGLQALMYECRIGRIDYVLTKSVSRFSRNTTDCLSLVRELLSYNIPVYFEKENLDTGSMESELILSIISGMAQEESESISKNVKWTVQKRIEAGKYKFGYPPYGYGRDENGMMVINPEEAKHVRQIFDWALSGIGTFKIAHMLEEQGVPTRKGSAWAASTVKGILTNEKYYGAAMFQKTYTDSSFQRHRNHGEADSYFVSGHHEAIVSEEEFHKVQEIIEMHIKEKCIVRGTGKYNNRYLFSGIITCGECGDTFKRQTISSGISWCCKTHLKNKAKCSMMFIHEEAFKAAFVTTLNKLVFGGKQVLYPYYEMLRITNSDENIQRIQGMKQELQRYAERKDTIRQLRAKGIIDSAVYNQEIGSIDKQCEELRSKITALQQSDASAVLNETEALLRFSDSAGMQTEFSEQLFASFVERIIVYTRKSVGFKLKCGLTLKEELCTDTK

SEQ ID NO: 4832 - protein, 515 aa, Unknown
  Description of Unknown: Integrase B4833 sequence
  SM00857,G3DSA:1.10.10.2600,IPR036162,PS51737,G3DSA:3.40.50.1390, IPR006119,IPR038109,PF07508,SSF53041,IPR011109, PF00239,PTHR30461,PS51736,Coil,cd00338
MQYLIYLRKSRADREAELRGEGETLARHEKALLELAKRQHLPIADIYREVVSGETIASRPMMQQLLSEVEQGIWNGVLVMEVERLARGDTIDQGIVAQAFKLSDTKIITPIKTYDPNNEFDEEYFEFGLFMSRREYKTIKRRLNNGRQASVKEGKYVGNRPPYGYERIKIENDKGFTLKPLEKEAQVVRMMFRWYAYGTHGISTIADQLNEMAIPSKTGKQWVYPTVRDILQNPVYVGKIRWGWRGQRKRVKNGSVSVSRPRSDDYLLADGIHPPIVVQQLFDQVQKKFSTHKPLPTSAREMKNPLAGLVICAKCGAKMQRRPYQRENIRTGLICPNNKCRNVSAPFDDVEQKLIEVLVEYIKEEKLRISNGHTQIDDSVLQILQNQLTDLQEETVDLNKQNDNIHDFLEKGIYDVDTFLQRSQKISSRITEIEEKQKTLQQDIIEENKRIESATSIIPMTEQLLLQYENMSALEKNSMLKEALRCVKYERECSIRDGGTADNFTLYLYPKISHK

SEQ ID NO: 4833 - protein, 515 aa, Unknown
  Description of Unknown: Integrase B4834 sequence
  PTHR30461:SF3,cd00338,SM00857,G3DSA:1.10.10.2600,IPR036162, PS51737,G3DSA:3.40.50.1390,IPR006119,IPR038109,PF07508, SSF53041,IPR011109,PTHR30461,PS51736, Coil,PF00239
MAYCIYLRKSRKDMEAEARGEGETLARHDRTLKELAQRMDYPIAKIYREIVSGESIANRPQMRQLLVDVAARKYEGVLVMEVERLARGDIHDQATVASTFKYSGTRIITPRETYDPSAANDEVHFEFMLFMSRCEYRTITRRIQTGRTSAAKEGRYIASRPPYGYRRIRRPDGVWTLEIIPEQAEIVRQIFCWYSHGEGGARIAARLNAMGVRTQMDKQWAQCTIARMIRNPIYKGYVTWAKRVDTVVGVDEHGAKQHKRVRNADPICVRGYHDPIVSDELFATANCTGREGSMPKRIGMPTQNPLAGLVHCALCGHHMVRTPGTLRPDGTRYPDRITCRTQGCTNYGCSIAALTEAVLNVLHSWSVSYPAAPEKAESREADIARDHARQHIAQLESQRAKLCDLLERGIYDDETYLQRSAALASQINAAREELKRIEAESEKPDPDALIRAIAPHCREALESFAVASSAEEKNRILRQLIDHITFRKSARGNNHDDKLSMVEITVHPFDASLSK

SEQ ID NO: 4834 - protein, 515 aa, Unknown
  Description of Unknown: Integrase B4835 sequence
  SM00857,G3DSA:1.10.10.2600,IPR036162,PF13408,IPR025827, G3DSA:3.40.50.1390,PS51737,IPR006119,IPR038109,PF07508, SSF53041,IPR011109,PTHR30461,Coil,PS51736, cd00338,PF00239
MSYLVYLRKSRKDLENPFMTTEEILNRHECILLDLAKKMNLSVGGIYREIVSGDSISARPVMQKLLREVESGMWEGVLVVEVERLARGDTVDQGIVQRTFQYSETLIITPQKTYNPSSESDQTFFEFGLFMSRQEYKTIKRRLKSGVMSAVHEGKWPYNSAPYGYRRYKLANQKGWSLEFDDQERPIAELIYHLFCDEKRGLGYISDYLEVRNIKSRTGGRFTESFLREFLRNPVNDGKVFYGRRKVVTKIVNGSSVRTRPRADEYIEVAGLHDPLIPHDLFLKAQERFRVSTPRNPSSYTVKNPLSGLLVCSECGRKLQRRPASTSKRGAPYDVLMCKTRGCPTVGSAVEVIEREVLHALEGIVRGYEADVPSVPSLVPQKEELLHNAVLHRADLNKQQERIYTLLEQGIYSTDVFLDRSKALEKQMQEVEHSIEIFKNELEEEKIKHDNWKSFVPTCKQLLDIYWTLTPDARNAALKEVIDRIEYKKLTRNPKGMCDVATFELTLYPKIPSKS

SEQ ID NO: 4835 - protein, 515 aa, Unknown
  Description of Unknown: Integrase B4836 sequence
  PTHR30461:SF3,cd00338,SM00857,G3DSA:1.10.10.2600,IPR036162, PF13408,IPR025827,G3DSA:3.40.50.1390,PS51737,IPR006119, IPR038109,PF07508,IPR011109,SSF53041,PTHR30461, PS51736,Coil,PF00239
MKKENEIRAVVYARYSSHSQTEQSIEGQISAAQIYAKAKGYTIVKEYVDRAKTGKNDNREAFQQMLSDTAKHEFSVIIVWKVDRFGRNREEITFNKYRCKKNDVRVEYIAEAVPDSPEGVILESVLEGMAEYYSLQLAQNIRRGIRASAEKCQAIGGHCSLGYAIDPKTKKYVIDPDTAPTVQLIFEKYAEGYTGMDIVRLLNEKGLRTVRGKPFTKNSLWTILKNERYTGVYLFKDEVRVEGGIPALVSRETFDKVQEMLEINHRSPVNTWNRATYLLTDKLFCGHCGSKMVGECGTSRTGATYNYYICAGKKRERNCSKKAVRQDWIEKVVLQQIRRVLFDQEFLEFIAHKAYTYYLEEKKKLDQSAAIKAQLSSVEKSIDNLIRAMEAGIFSASTKSRLDDLENQKAALTRTLAEIKLSEESFDLTEDRILFFLESMRGLDMDDVDSRKRLVKTFVNAVYLYDDKITLAFNFTDSCEKPEIIELADIADGIVEKFVHRASCSTRTKTLHGNV

SEQ ID NO: 4836 - protein, 515 aa, Unknown
  Description of Unknown: Integrase B4837 sequence
  PTHR30461:SF3,SM00857,G3DSA:1.10.10.2600,IPR036162,PS51737, G3DSA:3.40.50.1390,IPR006119,IPR038109,PF07508,SSF53041, IPR011109,PF00239,PTHR30461,PS51736,Coil, cd00338
MTMDRICMYLRKSRADEEAEKYGEGETLAKHKKILLKVAKEKGLNILRIREEIVSGESLVHRPEMLELLKEVKNKEYDAVLVMDMDRLGRGNMQEQGLILETFKESNTKIITPRKTYDLQDEFDEEYSEFEAFMARKELKIINRRLQRGRVRSIEDGNFLGPLPPFGYEIVCEGKTRTLTPHPEQAPIVKMIFDLYANHNMGGGKIANKLNELGYKTYTGKNWSSHLVLNIIKNEVYVGKIQWRKKVYKKSDNPEQIKEVKSLPREEWISVKGKHEPLISNDIFDKAQEILKKRSHVPYKTKITNPLAGIIICSKCGSSMVYRPYTNNIDPHIVCYNTSCNNKSSKFKFVEQRLLKGLEEWLEEYKAEWDNVEDKENKSKANNTLRMHKLSLSRLKNELEELEKQKNNLHDLLERGIYDVNTYLERSQLLAQRIDDTKFNIENTSKNIKNEEKRIDAQRNIIPKVKKVLDLYPKTDDPERKNKLLKSVLDSAVYEKEKEQRNDQFTLTLFPKLPK

SEQ ID NO: 4837 - protein, 515 aa, Unknown
  Description of Unknown: Integrase B4838 sequence
  SM00857,G3DSA:1.10.10.2600,IPR036162,PS51737,G3DSA:3.40.50.1390, IPR006119,IPR038109,PF07508,IPR011109,SSF53041, PF00239,PTHR30461,PS51736,Coil,cd00338
MQYLIYLRKSRADREAELRGEGETLARHEKALLELARHQHLPIADIYREVVSGETIASRPMMQQLLSEVEQGVWDGVLVMEVERLARGDTIDQGIVAQAFKLSDTKIITPIKTYDPNNEFDEEYFEFGLFMSRREYKTIKRRLNNGRQASVKEGKYVGNRPPYGYERIKIENDKGFTLKPLEKEAQVVRMMFRWYAYGAHGISTIADQLNEMAIPSKTGKQWVYPTVRDILQNPVYVGKIRWGWRGQHKRVKNGSVSVSRPRSDDYLLADGIHPPIIDQQLFDQVQKKFSMHKPLPTSAREMKNPLAGLVICAKCGAKMQRRPYQRENIRTGLICPNNKCRNVSAPFDDVEQKLIEVLAEYIKEEKLRISNGHTQIDDSILQILQNQLADLREETVDLNKQNDNIHDFLEKGIYDVDTFLQRSQKISSRITEIEEKQKTLQQEIIEENKRIESATSIIPMTEQLLLQYENMSALEKNSMLKEVLRCVKYERECSIRDGGTADNFTLYLYPKISHK

SEQ ID NO: 4838 - protein, 515 aa, Unknown
  Description of Unknown: Integrase B4839 sequence
  PTHR30461:SF3,SM00857,G3DSA:1.10.10.2600,IPR036162,PF13408, IPR025827,G3DSA:3.40.50.1390,PS51737,IPR006119,IPR038109, PF07508,IPR011109,SSF53041,PF00239, PTHR30461,PS51736,Coil,cd00338
MKGVIYARYSPGPNQTDQSIEGQLRECKQFAEENNITIVNTYADKKQTGRNDNRVQFQKMLQDSKKKQFDYVIVWKIDRFGRNREEIAKNKAILRMSGVKVLFAKEHIPDGPEGIILESVLEGLAEYYSANLSQNIIRGMRESAMKCKCNGSGLPLGYNVDKEHNYIRNDEEATLIKMIFKMYDDGSKINDICKYLNAHNYKTKRNSKFTHTGVSRILHNRQYIGEYRWKDIITPNGMPRIIDDELFERVAKRLERTKRAPSASRGDVKFLLTGKLFCGYCKSTMIGDSGTGKSGRKFYYYNCRIKKNKHTCKKKTVRKDWLEYEVARITANIVLQDKIIDYVSDKVVEIQKKEHEDKSNLNYYTVKLKETNSAIKNIMKVIESGIFTESMRERLLKLEDERSTYETEIAKEEIMRPTITKEQVVFFLKQFKNGNIEDKDYQAKLIDIFVNKVILYDDKIIITYNYSGEHNETSAKIIEEAAEELINEQEKCSDKLLSSPPQRYGSNDTNCYRTF

SEQ ID NO: 4839 - protein, 515 aa, Unknown
  Description of Unknown: Integrase B4840 sequence
  cd00338,SM00857,G3DSA:1.10.10.2600,IPR036162,PF13408, PS51737,G3DSA:3.40.50.1390,IPR025827,IPR006119,IPR038109, PF07508,IPR011109,SSF53041,PTHR30461,PS51736, Coil,PF00239
MSYLIYLRKSRKDLENPFMTTEEILNRHECILLDLAKKMNLSIGDIYREIVSGDSISARPVMQKLLREVESGMWEGVLVVEVERLARGDTVDQGIVQRTFQYSETLIITPQKTYNPSSESDQTFFEFGLFMSRQEYKTIKRRLKSGVMSAVHEGKWPYNSAPYGYRRYKLANQKGWSLEFDDQERPIAELIYHLFCDEKRGLGYISDYLEARNIKSRTGGRFTESFLREFLRNPANDGKVFYGRRKVVTKIVNGSSVRTRPRADEYIEVTGLHDPLIPHDLFLKSQERFRVSAPRNPSSYAVKNPLSGILVCSECGHKLQRRPASTSKRGASYDVLMCKTRGCPTIGSAVEVVEREVLRALEDIVRGYEADVPSVPSLIPQKEELLHNAILHRADLNKQQERIYTLLEQGIYSTDVFLDRSKAMESQMQEAEHSIEIFKKELEEEKIKYDNWKSFVPTCKQLLKLYWTLTPDARNAALKEVIDRIEYKKLTRNPKGMYDVATFELTLYPKIPSKS

SEQ ID NO: 4840 - protein, 515 aa, Unknown
  Description of Unknown: Integrase B4841 sequence
  PTHR30461:SF3,cd00338,SM00857,G3DSA:1.10.10.2600,IPR036162, PF13408,IPR025827,G3DSA:3.40.50.1390,PS51737,IPR006119, IPR038109,PF07508,SSF53041,IPR011109,PTHR30461, PS51736,Coil,PF00239
MYKRIGLYARYSDTKQDDGYSIEYQMSECQDYLNKQGLSLTKTYIDQAITGTKVAGREAFHELLNDVKNELIDVIVVYKFSRIFRNAYESHKYRKLFKKHNVRLISITQLMDDDTSAGRLMINVLADIDQFQSETISDFVKSSMREMAKQGYFTGGTVPYGYKLETVFDNGKKKKKRYTPDEFEKEVVKKLFELYADNYSLKYLQDYTKSIGASTRQGKPFGITSIARMLRNDFYIGVLRYNAQGHEPIVVYDVIPPIIDKVLWDRVQQRHKSQNYVKPRKRKDLYSLTGKIICGKCGKHFFGIRSASVQRGKKYDYKYYVCSTSKTYAECTCKRVRKDFLEKTVLNEIKKHILNEKAIYQIANEIIAKLGENPDSQKNKLKQLKKELSTVKSQISELLELRSLKLVNNAYVAEHMKKYEERAKEIDIQIMSIEQQTKMTISRAMIVDYLNKMMSISDTTDDEVLQTIFNNFVEKIVIDNEVIEVFLFTSPTTEQIGHKLPHGQPEWSLYTKTKR

SEQ ID NO: 4841 - protein, 515 aa, Unknown
  Description of Unknown: Integrase B4842 sequence
  SM00857,G3DSA:1.10.10.2600,IPR036162,PS51737,G3DSA:3.40.50.1390, IPR006119,IPR038109,PF07508,IPR011109,SSF53041, PF00239,PTHR30461,PS51736,Coil,cd00338
MYQSYEFKPEEILVYLRKSRSDDPYLSVEDVLQKHEEIIREWIGRNLVHDIPAKNFYREVVSGETIADRPEFCKVLRQVESPGIKGVLVVEVQRLSRGDLEDAGRLIKILRYTHTKVITPQKIYDIEDDYDRDFFERELKRGNEYLEYTKKILARGKYQSVKDGWYIASKPPFGFVRVTVQDGKRKRPTLDFGPDAPTVRYIFDRLNAGVLPYTVAKELKAMGANSPAGKPWTVQMLLDIAKNDHYDQMIAWKRRGDVSRVKDGEVVKSRPRSKDYELFPARHPRMIDHDVFVHVQELLKNRSRKRDSYEQVNPVAGIAYCGICGRAMMYHTGLRNGKFKYNPRLVCSGLTNCEAASCLFSEYSQALVSSLLCSIEDCKIELEEESDGREKEAQIQMLEKQVQTLELKELHLWEKYADGEMPKEIFDKLNLKNTESKGNAEKALEQLRSEKPQREHLQKKIAMLSDAIKAIESTSLSAKEKNAFLKTVIERIEYSRTHKEAKSHVPFRMSVKLRI

SEQ ID NO: 4842 - protein, 515 aa, Unknown
  Description of Unknown: Integrase B4843 sequence
  PTHR30461:SF3,cd00338,SM00857,G3DSA:1.10.10.2600,IPR036162, PF13408,PS51737,G3DSA:3.40.50.1390,IPR025827,IPR006119, IPR038109,PF07508,IPR011109,SSF53041, PTHR30461,PS51736,Coil,PF00239
MMQQALNAVIYARYSSHNQTEQSIEGQLRDCYAFAEREGLQVIGEYIDRAITGRTDERPDFQRMIADARKQEFQRVIVWKFDRFSRDRYDSAIYKHKLKQCGVRVLSAMENVGEGDVSIILEALLEASAEQYSLDLSKKVLRGQRESRLKGTFLGGLTPIGYKLENRKLVADERTAPIVRYIFEQYAKGTSKQDIINELATRGILNRHGKPLSHSTLQTILKNKKYIGVYTHGGQDVAGGCEALIDEKTFLKVQEQLSKRKHAPAASKAVIEYLLQGKLYLYCGYCGFNMFGDSGRGRNGSTYRYYACRRRKKERDCKKKNEKKDFIEWYVVEQTVEYVLTPERIEYIASELVAQYKKDCGIDRIKTYEKQLDRIKAEISRLVNTLAVCPAAARQPIFDKMEQLDAEKQEVELDLSKLRISAKIQISKEHIADWLKQFCNGDALDVDFQKRIIDTFINSVYLYDDKVIIYYNIEGGKQVSYIDMIDSTEEPPFSDDAPGSSGGSDLKRPALRLCC

SEQ ID NO: 4843 - protein, 515 aa, Unknown
  Description of Unknown: Integrase B4844 sequence
  PTHR30461:SF3,SM00857,G3DSA:1.10.10.2600,IPR036162,PF13408, PS51737,G3DSA:3.40.50.1390,IPR025827,IPR006119,IPR038109, PF07508,SSF53041,IPR011109,PTHR30461,Coil, PS51736,cd00338,PF00239
MQLNMRDTKTSNELQAARGVIYARYSSSGQREESIEGQIRECREYAKRHNIVIVGEYCDHAISGTSDKRPEFQRLIKDSAKGQFAFVITWKGDRFARNRYDSAVYKYRLQQNGVRILYAKESIPDGPEGIILESVMEGFAEYYSANLSQNVKRGMYDSALKLQTLGQYCYGLQKGADGKWEQNPAQAPIVKRIFEEYVAGRPATDIYRDLNNEGFRTWTGGLFNKNSLRRMLKNEKYCGVYQYADIRVEDGIPAIVNRETFDKAQKMLKAHHEKPASKKIDGGFLLTGKLFCGHCGELMTGDGGTSKTGRVYQYYTCNNRRLKKCDKERAPKQWIEDIVVQKLVEIANDDNVIEAFADRYMEWQEKQKKSSPSSGMEERLKKIETAIKNTMSLIDSGFITDSLKSHLVELESERVSVEQGIAKEQANSPSLKRSEVVYFLKKFRDGDIDDVSWRIYLVETFLQAAYLFDDGRLLLHLNYSGDNNEITAQVAEQVVKEGADLCSDFAPPSPPEKAP

SEQ ID NO: 4844 - protein, 515 aa, Unknown
  Description of Unknown: Integrase B4845 sequence
  PTHR30461:SF3,SM00857,G3DSA:1.10.10.2600,IPR036162,PF13408, IPR025827,G3DSA:3.40.50.1390,PS51737,IPR006119,IPR038109, PF07508,IPR011109,SSF53041,PF00239,PTHR30461, PS51736,Coil,cd00338
MELSKGVIYARYSSDKQRDESIEGQIRECKEYAEREGIVITHIYTDKALSARTDHRPEFRQMIDDAKKHNFEYVIVYQLDRFSRSREDSAVYKSILKRNGVKVISAKENISSDPAGIILESVLEGMAEYYSAELAQKVRRGMTDNALKGKMNGTPTPLGYDKTKENSLVINKREAKIVERIFDMYLKGHSIPSICSFLNSKGYLSKKGGKFSYAVIRRILSNEKYIGIMKWNDIIVEGAIPSIISKEIFDKVQSANSRRIKLKASRSEFYNLCGKLYCGKCNAHYVGSTATSRSGEKHYYYVCNNRRKHHTCDAPNLKREIVEDIVINQTLEILNQPSTIEQLAELAIKANKDMMSTSELELQAVNDRINQLQSELDNYMKAIAKGFISDTLQNQIEKTEAELQDHMTRRANHEMASNQIQLTAEHIEFFLHKMAKENPTTKRGRASIIDTFIKQATIFDDRVEIIFNYSNDLPQFKEQAITCSHSCDMVVHTTHCTNHFYIARSRYPIRLVITY

SEQ ID NO: 4845 - protein, 515 aa, Unknown
  Description of Unknown: Integrase B4846 sequence
  SM00857,G3DSA:1.10.10.2600,IPR036162,PF13408,IPR025827, G3DSA:3.40.50.1390,PS51737,IPR006119,IPR038109,PF07508, SSF53041,IPR011109,PTHR30461,Coil,PS51736, cd00338,PF00239
MQYLIYLRKSRADREAELRGEGETLARHEKALLELARRQHLPIADIYREVVSGETIASRPMMQQLLSEVEQGVWDGVLVMEVERLARGDTIDQGIVAQAFKLSDTKIITPIKTYDPNNEFDEEYFEFGLFMSRREYKTIKRRLNNGRQASVKEGKYVGNRPPYGYERIKIENDKGFTLKPLEKEAQVVRMMFRWYAYGAHGISTIADQLNEMAIPSKTGKQWVYPTVRDILQNPVYIGKIRWGWRGQRKRVKNGSVSVSRPRSDDYLLADGIHPPIVDQQLFDQVQKKFSTHKPLPTSAREMKNPLAGLVICAKCGAKMQRRPYQRQNIRTGLICPNNKCRNVSAPFDDVEQMLIEVLAEYIKEEKLRISNGHTQIDDSVLQILQNQLTDLQEETVDLNKQNDNIHDFLEKGIYDVDTFLQRSQKISSRITEIEEKQKTLQQEIIEENKRIESATSIIPMTEQLLLQYENMSALEKNSMLKEVLRCVKYERECSIRDGGTADNFTLYLYPKISHK

SEQ ID NO: 4846 - protein, 515 aa, Unknown
  Description of Unknown: Integrase B4847 sequence
  PTHR30461:SF3,SM00857,G3DSA:1.10.10.2600,IPR036162,PF13408, IPR025827,PS51737,G3DSA:3.40.50.1390,IPR006119,IPR038109, PF07508,IPR011109,SSF53041,PTHR30461,Coil, PS51736,cd00338,PF00239
MKAAIYARFSSHNQREESIEGQVRACKRFAKEHGMTVIEIYADRGLSGLHADNRPEFQRMIQDSDHHRFEALIMWNLDRFSRDKYDTAVYKTRLKKNGVSLYYSDQSIPDTPEGIILESLLEGFAQYYSANLARNAKRGLQENARKCLWNGGCVPLGYLIDEHQRFVLEPIGAACVRMIFELYASGQSIKSIVCTLNEKGYKTVKGNRFRLGSIQGILRNRKYIGEYHASGITVPNGIPAIVDVQLFNDVQARLGVVASAKAHNKADIPYLLTTKVFCGHCGSPMIGESGTGKGGATYRYYKCSCRKNRKGTCDKKTEPKDWLEENVVRQTVKNVLRPEVIKEISENCAAALKADASDESLVQALKAQLAETDKGLRNLLKAIEAGIISSTTRERMAELESQKSELEAQIAREQLRKPEITAEQISFWLESFLAGDIHDPKYQERIINALVRRVDVYDDGPEKQKLTIFYNITKNNHSSSKISISKCSDIECIALPKRSVAKAADFFSLLAEGRE

SEQ ID NO: 4847 - protein, 515 aa, Unknown
  Description of Unknown: Integrase B4848 sequence
  cd00338,SM00857,G3DSA:1.10.10.2600,IPR036162,PF13408, IPR025827,G3DSA:3.40.50.1390,PS51737,IPR006119,IPR038109, PF07508,SSF53041,IPR011109,PTHR30461,PS51736, Coil,PF00239
MSYLIYLRKSRKDLENPFMTTEEILNRHECILLDLAKKMNLSIGDIYREIVSGDSISARPVMQKLLREVESGMWEGVLVVEVERLARGDTVDQGIVQRTFQYSETLIITPQKTYNPSSESDQTFFEFGLFMSRQEYKTIKRRLKSGVMSAVREGKWPYNSTPYGYRRYKLENQKGWSLEFDDQERPIAELIYRLFVDEKKGFGYISDYLEAHNIKSRTGGRFTDSFLRDFIRNPVNDGKVFYGRRKVVTKIVNGSSVRTRPRADEYIEVDGLHDPLIPHDLFLKAQERFHTSTPRKPSTYTVKNPFSGLLVCSECGRKLQRRPASASKRGVPYDMLMCNTRGCPTIGSAVEVVEREVLRALEDIVRGYEADVPSVPSLVPQKEELLHNAILHRADLNKQQERIYTLLEQGIYSTDVFLDRSKALESQMQEVEHSIEIFKKELEEEKIKYDNWKSFVPTCKQLLEIYWTLTPDARNAALKEVIDRIEYKKLTRNPKGMYDVAAFELTLYPKIPSKS

SEQ ID NO: 4848 - protein, 515 aa, Unknown
  Description of Unknown: Integrase B4849 sequence
  PTHR30461:SF3,SM00857,G3DSA:1.10.10.2600,IPR036162,PS51737, G3DSA:3.40.50.1390,IPR006119,IPR038109,PF07508,IPR011109, SSF53041,PTHR30461,Coil,cd00338,PF00239
MKAVILARVSSKEQEDGYSLDAQISRLSDYANKKGLEVIKTFTLTESSTQGDRKKFQEVLKFCSSQKETIALIADAVDRVQRSFKESTYLDELRKKEKIELHFYREGMVVGKNASSSDLLRWDFLVIGAKSYVLALAENVKRSINFKIEHGEWCGKAPIGYLNRRNAHGKSEICLDPVRAPIIKKLFQEYSLGKTSFKELANLADKWDLKSNSPKARKLTSKTLYDTLTNPFYCGKMRIKGQLYPHIYEPLISEDLWNKCQEVRLGYKKQPVKYASKEFLYRGLITCYNTGKIVTTDQKRGHINYLICYDKTGKRIYCHEETITKQVQQILDSIIIPEPILTGLNQILRDSKKNEALLHEQAVTSLRKDLDITKKRIENLVDMYLDKKIDDEIYSSKINQLKNEKTSLENKIAAHSVSDDKFNETIINLFDIVNHAGKKFANSSNIEVKRRILKLIIRTMKLDRGNLGYELAWPFSELPKSDDCYLWRTLVDNLRTNHRDKILLIGQQLPYLLTF

SEQ ID NO: 4849 - protein, 515 aa, Unknown
  Description of Unknown: Integrase B4850 sequence
  PTHR30461:SF3,SM00857,G3DSA:1.10.10.2600,IPR036162,PF13408, PS51737,IPR025827,G3DSA:3.40.50.1390,IPR006119,IPR038109, PF07508,IPR011109,SSF53041,PTHR30461, Coil,PS51736,cd00338,PF00239
MNENKNAVLYARFSSDMQHETSIEAQEEAIRKYARENGYTIIAEYIDRAKSATTTAKRDRFNQMIEDSKDGGFSVVIVHKYDRFARNRLDSTVAKAILDKNGVRVISVLEPTDDTPEGELMEGMFELLAQYYSSNLGREVMKGFKVRAKKCLHNGGIAPLGYDVDPDSKKLIINENEAIIVRKIFDMYTSGYGYNTIIAHLNECGYVTKYGNEFAKNSLYSILRNKKYAGYYVYNQWDGKHNRHRAKPEDEVICIPDGVPAIISEEIYDKAAEIMAKHKLSPGANTAKTTYLLSGMIRCGHCGAIMTGNRRMNGKGYTYCSYRCQHKQSTECANKEIRHDRIEEYVLQVLEQNIFNEDYIPDIIAEIKEQAVQHNTSVIKELADLTMKLERIKTRRKNILNAIADGIAEDDCKEILSQLKSDEYSCIKRQKALSTTETDIDISTAELTERISELSIYIYERNIAECKKFIGQYVKSVVVYDTKVEVTVTIPSELLCGCEYSLTRSVGRKFLPMPR

SEQ ID NO: 4850 - protein, 515 aa, Unknown
  Description of Unknown: Integrase B4851 sequence
  PTHR30461:SF3,SM00857,G3DSA:1.10.10.2600,IPR036162,PF13408, IPR025827,G3DSA:3.40.50.1390,PS51737,IPR006119,IPR038109, PF07508,SSF53041,IPR011109,PF00239,PTHR30461, PS51736,Coil,cd00338
MRAFIYCRFSSHKQQELSIEGQRDICQEYADKHNITVVGQYADRARSGKTENRADFRRLMRDAATGVVDCVLVWRYDRFFRNRAESALYRKQLEAAGVHLISVTEYIPEGSAGIITQGMIETVAEYFSAKLSEDVSRGMNKAAQHCQIVGRAPLGYRAGPNKRWQIDPVGAELVRRIFEWYASGKAMGQLAAQLNEEGHRTTNGTLYTRSSFNSILRNEKYIGVYSYGGEVRIEGGCPRIIEDELFFTVQRRLSANRHRPGAYKAEVPYLLSGKLFCGLCGAPMTGTAGTSHTGARHYYYICNNRRAKTCEKKNVRLDLIEEAVLQSALDILTDENIAYISAEVERRCAENSDSAALLASLNAQLEEVQRRLKNIGNAIAQGIITETTKELLEEAEADRTALRQQIDRAKVQAALVVKAEAVACWLDGFRRGDRTDPDFRRQVFGALVHSVFVYDDYLKIIFNVDSAGAAVVPYEAAQAATPSEAPPGSYLDTLGAPKKAAMLIAAFSFICLSII

SEQ ID NO: 4851 - protein, 515 aa, Unknown
  Description of Unknown: Integrase B4852 sequence
  SM00857,G3DSA:1.10.10.2600,IPR036162,PF13408,IPR025827, PS51737,G3DSA:3.40.50.1390,IPR006119,IPR038109,PF07508, IPR011109,SSF53041,PF00239,PTHR30461,PS51736, Coil,cd00338
MSYLIYLRKSRKDLENPFMTTEEILNRHECILLDLAKKMNLSIGDIYREIVSGDSISARPVMQKLLREVESGMWEGVLVVEVERLARGDTVDQGIVQRTFQYSETLIITPQKTYNPSSESDQTFFEFGLFMSRQEYKTIKRRLKSGVMSAVREGKWPYNSAPYGYRRYKLANQKGWSLEFDDQERPIAELIYHLFCDEKRGLGYISDYLEARNIKSRTGGRFTESFLREFLRNPANDGKVFYGRRKVVTKIVNGSSVRTRPRADEYIEVAGLHDPLIPHDLFLKAQERFRVSTPRNPSSYAVKNPLSGILVCSECGHKLQRRPASTSKRGAPYDVLMCKTRGCPTIGSAVEVVEREVLRALEDIVRGYEADVPSVPSLIPQKEELLHNAILHRADLNKQQERIYTLLEQGIYSTDVFLDRSKAMESQMQEAEHSIEIFKKELEEEKIKYDNWKSFVPTCKQLLKLYWTLTPDARNAALKEVIDRIEYKKLTRNPKGMYDVATFELTLYPKIPSKS

SEQ ID NO: 4852 - protein, 515 aa, Unknown
  Description of Unknown: Integrase B4853 sequence
  cd03768,PTHR30461:SF3,SM00857,G3DSA:1.10.10.2600,IPR036162, PF13408,IPR025827,G3DSA:3.40.50.1390,PS51737,IPR006119, IPR038109,PF07508,IPR011109,SSF53041,PTHR30461, PS51736,Coil,PF00239
MKIGIYPRKSVYRDNSDSVAVQIKMCKDYAGIIFRGEELEFFIYDQDEGFSGKNTNRPSFQQLMQDVKANKLDVVMVYKLDRISRNVKEFSAMYDTMQDHDVSFVSVKESFDTSTPIGRTVMYILAAFAQLERENTSERVGDNMKQLGASGKWTGGHLPSGMTSIRKKVDGKEHSYLIVNQETIGRVKLLYQLILEGYPITRVERYCRDHSITSETGKFLNTSQIYGILTNPVYCQADLQAFYYLHGKGCTLPDKRLFDGTKGLIGYGRTQGTENKKKLDMDRWIIALGIHDYVIPANDWIAVQERLGQNKQVRTLKHEVGILRGILKCRCGRTMQNRVYIKNQRMFAYYFCPARDREGINYCDADFVKIDTIDNLFIDKLKAIRIDEEFVHPQHNQHSVTDINALKKDIRSTESALENLTRQLQENVTSTAAKYIVQQIENLDKKLNTLKNQLQLEELRDNKERSETEEREEIYKNICYLLDNFDDMEYKEKNELIRRTVKRCVLNDKNLEISF

SEQ ID NO: 4853 - protein, 515 aa, Unknown
  Description of Unknown: Integrase B4854 sequence
  cd00338,SM00857,G3DSA:1.10.10.2600,IPR036162,PS51737, G3DSA:3.40.50.1390,IPR006119,IPR038109,PF07508,SSF53041, IPR011109,PTHR30461,PS51736,Coil,PF00239
MQYLIYLRKSRADREAELRGEGETLARHEKALLELARRQHLPIADIYREVVSGETIASRPMMQQLLSEVEQGVWDGVLVMEVERLARGDTIDQGIVAQAFKLSDTKIITPIKTYDPNNEFDEEYFEFGLFMSRREYKTIKRRLNNGRQASVKEGKYVGNRPPYGYERIKIENDKGFTLKPLEKEAQVVKMMFRWYAYGAHGISTIADQLNEMAIPSKTGKQWVYPTVRDILQNPVYVGKIRWGWRGQRKRVKNGSVSVSRPRSDDYLLADGIHPPIIDQQLFDQVQKKFSMHKPLPTSAREMKNPLAGLVICAKCGAKMQRRPYQRENIRTGLICPNNKCRNVSAPFDDVEQKLIEALAEYIKEEKLRISNGHTQIDDSVLQILQNQLADLWEETVDLNKQNDNIHDFLEKGIYDVDTFLQRSQKISSRITEIEEKQKTLQQEIIEENKRIESATSIIPMTEQLLLQYENMSALEKNSMLKEVLRCVKYERECSIRDGGTADNFTLYLYPKISHK

SEQ ID NO: 4854 - protein, 515 aa, Unknown
  Description of Unknown: Integrase B4855 sequence
  PTHR30461:SF3,cd00338,SM00857,G3DSA:1.10.10.2600,IPR036162, PF13408,IPR025827,G3DSA:3.40.50.1390,PS51737,IPR006119, IPR038109,PF07508,IPR011109,SSF53041, PTHR30461,PS51736,Coil,PF00239
MNIEYSGLVADAYCRYSSKMQDDGNSIEYQIAEIEEFCIKNGIKIRKWHIDKAVSGKKVAGRDQFYNLIEDVKAKKINALIVWKTNRAFRNSYESHKYRKVLRKYGVKLISATQIIDEDTSTGRLTTNILSDIDQYQSEVIADHVKSAMREMVRRGFYTGQTIPYGYKVEDTNDNGKPRKKYIINEEEAVYVKRIFEEFANGLTIAHISRWMKAEGLKTRRGNVFDYDALRKMLKNDFYIGTRRYTVKELDTIEIENAVPPIIDERTFDAVQHVFLSRKKDTKPRSGKRTYGLTGKIVCAYCNEKFYGKAYANSPYYHCKNKVKKKTCDCKSIRKDKLEKKVLQEIKENILNAQSIEFIAEKVLKEIGSMPTQKVDRKELLKRKETLLREIKELVQLKLDGLINAEALRDMQMEKNGEIADIDLELALLEDREEKNIDKEFIVNYLNDLISYSNSDNDEILKVLFDKTVDKIVISNSGVELHLAVFFTKYTHKTDLAFPKFALSRDISRYDINKL

SEQ ID NO: 4855 - protein, 515 aa, Unknown
  Description of Unknown: Integrase B4856 sequence
  SM00857,G3DSA:1.10.10.2600,IPR036162,PF13408,IPR025827, G3DSA:3.40.50.1390,PS51737,IPR006119,IPR038109,PF07508, IPR011109,SSF53041,PF00239,PTHR30461,PS51736, Coil,cd00338
MSYLIYLRKSRKDLENPFMTTEEILNRHECILLDLAKKMNLSVGDIYREIVSGDSISARPVMQKLLREVESGMWEGVLVVEVERLARGDTVDQGIVQRTFQYSETLIITPQKTYNPSSESDQTFFEFGLFMSRQEYKTIKRRLKSGVMSAVREGKWPYNSAPYGYRRYKLANQKGWSLEFDDQERPIAELIYHLFCDEKQGLGYISDYLEARNIKSRTGGRFTESFLREFLRNPANDGKVFYGRRKVVTKIVNGSSVRTRPRADEYIEVAGLHDPLIPHDLFLKAQERFRVSTPRNPSSYTVKNPLSGLLVCSECGHKLQRRPASTSKRGAPYDVLMCKTRGCPTVGSAVEVIEREVLYALEDIVRGYEADVPSVPSLVPQKEELLHNAILHRTDLNKQQERIYTLLEQGIYSTDVFLDRSKALEKQMQEVDHSIEVLKNELEEEKIKYNNWKSFVPTCKQLLEIYWTLTPDAKNSALKEVIDRIEYKKLTRNPKGMCDVATFELTLYPKIPMKS

SEQ ID NO: 4856 - protein, 515 aa, Unknown
  Description of Unknown: Integrase B4857 sequence
  PTHR30461:SF3,cd00338,SM00857,G3DSA:1.10.10.2600,IPR036162, PF13408,PS51737,G3DSA:3.40.50.1390,IPR025827,IPR006119, IPR038109,PF07508,SSF53041,IPR011109,PTHR30461, Coil,PF00239
MYEEIKTACLYLRYSSSNQTEQSIEGQMHVCQDFCKRHNIRIVEMYIDRATSASKDIEKRVEFLKMIKDSEKGNFNAVIVYKLDRFARSRYDSATYKYRLKRNGVQLISATENITQDPEGIILESVLEGMAEFYSAELSQKINRGMRESAMKHNSIGGAIPLGYKTVDKKLVIDETTAPIVREAFQMYADGESVAEICRTFNNRGYKTSKGTRFGKSSFTKIFRNEKYIGVYKYHDYRAEDVIPPIIDKDLWDRVQVRVGKIKKAPARNKARHTYLLTGKLFCGHCGSAMNADGNSQGYLYYRCYGKKNLDKQCNKRNMEKNLIERLVAQDAMSFLTDEYIEKIATIACDRNKQEIESDSPIPVIRDRIRQVDVSLNNLLKAIETGSAPDMLVKRMGELETEKKDMEVQLKKEMAHQVYIDKEQVIFWLEKFREGDINDEEFCQTVIDLFVNSVTVWDEPDDKFKITIAYNLTSIPQKTYRLSKDGRLSDYASNTPNGETDKDNIILFHNLLIYM

SEQ ID NO: 4857 - protein, 515 aa, Unknown
  Description of Unknown: Integrase B4858 sequence
  SM00857,G3DSA:1.10.10.2600,IPR036162,PS51737,G3DSA:3.40.50.1390, IPR006119,IPR038109,PF07508,SSF53041,IPR011109, PF00239,PTHR30461,PS51736,Coil,cd00338
MQYLIYLRKSRADQEAELRGEGETLARHEKALLELARRQHLPIADIYREVVSGETIASRPMMQQLLSEVEQGVWDGVLVMEVERLARGDTIDQGIVAQAFKLSDTKIITPIKTYDPNNEFDEEYFEFGLFMSRREYKTIKRRLNNGRQASVKEGKYVGNRPPYGYERIKIENDKGFTLKPLEKEAQVVRMMFRWYAYGAHGISTIADQLNEMAIPSKTGKQWVYPTVRDILQNPVYVGKIRWGWRGQRKRVKNGSVSVSRPRSDDYLLADGIHPPIIDQQLFDQVQKKFSMHKPLPTSAREMKNPLAGLVICAKCGAKMQRRPYQRENIRTGLICPNNKCRNVSAPFDDVEQKLIEVLAEYIKEEKLRISNGHTQIDDSILQILQNQLADLREETVDLNKQNDNIHDFLEKGIYDVDTFLQRSQKISSRITEIEEKQKTLQQEIIEENKRIESATSIIPMTEQLLLQYENMSALEKNSMLKEVLRCVKYERECSIRDGGTADNFTLYLYPKISHK

SEQ ID NO: 4858 - protein, 515 aa, Unknown
  Description of Unknown: Integrase B4859 sequence
  cd00338,SM00857,G3DSA:1.10.10.2600,IPR036162, PF13408,IPR025827,G3DSA:3.40.50.1390,PS51737, IPR006119,IPR038109,PF07508,SSF53041, IPR011109,PTHR30461,PS51736,Coil,PF00239
MSYLIYLRKSRKDLENPFMTTEEILNRHECILLDLAKKMNLSIGDIYREIVSGDSISARPVMQKLLREVESGMWEGVLVVEVERLARGDTVDQGIVQRTFQYSETLIITPQKTYNPSSESDQTFFEFGLFMSRQEYKTIKRRLKSGVMSAVREGKWPYNSTPYGYRRYKLENQKGWSLEFDDQERPIAELIYRLFVDEKKGFGYISDYLEAHNIKSRTGGRFTDSFLRDFIRNPVNDGKVFYGRRKVVTKIVNGSSVRTRPRADEYIEVDGLHDPLIPHDLFLKAQERFHTSTPRKPSTYTVKNPFSGLLVCSECGRKLQRRPASASKRGVPYDMLMCNTRGCPTIGSAVEVVEREVLRALEDIVRGYEADVPSVPSLVPQKEELLHNAILHRADLNKQQERIYTLLEQGIYSTDVFLDRSKALESQMQEVEHSIEIFKKELEEEKIKYDNWKSFVPTCKQLLKLYWTLTPDARNAALKEVIDRIEYKKLTRNPKGMYDVATFELTLYPKIPSKS

SEQ ID NO: 4859 - protein, 515 aa, Unknown
  Description of Unknown: Integrase B4860 sequence
  SM00857,G3DSA:1.10.10.2600,IPR036162,PF13408,IPR025827, PS51737,G3DSA:3.40.50.1390,IPR006119,IPR038109,PF07508, SSF53041,IPR011109,PF00239,PTHR30461,PS51736, Coil,cd00338
MACNKRGYIYARFSSDNQREVSIDDQIKAGKDFCEANGIQVAGCYSDYALTGRNDNRPDFKRMMREIDGCDIVVIWNTDRLHRNMFNAFKYLGELIGAGKDFASVTQPELNGESEVRLLLYSIYTWKDQRYSEDLSANVSRGMRGKAERCEYLGYSKFGYGHEGNAITVNQDEAETVCKMHEMWQSGTTIAGIARMLKDMGVATSRGTDPGYNFVRAVLLDESYTGVYIWDDIRVEGGMPAIISRACYEKTLRRFQFRPRKKEARDYMLSGRLICGTCHEYMHGEKAKGGKAVYYCCKGKRKACQGNIRAEQLEDRVVEVVRGIFCDYDNCKRVVDFVLDAQSEEAPRTDIEGYEKQLKNIARKRQNLVKAIAEGLPMDDARETLDGLSRQAATIERRIEEAQKVNAHLDADALYEILDAVRRGEFTDAEVLETFVSEVYLYNDCIAIVTNLDGSNTEPMEVFAALEKEEPAPFEKGTGNIQMVGHRNPNTYLCSCTVVVLSTAIAMIAPLQKAS

SEQ ID NO: 4860 - protein, 515 aa, Unknown
  Description of Unknown: Integrase B4861 sequence
  PTHR30461:SF3,SM00857,G3DSA:1.10.10.2600,IPR036162,PF13408, PS51737,G3DSA:3.40.50.1390,IPR025827,IPR006119,IPR038109, PF07508,SSF53041,IPR011109,PF00239,PTHR30461, PS51736,Coil,cd00338
MSVDIKWQVPKAQPEANELAVVYARYSSHSQGEQSIEGQLSNARDYAAAHGYTIVHEYVDRAKSGRTDNRAEFQQMLKDTAKRQFSVIILWKVDRFGRNREEIAINKMKCRKNGVRVEYVAETIPDSPEGVILESVLEGFAEYYSLQLSQNIRRGRAESAEKCQSLGGNRPLGYKTGPDKKFVIDENTAPTVKIIFTMYADGKTVTEIVDKLNEMGLRTLRGGPFTKNSLHSILKNKKYIGIYEYQGHEIKDGVPRIIEDDVFNKVQEMLKINKRAPAKTWSRADYILTDKLFCGKCGALMFGESGTSKTGAKHNYYICSNKKRFRSCDKKAVRQADIEDTVLNATHELLQDDELLDYIVDRTWEYYLAQDNSQEELRNLQRQLAQTDTAISNLIRAIEAGILTEETKKRMDELTQQKADLKASIADREIARGFHLKKSHIAYYLRSLRDADWSDKETQKRLIQTFVNAVFVYDDHITLTYNFSGDKNTITLRDMQRFEDGEEFGCRASRSTKTI

SEQ ID NO: 4861 - protein, 515 aa, Unknown
  Description of Unknown: Integrase B4862 sequence
  cd00338,SM00857,G3DSA:1.10.10.2600,IPR036162,PS51737, G3DSA:3.40.50.1390,IPR006119,IPR038109,PF07508,SSF53041, IPR011109,PTHR30461,PS51736,Coil,PF00239
MQYLIYLRKSRADREAELRGEGETLARHEKALLELARRQHLPIADIYREVVSGETIASRPMMQQLLSEVEQGVWDGVLVMEVERLARGDTIDQGIVAQAFKLSDTKIITPIKTYDPNNEFDEEYFEFGLFMSRREYKTIKRRLNNGRQASVKEGKYVGNRPPYGYERIKIENDKGFTLKPLEKEAQVVRMMFRWYAYGAHGISTIADQLNEMAIPSKTGKQWVYPTVRDILQNPVYVGKIRWGWRGQRKKVKNGSVSVSRPRSDDYLLADGIHPPIIDQQLFDQVQKKFSMHKPLPTSAREMKNPLAGLVICAKCGAKMQRRPYQRENIRTGLICPNNKCRNVSAPFDDVEQKLIEVLAEYIKEEKLRISNGHTQIDDSVLQILQNQLADLREETVDLNKQNDNIHDFLEKGIYDVDTFLQRSQKISSRITKIEEKQKTLQQEIIEENKRIESATSIIPMTEQLLLQYENMSALEKNSMLKEVLRCVKYERECSIRDGGTADNFTLYLYPKISHK

SEQ ID NO: 4862 - protein, 515 aa, Unknown
  Description of Unknown: Integrase B4863 sequence
  PTHR30461:SF3,cd00338,SM00857,G3DSA:1.10.10.2600,IPR036162, PF13408,IPR025827,G3DSA:3.40.50.1390,PS51737,IPR006119, IPR038109,PF07508,IPR011109,SSF53041, PTHR30461,PS51736,Coil,PF00239
MYKRIGLYARYSDTKQDDGYSIEYQMSECQDYLNKQGLSLTKTYIDQAITGTKVAGREAFHELINDVKNELIDVIVVYKFSRIFRNAYESHKYRKLFKKHNVRLISITQLMDDDTSAGRLMINVLADIDQFQSETISDFVKSSMREMAKQGYFTGGTVPYGYKLETVFDNGKKKKKRYTPDEFEKEVVKKLFELYADNYSLKYLQDYTKSIGASTRQGKPFGITSIARMLRNDFYIGVLRYNAQGHEPIVVYDVIPPIIDKVLWDRVQQRHKSQNYVKPRKRKDLYSLTGKIICGKCGKHFFGIRSASVQRGKKYDYKYYVCSTSKTYAECTCKRVRKDFVEKTVLNEIKKHILNEKAIYQIANEIIAKLGENPDSQKNKLKQLKKELSTVKSQISELLELRSLKLVNNAYVAEHMKKYEERAKEIDIQIMSIEQQTKMTISHAMIVDYLNKMMSISDTTDDEVLQTIFNNFVDKIVIDNEVIEVFLFTSPTTEQIGHKLPHGQPEWSLYTKTKR

SEQ ID NO: 4863 - protein, 515 aa, Unknown
  Description of Unknown: Integrase B4864 sequence
  PTHR30461:SF3,cd00338,SM00857,G3DSA:1.10.10.2600,IPR036162, PF13408,IPR025827,G3DSA:3.40.50.1390,PS51737,IPR006119, IPR038109,PF07508,IPR011109,SSF53041,PTHR30461, PS51736,Coil,PF00239
MYKRIGLYARYSDTKQDDGYSIEYQMSECQDYLNKQGLSLTKTYIDQAITGTKVAGREAFHELINDVKNELIDVIVVYKFSRIFRNAYESHKYRKLFKKHNVRLISITQLMDDDTSAGRLMINVLADIDQFQSETISDFVKSSMREMAKQGYFTGGTVPYGYKLETVFDNGKKKKKRYTPDEFEKEVVKKLFELYADNYSLKYLQDYTKSIGASTRQGKPFGITSIARMLRNDFYIGVLRYNAQGHEPIVVYDVIPPIIDKVLWDRVQQRHKSQNYVKPRKRKDLYSLTGKIICGKCGKHFFGIRSASVQRGKKYDYKYYVCSTSKTYAECTCKRVRKDFLEKTVLNEIKKHILNEKAIYQIANEIIAKLGENPDSQKNKLKQLKKELSTVKSQISELLELRSLKLVNNAYVAEHMKKYEERAKEIDIQIMSIEQQTKMTISHAMIVDYLNKMMSISDTTDDEVLQTIFNNFVEKIVIDNEVIEVFLFTSPTTEQIGHKLPHGQPEWSLYTKTKR

SEQ ID NO: 4864 - protein, 515 aa, Unknown
  Description of Unknown: Integrase B4865 sequence
  cd00338,SM00857,G3DSA:1.10.10.2600,IPR036162,PF13408, IPR025827,G3DSA:3.40.50.1390,PS51737,IPR006119,IPR038109, PF07508,IPR011109,SSF53041,PTHR30461,PS51736, Coil,PF00239
MSYLIYLRKSRKDLENPFMTTEEILNRHECILLDLAKKMNLSIGDIYREIVSGDSISARPVMQKLLREVESGMWEGVLVVEVERLARGDTVDQGIVQRTFQYSETLIITPQKTYNPSSESDQTFFEFGLFMSRQEYKTIKRRLKSGVMSAVREGKWPYNSTPYGYRRYKLENQKGWSLEFDDQERPIAELIYRLFGDEKKGFGYISDYLEAHNIKSRTGGRFTDSFLRDFLRNPVNDGKVFYGRRKVVTKIVNGSSVRTRPRADEYIEVDGLHEPLIPHDLFLKAQERFHSSAPRKPSTYTVKNPFSGLLVCSECGRKLQRRPASASNRGVPYDMLMCNTRGCPTIGSAVEVVEREVLRALEDIVRGYEADVPSVPSLVPQKEELLHNAVLRRADLNKQQERIYTLLEQGIYSTDVFLDRSKALEKQMQEVEHSIEIFKNELEEEKIKHDNWKSFVPTCKQLLDIYWTLTPDARNAALKEVIDRIEYKKLTRNPKGMYDVATFELTLYPKIPSKS

SEQ ID NO: 4865 - protein, 515 aa, Unknown
  Description of Unknown: Integrase B4866 sequence
  cd00338,SM00857,G3DSA:1.10.10.2600,IPR036162,PS51737, G3DSA:3.40.50.1390,IPR006119,IPR038109,PF07508,IPR011109, SSF53041,PTHR30461,PS51736,Coil,PF00239
MQYLIYLRKSRADQEAELRGEGETLARHEKALLELARRQHLPIADIYREVVSGETIASRPMMQQLLSEVEQGIWNGVLVMEVERLARGDTIDQGIVAQAFKLSDTKIITPIKTYDPNNEFDEEYFEFGLFMSRREYKTIKRRLNNGRQASVKEGKYVGNRPPYGYERIKIENDKGFTLKPLEKEAQVVRMMFRWYAYGAHGISTIADQLNEMAIPSKTGKQWVYPTVRDILQNPVYVGKIRWGWRGQRKRVKNGSVSVSRPRSDDYLLADGIHPPIVDQQLFDQVQKKFSMHKPLPTSAREMKNPLAGLVICAKCGAKMQRRPYQRENIRTGLICPNNKCRNVSAPFDDVEQKLIEVLAEYIKEEKLRISNGHTQIDDSILQILQNQLADLREETVDLNKQNDNIHDFLEKGIYDVDTFLQRSQKISSRITEIEEKQKTLQQEIIEENKRIESATSIIPMTEQLLLQYESMSALEKNSMLKEVLRCVKYERECSIRDGGTADNFTLYLYPKISHK

SEQ ID NO: 4866 - protein, 515 aa, Unknown
  Description of Unknown: Integrase B4867 sequence
  PTHR30461:SF3,SM00857,G3DSA:1.10.10.2600,IPR036162,PF13408, PS51737,G3DSA:3.40.50.1390,IPR025827,IPR006119,IPR038109, PF07508,IPR011109,SSF53041,PTHR30461, Coil,PS51736,cd00338,PF00239
MSENKNAVLYARFSSDMQHETSIEAQEEAIRMYARENGYAIIAEYIDRAKSATTTAKRDRFNQMIEDSKDGGFSVVIVHKYDRFARNRLDSTVAKAILDKNGVRVISVLEPTDDTPEGELMEGMFELLAQYYSSNLGREVMKGFKVRAKKCLHNGGIAPLGYDVDPDSKKLIINENEAIIVRKIFDMYTSGYGYNTIIAHLNECGYVTKYGNEFAKNSLYSILRNKKYAGYYVYNQWDGKHNRHRAKPEDEVICIPDGVPAIISEEIYDKAAEIMAKHKLSPGANTAKTTYLLSGMIRCGHCGAIMTGNRRMNGKGYTYCSYRCQHKQSTECANKEIRHDRIEEYVLQVLEQNIFNEDYIPDIIAEIKEQAVQHNTSVIKELADLTIKLERIKTRRKNILNAIADGIAEDDCKEILSQFKADEYSCIKRQKALSTTETDIDISTAELTERISELSIYIYERNIAECKKFIGQYVKSVVVYDTKVEVAVTIPSELLCGCEYSLTRSMGRKFLPMPQ

SEQ ID NO: 4867 - protein, 514 aa, Unknown
  Description of Unknown: Integrase B4868 sequence
  PTHR30461:SF3,SM00857,G3DSA:1.10.10.2600,IPR036162,PF13408, PS51737,G3DSA:3.40.50.1390,IPR025827,IPR006119,IPR038109, PF07508,IPR011109,SSF53041,PF00239,PTHR30461, PS51736,Coil,cd00338
MYEDIKTACLYVRFSSHNQTEQSIEGQTRVCRDFCKRHNIRIVEIYADRATSASKDIEKRVQFLKMIKDSEKGLFDAVIVYKLDRFARSRYDSATYKYRLKRNGVQLISATENISNDPEGIILESVLEGMAEFYSAELSQKINRGMRESAYKHNSIGGAIPLGYKIEDKKLVIDPKTAPIVKEAFEKYADGETVAEICRQFNARGYKTSKGTAFGKSSFTKIFRNERYIGVYTFHDYRAEDAIPAIIDKDLWDRVQLRVGKIKNAPARNKAKVVYLLSGKIFCGHCGSKMNGNCNAGNYCYYQCYGKKNGNVDCKKKNIRKEFIERLVAQDALSLLTDEYIEQIATIACEKNQHEIELDSALPTIRDRIHQVDLSLNHLLKAIESGSAPDMLVKRMGELEKEKKDLQAQAKKESEDIVELDKAQVIYWLEQFRGGSIEDEEFCRMLIDLFVNSVTVWDEDDNTYKVTVAYNLTSLPTKTYRLNKGGTLSDFASNAPKSLEFCSLQSITYPMRLK

SEQ ID NO: 4868 - protein, 514 aa, Unknown
  Description of Unknown: Integrase B4869 sequence
  SM00857,G3DSA:1.10.10.2600,IPR036162,PS51737,G3DSA:3.40.50.1390, IPR006119,IPR038109,PF07508,IPR011109,SSF53041, PTHR30461,Coil,PS51736,cd00338,PF00239
MSTEYAIYLRKSRADLEAEAHGEGDTLARHEHILMELAKSRALPIGAIYREIVSGERIANRPVMQQLLSEVEDGRWKGVLVTETSRLARGDTIDQGIVAQAFKFSGTLIVTPSKTYDPTQEADEEWMEFGLFMSRQEYRMIRRRQLAGTRASKKEGHYVPGRPPYGYERYKLDGRGWSLRPVEPQAGVIRTIYDMYLSGKGFSEIANELNAMKIRTPLDKKWVPATTRAILQNPHYAGFIPSAMKVNTKIVQKGKLITKRPVNKNCELYEGIHEAIIPRDVWYSVQQRMKDTVTPRVPRKYQQMNPLAGLVYCDQCGKLMSRHPYRREDKVRFGCENPSCSTVSSLFEDVESLVLQSLREFLHKIELSSPALLDTKSEEIALQNIEKQLTDINHRLQRTYELLEDGVYSKETFLQRQSAISQDQTALLNTKHEIERKLHNKQTDIEAQKNSAPLIRHVLDVYPTLEDPKEQNLLLKQVIRRIDYHKTVRVYGKAKSDLHLTIHPKIAIPQTSNI

SEQ ID NO: 4869 - protein, 514 aa, Unknown
  Description of Unknown: Integrase B4870 sequence
  SM00857,G3DSA:1.10.10.2600,IPR036162,PS51737, G3DSA:3.40.50.1390,IPR006119,IPR038109,PF07508, IPR011109,SSF53041,PTHR30461,Coil, PS51736,cd00338,PF00239
MPTEYALYLRKSRADLEAEAHGEGDTLARHEHILMELAKSRALPIGAIYREIVSGERIANRPVMQQLLSEVEDGRWKGVLVTETSRLARGDTIDQGIVAQAFKFSGTLIVTPAKTYDPTQEADEEWMEFGLFMSRQEYRMIRRRQLAGTRASKKEGHYVPGRPPYGYERYKLDGRGWSLRPVEPQAGVIRTIYDMYLSGKGFSEIANELNAMKIRTPLDKKWVPATTRAILQNPHYAGFIPSAMKINTKIVQKGKLITKRPVNKNCELYEGIHEAIIPRDVWNSVQQRMKDTVTPRVPRKYQQMNPLAGLVYCDQCGKLMSRHPYRREDKVRFGCENPSCSTVSSLFEDVESLVLQSLREFLHEIELSSPALLDTKSEEIALQNIEKQLTDINHRLQRTYELLEDGVYSKETFLQRQSAISQDQTALLNTKHEIERKLHNKQTDIEAQKNSAPLIRHVLDVYPTLEDPKEQNLLLKQVIRRIDYHKTVRVYGKAKSDLHLTIHPKIAIPQTSNI

SEQ ID NO: 4870 - protein, 514 aa, Unknown
  Description of Unknown: Integrase B4871 sequence
  cd03768,PTHR30461:SF3,SM00857,G3DSA:1.10.10.2600,IPR036162, PF13408,PS51737,G3DSA:3.40.50.1390,IPR025827,IPR006119, IPR038109,PF07508,IPR011109,SSF53041,PTHR30461, PS51736,Coil,PF00239
MLRIGIYPRKSVYRDNSDSVQVQITACKDYARLMFKDQELDFRIYDKDEGFSGKNTHRPSFTELMADVKADELDIIIVYKLDRISRSVKDFSEIYETLQQHNVSFLSVKESFDTSTPMGRTVMYILSAFAQLERENTAERVADNMASLGEAGKWTGGTLPPGMTSVRKKIGDKTHSYLIVDEQQIKTVKYIFSLMLSGTSITKLERTLRTEGIRTERDAFYSCSKLYNLFTNPVYCANDMDAYYYFLEKGYKLPDPALFDGRHGLIGYGRTTQSNGTTVRKDTYSIAIGIHDPILSGTDWIAIQKRLGQNKSTRYAKYEAGILKGTLRCKCGVKMNIRTYKKNGSLFSYYYCPKMAREGVSACDTGYTRVDDIDDRFLQELKKIKLSPDSIELEENVSYVDTGKMRADLKKTTDSIRNLMNALSGSADSAAAKYIIAELEALDKEKSVLEKKLRTAEQRNRRAAVSAETKEFVYHRICNLLDNMDSMSYTEINELIRSIVKSCVFDGDHLDVTF

SEQ ID NO: 4871 - protein, 514 aa, Unknown
  Description of Unknown: Integrase B4872 sequence
  SM00857,IPR036162,PF13408,IPR025827,G3DSA:3.40.50.1390, IPR006119,SSF53041,PTHR30461,Coil,PS51736, cd00338,PF00239
MVKRRAAIYARFSSHNQRSESIEIQVDAGTRYIAENGLELVKVYADYAKTGRNTDRREYKHMMNDARLGLFDYVVIYKVPRIMRNRDEMALTRIMLRKAGVEILYAGEEIASGSAGVLQLGMLEVLAEWESAIDSERIIDGIQKNAQRCMANGRTLYGWDIVEGRYVVNDREAAVLHRMKNLLFSGSTVADIVRAVANERSRNGKPFNHDRTKKLLLRPQNGGTYSYAGHVVEDGMPAIWPKIEQDMIISMLGTPRPRRRVDHAAEWPLTGKLYCAECGNTLAGTSGTSKGGTVYSYYKCKKCKRTFRRDILEDAIVDMTICALERPDVRKRIADGMATYEATMEDAPLESERLRKEIKRIDAAFERIWQAIEDGIAPPGGKERIEDLKARKDALETEYQIAKANENIEPGFSELMDWLDNVAEEMNPQEILTMFVRAVQIDKTEVRLYFAFDYYGDNFTPPKKDEHPVDGCSSNSLMVEPSITKANTVISLETCYLQINRNWFAVIGNLQNTR

SEQ ID NO: 4872 - protein, 514 aa, Unknown
  Description of Unknown: Integrase B4873 sequence
  PTHR30461:SF3,SM00857,G3DSA:1.10.10.2600,IPR036162, PF13408,PS51737,G3DSA:3.40.50.1390,IPR025827, IPR006119,IPR038109,PF07508,IPR011109, SSF53041,PTHR30461,Coil,PS51736,cd00338,PF00239
MRKKKVKGGNRLVAYYRYSGGSGQTEQSIEGQRRDCENYAKLHGLTIVHEYIDRHISGKTDDRAAFQQMMNDGDKGAFDMVICWKTDRFARNRYDSAVYKKRLRDNGIEILYAAESNVEGAEGIIIEGLMEALAEYYSAELAEKMRRGMRESALKGQAINRCRSLGLTTDENKKYVIDEKTAPTVRFIFEHYAAGESSTSIVEQLNAKGLRTSQGNPFNKCSIPRIIQNEMYRGVYTSKAYNVRIEGAIPAIIDDDLWKRAQAMMKTNRQLKAKYEPKAEYLLSGKLFCAKCGCTMKGVSGHSGGNGEVYRYYACSNPQCRKRNIPKDDLEGKVIRSICDHLLQPETMELLAETMVEVQKADMEKPNAERDVLEQELRDVRRRSKNIMDAIETGSANPQLISRLDDLTQQENTLTYQLSTMEAEKPLLFTKEQYLFLLQQFYAQPTEQDDAYKRRLINTFVTNIEVSDSELLIYFNISEETENKNKNAPQLNFDKSSSTEKRLVRVARIELTAS

SEQ ID NO: 4873 - protein, 514 aa, Unknown
  Description of Unknown: Integrase B4874 sequence
  PTHR30461:SF3,cd00338,SM00857,G3DSA:1.10.10.2600,IPR036162, PF13408,IPR025827,G3DSA:3.40.50.1390,PS51737,IPR006119, IPR038109,PF07508,IPR011109,SSF53041,PTHR30461, PS51736,Coil,PF00239
MAKRKFNKGGEVRLVAYYRYSGGSGQTEQSIEGQRRDCEAYARLHNMTIQKEYVDRHISGKTDDRAAFQQMIADSDKGAFDMVICWKTDRFARNRYDSAVYKKRLRDNGVEIVYAAESNISGAEGIIIEGVMEALAEYYSAELAEKMRRGMRESALKGQAISRCRALGLKTDEHKRFVIDEKTAPTVRFIFEHYAAGESAMSIVEQLNAKGLRTSQGNPFNKSSIPRIIQNEAYRGVYISKSYDVRIEGAIPAIIDDELWERAQTMLKLNRQLKAKNEPKADYILSGKLYCSCGSLMRGMSGHSATGEVYRYYTCPNKDCHLRNIPKDDLEGKVMQSIVDHLLQPESMEALAEAMVEVQKADVEKPNAERVAIEQSLSDVRRRSKNILDAIENGTANAQLCARLDDLTEQEQTLSFQLSSLEKEKPVVFTKEQYLFLLEQFLMEPSERTPEYGRRLVNTFVTSMVVSGRELVINFNVSDETVNKNKKTSQTNLQKESSSGMRLVRVARIELTAS

SEQ ID NO: 4874 - protein, 514 aa, Unknown
  Description of Unknown: Integrase B4875 sequence
  SM00857,G3DSA:1.10.10.2600,IPR036162,PS51737,G3DSA:3.40.50.1390, IPR006119,IPR038109,PF07508,SSF53041,IPR011109, PTHR30461,Coil,PS51736,cd00338,PF00239
MSTEYALYLRKSRADLEAEAHGEGDTLARHEHILMELAKSRALPIGAIYREIVSGERIANRPVMQQLLSEVEDGRWKGVLVTETSRLARGDTIDQGIVAQAFKFSGTLIVTPAKTYDPTQEADEEWMEFGLFMSRQEYRMIRRRQLAGTRASKKEGHYVPGRPPYGYERYKLDGRGWSLRPVEPQAGVIRTIYDMYLSGKGFSEIANELNAMKIRTPLDKKWVPATTRAILQNPHYAGFIPSAMKVNTKIVQKGKLITKRPVNKNCELYEGIHEAIIPRDVWYSVQQRMKDTVTPRVPRKYQQMNPLAGLVYCDQCGKLMSRHPYRREDKVRFGCENPSCSTVSSLFEDVESLVLQSLREFLHEIELSSPTLLDTKSEEIALQNIEKQLTDINHRLQRTYELLEDGVYSKETFLQRQSAISQDQTALLNTKHEIERKLHNKQTDIEAQKNSAPLIRHVLDVYPTLEDPKEQNLLLKQVIRRIDYHKTVRVYGKAKSDLHLTIHPKIAIPQTSNI

SEQ ID NO: 4875 - protein, 514 aa, Unknown
  Description of Unknown: Integrase B4876 sequence
  PTHR30461:SF3,cd00338,SM00857,G3DSA:1.10.10.2600,IPR036162, PF13408,PS51737,IPR025827,G3DSA:3.40.50.1390,IPR006119, IPR038109,PF07508,IPR011109,SSF53041, PTHR30461,PS51736,Coil,PF00239
MTKAVIYARYSSHNQREESIEGQIRECQDFATRNDLTIVGEYIDRAISGKTDNRADFQRMIKDSERGHFQVVLVYAIDRFARNRYDSAIYKAKLKKNGVKVFYAKQHIPDTPEGIILESVMEGYAEYYSQNLAIHIKRGMKENALQCKVTGGTTPLGYRISENKTYEIDPAGAKIIREIFEMYAGGASATQIVTYCNEHGYRTARGGSFNKNSLRTILLNDKYIGVYRYEDVEIEDGVPAIIDKELFEKVQTMFHHNHAARARTKANADYLLTTKLFCGHCGSNMVGESGTSQNGEMHYYYKCSNRKRSHSCNKHTERKEWIEEFVVRHTVNTVLTDNNIEMIATKAAELMEKEFAESSVLTTLEQTKKDIEKRIKNMLDLMEQGIVTASTRERLLELESQKSDLEQRITRETMKKPPLSKERILHWLYSFKGGDINDMEYRQRVIDTLVNSIYIYDNDGGNSRKIVFTFNISGQNTSVVNCSDIACFAPPYGANPNTFFFVKNVFGFAIEVTV

SEQ ID NO: 4876 - protein, 514 aa, Unknown
  Description of Unknown: Integrase B4877 sequence
  cd00338,SM00857,G3DSA:1.10.10.2600,IPR036162,PS51737, G3DSA:3.40.50.1390,IPR006119,IPR038109,PF07508,IPR011109, SSF53041,PTHR30461,PS51736,Coil,PF00239
MSTEYAIYLRKSRADLEAEAHGEGDTLARHEHILMELAKSRALPIGAIYREIVSGERIANRPVMQQLLAEVEDGRWKGVLVTETSRLARGDTIDQGIVAQAFKFSGTLIVTPAKTYDPTQEADEEWMEFGLFMSRQEYRMIRRRQLAGTRASKKEGHYVPGRPPYGYERYKLDGRGWSLRPVEPQAGVIRTIYDMYLSGKGFSEIANELNAMKIRTPLDKKWVPATTRAILQNPHYAGFIPSAMKVNTKIVQKGKLITKRPVNKNCELYEGIHEAIIPRDVWYSVQQRMKDTVTPRVPRKYQQMNPLAGLVYCDQCGKLMSRHPYRREDKVRFGCENPSCSTVSSLFEDVESLVLQSLREFLHKIELSSPALLDTKSEENALQNIEKQLTDINRRLQRTYELLEDGFYSKETFLQRQSAISQDQTALLNIKHEIERKLHNKQTDIEAQKNSAPLIRHVLDVYPTLEDPKEQNLLLKQVIRRIDYHKTVRVYGKAKSDLHLTIHPKIAIPQTSNI

SEQ ID NO: 4877 - protein, 514 aa, Unknown
  Description of Unknown: Integrase B4878 sequence
  PTHR30461:SF3,SM00857,G3DSA:1.10.10.2600,IPR036162,PF13408, IPR025827,PS51737,G3DSA:3.40.50.1390,IPR006119,IPR038109, PF07508,SSF53041,IPR011109,PF00239, PTHR30461,PS51736,Coil,cd00338
MAKRKFNKGGEVRLVAYYRYSGGSGQTEQSIEGQRRDCETYARLHNMTIQKEYVDRHISGKTDDRAAFQQMIADSDKGAFDMVICWKTDRFARNRYDSAVYKKRLRDNGVEIVYAAESNIAGAEGIIIEGVMEALAEYYSAELAEKMRRGMRESALKGQAISRCRALGLKTDEHKRFVIDEKTAPTVRFIFEHYAAGESAMSIVEQLNAKGLRTSQGNPFNKSSIPRIIQNEAYRGVYVSKSYDVRIEGAIPAIIDDELWERAQTMLKLNRQLKAKNEPKADYILSGKLYCSCGSLMRGMSGHSATGEVYRYYTCPNKNCHLRNIPKDNLEGKVMQSISDHLLQPEAMEALAEAMVEVQKADAEKPNAERVAIEQSLADVRRRSKNILDAIENGTANAQLCARLDDLSEQERTLNFQLSALEKEKSVVFTKEQYLFLLEQFLVEPSERTPEYGRRLVNTFVTSMVVSDRELVINFNVSEETVNKNKKTSQTNLQKESSSGMRLVRVARIELTAS

SEQ ID NO: 4878 - protein, 514 aa, Unknown
  Description of Unknown: Integrase B4879 sequence
  PTHR30461:SF3,cd00338,SM00857,G3DSA:1.10.10.2600,IPR036162, PF13408,PS51737,IPR025827,G3DSA:3.40.50.1390,IPR006119, IPR038109,PF07508,IPR011109,SSF53041,PTHR30461, PS51736,Coil,PF00239
MSKIAVIYARYSSDRQREESIEGQIRECKAYAKKNGITVIRVYCDRAMTGKTDKRPEFQAMIKDAKKQDFDYVLVYKLNRFARSRYDSARYKNVLKQHGIRVISAMENIAEDSSGILLESVIEGLAEYYSAELAENVLRGMTENALECKWPGGIVPLGFKLDKNKHLVIDDDKAFIVREIFQSIIDGKRTSTIIDELNARHLKTAAGKPFRKNSLEKILKNERYTGTFVWKDIRKENALPAIITNDMFNAVQKILKNRKKTRSRVCSDNYLISGRLFCGLCHEKMIGMSGRSVTGLPYYYYACSNRRNRIGKCHTKNIRADKLEELVVDTTINILSNDTAIEYIAKQAIAAQEENRAQSSIPAIKEEIKELSKKLKNCIQAVENGIISQTIAENIPMYEKRLVELNSELSDELEKDNDLKVDEDMIRFFFERLVQRTKKETKFKSLLLSTMVRCVVIYDDYIEIQYNYKKELPILTNPVRINSSILFAVVECSGLQSNFIFYPEGFSYIVRRVA

SEQ ID NO: 4879 - protein, 514 aa, Unknown
  Description of Unknown: Integrase B4880 sequence
  cd00338,SM00857,G3DSA:1.10.10.2600,IPR036162,PF13408, PS51737,G3DSA:3.40.50.1390,IPR025827,IPR006119,IPR038109, PF07508,IPR011109,SSF53041,PTHR30461,PS51736, Coil,PF00239
MSTEYAIYLRKSRADLEAEAHGEGDTLARHEHILMELAKSRALPIGAIYREIVSGERIANRPVMQQLLSEVEDGRWKGVLVTETSRLARGDTIDQGIVAQAFKFSGTLIVTPSKTYDPTQEADEEWMEFGLFMSRQEYRMIRRRMTAGMQAAKREGRYISNVPPYGYERYKLEGRGWSLRPIESQAKVVRMIFDLYLSGLGYCEIEKRLNALHIPAPKSDKWSARTIPGILRNAHYIGCIPAAFRPGKKVVKDGQVKVTRPRVKSCELYKGLHEPIIDRAVWDQVQARLGKNAAVRTPGNRQQSNPLAGLIVCDCCGKRMQRRPQTGTGSQTQIQCTTRGCATVAHNADELEQLVLDSLRTFLAQIEVGTPVAPDLSAEQHALSEIEKQLTDLEARQRRTFELVEDGTYTREIFLSRQAELSTERERLTADRTAIQHKIEQAQHEYDARTGLAPAVRHVLDTYNTDLPAADRNKLLKQVIDRIDYHKRTRTRWTKESDLSLTLHPVVFSASANR

SEQ ID NO: 4880 - protein, 514 aa, Unknown
  Description of Unknown: Integrase B4881 sequence
  PTHR30461:SF3,cd00338,SM00857,G3DSA:1.10.10.2600,IPR036162, PF13408,PS51737,G3DSA:3.40.50.1390,IPR025827,IPR006119, IPR038109,PF07508,IPR011109,SSF53041,PTHR30461, PS51736,Coil,PF00239
MAKRKFNKGGEVRLVAYYRYSGGSGQTEQSIEGQRRDCEAYARLHNMTIQKEYVDRHISGKTDDRAAFQQMIADSDKGAFDMVICWKTDRFARNRYDSAVYKKRLRDNGVEIVYAAESNISGAEGIIIEGVMEALAEYYSAELAEKMRRGMRESALKGQAISRCRALGLKTDEHKRFVIDEKTAPTVRFIFEHYAAGESAMSIVEQLNAKGLRTSQGNPFNKSSIPRIIQNEAYRGVYISKSYDVRIEGAIPAIIDDELWERAQTMLKLNRQLKAKNEPKADYILSGKLYCSCGSLMRGMSGHSATGEVYRYYTCPNKDCHLRNIPKDDLEGKVMQFIVDHLLQPESMEALAEAMVEVQKADAEKPNAERVAIEQSLADVRRRSKNILDAIENGTANAQLCARLNDLTEQEQTLSFQLSSLEKEKPVAFTKEQYLFLLEQFLVEPSERTPEYGRRLVNTFVTSMVVSDRELVINFNVSDETVNKNKKASQTNLQKESSSGMRLVRVARIELTAS

SEQ ID NO: 4881 - protein, 514 aa, Unknown
  Description of Unknown: Integrase B4882 sequence
  cd03768,PTHR30461:SF3,SM00857,G3DSA:1.10.10.2600,IPR036162, PF13408,PS51737,G3DSA:3.40.50.1390,IPR025827,IPR006119, IPR038109,PF07508,IPR011109,SSF53041,PTHR30461, PS51736,Coil,PF00239
MLRIGIYPRKSVYRDNSDSVQVQITACKDYARLMFKDQELDFRIYDKDEGFSGKNTHRPSFTELMADVKADELDIIIVYKLDRISRSVKDFSEIYETLQQHNVSFLSVKESFDTSTPMGRTVMYILSAFAQLERENTAERVADNMASLGEAGKWTGGTLPPGMTSVRKKIGDKTHSYLIVDEQRIKTVKYIFSLMLSGTSITKLEHTLRQDGIRTERDAFYSCSKLYNLFTNPVYCANDMDAYYYFLEKGYKLPDPALFDGRHGLIGYGRTTQSNGTTVRKDTYSIAIGIHDPLLSGADWIAIQKRLGQNKSTRYAKYEAGILKGTLRCKCGVKMNIRTYKKNGSLFSYYYCPKMAREGVSACDTGYTRVDDIDDRFLQELKKIKLSPDSIELEENVSYVDTGKMRADLKKTTDSIRNLMNALSGSADSAAAKYIIAELESLDKEKSVLEKKLRTAEQRNRRAAVSAETKEFVYHRICNLLDNMDSMSYTEINELIRSIVKSCVFDGDHLDVTF

SEQ ID NO: 4882 - protein, 514 aa, Unknown
  Description of Unknown: Integrase B4883 sequence
  cd03768,PTHR30461:SF3,SM00857,G3DSA:1.10.10.2600,IPR036162, PF13408,IPR025827,PS51737,G3DSA:3.40.50.1390,IPR006119, IPR038109,PF07508,IPR011109,SSF53041,PTHR30461, PS51736,Coil,PF00239
MLRIGIYPRKSVYRDNSDSVQVQITACKDYARLMFKDQELDFRIYDKDEGFSGKNTHRPSFTELMADVKADELDIIIVYKLDRISRNVKDFSEIYETLQQHNVSFLSVKESFDTSTPMGRTVMYILSAFAQLERENTAERVADNMASLGEAGKWTGGTLPPGMTSVRKKIGDKTHSYLIVDEQRIKTVKYIFSLMLSGTSITKLEHTLRQEGIRTERDAFYSCSKLYNLFTNPVYCANDMDAYYYFLEKGYKLPDPALFDGRHGLIGYGRTTQSNGTTVRKDTYSIAIGIHDPILSGADWIAIQKRLGQNKSTRYAKYEAGILKGTLRCKCGVKMNIRTYKKNGSLFSYYYCPKMAREGVSACDTGYTRVDDIDDRFLQELKKIKLSPDSIELEENVSYVDTGKMRADLKKTTDSIRNLMNALSGSADSAAAKYIIAELEALDKEKAVLEKKLRTAEQRNRRAAVSAETKEFVYHQICNLLDNMDSMSYTEINELIRSIVKSCVFDGDHLDVTF

SEQ ID NO: 4883 - protein, 514 aa, Unknown
  Description of Unknown: Integrase B4884 sequence
  cd03768,PTHR30461:SF3,SM00857,G3DSA:1.10.10.2600,IPR036162, PF13408,IPR025827,PS51737,G3DSA:3.40.50.1390,IPR006119, IPR038109,PF07508,IPR011109,SSF53041,PTHR30461, PS51736,Coil,PF00239
MLRIGIYPRKSVYRDNSDSVQVQITACKDYARLMFKDQELDFRIYDKDEGFSGKNTHRPSFTELMADVKADELDIIIVYKLDRISRSVKDFSEIYETLQQHNVSFLSVKESFDTSTPMGRTVMYILSAFAQLERENTAERVADNMASLGEAGKWTGGTLPPGMTSVRKKIGDKTHSYLIVDEQRIKTVKYIFSLMLSGTSITKLEHTLRQDGIRTERDAFYSCSKLYNLFTNPVYCANDMDAYYYFLEKGYKLPDPALFDGRHGLIGYGRTTQSNGTTVRKDTYSIAIGIHDPILSGADWIAIQNRLGQNKSTRYAKYEAGILKGTLRCKCGVKMNIRTYKKNGSLFSYYYCPKMAREGISVCDTGYTRVDDVDDRFLQELKKIKLSPDSIELEENVSYVDTGKMRADLKKANDSIRNLMNALSGSADSSAAKYIITELESLDKEKAVLEKKLRTAEQRNRRAAVSAETKEYVYHRICNLLDNMDAMSYTEINELIRSIVKSCVFDGDHLDVMF

SEQ ID NO: 4884 - protein, 514 aa, Unknown
  Description of Unknown: Integrase B4885 sequence
  cd03768,PTHR30461:SF3,SM00857,G3DSA:1.10.10.2600,IPR036162, PF13408,PS51737,G3DSA:3.40.50.1390,IPR025827,IPR006119, IPR038109,PF07508,SSF53041,IPR011109,PTHR30461, PS51736,Coil,PF00239
MLRIGIYPRKSVYRDNSDSVQVQITACKDYARLMFKDQELDFRIYDKDEGFSGKNTHRPSFTELMADVKADELDIIIVYKLDRISRSVKDFSEIYETLQQHNVSFLSVKESFDTSTPMGRTVMYILSAFAQLERENTAERVADNMASLGEAGKWTGGTLPPGMTSVRKKIGDKTHSYLIVDEQRIKTVKYIFSLMLSGTSITKLEHTLRQDGIRTERDAFYSCSKLYNLFTNPVYCANDMDAYYYFLEKGYKLPDPALFDGRHGLIGYGRTTQSNGTTVRKDTYSIAIGIHDPILSGADWIAIQKRLGQNKSTRYAKYEAGILKGTLRCKCGVKMNIRTYKKNGSLFSYYYCPKMAREGVSACDTGYTRVDDIDDRFLQELKKIKLSPDSIELEENVSYVDTGKMRTDLKKTTDSIRNLMNALSGSADSAAAKYIIAELEALDKEKAVLEKKLRTAEQRNRRAAVSAETKEFVYHRICNLLDNMDSMSYTEINELIRSIVKSCVFDGDHLDVTF

SEQ ID NO: 4885 - protein, 514 aa, Unknown
  Description of Unknown: Integrase B4886 sequence
  SM00857,IPR036162,PF13408,IPR025827,G3DSA:3.40.50.1390, IPR006119,SSF53041,PTHR30461,Coil,PS51736, cd00338,PF00239
MVKRRAAIYARFSSHNQRSESIEIQVDAGTRYIAENGLELVKIYADYAKTGRNTDRREYKQMMNDARLGLFDYVVIYKVPRIMRNRDEMALTRIMLRKAGVEILYAGEEIASGSAGVLQLGMLEVLAEWESAIDSERIIDGIQKNAQRCMANGRTLYGWDIVEGRYVINDREAAVLHKMKNMVFAGSIIAEVVRAVANVRTRQGKPINHDRAKKLLLRPQNGGTYSYAGHVVEGGMPALWPKAEQDMLISILGNPRPRRRVDHAAEWPLTGKLYCAECGNTLAGTSGTGKSGTVYAYYKCKKCKRTFRRDILEDAIVDMTICALERPDVRKRIADGMATYEATMEDAPLESERLRKEIKRIDAAFERIWQAIEDGIAPPGGKERIEDLKARKDALETEYQIAKANENIEPGFSELMDWLDNVAEEMNPQEILTMFVRAVQIDKAEVRLYFAFDYYGDNFTPPKKDEHQLKRCSSNSPMVEPSITKANTVISLETCYLQINRNWFAVIGNLQNTR

SEQ ID NO: 4886 - protein, 514 aa, Unknown
  Description of Unknown: Integrase B4887 sequence
  cd03768,PTHR30461:SF3,SM00857,G3DSA:1.10.10.2600, IPR036162,PF13408,PS51737,IPR025827, G3DSA:3.40.50.1390,IPR006119,IPR038109,PF07508, SSF53041,IPR011109,PTHR30461,PS51736,Coil,PF00239
MLRIGIYPRKSVYRDNSDSVQVQITACKDYARLMFKDQELDFRIYDKDEGFSGKNTHRPSFTELMADVKADELDIIIVYKLDRISRSVKDFSEIYETLQQHNVSFLSVKESFDTSTPMGRTVMYILSAFAQLERENTAERVADNMASLGEAGKWTGGTLPPGMASVRKKIGDKTHSYLIVDEQRIKTVKYIFSLMLSGTSITKLEHTLRQEGIRTERNAFYSCSKLYNLFTNPVYCANDMDAYYYFLEKGYKLPDPALFDGRHGLIGYGRTTQSNGTTVRKDTYSIAIGIHDPILSGADWIAIQKRLGQNKSTRYAKYEAGILKGTLRCKCGVKMNIRTYKKNGSLFSYYYCPKMAREGVSACDTGYTRVDDIDDRFLQELKKIKLSPDSIELEENVSYVDTGKMRADLKKTTDSIRNLMNALSGSADSTAAKYIIAELEALDKEKSVLEKKLRTAEQRNRRAAVSAETKEFVYHRICNLLDNMDSMSYTEINELIRSIVKSCVFDGDHLDVTF

SEQ ID NO: 4887 - protein, 514 aa, Unknown
  Description of Unknown: Integrase B4888 sequence
  SM00857,IPR036162,G3DSA:3.40.50.1390,IPR006119,PF07508, SSF53041,IPR011109,PTHR30461,Coil,mobidb-lite, cd00338,PF00239
MRNEYNPIIIKYVAEYLRKSRGETTEDLIKHKTILEELCKSRGWVYVVYEEVETGESLFARPVMQQLLRDVEDNIYDAVVCVDLDRLGRGDLVDWGQIKRVFQKTNTYMVTPSSLYNLNDDNEEFAVDLQTLFARREYKKITHRLSMGKKVGAKLGAWTNGTPPMPYEYQEWIDPATNKRYYNEKGLVVNLQKLSIYRFMVDSFIKDKKSTNEIAWELNRRNIPSPRGGRWCNMTVRRLLVDETHLGKIISNKTKGDGHKNKSPNKPPFQKIPKEQWTVVENRHEAIKTQDEHEKILIGIQRNLKSPYRRSDHYYPLKGLIKCGLCGYGLPLEYKRGKDLIVKKCWHKDYLGNKCPNSSGKAQYIIDAIDEQLKEYEEQIRKEIESCEDQSTDLIQLQIKTIMDKLNKKDIALKRARIAYDEGVDTLDEYRSAKERILKEVDELENQLSIENLKLQKAQSITNHEKLHYIEEFRRSRWEDELDDKELNDLYKTIISSIIWTKQGDNIDIKVNFL

SEQ ID NO: 4888 - protein, 514 aa, Unknown
  Description of Unknown: Integrase B4889 sequence
  SM00857,G3DSA:1.10.10.2600,IPR036162,PS51737, G3DSA:3.40.50.1390,IPR006119,IPR038109,PF07508, SSF53041,IPR011109,PTHR30461,Coil, PS51736,cd00338,PF00239
MSTEYAIYLRKSRADLEAEAHGEGDTLARHEHILMELAKSRALPIGAIYREIVSGERIANRPVMQQLLSEVEDGRWKGVLVTETSRLARGDTIDQGIVAQAFKFSGTLIVTPAKTYDPTQEADEEWMEFGLFMSRQEYRMIRRRQLAGTRASKKEGHYVPGRPPYGYERYKLDGRGWSLRPVEPQAGVIRTIYDMYLSGKGFSEIANELNAMKIRTPLDKKWVPATTRAILQNPHYAGFIPSAMKVNTKIVQKGKLITKRPVNKNCELYEGIHEAIIPRDVWYSVQQRMKDTVTPRVPRKYQQMNPLAGLVYCDQCGKLMSRHPYRREDKVRFGCENPSCSTVSSLFEDVENLVLKSLREFLHEIELSSPALLDTKSEEIALQNIEKQLTDINHRLQRTYELLEDGVYSKETFLQRQSAISQDQTALLNTKHEIERKLHNKQTDIEAQKNSAPLIRHVLDVYPTLEDPKEQNLLLKQVIRRIDYHKTVRVYGKAKSDLHLTIHPKIAIPQTSNI

SEQ ID NO: 4889 - protein, 514 aa, Unknown
  Description of Unknown: Integrase B4890 sequence
  PTHR30461:SF3,SM00857,G3DSA:1.10.10.2600,IPR036162,PF13408, PS51737,G3DSA:3.40.50.1390,IPR025827,IPR006119,IPR038109, PF07508,IPR011109,SSF53041,PF00239,PTHR30461, PS51736,Coil,cd00338
MNKRTGIYGRYSDTKQDDGFSIEYQLTECQAYLDKNDMPLTKTYIDQAITGTKVAGREAFHELIRDVKNGMIDVVVVYKFSRIFRNAYESHKYRQLFKKHGVKLISVTQMVDDETSSGKLMIGVMANIDEYQSAVISDHVKSAMREMVSEGFFAGGTVPYGYKLEVVQHGKKTRKKYVPDEFESKIVNKIFELYADNYSLRYLQTYLKDNGAFTRRGKYFSIQTIARMLRNDFYIGVLRYSAQGHEPIIVHDIIPPIIDKELWDRVQYRHSTQKGVRPRKRKELYALTGKIRCANCGSHYFGIRSGSMQNGKKYDYKYYVCSQSKDYHTCSCKRIRKDYLEEITMKEIKRHILNEKSIYSIANEMLKILGENPTEQKDKLKQLKSRSSALKSEMKELIDLRAKRIVSDSFLAEHISEKENELQEVEQQIYNIERQTKLTLTHSMIVDYLNKMLSISDDTDDEVLKTIFDKFVESIIISDESIDITLIVSPNGDMEYNNSFRQPNVFFYAKINRQ

SEQ ID NO: 4890 - protein, 514 aa, Unknown
  Description of Unknown: Integrase B4891 sequence
  PTHR30461:SF3,SM00857,PS51736,IPR036162,G3DSA:3.40.50.1390, IPR006119,SSF53041,PF00239,PTHR30461,mobidb-lite, Coil,cd00338
MPKGTRAAIYARFSSHNQRSESIDIQVEKSREYCAENGLDVVRVYSDYAQTGRDVQRVEFQRMMNDAKLGLFDYVVIYKVTRIMRNRDEMALARIKLRKAGVEILYAGESLGEGSTRVLNLGMLEVLAEWESAIDSERIRDGINKNAQRGMANGRTHYGWDIVNGYYEVNEREAAVMHRMKNMLFAGSTVAEIKRAVAGERGKRGKPLTHGVITKLLRREQNCGVYDYAGVRIEDGMPALWSREDQDMINSILGSNGRKHNKTRDTNDYPLSGKMWCPECGQYYVGTCGTSKTGRVYHYYKCKKCRRTFRRDAVEEAVLDTVLETIKKPDVRQRIVDAMALYDEMNEEKEEPESKRIEREIKRIDAAFERIWQAIEDGIAPPGGKERVDMLREQKAALEADLRQAQASESAHLSGEDIAAWLDHIAQEPDAAEIIDTFVRLIEVDGEELKLYFAFDYWGDDFQPKQKKTNPEKGSSNNPMVEPQKIFANPTIAANGREIKVSNNWFCIITLIRT

SEQ ID NO: 4891 - protein, 514 aa, Unknown
  Description of Unknown: Integrase B4892 sequence
  cd03768,PTHR30461:SF3,SM00857,G3DSA:1.10.10.2600, IPR036162,PF13408,IPR025827,G3DSA:3.40.50.1390, PS51737,IPR006119,IPR038109,PF07508, SSF53041,IPR011109,PTHR30461,PS51736,Coil,PF00239
MLRIGIYPRKSVYRDNSDSVQVQITACKDYARLMFKDQELDFRIYDKDEGFSGKNTHRPSFTELMADVKADELDIIIVYKLDRISRSVKDFSEIYETLQQHNVSFLSVKESFDTSTPMGRTVMYILSAFAQLERENTAERVADNMASLGEAGKWTGGTLPPGMTSVRKKIGDKTHSYLIVDEQRIKTVKYIFSLMLSGTSITKLEHTLRQDGIRTERDAFYSCSKLYNLFTNPVYCANDMDAYYYFLEKGYKLPDPALFDGRHGLIGYGRTTQSNGTTVRKDTYSIAIGIHDPILSGADWIAIQKRLGQNKSTRYAKYEAGILKGTLRCKCGVKMNIRTYKKNGSLFSYYYCPKMAREGVSACDTGYTRVDDIDDRFLQELKKIKLSPDSIELEENVSYVDTGKMRADLKKANDSIRNLMNALSGSADSSAAKYIITELESLDKEKAVLEKKLRTAEQRNRRAAVSAETKEYVYHRICNLLDNMDAMSYTEINELIRSIVKSCVFDGDHLDVMF

SEQ ID NO: 4892 - protein, 514 aa, Unknown
  Description of Unknown: Integrase B4893 sequence
  PTHR30461:SF3,cd00338,SM00857,G3DSA:1.10.10.2600,IPR036162, PF13408,IPR025827,G3DSA:3.40.50.1390,PS51737,IPR006119, IPR038109,PF07508,IPR011109,SSF53041,PTHR30461, PS51736,Coil,PF00239
MAKRKFNKGGEVRLVAYYRYSGGSGQTEQSIEGQRRDCEAYARLHNMTIQKEYVDRHISGKTDDRAAFQQMIADSDKGAFDMVICWKTDRFARNRYDSAVYKKRLRDNGVEIVYAAESNISGAEGIIIEGVMEALAEYYSAELAEKMRRGMRESALKGQAISRCRALGLKTDEHKRFVIDEKTAPTVRFIFEHYAAGESAMSIVEQLNAKGLRTSQGNPFNKSSIPRIIQNEAYRGVYISKSYDVRIEGAIPAIIDDELWERAQTMLKLNRQLKAKNEPKADYILSGKLYCSCGSLMRGMSGHSATGEVYRYYTCPNKDCHLRNIPKDDLEGKVMQSIVDHLLQPESMEALAEAMVEVQKADVEKPNAERVAIEQSLADVRRRSKNILDAIENGTANAQLCARLNDLTEQEQTLSFQLSSLEKEKPVVFTKEQYLFLLEQFLMEPSERTPEYGRRLVNTFVTSMVVSGRELVINFNVSDETVNKNKKTSQTNLQKESSSGMRLVRVARIELTAS

SEQ ID NO: 4893 - protein, 514 aa, Unknown
  Description of Unknown: Integrase B4894 sequence
  cd03768,PTHR30461:SF3,SM00857,G3DSA:1.10.10.2600,IPR036162, PF13408,IPR025827,G3DSA:3.40.50.1390,PS51737,IPR006119, IPR038109,PF07508,IPR011109,SSF53041,PTHR30461, PS51736,Coil,PF00239
MLRIGIYPRKSVYRDNSDSVQVQITACKDYARLMFKDQELDFRIYDKDEGFSGKNTHRPSFTELMADVKADELDIIIVYKLDRISRSVKDFSEIYETLQQHNVSFLSVKESFDTSTPMGRTVMYILSAFAQLERENTAERVADNMASLGEAGKWTGGTLPPGMTSVRKKIGDKTHSYLIVDEQRIKTVKYIFSLMLSGTSITKLEHTLRQNGIRTERDAFYSCSKLYNLFTNPVYCANDMDAYYYFLEKGYKLPDPALFDGRHGLIGYGRTTQSNGTTVRKDTYSIAIGIHDPILSGADWIAIQKRLGQNKSTRYAKYEAGILKGTLRCKCGVKMNIRTYKKNGSLFSYYYCPKMAREGVSACDTGYTRVDDIDDRFLQELKKIKLSPDSIELEENVSYVDTGKMRADLKKTTDSIRNLMNALSGSADSAAAKYIIAELESLDKEKSVLEKRLRTAEQRNRRAAVSAETKEFVYHRICNLLDNMDSMSYTEINELIRSIVKSCVFDGDHLDVTF

SEQ ID NO: 4894 - protein, 514 aa, Unknown
  Description of Unknown: Integrase B4895 sequence
  PTHR30461:SF3,SM00857,G3DSA:1.10.10.2600,IPR036162,PF13408, IPR025827,G3DSA:3.40.50.1390,PS51737,IPR006119,IPR038109, PF07508,SSF53041,IPR011109,PTHR30461,Coil, PS51736,cd00338,PF00239
MRRKKNSDVIRLVAYYRYSGGSGQTEQSIEGQRRDCEAYAKLHGMTILHEYIDRHISGKTDDRAAFQQMMKDSDKGAFDMVICWKTDRFARNRYDSAVYKKRLRDNGVEIIYAAESNVQGAEGIIIEGLMEALAEYYSAELAEKMRRGMRESALKGQAISRCRALGLTTDENKKFVIDERTAPTVRFIFEHYAAGESSTSIIEQLNAKGLRTSQGGPFNKSSIPRIIQNEMYRGVYVSKAYNVRIEDAIPAIIDDDLWGRAQAMMKTNRQLKAKYEPKADYLLSGKLFCAECGGLMKGVSGHSGGNGEVYRYYACSNPECHKRNIPKADLEGKVIRSIRDHLLQPDTMEALADALVEVQEADATKPDAEREALEQELRDVRRRGKNIMDAIENGSVAPQLVARLNDLTQQENTLTYQLSTIAKETPLAFTREQYLLMLKMFCAHPDEQNEAYKHRLINTFVTSMKISDSELIIYFNISEETENKNKKAPQQNFTKESSTEMRLVRVARIELTAS

SEQ ID NO: 4895 - protein, 514 aa, Unknown
  Description of Unknown: Integrase B4896 sequence
  SM00857,G3DSA:1.10.10.2600,IPR036162,PS51737,G3DSA:3.40.50.1390, IPR006119,IPR038109,PF07508,SSF53041,IPR011109, PTHR30461,Coil,PS51736,cd00338,PF00239
MRTEYAIYLRKSRADLEAEAHGEGDTLARHEHILMELAKSRALPIGAIYREIVSGERIANRPVMQQLLSEVEDGRWKGVLVTETSRLARGDTIDQGIVAQAFKFSGTLIVTPSKTYDPTQEADEEWMEFGLFMSRQEYRMIRRRQLAGTRASKKEGHYVPGRPPYGYERYKLDGRGWSLRPVEPQAGVIRTIYDMYLSGKGFSEIANELNAMKIRTPLDKKWVPATTRAILQNPHYAGFIPSAMKVNTKIVQKGKLITKRPVNKNCELYEGIHEAIIPRDVWYSVQQRMKDTVTPRVPRKYQQMNPLAGLVYCDQCGKLMSRHPYRREDKVRFGCENPSCSTVSSLFEDVESLVLQSLREFLHEIELSSPDLLDTKSEEIALQNIEKQLTDINRRLQRTYELLEDGVYSKETFLQRQSAISQDQTALLNTKHEIERKLQNKQTDIEAQKNSAPLIRHVLDVYPTLEDPKEQNLLLKQVIRRIDYHKTVRVYGKAKSDLHLTIHPKIAIPQTSNI

SEQ ID NO: 4896 - protein, 514 aa, Unknown
  Description of Unknown: Integrase B4897 sequence
  cd03768,PTHR30461:SF3,SM00857,G3DSA:1.10.10.2600, IPR036162,PF13408,PS51737,IPR025827, G3DSA:3.40.50.1390,IPR006119,IPR038109,PF07508, IPR011109,SSF53041,PTHR30461,PS51736,Coil,PF00239
MLRIGIYPRKSVYRDNSDSVQVQITACKDYARLMFKDQELDFRIYDKDEGFSGKNTHRPSFTELMADVKADELDIIIVYKLDRISRSVKDFSEIYETLQQHNVSFLSVKESFDTSTPMGRTVMYILSAFAQLERENTAERVADNMASLGEAGKWTGGTLPPGMTSVRKKIGDKTHSYLIVDEQRIKTVKYIFSLMLSGTSITKLERTLRTEGIRTERDAFYSCSKLYNLFTNPVYCANDMDAYYYFLEKGYKLPDPALFDGRHGLIGYGRTTQSNGTTVRKDTYSIAIGIHDPVLSGADWIAIQKRLGQNKSTRYAKYEAGILKGILRCKCGVKMNIRTYKKNGSLFSYYYCPKMAREGVSACDTGYTRVDDIDDRFLQELKKIKLSPDSIELEENVSYVDTGKMRADLKKTTDSIRNLMNALSGSADSAAAKYIIAELEALDKEKSVLEKKLRTAEQRNRRAAVSAETKEFVYHRICNLLDNMDSMSYTEINELIRSIVKSCVFDGDHLDVTF

SEQ ID NO: 4897 - protein, 514 aa, Unknown
  Description of Unknown: Integrase B4898 sequence
  cd03768,PTHR30461:SF3,SM00857,G3DSA:1.10.10.2600,IPR036162, PF13408,PS51737,G3DSA:3.40.50.1390,IPR025827,IPR006119, IPR038109,PF07508,IPR011109,SSF53041,PTHR30461, PS51736,Coil,PF00239
MLRIGIYPRKSVYRDNSDSVQVQITACKDYARLMFKDQELDFRIYDKDEGFSGKNTHRPSFTELMADVKADELDIIIVYKLDRISRSVKDFSEIYETLQQHNVSFLSVKESFDTSTPMGRTVMYILSAFAQLERENTAERVADNMASLGEAGKWTGGTLPPGMTSVRKKIGDKTHSYLIVDEQRIKTVKYIFTLMLSGTSITKLEHTLRQEGIRTERDAFYSCSKLYNLFTNPVYCANDMDAYYYFLEKGYKLPDPALFDGRHGLIGYGRTTQSNGTTVRKDTYSIAIGIHDPILSGADWIAIQKRLGQNKSTRYAKYEAGILKGTLRCKCGVKMNIRTYKKNGSLFSYYYCPKMAREGVSACDTGYTRVDDIDDRFLQELKKIKLSPDSIELDGNVSYVDTGKMRADLKKTTDSIRNLMNALSGSADSAAAKYIIAELESLDKEKSVLEKKLRTAEQRNRRAAVSAETKEFVYHRICNLLDNMDSMSYTEINELIRSIVKSCVFDGDHLDVTF

SEQ ID NO: 4898 - protein, 514 aa, Unknown
  Description of Unknown: Integrase B4899 sequence
  PTHR30461:SF3,SM00857,G3DSA:1.10.10.2600,IPR036162,PF13408, IPR025827,G3DSA:3.40.50.1390,PS51737,IPR006119,IPR038109, PF07508,SSF53041,IPR011109,PF00239,PTHR30461, PS51736,Coil,cd00338
MYNQNELIMYLRKSRADRPDETVEEVLEKHEGILQDYASENFGFKIPENQILREVVSGETIADRPEIQRLLRQIESKKIKAVMVVDPQRLSRGDLEDCGRIVNAFRYSHTTIITQYREYNLEDKYDRKFFEMELGRGNDYLEYTKEILQRGRNASAKKGNFLGSVPPYGYKKVFVDKRPTLEIVPEEANVVRIIFDLYVNNNYGFMALANALDDLGIKPRKSKYWSAAALKNLIDNPVYIGKIRWNFRKTIYVIKDGEKQRTRPNAKNINDYILVDGNHEAILSEEMFNAAQAKKGKNIRVKQKVAVRNPFSGLLFCDCGRAMSYRTYRNKGVTIAMPRLVCEDQHHCRNKSVYYDEFEKYIVDVLYAAIADFKVKLENNNNTNSDYDLLIKKLEDKLERLHKKDDEQHDLLEEGFYTKEVFIRRNIKLQEDIEHTQLAIKNTKENMPKRIDYHERIATFQEAVDALQRNDVDASLKNMLLKKCIEKITYSRHLLANQSKFENPPFNVDIKLRL

SEQ ID NO: 4899 - protein, 514 aa, Unknown
  Description of Unknown: Integrase B4900 sequence
  cd03768,PTHR30461:SF3,SM00857,G3DSA:1.10.10.2600,IPR036162, PF13408,IPR025827,PS51737,G3DSA:3.40.50.1390,IPR006119, IPR038109,PF07508,IPR011109,SSF53041,PTHR30461, PS51736,Coil,PF00239
MLRIGIYPRKSVYRDNSDSVQVQITACKDYARLMFKDQELDFRIYDKDEGFSGKNTHRPSFTELMADVKADELDIIIVYKLDRISRSVKDFSEIYETLQQHNVSFLSVKESFDTSTPMGRTVMYILSAFAQLERENTAERVADNMASLGEAGKWTGGTLPPGMTSVRKKIGDKTHSYLIVDEQRIKTVKYIFSLMLSGTSITKLEHTLRQEGIRTERDAFYSCSKLYNLFTNPVYCANDMDAYYYFLEKGYKLPDPALFDGRHGLIGYGRTTQSNGTTVRKDTYSIAIGIHDPILSGADWIAIQKRLGQNKSTRYAKYEAGILKGTLRCKCGVKMNIRTYKKNGSLFSYYYCPKMAREGVSACDTGYTRVDDIDDRFLQELKKIKLSPDSIELEENVSYVDTGKMRADLKKLNDSIRNLMNALSGSADSAAAKYIIAELESLDKEKAVLEKKLRTAEQRNRRAAVSAETKEFVYHRICNLLDNMDSMSYTEINELIRSIVKSCVFDGDHLDVTF

SEQ ID NO: 4900 - protein, 514 aa, Unknown
  Description of Unknown: Integrase B4901 sequence
  SM00857,G3DSA:1.10.10.2600,IPR036162,PS51737,G3DSA:3.40.50.1390, IPR006119,IPR038109,PF07508,IPR011109,SSF53041, PF00239,PTHR30461,PS51736,Coil,cd00338
MSTEYAIYLRKSRADLEAEAHGEGDTLARHEHILMELAKSRALPIGAIYREIVSGERIANRPVMQQLLSEVEDGRWKGVLVTETSRLARGDTIDQGIVAQAFKFSGTLIVTPSKTYDPTQEADEEWMEFGLFMSRQEYRMIRRRQLAGTRASKKEGHYVPGRPPYGYERYKLDGRGWSLRPVEPQAGVIRTIYDMYLSGKGFSEIANELNAMKIRTPLDKKWVPATTRAILQNPHYAGFIPSAMKVNTKIVQKGKLITKRPVNKNCELYEGIHEAIIPRDVWNSVQQRMKDTVTPRVPRKYQQMNPLAGLVYCDQCGKLMSRHPYRREDKVRFGCENPSCSTVSSLFEDVESLVLQSLREFLHKIELSSPARLDTKSEENALQNIEKQLTDINRRLQRTYELLEDGFYSKETFLQRQSAISQDQTALLNTKHEIERKLHNKQKDIEAQKNSAPLIRHVLDVYPTLEDPKEQNLLLKQVIRRIDYHKTVRVYGKAKSDLHLTIHPKIAIPQTSNI

SEQ ID NO: 4901 - protein, 514 aa, Unknown
  Description of Unknown: Integrase B4902 sequence
  cd03768,PTHR30461:SF3,SM00857,G3DSA:1.10.10.2600, IPR036162,PF13408,PS51737,G3DSA:3.40.50.1390, IPR025827,IPR006119,IPR038109,PF07508, SSF53041,IPR011109,PTHR30461,PS51736,Coil,PF00239
MLRIGIYPRKSVYRDNSDSVQVQITACKDYARLMFKDQELDFRIYDKDEGFSGKNTHRPSFTELMADVKADELDIIIVYKLDRISRSVKDFSEIYETLQQHNVSFLSVKESFDTSTPMGRTVMYILSAFAQLERENTAERVADNMASLGEAGKWTGGTLPPGMTSVRKKIGDKTHSYLIVDEQRIKTVKYIFSLMLSGTSITKLERTLRTEGIRTERDAFYSCSKLYNLFTNPVYCANDMDAYYYFLEKGYKLPDPALFDGRHGLIGYGRTTQSNGTTVRKDTYSIAIGIHDPILSGADWIAIQKRLGQNKSTRYAKYEAGILKGTLRCKCGVKMNIRTYKKNGSLFSYYYCPKMAREGVSACDTGYTRVDDIDDRFLQELKKIKLSPDSIELEENVSYVDTGKMRADLKKTTDSIRNLMNALSGSADSAAAKYIIAELEALDKEKSVLEKKLRTAEQRNRRAAVSAETKEFVYHRICNLLDNMDSMSYTEINELIRSIVKSCVFDGDHLDVTF

SEQ ID NO: 4902 - protein, 514 aa, Unknown
  Description of Unknown: Integrase B4903 sequence
  cd00338,SM00857,G3DSA:1.10.10.2600,IPR036162,PF13408, PS51737,G3DSA:3.40.50.1390,IPR025827,IPR006119,IPR038109, PF07508,IPR011109,SSF53041,PTHR30461,PS51736, Coil,PF00239
MSMNAVIYARYSSHNQTEQSIEGQLRDCYDYAKRNDLTVIGEYIDRAISGKTDDRPDFQRMIEDAPKRQFERVLVWKFDRFARNMFDSVTYKHELKKHGVKVISAMENIGEGDESVLLEAMLEASAEYYSLDLKKKIARGMRESALKGKFVGGAVPWWCSVNAEHKLIVIDERAAIVKEAFARYDSGEGSKSIVDDFAKRGLRSNRGMPVTLSWLLSILKNRKTIGEYTYNGIEIPGGLPAVVDKPLFDRVQERIARKRRTGGGEATSKTEYLLQGKLFCGLCGSPITAECGQNRKGVVYNYYACSLKKKKHQCKKANERKDFLEWYVVEQTLDYVLTPDRTDYIAEAIVAEYERQFDKSGIKALEQKIALTEGEIQKTMDLCIQATTDAMRKRFMKRCEELDAKKADMEIDLSKLRVAASITYTKEEVRAWLRQFCAGDSFNPAFRRRIIDVFINTVYLYDDKLIIYYNLRDSRQVSYIEAIGASSEIENLRPVPDNKKTAVECSTADKNGGA

SEQ ID NO: 4903 - protein, 514 aa, Unknown
  Description of Unknown: Integrase B4904 sequence
  PTHR30461:SF3,SM00857,G3DSA:1.10.10.2600,IPR036162,PF13408, PS51737,IPR025827,G3DSA:3.40.50.1390,IPR006119,IPR038109, PF07508,IPR011109,SSF53041,PTHR30461,Coil, PS51736,cd00338,PF00239
MRRKKVKGGNRLVAYYRYSGGSGQTEQSIEGQRRDCENYAKLHGLTILHEYIDRHISGKTDDRAAFQQMMNDGDKGAFDMVICWKTDRFARNRYDSAVYKKRLRDNGIEILYAAESNVEGAEGIIIEGLMEALAEYYSAELAEKMRRGMRESALKGQAINRCRSLGLTTDENKKYVIDEKTAPTVRFIFEHYAAGESSTSIVDQLNAKGLRTSQGNLFNKCSIPRIIQNEMYRGVYTSKAYNVRIEGAIPAIIDDDLWKRAQAMMKTNRQLKAKYEPKAEYLLSGKLFCAKCGCTMKGVSGHSGGNDEVYRYYACSNPQCRKRNIPKDDLEGKVIRSICDHLLQPETMELLAETMVDVQKADMEKPNAERDVLEQELWDVRRRSKNIMDAIETGSANPQLVARLDDLTQQENTLTYQLSTMEAEKPLLFTKEQYLFLLQQFYAQPTEQDDAYKRRLINTFVTNIEVSDSELLIYFNISEETENKNKNASQLNFDKSSSTEKRLVRVARIELTAS

SEQ ID NO: 4904 - protein, 514 aa, Unknown
  Description of Unknown: Integrase B4905 sequence
  SM00857,G3DSA:1.10.10.2600,IPR036162,PF13408,PS51737, IPR025827,G3DSA:3.40.50.1390,IPR006119,IPR038109,PF07508, IPR011109,SSF53041,PTHR30461,Coil,PS51736, cd00338,PF00239
MSTEYALYLRKSRADLEAEAHGEGDTLARHEHILMELAKSRALPIGAIYREVVSGERIANRPVMQQLLAEVEDGRWKGVLVTETSRLARGDTIDQGIVAQAFKFSGTLIVTPSKTYDPTQEADEEWMEFGLFMSRQEYRMIRRRMTAGMQAAKREGRYISNVPPYGYERYKLDGRGWSLRPIEPQAKVVRMIFDLYLSGLGYCEIEKRLNALHIPAPKSDKWSARTIPGILRNAHYIGCIPAAFRPGKKVVKDGQVKVTRPRVKSCELYKGLHEPIIDRAVWDQVQARLGKNAAVRTPGNRQQSNPLAGLIVCDCCGKRMQRRPQTGTNSQTQIQCTTRGCATVAHNADELERLVLESLRTFLAQIEVGTPAAPDLSAERHALTEIEKQLTDLDTRLRRTFELVEDGTYTREIFLSRQAELTAERERLTADRAAIRQKIDQAQHEYDTRTGLAPAVRHVLDTYSTDLSAADRNKLLKQVIDHIDYHKRTRTRWTKESDLSLTLHPVVFSSLTNR

SEQ ID NO: 4905 - protein, 514 aa, Unknown
  Description of Unknown: Integrase B4906 sequence
  SM00857,G3DSA:1.10.10.2600,IPR036162,PS51737,G3DSA:3.40.50.1390, IPR006119,IPR038109,PF07508,IPR011109,SSF53041, PTHR30461,Coil,PS51736,cd00338,PF00239
MPTDYALYLRKSRADLEAEAHGEGDTLARHEHILMELAKSRALPIGAIYREIVSGERIANRPVMQQLLSEVEDGRWKGVLVTETSRLARGDTIDQGIVAQAFKFSGTLIVTPAKTYDPTQEADEEWMEFGLFMSRQEYRMIRRRQLAGTRASKKEGHYVPGRPPYGYERYKLDGRGWALRPVEPQAGVIRTIYDMYLSGKGFSEIANELNAMKIRTPLDKKWVPATTRAILQNPHYAGFIPSAMKVNTKIVQKGKLITKRPVNKNCELYEGIHEAIIPRDVWYSVQQRMKDTVTPRVPRKYQQMNPLAGLVYCDQCGKLMSRHPYRREDKVRFGCENPSCSTVSSLFEDVENLVLQSLREFLHEIELSSPTLLDTKSEEIALQNIEKQLTDINHRLQRTYELLEDGVYSKETFLQRQSAISQDQTALLNTKHEIERKLHNKQTDIEAQKDSAPLIRHVLDVYPTLEDPKEQNLLLKQVIRRIDYHKTVRVYGKAKSDLHLTIHPKIAIPQTSNI

SEQ ID NO: 4906 - protein, 514 aa, Unknown
  Description of Unknown: Integrase B4907 sequence
  cd03768,PTHR30461:SF3,SM00857,G3DSA:1.10.10.2600, IPR036162,PF13408,PS51737,G3DSA:3.40.50.1390, IPR025827,IPR006119,IPR038109,PF07508, IPR011109,SSF53041,PTHR30461,PS51736,Coil,PF00239
MLRIGIYPRKSVYRDNSDSVQVQITACKDYARLMFKDQELDFRIYDKDEGFSGKNTHRPSFTELMADVKADELDIIIVYKLDRISRSVKDFSEIYETLQQHNVSFLSVKESFDTSTPMGRTVMYILSAFAQLERENTAERVADNMASLGEAGKWTGGTLPPGMTSVRKKIGDKTHSYLIVDEQRIKTVKYIFSLMLSGTSITKLEHTLRQEGIRTERDAFYSCSKLYNLFTNPVYCANDMDAYYYFLEKGYKLPDPALFDGRHGLIGYGRTTQSNGTTVRKDTYSIAIGIHDPILSGTDWIAIQKRLGQNKSTRYAKYEAGILKGTLRCKCGVKMNIRTYKKNGSLFSYYYCPKMAREGVSACDTGYTRVDDIDDRFLQELKKIKLSPDSIELEENVSYVDTGKMRADLKKTTDSIRNLMNALSGSADSAAAKYIIAELEALDKEKSVLEKKLRTAEQRNRRAAVSAETKEFVYHRICNLLDNMDSMSYTEINELIRSIVKSCVFDGDHLDVTF

SEQ ID NO: 4907 - protein, 514 aa, Unknown
  Description of Unknown: Integrase B4908 sequence
  cd03768,PTHR30461:SF3,SM00857,G3DSA:1.10.10.2600,IPR036162, PF13408,IPR025827,PS51737,G3DSA:3.40.50.1390,IPR006119, IPR038109,PF07508,IPR011109,SSF53041,PTHR30461, PS51736,Coil,PF00239
MLRIGIYPRKSVYRDNSDSVQVQITACKDYARLMFKDQELDFRIYDKDEGFSGKNTHRPSFTELMADVKADELDIIIVYKLDRISRSVKDFSEIYETLQQHNVSFLSVKESFDTSTPMGRTVMYILSAFAQLERENTAERVADNMASLGEAGKWTGGTLPPGMTSVRKKIGDKTHSYLIVDEQRIKTVKYIFSLMLSGTSITKLEHTLRQEGIRTERDAFYSCSKLYNLFTNPVYCANDMDAYYYFLEKGYKLPDPALFDGRHGLIGYGRTTQSNGTTVRKDTYSIAIGIHDPILSGADWIAIQKRLGQNKSTRYAKYEAGILKGTLRCKCGVKMNIRTYKKNGSLFSYYYCPKMAREGVSACDTGYTRVDDIDDRFLQELKKIKLSPDSIELEENVSYVDTGKMRTDLKKTTDSIRNLMNALSGSADSAAAKYIIAELEALDKEKAVLEKKLRTAEQRNRRAAVSAETKEFVYHRICNLLDNMDSMSYTEINELIRSIVKSCVFDGDHLDVTF

SEQ ID NO: 4908 - protein, 514 aa, Unknown
  Description of Unknown: Integrase B4909 sequence
  SM00857,G3DSA:1.10.10.2600,IPR036162,PF13408,PS51737, G3DSA:3.40.50.1390,IPR025827,IPR006119,IPR038109,PF07508, IPR011109,SSF53041,PF00239,PTHR30461,PS51736, Coil,cd00338
MSTEYAIYLRKSRADLEAEAHGEGDTLARHEHILMELAKSRALPIGAIYREIVSGERIANRPVMQQLLSEVEDGRWKGILVTETSRLARGDTIDQGIVAQAFKFSGTLIVTPSKTYDPTQEADEEWMEFGLFMSRQEYRMIRRRMTAGMQAAKREGRYISNVPPYGYERYKLEGRGWSLRPIESQAKVVRMIFDLYLSGLGYCEIEKRLNALHIPAPKSDKWSARTIPGILRNAHYIGCIPAAFRPGKKVVKDGQVKVTRPRVKSCELYKGLHEPIIDRAVWDQVQARLGKNAAVRTPGNRQQSNPLAGLIVCDCCGKRMQRRPQTGTGSQTQIQCTTRGCATVAHNADELEQLVLDSLRTFLAQIEVGTPVAPDLSAEQHALSEIEKQLTDLEARQRRTFELVEDGTYTREIFLSRQAELSTERERLTADRTAIQHKIEQAQHEYDARTGLAPAVRHVLDTYNTDLPAADRNKLLKQVIDRIDYHKRTRTRWTKESDLSLTLHPVVFSSLTNR

SEQ ID NO: 4909 - protein, 514 aa, Unknown
  Description of Unknown: Integrase B4910 sequence
  PTHR30461:SF3,SM00857,G3DSA:1.10.10.2600,IPR036162,PF13408, IPR025827,G3DSA:3.40.50.1390,PS51737,IPR006119,IPR038109, PF07508,SSF53041,IPR011109,PTHR30461,PS51736, cd00338,PF00239
MNTVIYARYSAGPRQTDQSIEGQLRVCTDFCKQRGLTVIDTYCDRHISGRTDERPEFQRLIADAKRKKFEAVVVYKTDRFARNKYDSAVYKRELKRNGIQIFYAAEAIPDGPEGIILESLMEGLAEYYSAELAQKIKRGMHESALKCQSTGSGRPLGYRVDEQKHFQIDPESAQTVQTIFEQYIKGESNAAICELLNSRGLRTAQGKPFNKNSINRIIKNRKYIGEYRYHDIVVEGGMPAIISKDTFNLAQAEMERRRTRKAPKSPKAEYLLAGRLFCGHCKGPMQGVSGTGKSGNKWYYYYCGNTRGKNKTCDKKQVSRDRLERAVVDFTVRYILQEDILEELARKVHAAQEHQNDTASEIAFYEKKLADNKKSIANVLRAIESGAATQTLPARLQELENEQAVILGELSFLKGKHLAFTEDQILFALMKHLEPYPGESEQDYRRRIISDFVSEVYLYDDRLLIYFNISSEDGKLKSADLSNIEGGEFDEGLVSSTTSQKIRTLSSMVIRSDF

SEQ ID NO: 4910 - protein, 514 aa, Unknown
  Description of Unknown: Integrase B4911 sequence
  PTHR30461:SF3,SM00857,G3DSA:1.10.10.2600,IPR036162,PF13408, PS51737,G3DSA:3.40.50.1390,IPR025827,IPR006119,IPR038109, PF07508,IPR011109,SSF53041,PTHR30461,Coil, PS51736,cd00338,PF00239
MRRKKVKGGNRLVAYYRYSGGSGQTEQSIEGQRRDCENYAKLHGLTIVHEYIDRHISGKTDDRAAFQQMMNDGDKGAFDMVICWKTDRFARNRYDSAVYKKRLRDNGIEILYAAESNVEGAEGIIIEGLMEALAEYYSAELAEKMRRGMRESALKGQAINRCRSLGLTTDENKKYVIDEKTAPTVRFIFEHYAAGESSASIVEQLNAKGLRTSQGNPFNKCSIPRIIQNEMYRGVYTSKAYNVRIEGAIPAIIDDDLWKRAQAMMKTNRQLKAKYEPKAEYLLSGKLFCAKCGCTMKGVSGHSGGNDEVYRYYACSNPQCRKRNIPKDDLEGKVIRSICDHLLQPETMELLAETMVDVQKADMEKPNAERDVLEQELWDVRRRSKNIMDAIETGSANPQLVARLDDLTQQENTLTYQLSTMEAEKPLLFTKEQYLFLLQQFYAQPTEQDDAYKRRLINTFVTNIEVSDSELLIYFNVSEETENKNKNASQSNFDKSSSTEKRLVRVARIELTAS

SEQ ID NO: 4911 - protein, 514 aa, Unknown
  Description of Unknown: Integrase B4912 sequence
  SM00857,G3DSA:1.10.10.2600,IPR036162,PS51737,G3DSA:3.40.50.1390, IPR006119,IPR038109,PF07508,IPR011109,SSF53041, PF00239,PTHR30461,PS51736,Coil,cd00338
MQIEYAMYLRKSRADLEAEAHGEGDTLARHEHILMELAKSRALPIGAIYREIVSGERIANRPVMQQLLSEVEDGRWKGVLVTETSRLARGDTIDQGIVAQAFKFSGTLIVTPSKTYDPTQEADEEWMEFGLFMSRQEYRMIRRRQLAGTRASKKEGHYVPGRPPYGYERYKLDGRGWSLRPVEPQAGVIRTIYDMYLSGKGFSEIANELNAMKIRTPLDKKWVPATTRAILQNPHYAGFIPSAMKVNTKIVQKGKLITKRPVNKNCELYEGIHEAIIPRDVWNSVQQRMKDTVTPRVPRKYQQMNPLAGLVYCDQCGKLMSRHPYRREDKVRFGCENPSCSTVSSLFEDVESLVLQSLREFLHEIELSSPALLDTKSEEIALQNIEKQLTDINHRLQRTYELLEDGVYSKETFLQRQSAISQDQTALLNTKHEIERKLHNKQTDIEAQKNSAPLIRHVLDVYPTLEDPKEQNLLLKQVIRRIDYHKTVRVYGKAKSDLHLTIHPKIAIPQTSNI

SEQ ID NO: 4912 - protein, 514 aa, Unknown
  Description of Unknown: Integrase B4913 sequence
  PTHR30461:SF3,SM00857,G3DSA:1.10.10.2600,IPR036162,PF13408, PS51737,G3DSA:3.40.50.1390,IPR025827,IPR006119,IPR038109, PF07508,IPR011109,SSF53041,PF00239, PTHR30461,PS51736,Coil,cd00338
MRVVLYMRYSSDRQTEQSIEGQNRVCTAFCEQQGYEIVDRYIDRATSAFKDTNKRTEFQRMIRDSEKQLWEGIVVYKLDRFARNRYDSATYKARLKKNGVRVISATENISDNPEGVILEAVLEGMAEFYSKELSQKITRGMFESANKCHSIGGHIPLGYKIENKKLVIDEAGAAIVREAFDLYANGTTVAEICETFNTKGYRTAKNAEFNKNSFRSMFKNERYIGIYKYKDLRIEGGVPAIVDKDTFAIVQKKLSKNAEAPSRGKAKIDYLLSQKLFCGHCGSLMTGESGTGKGGTTYFYYTCGKRKREHTCDKKPLKKDFIERAVVEDALTLLTPETIDELADIAVNESIREMEENSIIPALKDQLHDTERSINNLVKMVEKGVESDTIADRLKELEKEKRAIEKRLVVAQDDYVILEKDHIVWWLSEFCNGDIEDEEFRRHIIDLLVNSVTVWDEPDGWYKITSVYNLTSNKTKTFRCSDLSGQAPPNSANPNSVFFIKHTFGFVYRIENAQ

SEQ ID NO: 4913 - protein, 514 aa, Unknown
  Description of Unknown: Integrase B4914 sequence
  PTHR30461:SF3,SM00857,G3DSA:1.10.10.2600,IPR036162,PF13408, IPR025827,G3DSA:3.40.50.1390,PS51737,IPR006119,IPR038109, PF07508,SSF53041,IPR011109,PF00239,PTHR30461, PS51736,Coil,cd00338
MAKRKFNKGGEVRLVAYYRYSGGSGQTEQSIEGQRRDCETYARLHNMTIQKEYVDRHISGKTDDRAAFQQMIADSDKGAFDMVICWKTDRFARNRYDSAVYKKRLRDNGVEIVYAAESNIAGAEGIIIEGVMEALAEYYSAELAEKMRRGMRESALKGQAISRCRALGLKTDERKRFVIDEKTAPTVRFIFEHYAAGESAMSIVEQLNAKGLRTSQGNPFNKSSIPRIIQNEAYRGVYVSKSYDVRIEGAIPAIIDNELWERAQTMLKLNRQLKAKNEPKADYILSGKLYCSCGSLMRGMSGHSATGEVYRYYTCPNKDCHLRNIPKDDLEGKVIQSIVDHLLQPESMEALAEAMVEVQKADAEKPNAERVAIEQSLADVRRRSKNILDAIENGTANAQLCARLNDLTEQEQTLSFQLSSLEKEKPVVFTKEQYLFLLEQFLVEPSERTPEYGRRLVNAFVTSMVVSDRELVINFNVSDETVNKNKKASQTNLQKESSSGMRLVRVARIELTAS

SEQ ID NO: 4914 - protein, 514 aa, Unknown
  Description of Unknown: Integrase B4915 sequence
  PTHR30461:SF3,cd00338,SM00857,G3DSA:1.10.10.2600,IPR036162, PF13408,PS51737,IPR025827,G3DSA:3.40.50.1390,IPR006119, IPR038109,PF07508,IPR011109,SSF53041,PTHR30461, PS51736,Coil,PF00239
MRVVLYMRYSSDRQTEQSIEGQNRVCTAFCEQQGYEIVDRYIDRATSAFKDTDKRTEFQRMIRDSEKQLWEGIVVYKLDRFARNRYDSATYKARLKKNGVRVISATENISDNPEGVILEAVLEGMAEFYSKELSQKITRGMFESANKCHSIGGHIPLGYKIENKKLVIDEAGAAIVREAFDLYANGATVAEICETFNTKGYRTAKNAEFNKNSFRSMFKNERYIGIYKYKDLRIEGGVPAIIDKDTFAIVQKKLSKNAEAPSRGKAKIDYLLSQKLFCGHCGSLMTGESGTGKGGTTYFYYTCGKRKREHTCDKKPLKKDFIERAVVEDALTLLTPETIDELADIAVKESIREMEENSIIPALKDQLHETERSINNLVKMVEKGVESDTIADRLKELEKEKRAIEKRLVVAQDDYVILEKDHIVWWLSEFCNGDIEDEEFRRHIIDLLVNSVTVWDEPDGWYKITSVYNLTSNKTKTFRCSDLSGQAPPNSANPNSVFFIKHTFGFVYRIENAD

SEQ ID NO: 4915 - protein, 514 aa, Unknown
  Description of Unknown: Integrase B4916 sequence
  PTHR30461:SF3,SM00857,G3DSA:1.10.10.2600,IPR036162,PF13408, PS51737,IPR025827,G3DSA:3.40.50.1390,IPR006119,IPR038109, PF07508,IPR011109,SSF53041,PTHR30461,PS51736, cd00338,PF00239
MNTVIYARYSAGPRQTDQSIEGQLRVCTDFCKQRGLTVIDTYCDRHISGRTDERPEFQRLIADAKRKKFEAVVVYKTDRFARNKYDSAVYKRELKRNGIQIFYAAEAIPDGPEGIILESLMEGLAEYYSAELAQKIKRGMHESALKCQSTGSGRPLGYRVDEQKRFQIDPESAQTVQTIFEQYIKGESNAAICELLNSHGLRTAQGKPFNKNSINRIIKNQKYIGEYRYHDIVVEGGMPAIISKDTFNLAQAEMERRRTRKAPKSPKAEYLLAGRLFCGHCKGPMQGVSGTGKSGNKWYYYYCGNTRGKNKTCDKKQVSRDRLERAVVDFTVRYILQEDILEELARKVHAAQEHQNDTASEIAFYEKKLADNKKSIANVLRAIESGAATQTLPARLQELENEQAVILGELSFLKGKRLAFTEDQILFALMKHLEPYPGESEQDYRRRIISDFVSEVYLYDDRLLIYFNISSEDGKLKSADLSNIEGGEFDEGLISSTTSQKIRTLSSMVIRSDF

SEQ ID NO: 4916 - protein, 514 aa, Unknown
  Description of Unknown: Integrase B4917 sequence
  PTHR30461:SF3,SM00857,G3DSA:1.10.10.2600,IPR036162,PF13408, PS51737,G3DSA:3.40.50.1390,IPR025827,IPR006119,IPR038109, PF07508,IPR011109,SSF53041,PF00239,PTHR30461, PS51736,Coil,cd00338
MYENIKTACLYVRFSSHNQTEQSIEGQTRVCRDFCKRHNIRIVEIYADRATSASKDIEKRVQFLKMIKDSEKGLFDAVIVYKLDRFARSRYDSATYKYRLKRNGVQLISATENISNDPEGIILESVLEGMAEFYSAELSQKINRGMRESAYKHNSIGGAIPLGYKIEDKKLVIDPKTAPIVKEAFEKYAEGETVAEICRQFNARGYKTSKGTAFGKSSFTKIFRNERYIGVYSFHDYRAEDAIPAIIDKDLWDRVQLRVGKIKNAPARNKAKVVYLLSGKIFCGHCGSKMNGNCNAGNYYYYQCYGKKNGNVDCKKKNIRKEFIERLVAQDALSLLTDEYIEQIATIACEKNQHEIELDSALPTIRDRIHQVDLSLNNLLKAIESGSAPDMLVKRMGELEKEKKDLQVQAKKESEDIVELDKAQVIYWLEQFRGGSIEDEEFCRMLIDLFVNSVTVWDEDDNTYKVTVAYNLTSLPTKTYRLNKGGTLSDFTSNAPGMKNADIPYISSQILCIF

SEQ ID NO: 4917 - protein, 514 aa, Unknown
  Description of Unknown: Integrase B4918 sequence
  PTHR30461:SF3,SM00857,G3DSA:1.10.10.2600,IPR036162,PS51737, G3DSA:3.40.50.1390,IPR006119,IPR038109,PF07508,IPR011109, SSF53041,PTHR30461,Coil,cd00338,PF00239
MNALENVPYNVYESIKFVAIYLRKSRNEEGISDEDVLLKHRSQLLDFCNRHGFDYDIFQEIGSSDTIEFRPEFKRLLERVQRKIYDAVLVIDFDRITRGDTYEYGYIKRIFAESNTPILTPYGDFIDLSDETNILIDVKASMGRYEYIQTKKRFKEGKKRSARLGRWSNGTPPIGYNYDRNTKSLVIDEEAAEMVRKIFEWYVNDDLPLQQIAFRLNRMGYRTRRGKFFQEIQIQRILTNETYIGTIIYGKTEGSGHKKKKTKPLRKKPEDEWIRVEGCHEPIIDKDIFYRAGTKLAKRQKIPRKARQEVYTLSGLIRCKRCGSLMRQYLRKRADGSKVLNVRICQHTDPFGNRCGNSGCNSEILLIALKEQIEEYRNKLLDSSGVVDMDSQKRLKEKIAIIREELAKLEEGLERIKTLFVDGYIDKEEMDKRTEEQSKKVETKRRELRSYEAEYNSVSNDTVEKKLKLVESIAEQLDVTNPFDKRLNRDLRKLVDYVSYERNGEKFNIKVEFY

SEQ ID NO: 4918 - protein, 514 aa, Unknown
  Description of Unknown: Integrase B4919 sequence
  SM00857,G3DSA:1.10.10.2600,IPR036162,PS51737, G3DSA:3.40.50.1390,IPR006119,IPR038109,PF07508, IPR011109,SSF53041,PTHR30461,Coil, PS51736,cd00338,PF00239
MSTDYALYLRKSRADLEAEAHGEGDTLARHEHILMELAKSRALPIGAIYREIVSGERIANRPVMQQLLSEVEDGRWKGVLVTETSRLARGDTIDQGIVAQAFKFSGTLIVTPAKTYDPTQEADEEWMEFGLFMSRQEYRMIRRRQLAGTRASKKEGHYVPGRPPYGYERYKLDGRGWSLRPVEPQAGVIRTIYDMYLSGKGFSEIANELNAMKIRTPLDKKWVPATTRAILQNPHYAGFIPSAMKVNTKIVQKGKLITKRPVNKNCELYEGIHEAIIPRDVWNSVQQRMKDTVTPRVPRKYQQMNPLAGLVYCDQCGKLMSRHPYRREDKVRFGCENPSCSTVSSLFEDVESLVLQSLREFLHKIELSSPALLDTKSEEIALQNIEKQLTDINHRLQRTYELLEDGVYSKETFLQRQSAISQDQTALLKTKHEIERKLHNKQTDIEAQKNSAPLIRHVLDVYPTLEDPKEQNLLLKQVIRRIDYHKTVRVYGKAKSDLHLTIHPRIAIPQTSNI

SEQ ID NO: 4919 - protein, 514 aa, Unknown
  Description of Unknown: Integrase B4920 sequence
  PTHR30461:SF3,SM00857,G3DSA:1.10.10.2600,IPR036162,PF13408, IPR025827,G3DSA:3.40.50.1390,PS51737,IPR006119,IPR038109, PF07508,SSF53041,IPR011109,PTHR30461,Coil, PS51736,cd00338,PF00239
MRRKKNSDVIRLVAYYRYSGGSGQTEQSIEGQRRDCEAYAKLHGMTILHEYIDRHISGKTDDRAAFQQMMKDSDKGAFDMVICWKTDRFARNRYDSAVYKKRLRDNGVEIIYAAESNVQGAEGIIIEGLMEALAEYYSAELAEKMRRGMRESALKGQAISRCRALGLTTDENKKFVIDERTAPTVRFIFEHYAAGESSTSIIEQLNAKGLRTSQGGPFNKSSIPRIIQNEMYRGVYVSKAYNVRIEDAIPAIIDDDLWGRAQAMMKTNRQLKAKYEPKADYLLSGKLFCAECGGLMKGVSGHSGGNGEVYRYYACSNPECHKRNIPKADLEGKVIRSIRDHLLQPDTMEALADALVEVQEADATKPDAEREALEQELRDVRRRGKNIMDAIENGSVAPQLVARLNDLTQQENTLTYQLSTIAKETPLAFTREQYLLMLKMFCAQPDEQNEAYKHRLINTFVTSMKISDSELIIYFNISEETENKNKKAPQQNFTKESSTEMRLVRVARIELTAS

SEQ ID NO: 4920 - protein, 514 aa, Unknown
  Description of Unknown: Integrase B4921 sequence
  SM00857,IPR036162,PF13408,IPR025827,G3DSA:3.40.50.1390, IPR006119,SSF53041,PTHR30461,Coil,PS51736, cd00338,PF00239
MVKRRAAIYARFSSHNQRSESIEIQVDAGTRYIAENGLELVKVYADYAKTGRNTDRREYKHMMNDARLGLFDYVVIYKVPRIMRNRDEMALTRIMLRKAGVEILYAGEEIASGSAGVLQLGMLEVLAEWESAIDSERIIDGIQKNAQRCMANGRTLYGWDIVEGRYVVNDREAAVLHRMKNLLFSGSTVADIVRAVANERSRNGKPFNHDRTKKLLLRPQNGGTYSYAGHVVEDGMPAIWPKIEQDMIISMLGTPRPRRRVDHTAEWPLTGKLYCAECGNTLAGTSGTSKGGTVYSYYKCKKCKRTFRRDILEDAIVDMTICALERPDVRKRIADGMATYEATMEDAPLESERLRKEIKRIDAAFERIWQAIEDGIAPPGGKERIEDLKARKDALETEYQIAKANENIEPGFSELMDWLDNVAEEMNPQEILTMFVRAVQIDKTEVRLYFAFDYYGDNFTPPKKDEHPVDGCSSNSLMVEPNITKANTVICLETCYLQINRNWFAVIGNLQNTR

SEQ ID NO: 4921 - protein, 514 aa, Unknown
  Description of Unknown: Integrase B4922 sequence
  PTHR30461:SF3,cd00338,SM00857,G3DSA:1.10.10.2600, IPR036162,PF13408,IPR025827,G3DSA:3.40.50.1390, PS51737,IPR006119,IPR038109,PF07508, SSF53041,IPR011109,PTHR30461,PS51736,Coil,PF00239
MAKRKFNKGGEVRLVAYYRYSGGSGQTEQSIEGQRRDCEAYARLHNMTIQKEYVDRHISGKTDDRAAFQQMIADSDKGAFDMVICWKTDRFARNRYDSAVYKKRLRDNGVEIVYAAESNISGAEGIIIEGVMEALAEYYSAELAEKMRRGMRESALKGQAISRCRALGLKTDEHKRFVIDEKTAPTVRFIFEHYAAGESAMSIVEQLNAKGLRTSQGNPFNKSSIPRIIQNEAYRGVYISKSYDVRIEGAIPAIIDDELWERSQTMLKLNRQLKAKNEPKADYILSGKLYCSCGSLMRGMSGHSATGEVYRYYTCPNKDCHLRNIPKDDLEGKVMQSIVDHLLQPESMEALAEAMVEVQKADVEKPNAERVAIEQSLSDVRRRSKNILDAIENGTANAQLCARLDDLTEQEQTLSFQLSSLEKEKPVVFTKEQYLFLLEQFLMEPSERTPEYGRRLVNTFVTSIVVSDRELVINFNVSEETVNKNKKTSQTNLQKESSSGMRLVRVARIELTAS

SEQ ID NO: 4922 - protein, 514 aa, Unknown
  Description of Unknown: Integrase B4923 sequence
  PTHR30461:SF3,cd00338,SM00857,G3DSA:1.10.10.2600,IPR036162, PF13408,PS51737,G3DSA:3.40.50.1390,IPR025827,IPR006119, IPR038109,PF07508,IPR011109,SSF53041,PTHR30461, PS51736,Coil,PF00239
MAKRKFNKGGEVRLVAYYRYSGGSGQTEQSIEGQRRDCETYARLHNMTIQKEYVDRHISGKTDDRAAFQQMITDSDKGAFDMVICWKTDRFARNRYDSAVYKKRLRDNGVEIVYAAESNIAGAEGIIIEGVMEALAEYYSAELAEKMRRGMRESALKGQAISRCRALGLKTDEHKRFVIDEKTAPTVRFIFEHYAAGESAMSIVEQLNAKGLRTSQGNPFNKSSIPRIIQNEAYRGVYISKSYDVRIEGAIPAIIDDELWERAQTMLKLNRQLKAKNEPKADYILSGKLYCSCGSLMRGMSGHSATGEVYRYYTCPNKNCHLRNIPKDDLEGKVMQSISDHLLQPEAMEALAEAMVEVQKADAEKPNAERVAIEQSLADVRRRSKNILDAIENGTANAQLCARLDDLTEQEQTLSFQLSSLEKEKPVVFTKEQYLFLLEQFLVEPSERTPEYGRRLVNTFVTSMVVSDRELVINFNVSDETVNKNKKTSQTNLQKESSSGMRLVRVARIELTAS

SEQ ID NO: 4923 - protein, 514 aa, Unknown
  Description of Unknown: Integrase B4924 sequence
  SM00857,G3DSA:1.10.10.2600,IPR036162,PS51737,G3DSA:3.40.50.1390, IPR006119,IPR038109,PF07508,SSF53041,IPR011109, PTHR30461,Coil,PS51736,cd00338,PF00239
MSTEYALYLRKSRADLEAEAHGEGDTLARHEHILMELAKSRALPIGAIYREIVSGERIANRPVMQQLLSEVEDGRWKGVLVTETSRLARGDTIDQGIVAQAFKFSGTLIVTPSKTYDPTQEADEEWMEFGLFMSRQEYRMIRRRQLAGTRASKKEGHYVPGRPPYGYERYKLDGRGWSLRPVEPQAGVIRTIYDMYLSGKGFSEIANELNAMKIRTPLDKKWVPATTRAILQNPHYAGFIPSAMKVNTKIVQKGKLITKRPVNKNCELYEGIHEAIIPRDVWYSVQQRMKDTVTPRVPRKYQQMNPLAGLVYCDQCGKLMSRHPYRREDKVRFGCENPSCSTVSSLFEDVESLVLQSLREFLHKIELSSPTLLDTKSEEIALQNIEKQLTDINHRLQRTYELLEDGVYSKETFLQRQSAISQDQTTLLNTKHEIERKLHNKQTDIEAQKNSAPLIRHVLDVYPTLEDPKEQNLLLKQVIRRIDYHKTVRVYGKAKSDLHLTIHPKIAIPQTSNI

SEQ ID NO: 4924 - protein, 514 aa, Unknown
  Description of Unknown: Integrase B4925 sequence
  cd03768,PTHR30461:SF3,SM00857,G3DSA:1.10.10.2600, IPR036162,PF13408,PS51737,IPR025827, G3DSA:3.40.50.1390,IPR006119,IPR038109,PF07508, IPR011109,SSF53041,PTHR30461,PS51736,Coil,PF00239
MLRIGIYPRKSVYRDNSDSVQVQITACKDYARLMFKDQELDFRIYDKDEGFSGKNTHRPSFTELMADVKADELDIIIVYKLDRISRSVKDFSEIYETLQQHNVSFLSVKESFDTSTPMGRTVMYILSAFAQLERENTAERVADNMASLGEAGKWTGGTLPPGMTSVRKKIGDKTHSYLIVDEQRIKTVKYIFSLMLSGTSITKLERTLRTEGIRTERDAFYSCSKLYNLFTNPVYCANDMDTYYYFLEKGYKLPDPALFDGRHGLIGYGRTTQSNGTTVRKDTYSIAIGIHDPVLSGADWIAIQKRLGQNKSTRYAKYEAGILKGILRCKCGVKMNIRTYKKNGSLFSYYYCPKMAREGVSACDTGYTRVDDIDDRFLQELKKIKLSPDSIELEENVSYVDTGKMRADLKKTTDSIRNLMNALSGSADSAAAKYIIAELEALDKEKSVLEKKLRTAEQRNRRAAVSAETKEFVYHRICNLLDNMDSMSYTEINELIRSIVKSCVFDGDHLDVTF

SEQ ID NO: 4925 - protein, 514 aa, Unknown
  Description of Unknown: Integrase B4926 sequence
  PTHR30461:SF3,SM00857,G3DSA:1.10.10.2600,IPR036162,PF13408, PS51737,G3DSA:3.40.50.1390,IPR025827,IPR006119,IPR038109, PF07508,IPR011109,SSF53041,PF00239,PTHR30461, PS51736,Coil,cd00338
MYEDIKTACLYVRFSSHNQTEQSIEGQTRVCRDFCKRHNIRIVEIYADRATSASKDIEKRVQFLKMIKDSEKGLFDAVIVYKLDRFARSRYDSATYKYRLKRNGVQLISATENISNDPEGIILESVLEGMAEFYSAELSQKINRGMRESAYKHNSIGGAIPLGYKIEDKKLVIDPKTAPIVKEAFEKYADGETVAEICRQFNARGYKTSKGTAFGKSSFTKIFRNERYIGVYTFHDYRAEDAIPAIIDKDLWDRVQLRVGKIKNAPARNKAKVVYLLSGKIFCGHCGSKMNGNCNAGNYCYYQCYGKKNGNVDCKKKNIRKEFIERLVAQDALSLLTDEYIEQIATIACEKNQHEIELDSALPTIRDRIHQVDLSLNNLLKAIESGSAPDMLVKRMGELEKEKKDLQAQAKKESEDIIELDKAQAIYWLEQFRGGSIEDEEFCRMLIDLFVNSVTVWDEDDNTYKVTVAYNLTSLPTKTYRLNKGGTLSDFASNAPGMGKYKAESVGAGHQGNP

SEQ ID NO: 4926 - protein, 514 aa, Unknown
  Description of Unknown: Integrase B4927 sequence
  PTHR30461:SF3,SM00857,G3DSA:1.10.10.2600,IPR036162,PF13408, IPR025827,G3DSA:3.40.50.1390,PS51737,IPR006119,IPR038109, PF07508,IPR011109,SSF53041,PTHR30461,Coil, PS51736,cd00338,PF00239
MTIIGEYCDKAISGKTDNRPSFQRLIKDSEKGQFEAVIMYTLDRFARNRYDSAIYKAKLKKNGVRVYYAKQPMPDTPEGIILESVLEGYAEYYSENLSRNIKRGMKENALQCIANGGAGMPLGYTVGEDRRYKIDPVGARIVQEIFQMYADGMSATQIINECNKRGYKTARGNAFNKNSLRTMLKNDRYIGVYRFADVVVEGGVPPIISRELFDKVQATLKHNYSARARNKAKDDYLLTAKLFCGHCGSSMVGESGTSKSGKLHHYYKCIERKRKHKCNKAVEKKDWMEELVVRFTVQKVLTDENIERIAVKAMEIIEKESADTTYIDGLRNELKEVKKKIKNLMTAIEQGIITPSTKERMDELELEKNEIEGRIASEEMKKPHLTKERIMYWLYSFKSGNIDDVEYKRRVIDTLVNSVYVYDEGDKGRRIVFTFNISGRNTATLSCSDIACFAPPKIRPSAFGRWPYFWASLARRAGTNLLDGVQEVLPGVVHGVTHVLHGAAHAGLHGPLPG

SEQ ID NO: 4927 - protein, 514 aa, Unknown
  Description of Unknown: Integrase B4928 sequence
  cd03768,PTHR30461:SF3,SM00857,G3DSA:1.10.10.2600,IPR036162, PF13408,PS51737,IPR025827,G3DSA:3.40.50.1390,IPR006119, IPR038109,PF07508,SSF53041,IPR011109,PTHR30461, PS51736,Coil,PF00239
MLRIGIYPRKSVYRDNSDSVQVQITACKDYARLMFKDQELDFRIYDKDEGFSGKNTHRPSFTELMADVKADELDIIIVYKLDRISRSVKDFSEIYETLQQHNVSFLSVKESFDTSTPMGRTVMYILSAFAQLERENTAERVADNMASLGEAGKWTGGTLPPGMTSVRKKIGDKTHSYLIVDEQRIKTVKYIFSLMLSGTSITKLERTLRAEGIRTERDAFYSCSKLYNLFTNPVYCANDMDAYYYFLEKGYKLPDPALFDGRHGLIGYGRTTQSNGTTVRKDTYSIAIGIHDPVLSGADWIAIQKRLGQNKSTRYAKYEAGILKGTLRCKCGVKMNIRTYKKNGSLFSYYYCPKMAREGVSACDTGYTRVDDIDDRFLQELKKIKLSPDSIELEENVSYVDTGKMRADLKKTTDSIRNLMNALSGSADSAAAKYIIAELEALDKEKSVLEKKLRTAEQRNRRAAVSAETKEFVYHRICNLLDNMDSMSYTEINELIRSIVKSCVFDGDHLDVTF

SEQ ID NO: 4928 - protein, 514 aa, Unknown
  Description of Unknown: Integrase B4929 sequence
  SM00857,G3DSA:1.10.10.2600,IPR036162,PS51737,G3DSA:3.40.50.1390, IPR006119,IPR038109,PF07508,IPR011109,SSF53041, PTHR30461,Coil,PS51736,cd00338,PF00239
MSTEYAIYLRKSRADLEAEAHGEGDTLARHEHILMELAKSRALPIGAIYREIVSGERIANRPVMQQLLAEVEDGRWKGVLVTETSRLARGDTIDQGIVAQAFKFSGTLIVTPSKTYDPTQEADEEWMEFGLFMSRQEYRMIRRRQLAGTRASKKEGHYVPGRPPYGYERYKLDGRGWSLRPVEPQAGVIRTIYDMYLSGKGFSEIANELNAMKIRTPLDKKWVPATTRAILQNPHYAGFIPSAMKINTKIVQKGKLITKRPVNKNCELYEGIHEAIIPRDVWYSVQQRMKDTVTPRVPRKYQQMNPLAGLVYCDQCGKLMSRHPYRREDKVRFGCENPSCSTVSSLFEDVESLVLQSLREFLHKIELSSPTLLDTKSEEIALQNIEKQLTDINHRLQRTYELLEDGFYSKETFLQRQSAISQDQTALLNTKHEIERKLHNKQTDIEAQKNSAPLIRHVLDVYPTLEDPKEQNLLLKQVIRRIDYHKTVRVYGKAKSDLHLTIHPKIAIPQTSNI

SEQ ID NO: 4929 - protein, 514 aa, Unknown
  Description of Unknown: Integrase B4930 sequence
  PTHR30461:SF3,cd00338,SM00857,G3DSA:1.10.10.2600,IPR036162, PF13408,IPR025827,G3DSA:3.40.50.1390,PS51737,IPR006119, IPR038109,PF07508,IPR011109,SSF53041, PTHR30461,PS51736,Coil,PF00239
MRKKKVKDGNRLVAYYRYSGGSGQTEQSIEGQRRDCENYAKLHGLTILHEYIDRHISGKTDDRAAFQQMMNDGDKGAFDMVICWKTDRFARNRYDSAVYKKRLRDNGIEIFYAAESNVEGAEGIIIEGLMEALAEYYSAELAEKMRRGMRESALKGQAINRCRSLGLTTDENKKYVIDEKTAPTVRFIFEHYAAGESSTSIVDQLNAKGLRTSQGNPFNKCSIPRIIQNEMYRGVYTSKAYNVRIEGAIPAIIDDDLWKRAQAMMKTNRQLKAKYEPKAEYLLSGKLFCAKCGCTMKGVSGHSGGNGEVYRYYACSNPQCRKRNIPKDDLEGKVIRSICDHLLQPETMELLAETMVEVQKADMEKPNAERDVLEQELRDVRRKSKNIMDAIETGSANPQLVARLDDLTQQENTLTYQLSTMEAEKPLLFTKEQYLFLLQQFYAQPTEQDDAYKRRLINTFVTNIEVSDSELLIYFNISEETENKNKNAPQLNFDKSSSTEKRLVRVARIELTAS

SEQ ID NO: 4930 - protein, 514 aa, Unknown
  Description of Unknown: Integrase B4931 sequence
  SM00857,G3DSA:1.10.10.2600,IPR036162,PS51737,G3DSA:3.40.50.1390, IPR006119,IPR038109,PF07508,SSF53041,IPR011109, PF00239,PTHR30461,PS51736,Coil,cd00338
MNQELFAIYLRKSRKDLELKEYDVLERHRRILLDFANSRNIKINKEDIYEEVVSGETIQDRPVVQELLKKIEAGYYKAVLVMEIERLARGNTIDQGIIAQTFQLTNTLIITPNKTYDTNNEYDNEFLEFGLFMSRREYKAISRRIQAGRIQSVKEGNFIGSVTPYGYDKEKLKGTKGYKLIPNQEEAENVKLIFKLFIESSCGTSNLAYKLNDLGIRSRTNSVWTPAMVRNILKNRVYIGFVSWGKRANVKKLNNNEINKSRPINTDYIEARGKHEPIIDDITFYKVQELLKSTSIKKVPYEKVLKNPLSGLIKCGKCNLNMIRRPYPQNKHEDLLICRNKYCDNISSSLHLVEKKLLNSLEEQLNEFYFYINNYEQEYIKSTKNYNLQIKKIDKEILKLKSQLSKACEFLELGAYSLELFKERSNSINLKVENLEKEKLKLEELSKNNIIERITQYIPLLEKCLNTYWTLDIEGKNSILKEIISEVYYTKNVKGSRWNLDNTDKFSLDIKLRV

SEQ ID NO: 4931 - protein, 514 aa, Unknown
  Description of Unknown: Integrase B4932 sequence
  PTHR30461:SF3,SM00857,G3DSA:1.10.10.2600,IPR036162,PF13408, PS51737,G3DSA:3.40.50.1390,IPR025827,IPR006119,IPR038109, PF07508,IPR011109,SSF53041,PTHR30461, Coil,PS51736,cd00338,PF00239
MPKKNPSGGKRLVAYYRYSGGSHQTEQSIEGQRRDCETYARIHGMVILHEYIDRHISGKTDDRPEFQQMIADAGKGMFDYVICWKTDRIARSRYDSIIYKKKLRDNGVELLYAAEANVEGSGGIIVEGLMEALAEYYSAELAEKVRRGMRESALKGKAIGSSRPLGLTVDKDKKYIIDPAGAAAVRYIFEQYAAGAASSAIVAHLNEQGLCTSRGNPFNKSSVVRIIQNEVYRGVYVSPKFDVRIEGAVPAIIDDDLWERAQKMFVRNRQSRSPRNDRADYILSGKLFCGECGTAMKGVSGHSSNGEVYFYYSCPCKDCHRRNIPKDELEGLVIRTVCNDVLQPDVMDRIADSVIEAQTAELNQPNPEKDALQHELADVQRKAKNLLAALENGTAGAMLTNRLAELEQQADTLSYQLSSLESEPKFPVFSKEEVLYLLEQFLIAPSEKTKAYRRRLIDTFVSKIEVSNTELTIYFNIAEEDCGKMKKAPQSNQPEGCSTEKQMVRVARIELTAS

SEQ ID NO: 4932 - protein, 514 aa, Unknown
  Description of Unknown: Integrase B4933 sequence
  PTHR30461:SF3,SM00857,G3DSA:1.10.10.2600,IPR036162,PF13408, IPR025827,G3DSA:3.40.50.1390,PS51737,IPR006119,IPR038109, PF07508,IPR011109,SSF53041,PTHR30461,Coil, PS51736,cd00338,PF00239
MRRKKNSDVIRLVAYYRYSGGSGQTEQSIEGQRRDCEAYAKLHGMTILHEYIDRHISGKTDDRAAFQQMMKDSDKGAFDMVICWKTDRFARNRYDSAVYKKRLRDNGVEIIYAAESNVQGAEGIIIEGLMEALAEYYSAELSEKMRRGMRESALKGQAISRCRALGLTTDENKKFVIDERTAPTVRFIFEHYAAGESSTSIIEQLNAKGLRTSQGGPFNKSSIPRIIQNEMYRGVYVSKAYNVRIEDAIPAIIDDDLWGRAQAMMKTNRQLKAKYEPKADYLLSGKLFCAECGSLMKGVSGHSGGNGEVYRYYACSNPECHKRNIPKVDLEGKVIRSIRDHLLQPDAMEALADALVEVQEADAAKPNAEREALEQELHDVRRRGKNIIDAIENGSAAPQLVARLNDLTQQENTLTYQLSTIAKETPLAFTREQYLLMLKMFCAQPDEQNEAYKHRLINTFVTSMKVSDSELVIYFNISEETENKNKKASQQNFTKESSTEMRLVRVARIELTAS

SEQ ID NO: 4933 - protein, 514 aa, Unknown
  Description of Unknown: Integrase B4934 sequence
  PTHR30461:SF3,SM00857,G3DSA:1.10.10.2600,IPR036162,PF13408, IPR025827,G3DSA:3.40.50.1390,PS51737,IPR006119,IPR038109, PF07508,SSF53041,IPR011109,PTHR30461,Coil, PS51736,cd00338,PF00239
MPTVTVIQPTIAEEKAVKIRCAAYCRVSSDSEDQLNSFMAQTRYYSQIFEDSETEELIDIYADEGITGTREDKRSEFQRLMKDCRKGKIDRIYTKSISRFARNTRDCLKNVRELKSLGITIYFEKENIDTANMTDEMMITIMGGLAQEESTSISQNMQWSIRKRMANGTYIVSHVPYGYTKSGGKMIVNPREAEIVKRIYEDFLNGKGLLRISNDLNAGSIPKNSKGEPWNKNVVRYVLTNEKYIGDCLWQKKFTENVFPFRKSKNQGQVDSYYITDAHEPIISREDFTKVQTLLKQRGEYYGNTEFKQYPLTMKIFCDNCGKIYRRKNINGKIYWVCRTHDNRAKDCPNKAIAQKLIYISFIRLCNKLWYNYKQILVPLQTSLQDLKLKRFSGNTNVMDIHKEIAKLKEQTHVLARLKTKGFLDEAKYIEQTTELTAKINKLQVELKKLSRSDDEDETLEQIEMLFDFFEKRDKPITEFEESTFESIVEKIVVIDQHELEFHLIGGLKFKENI

SEQ ID NO: 4934 - protein, 514 aa, Unknown
  Description of Unknown: Integrase B4935 sequence
  PTHR30461:SF3,cd00338,SM00857,G3DSA:1.10.10.2600,IPR036162, PF13408,IPR025827,G3DSA:3.40.50.1390,PS51737,IPR006119, IPR038109,PF07508,IPR011109,SSF53041,PTHR30461, PS51736,Coil,PF00239
MRVVLYMRYSSDRQTEQSIEGQNRVCTAFCEQQGYEIVDRYIDRATSAFKDTDKRTEFQRMIRDSEKQLWEGIVVYKLDRFARNRYDSATYKARLKKNGVRVISATENISDNPEGVILEAVLEGMAEFYSKELSQKITRGMFESANKCHSIGGHIPLGYKIENKKLVIDEAGAAIVREAFDLYANGATVAEICETFNTKGYRTAKNAEFNKNSFRSMFKNERYIGIYKYKDLRIEGGVPAIVDKDIFTIVQKKLSKNAEAPSRGKAKIDYLLSQKLFCGHCGSLMTGESGTGKGGTTYFYYTCGKRKREHTCDKKPLKKDFIERAVVEDALTLLTPETINELADIAVKESVREMEENSIIPALKNQLHETERSINNLVKMVEKGVESDTIADRLKELEKEKRAIEKRLVVAQDDYVILEKDHIVWWLSEFCNGDIEDEDFRRHIIDLLVNSVTVWDEPDGWYKITSVYNLTSNKTKTFRCSDLSGQAPPNSANPNSFFFVKHCVGFVFIVEDVG

SEQ ID NO: 4935 - protein, 514 aa, Unknown
  Description of Unknown: Integrase B4936 sequence
  PTHR30461:SF3,cd00338,SM00857,G3DSA:1.10.10.2600,IPR036162, PF13408,IPR025827,G3DSA:3.40.50.1390,PS51737,IPR006119, IPR038109,PF07508,IPR011109,SSF53041,PTHR30461, PS51736,Coil,PF00239
MARSKKTECLPLERIGVIYARYSSHNQKEESIEQQVEECTSFALLNGIKIVHVYADKALSGRTDKRPQFQRLMRDAEKRSFSVVVAYKSNRIARDMLNALKYEDRLGKYGIETLYAKEEFGNTAAGRFALRTMMNVNQFYSENMAEDIKRGMLDNAENCKVNGALPLGYVSGPDKRYAIEPKEAEIVRGIYDKVLEGVSFADIANDLNACGVRTKHGSLWNKCSFHRILTNDVYIGVYRHSGVVKEGGVPPILEREVFIAMQKYLETKKNPRGRHRENGDYLLTGKLRCGYCESFMVGVSGTSKTGDKHYYYTCNSRHAGSGCKKENVRRDTIEYTVAALTQQVVFKEDIIEWIATAAVKLAKEASGQNEIDAMEAELAEDRKATKNIMAAIEQGIFTATTKSRLLELEADIASLEQSIRDAKAISEGKLLEKERVVYFLTSLREGNLHSKTYQKRLIDTFVRAVYLWDDRIGIDYYYAGKDSMVKYSLSEIEADIGENIREVLKDSLTGHHII

SEQ ID NO: 4936 - protein, 514 aa, Unknown
  Description of Unknown: Integrase B4937 sequence
  PTHR30461:SF3,SM00857,IPR036162,PF13408,IPR025827, G3DSA:3.40.50.1390,IPR006119,PF07508,IPR011109,SSF53041, PTHR30461,Coil,PS51736,cd00338,PF00239
MYDSMPAEWLCCAYLRKSREDEEREKQGRYKTLERHKAILESLSSDNGHKIAQWYPEIVSGETIEGRPEVKKLLADLASGKWDAVYVVEASRLGRGGGSDQEKIVNAFRYTNTWLVTEEKVYDPSSKADMRQLKNDLRSSEDELDSITTRLTRGKYRSAQEGRWQATGRTPYGWRAVRIAGLWQLRPDENHCHMLRIYDLLESGLTPWDVANIYNAEGIPTPRGGDHWTAAIVRAIALNPANCGYVVFGKHKTMRIFDPVTFEAKKVRVKNDKPVMVKGLHYGTGGISEERFERITGHLVGSAHLRKGLELKNPLARLLKCGKCGYAMNHHRMSSGKSYGYFYQHPAKRNMTRACDGCRGARDDLVMDTLVASLRSLCNDIELRIKADNRASEHEAHIEALRKELEKVRAARSRAMEAYEAGAYTIAELKARKDEAEKRMESIERAIKDAKPPKYTPELVVSINKCIDMLLDDTVSVQVKNDFLKSVIGRIDYYNDTPPFVHDNKVHLEIFLRQ

SEQ ID NO: 4937 - protein, 514 aa, Unknown
  Description of Unknown: Integrase B4938 sequence
  PTHR30461:SF3,SM00857,G3DSA:1.10.10.2600,IPR036162,PF13408, PS51737,G3DSA:3.40.50.1390,IPR025827,IPR006119,IPR038109, PF07508,SSF53041,IPR011109,PF00239, PTHR30461,PS51736,Coil,cd00338
MAKRKFNKGGEVRLVAYYRYSGGSGQTEQSIQGQRRACETYARLHNMTIQKEYVDRHISGKTDDRAAFQQMIADSDKGAFDMVICWKTDRFARNRYDSAVYKKRLRDNGVEIVYAAESNIAGAEGIIIEGVMEALAEYYSAELAEKMRRGMRESALKGQAISRCRALGLKTDERKRFVIDEKTAPTVRFIFEHYAAGESAMSIVEQLNAKGLRTSQGNPFNKSSIPRIIQNEAYRGVYVSKSYDVRIEGAIPAIIDNELWERAQTMLKLNRQLKAKNEPKADYILSGKLYCSCGSLMRGMSGHSATGEVYRYYTCPNKDCHLRNIPKDDLEGKVIQSIVDHLLQPESMEALAEAMVEVQKADAEKPNAERVAIEQSLADVRRRSKNILDAIENGTANAQLCARLNDLTEQEQTLSFQLSSLEKEKPVAFTKEQYLFLLEQFLVEPSERTPEYGRRLVNAFVTSMVVSDRELVINFNVSDETVNKNKKASQTNLQKESSSGMRLVRVARIELTAS

SEQ ID NO: 4938 - protein, 514 aa, Unknown
  Description of Unknown: Integrase B4939 sequence
  PTHR30461:SF3,SM00857,G3DSA:1.10.10.2600,IPR036162,PF13408, PS51737,IPR025827,G3DSA:3.40.50.1390,IPR006119,IPR038109, PF07508,IPR011109,SSF53041,PTHR30461,Coil, PS51736,cd00338,PF00239
MRKKKVKDGNRLVAYYRYSGGSGQTEQSIEGQRRDCENYAKLHGLTILHEYIDRHISGKTDDRAAFQQMMNDGDKGAFDMVICWKTDRFARNRYDSAVYKKRLRDNGIEILYAAESNVEGAEGIIIEGLMEALAEYYSAELAEKMRRGMRESALKGQAINRCRSLGLTTDENKKYVIDEKTAPTVRFIFEHYAAGESSASIVEQLNAKGLRTSQGNPFNKCSIPRIIQNEMYRGVYTSKAYNVRIEGVIPAIIDDDLWKRAQAMMKTNRQLKAKYEPKAEYLLSGKLFCAKCGCTMKGVSGHSGGNDEVYRYYACSNPQCRKRNIPKDDLEGKVIRSICDHLLQPETMELLAETMVDVQKADMEKPNAERDVLEQELWDVRRRSKNIMDAIETGSANPQLVARLDDLTQQENTLTYQLSTMEAEKPLLFTKEQYLFLLQQFYAQPTEQDDVYKRRLINTFVTNIEVSDSELLIYFNISEETENKNKNAPQLNFDKSSSTEKRLVRVARIELTAS

SEQ ID NO: 4939 - protein, 514 aa, Unknown
  Description of Unknown: Integrase B4940 sequence
  SM00857,G3DSA:1.10.10.2600,IPR036162,PS51737,G3DSA:3.40.50.1390, IPR006119,IPR038109,PF07508,IPR011109,SSF53041, PF00239,PTHR30461,PS51736,Coil,cd00338
MQMEYAMYLRKSRADLEAEAHGEGDTLARHEHILMELAKSRALPIGAIYREIVSGERIANRPVMQQLLSEVEDGRWKGVLVTETSRLARGDTIDQGIVAQAFKFSGTLIVTPSKTYDPTQEADEEWMEFGLFMSRQEYRMIRRRQLAGTRASKKEGHYVPGRPPYGYERYKLDGRGWSLRPVEPQAGVIRTIYDMYLSGKGFSEIANELNAMKIRTPLDKKWVPATTRAILQNPHYAGFIPSAMKVNTKIVQKGKLITKRPVNKNCELYEGIHEAIIPRDVWYSVQQRMKDTVTPRVPRKYQQMNPLAGLVYCDQCGKLMSRHPYRREDKVRFGCENPSCSTVSSLFEDVESLVLQSLREFLHKIELSSPALLDTKSEENALQNIEKQLTDINRRLQRTYELLEDGFYSKETFLQRQSAISQDQTALLNTKHEIERKLHNKQTDIEAQKNSAPLIRHVLDVYPTLEDPKEQNLLLKQVIRRIDYHKTVRVYGKAKSDLHLTIHPKIAIPQTSNI

SEQ ID NO: 4940 - protein, 514 aa, Unknown
  Description of Unknown: Integrase B4941 sequence
  SM00857,IPR036162,PF13408,IPR025827, G3DSA:3.40.50.1390,IPR006119,SSF53041,PTHR30461, Coil,PS51736,cd00338,PF00239
MVKRRAAIYARFSSHNQRSESIEIQVDAGTRYIAENGLELVRVYADYAKTGRNTDRSDYKRMMNDARLGLFDYVVIYKVPRIMRNRDEMALTRIMLRKAGVEILYAGEEIASGSSGVLQLGMLEVLAEWESAVDSERIIDGIQKNAQRCMANGRTLYGWDIVEGRYVVNDREAAVLHRMKNLLFSGSTVADIVRAVANERSRNGKPFNHDRTKKLLLRPQNGGTYSYAGHVVEDGMPAIWPKIEQDMIISMLGKPRPRRRIDHAAEWPLTGKLYCAECGNTLAGTSGTSKGGTVYAYYKCKKCKRTFRRDILEDAIVDMTICALERPDVRKRIADGMATYEATMEDAPLESERLRKEIKRIDAAFERIWQAIEDGIAPPGGKERIEDLKARKDALETEYQIAKANENIEPGFSELMDWLDNVAEEMNPQEILTMFVRAVQIDKTEVRLYFAFDYYGDNFTPPKKDEHPVDGCSSNSPMVEPSINRANTVISLETCYLQINRNWFAVIGNLQNTR

SEQ ID NO: 4941 - protein, 514 aa, Unknown
  Description of Unknown: Integrase B4942 sequence
  PTHR30461:SF3,cd00338,SM00857,G3DSA:1.10.10.2600,IPR036162, PF13408,IPR025827,G3DSA:3.40.50.1390,PS51737,IPR006119, IPR038109,PF07508,IPR011109,SSF53041,PTHR30461, PS51736,Coil,PF00239
MAKRKFNKGGEVRLVAYYRYSGGSGQTEQSIEGQRRDCEAYARLHNMTIQKEYVDRHISGKTDDRAAFQQMIADSDKGAFDMVICWKTDRFARNRYDSAVYKKRLRDNGVEIVYAAESNISGAEGIIIEGVMEALAEYYSAELAEKMRRGMRESALKGQAISRCRALGLKTDEHKRFVIDEKTAPTVRFIFEHYAAGESAMSIVEQLNAKGLRTSQGNPFNKSSIPRIIQNEAYRGVYISKSYDVRIEGAIPAIIDDELWERAQTMLKLNRQLKAKNEPKADYILSGKLYCSCGSLMRGMSGHSATGEVYRYYTCPNKDCHLRNIPKDDLEGKVMQSIVDHLLQPESMEALAEAMVEVQKADVEKPNAERVAIEQSLSDVRRRSKNILDAIENGTANAQLCARLDDLTEQEQTLSFQLSSLEKEKPVVFTKEQYLFLLEQFLMEPSERTPEYGRRLVNTFVTSMVVSGRELVINFNVSDETVNKNKKASQTNLQKESSSGMRLVRVARIELTAS

SEQ ID NO: 4942 - protein, 514 aa, Unknown
  Description of Unknown: Integrase B4943 sequence
  SM00857,G3DSA:1.10.10.2600,IPR036162,PS51737,G3DSA:3.40.50.1390, IPR006119,IPR038109,PF07508,IPR011109,SSF53041, PF00239,PTHR30461,PS51736,Coil,cd00338
MPTEYALYLRKSRADLEAEAHGEGDTLARHEHILMELAKSRALPIGAIYREIVSGERIANRPVMQQLLSEVEDGRWKGVIVTETSRLARGDTIDQGIVAQAFKFSGTLIVTPAKTYDPTQEADEEWMEFGLFMSRQEYRMIRRRQLAGTRASKKEGHYVPGRPPYGYERYKLDGRGWSLRPVEPQAGVIRTIYDMYLSGKGFSEIANELNAMKIRTPLDKKWVPATTRAILQNPHYAGFIPSAMKVNTKIVQKGKLITKRPVNKNCELYEGIHEAIIPRDVWYSVQQRMKDTVTPRVPRKYQQMNPLAGLVYCDQCGKLMSRHPYRREDKVRFGCENPSCSTVSSLFEDVENLVLQSLREFLHEIELSSPALLDTKSEETALQNIEKQLTDINHRLQRTYELLEDGVYSKETFLQRQSAISQDQTALLNTKHEIERKLHNKQTDIEAQKNSAPLIRHVLDVYPTLEDPKEQNLLLKQVIRRIDYHKTVRVYGKAKSDLHLTIHPKIAIPQTSNI

SEQ ID NO: 4943 - protein, 514 aa, Unknown
  Description of Unknown: Integrase B4944 sequence
  SM00857,G3DSA:1.10.10.2600,IPR036162,PS51737, G3DSA:3.40.50.1390,IPR006119,IPR038109,PF07508, SSF53041,IPR011109,PTHR30461,Coil, PS51736,cd00338,PF00239
MPTDYALYLRKSRADLEAEAHGEGDTLARHEHILMELAKSRALPIGAIYREIVSGERIANRPVMQQLLSEVEDGRWKGVLVTETSRLARGDTIDQGIVAQAFKFSGTLIVTPAKTYDPTQEADEEWMEFGLFMSRQEYRMIRRRQLAGTRASKKEGHYVPGRPPYGYERYKLDGRGWSLRPVEPQAGVIRTIYDMYLSGKGFSEIANELNAMKIRTPLDKKWVPATTRAILQNPHYAGFIPSAMKVNTKIVQKGKLITKRPVNKNCELYEGIHEAIIPRDVWNSVQQRMKETVTPRVPRKYQQMNPLAGLVYCDQCGKLMSRHPYRREDKVRFGCENPSCSTVSSLFEDVESLVLQSLREFLHKIELSSPALLDTKSEEIALQNIEKQLTDINRRLQRTYELLEDGFYSKETFLQRQSAISRDQTALLNTKHEIERKLHNKQTDIEAQKNSAPLIRHVLDVYPTLEDPKEQNLLLKQVIRRIDYHKTVRVYGKAKSDLHLTIHPKIAIPQTSNI

SEQ ID NO: 4944 - protein, 514 aa, Unknown
  Description of Unknown: Integrase B4945 sequence
  cd03768,PTHR30461:SF3,SM00857,G3DSA:1.10.10.2600,IPR036162, PF13408,PS51737,G3DSA:3.40.50.1390,IPR025827,IPR006119, IPR038109,PF07508,IPR011109,SSF53041,PTHR30461, PS51736,Coil,PF00239
MLRIGIYPRKSVYRDNSDSVQVQITACKDYARLMFKDQELDFRIYDKDEGFSGKNTHRPSFTELMADVKADELDIIIVYKLDRISRSVKDFSEIYETLQQHNVSFLSVKESFDTSTPMGRTVMYILSAFAQLERENTAERVADNMASLGEAGKWTGGTLPPGMTSVRKKIGDKTHSYLIVDEQRIKTVKYIFSLMLSGTSITKLERTLRTEGIRTERDAFYSCSKLYNLFTNPVYCANDMDAYYYFLEKGYKLPDPALFDGRHGLIGYGRTTQSSGTTVRKDTYSIAIGIHDPILSGADWIAIQKRLGQNKSTRYTKYEAGILKGTLRCKCGVKMNIRTYKKNGSLFSYYYCPKMAREGVSACDTGYTRVDDIDDRFLQELKKIKLSPDSIELEENVSYVDTGKMRADLKKTTDSIRNLMNALSGSADSAAAKYIIAELEALDKEKAVLGKKLRTAEQRNRRAAVSAETKEFVYHRICNLLDNMDSMSYIEINELIRSIVKSCVFDGDHLDVTF

SEQ ID NO: 4945 - protein, 514 aa, Unknown
  Description of Unknown: Integrase B4946 sequence
  cd03768,PTHR30461:SF3,SM00857,G3DSA:1.10.10.2600,IPR036162, PF13408,IPR025827,PS51737,G3DSA:3.40.50.1390,IPR006119, IPR038109,PF07508,IPR011109,SSF53041,PTHR30461, PS51736,Coil,PF00239
MLRIGIYPRKSVYRDNSDSVQVQITACKDYARLMFKDQELDFRIYDKDEGFSGKNTHRPSFTELMADVKADELDIIIVYKLDRISRSVKDFSEIYETLQQHNVSFLSVKESFDTSTPMGRTVMYILSAFAQLERENTAERVADNMASLGEAGKWTGGTLPPGMTSVRKKIDDKTHSYLIVDEQRIKTVKYIFSLMLSGTSITKLERTLRTEGIRTERDAFYSCSKLYNLFTNPVYCANDMDAYYYFLEKGYKLPDPALFDGRHGLIGYGRTTQSNGTTVRKDTYSIAIGIHDPVLSGADWIAIQKRLGQNKSTRYAKYEAGILKGILRCKCGVKMNIRTYKKNGSLFSYYYCPKMAREGVSACDTGYTRVDDIDDRFLQELKKIKLSPDSIELEENVSYVDTGKMRADLKKTTDSIRNLMNALSGSADSAAAKYIIAELEALDKEKSVLEKKLRTAEQRNRRAAVSAETKEFVYHRICNLLDNMDSMSYTEINELIRSIVKSCVFDGDHLDVTF

SEQ ID NO: 4946 - protein, 514 aa, Unknown
  Description of Unknown: Integrase B4947 sequence
  cd03768,PTHR30461:SF3,SM00857,G3DSA:1.10.10.2600,IPR036162, PF13408,IPR025827,G3DSA:3.40.50.1390,PS51737,IPR006119, IPR038109,PF07508,SSF53041,IPR011109,PTHR30461, PS51736,Coil,PF00239
MLRIGIYPRKSVYRDNSDSVQVQITACKDYARLMFKDQELDFRIYDRDEGFSGKNTHRPSFTELMADVKADELDIIIVYKLDRISRSVKDFSEIYETLQQHNVSFLSVKESFDTSTPMGRTVMYILSAFAQLERENTAERVADNMASLGEAGKWTGGTLPPGMTSVRKKIGDKTHSYLIVDEQRIKTVKYIFSLMLSGTSITKLEHTLRQDGIRTERDAFYSCSKLYNLFTNPVYCANDMDAYYYFLEKGYKLPDPALFDGRHGLIGYGRTTQSSGTTVRKDTYSIAIGIHDPILSGADWIAIQKRLGQNKSTRYAKYEAGILKGTLRCKCGVKMNIRTYKKNGSLFSYYYCPKMAREGASAYDTGYTRVDDIDNRFLQELKKIKLSPDSIELEENVSYVDTGKMRTDLKKTTDSIRNLMNALSCSADSAAAKYIIAELEALDKEKAVLEKKLRTAEQRNRRAAVSAETKEFVYHQICNLLDNMDSMSYTEINELIRSIVKSCVFDGDHLDVTF

SEQ ID NO: 4947 - protein, 514 aa, Unknown
  Description of Unknown: Integrase B4948 sequence
  PTHR30461:SF3,SM00857,G3DSA:1.10.10.2600,IPR036162,PF13408, PS51737,IPR025827,G3DSA:3.40.50.1390,IPR006119,IPR038109, PF07508,IPR011109,SSF53041,PF00239,PTHR30461, PS51736,Coil,cd00338
MNRRTGIYGRYSDTKQDDGFSIEYQLTECQAYLDKNGMPLTKTYIDQAITGTKVAGREAFHELIRDVKNGMIDVVVVYKFSRIFRNAYESHKYRQLFKKHGVKLISVTQMVDDETSSGKLMIGVMANIDEYQSAVISDHVKSAMREMVSEGFFAGGTVPYGYKLEVVQHGKKTRKKYVPDEFESKIVNKIFELYADNYSLRYLQTYLKDNGAFTRRGKYFSIQTIARMLRNDFYIGVLRYSAQGHEPIIVHDIIPPIIDKELWDRVQYRHSTQKGVRPRKRKELYALTGKIRCANCGSHYFGIRSGSMQNGKKYDYKYYVCSQSKDYHTCSCKRIRKDYLEEITMKEIKRHILNEKSIYSIANEMLKILGENPTEQKDKLKQLKSRSSALKSEMKELIDLRAKRIVSDSFLAEHISEKENELQEVEQQIYNIERQTKLTLTHSMIVDYLNKMLSISDDTDDEVLKTIFDKFVESIIVSDESIDITLIVSPNGDIEYNESLRQPNVFFYAKINRQ

SEQ ID NO: 4948 - protein, 514 aa, Unknown
  Description of Unknown: Integrase B4949 sequence
  SM00857,G3DSA:1.10.10.2600,IPR036162,PS51737,G3DSA:3.40.50.1390, IPR006119,IPR038109,PF07508,IPR011109,SSF53041, PTHR30461,Coil,PS51736,cd00338,PF00239
MPTEYALYLRKSRADLEAEAHGEGDTLARHEHILMELAKSRALPIGAIYREIVSGERIANRPVMQQLLAEVEDGRWKGVLVTETSRLARGDTIDQGIVAQAFKFSGTLIVTPSKTYNPTQEADEEWMEFGLFMSRQEYRMIRRRQLAGTRASKKEGHYVPGRPPYGYERYKLDGRGWSLRPVEPQAGVIRTIYDMYLSGKGFSEIANELNAMKIRTPLDKKWVSATTRAILQNPHYAGFIPSAMKVNTKIVQKGKLITKRPVNKNCELYEGIHEAIIPRDVWYSVQQRMKDTVTPRVPRKYQQMNPLAGLVYCDQCGKLMSRHPYRREDKVRFGCENPSCSTVSSLFEDVESLVLQSLREFLHKIELSSPTLLDTKSEEIALQNIEKQLTDINRRLQRTYELLEDGVYSKETFLQRQSAISQDQTALLNTKHEIERKLHNKQTDIEAQKNSAPLIRHVLDVYPTLEDPKEQNLLLKQVIRRIDYHKTVRVYGKAKSDLHLTIHPKIAIPQTSNI

SEQ ID NO: 4949 - protein, 514 aa, Unknown
  Description of Unknown: Integrase B4950 sequence
  SM00857,G3DSA:1.10.10.2600,IPR036162,PS51737, G3DSA:3.40.50.1390,IPR006119,IPR038109,PF07508, IPR011109,SSF53041,PTHR30461,Coil, PS51736,cd00338,PF00239
MPTDYALYLRKSRADLEAEAHGEGDTLARHEHILMELAKSRALPIGAIYREIVSGERIANRPVMQQLLSEVEDGRWKGVLVTETSRLARGDTIDQGIVAQAFKFSGTLIVTPAKTYDPTQEADEEWMEFGLFMSRQEYRMIRRRQLAGTRASKKEGHYVPGRPPYGYERYKLDGRGWSLRPVEPQAGVIRTIYDMYLSGKGFSEIANELNAMKIRTPLDKKWVPATTRAILQNPHYAGFIPSAMKVNTKIVQKGKLITKRPVNKNCELYEGIHEAIIPRDVWYSVQQRMKDTVTPRVPRKYQQMNPLAGLVYCDQCGKLMSRHPYRREDKVRFGCENPSCSTVSSLFEDVENLVLQSLREFLHEIELSSPTLLDTKSEEIALQNIEKQLTDINHRLQRTYELLEDGVYSKETFLQRQSAISQDQTALLNTKHEIERKLHNKQTDIEAQKDSAPLIRHVLDVYPTLEDPKEQNLLLKQVIRRIDYHKTVRVYGKAKSDLHLTIHPKIAIPQTSNI

SEQ ID NO: 4950 - protein, 514 aa, Unknown
  Description of Unknown: Integrase B4951 sequence
  PTHR30461:SF3,SM00857,G3DSA:1.10.10.2600,IPR036162,PF13408, PS51737,IPR025827,G3DSA:3.40.50.1390,IPR006119,IPR038109, PF07508,IPR011109,SSF53041,PTHR30461,Coil, PS51736,cd00338,PF00239
MPKKNPSGGKRLVAYYRYSGGSHQTEQSIEGQRRDCETYARIHGMVILHEYIDRHISGKTDDRPEFQQMIADAGKGMFDYVICWKTDRIARSRYDSIIYKKKLRDNGVELLYAAEANVEGSGGIIVEGLMEALAEYYSAELAEKVRRGMRESALKGKAIGSSRPLGLTVDKDKKYIIDPAGAAAVRYIFEQYAAGAASSSIVAHLNEQGLCTSRGNPFNKSSVVRIIQNEVYRGVYVSPKFDVRIEGAVPAIIDDDLWERAQKMFIRNRQSRSPRNDRADYILSGKLFCGECGTAMKGVSGHSSNGEVYFYYNCPCKDCHRRNIPKDELEGLVIRTVCNDVLQPDVMDRIADSVIEAQTAELNQPNPEKEALQHELADVQRKAKNLLSALENGTAGAMLTNRLSELEQQADTLSYQLSSLESEPKFPVFSKEEVLYLLEQFLIAPSEKTKAYRRRLIDTFVSKIEVSNTELTIYFNIAEEDCGKMKKAPQSNQPEGCSTEKQMVRVARIELTAS

SEQ ID NO: 4951 - protein, 514 aa, Unknown
  Description of Unknown: Integrase B4952 sequence
  cd00338,SM00857,G3DSA:1.10.10.2600,IPR036162,PS51737, G3DSA:3.40.50.1390,IPR006119,IPR038109,PF07508,IPR011109, SSF53041,PTHR30461,PS51736,Coil,PF00239
MEQYAIYLRKSRADAEAEAHGEGETLARHQTALLALAKKLDLFVGAIYKEIVSGETIAARPMMQQLLAEVRQGLWAGVLVMEVERLARGNTMDQGYVAQSFAFRGTKIITPLKTYDPADEYDQEYFEFGLFMSRREYMTINRRIQRGRRASAQEGKYYANVAPYGYARKKLEKQKGFILEPTPEESNVVKMVFDWYLNGPDGVPIGISKIARRLNALHIPPPRIDVWTANTVRSMLQNPTYAGKITWGRRGGVKNVDKNGGVTCSRPRAKEYDLFDGLHTPLVSVETWERVQVRLADHKDMPTPWGRPVQNPLCGLIVCGLCGRKMRRKPGTSTPDFLICAEPQCSCVGSYLSVVEEALLKAMGYWIETHKVPMESAPACESFDNALKNISAERAKLQKQKNSLYDLLEQGLYTPEIFLERSKDISARLSALDADEEGFRAEIAKAQRATELQQRLIPKMSSAIELYRAATDPAEKNRVLKEVLDHVVYTRTAGGRWAPKNNFTLDLFPLYQKE

SEQ ID NO: 4952 - protein, 514 aa, Unknown
  Description of Unknown: Integrase B4953 sequence
  SM00857,IPR036162,PF13408,IPR025827, G3DSA:3.40.50.1390,IPR006119,SSF53041,PTHR30461, Coil,PS51736,cd00338,PF00239
MVKRRAAIYARFSSHNQRSESIEIQVDAGTRYIAENGLELVRVYADYAKTGRNTDRSDYKRMMNDARLGLFDYVVIYKVPRIMRNRDEMALTRIMLRKAGVEILYAGEEIASGSSGVLQLGMLEVLAEWESAVDSERIIDGIQKNAQRCMANGRTLYGWDIVEGRYVINDREAAVLHKMKNMVFAGSIIAEVVRAVANVRTRQGKPINHDRAKKLLLRPQNGGTYSYAGHVVEGGMPALWPKAEQDMLISILGNPRPRRRVDHAAEWPLTGKLYCAECGNTLAGTSGTSKSGTVYAYYKCKKCKRTFRRDILEDAIVDMTICALERPDVRKRIADGMATYEATMEDAPLESERLRKEIKRIDAAFERIWQAIEDGIAPPGGKERIEDLKARKDALETEYQIAKANENIEPGFSELMDWLDNVAEEMNPQEILTMFVRAVQIDKTEVRLYFAFDYYGDNFTPPKKDEHPVKGCSSNSPMVEPSITKANTVISLETCYLQINRNWFAVIGNLQNTR

SEQ ID NO: 4953 - protein, 514 aa, Unknown
  Description of Unknown: Integrase B4954 sequence
  PTHR30461:SF3,SM00857,G3DSA:1.10.10.2600,IPR036162,PF13408, IPR025827,G3DSA:3.40.50.1390,PS51737,IPR006119,IPR038109, PF07508,SSF53041,IPR011109,PTHR30461,Coil, PS51736,cd00338,PF00239
MPTVTVIQPIIAAEQNTKIRCAAYCRVSSDSEDQLNSFMAQTRYYSQVFKDSETEELIDIYADEGITGTREDKRDEFQRMLKDCRRGKIDRIYTKSISRFARNTKDCLKSVRELKALGITIFFEKENIDTANMTDEMMITIMGGLAQEESTSISQNMRWSIKKRMENGTFELSCPPYGYIKENGKLVVDPAQAQTVQNIFSWYLSGYGIISIVNRLNHFNTPCCKRSNKWHMFGVTYILTNEKYTGNTMFQKTYSGTTLPIQRYKNNGERNKYYAVNTHPAIVSQDDFDKVQALMSEKGEIFYKTEKQKCVLRKIMKCGQCGSTYIRKKSRDKYYWSCRKHDLKASECFSKRIPESDIYYAFIRICNKLISNYTQILIPLQTALQYLKLKKFSGQTQVMDIHKEVAKLKEQTHVLARLKTKGFLDEAKYIEQTTELTAKINKLQAELKKLTRSDDEDETLDQIDMLIDFFEKRENPMTEFEETAFESIVEKIVVIDQHELEFHLIGGLKFKENV

SEQ ID NO: 4954 - protein, 514 aa, Unknown
  Description of Unknown: Integrase B4955 sequence
  SM00857,IPR036162,G3DSA:3.40.50.1390,IPR006119,PF07508, SSF53041,IPR011109,PTHR30461,Coil,mobidb-lite, cd00338,PF00239
MRNEYNPIIIKYVAEYLRKSRGETTEDLIKHKTILEELCKSRGWIYVVYEEVETGESLFARPVMQQLLRDVEDNIYDAVVCVDLDRLGRGDLVDWGQIKRVFQKTNTYMVTPSSLYNLNDDNEEFAVDLQTLFARREYKKITHRLSMGKKVGAKLGAWTNGTPPMPYEYQEWIDPATNKRYYNEKGLVVNLQKLSIYRFMVDSFIKDKKSTNEIAWELNRRNIPSPRGGRWCNMTVRRLLVDETHLGKIISNKTKGDGHKNKSPNKQPFQKIPKEQWTVVENRHEAIKTQDEHEKILIGIQKNLKSPYRRSDHYYPLKGLIKCGLCGYGLPLEYKRGKDLVVKKCWHKDYLGNKCPNSSGKAQYIIDAIDEQLKEYEEQIRKEIESCEDQSTDLIQLQIKTIMDKLNKKDIALKRARIAYDEGVDTLDEYRSAKERILKEVDELESQLSIENLKLQKAQSITNHEKLHYIEEFRRSRWEDELDDKELNDLYKTIISSIIWTKQGDNIDIKVNFL

SEQ ID NO: 4955 - protein, 514 aa, Unknown
  Description of Unknown: Integrase B4956 sequence
  PTHR30461:SF3,SM00857,G3DSA:1.10.10.2600,IPR036162, PF13408,IPR025827,G3DSA:3.40.50.1390,PS51737, IPR006119,IPR038109,PF07508,SSF53041, IPR011109,PTHR30461,Coil,PS51736,cd00338,PF00239
MPKKNPSGGKRLVAYYRYSGGSHQTEQSIEGQRRDCETYARIHGMVILHEYIDRHISGKTDDRPEFQQMIADAGKGMFDYVICWKTDRIARSRYDSIVYKKKLRDNGVELLYAAEANVEGSGGIIVEGLMEALAEYYSAELAEKVRRGMRESALKGKAIGSSRPLGLTVDKDKKYIIDPAGAAAVRYIFEQYAAGAASSAIVAHLNEQGLCTSRGNPFNKSSVVRIIQNEVYRGVYVSPKFDVRIEGAVPAIIDDDLWERAQKMFIRNRQSRSPRNDRADYILSGKLFCGECGTAMKGVSGHSSNGEVYFYYNCPCKDCHRRNIPKDELEGLVIRTVCNDVLQPDVMDHIADSVIEAQTAELNQPNPEKEALQHELADVQRKAKNLLSALENGTAGAMLTNRLAELEQQADTLSYQLSSLESEPKFPVFSKEEVLYLLEQFLIAPSEKTKAYRRRLIDTFVSKIEVSNTELTIYFNISEEDCGKMKKAPQSNQPEGCSTEKQMVRVARIELTAS

SEQ ID NO: 4956 - protein, 514 aa, Unknown
  Description of Unknown: Integrase B4957 sequence
  cd03768,PTHR30461:SF3,SM00857,G3DSA:1.10.10.2600,IPR036162, PF13408,PS51737,G3DSA:3.40.50.1390,IPR025827,IPR006119, IPR038109,PF07508,SSF53041,IPR011109,PTHR30461, PS51736,Coil,PF00239
MLRIGIYPRKSVYRDNSDSVQVQITACKDYARLMFKDQELDFRIYDKDEGFSGKNTHRPSFTELMADVKADELDIIIVYKLDRISRSVKDFSEIYETLQQHNVSFLSVKESFDTSTPMGRTVMYILSAFAQLERENTAERVADNMASLGEAGKWTGGTLPPGMTSVRKKIGDKTHSYLIVDEQRIKTVKYIFSLMLSGTSITKLERTLRTEGIRTERDAFYSCSKLYNLFTNPVYCANDMDAYYYFLEKGYKLPDPALFDGRHGLIGYGRTTQSNGTTVRKDTYSIAIGIHDPILSGADWIAIQKRLGQNKSTRYAKYEAGILKGTLRCKCGVKMNIRTYKKNGSLFSYYYCPKMAREGVSACDTGYTRVDDIDDRFLQELKKIKLSPDSIELEENVSYVDTGKMRADLKKTIDSIRNLMNALSGSADSAAAKYIIAELESLDKEKSVLEKKLRAAEQRNRRAAVSAETKEFVYHRICNLLDNMDSMSYTEINELIRSIVKSCVFDGDHLDVTF

SEQ ID NO: 4957 - protein, 514 aa, Unknown
  Description of Unknown: Integrase B4958 sequence
  PTHR30461:SF3,SM00857,G3DSA:1.10.10.2600,IPR036162,PF13408, IPR025827,G3DSA:3.40.50.1390,PS51737,IPR006119,IPR038109, PF07508,SSF53041,IPR011109,PTHR30461,Coil, PS51736,cd00338,PF00239
MPKKNPSGGKRLVAYYRYSGGSHQTEQSIEGQRRDCETYARIHGMVILHEYIDRHISGKTDDRPEFQQMIADAGKGMFDYVICWKTDRIARSRYDSIIYKKKLRDNGVELLYAAEANVEGSGGIIVEGLMEALAEYYSAELAEKVRRGMRESALKGKAIGSSRPLGLTVDKDKKYIIDPAGAAAVRYIFEQYAAGAASSAIVAHLNEQGLCTSRGNPFNKSSVVRIIQNEVYRGVYVSPKFDVRIEGAVPAIIDDDLWERAQKMFVRNRQSRSPRNDRADYILSGKLFCGECGTAMKGVSGHSSNGEVYFYYNCPCKDCHRRNIPKDELEGLVIRTVCNDVLQPDVMNRIADSVIEAQTAELNQPNPEKEALRHELADVQRKAKNLLSALENGTAGAMLTSRLAELEQQADTLSYQLSSLESEPKFPVFSKEEVLYLLEQFLIAPSEKTKAYRRRLIDTFVSKIEVSNTELTIYFNIAEEDCGKMKKAPQSDQPEGCSTEKQMVRVARIELTAS

SEQ ID NO: 4958 - protein, 514 aa, Unknown
  Description of Unknown: Integrase B4959 sequence
  PTHR30461:SF3,SM00857,G3DSA:1.10.10.2600,IPR036162,PF13408, IPR025827,G3DSA:3.40.50.1390,PS51737,IPR006119,IPR038109, PF07508,SSF53041,IPR011109,PF00239,PTHR30461, PS51736,Coil,cd00338
MKTAVIYARYSSDKQTEQSIEGQLYDCYNYAKQHGITVVQEYIDRAMTGKNDDRPAFQQMLHESAMHKWDSVIVWKLDRFARNTIDSAVNRQILAKNGVKLLSVMESFGDDASGQMMTHIIEAINEYYSADLREKTIRGMRQSAMKAQTTGHIPLGYKVVDKKLVIDDETRIIPETVFRMYAEGERLTDIAEHLNAQGYRNRRGRPFTTNSFYNMLANEKYIGIYKYDDIVIEGGIPQMIPNEVFEAVREKLITNRKRAAKNTAKADYYLSGKLYCGHCGEPMSGLSGTGRNGVKHYYYRCNGVQKKSGCHKKLENKYLIEDEVCRAARSAFEQMDKAETAETIYQMYLQTVRNEYAPAELEKELTECTKQAENVVNAIAQTGGNQLLFDKVRELEERKEQLGSALRLSQAMTDNVPSVEQIAVFIDDILATDINTTEGKKAIADIMISKVYVYDDKLTVIFKDKDGKSVDIPLSAVSDSSSADCAPSALGSQNKSIQTVSIICGCMAVTKRRE

SEQ ID NO: 4959 - protein, 514 aa, Unknown
  Description of Unknown: Integrase B4960 sequence
  cd03768,PTHR30461:SF3,SM00857,G3DSA:1.10.10.2600,IPR036162, PF13408,IPR025827,PS51737,G3DSA:3.40.50.1390,IPR006119, IPR038109,PF07508,SSF53041,IPR011109,PTHR30461, PS51736,Coil,PF00239
MLRIGIYPRKSVYRDNSDSVQVQITACKDYARLMFKDQELDFRIYDKDEGFSGKNTHRPSFTELMADVKADELDIIIVYKLDRISRSVKDFSEIYETLQQHNVSFLSVKESFDTSTPMGRTVMYILSAFAQLERENTAERVADNMASLGEAGKWTGGTLPPGMTSIRKKIGDKTHSYLIVDKQRIKTVKYIFSLMLSGTSITKLEHTLRQDGIRTERDAFYSCSKLYNLFTNPVYCANDMDAYYYFLEKGYKLPDPALFDGRHGLIGYGRTTQSNGTTVRKDTYSIAIGIHDPILSGADWIAIQKRLGQNKSTRYAKYEAGILKGTLRCKCGVKMNIRTYKKNGSLFSYYYCPKMAREGVSACDTGYTRVDDIDDRFLQELKKIKLSPDSIELEENVSYVDTGKMRADLKKTTDSIRNLMNALSGSADSAAAKYIIAELEALDKEKSVLEKKLRTAEQRNRRAAVSAETKEFVYHRICNLLDNMDSMSYTEINELIRSIVKSCVFDGDHLDVTF

SEQ ID NO: 4960 - protein, 514 aa, Unknown
  Description of Unknown: Integrase B4961 sequence
  PTHR30461:SF3,cd00338,SM00857,G3DSA:1.10.10.2600,IPR036162, PF13408,IPR025827,G3DSA:3.40.50.1390,PS51737,IPR006119, IPR038109,PF07508,IPR011109,SSF53041,PTHR30461, PS51736,Coil,PF00239
MAKRKFNKGGEVRLVAYYRYSGGSGQTEQSIEGQRRDCETYARLHNMTIQKEYVDRHISGKTDDRAAFQQMITDSDKGAFDMVICWKTDRFARNRYDSAVYKKRLRDNGVEIVYAAESNIAGAEGIIIEGVMEALAEYYSAELAEKMRRGMRESALKGQAISRCRALGLKTDEHKRFVIDEKTAPTVRFIFEHYAAGESATSIVDKLNAKGLRTSQGNPFNKSSIPRIIQNEAYRGVYISKSYDVRIEGAIPAIIDDELWERAQTMLKLNRQLKAKNEPKADYILSGKLYCSCGSLMRGMSGHSATGEVYRYYTCPNKDCHLRNIPKDDLEGKVMQSIVDHLLQPESMEALAEAMVEVQKADVEKPNAERVAIEQSLSDVRRRSKNILDAIENGTANAQLCARLDDLTEQEQTLSFQLSSLEKEKPVVFTKEQYLFLLEQFLMEPSERTPEYGRRLVNTFVTSMVVSGHELVINFNVSDETVNKNKKTSQTNLQKESSSGMRLVRVARIELTAS

SEQ ID NO: 4961 - protein, 514 aa, Unknown
  Description of Unknown: Integrase B4962 sequence
  SM00857,G3DSA:1.10.10.2600,IPR036162,PS51737,G3DSA:3.40.50.1390, IPR006119,IPR038109,PF07508,IPR011109,SSF53041, PTHR30461,Coil,PS51736,cd00338,PF00239
MRTEYAIYLRKSRADLEAEAHGEGDTLARHEHILMELAKSRALPIGAIYREIVSGERIANRPVMQQLLSEVEDGRWKGVLVTETSRLARGDTIDQGIVAQAFKFSGTLIVTPAKTYDHPQEADEEWMEFGLFMSRQEYRMIRRRQLAGTRASKKEGHYVPGRPPYGYERYKLDGRGWSLRPVEPQAGVIRTIYDMYLSGKGFSEIANELNAMKIRTPLDKKWVPATTRAILQNPHYAGFIPSAMKVNTKIVQKGKLITKRPVNKNCELYEGIHEAIIPRDVWNSVQQRMKDTVTPRVPRKYQQMNPLAGLVYCDQCGKLMSRHPYRREDKVRFGCENPSCSTVSSLFEDVENLVLQSLREFLHEIELSSPTLLDTKSEEIALQNIEKQLTDINHRLQRTYELLEDGVYSKETFLQRQSAISQDQTALLNTKHEIERKLHNKQTDIEAQKNSAPLIRHVLDVYPTLEDPKEQNLLLKQVIRRIDYHKTVRVYGKAKSDLHLTIHPKIAIPQTSNI

SEQ ID NO: 4962 - protein, 514 aa, Unknown
  Description of Unknown: Integrase B4963 sequence
  PTHR30461:SF3,SM00857,G3DSA:1.10.10.2600,IPR036162,PF13408, PS51737,IPR025827,G3DSA:3.40.50.1390,IPR006119,IPR038109, PF07508,IPR011109,SSF53041,PF00239, PTHR30461,PS51736,Coil,cd00338
MARSKKTECLPLERIGVIYARYSSHNQKEESIEQQVEECTSFALLNGIKIVHVYADKALSGRTDKRPQFQRLMRDAEKRSFSVVVAYKSNRIARDMLNALKYEDRLGKYGIETLYAKEEFGNTAAGRFALRTMMNVNQFYSENMAEDIKRGMLDNAENCKVNGALPLGYVSGPDKRYAIEPKEAEIVRGIYDKVLEGVSFADIANDLNACGVRTKHGSLWNKCSFHRILTNDVYIGVYRHSGVVKEGGVPPILEREVFIAMQKYLETKKNPRGRHRENGDYLLTGKLRCGYCESFMVGVSGTSKTGDKHYYYTCNSRHAGSGCKKENVRRDTIEYTVAALTQQVVFKEDIIEWIATAAVKLAKEASGQNEIDAMEAELAEDRKATKNIMAAIEQGIFTATTKSRLLELEADIASLEQSIRDAKAISEGKLLEKERVVYFLTSLREGNLHSKTYQKRLIDTFVRAVYLWDDRIGIDYYYAGKDSMVKYSLSEIEADIGENIREVLKDSLTGHQVS

SEQ ID NO: 4963 - protein, 514 aa, Unknown
  Description of Unknown: Integrase B4964 sequence
  PTHR30461:SF3,SM00857,G3DSA:1.10.10.2600,IPR036162,PF13408, PS51737,G3DSA:3.40.50.1390,IPR025827,IPR006119,IPR038109, PF07508,IPR011109,SSF53041,PTHR30461,Coil, PS51736,cd00338,PF00239
MRRKKVEGGNRLVAYYRYSGGSGQTEQSIEGQRRDCENYAKLHGLTILHEYIDRHISGKTDDRAAFQQMMNDGDKGAFDMVICWKTDRFARNRYDSAVYKKRLRDNGIEILYAAESNVEGAEGIIIEGLMEALAEYYSAELAEKMRRGMRESALKGQAINRCRSLGLTTDENKKYVIDEKTAPTVRFIFEHYAAGESSTSIVEQLNAKGLRTSQGNPFNKCSIPRIIQNEMYRGVYTSKAYNVRIEGAIPAIIDDDLWKRAQAMMKTNRQLKAKYEPKAEYLLSGKLFCAKCGCTMKGVSGHSGGNGEVYRYYACSNPQCRKRNIPKDDLEGKVIRSICDHLLQPETMELLAETMVDVQKADMEKPNAERDVLEQELRDVRRRSKNIMDAIETGSANPQLVARLDDLTQQENTLTYQLSTMEAEKPLLFTKEQYLFLLQQFYAQPTEQDDAYKRRLINTFVTNIEVSDSELLIYFNISEETENKNKNAPQLNFDKSSSTEKRLVRVARIELTAS

SEQ ID NO: 4964 - protein, 514 aa, Unknown
  Description of Unknown: Integrase B4965 sequence
  PTHR30461:SF3,SM00857,G3DSA:1.10.10.2600,IPR036162,PF13408, IPR025827,G3DSA:3.40.50.1390,PS51737,IPR006119,IPR038109, PF07508,IPR011109,SSF53041,PTHR30461,Coil, PS51736,cd00338,PF00239
MPKKNPSGGKRLVAYYRYSGGSHQTEQSIEGQRRDCETYARIHGMVILHEYIDRHISGKTDDRPEFQQMIADSGKGMFDYVICWKTDRIARSRYDSIIYKKKLRDNGVELLYAAEANVEGSGGIIVEGLMEALAEYYSAELAEKVRRGMRESALKGKAIGSSRPLGLTVDKDKKYIIDPAGAAAVRYIFEQYAAGAASSAIVAHLNEQGLCTSRGNPFNKSSVVRIIQNEVYRGVYVSPKFDVRIEGAVPAIIDDDLWERAQKMFIRNRQSRSPRNDRADYILSGKLFCGECGTAMKGVSGHSSNGEVYFYYNCPCKDCHRRNIPKDELEGLVIRTVCNDVLQPDVMDRIADSVIEAQTAELNQPNPEKEALQHELADVQRKAKNLLSALENGTAGAMLTNRLAELEQQANTLSYQLSSLESEPKFPVFSKEEVLYLLEQFLIAPSEKTKAYRRRLIDTFVSKIEVSNTELTIYFNIAEEDCGKMKKAPQSNQPEGCSTEKQMVRVARIELTAS

SEQ ID NO: 4965 - protein, 514 aa, Unknown
  Description of Unknown: Integrase B4966 sequence
  PTHR30461:SF3,IPR036162,PS51737,IPR011109,PTHR30461, PF00239,G3DSA:1.10.10.2600,IPR006119,SSF53041,cd00338, SM00857,IPR025827,IPR038109,mobidb-lite,PS51736, PF13408,G3DSA:3.40.50.1390,PF07508,Coil
MAKKKKPAGGNAIIYARYSSHNQRDVSIEQQIEACRKHAAELGLTITDTYEDRAISGRTDNRPAFQRMMRDAEDGRFQYVLAWKSNRMGRNMMQAMVNESRLMDCGVKVFYAEEDFDDSAAGRFALRSMMNVNQFYSDNLAEDVRRGLMDNASKCMANGRQPLGYKRGEDGKVVVDEPAAAIVREIYTRIASGEMFMDIARDLNRRGIKTQSGSEWNKSSFKVLCRNERYRGIYIYGDTRIEGGIPPIVDDVLWYKVQEVLNVKKSKNRHHCPSDEDYLLTGKLRCGKCGGYMIGMSGRSKTGDVHHYYACQNRRVGHTCDKKNIRRDVIEPAVAQAIKQYCLTDDAIEWITDQTIAYWEDEDRKLQIDSIENDLSAVQSSISNVMKAIEMGVITETTRDRLIELERQQTDLKSKLALAKEEIVHVDRKDLISSLLAFRHGNVHDRAYQEKLFNAFLIAVYVYDDDHLKLVFNSFGKDDTVNIALDLGENDDNSGLSDVSKSSPILSNGQPKTT

SEQ ID NO: 4966 - protein, 514 aa, Unknown
  Description of Unknown: Integrase B4967 sequence
  PTHR30461:SF3,SM00857,G3DSA:1.10.10.2600,IPR036162,PF13408, PS51737,G3DSA:3.40.50.1390,IPR025827,IPR006119,IPR038109, PF07508,IPR011109,SSF53041,PTHR30461,Coil, PS51736,cd00338,PF00239
MRKKKVKGGNRLVAYYRYSGGSGQTEQSIEGQRRDCENYANLHGLTILHEYIDRHISGKTDDRAAFQQMMNDGDKGAFDMVICWKTDRFARNRYDSAVYKKRLRDNGIEILYAAESNVEGAEGIIIEGLMEALAEYYSAELAEKMRRGMRESALKGQAINRCRSLGLTTDENKKYVIDEKTAPTVRFIFEHYAAGESSTSIVDQLNAKGLRTSQGNPFNKCSIPRIIQNEMYRGVYTSKAYNVRIEGAIPAIIDDDLWKRAQAMMKTNRQLKSKYEPKAEYLLSGKLFCAKCGCTMKGVSGHSGGNGEVYRYYACSNPQCRKRNIPKDDLEGKVIRSICDHLLQPETMELLAETMVEVQKADMEKPNAERDVLEQELRDVRRRSKNIMDAIETGSANPQLVARLDDLTQQENTLTYQLSTMEAEKPLLFTKEQYLFLLQQFYAQPTEQDDAYKRRLINTFVTNIEVSDSELLIYFNISEETENKNKNASQLNFDKSSSTEKRLVRVARIELTAS

SEQ ID NO: 4967 - protein, 514 aa, Unknown
  Description of Unknown: Integrase B4968 sequence
  cd00338,SM00857,G3DSA:1.10.10.2600,IPR036162,PS51737, G3DSA:3.40.50.1390,IPR006119,IPR038109,PF07508,SSF53041, IPR011109,PTHR30461,PS51736,Coil,PF00239
MQMEYAMYLRKSRADLEAEAHGEGDTLARHEHILMELAKSRALPIGAIYREIVSGERIANRPVMQQLLAEVEDGRWKGVLVTETSRLARGDTIDQGIVAQAFKFSGTLIVTPAKTYDPTQEADEEWMEFGLFMSRQEYRMIRRRQLAGTRASKKEGHYVPGRPPYGYERYKLDGRGWSLRPVEPQASVIRTIYDMYLSGKGFSEIANELNAMKIRTPLDKKWVPATTRAILQNPHYAGFIPSAMKVNTKIVQKGKLITKRPVNKNCELYEGIHEAIIPRDVWYSVQQRMKDTVTPRVPRKYQQMNPLAGLVYCDQCGKLMSRHPYRREDKVRFGCENPSCSTVSSLFEDVESLVLQSLREFLHEIELSSPTLLDTKSEEIALQNIEKQLTDINHRLQRTYELLEDGVYSKETFLQRQSAISQDQTALLNTKHEIERKLHNKQTDIEAQKNSAPLIRHVLDVYPTLEDPKEQNLLLKQVIRRIDYHKTVRVYGKAKSDLHLTIHPKIAIPQTSNI

SEQ ID NO: 4968 - protein, 514 aa, Unknown
  Description of Unknown: Integrase B4969 sequence
  PTHR30461:SF3,cd00338,SM00857,G3DSA:1.10.10.2600,IPR036162, PF13408,PS51737,G3DSA:3.40.50.1390,IPR025827,IPR006119, IPR038109,PF07508,SSF53041,IPR011109, PTHR30461,PS51736,Coil,PF00239
MSVDIKWNVPQKGKEGDLAAVYARYSSHSQGEQSIEGQLAEAQKYAAAHGYTIVHEYVDRAKSGRTDNREEFQRMLKDTAKKQFNVIILWKVDRFGRNREEIAINKMKCRKNGVRVEYVAETIPNTPEGVILESVLEGFAEYYSLQLSQNIRRGIAESAEKCQVTGGNRPLGYKTGPDKKFEIDEDTAPTVRLIFKMYADGATVTEIVAKLNELGLRTLRGGKFTHNSLHTILKNEKYIGIYNNHGKHIEGGVPRLIDDELFYKAQEMLKVNKRAPAKTWARADYLLADKAFCGKCGAPMFGESGTSKTGARHNYYICSHKKRFKTCDKKAVRQADVEDLVIKATCDLLADTELLDFIIENTWQYYLAQDNSQEELRNLTRQLEQTDLAIKNLIRAIEAGILTDETKSRMDELTTQKAELKAAIADRELARGFHLQREHIAFYLYDLRNADRTDREVQKRLIQTFVNSVFVFDDCVKLTFNFSGNKSVVTLKMLQAAEAGEVFGCYASCSTNAR

SEQ ID NO: 4969 - protein, 514 aa, Unknown
  Description of Unknown: Integrase B4970 sequence
  SM00857,G3DSA:1.10.10.2600,IPR036162,PS51737,G3DSA:3.40.50.1390, IPR006119,IPR038109,PF07508,SSF53041,IPR011109, PTHR30461,Coil,PS51736,cd00338,PF00239
MSTEYAIYLRKSRADLEAEAHGEGDTLARHEHILMELAKTRALPIGAIYREIVSGERIANRPVMQQLLSEVEDGRWKGVLVTETSRLARGDTIDQGIVAQAFKFSGTLIVTPAKTYDPTQEADEEWMEFGLFMSRQEYRMIRRRQLAGTRASKKEGHYVPGRPPYGYERYKLDGRGWSLRPVEPQAGVIRTIYDMYLSGKGFSEIANELNAMKIRTPLDKKWVPATTRAILQNPHYAGFIPSAMKVNTKIVQKGKLITKRPVNKNCELYEGIHEAIIPRDVWYSVQQRMKDTVTPRVPRKYQQMNPLAGLVYCDQCGKLMSRHPYRREDKVRFGCENPSCSTVSSLFEDVESLVLQSLREFLHEIELSSPTLLDTKSEEIALQNIEKQLTDINHRLQRTYELLEDGVYSKETFLQRQSAISQDQTALLNTKHEIERKLHNKQTDIEAQKNSAPLIRHVLDVYPTLEDPKEQNLLLKQVIRRIDYHKTVRVYGKAKSDLHLTIHPKIAIPQTSNI

SEQ ID NO: 4970 - protein, 514 aa, Unknown
  Description of Unknown: Integrase B4971 sequence
  SM00857,IPR036162,G3DSA:3.40.50.1390,IPR006119, PF07508,IPR011109,SSF53041,PTHR30461, Coil,mobidb-lite,cd00338,PF00239
MRNEYNPIIIKYVAEYLRKSRGETTEDLIKHKTILEELCKSRGWVYVVYEEVETGESLFARPVMQQLLRDAEDNIYDAVVCVDLDRLGRGDLVDWGQIKRVFQKTNTYMVTPSSLYNLNDDNEEFAVDLQTLFARREYKKITHRLSMGKKVGAKLGAWTNGTPPMPYEYQEWIDPATNKRYYNEKGLVVNLQKSSIYRFMVDSFIKDKKSTNEIAWELNRRNIPSPRGGRWCNMTVRRLLVDETHLGKIISNKTKGDGHKNKSPNKQPFQKIPKEQWTVVENRHEAIKTQDEHEKILIGIQKNLKSPYRRSDHYYPLKGLIKCGLCGYGLPLEYKRGKDLIVKKCWHKDYLGNKCPNSSGKAQYIIDAIDEQLKEYEEQIRKEIESCEDQSTDLIQLQIKTIMDKLNKKDIALKRARIAYDEGVDTLDEYRSAKERILKEVDELESQLSIENLKLQKAQSITNHEKLHYIEEFRRSRWEDELGDKELNDLYKTIISSIIWTKQGDNIDIKVNFL

SEQ ID NO: 4971 - protein, 514 aa, Unknown
  Description of Unknown: Integrase B4972 sequence
  cd03768,PTHR30461:SF3,SM00857,G3DSA:1.10.10.2600,IPR036162, PF13408,IPR025827,G3DSA:3.40.50.1390,PS51737,IPR006119, IPR038109,PF07508,SSF53041,IPR011109,PTHR30461, PS51736,Coil,PF00239
MLRIGIYPRKSVYRDNSDSVQVQITACKDYARLMFKDQELDFRIYDKDEGFSGKNTHRPSFTELMADVKADELDIIIVYKLDRISRSVKDFSEIYETLQQHNVSFLSVKESFDTSTPMGRTVMYILSAFAQLERENTAERVADNMASLGEAGKWTGGTLPPGMTSVRKKIGDKTHSYLIVDEQRIKTVKYIFSLMLSGTSITKLERTLRTEGIRTERDAFYSCSKLYNLFTNPVYCANDMDAYYYFLEKGYKLPDPALFDGRHGLIGYGRTTQSNGTTVRKDTYSIAIGIHDPILSGADWIAIQKRLGQNKSTRYAKYEAGILKGTLRCKCGVKMNIRTYKKNGSLFSYYYCPKMAREGVSACDTGYTRADDIDDRFLQELKKIKLSPDSIELEENVSYVDTGKMRADLKKTTDSIRNLMNALSGSADSAAAKYIIAELEALDKEKSVLEKKLRTAEQRNRRAAVSAETKEFVYHRICNLLDNMDSMSYTEINELIRSIVKSCVFDGDHLDVTF

SEQ ID NO: 4972 - protein, 514 aa, Unknown
  Description of Unknown: Integrase B4973 sequence
  SM00857,G3DSA:1.10.10.2600,IPR036162,PF13408,IPR025827, PS51737,G3DSA:3.40.50.1390,IPR006119,IPR038109,PF07508, SSF53041,IPR011109,PTHR30461,Coil,PS51736, cd00338,PF00239
MQMEYAIYLRKSRADLEAEAHGEGDTLARHEHILMELAKSRALPIGAIYREIVSGERIANRPVMQQLLSEVEDGRWKGVLVTETSRLARGDTIDQGIVAQAFKFSGTLIVTPSKTYDPTQEADEEWMEFGLFMSRQEYRMIRRRMTAGMQAAKREGRYISNVPPYGYERYKLDGRGWSLRPIEPQAKVVRMIFDLYLSGLGYCEIEKRLNALHIPAPKSDKWSARTIPGILRNAHYIGCIPAAFRPGKKVVKDGQITVTRPRNHNCELYKGLHEPIIDRAVWDQVQARLGKNAAVRTPGNRQQSNPLAGLIVCDCCGKRMQRRPQTSTSSQTQIQCTTRGCATVAHNADELEQLVLDSLRTFLAQIEVGTPVALDLSAEQHALSEIEKSLTDLEARQRRTFELVEDGTYTREIFLSRQAELTAERERLTADRAAIQQRIEQAQHEYDARTGLAPAVRHVLDTYNTDLPAADRNKLLKQVIERIDYHKRTRTRWTKERDLSLTLHPVVFSSSTNR

SEQ ID NO: 4973 - protein, 514 aa, Unknown
  Description of Unknown: Integrase B4974 sequence
  SM00857,G3DSA:1.10.10.2600,IPR036162,PS51737,G3DSA:3.40.50.1390, IPR006119,IPR038109,PF07508,IPR011109,SSF53041, PTHR30461,Coil,PS51736,cd00338,PF00239
MSTEYALYLRKSRADLEAEAHGEGDTLARHEHILMELAKSRALPIGAIYREIVSGERIANRPVMQQLLSEVEDGRWKGVLVTETSRLARGDTIDQGIVAQAFKFSGTLIVTPSKTYDPTQEADEEWMEFGLFMSRQEYRMIRRRQLAGTRASKKEGHYVPGRPPYGYERYKLDGRGWSLRPVEPQAGVIRTIYDMYLSGKGFSEIANELNAMKIRTPLDKKWVPATTRAILQNPHYAGFIPSAMKVNTKIVQKGKLITKRPVNKNCELYEGIHEAIIPRDVWNSVQQRMKDTVTPRVPRKYQQMNPLAGLVYCDQCGKLMSRHPYRREDKVRFGCENPSCSTVSSLFEDVESLVLQSLREFLHEIELSSPTHLDTKSEEIALQNIEKQLTDINHRLQRTYELLEDGVYSKETFLQRQSAISQDQTALLNTKHEIERKLHNKQTDIEAQKNSAPLIRHVLDVYPTLEDPKEQNLLLKQVIRRIDYHKTVRVYGKAKSDLHLTIHPKIAIPQTSNI

SEQ ID NO: 4974 - protein, 514 aa, Unknown
  Description of Unknown: Integrase B4975 sequence
  SM00857,G3DSA:1.10.10.2600,IPR036162,PS51737, G3DSA:3.40.50.1390,IPR006119,IPR038109,PF07508, SSF53041,IPR011109,PTHR30461,Coil, PS51736,cd00338,PF00239
MSTEYAIYLRKSRADLEAEAHGEGDTLARHEHILMELAKSRALPIGAIYREIVSGERIANRPVMQQLLSEVEDGRWKGVLVTETSRLARGDTIDQGIVAQAFKFSGTLIVTPSKTYDPTQEADEEWMEFGLFMSRQEYRMIRRRQLAGTRASKKEGHYVPGRPPYGYERYKLDGRGWSLRPVEPQAGVIRTIYDMYLSGKGFSEIANELNAMKIRTPLDKKWVPATTRAILQNPHYAGFIPSAMKVNTKIVQKGKLITKRPVNKNCELYEGIHEAIIPRDVWYSVQQRMKDTVTPRVPRKYQQMNPLAGLVYCDQCGKLMSRHPYRREDKVRFGCENPSCSTVSSLFEDVESLVLQSLREFLHKIELSSPALLDTKSEEIALQNIEKQLTDINRRLQRTYELLEDGFYSKETFLQRQSAISQDQTALLNTKHEIERKLHNKQTDIEAQKNSAPLIRHVLDVYPTLEDPKEQNLLLKQVIRRIDYHKNVRVYGKAKSDLHLTIHPKIAIPQTSNI

SEQ ID NO: 4975 - protein, 514 aa, Unknown
  Description of Unknown: Integrase B4976 sequence
  SM00857,G3DSA:1.10.10.2600,IPR036162,PS51737,G3DSA:3.40.50.1390, IPR006119,IPR038109,PF07508,SSF53041,IPR011109, PTHR30461,Coil,PS51736,cd00338,PF00239
MSTEYAIYLRKSRADLEAEAHGEGDTLARHEHILMELAKSRALPIGAIYREIVSGERIANRPVMQQLLSEVEDGRWKGVLVTETSRLARGDTIDQGIVAQAFKFSGTLIVTPSKTYDPTQEADEEWMEFGLFMSRQEYRMIRRRQLAGTRASKKEGHYVPGRPPYGYERYKLDGRGWSLRPVEPQAGVIRTIYDMYLSGKGFSEIANELNAMKIRTPLDKKWVPATTRAILQNPHYAGFIPSAMKVNTKIVQKGKLITKRPVNKNCELYEGIHEAIIPRDVWYSVQQRMKDTVTPRVPRKYQQMNPLAGLVYCDQCGKLMSRHPYRREDKVRFGCENPSCSTVSSLFEDVESLVLQSLREFLHEIELSSPALLDTKSEEIALQNIEKQLTDINRRLQRTYELLEDGVYSKETFLQRQSAISQDQTALLNTKHEIERKLHNKQTDIEAQKNSAPLIRHVLDVYPTLEDPKEQNLLLKQVIRRIDYHKTVRVYGKAKSDLHLTIHPKIAIPQTSNI

SEQ ID NO: 4976 - protein, 514 aa, Unknown
  Description of Unknown: Integrase B4977 sequence
  SM00857,IPR036162,G3DSA:3.40.50.1390,IPR006119, PF07508,SSF53041,IPR011109,PTHR30461, Coil,mobidb-lite,cd00338,PF00239
MRNEYNPIIIKYVAEYLRKSRGETTEDLIKHKTILEELCKSRGWVYVVYEEVETGESLFARPVMQQLLRDVEDNIYDAVVCVDLDRLGRGDLVDWGQIKRVFQKTNTYMVTPSSLYNLNDDNEEFAVDLQTLFARREYKKITHRLSMGKKVGAKLGAWTNGTPPMPYEYQEWIDPATNKRYYNEKGLVVNLQKLSIYRFMVDSFIKDKKSTNEIAWELNRRNIPSPRGGRWCNMTVRRLLVDETHLGKIISNKTKGDGHKNKSPNKQPFQKIPKEQWTVVENRHEAIKTQDEHEKILIGIQKNLKSPYRRSDHYYPLKGLIKCGLCGYGLPLEYKRGKDLIVKKCWHKDYLGNKCPNSSGKAQYIIDAIDEQLKEYEEQIRKEIESCEDQSTDLIQLQIKTIMDKLNKKDIALKRARIAYDEGVDTLDEYRSAKERILKEVDELESQLSIENLKLQKAQSITNHEKLHYIEEFRRSRWEDELDDKELNDLYKTIISSIIWTKQGDNIDIKVNFL

SEQ ID NO: 4977 - protein, 514 aa, Unknown
  Description of Unknown: Integrase B4978 sequence
  PTHR30461:SF3,SM00857,G3DSA:1.10.10.2600,IPR036162,PF13408, PS51737,IPR025827,G3DSA:3.40.50.1390,IPR006119,IPR038109, PF07508,IPR011109,SSF53041,PTHR30461,Coil, PS51736,cd00338,PF00239
MRRKKVEGGNRLVAYYRYSGGSGQTEQSIEGQRRDCENYARLHGLTIVHEYIDRHISGKTDDRAAFQQMMNDGDKGAFDMVICWKTDRFARNRYDSAVYKKRLRDNGIEILYAAESNVEGAEGIIIEGLMEALAEYYSAELAEKMRRGMRESALKGHAINRCRSLGLTTDENKKYVIDEKTAPTVRFIFEHYAAGESSTSIVEQLNAKGLRTSQGNPFNKCSIPRIIQNEMYRGVYTSKAYNVRIEGAIPAIIDDDLWKRAQAMMKTNRQLKAKYEPKAEYLLSGKLFCAKCGCTMKGVSGHSGGNDEVYRYYACSNPQCRKRNIPKDDLEGKVIRSICDHLLQPETMELLAETMVDVQKADMEKPNAERDVLEQELWDVRRRSKNIMDAIETGSANPQLVARLDDLTQQENTLTYQLSTMEAEKPLLFTKEQYLFLLQQFYAQPTEQDDAYKRRLINTFVTNIEVSDSELLIYFNISEETENKNKNASQSNFDKSSSTEKRLVRVARIELTAS

SEQ ID NO: 4978 - protein, 514 aa, Unknown
  Description of Unknown: Integrase B4979 sequence
  PTHR30461:SF3,SM00857,G3DSA:1.10.10.2600,IPR036162,PF13408, IPR025827,G3DSA:3.40.50.1390,PS51737,IPR006119,IPR038109, PF07508,IPR011109,SSF53041,PF00239,PTHR30461, Coil,cd00338
MNTVIYARYSAGPRQTDQSIEGQLRVCTDFCKQRGLTVIDAYCDRHISGRTDERPEFQRLITDAKRKKFEAVVVYKTDRFARNKYDSAVYKRELKRNGIQIFYAAEAIPDGPEGIILESLMEGLAEYYSAELAQKIKRGMHESALKCQSTGSGRPLGYRVDEQKHFQIAPESAQTVQTIFEQYIKGESNAAICELLNSRGLRTAQGKPFNKNSINRIIKNRKYIGEYRYHDIVVEGGMPAIISKDTFNLAQAEMERRRTRKAPKSPKAEYLLAGRLFCGHCKGPMQGVSGTGKSGNKWYYYYCGNTRGENKTCDKKQVSRDRLERAVVDFTVRYILQEEVLEELARKVHAAQERQNDTASEIAFYEKKLADNKKSIANVLRAIESGAMTQTLPARLQELENEQAVILGEISFLKGKRLAFTEDQIFFALMKHLEPYPGESEQDYRRRIISDFVSEVYLYDDRLLIYFNISSEDGKLKSADLSNIEGGEFDEGLVSSTTSQKIRTLSSMVIRSDF

SEQ ID NO: 4979 - protein, 513 aa, Unknown
  Description of Unknown: Integrase B4980 sequence
  PTHR30461:SF3,SM00857,G3DSA:1.10.10.2600,IPR036162,PF13408, IPR025827,G3DSA:3.40.50.1390,PS51737,IPR006119,IPR038109, PF07508,IPR011109,SSF53041,PF00239,PTHR30461, PS51736,Coil,cd00338
MAKRLHGALICARYSTDNQNPDSIEVQVAKCTEWCHTHNIPVLGVYADEATSGMKDTRPRYAAMMRDLRDGVGDMVVIYDQSRMFRKMTSWFSFRDQLTQMGVDVVSVTQPMIGKDLRDPTNFLTEGSMALFNQIWALQSRQKVMEKMRFMAKNGQHTGGKPALGYEVVDGQLAICEAEAKIVRRIFEEYGSGKSYREIVAGLNADGIKTKRGSAFGANSLHDLLKNEKYIGTLVYGQRPYREDGTRNTHAAAADSIRIENAIPAIIDKELFAKVQDKMAANKRQQGGRPPTKRDYPLKGKVVCAECKSAMTISTSQKIYDYYKCSGKKRRHDCDGVNISVDVLERTVANAVRQVLGSPKNVERLITILRDQSGEIQAQAVDALRQLIAREREISRKLDNATDAILGGLSSPTLLARVKDLEQEKTEIDRQMRELKATVDASAIPETRLREIIDEISGDNPAGNAALLAIVCRVEVAKDTITIWTMLDTHPDGTFDWSEEGVLITPGTTSGVP

SEQ ID NO: 4980 - protein, 513 aa, Unknown
  Description of Unknown: Integrase B4981 sequence
  PTHR30461:SF3,cd00338,SM00857,G3DSA:1.10.10.2600,IPR036162, PF13408,PS51737,G3DSA:3.40.50.1390,IPR025827,IPR006119, IPR038109,PF07508,IPR011109,SSF53041,PTHR30461, PS51736,Coil,PF00239
MAKAKQKAATNDISKLAVIYARYSSHNQTEQSIEGQLAAGHRYADLKGYTVVHEYIDRAMTGRNDNRDDFQKMLSDTSKKQFGAIIVWKVDRFGRNREEITFNKYRCKKNGVRVEYVAENLPDSPEGVILESVLEGMAEYYSLQLSQNVQRGLLESAKKHQVIGGNVPLGLMMDAHKKYVPDLKTAPTVKLIFDMYAEGSTTSEIINHLNSIGMRTKAGKPFTKSSLTTVLKNEKYIGVYKYKDIIRDEGVIPPIVDKEIFYKVQELLKVNRRMPSHKWSYSDYILTDKLFCGKCGTAMVGESGFGKMGVKYSYYICAKRRKDKTCDKKPVRQEWIEEIVLQRVQGILQNEELLEFIAENTWQYYLAQDESMEKLKGLQTELDKVEKSAANLMKAIEAGIFNDMTKARMDELDDQRAVIKKAMAEIEIEKGFKLTKDHILYFLEQFKKLDYKDRDCQRRLIDVFVNSIFVYDDKLRIAFNFGGSDSTITLNEVDKADRGEGFVCCASCPVLRP

SEQ ID NO: 4981 - protein, 513 aa, Unknown
  Description of Unknown: Integrase B4982 sequence
  PTHR30461:SF3,cd00338,SM00857,G3DSA:1.10.10.2600,IPR036162, PF13408,IPR025827,G3DSA:3.40.50.1390,PS51737,IPR006119, IPR038109,PF07508,IPR011109,SSF53041,PTHR30461, PS51736,Coil,PF00239
MAQAKLISPVSRQAYERTKVAAYCRVSSNSADQLNSYAAQIRAYTKLIKSNDSWELVEIFADEGLSGMKAENRVEFQRMIEMCEHKQIDLIITKSVSRFARNVKEALEYVRKLKLLGIGVQFEKEGIYTLALGDEMLLNTFSAIAQEESKAISQNQRLSIVKRMERGEYVDSNAPYGFRLQDKKLEAFDREADVVRYIFQQYLSGWSTSEIARDLTEKGIQTKLGKEQWRSTKISYILSNERYVGDCRYQKTYRDTTVPFKQSKNRGQEDMFYASETHDPIIDRESFEKVQALLQDRKERFSKSEQLNIYPLTSRIRCSECGSVFRRKVRNGAIKWVCARHSADTHACPSGYYSEERIYDGFITMVNKLRFGEERILDQVIAKLETAAALYKRNNISAGKMSQSIAELNAKLVMLEQLRSKGYLAIEVYQSQTRDIQKQISSLKSERRSAFESTIQTMLDEVLKMRSLLNEIEEPLEEFNDKLFHELVKGIEINKQDEMTVTFLGGLKFTELI

SEQ ID NO: 4982 - protein, 513 aa, Unknown
  Description of Unknown: Integrase B4983 sequence
  PTHR30461:SF3,SM00857,G3DSA:1.10.10.2600,IPR036162,PF13408, IPR025827,PS51737,G3DSA:3.40.50.1390,IPR006119,IPR038109, PF07508,IPR011109,SSF53041,PTHR30461,Coil, PS51736,cd00338,PF00239
MMQQALNAVIYARYSSHNQTEQSIEGQLRDCYAFAEREGLQVVGEYIDRAITGRTDERPDFQRMIADARKQEFQRVIVWKFDRFSRDRYDSAIYKHKLKQCGVRVLSAMENVGEGDVSIILEALLEASAEQYSLDLSKKVLRGQRESRLKGTFLGGLTPIGYKLENRKLVADERTAPIVRYIFEQYAKGTSKQDIINELATRGILNRHGKPLSHSTLQTILKNKKYIGVYTHGGQDVAGGCEALIDEKTFLKVQEQLSKRKHAPAASKAVIEYLLQGKLYCGYCGFNMFGDSGRGRNGSTYRYYACRRRKKERDCKKKNEKKDFIEWYVVEQTVEYVLTPERIEYIASELVAQYKKDCGIDRIKAYEKQLDRIKAEISRLVDTLAVCPAAARQPIFDKMEQLDAEKQEAELDLSKLRISAKIQISKEHIADWLKQFCNGDALDVDFQKRIIDTFINSVYLYDDKVIIYYNIEGGKQVSYIDMIDSTEEPPFSDDAPGSSGGSDLKRPALHLCC

SEQ ID NO: 4983 - protein, 513 aa, Unknown
  Description of Unknown: Integrase B4984 sequence
  PTHR30461:SF3,cd00338,SM00857,G3DSA:1.10.10.2600,IPR036162, PF13408,PS51737,G3DSA:3.40.50.1390,IPR025827,IPR006119, IPR038109,PF07508,IPR011109,SSF53041,PTHR30461, PS51736,Coil,PF00239
MMQQALNAVIYARYSSHNQTEQSIEGQLRDCYAFAEREGLQVIGEYIDRAITGRTDERPDFQRMIADARKQEFQRVIVWKFDRFSRDRYDSAIYKHKLKQCGVRVLSAMENVGEGDVSIILEALLEASAEQYSLDLSKKVLRGQRESRLKGTFLGGLTPIGYKLENRKLVADERTAPIVRYIFEQYAKGTSKQDIINELATRGILNRHGKPLSHSTLQTILKNKKYIGVYTHGGQDVAGGCEALIDEKTFLKVQEQLSKRKHAPAASKAVIEYLLQGKLYCGYCGFNMFGDSGRGRNGSTYRYYACRRRKKERDCKKKNEKKDFIEWYVVEQTVEYVLTPERIEYIASELVAQYKKDCGIDRIKTYEKQLDRIKAEISRLVDTLAVCPAAARQPIFDKMEQLDAEKQEVELDLSKLRISAKIQISKEHIADWLKQFCNGDALDVDFQKRIIDTFINSVYLYDDKVIIYYNIEGGKQVSYIDMIDSTEEPPFSDDAPGSSGGSDLKRPALRLCC

SEQ ID NO: 4984 - protein, 513 aa, Unknown
  Description of Unknown: Integrase B4985 sequence
  PTHR30461:SF3,cd00338,SM00857,G3DSA:1.10.10.2600,IPR036162, PF13408,IPR025827,PS51737,G3DSA:3.40.50.1390,IPR006119, IPR038109,PF07508,IPR011109,SSF53041,PTHR30461, PS51736,Coil,PF00239
MKKQPTGGKRLVAYYRYSGGSHQTEQSIEGQRRDCETYARIHGMVILHEYIDRHISGKTDDRPEFQQMIADAGKGMFDYVICWKTDRIARSRYDSIVYKKKLRDNGVELLYAAEANVEGSGGIIVEGLMEALAEYYSAELAEKVRRGMRESALKGKAIGSSRPLGLTVDKDKKYIIDPAGAAAVRYIFEQYAAGAASSAIVAHLNEQGLCTSRGNPFNKSSVVRIIQNEVYRGVYVSPKFDVRIEGAVPAIIDDDLWERAQKMFIRNRQSRSPRNDRADYILSGKLFCGECGTAMKGVSGHSSNGEVYFYYNCPCKDCHRRNIPKDELEGLVIRTVCNDVLQPDVMDRIADSVIEAQTAELNQPNPEKEALQCELADVQRKAKNLLSALENGTAGAMLTNRLAELEQRADTLSYQLSSLESEPKFPVFSKEEVLYLLEQFLIAPSEKTKAYRRRLIDTFVSKIEVSNTELTIYFNIAEEDCGKMKKAPQSNQPEGCSTEKQMVRVARIELTAS

SEQ ID NO: 4985 - protein, 513 aa, Unknown
  Description of Unknown: Integrase B4986 sequence
  PTHR30461:SF3,cd00338,SM00857,G3DSA:1.10.10.2600,IPR036162, PF13408,PS51737,G3DSA:3.40.50.1390,IPR025827,IPR006119, IPR038109,PF07508,IPR011109,SSF53041,PTHR30461, PS51736,Coil,PF00239
MRVVLYMRYSSDRQTEQSIEGQNRVCTAFCEQQGYEIVGRYIDRATSAFKDTDKRTEFQRMIRDSEKQLWEGIVVYKLDRFARNRYDSATYKARLKKNGVRVISATENISDNPEGVILEAVLEGMAEFYSKELSQKITRGMFESANKCHSIGGHIPLGYKIENKKLVIDEAGAAIVREAFDLYANGATVAEICETFNTKGYRTAKNAEFNKNSFRSMFKNERYIGIYKYKDLRIEGGVPAIIDKDTFAIVQKKVSKNAEAPSRGKAKIDYLLSQKLFCGHCGSLMTGESGTGKGGTTYFYYTCGKRKREHTCDKKPLKKDFIERAVVEDALTLLTPETIDELADIAVKESIREMEENSIIPALKDQLHETERSINNLVKMVEKGVESDTIADRLKELEKEKRAIEKRLVVAQDDYVILEKDHIVWWLSEFCNGDIEDEDFRRHIIDLLVNSVTVWDEPDGWYKITSVYNLTSNKTKTFRCSDLSGQAPPLKDNPNTLFFIGTLFGQTTKHRVE

SEQ ID NO: 4986 - protein, 513 aa, Unknown
  Description of Unknown: Integrase B4987 sequence
  PTHR30461:SF3,SM00857,G3DSA:1.10.10.2600,IPR036162,PF13408, IPR025827,PS51737,G3DSA:3.40.50.1390,IPR006119,IPR038109, PF07508,SSF53041,IPR011109,PTHR30461,PS51736, cd00338,PF00239
MKRITKIEAADTGAVRKLRVAAYARVSTDSEEQLISLDAQKNHYEVLIRSRRDWEYAGLYYDEGISGTKMAKRDGLLSMLADCERGLIDYIIVKSISRFSRNTVESIETVRKLCSMGIYILFEKENIDTGKMEGELLLSILSSLAESESRSISENETWSIQKRFRNGTYKIAYPPYGYDYIDGEMVVNPEQSEIVKWIFAEVLSGSSTTHIANALNARGISTKRGGRWTGHTINGMIKNEKYTGDVIFQKTYSDDTFTRRRNNGERDRFFVQGHHEAIISHEDFDAANDMIARNAAEKGIYADSRKYQNRYAFSGKIICGDCGAVWKRRKISGYFGYACTTHLEDKDVCGMKSIREDSIMAAFATMMNKLIFARDKVLLPFSNALKTAERAEYLDEFTALEEGLEKNLQKRQQITQLFTKGYLDPAVYAQQNDELLSASARLTAEKDAIIAKISGGSRQKKALEDILHYTSGASMLTEFDEDLFTRFVDRVIVYSRTEIGFDMKFGPVFRERI

SEQ ID NO: 4987 - protein, 513 aa, Unknown
  Description of Unknown: Integrase B4988 sequence
  PTHR30461:SF3,SM00857,G3DSA:1.10.10.2600,IPR036162,PS51737, G3DSA:3.40.50.1390,IPR006119,IPR038109,PF07508,SSF53041, IPR011109,PTHR30461,Coil,PS51736,cd00338, PF00239
MKPSGDYAIYLRKSRKDLELEALGEGETLARHRTALMELADKKGLKISKIYEEMVSGESIAARPQMQQLLDDVCAGRFAGVLVMEVERLARGNTKDQGEVAEAFSMSNTLIVTPTKTYDPNNEFDEEYFEFGLFMARREYKTIRRRMQRGLIESIKEGNYVGSLPPYGYDIIRINKKERTLKLNDQSQYVKMMFDWFVNERLSSGQIANRLTEMGIPTQTGKSEWNRATVKDILQNTLYTGKIRWNRRKVSKEKGSDGRTVKRKRRLTPEDYMVVDGKHPAIVSQEIFDKAQTLFCGQVPLKAQTTITNPFARLMVCKHCGKGISYNTFAYRGGQTKGRMSHRTSLTCKVKSAPYDDVVAAVAAALRDYISDFEFKLNNDEEARKNKQHEEMLHSMDVELNKLKQKREKLFDFLESGIYTKQEFMERKGVLSERIEAMQGSIENIKKSLPPPVDYREKILRVSEALSALEDPDVPAKAKNDLLKTVVRKIEYDCVDFGRNKGGEVHLDVYLKE

SEQ ID NO: 4988 - protein, 513 aa, Unknown
  Description of Unknown: Integrase B4989 sequence
  PTHR30461:SF3,SM00857,G3DSA:1.10.10.2600,IPR036162,PF13408, IPR025827,G3DSA:3.40.50.1390,PS51737,IPR006119,IPR038109, PF07508,SSF53041,IPR011109,PTHR30461,Coil, PS51736,cd00338,PF00239
MKKQPTGGNRLVAYYRYSGGSHQTEQSIEGQRRDCETYARIHGMVILHEYIDRHISGKTDDRPEFQQMIADAGNGMFDYVICWKTDRIARSRYDSIIYKKKLRDNGVELLYAAEANVEGSGGIIVEGLMEALAEYYSAELAEKVRRGMRESALKGKAIGSSRPLGLTVDKDKKYIIDPTGAAAVRYIFEQYAAGAASSAIVAHLNEQGLCTSRGNPFNKSSVVRIIQNEVYRGVYVSPKFDVRIEGAVPAIIDDDLWERAQKMFIRNRQSRSPRNDRADYILSGKLFCGECGTAMKGVSGHSSNGEVYFYYNCPCKDCHRRNIPKDELEGLVIRTVCNDVLQPDVMERIANSVIEAQTAELNQPNPEKDALEHELADVQRKAKNLLSALENGTAGAMLTNRLAELEQQADTLSYQLSSLESEPKFPVFSKEEVLYLLEQFLIAPSEETKAYRRRLIDTFVSKIEVSNTELTIYFNIAEEDCGKIKKAPQSNQPEGCSTEKQMVRVARIELTAS

SEQ ID NO: 4989 - protein, 513 aa, Unknown
  Description of Unknown: Integrase B4990 sequence
  PTHR30461:SF3,SM00857,G3DSA:1.10.10.2600,IPR036162,PF13408, PS51737,IPR025827,G3DSA:3.40.50.1390,IPR006119,IPR038109, PF07508,IPR011109,SSF53041,PTHR30461,PS51736, cd00338,PF00239
MKRITKIEAADTGAVRKLRVAAYARVSTDSEEQLISLDAQKNHYEVLIRSRRDWEYAGLYYDEGISGTKMAKRDGLLSMLADCERGLIDYIIVKSISRFSRNTVESIETVRKLCSMGIYILFEKENIDTGKMEGELLLSILSSLAESESRSISENETWSIQKRFRNGTYKIAYPPYGYDYIDGEMVVNPEQSEIVKWIFAEVLSGSSTTHIANALNARGISTKRGGRWTGHTINGMIKNEKYTGDVIFQKTYSDDTFTRRRNNGERDRFFVQGHHEAIISHEDFDAANDMIARNATEKGIYADSRKYQNRYAFSGKIICGDCGAVWKRRKISGYFGYACTTHLEDKDVCGMKSIREDSIMAAFATMMNKLIFARDKVLLPFSNALKTAERAEYLDEFTALEEGLEKNLQKRQQITQLFTKGYLDPAVYAQQNDELLSASARLTAEKDAIIAKISGGSRQKKALEDILHYTSGASMLTEFDEDLFTRFVDRVIVYSRTEIGFDMKFGPVFRERI

SEQ ID NO: 4990 - protein, 513 aa, Unknown
  Description of Unknown: Integrase B4991 sequence
  PTHR30461:SF3,SM00857,G3DSA:1.10.10.2600,IPR036162,PS51737, G3DSA:3.40.50.1390,IPR006119,IPR038109,PF07508,SSF53041, IPR011109,PTHR30461,Coil,PS51736,cd00338, PF00239
MTRVILIRCRSAVKKLRAAAYCRVSTEKAEQAGSLSSQRLYFEQYITRSDNMELVGVFYDEGTSGTTTMHRVGFNKMLKLARKGEIDIILTKEVSRFARNTVDTLKITRELKQTGVGVIFINDNIDTRESDGELRLSIMATIAQEESRKISERVRWGQARKMEQGVVFGRNCLGYDVSGGKISIEKQGASIVQRIFNEYTLLLKGAGTIAKELNSEKVPAPCAGSWSASYIRRILRNEKYVGDLEQKKSCTPDYLTHKKKLNRGGRIYLRCHHEPIISRELWDMTQLEISRRTPTETSRNSDRYPYSGKVHCALCGCVMVSRVKKLNEGIYKALRCAGRIKGNGCDNDTLNVKVLTAGIKYMLDGIVTNKAAITDRVMKSLPMPITDKAALQRQKDIIREKKRRLVDMVLDGLITKEELAEQKQYYDSKLKELDRKADMGDAAEQSGKCIAGKIGEILRFDDECVWRAVERVEYSHKELAVYFKGVEKGFAARFTVSGRGEGYKAAFGEIFRR

SEQ ID NO: 4991 - protein, 513 aa, Unknown
  Description of Unknown: Integrase B4992 sequence
  PTHR30461:SF3,SM00857,G3DSA:1.10.10.2600,IPR036162,PF13408, IPR025827,PS51737,G3DSA:3.40.50.1390,IPR006119,IPR038109, PF07508,IPR011109,SSF53041,PTHR30461,Coil, PS51736,cd00338,PF00239
MMQQALNAVIYARYSSHNQTEQSIEGQLRDCYAFAEREGLQVVGEYIDRAITGRTDERPDFQRMIADARKQEFQRVIVWKFDRFSRDRYDSAIYKHKLKQCGVRVLSAMENVGEGDVSIILEALLEASAEQYSLDLSKKVLRGQRESRLKGTFLGGLTPIGYKLENRKLVADERTAPIVRYIFEQYAKGTSKQDIINELATRGILNRHGKPLSHSTLQTILKNKKYIGVYTHGGQDVAGGCEALIDEKTFLKVQEQLSKRKHAPAASKAVIEYLLQGKLYCGYCGFNMFGDSGRGRNGSTYRYYACRRRKKERDCKKKNEKKDFIEWYVVEQTVEYVLTPERIEYIASELVAQYKKDCGIDRIKAYEKQLDRIKAEISRLVDTLAVCPAAARQPIFDKMEQLDAEKQEAELDLSKLRISAKIQISKEHIADWLKQFCNGDALDVDFQKRIIDTFINSVYLYDDKVIIYYNIEGGKQVSYIDMIDSTEEPPFSDDAPGSSGGSDLKRPALRLCC

SEQ ID NO: 4992 - protein, 513 aa, Unknown
  Description of Unknown: Integrase B4993 sequence
  PTHR30461:SF3,SM00857,G3DSA:1.10.10.2600,IPR036162,PS51737, G3DSA:3.40.50.1390,IPR006119,IPR038109,PF07508,IPR011109, SSF53041,PTHR30461,Coil,PS51736,cd00338, PF00239
MKRPDDYAIYLRKSRKDLDLEALGEGETLARHRTALLELADKKGLKITRIYEEMVSGESIADRPQMQQLLDDVCAGRFAGVLVMEVERLARGNTKDQGEVAEAFSMSNTLIVTPTKTYDPNNEFDEEYFEFGLFMSRREYKTIRRRMQRGLIESIKEGNYVGSLPPYGYDIIRINKKERTLKLNDQSQYVKMMFDWFVNEGLSCGQIARRLSEMGIPTQTGKSEWNRATVKDILQNTLYTGKIRWNRRKVSKEKGSDGRTIKRKRRLTPEDYMVVDGKHPAIVSQEIFDKAQTLFCGQVPLKAQTTITNPFARLMVCKHCGKGISYNDFAHRGGQTKGRMSHRTSLTCKVKSAPYDDVVAAVAAALRDYISDFEFKLNNDEEAQKNKQQEEILRSMDVELKKLEQKREKLFDFLESGIYTKQEFMERKGVLSERIEAMQGSIENIKKSLPPPVDYREKILRVSEALSALEDPDVPAKAKNDLLKTVVRKIEYDCVDFGRNKGGEVHLDVYLKE

SEQ ID NO: 4993 - protein, 513 aa, Unknown
  Description of Unknown: Integrase B4994 sequence
  PTHR30461:SF3,SM00857,G3DSA:1.10.10.2600,IPR036162,PF13408, IPR025827,PS51737,G3DSA:3.40.50.1390,IPR006119,IPR038109, PF07508,IPR011109,SSF53041,PTHR30461,Coil, PS51736,cd00338,PF00239
MPTVTVIQPTISEEQNTKIRCAAYCRVSSDSEDQLNSFMAQMRYYSQVFDNSETEELIDIYADEGITGTREDKRDEFQRLMKDCRKGKIDRIYTKSISRFARNTRDCLKNVRELKSLGITIYFEKENIDTANMTDEMMITIMGGLAQEESTSISQNLRWGIKKRMENGTIKMCTPVFGYELVDGNLILKSDEAEIVRQIFDWYLNGYGLAAIAQMLNALKIERFGRTSHWTASTVGVMLRNEKYIGDQLFQKKYTTDTLPFRQVVNKGERDQYYYSDRHKPIISRDDFDKVQNILAEHKKSFKGLKQDHIFAKKIYCGECGSTFKFKCRKNKNYWVCRLHDAESDKCSNKQILEANAISAFIMLCNKLWYNYKQILLPCQAALQDLKLKKFSGKTQVMDIHKEIAKLREQAHVLARLKTKGFLDEAKYLEQTTELTAKINKLQTELKKLTRSDDEDEMLEQIEMLIDFFEKRENIMIDFDESAFENIVEKIVVIDQYELEFHLIGGLKFKENI

SEQ ID NO: 4994 - protein, 513 aa, Unknown
  Description of Unknown: Integrase B4995 sequence
  PTHR30461:SF3,IPR036162,PS51737,IPR011109,PTHR30461, PF00239,G3DSA:1.10.10.2600,IPR006119,PF14287,SSF53041, IPR025378,SM00857,IPR025827,cd03770,IPR038109, PS51736,PF13408,G3DSA:3.40.50.1390,PF07508,Coil
MQENKQNIRFTALYCRLSSDDELKGDSNSIIHQKQILQDYALKNSLTPTEVYVDDGFTGTNFDRPDFKRLLSDVENDLVKTIIVKDLSRFGRNYLKVGYYTEILFPSKGVRFISVSDNLDTSAKDEINDFIPFKNIMNEWYAKDLSRKQRAVIKSKGNAGKRLSTRPIYGYKKAENGDWIIDEPAAIVVRKIFDLYLKGYGPASIANYLFANKVKIPSLTGLQISDKTRNPYRWSKDSVAHILTCQDYCGDMINFKRSDVDNLVIFPDKQEPIISREIFAEAQKLRLSKKPVRHSYSEPVLFSDFLRCADCKNRMYAQRRYKGSTSYTCSTARKVQGCSSHYINENRLSDCVKSEINKLIANKTKVVEFAKAKMHTDAKTAQCASVKNLKNAQTRISEIDAILKNLYEDKVRGNITLETFKKLENEFLREQANLNQTVINQSRIKVNIDSQSKKICEFLRKLEMYKVTIQELSRNVLIDLIDKIEICEAEKENNKRSQQVHIYYLGIGKIDLE

SEQ ID NO: 4995 - protein, 513 aa, Unknown
  Description of Unknown: Integrase B4996 sequence
  PTHR30461:SF3,cd00338,SM00857,G3DSA:1.10.10.2600,IPR036162, PF13408,IPR025827,G3DSA:3.40.50.1390,PS51737,IPR006119, IPR038109,PF07508,SSF53041,IPR011109,PTHR30461, PS51736,Coil,PF00239
MPEVRLITPITRQNTKKMQVAAYCRVSSNSADQLNSYAAQIRAYKKCIGARDDWELVDIFADEGLTGMKSETRDEFQRMIRMCELKQIDLIITKSISRFARNTKDALAYVRKLKLLGVGVQFEKEGISTLSMGDEMLLNTFSALAQEESQSISMNQRLSIVKRMELGEYVDSNAPYGYRLVDKALAVYEPEAAVVRDIFDLYLRGFSISEIGRELKSRNIPTKAGKESWHPYRIAYMLKNERYIGDSFYQKTYRETTVPFNQHINRGQEDRFYAKGTHPGIIDKDVFNAVQQLIQKRKETFSRTTTQNIYPLTSRIQCSECGSFYRRRSVSGTVKWVCALHKDDSTACDSHYYSEERIYDGFITMVNKLRFSEDNILGQVISRLEMTLAAMKRNNLVARDLSNSIAELNAKLLMLEQLRSKGYLAPEVYQAQANEIGAELAKLKDVRQEKFNSKAASMLEEVKKLKMLIFELEEPLEAFDEKLFLEIVKSIQINKEDEMSVEFLGGLRFKERI

SEQ ID NO: 4996 - protein, 513 aa, Unknown
  Description of Unknown: Integrase B4997 sequence
  cd03768,PTHR30461:SF3,SM00857,IPR036162,PF13408, IPR025827,G3DSA:3.40.50.1390,PS51737,IPR006119,PF07508, IPR011109,SSF53041,PTHR30461,PS51736,Coil, PF00239
MIIGIYPRKSVYRDNSESIKVQIKLCKEYAKIVYKGQQIDFRIYGKDEGFSGKNTNRPSFQELMRDVKSNILNVVMVYRLDRISRNVSEFSEMYDIMHAHNVTFLSVKESFDTSTPIGRTVMYILAAFSQFERESTSERVADNMHSLGASGKWTGGKLPAGMSSIRKTVDGKEHSFLVVNDERIGLVKMLYSMYLEGYTITALERYCRDHGFRTESGKFLSTSQIHCILSNPVYCSNGTAAYDYFKGHGHTVPDKLFFDGTKGLVSYGKTKQSEKRIVNDKYTISVGIHEPVIAAEDWIAVQNRFGANKFYRSNKYKVGILKGVLKCNCGARMDIRTYVKNGNQFSYYYCARMAREGKKVCDTGYIRVDTIDDAFISKLMQIKSNPSMIKVRATELDFVDINKIEAELKSIDQAIENLTGALSENSSSTAASHIIKQIEKLDASKVRLESSLYSAMQNNKIAQSEKETKDIIYNYICCLLEKFESMSYQEKNELIKKAVKKCICSNDGLHIIF

SEQ ID NO: 4997 - protein, 513 aa, Unknown
  Description of Unknown: Integrase B4998 sequence
  PTHR30461:SF3,SM00857,G3DSA:1.10.10.2600,IPR036162,PS51737, G3DSA:3.40.50.1390,IPR006119,IPR038109,PF07508,IPR011109, SSF53041,PTHR30461,Coil,PS51736,cd00338, PF00239
MKRPDDYAIYLRKSRKDLDLEALGEGETLARHRTALLELADKKGLKITRIYEEMVSGESIADRPQMQQLLDDVCAGRFAGVLVMEVERLARGNTKDQGEVAEAFSMSNTLIVTPTKTYDPNNEFDEEYFEFGLFMSRREYKTIRRRMQRGLIESIKEGNYVGSLPPYGYDIIRINKKERTLKLNDQSQYVKMMFDWFVNEGLSCGQIANRLTEMGIPTQTGKSEWNRATVKDILQNTLYTGKIRWNRRKVSKEKGSDGRTVKRKRRLTPEDYMVVDGKHPAIVSQEIFDKAQTLFCGQVPLKAQTTITNPFARLMVCKHCGKGISYNTFAHRGGQTKGRMSHRTSLTCKVKSAPYDDVVAAVAAALRDYISDFEFKLNNDEEARKNKQHEEILRSMDVELKKLEQKREKLFDFLESGIYTKQEFMERKGVLSDRIEAMQASIENVKKSLPPPVDYREKILRVSEALSALEDPDVPAKAKNDLLKTVVRKIEYDCADFGRNKGGEVHLDVYLKE

SEQ ID NO: 4998 - protein, 513 aa, Unknown
  Description of Unknown: Integrase B4999 sequence
  PTHR30461:SF3,cd00338,SM00857,G3DSA:1.10.10.2600,IPR036162, PF13408,PS51737,G3DSA:3.40.50.1390,IPR025827,IPR006119, IPR038109,PF07508,IPR011109,SSF53041,PTHR30461, PS51736,Coil,PF00239
MLRAALYARYSSDNQRYESITAQLRASREYCKQRGYIVVKTYTDEAISGTSVAGRDAFQQMILDSSDDIFDVVIFHKIDRNARDEIDYYTNVDRLRKNGVRYEYSAEGIDVTTTNGKLTEGIKVAVAAWYSRNLAQEVRKGQKENALQAKFNGGRPPLGYKIVNQRYEIEPREAEAVRLIFDMYLHGSGYIDIAAELNRRGFVTRNGKPFAKNSLYEILGNERYTGTYIFNRIVTDDFGRRNNHKINDAAIKIPGAIPAIIDEETFAAVARRRELNKRRSSVFRAEERYLLSGKIICGECGSHLCGHRVKSRGQCYSYYCCSRRKLPVEVKCSMRMIQKKPLEDAVCEGILNMILLPDTRKTIIEEMQKGYGEFNDDIENKRRELSNEKVRAERKLSNLYRIIEDGDVDDFDLDRLKNAKAEVLAIRQELEKLPCEKFPPLAVQQINAAFDAFAVAVSNGEEKARQAVINFFLEQVVVMPENVEVFLNVSPCENFSVALPSPHLHQMLCSRTF

SEQ ID NO: 4999 - protein, 513 aa, Unknown
  Description of Unknown: Integrase B5000 sequence
  PTHR30461:SF3,cd00338,SM00857,G3DSA:1.10.10.2600,IPR036162, PF13408,IPR025827,G3DSA:3.40.50.1390,PS51737,IPR006119, IPR038109,PF07508,IPR011109,SSF53041,PTHR30461, PS51736,Coil,PF00239
MPEVRLITPITRQSTKKMQVAAYCRVSSNSADQLNSYAAQIRAYKKYIGARDDWELVDIFADEGLTGMKSETRDEFQRMIRMCELKQIDLIITKSISRFARNTKDALAYVRKLKLLGVGVQFEKEGISTLSMGDEMLLNTFSALAQEESQSISMNQRLSIVKRMELGEYVDSNAPYGYRLVDKALAVYEPEAAVVRDVFDLYLRGFSISEIGRELKSRNIPTKAGKESWHPYRIAYMLKNERYIGDSFYQKTYRETTVPFNQHINRGQEDRFYAKGTHPGIIDTDVFNAVQQLIQKRKETFSRTTTQNIYPLTSHIQCSECGSFYRRRSVSGTVKWVCALHKDDSTACDSHYYSEERIYDGFITMVNKLRFSEDNILGQVISRLEMTLAAIKRNNLAARDLSKSIAELNAKLLMLEQLRSKGYLAPEVYQAQANEIGAELARLKDVRQEKFNSKAASMLEEVKKFKMLIFELEEPLEAFDEKLFLEIVKSIQINKEDEMSVEFLGGLRFRERI

SEQ ID NO: 5000 - protein, 513 aa, Unknown
  Description of Unknown: Integrase B5001 sequence
  PTHR30461:SF3,SM00857,G3DSA:1.10.10.2600,IPR036162,PF13408, IPR025827,G3DSA:3.40.50.1390,PS51737,IPR006119,IPR038109, PF07508,SSF53041,IPR011109,PTHR30461,Coil, PS51736,cd00338,PF00239
MLKTDMTNEKSTAVIYARFSSDKQREESIEGQIRECTQFAKDQNLEIIATYIDRALSARSDNRPDFLRMIADSSKGLFQYVIVYQLDRFSRSRYDSAVYKHKLKKNGVRVLSAKERIGDDPSSIILESMLEGYAEYYSAELSQKVKRGMTENVLEHKWTGGYVPLGYSLAPDKTLQIDPSGAEAVKIIYEKWLSGYRIMDIIRYLNEHNYVTSRKSKFRYNSLNRILTNPIYTGLYRWGTIEVADYAPAIITQKQFALAQEKIHHIKAHPRAKRRSAAYALTGIIYCGVCGSPMTGQSGHSKSGALYHYYRCSTKNNYHDRGKKLNVKCTNRNISREKLEDLVLQTTINILMNPEAVRMIAKQAVAAQEKDPAATEIDRIKEDKKLIQKKLSNSIKAVEAGIISTTLAVNISQYEKEIADLDIKMEKIKLSSTPVKIDEIAVEFFLKNLLLQKKEHDKYRLDMFQTFIRRVIVYPDKVEIQYNYTATPILENPVIKMMTGNPGCSRCERLVTR

SEQ ID NO: 5001 - protein, 513 aa, Unknown
  Description of Unknown: Integrase B5002 sequence
  PTHR30461:SF3,SM00857,G3DSA:1.10.10.2600,IPR036162,PF13408, IPR025827,G3DSA:3.40.50.1390,PS51737,IPR006119,IPR038109, PF07508,IPR011109,SSF53041,PF00239,PTHR30461, PS51736,Coil,cd00338
MLYAIYLRKSRADLEAEAMGQGETLARHRAALLDYAAHHGLEIGAVYEEIISGESIDARPKMKQLLREVEQGRWAGVLCMDIDRLARGNSADQARVSNTFRISGTLIITPSKVYDQSRESDEEYVDFELFMARREYKAISRRIMRGRIASVKEGHFIGSTPPYGYDKVKVEKGRGFTLLPNSESDTVKQIYSMCISGMGCNAIARRLDMMGVTPRKGSSWSSASIQDILKNPVYCGKIRWQYRKEEKSLTDGIVTTHRRENPDCIIAQGLHPALISEEEFEKAQQFLNSRRIPHKKENTELRNPLSGLVYCGMCGSMMTRLGTGSRNHSDTLRCPNRNCGNVSAKLELVESALVEGVARWLNDCRVNVSRKPAADTAKAERTAAEKVRAELAKLDSQREKIYSFLEQGVYSAGEFRERMESLEKRRTQLSENLRQAEQAVSEAEGNRQLYAQIIPSVERVMDIYAQSTPEEKNRLLKTIISRAEYIKTERNTRGNADRCNFTLNVTPLFPETD

SEQ ID NO: 5002 - protein, 513 aa, Unknown
  Description of Unknown: Integrase B5003 sequence
  SM00857,G3DSA:1.10.10.2600,IPR036162,PF13408,IPR025827, G3DSA:3.40.50.1390,PS51737,cd03770,IPR006119,PF14287, PF07508,IPR011109,IPR038109,SSF53041,PTHR30461, PS51736,IPR025378,PF00239
MQENKQNLRFTALYCRLSSDDELKGDSNSIIHQKQILQDYALKHSLTPTEIYVDDGFTGTNFDRPDFKRLLSDVENDLVKTVIVKDLSRLGRNYLKVGYYTEVLFPEKGVRFISIADNLDTSVNDELNDFIPFKNIMNEWYAKDLSRKQRAVVKSKGNSGIRLATRPLYGYKKAENGDWLIDEPTAAVVQKIFDLYLKGYGPVSIANYLFANKVKIPSTIGLPKLNPEQNPYRWSKDTVAKILTCQDYCGDMINFKRSDVDSLVIFHDRQEPIISREIFAEAQKLRLDRKPVRHDYSEPVLFSDLLLCADCKSRMYAQRRYHGTTSYSCSKARKTQGCTSHYINENKLIDCVKSDINKLIKNKGIVIKLAKEKMHIDTKTAQCANSQNLKNAKKRILQIDTILKNLYEDKVLGNINLATFKKLESDYLREQAELNKVIFEQSKIKVNLENRSKSICGFLKKLESYNNPVSELSRDLLIDLIDKIEICEATKNGNERSQQVHIYYKEIGKINLE

SEQ ID NO: 5003 - protein, 513 aa, Unknown
  Description of Unknown: Integrase B5004 sequence
  PTHR30461:SF3,SM00857,G3DSA:1.10.10.2600,IPR036162,PF13408, IPR025827,PS51737,G3DSA:3.40.50.1390,IPR006119,IPR038109, PF07508,IPR011109,SSF53041,PF00239,PTHR30461, PS51736,Coil,cd00338
MLYAIYLRKSRADLEAEAMGQGETLARHRAALLDYAAHHGLEIGAVYEEIISGESIDARPKMKQLLREVEQGRWAGVLCMDIDRLARGNSADQARVSNTFRISGTLIITPSKVYDQSRESDEEYVDFELFMARREYKAISRRIMRGRIASVKEGHFIGSTPPYGYDKVKVEKGRGFTLLPNSESDTVKQIYSMCISGMGCNAIARRLDMMGVTPRKGSSWSSASIQDILKNPVYCGKIRWQYRKEEKSLTDGIVTTRRRENPDCIIAQGLHPALISEEEFEKAQQFLNSRRIPHKKESTELRNPLSGLVYCGMCGSMMTRLGTGSRNHSDTLRCPNRNCGNVSAKLELVESALVEGVARWLNDCRVNVSRKPAADTAKAERTAAEKVRAELAKLDSQREKIYSFLEQGVYSAGEFRERMESLEKRRTQLSENLRQAEQAVSEAEGNRQLYARIIPRVERVMDIYAQSTPEEKNRLLKTIISRAEYIKTERNTRGNADRCNFTLNVTPLFPETD

SEQ ID NO: 5004 - protein, 513 aa, Unknown
  Description of Unknown: Integrase B5005 sequence
  PTHR30461:SF3,SM00857,G3DSA:1.10.10.2600,IPR036162,PF13408, IPR025827,G3DSA:3.40.50.1390,PS51737,IPR006119,IPR038109, PF07508,IPR011109,SSF53041,PTHR30461,Coil, PS51736,cd00338,PF00239
MKKQPTGGNRLVAYYRYSGGSHQTEQSIEGQRRDCETYARIHGMVILHEYIDRHISGKTDDRPEFQQMIADAGKGMFDYVICWKTDRIARSRYDSIVYKKKLRDNGVELLYAAEANVEGSGGIIVEGLMEALAEYYSAELAEKVRRGMRESALKGKAIGSSRPLGLTVDKDKKYIIDPAGAAAVRYIFEQYAAGAASSAIVAHLNEQGLCTSRGNPFNKSSVVRIIQNEVYRGVYVSPKFDVRIEGAVPAIIDDDLWERAQKMFIRNRQSRSPRNDRADYILSGKLFCGECGTAMKGVSGHSSNGEVYFYYNCPCKDCHRRNIPKDELEGLVIRTVCNDVLQPDVMDRIADSVIEAQTAELNQPNPEKEALQHELADVQRKAKNLLAALENGTAGAMLTNRLAELEQQADTLSYQLSSLESEPKFPVFSKEEVLYLLEQFLIAPSEKTKTYRRRLIDTFVSKIEVSSTELTIYFNIAEEDCGKMKKAPQSNQPEGCSTEKQMVRVARIELTAS

SEQ ID NO: 5005 - protein, 513 aa, Unknown
  Description of Unknown: Integrase B5006 sequence
  PTHR30461:SF3,cd00338,SM00857,G3DSA:1.10.10.2600,IPR036162, PF13408,PS51737,G3DSA:3.40.50.1390,IPR025827,IPR006119, IPR038109,PF07508,IPR011109,SSF53041,PTHR30461, PS51736,Coil,PF00239
MAKAKQKAATNDISKLAVIYARYSSHNQTEQSIEGQLAAGHRYADLKGYTVVHEYIDRAMTGRNDNRDDFQKMLSDTSKKQFGAIIVWKVDRFGRNREEITFNKYRCKKNGVRVEYVAENLPDSPEGVILESVLEGMAEYYSLQLSQNVQRGLLESAKKHQVIGGNVPLGLMMDAHKKYVPDLKTAPTVKLIFDMYAEGSTTSEIINHLNSIGMRTKAGKPFTKSSLTTVLKNEKYIGVYKYKDIIRDEGVIPPIVDKEIFYKVQELLKVNRRMPSHKWSYSDYILTDKLFCGKCGTAMVGESGFGKMGVKYSYYICAKRRKDKTCDKKPVRQEWIEEIVLQRVQGILQNEELLEFIAENTWQYYLAQDESMEKLKGLQTELDKVEKSAANLMKAIEAGIFNDMTKARMDELDDQRAVIKKAMAEIEIEKGFKLTKDHILYFLEQFKKLDYKDRDCQRRLIDVFVNSIFVYDDKLRIAFNFGGSDSTITLNEVDKADRGEGFVCCASCPVIKP

SEQ ID NO: 5006 - protein, 513 aa, Unknown
  Description of Unknown: Integrase B5007 sequence
  cd00338,SM00857,G3DSA:1.10.10.2600,IPR036162,PF13408, IPR025827,PS51737,G3DSA:3.40.50.1390,IPR006119,IPR038109, PF07508,IPR011109,SSF53041,PTHR30461,PS51736, Coil,PF00239
MTQRTAVLYARYSSDKQREASIDDQLRVCRYYCKAEGIEVVAEYKDYALSGKTDHRPEFRRMIANAPESDYVVVYMFDRFSRDRYDSATYKKMLRECGVRVLSASEKVEDTPEGGLQEGMLELLSEYYVRDLARKVRRGMEGNALKARDNGYRIFGYSTDPETRCYVINEAEANAVREMFSMHISGNSVNSIAREMASRGWTTTTGKPVDYNWAWRVLNRRAYTGLYSWGGIEVPGGMPQIIDEVTFARSQAVVPRKRRKDENWDVYRLTGKLFCGFCGNPMHGTAGTGKKGKRYHYYACREGDGCKRPWVRRELLEDSIADAVLETCSDEGRMRMLARRIVEAYAEPGEEEAEMAAIEAQIASLEREQHNMTQAAMKGFVTDEMVARNDEIKVQMKNLHNRHGVLASQMCEITEDDIVGYMMHGFNRDDEDFIFGSIVREAYLFDDCVLLVFNFRDEVGDLTEIRVALQAQKKCEPGEGFALCSRGVPGEEFPEPISLPGGFGLIIPLRRAA

SEQ ID NO: 5007 - protein, 513 aa, Unknown
  Description of Unknown: Integrase B5008 sequence
  PTHR30461:SF3,SM00857,G3DSA:1.10.10.2600,IPR036162,PF13408, IPR025827,G3DSA:3.40.50.1390,PS51737,IPR006119,IPR038109, PF07508,SSF53041,IPR011109,PTHR30461,Coil, PS51736,cd00338,PF00239
MNKRTGIYGRYSDTKQDDGFSIEYQLTECQAYLDKNSMPLTKAYIDQAITGTKVAGREAFHELIHDVKNGLIDVVVVYKYSRIFRNAYESHKYRKLFKKHGVKLISVTQTVDDETSSGQLMIGVMANIDEYQSAVISDHVKSAMREMVSEGFFAGGTVPYGYKLEVIQHGKKVRKKYVPDEFESKIVNKIFELYADNYSLRYLQTYLKDNGAFTRRGKYFSIQTIARMLRNDFYIGILRYSAQGHEPIVVHDIIPPIIDKELWDRVQYRHSRQKDVRPRKRKDLYALTGKIKCANCGSHYFGIRSGSTQNGKKYDYKYYVCSQSKDYHTCSCKRIRKDYLEGITMREIKRHILNEKSIYSIANEMLKILGENPTEQKSKLKQLKSRSSSLKSEMKELIDLRAKKIVSDSFLAEHIKEKETELQEIEQQIYNIERQTKSTLTHSMIVDYLNKMLSISDDTDDEVLKTIFDKFVDSIVVSDESIDITLIVSPHGDLEYNASLRQPKLSYYSKMNR

SEQ ID NO: 5008 - protein, 513 aa, Unknown
  Description of Unknown: Integrase B5009 sequence
  PTHR30461:SF3,SM00857,G3DSA:1.10.10.2600,IPR036162,PF13408, IPR025827,G3DSA:3.40.50.1390,PS51737,IPR006119,IPR038109, PF07508,IPR011109,SSF53041,PF00239,PTHR30461, PS51736,Coil,cd00338
MYLVAYARYSSDNQREESITAQLRAIHNWANANGHVIVKEYVDEALSARTDKRPNFLKMIEDSKIEDWNGVVVHKLDRFSRNRYNSAVYKKTLKDNNKKLFSVLEKLDDSPESIIMEAMLEGLSEYYSANLAREVKKGLTENALDCKHNGGIPPLGYSVKDSHYVVDKRESEIIKLIFNMYKTNHSYVEICSELNLRGYKTKRNKNFSKNSIHDILVNEKYIGNYTFGYGNRAKKRGQPNPDMIKIEGGMPAIIDKDTFFIVQEKMKGRKHMGGSYKAKQVYLLSGLIKCGICNEKYVGARKNKYWSVYECSGHKKGMCENKAIKKEEIEKIVVDELKVKINGLFNNVELLEKVNTKYKELHNDTENNLKIEEEKLSNVQTQINNINNAILDGFYSPEMKDKMKLLQSEKEFIERSIYLIRNISEKDEITSADINNILNTDLLKLESDNLNNIKEIIQKYIKEIIITPENINIKVVLDNTNITGDRDVCGSPPPKFEKRTAIILNLAVLFFFI

SEQ ID NO: 5009 - protein, 513 aa, Unknown
  Description of Unknown: Integrase B5010 sequence
  PTHR30461:SF3,cd00338,SM00857,G3DSA:1.10.10.2600,IPR036162, PF13408,PS51737,IPR025827,G3DSA:3.40.50.1390,IPR006119, IPR038109,PF07508,IPR011109,SSF53041,PTHR30461, PS51736,Coil,PF00239
MRVVLYMRYSSDRQTEQSIEGQNRVCTAFCEQQGYEIVDRYIDRATSAFKDTDKRTEFQRMIRDSEKQLWEGIVVYKLDRFARNRYDSATYKARLKKNGVRVISATENISDNPEGVILEAVLEGMAEFYSKELSQKITRGMFESANKCHSIGGHIPLGYKIENKKLVIDEAGAAIVREAFNLYANGATVAEICETFNTKGYRTAKNAEFNKNSFRSMFKNERYIGIYKYKDLRIEGGVPAIVDKDTFAIVQKKLSKNAEAPSRGKAKIDYLLSQKLFCGHCGSLMTGESGTGKGGTTYFYYTCGKRKREHTCDKKPLRKDFIERAVVEDALTLLTPETIEELADIAVNESVREMEENSIIPALKDQLHETERSINNLVKMVEKGVESDTIADRLKELEKEKRAIEKRLVVAQDDCVILEKEHIVWWLSDFCNGDIDDEEFRRHIIDLLVNSVTVWDEPDGWYKITSVYNLTSNKTKTFRCSDLSGQAPPLKDNPNTLFFIGTLFGQTTKHRVE

SEQ ID NO: 5010 - protein, 513 aa, Unknown
  Description of Unknown: Integrase B5011 sequence
  PTHR30461:SF3,SM00857,G3DSA:1.10.10.2600,IPR036162,PF13408, IPR025827,G3DSA:3.40.50.1390,PS51737,IPR006119,IPR038109, PF07508,IPR011109,SSF53041,PTHR30461,Coil, PS51736,cd00338,PF00239
MMQQALNAVIYARYSSHNQTEQSIEGQLRDCYAFAEREGLQVVSEYIDRAITGRTDERPDFQRMIADARKQEFQRVIVWKFDRFSRDRYDSAIYKHKLKQCGVRVLSAMENVGEGDVSIILEALLEASAEQYSLDLSKKVLRGQRESRLKGTFLGGLTPIGYKLENRKLVADERTAPIVRYIFEQYAKGTSKQDIINELATRGILNRHGKPLSHSTLQTILKNKKYIGVYTHGGQDVAGGCEALIDEKTFLKVQEQLSKRKHAPAASKAVIEYLLQGKLYCGYCGFNMFGDSGRGRNGSTYRYYACRRRKKERDCKKKNEKKDFIEWYVVEQTVEYVLTPERIEYIASELVAQYKKDCGIDRIKAYEKQLDRIKAEISRLVDTLAVCPAAARQPIFDKMEQLDAEKQEAELDLSKLRISAKIQISKEHIADWLKQFCNGDALDVDFQKRIIDTFINSVYLYDDKVIIYYNIEGGKQVSYIDMIDSTEEPPFSDDAPGSSGGSDLKRPALRLCC

SEQ ID NO: 5011 - protein, 513 aa, Unknown
  Description of Unknown: Integrase B5012 sequence
  PTHR30461:SF3,cd00338,SM00857,G3DSA:1.10.10.2600,IPR036162, PF13408,PS51737,IPR025827,G3DSA:3.40.50.1390,IPR006119, IPR038109,PF07508,IPR011109,SSF53041,PTHR30461, PS51736,Coil,PF00239
MPEVRLITPITRQNTKKMQVAAYCRVSSNSADQLNSYAAQIRAYKKCIGARDDWELVDIFADEGLTGMKSETRDEFQRMIRMCELKQIDLIITKSISRFARNTKDALAYVRKLKLLGVGVQFEKEGISTLSMGDEMLLNTFSALAQEESQSISMNQRLSIVKRMELGEYVDSNAPYGYRLADKMLTVYEPEAGIVRNIFALYLQGFSTSEIARELNKLNIPTKAGKEIWRPSRVAYILKNERYIGDSFYQKTYRETTVPFNQHPNRGQEDRFYAKGTHPGIVEKDVFDAAQTLIEKRKDVFAKATTQNIYPLTSRIQCSECGSFYRRRIVSGTVKWVCSLHKDDSMACDSNYYSEERIYDGFISMVNKLRFSEDNILGQVISRLEMTLAAMKRNNLAARDLSKSIAELNAKLLMLEQLRSKGYLAPEVYQAQANEISAELAKLKDVRQEKFNSKAAIMLEEIKKLKMLIFELEEPLEAFDEKLFLEIVKSIQINKEDEMSVELLGGLRFRERI

SEQ ID NO: 5012 - protein, 513 aa, Unknown
  Description of Unknown: Integrase B5013 sequence
  PTHR30461:SF3,cd00338,SM00857,G3DSA:1.10.10.2600,IPR036162, PF13408,PS51737,IPR025827,G3DSA:3.40.50.1390,IPR006119, IPR038109,PF07508,IPR011109,SSF53041,PTHR30461, PS51736,Coil,PF00239
MPEVRLITPITRQSTKKMQVAAYCRVSSNSADQLNSYAAQIRAYKKCIGARDDWELVDIFADEGLTGMKSETRDEFQRMIRMCELKQIDLIITKSISRFARNTKDALAYVRKLKLLGVGVQFEKEGISTLSMGDEMLLNTFSALAQEESQSISMNQRLSIVKRMELGEYVDSNAPYGYRLVDKMLTVYEPEAGIVRNIFALYLQGFSTSEIARELNKLNIPTKAGKEIWRPSRVAYILKNERYIGDSFYQKTYRETTVPFNQHPNRGQEDRFYAKGTHPGIVEKDVFDAAQILIEKRKDVFAKATTQNIYPLTSRIQCSECGSFYRRRIVSGTVKWVCSLHKDDSTACDSNYYSEERIYDGFISMVNKLRFSEDNILGQVISRLEMTLAAMKRNNLAARDLSKSIAELNAKLLMLEQLRSKGYLAPEVYQAQANEISAELAKLKDVRQEKFNSKAAIMLEEVKKLKMLIFELEEPLDAFDEKLFLEIVKSIQINKEGEMSVELLGGLRFRERI

SEQ ID NO: 5013 - protein, 513 aa, Unknown
  Description of Unknown: Integrase B5014 sequence
  PTHR30461:SF3,cd00338,SM00857,G3DSA:1.10.10.2600,IPR036162, PF13408,IPR025827,G3DSA:3.40.50.1390,PS51737,IPR006119, IPR038109,PF07508,SSF53041,IPR011109,PTHR30461, PS51736,Coil,PF00239
MRVVLYMRYSSDRQTEQSIEGQNRVCTAFCEQQGYEIVDRYIDRATSAFKDTDKRTEFQRMIRDSEKQLWEGIVVYKLDRFARNRYDSATYKARLKKNGVRVISATENISDNPEGVILEAVLEGMAEFYSKELSQKITRGMFESANKCHSIGGHVPLGYKIENKKLVIDEAGAAIVREAFDLYANGATVAEICETFNTKGYRTAKNAEFNKNSFRSMFKNERYIGIYKYKDLRIEGGVPAIVDKDTYAIVQKKLSKNAEAPSRGKAKIDYLLSQKLFCGHCGSLMTGESGTGKGGTTYFYYTCGKRKREHTCDKKPLKKDFIERAVVEDALTLLTPETIDELADIAVNESIREMEENSIIPALKDQLHETERSINNLVKMVEKGVESDTIADRLKELEKEKRALEKRLVVAQDDYVILEKEHIVWWLSDFCNGDIEDEEFRRHIIDLLVNSVTVWDEPDGWYKITSVYNLTSNKTKTFRCSDLSGQAPPLKDNPNTLFFIGTLFGQTTKHRVE

SEQ ID NO: 5014 - protein, 513 aa, Unknown
  Description of Unknown: Integrase B5015 sequence
  PTHR30461:SF3,cd00338,SM00857,G3DSA:1.10.10.2600,IPR036162, PF13408,PS51737,IPR025827,G3DSA:3.40.50.1390,IPR006119, IPR038109,PF07508,IPR011109,SSF53041,PTHR30461, PS51736,Coil,PF00239
MCAKKKPAMLEPDMQDAVIYTRYSSHNQRDCSIEQQVADCEIFARQNNLRVVKVYADRHLSGTTDNRPQFQQMLKDASHGHWAYVICWKIDRFARNRYDSATYKFRLKKAGVRVLYAKESIPDGPEGILLESVLEGSAEYYSAALAQNIRRGMKYNAEQCKVNSGSIPFGYCKGPDGRFAIHEANAEVVREIFRKAAAGMPFVDIANDLNSRGLKTSRGGRWNKGSFRLLMNEAYIGVYHFSDTRIEGGMPALIDQGTFWAANERLKANSSVRGRHQDGGDYLLTGKLKCAHCGSYMIGFSGTGKSGELHYYYGCQKRRRERACKKANVPREWIERVVVKAALDYVLRPDVMEWIADAVMEYQEREAASAQLAALTAELEENQKATDNVMKAIEAGIITSTTKQRLLDLEAKAQDLKRAIELEKLSHVRLERDQVLFWLDRFRGGSLQSQEFRRKVIDAFVSVVYLSDDHLRIAFNYSGGPNAEADFDLVMDAEAAAGELSKKFAQGHVTSIQ

SEQ ID NO: 5015 - protein, 513 aa, Unknown
  Description of Unknown: Integrase B5016 sequence
  PTHR30461:SF3,SM00857,G3DSA:1.10.10.2600,IPR036162,PF13408, IPR025827,PS51737,G3DSA:3.40.50.1390,IPR006119,IPR038109, PF07508,IPR011109,SSF53041,PF00239,PTHR30461, PS51736,Coil,cd00338
MPTVTVIQPTLTEEKTAKIRCAAYCRVSSDSEDQLNSFMAQTRYYSQLFEDSKAEELIDIYADEGITGTREDKRGEFQRMMKDCRRGKIDRIYTKSISRFARNTKDCLKNVRELKSLGITIFFEKENIDTAKMTDEMMITIMGGLAQEESTSISQNLRWGIKKRMENGDFNPASLPFGYRRKNKTVVINKTEADIVREIFDKYLCGVGMESIADELNRKHIDKNNKGFIWCKNTIKYLLKNEKYTGKSIFRKFYTTESFPFKQRKNNGELEQYLVENTMPIIISEEKFNKVQKLIKGRKINCEIENISYILSGKMKCKSCGSAYRRKKINGDINWVCTKHNLNAKDCPQKAILQSTIYSSFIRLFNKLWYNYKDILLPLHTALQNLKLRKFSGQAQVMEVRKEIAKLREQSHVLARLKTKGFLDEAKYIEQTAELTAKINKLQTELKKLTRSDNEDETLNQIEMLIDFFEKQDDPITKFEESEFESIVDKIVVINQHELEFHLIGGLKFKEKI

SEQ ID NO: 5016 - protein, 513 aa, Unknown
  Description of Unknown: Integrase B5017 sequence
  PTHR30461:SF3,cd00338,SM00857,G3DSA:1.10.10.2600,IPR036162, PF13408,IPR025827,G3DSA:3.40.50.1390,PS51737,IPR006119, IPR038109,PF07508,SSF53041,IPR011109,PTHR30461, PS51736,Coil,PF00239
MPEVRLITPITRQSTKKMQVAAYCRVSSNSADQLNSYAAQIRAYKKCIGARDDWELVDIFADEGLTGMKSETRDEFQRMIRMCELKQIDLIITKSISRFARNTKDALAYVRKLKLLGVGVQFEKEGISTLSMGDEMLLNTFSALAQEESQSISMNQRLSIVKRMELGEYVDSNAPYGYRLVDKALAVYEPEAAVVRDIFDLYLRGFSISEIGRELKSRNIPTKAGKESWHPYRIAYMLKNERYIGDSFYQKTYRETTVPFNQHINRGQEDRFYAKGTHPGIIDKDVFNAVQQLIQKRKETFSRTTTQNIYPLTSRIQCSECGSFYRRRSVSGTVKWVCALHKDDSAACDSHYYSEERIYDGFITMVNKLRFSEDNILGQVISRLEMTLAAMKRNNLVARDLSNSIAELNAKLLMLEQLRSKGYLAPEVYQAQANEIGAELAKLKDVRQKKFNSKAASMLEEVKKLKMLIFELEEPLEAFDEKLFLEIVKSIQINKEDEMSVEFLGGLRFRERI

SEQ ID NO: 5017 - protein, 513 aa, Unknown
  Description of Unknown: Integrase B5018 sequence
  SM00857,G3DSA:1.10.10.2600,IPR036162,PF13408,PS51737, G3DSA:3.40.50.1390,IPR025827,IPR006119,IPR038109,PF07508, IPR011109,SSF53041,PF00239,PTHR30461,PS51736, Coil,cd00338
MLYAIYLRKSRADLEAEAMGQGETLARHRAALLDYAAHHGLEIGAVYEEIISGESIDARPKMKQLLREVEQGRWAGVLCMDIDRLARGNSADQARVSNTFRISGTLIITPSKVYDQSRESDEEYVDFELFMARREYKAISRRIMRGRIASVKEGHFIGSTPPYGYDKVKVEKGRGFTLLPNSESDTVKLIYSLCISGMGCNAIARRLDTMGVTPRKGSSWSSASIQDILKNPVYCGKIRWQYRKEEKSLTDGIVTTHRRENPDCIIAQGLHPALICEEEFDQAQQFLNSRRIPHKKESTELRNPLSGLVYCGMCGSMMTRLGTSSRNHSDTLRCPNRNCSNVSAKLELVESALVEGVARWLNDCRVNVSRKPAADTAKAERTAAEKVRAELAKLDSQREKIYSFLEQGVYSAGEFRERMESLEKRRTQLSENLRQAEQAVSEAEGNRQLYAQIIPSVERVMDIYAQSTPEEKNRLLKTIISRAEYIKTERNTRGNADRCNFTLNVTPLFPETD

SEQ ID NO: 5018 - protein, 513 aa, Unknown
  Description of Unknown: Integrase B5019 sequence
  PTHR30461:SF3,SM00857,G3DSA:1.10.10.2600,IPR036162,PF13408, PS51737,IPR025827,G3DSA:3.40.50.1390,IPR006119,IPR038109, PF07508,IPR011109,SSF53041,PTHR30461,Coil, PS51736,cd00338,PF00239
MMQQALNAVIYARYSSHNQTEQSIEGQLRDCYAFAEREGLQVVGEYIDRAITGRTDERPDFQRMIADARKQEFQRVIVWKFDRFSRDRYDSAIYKHKLKQCGVRVLSAMENVGEGDVSIILEALLEASAEQYSLDLSKKVLRGQRESRLKGTFLGGLTPIGYKLENRKLVADERTAPIVRYIFEQYAKGTSKQDIINELATRGILNRHGKPLSHSTLQTILKNKKYIGVYTHGGQDVAGGCEALIDEKTFLKVQEQLSKRKHAPAASKAVIEYLLQGKLYCGYCGFNMFGDSGRGRNGSTYRYYACRRRKKERDCKKKNEKKDFIEWYVVEQTVEYVLTPERIEYIASELVAQYKKDCGIDRIKAYEKQLDRIKAEISRLVDTLAVCPATARQPIFDKMEQLDAEKQEAELDLSKLRISAKIQISKEHIADWLKQFCNGDALDVDFQKRIIDTFINSVYLYDDKVIIYYNIEGGKQVSYIDMIDSTEEPPFSDDAPGSSGGSDLKRPALRLCC

SEQ ID NO: 5019 - protein, 513 aa, Unknown
  Description of Unknown: Integrase B5020 sequence
  PTHR30461:SF3,SM00857,G3DSA:1.10.10.2600,IPR036162,PF13408, PS51737,G3DSA:3.40.50.1390,IPR025827,IPR006119,IPR038109, PF07508,IPR011109,SSF53041,PTHR30461,Coil, PS51736,cd00338,PF00239
MPEALNAVIYARYSSDRQTEQSIEGQLRECYVFAKANDIAVIDTYIDRAISGKTDNRPAFQKMIEDSAKRQFQAVIVYRLDRFTRNRYDSAIYKARLKKNGVKVLSAMENLNGSPESIIMESLLEGMAEYYSVELSQKITRGMRENALKGKALGGQRVLGYKVNSDCYFEIDETTAPVVVDIFKLYSSGKTVKEICDILNARGVKTARGGAFNKNSLHTILTNKKYIGIYKTKYGEIVGGIPAIIDKELFEMVALRMEQNKKAPARAKAEINYLLSTKLFCGKCRSAMVGESGTSKTGKKYYYYACVKKKREKACDKSNVKKDWIEDLVIQRTVTDILKDDVIEKIADRLVELQKAEAAESGTMLYLQNSLADIQVSIKNIMTAIEKGIITESTKTRLTELEDEKRNVEIEIAKESIARRIISREQIIYWISSFKDGDISSEKYRQQLIDTFVHAVFVYDDKIVITYNYSGENNTATISDLDLSSPPSSCTKKDAAAKSLEVSTTSGLFCAHF

SEQ ID NO: 5020 - protein, 513 aa, Unknown
  Description of Unknown: Integrase B5021 sequence
  PTHR30461:SF3,cd00338,SM00857,G3DSA:1.10.10.2600,IPR036162, PF13408,IPR025827,G3DSA:3.40.50.1390,PS51737,IPR006119, IPR038109,PF07508,IPR011109,SSF53041,PTHR30461, PS51736,Coil,PF00239
MKKKPIEPEMQDAVIYTRYSSHNQRDCSIEQQVADCEIFARQNNLRVVKVYADRHLSGTTDNRPQFQQMLKDASHGHWAYVICWKIDRFARNRYDSATYKFRLKKAGVRVLYAKESIPDGPEGILLESVLEGSAEYYSAALAQNIRRGMKFNAEQCKVNSGSIPFGYCKGPDGRFAVHEANAEVVREIFRKAAAGMPFVDIANDLNSRGLKTSRGGRWNKGSFRLLMNEAYIGVYHFSDTRIEGGMPALIDQGTFWAANERLKANSSVRGRHQDGGDYLLTGKLKCAHCGSYMIGFSGTGKSGELHYYYGCQKRRRERACKKANVPREWIERVVVKAALDYVLRPDVMEWIADAVMEYQEREAASAQLAALTAELEENREATDNVMKAIEAGIITSTTKQRLLDLEAKAQDLKRAIELEKLSHVRLERDQILFWLDRFRGGSLQSQEFRRKVIDAFVSVVYLFDDHLRIAFNYSGGSNAEADFDLVMDAEAAAGELSKKFAQGHVASTSTKAI

SEQ ID NO: 5021 - protein, 513 aa, Unknown
  Description of Unknown: Integrase B5022 sequence
  PTHR30461:SF3,SM00857,G3DSA:1.10.10.2600,IPR036162,PF13408, IPR025827,PS51737,G3DSA:3.40.50.1390,IPR006119,IPR038109, PF07508,IPR011109,SSF53041,PTHR30461,Coil, PS51736,cd00338,PF00239
MIQQALNAVIYARYSSHNQTEQSIEGQLRDCYAFAEREGLQVIGEYIDRAITGRTDERPDFQRMIADARKQEFQRVIVWKFDRFSRDRYDSAIYKHKLKQCGVRVLSAMENVGEGDVSIILEALLEASAEQYSLDLSKKVLRGQRESRLKGTFLGGLTPIGYKLENRKLVADERTAPIVRYIFEQYAKGTSKQDIINELATRCILNRHGKPLSHSTLQTILKNKKYIGVYTHGGQDVAGGCEALIDEKTFLKVQEQLSKRKHAPAASKAVIEYLLQGKLYCGYCGFNMFGDSGRGRNGSTYRYYACRRRKKERDCKKKNEKKDFIEWYVVEQTVEYVLTPERIEYIASELVAQYKKDCGIDRIKTYEKQLDRIKAEISRLVDTLAVCPAAARQPIFDKMEQLDAEKQEVELDLSKLRISAKIQISKEHIADWLKQFCNGDALDVDFQKRIIDTFINSVYLYDDKVIIYYNIEGGKQVSYIDMIDSTEEPPFSDDAPGSSGGSDLKRPALRLCC

SEQ ID NO: 5022 - protein, 513 aa, Unknown
  Description of Unknown: Integrase B5023 sequence
  PTHR30461:SF3,cd00338,SM00857,G3DSA:1.10.10.2600,IPR036162, PF13408,PS51737,G3DSA:3.40.50.1390,IPR025827,IPR006119, IPR038109,PF07508,IPR011109,SSF53041,PTHR30461, PS51736,Coil,PF00239
MAKAKQKAATNDISKLAVIYARYSSHNQTEQSIEGQLAAGHRYADLKGYTVVHEYIDRAMTGRNDNRDDFQKMLSDTSKKQFGAIIVWKVDRFGRNREEITFNKYRCKKNGVRVEYVAENLPDSPEGVILESVLEGMAEYYSLQLSQNVQRGLLESAKKHQVIGGNVPLGLMMDAHKKYVPDLKTAPTVKLIFDMYAEGSTTSEIINHLNSIGMRTKAGKPFTKSSLTTVLKNEKYIGVYKYKDIIRDEGVIPPIVDKEIFYKVQELLKVNRRMPSHKWSYSDYILTDKLFCGKCGTAMVGESGFGKMGVKYSYYICAKRRKDKTCDKKPVRQEWIEEIVLQRVQGILQNEELLEFIAENTWQYYLAQDESMEKLKGLQTELDKVEKSAANLMKAIEAGIFNDMTKARMDELDDQRAVIKKAMAEIEIEKGFKLTKDHILYFLEQFKKLDYKDRDCQRRLIDVFVNSIFVYDDKLRIAFNFGGSDSTITLNEVDKADRGEGFVCCASCPIYKY

SEQ ID NO: 5023 - protein, 513 aa, Unknown
  Description of Unknown: Integrase B5024 sequence
  PTHR30461:SF3,SM00857,G3DSA:1.10.10.2600,IPR036162,PF13408, IPR025827,G3DSA:3.40.50.1390,PS51737,IPR006119,IPR038109, PF07508,SSF53041,IPR011109,PTHR30461,Coil, PS51736,cd00338,PF00239
MMQQALNAVIYARYSSHNQTEQSIEGQLRDCYAFAEREGLQVIGEYIDRAITGRTDERPDFQRMIADARKQEFQRVIVWKFDRFSRDRYDSAIYKHKLKQCGVRVLSAMENVGEGDVSIILEALLEASAEQYSLDLSKKVLRGQRESRLKGTFLGGLTPIGYKLENRKLVADERTAPIVRYIFEQYAKGTSKQDIINELATRGILNRHGKPLSHSTLQTILKNKKYIGVYTHGGQDVAGGCEALIDEKTFLKVQEQLSKRKHAPAASKAVMEYLLQGKLYCGYCGFNMFGDSGRGRNGSTYRYYACRRRKKERDCKKKNEKKDFIEWYVVEQTVEYVLTPERIEYIASELVAQYKKDCGIDRIKTYEKQLDRIKAEISRLVDTLAVCPAAARQPIFDKMEQLDAEKQEVELDLSKLRISAKIQISKEHIADWLKQFCNGDALDVDFQKRIIDTFINSVYLYDDKVIIYYNIEGGKQVSYIDMIDSTEEPPFSDDAPGSSGGSDLKRPALHLYC

SEQ ID NO: 5024 - protein, 513 aa, Unknown
  Description of Unknown: Integrase B5025 sequence
  PTHR30461:SF3,SM00857,G3DSA:1.10.10.2600,IPR036162,PF13408, IPR025827,G3DSA:3.40.50.1390,PS51737,IPR006119,IPR038109, PF07508,IPR011109,SSF53041,PTHR30461,Coil, PS51736,cd00338,PF00239
MRVVLYMRYSSDRQTEQSIEGQNRVCTAFCEQQGYEIVDRYIDRATSAFKDTNKRTEFQRMIRDSEKQLWEGIVVYKLDRFARNRYDSATYKARLKKNGVRVISATENISDNPEGVILEAVLEGMAEFYSKELSQKITRGMFESANKCHSIGGHIPLGYKIENKKLVIDEAGAAIVREAFDLYANGTTVAEICETFNTKGYRTAKNAEFNKNSFRSMFKNERYIGIYKYKDLRIEGGVPAIVDKDTFAIVQKKLSKNAEAPSRGKAKIDYLLSQKLFCGHCGSLMTGESGTGKGGTTYFYYTCGKRKREHTCDKKPLKKDFIERAVVEDALTLLTPETIDELADIAVNESIREMEENSIIPALKDQLHDTERSINNLVKMVEKGVESDTIADRLKELEKEKRAIEKRLVVAQDDYVILEKDHIVWWLSEFCNGDIEDEEFRRHIIDLLVNSVTVWDEPDGWYKITSVYNLTSNKTKTFRCSDLSGQAPPLKDNPNTLFFIGTLFGQTTKHRVE

SEQ ID NO: 5025 - protein, 513 aa, Unknown
  Description of Unknown: Integrase B5026 sequence
  PTHR30461:SF3,cd00338,SM00857,G3DSA:1.10.10.2600,IPR036162, PF13408,IPR025827,PS51737,G3DSA:3.40.50.1390,IPR006119, IPR038109,PF07508,SSF53041,IPR011109,PTHR30461, PS51736,Coil,PF00239
MCAKKKPAMLEPDMQDAVIYTRYSSHNQRDCSIEQQVADCEIFARQNNLRVVKVYADRHLSGTTDNRPQFQQMLKDAAHGHWAYVICWKIDRFARNRYDSATYKFRLKKAGVRVLYAKESIPDGPEGILLESVLEGSAEYYSAALAQNIRRGMKYNAEQCKVNSGSIPFGYCKGADGRFAIHEANAEVVREIFRKAAAGMPFVDIANDLNSRGLKTSRGGRWNKGSFRLLMNEAYIGVYHFSDTRIEGGMPALIDQGTFWAANERLKANSSVRGRHQDGGDYLLTGKLKCAHCGSYMIGFSGTGKSGELHYYYGCQKRRRERACKKANVPREWIERVVVKAALDYVLRPDVMEWIADAVMEYQEREAASAQLAALTAELEENQKATDNVMKAIEAGIITSTTKQRLLDLEAKAQDLKRAIELEKLSHVRLERDQVLFWLDRFRGGSLQSQEFRRKVIDAFVSVVYLSDDHLRIAFNYSGGPNAEADFDLVMDAETAAGELSKKFAQGHVTSTN

SEQ ID NO: 5026 - protein, 513 aa, Unknown
  Description of Unknown: Integrase B5027 sequence
  PTHR30461:SF3,SM00857,G3DSA:1.10.10.2600,IPR036162,PF13408, PS51737,IPR025827,G3DSA:3.40.50.1390,IPR006119,IPR038109, PF07508,SSF53041,IPR011109,PF00239,PTHR30461, PS51736,Coil,cd00338
MKKQPTGGKRLVAYYRYSGGSHQTEQSIEGQRRDCETYARIHGMVILHEYIDRHISGKTDDRPEFQQMIADAGKGMFDYVICWKTDRIARSRYDSIIYKKKLRDNGVELLYAAEANVEGSGGIIVEGLMEALAEYYSAELAEKVRRGMRESALKGKAIGSSRPLGLTVDKDKKYIIDPAGASAVRYIFEQYAAGAASSAIVAHLNEQGLCTSRGNPFNKSSVVRIIQNEVYRGVYVSPKFDVRIEGAVPAIIDDDLWERAQKMFIRNRQSRSPRNDRADYILSGKLFCGECGTAMKGVSGHSSNGEVYFYYNCPCKDCHRRNIPKDELEGLVIRTVCNDVLQPDVMERIANSVIEAQTSELNQPNPEKEALQHELADVQRKAKNLLSALENGTAGAMLTNRLAELEQQADTLSYQLSSLESEPKFPVFSKEEVLYLLEQFLIAPSEETKAYRRRLIDTFVSKIEVSNTELTIYFNIAEEDCGKMKKAPQSNQPEDCSTEKQMVRVARIELTAS

SEQ ID NO: 5027 - protein, 513 aa, Unknown
  Description of Unknown: Integrase B5028 sequence
  PTHR30461:SF3,SM00857,G3DSA:1.10.10.2600,IPR036162,PF13408, PS51737,G3DSA:3.40.50.1390,IPR025827,IPR006119,IPR038109, PF07508,IPR011109,SSF53041,PF00239,PTHR30461, PS51736,Coil,cd00338
MLYAIYLRKSRADLEAEAMGQGETLARHRAALLDYAAHHGLEIGAVYEEIISGESIDARPKMKQLLREVEQGRWAGVLCMDIDRLARGNSADQARVSNTFRISGTLIITPSKVYDQSRESDEEYVDFELFMARREYKAISRRIMRGRIASVKEGHFIGSTPPYGYDKVKVEKGRGFTLLPNSESDTVKQIYSMCISGMGCNAIARRLDMMGVTPRKGSSWSSASIQDILKNPVYCGKIRWQYRKEEKSLTDGIVTTHRRENPDCIIAQGLHPALISEEEFEKAQQFLNSRRIPHKKESTELRNPLSGLVYCGMCGSMMTRLGTGSRNHSDTLRCPNRNCGNVSAKLELVESALVEGVARWLNDCRVNVSRKPAADTAKAERTAAEKVRAELAKLDSQREKIYSFLEQGVYSAGEFRERMESLEKRRTQLSENLRQAEQAVSEAEGNRQLYAQIIPSVERVMDIYAQSTPEEKNRLLKTIISRAEYIKTERNTRGNADRCNFTLNVTPLFPETD

SEQ ID NO: 5028 - protein, 513 aa, Unknown
  Description of Unknown: Integrase B5029 sequence
  SM00857,G3DSA:1.10.10.2600,IPR036162,PF13408,PS51737, G3DSA:3.40.50.1390,IPR025827,IPR006119,IPR038109,PF07508, IPR011109,SSF53041,PTHR30461,Coil,PS51736, cd00338,PF00239
MLYAIYLRKSRADLEAEAMGQGETLARHRAALLDYAAHHGLEIGAVYEEIISGESIDARPKMKQLLREVEQGRWAGVLCMDIDRLARGNSADQARVSNTFRISGTLIITPSKVYDQSRESDEEYVDFELFMARREYKAISRRIMRGRIASVKEGHFIGSTPPYGYDKVKVEKGRGFTLLPNSESDTVKLIYSLCISGMGCNAIARRLDTMGVTPRKGSSWSSASIQDILKNPVYCGKIRWQYRKEEKSLTDGIVTTHRRENPDCIIAQGLHPALICEEEFDQAQQFLNSRRIPHKKESTELRNPLSGLVYCGMCGSMMTRLGTSSRNHSDTLRCPNRNCSNVSAKLEFVESALVEGVARWLNDCRVNVSRKPAADTAKAERTAAEKVRAELAKLDSQREKIYSFLEQGVYSAGEFRERMESLEKRRTQLSENLRQAEQAVSEAEGNRQLYAQIIPSVERVMDIYAQSTPEEKNRLLKTIISRAEYIKTERNTRGNADRCNFTLNVTPLFPETD

SEQ ID NO: 5029 - protein, 513 aa, Unknown
  Description of Unknown: Integrase B5030 sequence
  PTHR30461:SF3,SM00857,G3DSA:1.10.10.2600,IPR036162,PF13408, IPR025827,PS51737,G3DSA:3.40.50.1390,IPR006119,IPR038109, PF07508,SSF53041,IPR011109,PF00239,PTHR30461, PS51736,Coil,cd00338
MRVVLYMRYSSDRQTEQSIEGQNRVCTAFCEQQGYEIVDRYIDRATSAFKDTDKRAEFQRMIRDSEKQLWEGIVVYKLDRFARNRYDSATYKARLKKNGVRVISATENISDNPEGVILEAVLEGMAEFYSKELSQKITRGMFESANKCHSIGGHVPLGYKIENKKLVIDEAGAAIVREAFDLYANGATVAEICETFNTKGYRTAKNAEFNKNSFRSMFKNERYIGIYKYKDLRIEGGVPAIVDKDTFAIVQKKLSKNAEAPSRGKAKIDYLLSQKLFCGHCGSLMTGESGTGKGGTTYFYYTCGKRKREHTCDKKPLKKDFIERAVVEDALTLLTPATIDELADIAVKESVREMEENSIIPALKDQLHETERSINNLVKMVEKGVESDTIADRLKELEKEKRAIEKRLVVAQDDYVILEKDHIVWWLSEFCNGDIEDEEFRRHIIDLLVNSVTVWDEPDGWYKITSVYNLTSNKTKTFRCSDLSGQAPPLKDNPNTLFFIGTLFGQTTKHRVE

SEQ ID NO: 5030 - protein, 513 aa, Unknown
  Description of Unknown: Integrase B5031 sequence
  SM00857,G3DSA:1.10.10.2600,IPR036162,PF13408,IPR025827, G3DSA:3.40.50.1390,PS51737,IPR006119,IPR038109,PF07508, IPR011109,SSF53041,PTHR30461,Coil,PS51736, cd00338,PF00239
MPTDYALYLRKSRADLEAEAHGEGDTLARHEHILMELAKSRALPIGAIYREIVSGERIANRPVMQQLLSEVEDGRWKGVLVTETSRLARGDTIDQGIVAQAFKLSGTLIVTPSKTYDPTQEADEEWMEFGLFMSRQEYRMIRRRMTAGMNAAKREGRFIGNVAPYGYERFKLDGRGWSLRIVPEQAEIVRMIFDLYNSGLGYCRIEKRLNELHIPAPKGEKWTSATIPGIIQNPHYIGMIPAGRRPGRKVVKDGEVKLIRPRQKCELYPGMHEPIISRETWDKAQARIGKNREARVPAGRRQSNPLAGLLVCDCCGKNMQRRPQTGRGSQTQILCPTRGCPTVAHNADELEDMVIDSLRVFLAKLEAGKPAKTDVSVEYAALEECTKKLKDLEARQRRTFELVEDGTYTREIFLARQAELTAERVRIEQQKAELEEAVAKKKQEAEAQNNLAPAARQVLEAYNKQLSVEDRNRLLKKVIDHIDYHKRKRTRWNPESDLSITLHPVVTSSNPHR

SEQ ID NO: 5031 - protein, 513 aa, Unknown
  Description of Unknown: Integrase B5032 sequence
  PTHR30461:SF3,cd00338,SM00857,G3DSA:1.10.10.2600,IPR036162, PF13408,IPR025827,G3DSA:3.40.50.1390,PS51737,IPR006119, IPR038109,PF07508,IPR011109,SSF53041,PTHR30461, PS51736,Coil,PF00239
MRVVLYMRYSSDRQTEQSIEGQNRVCTAFCEQQGYEIVDRYIDRATSAFKDTDKRTEFQRMIRDSEKQLWEGIVVYKLDRFARNRYDSATYKARLKKNGVRVISATENISDNPEGVILEAVLEGMAEFYSKELSQKITRGMFESANKCHSIGGHIPLGYKIENKKLVIDEAGAAIVREAFDLYANGATVAEICETFNTKGYRTAKNAEFNKNSFRSMFKNERYIGIYKYKDLRIEGGVPAIVDKDIFTIVQKKLSKNAEAPSRGKAKIDYLLSQKLFCGHCGSLMTGESGTGKGGTTYFYYTCGKRKREHTCDKKPLKKDFIERAVVEDALTLLTPETINELADIAVKESVREMEENSIIPALKNQLHETERSINNLVKMVEKGVESDTIADRLKELEKEKRAIEKRLVVAQDDYVILEKDHIVWWLSEFCNGDIEDEEFRRHIIDLLVNSVTVWDEPDGWYKITSVYNLTSNKTKTFRCSDLSGQAPPLKDNPNTLFFIGTLFGQTTKHRVE

SEQ ID NO: 5032 - protein, 513 aa, Unknown
  Description of Unknown: Integrase B5033 sequence
  PTHR30461:SF3,SM00857,G3DSA:1.10.10.2600,IPR036162,PF13408, IPR025827,PS51737,G3DSA:3.40.50.1390,IPR006119,IPR038109, PF07508,IPR011109,SSF53041,PTHR30461,Coil, PS51736,cd00338,PF00239
MKKQPTVGKRLVAYYRYSGGSHQTEQSIEGQRRDCETYARIHGMVILHEYIDRHISGKTDDRPEFQQMIADAGKGMFDYVICWKTDRIARSRYDSIVYKKKLRDNGVELLYAAEANVEGSGGIIVEGLMEALAEYYSAELAEKVRRGMRESALKGKAIGSSRPLGLTVDKDKKYIIDPAGAAAVRYIFEQYAAGAASSSIVAHLNEQGLCTSRGNPFNKSSVVRIIQNEVYRGVYVSPKFDVRIEGAVPAIIDDDLWERAQKMFIRNRQSRSPRNDRADYILSGKLFCGECGTAMKGVSGHSSNGEVYFYYNCPCKDCHRRNIPKDELEGLVIRTVCNDVLQPDVMDRIADSVIEAQTAELNQPNPEKEALQHELADVQRKAKNLLAALENGTAGSMLTNRLAELEQQADTLSYQLSSLESEPKFPVFSKEEVLYLLEQFLIAPSEKTKAYRRRLIDTFVSKIEVSNTELTIYFNIAEEDCGKMKKAPQSNQPEGCSTEKQMVRVARIELTAS

SEQ ID NO: 5033 - protein, 513 aa, Unknown
  Description of Unknown: Integrase B5034 sequence
  PTHR30461:SF3,SM00857,G3DSA:1.10.10.2600,IPR036162,PF13408, PS51737,G3DSA:3.40.50.1390,IPR025827,IPR006119,IPR038109, PF07508,IPR011109,SSF53041,PF00239,PTHR30461, PS51736,Coil,cd00338
MQRAVIYARYSPGPNQTEQSIEGQVRECTKYAEQHGLRIVGTYVDRKISGKTDNRREFQRMIDDSEKHIFDVIILYHTDRFARNRYDSAIYKHKLKENGVELRYATTDIPKGPEGIILESIMEGWAEYYSAELSRKIKRGMRESALKCHSTGAGRCLGYRTAEDKSLVIEPEGAKAVQTVFDMYIKGKSHADICRYLNDCGFRTAQGKLFNKNSVTHIIRNKRYIGVYTYDDITIEDGIPAIISKDTFHLAQLEAARRKTAKRPKEPKAEYLLSGKAFCGHCQKPLVGVSGTGKSGNKWYYYYCQESRAKRGCTKRPVKRDWLEREVVERTVAEVLQPEVIQHIAKKCYDLQMEYRQDNSDVLFYELKLKDVRKAIKNTMRAIESGVKTKTLPARLQELENEEEALEAELAIAKASDFVITTDQIEFLLTQFAEPWECESEEEYHRRIIKCFVHKVFLFDDKLLIYYNVSRDGKTREQSEAELLEEVLGEGFDKRSSGSTKRWQQFGYFKRNA

SEQ ID NO: 5034 - protein, 513 aa, Unknown
  Description of Unknown: Integrase B5035 sequence
  PTHR30461:SF3,cd00338,SM00857,G3DSA:1.10.10.2600,IPR036162, PF13408,IPR025827,PS51737,G3DSA:3.40.50.1390,IPR006119, IPR038109,PF07508,SSF53041,IPR011109,PTHR30461, PS51736,Coil,PF00239
MCAKKKPAMLEPDMQDAVIYTRYSSHNQRDCSIEQQVADCEIFARQNNLRVVKVYADRHLSGTTDNRPQFQQMLKDAAHGHWAYVICWKIDRFARNRYDSATYKFRLKKAGVRVLYAKESIPDGPEGILLESVLEGSAEYYSAALAQNIRRGMKYNAEQCKVNSGSIPFGYRKGPDGRFAIHEANAEVVREIFRKAAAGMPFVDIANDLNSRGLKTSRGGRWNKGSFRLLMNEAYIGVYHFSDTRIEGGMPALIDQGTFWAANERLKANSSVRGRHQDGGDYLLTGKLKCAHCGSYMIGFSGTGKNGELHYYYGCQKRRRERACKKANVPREWIERVVVKAALDYVLRPDVMEWITDAVMEYQEREAASAQLAALTAELEENQKATDNVMKAIEAGIITSTTKQRLLDLEAKAQDLKRAIELEKLSHVRLERDQVLFWLDRFRGGSLQSQEFRRKVIDAFVSVVYLSDDHLRIAFNYSGGSNAEADFDLVMDAEAAAGELSKKFAQGHVTSTK

SEQ ID NO: 5035 - protein, 513 aa, Unknown
  Description of Unknown: Integrase B5036 sequence
  cd00338,SM00857,G3DSA:1.10.10.2600,IPR036162,PF13408, PS51737,G3DSA:3.40.50.1390,IPR025827,IPR006119,IPR038109, PF07508,IPR011109,SSF53041,PTHR30461,PS51736, Coil,PF00239
MAHKTAVLYARYSSDKQREASIDDQLRVCRDYCKAEGIDVVAEYKDYALSGKTDHRPEFRRMIANAPESDYVVVYMFDRFSRDRYDSATYKKMLRECGVRVLSASEKVEDTPEGGLQEGMLELLSEYYVRDLARKVRRGMEGNALKAKDNGYRIFGYSTDPETRCYVIDEAEANAVREMFSMHISGNSVNSIAREMARRGWTTTTGKPVDYNWAWRVLNRKAYTGLYSWGGIEVPGGMPQIIDEVTFARSQAVVPRKRRKDENWDVYRLTGKLFCGFCGKPMHGTAGTGKKGKRYHYYACKEGDGCKRPWVRRELLEDSIADAVLETCSDERRMRMLARRIVEAYVEPGEEEAEMASIEAQIVSLEREQHNMTQAAMKGFVTDEMVARNDEIKAQLKNLHNRHGVLASQMCEITEDDIVGYMMHGFNRDDEDFIFGSIVREAYLFDDCVLLVFNFRDEVGDLTEIRVALQTQKKCEPGGGFALCSRGVPGEVFPEPVSLPGGFGLIIPLRRAA

SEQ ID NO: 5036 - protein, 513 aa, Unknown
  Description of Unknown: Integrase B5037 sequence
  PTHR30461:SF3,SM00857,G3DSA:1.10.10.2600,IPR036162,PF13408, IPR025827,PS51737,G3DSA:3.40.50.1390,IPR006119,IPR038109, PF07508,IPR011109,SSF53041,PF00239,PTHR30461, PS51736,Coil,cd00338
MKKQPTGGKRLVAYYRYSGGSHQTEQSIEGQRRDCETYARIHGMVILHEYIDRHISGKTDDRPEFQQMIADAGKGMFDYVICWKTDRIARSRYDSIVYKKKLRDNGVELLYAAEANVEGSGGIIVEGLMEALAEYYSAELAEKVRRGMRESALKGKAIGSSRPLGLTVDKDKKYIIDPAGAAAVRYIFEQYAAGAASSAIVAHLNEQGLCTSRGNPFNKSSVVRIIQNEVYRGVYVSPKFDVRIEGAVPAIIDDDLWERAQKMFIRNRQSRSPRNDRADYILSGKLFCGECGTAMKGVSGHSSNGEVYFYYNCPCKDCHRRNIPKDELEGLVIRTVCNDVLQPDVMNRIADSVIETQTAELNQPNPEKEALQHELADVQRKAKNLLAALENGTAGAMLTNRLAELEQQADTLSYQLSSLESEPKFPVFSKEEVLYLLEQFLIAPSEKTKAYRRRLIDTFVSKIEVSNTELTIYFNIAEEDCGKIKKAPQSNQPEGCSTEKQMVRVARIELTAS

SEQ ID NO: 5037 - protein, 513 aa, Unknown
  Description of Unknown: Integrase B5038 sequence
  SM00857,G3DSA:1.10.10.2600,IPR036162,PF13408,PS51737, G3DSA:3.40.50.1390,IPR025827,IPR006119,IPR038109,PF07508, IPR011109,SSF53041,PTHR30461,Coil,PS51736, cd00338,PF00239
MQTEYALYLRKSRADLEAEAHGEGDTLARHEHILMELAKSRALPIGAIYREIVSGERIANRPVMQQLLSEEEDGRWKGVLVTETSRLARGDTIDQGIVAQAFKLSGTLIVTPSKTYDPTQEADEEWMEFGLFMSRQEYRMIRRRMTAGMNAAKREGRFIGNVAPYGYERFKLDGRGWSLRIVPERAEIVRMIFDLYNSGLGYCRIEKRLNELHIPAPKGEKWTSATIPGIIQNPHYIGMIPAGRRPGRKVVKDGEVKLIRPRQKCELYPGMHEPIISRETWDKAQARIGKNREARVPAGRRQSNPLAGLLVCDCCGKNMQRRPQIGRGSQTQILCPTRGCPTVAHNADELEDMVIDSLRVFLAKLEAGKPAKTDVSVEYAALEECAKKLKDLEARQRRTFELVEDGTYTREIFLARQAELTAERVKIEQQKTELEAAIRNKKQEAEAQNNLAPAARQVLEAYKKDMSAEDRNRLLKKVIDHIDYHKRKRTRWNPESDLSITLHPVVTSSSPHR

SEQ ID NO: 5038 - protein, 513 aa, Unknown
  Description of Unknown: Integrase B5039 sequence
  SM00857,G3DSA:1.10.10.2600,IPR036162,PF13408,IPR025827, PS51737,G3DSA:3.40.50.1390,IPR006119,IPR038109,PF07508, SSF53041,IPR011109,PTHR30461,Coil,PS51736, cd00338,PF00239
MAKPEVSELAVVYARYSSHSQGEQSIEGQLSNARDYAAAHGYTIVHEYVDRAKSGRTDNRAEFQQMLKDTAKRQFSVIILWKVDRFGRNREEIAINKMKCRKNGVRVEYVAETIPDSPEGVILESVLEGFAEYYSLQLSQNIRRGRAESAEKCQSLGGNRPLGYKTGPDKKFVIDENTAPTVKMIFTMYADGKTVTEIVDKLNEMGLRTLRGGPFTKNSLHSILKNKKYIGVYEYQGREIKDGVPRIIEDDVFNKVQEMLKINKRAPAKTWSRADYILTNKLFCGKCGALMFGESGTSKTGVKHNYYICSNKKRFRSCDKKAVRQADIEDTVLNATHELLQDDELLDYIVDRTWEYYLAQDNSQEELRNLQRQLAQTDTAISNLIRAIEAGILTEETKKRMDELTQQKADLKASIADREIARGFHLQKSHIAFYLRSLRDADWSDKEAQKRLIQTFVNAVFVYDDHITLTYNFSGDKSTITLHDMQRFEDGEEFGCRASRSSVCHCIRSVSYI

SEQ ID NO: 5039 - protein, 513 aa, Unknown
  Description of Unknown: Integrase B5040 sequence
  PTHR30461:SF3,SM00857,G3DSA:1.10.10.2600,IPR036162,PF13408, IPR025827,PS51737,G3DSA:3.40.50.1390,IPR006119,IPR038109, PF07508,IPR011109,SSF53041,PTHR30461,Coil, PS51736,cd00338,PF00239
MPTVTVIQPTISEEQNTKIRCAAYCRVSSDSEDQLNSFMAQMRYYSQVFDNSETEELIDIYADEGITGTREDKRDEFQRLMKDCRKGKIDRIYTKSISRFARNTRDCLKNVRELKSLGITIYFEKENIDTANMTDEMMITIMGGLAQEESTSISQNLRWGIKKRMENGTIKMCTPVFGYELVDGNLILKSDEAEIVRQIFDWYLNGYGLAAIAQMLNALKIKRFGRTSHWTASTVGVMLRNEKYIGDQLFQKKYTTDTLPFRQVVNKGERDQYYYSDRHKPIISRDDFDKVQNILAEHKKSFKGLKQDHIFAKKIYCGECGSTFKFKCRKNKNYWVCRLHDAESDKCSNKQILEANAISAFIMLCNKLWYNYKQILLPCQAALQDLKLKKFSGKTQVMDIHKEIAKLREQAHVLARLKTKGFLDEAKYLEQTTELTAKINKLQTELKKLTRSDDEDEMLEQIEMLIDFFEKRENIMIDFDESAFENIVEKIVVIDQYELEFHLIGGLKFKENI

SEQ ID NO: 5040 - protein, 513 aa, Unknown
  Description of Unknown: Integrase B5041 sequence
  PTHR30461:SF3,SM00857,G3DSA:1.10.10.2600,IPR036162,PF13408, PS51737,IPR025827,G3DSA:3.40.50.1390,IPR006119,IPR038109, PF07508,IPR011109,SSF53041,PTHR30461,Coil, PS51736,cd00338,PF00239
MLKTDMTNEKSTAVIYARFSSDKQREESIEGQIRECTQFAKDQNLEIIATYIDRALSARSDNRPDFLRMIADSAKGLFQYVIVYQLDRFSRSRYDSAVYKHKLKKNGVRVLSAKERIGDDPSSIILESMLEGYAEYYSAELSQKVKRGMTENVLEHKWTGGYVPLGYCLAPDKTLQIDPVGAEAVKIIYDKWLSGCRIMDIIRYLNDHNYVTSRKAKFRYSSLNRILTNPIYTGLYRWGSIEVADYAPPIISQKQFSLAQEKIHHIKAHPRAKRRSAAYALTGIIYCGVCGSPMTGQSGHSKSGALYHYYRCSTKNNYHDRGKKLNVKCTNRNISREKLEDLVLQTTINILMNPEAVHMIAKQAVAVQQKDPVSMELDRIKEDKKIIQKKLNNSIKAVEAGIISTTLAANISQYEKEIADLDIKMEKIKLSSTPVKIDEIAVEFFLKNLLLQKKEHDKYRLDMFQTFIRRVIVYPDKVEIQYNYTATPILENPVIKMMTGNPGCSRCERLVTR

SEQ ID NO: 5041 - protein, 513 aa, Unknown
  Description of Unknown: Integrase B5042 sequence
  PTHR30461:SF3,SM00857,G3DSA:1.10.10.2600,IPR036162,PF13408, IPR025827,PS51737,G3DSA:3.40.50.1390,IPR006119,IPR038109, PF07508,SSF53041,IPR011109,PTHR30461,Coil, PS51736,cd00338,PF00239
MKKQPSGGKRLVAYYRYSGGSHQTEQSIEGQRRDCETYARIHGMVILHEYIDRHISGKTDDRPEFQQMIADAGKGMFDYVICWKTDRIARSRYDSIIYKKKLRDNGVELLYAAEANVEGSGGIIVEGLMEALAEYYSAELAEKVRRGMRESALKGKAIGSSRPLGLTVDKDKKYIIDPAGAAAVRYIFEQYAAGAASSAIVAHLNEQGLCTSRGNPFNKSSVVRIIQNEVYRGVYVSPKFDVRIEGAVPAIIDDDLWERAQKMFIRNRQSRSPRNDRADYILSGKLFCGECGTAMKGVSGHSSNGEVYFYYNCPCKDCHRRNIPKDELEGLVIRTVCNDVLQPDVMDHIADSVIEAQTAELNQPNPEKEALQHELADVQRKAKNLLSALENGTAGAMLTNRLAELEQQADTLSYQLSSLESEPKFPVFSKEEVLYLLEQFLIAPSEKTKAYRRRLIDTFVSKIEVSNTELTIYFNISEEDCGKMKKAPQSNQPEGCSTEKQMVRVARIELTAS

SEQ ID NO: 5042 - protein, 513 aa, Unknown
  Description of Unknown: Integrase B5043 sequence
  PTHR30461:SF3,SM00857,G3DSA:1.10.10.2600,IPR036162,PF13408, IPR025827,PS51737,G3DSA:3.40.50.1390,IPR006119,IPR038109, PF07508,IPR011109,SSF53041,PTHR30461,Coil, PS51736,cd00338,PF00239
MKKAVIYARYSSDSQTEQSIEGQLRVVNQFASNNDYIIIDTYIDRATTGTNTNRPGFQKMIADSARRDFDYVLVYKLDRFARNRFDSAFNKKALKKNGVKVVSATENISDSPEGIILESMLEGMAEYYSAELSQKVKRGQFESLEKGTFLGGTMLYGYKVNNKIIEINEEQAYIVRKIFTAYANGKTALQIADMLKNDNILNNQGRLFCANSIMNLLKNKKYTGLLEYGDYVKENYYPRIIDDNTFEIVSKRIEDNKRSPARMKAYCLYRLSGKLYCGHCKSLMTGESGTSKQGKIHYYYKCFGKKKHNGCDKKSVKKEELENLVVALVLQHILAEDKILDTIEGVTSAYNESVKQSTELSILKQEQAQNEKYINNILTAIKNGIFSETTQKELIKLESRQTELKEAILVQEALQQNKLSKEQVLFFFKQFIQEELSDEEAKTSIIDTLVYKVILYDDKIRIILKNKDNITKDGSLEELEKMCSNLAQLSPPLSHNPNIYFTKDFIILDYVFK

SEQ ID NO: 5043 - protein, 513 aa, Unknown
  Description of Unknown: Integrase B5044 sequence
  PTHR30461:SF3,SM00857,G3DSA:1.10.10.2600,IPR036162,PF13408, IPR025827,PS51737,G3DSA:3.40.50.1390,IPR006119,IPR038109, PF07508,SSF53041,IPR011109,PTHR30461,Coil, PS51736,cd00338,PF00239
MGIIMPEALNAVIYARYSSDRQTEQSIEGQLRECYAFAKANDIAVIDTYIDRAISGKTDNRPAFQKMIEDSAKRQFQAVIVYRLDRFTRNRYDSAIYKARLKKNGVKVLSAMENLNGSPESIIMESLLEGMAEYYSVELSQKITRGMRENALKGKALGGQRVLGYKVNSDCYFEIDETTAPVVVDIFKLYSSGKTVKEICDILNARGVKTARGGAFNKNSLHTILTNKKYIGVYKTKYGEIVGGIPAIIDKELFEMVALRMEQNKKAPARAKAEKNYLLSTKLFCGKCRSAMVGESGTSKTGKKYYYYACVKKKREKACDKSNVKKDWIEDLVIQRTVTDILKDDVIEKIADRLVELQKAEAAESGTMLYLQNSLADIQVSIKNIMTAIEKGIITESTKTRLTELEDEKRNVEIEIAKESIARRIISREQIIYWISSFKDGDITSEKYRQQLIDTFVHAVFVYDEKIVITYNYSGENNTATISDLDLSSPPLQSNPNIFVTLDVFGLVVQIER

SEQ ID NO: 5044 - protein, 513 aa, Unknown
  Description of Unknown: Integrase B5045 sequence
  PTHR30461:SF3,SM00857,G3DSA:1.10.10.2600,IPR036162,PF13408, IPR025827,G3DSA:3.40.50.1390,PS51737,IPR006119,IPR038109, PF07508,IPR011109,SSF53041,PTHR30461,Coil, PS51736,cd00338,PF00239
MKKQPTGGNRLVAYYRYSGGSHQTEQSIEGQRRDCETYARIHGMVILHEYIDRHISGKTDDRPEFQQMIADAGKGMFDYVICWKTDRIARSRYDSIVYKKKLRDNGVELLYAAEANVEGSGGIIVEGLMEALAEYYSAELAEKVRRGMRESALKGKAIGSSRPLGLTVDKDKKYIIDPAGAAAVRYIFEQYAAGAASSAIVAHLNEQGLCTSRGNPFNKSSVVRIIQNEVYRGVYVSPKFDVRIEGAVPAIIDDDLWERAQKMFIRNRQSRSPRNDRADYILSGKLFCGECGTAMKGVSGHSSNGEVYFYYNCPCKDCHRRNIPKDELEGLVIRTVCNDVLQPDVMDRIADSVIEAQTAELNQPNPEKEALQHELADVQRKAKNLLAALENGTAGAMLTNRLAELEQQADTLSYQLSSLESEPKYPVFSKEEVLYLLEQFLIAPSEKTKAYRRRLIDTFASKIEVSNTELTIYFNIAEEDCGKMKKAPQSNQPEGCSTEKQMVRVARIELTAS

SEQ ID NO: 5045 - protein, 513 aa, Unknown
  Description of Unknown: Integrase B5046 sequence
  PTHR30461:SF3,SM00857,G3DSA:1.10.10.2600,IPR036162,PF13408, IPR025827,G3DSA:3.40.50.1390,PS51737,IPR006119,IPR038109, PF07508,SSF53041,IPR011109,PF00239,PTHR30461, PS51736,Coil,cd00338
MPEALNAVIYARYSSDRQTEQSIEGQLRECYAFAKANDIAVIDTYIDRAISGKTDNRPAFQKMIEDSAKRQFQAVIVYRLDRFTRNRYDSAIYKARLKKNGVKVLSAMENLNGSPESIIMESLLEGMAEYYSVELSQKITRGMRENALKGKALGGQRVLGYKVNSDCYFEIDETTAPVVVDIFKLYSSGKTVKEICDILNARGVKTARGGAFNKNSLHTILTNKKYIGIYKTKYGEIVGGIPAIIDKELFEMVALRMEQNKKAPARAKAEINYLLSTKLFCGKCRSAMVGESGTSKTGKKYYYYACVKKKREKACDKSNVKKDWIEDLVIQRTVTDILKDDVIDKIADRLVELQKAEAAESGTMLYLENSLAEIQVSIKNIMTAIEKGIITESTKTRLTELEDEKRNVEIEIAKESIARRIISREQIIYWISSFKDGDITSEKYRQQLIDTFVHAVFVYDDKIVITYNYSGENNTATISDLDLSSPPPKSPDNLGFLLICCMIDEAILCTFGL

SEQ ID NO: 5046 - protein, 513 aa, Unknown
  Description of Unknown: Integrase B5047 sequence
  PTHR30461:SF3,SM00857,G3DSA:1.10.10.2600,IPR036162,PS51737, G3DSA:3.40.50.1390,IPR006119,IPR038109,PF07508,SSF53041, IPR011109,PF00239,PTHR30461,PS51736,Coil, cd00338
MKRPDDYAIYLRKSRKDLDLEALGEGETLARHRTALLELADKKGLKITRIYEEMVSGESIADRPQMQQLLDDVCAGTYAGVLVMEVERLARGNTKDQGEVAEAFSMSNTLIVTPTKTYDPNNEFDEEYFEFGLFMSRREYKTIRRRMQRGLIESIKEGNYVGSLPPYGYDIIRINKKERTLKLNDQSQYVKMMFDWFVNEGLSCGQIARRLSEMGIPTQTGKSEWNRATVKDILQNTLYTGKIRWNRRKVSKEKGSDGRTVKRKRRLTPEDYMVVDGKHPAIVSQEIFDKAQTLFCGQVPLKAQTTITNPFARLMVCKHCGKGIGYNTFAHRGGQTKGRMSHGTSLTCKVKSAPYDDVVAAVAAALRDYISDFEFKLNNDEEARKNKQHEEMLHSMNVELNKLKQKREKLFDFLESGIYTKQEFMERKGVLSERIEAMQISIENIKKSLPPPVDYREKILRVSEALSALEDPDVPAKAKNDLLKTVVRKIEYDCVDFGRNKGGEVHLDVYLKE

SEQ ID NO: 5047 - protein, 513 aa, Unknown
  Description of Unknown: Integrase B5048 sequence
  PTHR30461:SF3,cd00338,SM00857,G3DSA:1.10.10.2600,IPR036162, PF13408,IPR025827,PS51737,G3DSA:3.40.50.1390,IPR006119, IPR038109,PF07508,IPR011109,SSF53041,PTHR30461, PS51736,Coil,PF00239
MRVVLYMRYSSDRQTEQSIEGQNRVCTAFCEQQGYEIVDRYIDRATSAFKDTDKRTEFQRMIRDSEKQLWEGIVVYKLDRFARNRYDSATYKARLKKNGVRVISATENISDNPEGVILEAVLEGMAEFYSKELSQKITRGMFESANKCHSIGGHIPLGYKIENKKLVIDEAGAAIVREAFDLYANGATVAEICETFNTKGYRTAKNAEFNKNSFRSMFKNERYIGIYKYKDLRIEGGVPAIVDKDTFAIVQKKLSKNAEAPSRGKAKIDYLLSQKLFCGHCGSLMTGESGTGKGGTTYFYYTCGKRKREHTCDKKPLKKDFIERAVVEDALTLLTPETIDELADIAVNESIREMEENSIIPALKDQLHDTERSINNLVKMVEKGVESDTIADRLKELEKEKRAIEKRLVVAQDDYVLLEKDHIVWWLSEFCNGDIEDEEFRRHIIDLLVNSVTVWDEPDGWYKITSVYNLTSNKTKTFRCSDLSGQAPPLKYNPNTLFFIGTLFGQTTKHRVE

SEQ ID NO: 5048 - protein, 513 aa, Unknown
  Description of Unknown: Integrase B5049 sequence
  PTHR30461:SF3,SM00857,G3DSA:1.10.10.2600,IPR036162,PF13408, PS51737,IPR025827,G3DSA:3.40.50.1390,IPR006119,IPR038109, PF07508,IPR011109,SSF53041,PTHR30461,Coil, PS51736,cd00338,PF00239
MMQQALNAVIYARYSSHNQTEQSIEGQLRDCYAFAEREGLQVVGEYIDRAITGRTDERPDFQRMIADARKQEFQRVIVWKFDRFSRDRYDSAIYKHKLKQCGVRVLSAMENVGEGDVSIILEALLEASAEQYSLDLSKKVLRGQRESRLKGTFLGGLTPIGYKLENRKLVADERTAPIVRYIFEQYAKGTSNQDIINELAARGILNRHGKPLSHSTLQTILKNKKYIGVYTHGGQDVAGGCEALIDEKTFLKVQEQLSKRKHAPAASKAVIEYLLQGKLYCGYCGFNMFGDSGRGRNGSTYRYYACRRRKKERDCKKKNEKKDFIEWYVVEQTVEYVLTPERIEYIASELVAQYKKDCGIDRIKTYEKQLDRIKAEISRLVDTLAVCPAAARQPIFDKMEQLDAENQEVELDLSKLRISAKIQISKDHIADWLKQFCNGDALDVDFQKRIIDTFINSVYLYDDKVIIYYNIEGGKQVSYIDMIDSTEEPPFSDDAPGSSGGSDLKRPALRLCC

SEQ ID NO: 5049 - protein, 513 aa, Unknown
  Description of Unknown: Integrase B5050 sequence
  PTHR30461:SF3,cd00338,SM00857,G3DSA:1.10.10.2600,IPR036162, PF13408,PS51737,IPR025827,G3DSA:3.40.50.1390,IPR006119, IPR038109,PF07508,IPR011109,SSF53041,PTHR30461, PS51736,Coil,PF00239
MQQAVIYARYSPGPNQTEQSIEGQVRECTKYAELHDLRIVGTYIDRKISGKTDNRREFQRMIDDSEKHIFDVIILYHTDRFARNRYDSAIYKHKLKENGVELRYATTDIPKGPEGIILESIMEGWAEYYSAELSRKIKRGMRESALKCHSTGAGRCLGYRTAEDKSLVIEPEGAKAVQTVFDMYIKGKSHADICRYLNDCGFRTAQGKLFNKNSVTHIIRNKRYIGVYTYDDITIEDGIPAIISKDTFHLAQLEAARRKTAKRPKEPKAEYLLSGKAFCGHCQKPLVGVSGTGKSGNKWYYYYCQESRAKRGCTKKPVKRDWLEREVVKRTVAEVLQPEVIQHIAKKCYDLQMEYRQDNSDVLFYELKLKDVRKAIKNTMHAIESGVKTKTLPARLQELENEEEALEAELAIAKASDFVITADQIEFLLTQFAEPWECESEEEYHRRIIKCFVHKVFLFDDKLLIYYNVSRDGKTREQSEAELLEEALGEGFDKRSSGSTMRKATPCGWLFAC

SEQ ID NO: 5050 - protein, 513 aa, Unknown
  Description of Unknown: Integrase B5051 sequence
  PTHR30461:SF3,SM00857,G3DSA:1.10.10.2600,IPR036162,PF13408, IPR025827,PS51737,G3DSA:3.40.50.1390,IPR006119,IPR038109, PF07508,SSF53041,IPR011109,PF00239,PTHR30461, PS51736,Coil,cd00338
MKKQPTGGKRLVAYYRYSGGSHQTEQSIEGQRRDCETYARIHGMVILHEYIDRHISGKTDDRPEFQQMIADAGKGMFDYVICWKTDRIARSRYDSIVYKKKLRDNGVELLYAAEANVEGSGGIIVEGLMEALAEYYSAELAEKVRRGMRESALKGKAIGSSRPLGLTVDKDKKYIIDPAGAAAVRYIFEQYAAGAASSAIVAHLNEQGLCTSRGNPFNKSSVVRIIQNEVYRGVYVSPKFDVRIEGAVPAIIDDDLWERAQKMFVRNRQSRSPRNDRADYILSGKLFCGECGTAMKGVSGHSSNGEVYFYYNCPCKDCHRRNIPKDELEGLVIRTVCNDVLQPDVMDRIADSVIESQTAELNQPNPEKEALQHELADVQRKAKNLLSALENGTAGAMLTNRLAELEQQADTLSYQLSSLESEPKFPVFSKEEVLYLLEQFLIAPSEKTKAYRRRLIDTFVSKIEVSNTELTIYFNIAEEDCGKMKKAPQSNQPEGCSTEKQMVRVARIELTAS

SEQ ID NO: 5051 - protein, 513 aa, Unknown
  Description of Unknown: Integrase B5052 sequence
  PTHR30461:SF3,SM00857,G3DSA:1.10.10.2600,IPR036162,PF13408, IPR025827,G3DSA:3.40.50.1390,PS51737,IPR006119,IPR038109, PF07508,SSF53041,IPR011109,PF00239,PTHR30461, PS51736,Coil,cd00338
MRAFIYCRFSSHKQQELSIEGQRDICQEYADKHNITVVGQYADRARSGKTENRADFRRLMRDAATGVVDCVLVWRYDRFFRNRAESALYRKQLEAAGVHLISVTEYIPEGSAGIITQGMIETVAEYFSAKLSEDVSRGMNKAAQHCQIVGRAPLGYRAGPNKRWQIDPVGAELVRRIFEWYASGKAMGQLAAQLNEEGHRTTNGTLYTRSSFNSILRNEKYIGVYSYGGEVRIEGGCPRIIEDELFFTVQRRLSANRHRPGAYKAEVPYLLSGKLFCGLCGAPMTGTAGTSHTGARHYYYICNNRRAKACKKKNVRLDLIEEAVLQSALDILTDENIAYISAEVERRCAENSDSAALLASLNAQLEEVQRRLKNIGNAIAQGIITETTKELLEEAEADRTALRQQIDRAKVQAALVVKAEAVACWLDGFRRGDRTDPDFRRQVFGALVHSVFVYDDYLKIIFNVDSAGAAVVPYEAAQAATPSEAPPGSYLDTLGAPKNALHESVGHFFVALF

SEQ ID NO: 5052 - protein, 513 aa, Unknown
  Description of Unknown: Integrase B5053 sequence
  SM00857,G3DSA:1.10.10.2600,IPR036162,PF13408,PS51737, G3DSA:3.40.50.1390,IPR025827,IPR006119,IPR038109,PF07508, IPR011109,SSF53041,PTHR30461,Coil,PS51736, cd00338,PF00239
MKMMQNDNRTAITYYRYSSHRQGEQSIEGQRAEAERWAKANGYTIVREYADRAMTGTNDDREQFQLMLRELERLRPAVLILWKVDRMGRNKEEIAFNKYRCKKNGVKVIYTAESIPDTPEGVILESVLEGMAEYYSLQLSQNVRRGLRVSATKCQSTGGNRPLGYRTGPDKKFEIDPEGAAIVRQVFERYVRGETQAEIVHALNEQGLRTLHGRPFTHNSLRTVLQNEKYIGVYQYKDVRIEGGVPAIIDVETFQKAQRIRKRNRRINWKRWSVAEYLLTGKLFCGSCGDMMVGVSGTSKTGAKHHYYGCSSRYGDKRFRSTCRRKAVRKAWIEGIVLREISQLLQDDALLDFIAENTYRYYVEANTDTAYTDALQTNLQEVEKSLANIMRAVEAGIFNDTTKARMEELEMQKQQIQSSLNMAKLDNGLHLTKDHIFYFLRRFRELDIENIDCRRQLINTFVNAVFIYDDHITLTFNYSGDDRTISLAETDAAVEGDKFICDVSCPAKQKTTS

SEQ ID NO: 5053 - protein, 513 aa, Unknown
  Description of Unknown: Integrase B5054 sequence
  PTHR30461:SF3,SM00857,G3DSA:1.10.10.2600,IPR036162,PS51737, G3DSA:3.40.50.1390,IPR006119,IPR038109,PF07508,IPR011109, SSF53041,PTHR30461,Coil,PS51736,cd00338, PF00239
MKRPDDYAIYLRKSRKDLDLEALGEGETLARHRTALLELADKKGLKISRIYEEMVSGESIADRPQMQQLLDDVCAGIYAGVLVMEVERLARGNTKDQGEVAEAFSMSNTLIVTPTKTYDPNNEFDEEYFEFGLFMSRREYKTIRRRMQRGLIESIKEGNYVGSLPPYGYDIIRINKKERTLKLNDQSQYVKMMFDWFVNEGLSCGQIARRLSEMGIPTQTGKSEWNRATVKDILQNTLYTGKIRWNRRKVSKEKGSDGRTVKRKRRLTPEDYMVVDGKHPAIVSQEIFDKAQTLFCGQVPLKAQTTITNPFARLMVCKHCGKGIGYNTFAHRGGQTKGRMSHRTSLTCKVKSAPYDDVVAAVAAALRDYISDFEFKLNNDEEARKNKQHEEMLHSMDVELNKLKQKREKLFDFLESGIYTKQEFMERKGVLSERIEAMQGSIENIKKSLPPPVDYREKILRVSEALSALEDPDVPAKAKNDLLKTVIRKIEYDCVDFGRNKGGEVHLDVYLKE

SEQ ID NO: 5054 - protein, 513 aa, Unknown
  Description of Unknown: Integrase B5055 sequence
  PTHR30461:SF3,SM00857,G3DSA:1.10.10.2600,IPR036162,PF13408, IPR025827,G3DSA:3.40.50.1390,PS51737,IPR006119,IPR038109, PF07508,IPR011109,SSF53041,PF00239,PTHR30461, PS51736,Coil,cd00338
MPDVRLITPITKQNAQKTQVAAYCRVSSNSADQLNSYAAQIRTYKKVIGARKDWELVDIFADEGLTGMKSDTRDEFQRMIRMCELKQIDLIVTKSISRFARNTKDALAYVRKLRLLGVGVLFEKEGISTLSMGDEMLLNTFSALAQEESQSISMNQRLSIVKRMELGEYVDSNAPYGYRLVNKKLDIHEPEAAIVRNIFGWYLQGYSTSEIARELNNRNIPTKTGKDTWRSSRVAYILKNERYIGDSFYQKTYRETTVPFNQHTNRGQEDRFYAKGTHPAIIEKEVFNAVQELLEKRKDSFARKTVQNIYPLTSRIQCSECGSFYRRRLVSGTVKWVCSLHKDESTACDSNYYSEERIYAGFITMVNKLRFSEDNILAQVISRLEMTLAAMKRNNLAAKDMSKGIAELNAKLLMLEQLRSKGYLAVEVYQAQANDINAELAKLKDARQEKFQSKTATMLEEVKKLKMLIFELEEPLEAFDEKLFLEIVKSIQINKKDEMSVELLGGLRFKERI

SEQ ID NO: 5055 - protein, 513 aa, Unknown
  Description of Unknown: Integrase B5056 sequence
  PTHR30461:SF3,SM00857,G3DSA:1.10.10.2600,IPR036162,PF13408, IPR025827,G3DSA:3.40.50.1390,PS51737,IPR006119,IPR038109, PF07508,IPR011109,SSF53041,PTHR30461,Coil, PS51736,cd00338,PF00239
MKKQPTGGNRLVAYYRYSGGSHQTEQSIEGQRRDCETYARIHGMVILHEYIDRHISGKTDDRPEFQQMIADAGKGMFDYVICWKTDRIARSRYDSIVYKKKLRDNGVELLYAAEANVEGSGGIIVEGLMEALAEYYSAELAEKVRRGMRESALKGKAIGSSRPLGLTVDKDKKYIIDPAGAAAVRYIFEQYAAGAASSAIVAHLNEQGLCTSRGNPFNKSSVVRIIQNEVYRGVYVSPKFDVRIEGAVPAIIDDDLWERAQKMFIRNRQSRSSRNDRADYILSGKLFCGECGTAMKGVSGHSSNGEVYFYYNCPCKDCHRRNIPKDELEGLVIRTVCNDVLQPDVMNRIADSVIEAQTAELNQPNPEKEALQHELADVQRKAKNLLAALENGTAGAMLTNRLAELEQQADTLSYQLSSLESEPKFPVFSKEEVLYLLEQFLIAPSEKTKAYRRRLIDTFVSKIEVSNTELTIYFNIAEEDCGKMKKAPQSNQPEGCSTEKQMVRVARIELTAS

SEQ ID NO: 5056 - protein, 513 aa, Unknown
  Description of Unknown: Integrase B5057 sequence
  PTHR30461:SF3,SM00857,G3DSA:1.10.10.2600,IPR036162,PF13408, IPR025827,G3DSA:3.40.50.1390,PS51737,IPR006119,IPR038109, PF07508,SSF53041,IPR011109,PF00239,PTHR30461, PS51736,Coil,cd00338
MKKQPTGGNRLVAYYRYSGGSHQTEQSIEGQRRDCETYARIHGMVILHEYIDRHISGKTDDRPEFQQMIADAGKGMFDYVICWKTDRIARSRYDSIVYKKKLRDNGVELLYAAEANVEGSGGIIVEGLMEALAEYYSAELAEKVRRGMRESALKGKAIGSSRPLGLTVDKDKKYIIDPAGAAAVRYIFEQYAAGAASSAIVAHLNEQGLCTSRGNPFNKSSVVRIIQNEVYRGVYVSPKFDVRIEGAVPAIIDDDLWERAQKMFIRNRQSRSPRNDRADYILSGKLFCGECGTAMKGVSGHSSNGEVYFYYNCPCKDCHRRNIPKDELEGLVIRTVCNDVLQPDVMDRIADSVIAAQTAELNQPNPEKEALQHELADVQRKAKNLLSALENGTAGAMLTNRLAELEQQADTLSYQLSSLESEPKFPVFSKEEVLYLLEQFLIAPSEKTKAYRRRLIDTFVSKIEVSNTELTIYFNIAEEDCGKMKKAPQSNQPEGCSTEKQMVRVARIELTAS

SEQ ID NO: 5057 - protein, 513 aa, Unknown
  Description of Unknown: Integrase B5058 sequence
  PTHR30461:SF3,IPR036162,PS51737,IPR011109,PTHR30461, PF00239,G3DSA:1.10.10.2600,IPR006119,SSF53041,cd00338, SM00857,IPR025827,IPR038109,PS51736,mobidb-lite, PF13408,G3DSA:3.40.50.1390,PF07508,Coil
MMQQALNAVIYARYSSHNQTEQSIEGQLRDCYAFAEREGLQVIGEYIDRAITGRTDERPDFQRMIADARKQEFQRVIVWKFDRFSRDRYDSAIYKHKLKQCGVRVLSAMENVGEGDVSIILEALLEASAEQYSLDLSKKVLRGQRESRLKGTFLGGLTPIGYKLENRKLVADERTAPIVRYIFEQYAKGTSKQDIINELATRGILNRHGKPLSHSTLQTILKNKKYIGVYTHGGQDVAGGCEALIDEKTFLKVQEQLSKRKHAPAASKAVIEYLLQGKLYCGYCGFNMFGDSGRGRNGSTYRYYACRRRKKERDCKKKNEKKDFIEWYVVEQTVEYVLTPERIEYIASELVAQYKKDCGIDRIKTYEKQLDRIKAEISRLVDTLAVCPAAARQPIFDKMEQLDAEKQEVELDLSKLRISAKIQISKEHIADWLKQFCNGDALDVDFQKRIIDTFINSVYLYDDKVIIYYNIEGGKQVSYIDMIDSTEEPPFSDDAPGSSGGSDLKRPAPRLCC

SEQ ID NO: 5058 - protein, 513 aa, Unknown
  Description of Unknown: Integrase B5059 sequence
  cd00338,SM00857,G3DSA:1.10.10.2600,IPR036162,PS51737, G3DSA:3.40.50.1390,IPR006119,IPR038109,PF07508,IPR011109, SSF53041,PTHR30461,PS51736,Coil,PF00239
MELYAQYLRKSRADMEAEQHGAGETLARHKYMLDQLANSMGIVISKVYKEIVSGETISDRPVMQQLLQDVEAGMYKGVLVVEVERLARGDTIDQGIVSQTFKYSNTQIITPTKVYNPNDEFDEEYFEFGLFMSRREYKTINRRIQAGRIASVKEGKYPSHKAPFGYRVVKLQNEKGYTLEIIEHEADAVRKIFDMYVNKLEGATTIAHTLNALGYKPRISNIFSTQAITAILDNPVYAGYVTWERRKEVRTMQNGIVKKSRPRSHNYIKCKGRHQAIIDENLWEKAHELRTNKRIATPRKSKELTNPLCGLIYCTKCGHKMQRRPAGSRQPADVIMCPNNECNNYASYMSLIEKDIIEVLCDWIDKYSICSKQDNELTLNINTLNNNITALNKELSTTKEQLNNAYNFLERGIYTPEVFFERSAALKDKINTIEQNIHNIQNEILKEQKQQQAKLNFLPKVKTIVDCYWELDNAKAKNDMLKEVIDHIDYIKEVKGRGHEDDFKLTIYPIISK

SEQ ID NO: 5059 - protein, 513 aa, Unknown
  Description of Unknown: Integrase B5060 sequence
  SM00857,G3DSA:1.10.10.2600,IPR036162,PF13408, IPR025827,G3DSA:3.40.50.1390,PS51737,IPR006119, IPR038109,PF07508,IPR011109,SSF53041, PF00239,PTHR30461,PS51736,Coil,cd00338
MKEYCIYLRKSRADAEAEARGEGETLARHEKALTELAKKHDYPVHGIYREIVSGDTIAARPEMQRLVEEVQSGRWAGVLCMEVERLARGDTIDQGIVAQAFKYSNTLIITPQKTYDPNNEMDEEYFEFSLFMARREYKTIKRRLQAGRLASTKEGNYLGTRAPYGYVFGFSPEDGRRILVVHEETAALVRSAFGWYAQGVTSAEIARRLNAAGARTNYGHLWTPGRVRDMLHTPVYCGKIRWNQRVSTPKIENGQRVVKRPRSDKEILVDGKHTPIVDSALYDQVQAMLCDNRNTARTRSDCTLKNPYAGLLFCGQCGKAMVRRTWARETDSVYCRTLDCPTSSISVAELTESVIDILDTWEKMAQSPAKEWRAANQAATFNEPLADKCRETIRQAQAQMERLQDLLEQGIYSPEEYVKRRDVLRERISDARTELAGIEGNRPKMSDAEKIRALLPRIRDVSNALKAGNREPEELNAMLKTVINRIYYYKTERGKRNVKAINMLSLQIYPQTP

SEQ ID NO: 5060 - protein, 513 aa, Unknown
  Description of Unknown: Integrase B5061 sequence
  PTHR30461:SF3,SM00857,G3DSA:1.10.10.2600,IPR036162,PF13408, IPR025827,G3DSA:3.40.50.1390,PS51737,IPR006119,IPR038109, PF07508,IPR011109,SSF53041,PF00239,PTHR30461, PS51736,Coil,cd00338
MKKQPTGGKRLVAYYRYSGGSHQTEQSIEGQRRDCETYARIHGMVILHEYIDRHISGKTDDRPEFQQMIADAGKGMFDYVICWKTDRIARSRYDSIVYKKKLRDNGVELLYAAEANVEGSGGIIVEGLMESLAEYYSAELAEKVRRGMRESALKGKAIGSSRPLGLTVDKDKKYIIDPAGASAVRYIFEQYAAGAASSAIVAHLNEQGLCTSRGNPFNKSSVVRIIQNEVYRGVYVSPKFNVRIEGAVPAIIDDDLWERAQKMFVRNRQSRSPRNDRADYILSGKLFCGECGTAMKGVSGHSSNGEVYFYYNCPCKDCHRRNIPKDELEGLVIRTVCNDVLRPDVMERIANSVIEAQAAELNQPNPEKEALQNELADVQRKAKNLLSALENGAAGAMLTNRLAELEQRADTLSYQLSSLESEPKFPVFSKEEVLYLLEQFLIAPAEETKAYRRRLIDTFVSKIEVSRTELTIYFNISEEDCGKMKKAPQSSQPEDCSTEKQMVRVARIELTAS

SEQ ID NO: 5061 - protein, 513 aa, Unknown
  Description of Unknown: Integrase B5062 sequence
  PTHR30461:SF3,cd00338,SM00857,G3DSA:1.10.10.2600,IPR036162, PF13408,IPR025827,G3DSA:3.40.50.1390,PS51737,IPR006119, IPR038109,PF07508,IPR011109,SSF53041,PTHR30461, PS51736,Coil,PF00239
MAKAKQKAATNDISKLAVIYARYSSHNQTEQSIEGQLAAGHRYADLKGYTVVHEYIDRAMTGRNDNRDDFQKMLYDTSKKQFGAIIVWKVDRFGRNREEITFNKYRCKKNGVRVEYVAENLPDSPEGVILESVLEGMAEYYSLQLSQNVQRGLLESAKKHQVIGGNVPLGLMMDAHKKYVPDPKTAPTVKLIFDMYAEGSTTSEIINHLNSIGMRTKAGKPFTKSSLTTVLKNEKYIGVYKYKDIIRDEGVIPPIVDKEIFYKVQELLKVNRRMPSHKWSYSDYILTDKLFCGKCGTAMVGESGFGKMGVKYSYYICAKRRKDKTCDKKPVRQEWIEEIVLQRVQGILQNEELLEFIAENTWQYYLAQDESMEKLKGLQTELDKVEKSAANLMKAIEAGIFNDMTKARMDELDDQRAVIKKAMAEIEIEKGFKLTKDHILYFLEQFKKLDYKDRDCQRRLIDVFVNSIFVYDDKLRIAFNFGGSDSTITLNEVDKADRGEGFVCCASCPVIKP

SEQ ID NO: 5062 - protein, 513 aa, Unknown
  Description of Unknown: Integrase B5063 sequence
  PTHR30461:SF3,SM00857,G3DSA:1.10.10.2600,IPR036162,PS51737, G3DSA:3.40.50.1390,IPR006119,IPR038109,PF07508,SSF53041, IPR011109,PTHR30461,Coil,PS51736,cd00338, PF00239
MKRPDDYAIYLRKSRKDLDLEALGEGETLARHRTALLELADKKGLKVTRIYEEMVSGESIADRPQMQQLLDDVCAGRFAGVLVMEVERLARGNTKDQGEVAEAFSMSNTLIVTPTKTYDPNNEFDEEYFEFGLFMSRREYKTIRRRMQRGLIESIKEGNYVGSLPPYGYDIIRINKKERTLKLNDQSQYVKMMFDWFVNEGLSCGQIARRLSEMGIPTQTGKSEWNRATVKDILQNTLYTGKIRWNRRKVSKEKGSDGRTIKRKRRLTPEDYMVVDGKHPAIVSQEIFDKAQTLFCGQVPLKAQTTITNPFARLMVCKHCGKGISYNDFAHRGGQTKGRMSHRTSLTCKVKSAPYDDVVAAVAAALRDYISDFEFKLNNDEEARKNKQHEEMLHSMDVELNKLKQKREKLFDFLESGIYTKQEFMERKGVLSERIEAMQGSIENIKKSLPPPVDYREKILRVSEALSALEDPDVPAKAKNDLLKTVIRKIEYDCVDFGRNKGGEVHLDVYLKE

SEQ ID NO: 5063 - protein, 513 aa, Unknown
  Description of Unknown: Integrase B5064 sequence
  PTHR30461:SF3,SM00857,G3DSA:1.10.10.2600,IPR036162,PF13408, IPR025827,PS51737,G3DSA:3.40.50.1390,IPR006119,IPR038109, PF07508,IPR011109,SSF53041,PTHR30461,Coil, PS51736,cd00338,PF00239
MMQQALNAVIYARYSSHNQTEQSIEGQLRDCYAFAEREGLQVVGEYIDRAITGRTDERPDFQRMIADARKQEFQRVIVWKFDRFSRDRYDSAIYKHKLKQCGVRVLSAMENVGDGDVSIILEALLEASAEQYSLDLSKKVLRGQRESRLKGTFLGGLTPIGYKLENRKLVADERTAPIVRYIFEQYAKGTSKQDIINELATRGILNRHGKPLSHSTLQTILKNKKYIGVYTHGGQDVAGGCEALIDEKTFLKVQEQLSKRKHAPAASKAVIEYLLQGKLYCGYCGFNMFGDSGRGRNGSTYRYYACRRRKKERDCKKKNEKKDFIEWYVVEQTVEYVLTPERIEYIASELVAQYKKDCGIDRIKAYEKQLDRIKAEISRLVDTLAVCPAAARQPIFDKMEQLDAEKQEVELDLSKLRISAKIQISKEHIADWLKQFCNGDALDVDFQKRIIDTFINSVYLYDDKVIIYYNIEGGKQVSYIDMIDSTEEPPFSDDAPGSSGGSDLKRPALRLCC

SEQ ID NO: 5064 - protein, 513 aa, Unknown
  Description of Unknown: Integrase B5065 sequence
  PTHR30461:SF3,SM00857,G3DSA:1.10.10.2600,IPR036162,PF13408, PS51737,IPR025827,G3DSA:3.40.50.1390,IPR006119,IPR038109, PF07508,IPR011109,SSF53041,PTHR30461,PS51736, cd00338,PF00239
MNRAVIYARYSSDMQREESVEAQIRACKYYAQQNGIDIIGIYADRAKSGMYHSEKREEFQALLNAAPRKEYDIVLVHKLNRFGRAGVKALNDRDYLERLGIEIISVTERLENTPEGRLMLYVITGMNEYYSRNLAGEVLKGLRENAYKGITTGGTPALGYNLGADKKLVINEQEAAAVRLIFKMYISGAGYGEIIDELNSRGFRTKRGAKFGKNSIYDILRNERYTGRFTYGKTKTVNGHRSQHKKEKEYISIEGGCPAIISADEWERVQRLMDVKKHDAASGKAKELYILSGKLFCGHCGARMVGNSRVSRGERYLYYDCNAKLRKKTCTKHAVKKNEIEQAVIQKLNQLAFSDDLIERFVDEAYKAQDNEMPDIGGKIADIDKKISNLVTAIESGADIGPIKQRMADLSAQKDALLSSNVPKGDFLTRDEIRSRFKKFLNIADLPPAQQKFIISEYVTRIEVFDYDGGGHFCRITLSNNTSVDTDVLGSSAPSYQQQAEIINGKLVISFLL

SEQ ID NO: 5065 - protein, 513 aa, Unknown
  Description of Unknown: Integrase B5066 sequence
  SM00857,G3DSA:1.10.10.2600,IPR036162,PF13408,IPR025827, G3DSA:3.40.50.1390,PS51737,PF14287,IPR006119,cd03770, PF07508,IPR011109,IPR038109,SSF53041,PTHR30461, PS51736,IPR025378,PF00239
MQENKQNLRFTALYCRLSSDDELKGDSNSIIHQKQILQDYALKHSLTPTEIYVDDGFTGTNFDRPDFKRLLSDVENDLVKTVIVKDLSRLGRNYLKVGYYTEVLFPEKGVRFISIADNLDTSVNDELNDFIPFKNIMNEWYAKDLSRKQRAVVKSKGNSGKRLATRPLYGYKKAENGDWLIDEPTAAVVQKIFDLYLKGYGPASIANYLFANKVKIPSTIGLPKLNPEQNPYRWSKDTVAKILTYQDYCGDMINFKRSDVDSLVIFPDRQEPIISREIFAEAQKLRLDRKPVRHDYSEPVLFSDLLLCADCKSRMYAQRRYHGTTSYSCSKARKTQGCTSHYINENKLIDCVKSDINKLIKNKGIVIKLAKEKMHIDTKTAQCANSQNLKNAKKRILQIDTILKNLYEDKVLGNINLATFKKLESDYLREQAELNKVIFEQSKIKVNLENRSKSICGFLKKLESYNNPVSELSRDLLIDLIDKIEICEATKNGNERSQQVHIYYKEIGKINLE

SEQ ID NO: 5066 - protein, 513 aa, Unknown
  Description of Unknown: Integrase B5067 sequence
  PTHR30461:SF3,SM00857,G3DSA:1.10.10.2600,IPR036162,PF13408, IPR025827,G3DSA:3.40.50.1390,PS51737,IPR006119,IPR038109, PF07508,SSF53041,IPR011109,PF00239,PTHR30461, PS51736,Coil,cd00338
MKKQPTGGNRLVAYYRYSGGSHQTEQSIEGQRRDCETYARIHGMVILHEYIDRHISGKTDDRPEFQQMIADAGKGMFDYVICWKTDRIARSRYDSIIYKKKLRDNGVELLYAAEANVEGSGGIIVEGLMEALAEYYSAELAEKVRRGMRESALKGKAIGSSRPLGLTVDKDKKYIIDPAGAAAVRYIFEQYAAGAASSAIVAHLNEQGLCTSRGNPFNKSSVVRIIQNEVYRGVYVSPKFDVRIEGAVPAIIDDDLWERAQKMFIRNRQSRSPRNDRADYILSGKLFCGECGTAMKGVSGHSSNGEVYFYYNCPCKDCHRRNIPKDELEGLVIRTVCNDVLQPDVMNRIADSVIEAQTAELNQPNPEKEALQHELADVQRKAKNLLAALENGTAGAMLTNRLAELEQQADTLSYQLSSLESEPKFPVFSKEEVLYLLEQFLIAPSEKTKAYRRRLIDTFVSKIEVSNTELTIYFNISEEDCGKMKKAPQSNQPEGCSTEKQMVRVARIELTAS

SEQ ID NO: 5067 - protein, 512 aa, Unknown
  Description of Unknown: Integrase B5068 sequence
  PTHR30461:SF3,SM00857,G3DSA:1.10.10.2600,IPR036162,PF13408, IPR025827,PS51737,G3DSA:3.40.50.1390,IPR006119,IPR038109, PF07508,SSF53041,IPR011109,PF00239,PTHR30461, PS51736,Coil,cd00338
MKAVIYARFSSHNQREESIEGQVRACQRFAKEHDMTVIEIYADRGLSGLHADNRPEFQRMIADSDRHKFQALIMWNLDRFSRDKYDTAVYKSRLKKNGVTLYYSDQNIPDTPEGIILESLLEGFAQYYSANLSRNAKRGLQENARKCLWNGGGLPLGYTIDETKHFVIDPAGAACVRLIFQMYADNHSIKEIVSTLNEKGYRTVKGNKFRLGSIQGVLRNRKYIGEYHASGITVPNGVPAIVDVELFNAVQEKIGVVSAAKARNKAEIPYLLTTKVFCGHCGSPMIGESGTGKGGSTYRYYKCSCRKNRKGQCDKRTEQKEWLEETVVAQTVEKFLHPDVIEDVSNACVAVLEQDCQNNALLKALNAQLADVEKSSRNLIKAIEAGVFTASMRERLAELEQQKEDITVQIAREQLRKPQLSAEQIAFFLRSFLDGDAHDPNFQERIIESLVRRVDVYDEGPGNRKLTVFYNLKKNNHSSVSVKCSDSESVGLPKRSVAKAADFFSLLAEGRE

SEQ ID NO: 5068 - protein, 512 aa, Unknown
  Description of Unknown: Integrase B5069 sequence
  PTHR30461:SF3,SM00857,G3DSA:1.10.10.2600,IPR036162,PF13408, IPR025827,PS51737,G3DSA:3.40.50.1390,IPR006119,IPR038109, PF07508,SSF53041,IPR011109,PF00239,PTHR30461, Coil,cd00338
MSELYLMYLRKSRADGEDETVEEVLAKHERMLQKLAVEKFGHPIPGNSIYREVVSGETIEDRPEMKRVLSAIESPDVKGVLVVDPQRLSRGDWEDGGRILSSFKYSNTLIVTPPKTYNLYDQYDYRFFKMELSRGNDYLEYTKEILKRGRENSIEAGRYLGSVAPYGYEKVFVDKAPTLTPNVKEAEAINIAVRKCVYDGMGWTFIARELDSMGYKPRSGGKWNPYSLRDICINPVNIGKVKWNARKTIRVYKDGKLVKTRPRNKDSVIYKDGLHPPILEKDLYEKLIAKAGVITRENQHTQLVNPLAGLLYCSTCGRAMTYRTYKRNGSPRSAPRLACDNQINCGTKSSTFSDVYNILIDILENTVHDFEFKAEEDNGSARIEYDRMISEAENELRIIDAREEELYDYLEEGLYSKEIFLKRMSKYQDKRSELEKRLSFLRDKSAQPIDYHEKIRTFRHVIDSLNDDNTTAKHKNNLLKQIIKRIEYSRNSENRTKWDSSKPELKIYFHDF

SEQ ID NO: 5069 - protein, 512 aa, Unknown
  Description of Unknown: Integrase B5070 sequence
  PTHR30461:SF3,cd00338,SM00857,G3DSA:1.10.10.2600,IPR036162, PF13408,IPR025827,PS51737,G3DSA:3.40.50.1390,IPR006119, IPR038109,PF07508,IPR011109,SSF53041,PTHR30461, PS51736,Coil,PF00239
MLADYLEKIRTKTNVLVLKAVIYARYSSDMQRSESIAAQIRFIREFAKNNNIIIVSEYIDEAQSAKRDDREAFQQMMKDSKSAEWQIVLVHKLDRFARNRFDSATYRIHLRKNRKYLISAVEQFDDSPESAMLEAVIEAMSEYYSKNLAREVMKGLTENALKGKNCGGTPPLGYDLDEHKFYKINAFEAQGVKLIFKLFLDGKTYSEIISILNAAGYRTKCNRLFSRNSLYEILRNEKYKGIFVYNKTQSRDEITGKRSGHRYKSEDEVIRINGVVPQLISPEDWDVAQSILDNRKKAYGNNAKETYLLSGKIKCGKCGGSYVGRRVFNSCGVKYIYYACNEKRNPNFKCDNSSVRRDWIEDIVVKKVKEFVREFNGKYFEDIQSEYIKEVTDCKQKEIMALRSKLNSIDADIQRLVDAISKCSLESLINRLELLEQQKKEIQADIDKFEIPDNNVSIEQIKKLLSKAEQMLEEESTPLKELINLVVKKIVVNESDIQIYMNCFDKTMTHKR

SEQ ID NO: 5070 - protein, 512 aa, Unknown
  Description of Unknown: Integrase B5071 sequence
  PTHR30461:SF3,SM00857,G3DSA:1.10.10.2600,IPR036162,PF13408, IPR025827,G3DSA:3.40.50.1390,PS51737,IPR006119,IPR038109, PF07508,IPR011109,SSF53041,PF00239,PTHR30461, PS51736,Coil,cd00338
MRNAVIYARYSSDRQREESIEGQIRVCEDFARRNDMRILKIYTDRALTGRTDKRPEFQLMIKEAASRAFEVVIVYKLNRFARNRYDSASYKHKLKKYGVKVVSAMENIADDPSGILLESVIEGMAEYYSAELSENVIRGQTENILEGKWAGGTVPLGYKLDAEKHLVLDEEKVPIVKLVFSMTLDGLGTTTIARELNRRGYRNARGKPFRMSNIYVILKNKHYLGKFSWRGIESPYAVPAIVSESDFNEVQKIMNARRVNRVKAGERYMLSGKLFCGECGERMVGTSGTSRSGEIYYYYACPNHQRRNTRTCERTQIRADIIDSTVCDVTTRLLESDAAVEAIARQAVEVQTHTDVNAAIAATKKRMADVKKKIDNCVKAVESGIISDAIAKTLHDNEETLRDLECELAKQEIARKSSELTVDKIRFFFKSICRDAKKADKYRRILLSTLVRMVIVRGDALEIRYNYANEYPALQNPVKAECSYNNRLVVSCDKSTNTIYLTPSYFYILARL

SEQ ID NO: 5071 - protein, 512 aa, Unknown
  Description of Unknown: Integrase B5072 sequence
  SM00857,G3DSA:1.10.10.2600,IPR036162,PF13408,IPR025827, G3DSA:3.40.50.1390,PS51737,IPR006119,IPR038109,PF07508, IPR011109,SSF53041,PF00239,PTHR30461,PS51736, Coil,cd00338
MNAVIYARYSSHNQTEQSIEGQLRDCYEYAKRNDLTIIGEYIDRAISGKTDERPDFQRMIKDASKRQFERILVWKLDRFARNRYDSATYKHKLKQYGVKVISAMENVGEGDESVLLEALLEASAEYYSLDLKKKIARGMRESALRGKFVGGTLPWWCRVDDEQKLTVIDERAAIVREAFMRYDSGEGSKSIVSDFAKRSLRSNRGVPVTLSWLLSILKNRKTIGEYTYNGIEIPGGLPAVVDKPLFDRVQDRIARNRRTGGGEARAKTEYLLQGKLFCGLCGSPITAECGQNHKGVVYNYYACSLKKKKHQCKKANERKDFLEWYVVEQTLDYVLTPARTEYIASAIVAEYEREFDKSGIRVLEQKIALTEGEIQKTMDLCIQATTDAMRDRFMKRCEELDAKKADMEIDLSKLRVAASIVYTKDEVCAWLRQFCTGDCFDPAFRRRIIDVFINTVYLYDEKLIIYYNLRDSRQVSYIEAIGASSEIENLLPVPDNKKSAAECSTADGDGGA

SEQ ID NO: 5072 - protein, 512 aa, Unknown
  Description of Unknown: Integrase B5073 sequence
  PTHR30461:SF3,cd00338,SM00857,G3DSA:1.10.10.2600,IPR036162, PF13408,IPR025827,G3DSA:3.40.50.1390,PS51737,IPR006119, IPR038109,PF07508,SSF53041,IPR011109,PTHR30461, PS51736,Coil,PF00239
MLAEYLEKIKSRNNVTILKAALYARYSSDMQRGESVDAQIRLIKEFAEKNNIVIVKQYVDEAKSAKWDSRESFQQMIKDSKTSEWQVVIVHKLDRFARNRDDSTMYRIQLRRYRKYLISAVEQLGDSPEDQLLEAMIEAMAEFYSKNLARETIKGLTENALKGKHCGGIPPLGYELDEFNFYKVNEFEAQGVKLIYSLFLEGKSYTEIIAEINLLGYRTKRNRLFTRNSLYEILRNEKYTGTFVYNKMESRDEFSGVRSRHKYKPENEIIKVENMIPEIISKEDWKSVQTILNRRKKAYTNHAKEEYLLSGKIKCGECGGNYVGKRTFNSRGVKYVSYICNRKRNPNYKCSNSCIKRDWIEEKVIKVVKDFIRKFNEAYFDEIQHKYIEEMQDKKQKEVKVLQNELNRINADIERIVEAIAKAPLESLIEKLQVLENQKNGLKENINKIQQVPDFEVTIQEMKSLIKKAEKMLEENSVPFKELIDLVVKEIVVNRDNIQIYMCFDKKFIQER

SEQ ID NO: 5073 - protein, 512 aa, Unknown
  Description of Unknown: Integrase B5074 sequence
  PTHR30461:SF3,SM00857,G3DSA:1.10.10.2600,IPR036162,PF13408, PS51737,G3DSA:3.40.50.1390,IPR025827,IPR006119,IPR038109, PF07508,SSF53041,IPR011109,PTHR30461,PS51736, cd00338,PF00239
MKRITKIDAAAKETKKLRVAAYARVSTDSADQLISLEAQKEHYEQVIKNCPNWEFAGLYYDEGVSGTKMAKRDGLLRMLADCERGLIDYILVKSISRFSRNTVESVETVRRLSAMGIYIFFEKENIDTGKMEGELMLSIMSSLAEDESRSLSENNKWSIQKRFQNGTYVIGTPAYGYKNADGKMVIDEEKAEVVRRIFDSVLEGKSGGTIAKELNAKGIPTARGVQWRSSVITAMIRNETYTGVAVFQKTYKDDQFNSHVNHGERGMYRIEGHHDPIVSEEVFLAANTAVDNNAKEKGVVRNSGKYSVRYALSGKIFCGECGGKCKRKKIYGDIWYGCETHARESKKCRQLPVRADMVEAAFVNMMNKLIYGRDAVLLPMSGRLLGGGDKEIIDRLAEINTELDAVAERRQAADKFFAKGLLDAAVYREELDELARKEKELHTVRAGIEGDPNLDSDRQRALNELLRYTAKAELLTAFSDEVFTKHVDRVIIFSRKEVGFAMKCGPVFRERI

SEQ ID NO: 5074 - protein, 512 aa, Unknown
  Description of Unknown: Integrase B5075 sequence
  PTHR30461:SF3,IPR036162,PS51737,IPR011109,PTHR30461, PS00397,PF00239,G3DSA:1.10.10.2600,IPR006119,SSF53041, cd00338,SM00857,IPR025827,IPR038109,PS51736, IPR006118,PF13408,G3DSA:3.40.50.1390,PF07508,Coil
METTNKIPCGIYARVSTDKQGDSVENQLSQGEEFISRLGDTYYLDEDCIFVDNAVSGYYTSVFDREAMKNAIEKAKSGRCKVLIFKEVSRVGRDKQENPAIIGMFEQYGVRVIAINDNYDSNNKDNITFDILSVLSEQESKKISVRVSSAKKQKARRGQWNTDAPIGYKLNSETKKLEVDQDSGHIVQTIFNLYTEKGMGTFSIAKTLNDKGERTRDGNLFSRTSINRILKNQAYIGHTVYGKRRNVLQRNYDDTGRMTKKKVVQKIDPSDWTIVKNTHEPLVSEEVFYRAQGILSERTHHREPRRAYHPLTGILFCKKCGQGMVCQKRSFKDKEYRYYICKTYHKYGRDACPQANVNADELESDVIKIVRNRVRTLDKNKLAAFNNRSSDIARLEEDKKSRMKLLDRLYRDQRDLFDQRDLFPEAMYKEQMIELKTKAEGIEEEVNIITNQISAIEAVSNETANIYKIITEFLELDISDIGRLRTILHELIKKIDLENNHIDIEYRIKLFS

SEQ ID NO: 5075 - protein, 512 aa, Unknown
  Description of Unknown: Integrase B5076 sequence
  PTHR30461:SF3,SM00857,G3DSA:1.10.10.2600,IPR036162,PF13408, PS51737,G3DSA:3.40.50.1390,IPR025827,IPR006119,IPR038109, PF07508,IPR011109,SSF53041,PTHR30461,Coil, PS51736,cd00338,PF00239
MRNAVIYARYSSDRQREESIEGQIRVCEDFARRNDMRILKIYTDRALTGRTDKRPEFQLMIKEAASRAFEVVIVYKLNRFARNRYDSASYKHKLKKYGVKVVSAMENIADDPSGILLESVIEGMAEYYSAELSENVIRGQTENILEGKWAGGTVPLGYKLDAEKHLVLDEEKVPIVKLVFSMTLDGIGTTTIARELNRRGYRNARGKPFRMSNIYVILKNKHYLGKFSWRGIESPHAVPAIVSESDFNEVQKIMNARRVNRVKASERYMLSGKLFCGECGERMVGTSGTSRNGEIYYYYACPNHQRKNTRTCERTQIRADIIDSTVCDVTTRLLESDAAVEAIARQAVEVQTHTDMNAAIAATKKRMADVKKKIDNCVKAVESGIISDAIAKTLHDNEETLRDLECELAKQEIARKSSELTVDKIRFFFKSICRDAKKADKYRRILLSTLVRMVIVRGDTLEIRYNYANEYPALQNPVKAECSYNNRLVVSCDESTNTIYLTPSYFYILARL

SEQ ID NO: 5076 - protein, 512 aa, Unknown
  Description of Unknown: Integrase B5077 sequence
  SM00857,G3DSA:1.10.10.2600,IPR036162,PF13408,IPR025827, G3DSA:3.40.50.1390,PS51737,IPR006119,IPR038109,PF07508, IPR011109,SSF53041,PTHR30461,Coil,PS51736, cd00338,PF00239
MNAVIYARYSSHNQTEQSIEGQLRDCYEYAKRNDLAIIGEYIDRAISGKTDERPDFQRMIKDASKRQFERILVWKLDRFARNRYDSATYKHKLKQYGVKVISAMENVGEGDESVLLEALLEASAEYYSLDLKKKIARGMRESALRGKFVGGTLPWWCRVDDEQKLTVIDERAAIVREAFMRYDSGEGSKSIVSDFAKRGLRSNRGVPVTLSWLLSILKNRKTIGEYTYNGIEIPGGLPAVVDKPLFDRVQERIARKRRTGGGEATSKTEYLLQGKLFCGLCGSPITAECGQNRKGVVYNYYACSLKKKKHQCKKANERKDFLEWYVVEQTLDYVLTPDRTDYIAEAIVAEYERQFDKSGIKALEQKIALTEGEIQKTMDLCIQATTDAMRKRFMKRCEELDAKKADMEIDLSKLRVAASITYTKEEVRAWLRQFCAGDSFNPAFRRRIIDVFINTVYLYDDKLIIYYNLRDSRQVSYIEAIGASSEIENLRPVPDNKKTAVECSTADKNGGA

SEQ ID NO: 5077 - protein, 512 aa, Unknown
  Description of Unknown: Integrase B5078 sequence
  PTHR30461:SF3,cd00338,SM00857,IPR036162,PF13408, IPR025827,G3DSA:3.40.50.1390,IPR006119,SSF53041,PTHR30461, PS51736,Coil,PF00239
MKVVAIYSRKSKESDTGESIKNQIEMCKDYFLNQGKEFTFEIFQDEGFSGGNTKRPEFQRMMLLAKHGKFDIVACYKVDRIARNIIDFMNTFDILKKNKVSLVSVTEGFDPNTPIGMMLMTMIAGFAEMERMNIAQRVKDNMNALAKMGRWLGGTPPTGYRAIKENTHNGKYAMYLELIPEMKEKLTFIFESAAAGYTSRYIGKLVELHPKTIINIVYNPTYCPSDELSKSYLENLGYKVYGELNGRGYLPWNRRPIDVNGKKMYRSEDRFVTASKHEIPTDSATWIKANEEIRKRGDEGRPRISQYSFLAHMLTCKCGCGMSVDSGYKRKDGSRSYYFKCSSKKGGYNRNCDAKLIRVDYIENDILSLLQKICLNKELLNDEISKTETIVIDKNEIKNISQKIKSNDIEMENLVSQLGKLKGSAADAVTTKMNKLSEENDNLKQKLFLLEHDNILNSINHYDIDYLYNKIVNLMSSWENLSLEDKQFGIQSIIDKIKWDGEKFKISFIKKS

SEQ ID NO: 5078 - protein, 512 aa, Unknown
  Description of Unknown: Integrase B5079 sequence
  SM00857,G3DSA:1.10.10.2600,IPR036162,PF13408, PS51737,IPR025827,G3DSA:3.40.50.1390,IPR006119, IPR038109,PF07508,IPR011109,SSF53041, PTHR30461,PS51736,cd00338,PF00239
MNAVIYARYSSHNQTEQSIEGQLRDCYEYAKRNDLAIIGEYIDRAISGKTDERPDFQRMIKDASKRQFERILVWKLDRFARNRYDSATYKHKLKQYGVKVISAMENVGEGDESVLLEALLEASAEYYSLDLKKKIARGMRESALRGKFVGGTLPWWCRVDDEQKLTVIDERAAIVREAFMRYDSGEGSKSIVSDFAKRGLRSNRGVPVTLSWLLSILKNRKTIGEYTYNGIEIPGGLPAVVDKPLFDRVQARIARNRRTGGGEARAKTEYLLQGKLFCGLCGSPITAECGQNHKGVVYNYYACSLKKKKHQCKKANERKDFLEWYVVEQTLDYVLTPARTEYIASAIVAEYEREFDKSGIRVLEQKIALTEGEIQKTMDLCIQATTDAMRDRFMKRCEELDAKKTDMEIDLSKLRVAASIVYTKEEVCAWLHQFCTGDCFDPAFRRRIIDVFINTVYLYDEKLIIYYNLRDSRQVSYIEAIGASSEIENLLPVPDNKKSAAECSTADGDGGA

SEQ ID NO: 5079 - protein, 512 aa, Unknown
  Description of Unknown: Integrase B5080 sequence
  PTHR30461:SF3,SM00857,G3DSA:1.10.10.2600,IPR036162,PS51737, G3DSA:3.40.50.1390,IPR006119,IPR038109,PF07508,IPR011109, SSF53041,PTHR30461,Coil,PS51736,cd00338, PF00239
MKRPDDYAIYLRKSRKDLDLEALGEGETLARHRTALLELADKKGLKITRIYEEVVSGESIADRPQMQQLLDNVCAGDYAGVLVMEVERLARGNTKDQGEVAEAFSISNTLIVTPTKTYDPNNEFDEEYFEFGLFMSRREYKTIRRRMQRGLIESIKEGNYVGSLPPYGYDIIRLNKKERTLKLNDQSQYVEMIFDWFVNERLSSGQIANRLTEMGIPTQTGKSEWNRGTIKEILQNNLYVGKIRWYRRKVTKEKSNGTTVRKKRRLSPEDYFIVDGKHPAIVSQELFDKAQTLFCGQVPVKAQTTITNPFARLMVCKHCGKGICYQCHACRGGHTKPRMVHRTSLTCKVKSAPYDDVVAAVAAALRDYISDFEFKLNNDEEAKKNKQHEEMLRMMDTELQKLEQKREKLFDFLESGIYTKQEFMERKGVLSERIEAMQASIENIKKSLPPPVDYREKILRVSEALSALEDPDVPAKAKNDLLKTVVRKIEYDCVDFGRNKGGEVHLDVYLKE

SEQ ID NO: 5080 - protein, 512 aa, Unknown
  Description of Unknown: Integrase B5081 sequence
  PTHR30461:SF3,SM00857,G3DSA:1.10.10.2600,IPR036162,PF13408, IPR025827,G3DSA:3.40.50.1390,PS51737,IPR006119,IPR038109, PF07508,SSF53041,IPR011109,PTHR30461,Coil, PS51736,cd00338,PF00239
MICAMYLRKSRADYEAEARGEGETLAKHRETLMAVAKARDLTVTDVFSELVSGDTIAERPEMQRLMRAVERGDYDAVLCMDIDRLGRGDGADQSAILKTLKYSDTIVITPYKDYNTRREMDEEFFEYSQFIARSEYKRIKRRMWAGRVASVKEGKWISPKAPFGYRRVRIEPGRGWTLTPEPSEAEAVRSMFAWYASGECGKNTIARRINDMGFRTYGGKNFDPSEIRSILTNPVYIGKIRWNYRHQNIEMKDGKEIVTRPRSSECLVSDGLHPAIVDKDVFDAVQRCFTSLGDPCVPFRREMVNPLSGLMHCAECGRAMHMVPEYKRYGVDATYRCRKTGGCATTTIEAKYVYDALLFALRQWSTYGDSDGYAPDCAAPVNDTLPQIRAVSAQITQLRNQLSKLQDLLETGVYSADTYVERSKVINDRIAAASATLAELRQSQPVDERAAIIRLKPKIRHLLDTWDDSTPAEKNALLRTIVREIKYKKTRRCFRNENPAEYLTLTIYPIVD

SEQ ID NO: 5081 - protein, 512 aa, Unknown
  Description of Unknown: Integrase B5082 sequence
  PTHR30461:SF3,cd00338,SM00857,G3DSA:1.10.10.2600,IPR036162, PF13408,PS51737,IPR025827,G3DSA:3.40.50.1390,IPR006119, IPR038109,PF07508,SSF53041,IPR011109,PTHR30461, PS51736,Coil,PF00239
MYCLYLRKSRADIELEAKGELETLARHKKALLALAQKNNLTIGEIYEEIVSGETISSRPVVQQLLDEVENGKWDGVLVMEIERLARGDTIDQGIVARAFKIGNTKIITPSKTFDPNNEFDEEYFEFGLFMSRREYKTINRRIQRGRIASASEGKFIGSVPPYGYDKIKIKNDKGYTLRPNAQESVVVKRIYSMYLTGKGMHVIARELDDMGIKPRYRDTWSKSTLSDILTNPVYTGKLRWSYRQEDKYVVDGVVHKRRKVNASPIYVDGLHDPIISSEDFESAQKIRARNTLKTKPSLTLQNPLSGLVYCSMCGTMMTRQGAGSKNKYDTLRCPSRTCDCVSSPIFLVEQELLRLIQEWLFDYAVQSKNVHPEETDLTLYQSQLEEAKKEIVKYTAQLNKTYDLLEQGIYTEDVFKKRQAELSQKITEINTKSTHLKAKADGIATLRKSREEVMPKFISILELYQHAENAEQKNHLLRQLITKAVYAKNEPNKKNNALTPNFELHIYPNLMD

SEQ ID NO: 5082 - protein, 512 aa, Unknown
  Description of Unknown: Integrase B5083 sequence
  PTHR30461:SF3,SM00857,G3DSA:1.10.10.2600,IPR036162,PF13408, IPR025827,G3DSA:3.40.50.1390,PS51737,IPR006119,IPR038109, PF07508,IPR011109,SSF53041,PTHR30461,Coil, PS51736,cd00338,PF00239
MKKENEIRAVVYARYSSHSQTEQSIEGQISAAQVYAKAKGYTIVKEYVDRAKTGKNDNREAFQQMLSDTAKHEFSVIIVWKVDRFGRNREEITFNKYRCKKNDVRVEYIAEAVPDSPEGVILESVLEGMAEYYSLQLAQNIRRGIRASAEKCQAIGGHCSLGYAIDPKTKKYVIDPDTAPTVQLIFEKYAEGYTGMDIVRLLNEKGLRTVRGKPFTKNSLWTILKNERYAGVYLFKNEVRVEGGIPALVSRETFDKVQEMLEINHRSPVNTWNRATYLLTDKLFCGHCGSKMVGECGTSRTGATYNYYICAGKKRERNCSKKAVRQDWIEKVVLQQIRRVLFDQEFLEFIAHKAYTYYLEEKKKLDQSAAIKAQLSSVESSIDNLIRAMEAGIFSTSTKSRLDDLENQKTALTRTLAEIKLSEESFDLTEDRILFFLESMRGLDMDDVDSRKRLVKTFVNAVYLYDDKITLAFNFTDSCEKPEIIELTDIADGVVEKFVHRASCSTKKHCTS

SEQ ID NO: 5083 - protein, 512 aa, Unknown
  Description of Unknown: Integrase B5084 sequence
  PTHR30461:SF3,cd00338,SM00857,G3DSA:1.10.10.2600,IPR036162, PF13408,PS51737,G3DSA:3.40.50.1390,IPR025827,IPR006119, IPR038109,PF07508,IPR011109,SSF53041,PTHR30461, PS51736,Coil,PF00239
MNVVLYLRYSSDKQSEQSIEGQDRVCSAYCQANDMKIVGKYIDRALSASRHTEKRDEFLRMIRDSEKRTFDAVVVYKLDRFSRDRYDSAIYKNRLKRNGVRVISATENISDSPEGIILESVLEGMAEFYSKELSQKVSRGMNETALKCNSCGGHIPLGYKIESKKFVIDPSTAPIVKEAFERYAAGETVAEICDAFNNKGFRTAKGSAFNKNSFANMFANERYIGVYRYKDIRIENGIPVIIDKKLFEEVQRRLKKNACAPSRGKAKVEYLLAQKLFCGHCGGLMTGECGTSKNGDKYNYYTCSKRKRFHSCDKKNVSKEQIEEFVATKTLELFTPQKIDELADIAVKQAEAEAQENTVVPVIENEIKELEKSINNLLKLAERAPDSEALVNRLKELEDQKKAAERRLADENSKVLVLEKPHIVWWLNEFAKGDIHDEHFKRQIFDMLVNSVTIWDEPDGWKITIVYNLLSDVPRTFRCSDLTATGSPLQYNPNTILFLGHVMVYTTKYRTN

SEQ ID NO: 5084 - protein, 512 aa, Unknown
  Description of Unknown: Integrase B5085 sequence
  PTHR30461:SF3,cd00338,SM00857,G3DSA:1.10.10.2600,IPR036162, PF13408,IPR025827,PS51737,G3DSA:3.40.50.1390,IPR006119, IPR038109,PF07508,IPR011109,SSF53041,PTHR30461, PS51736,Coil,PF00239
MYEDIKTACLYVRFSSHNQTEQSIEGQTRVCRDFCKRHNIRIVEIYADRATSASKDIEKRVQFLKMIKDSEKGLFDAVIVYKLDRFARSRYDSATYKYRLKRNGVQLISATENISNDPEGIILESVLEGMAEFYSAELSQKINRGMRESAYKHNSIGGAIPLGYKIEDKKLVIDPKTAPIVKEAFEKYADGETVAEICRQFNARGYKTSKGTAFGKSSFTKIFRNERYIGVYTFHDYRAEGAVPAIIDKDLWNRVQLRAGKIKSAPARHKAKVVYLLSGKLFCGHCGSRMNGNCNASNYYYYQCYGKKNGHVDCNKKNIRKEFIERLVAQDALSLLTDEYIEQIAAIACEKNQHEIELDSALPTIRDRIHQVDLSLNNLLKAIESGSAPDMLVKRMGELEKEKKDLQAQAKKESEDIVELDKAQVIYWLEQFRGGSIEDEEFCRMLIDLFVNSVTVWDEDDDTYKVTVAYNLTSLPTKTYRLNKGGTLSDFASNAPARWSRGPRSTSLYARR

SEQ ID NO: 5085 - protein, 512 aa, Unknown
  Description of Unknown: Integrase B5086 sequence
  PTHR30461:SF3,SM00857,G3DSA:1.10.10.2600,IPR036162,PF13408, PS51737,IPR025827,G3DSA:3.40.50.1390,IPR006119,IPR038109, PF07508,SSF53041,IPR011109,PTHR30461,Coil, PS51736,cd00338,PF00239
MPEALNAVIYARYSSDRQTEQSIEGQLRECYAFAKANDIAVIDTYIDRAISGKTDNRPAFQKMIEDSAKRQFQAVIVYRLDRFTRNRYDSAIYKARLKKNGVKVLSAMENLNGSPESIIMESLLEGMAEYYSVELSQKITRGMRENALKGKALGGQRVLGYKVNSDCYFEIDETTAPVVVDIFKLYSSGKTVKEICDILNARGVKTARGGAFNKNSLHTILTNKKYIGIYKTKYGEIVGGIPAIIDKELFEMVALRMEQNKKAPARAKAEINYLLSTKLFCGKCRSAMVGESGTSKTGKKYYYYACVKKKREKACDKSNVKKDWIEDLVIQRTVTDILKDDVIEKIADRLVELQKAEAAESGTMLYLENSLAEIQVSIKNIMTAIEKGIITESTKTRLTELEDEKRNVEIEIAKESIARRIISREQIIYWISSFKDGDITSEKYRQQLIDTFVHAVFVYDDKIVITYNYSGENNTATISDLDLSSPPKSANPNSVFFIKHTFGFVYRIENAD

SEQ ID NO: 5086 - protein, 512 aa, Unknown
  Description of Unknown: Integrase B5087 sequence
  PTHR30461:SF3,SM00857,G3DSA:1.10.10.2600,IPR036162,PF13408, IPR025827,G3DSA:3.40.50.1390,PS51737,IPR006119,IPR038109, PF07508,SSF53041,IPR011109,PTHR30461,Coil, PS51736,cd00338,PF00239
MRNAVIYARYSSDRQREESIEGQIRVCEDFARRNDMRILKIYTDRALTGRTDKRPEFQLMIKEAASRAFEIVIVYKLNRFARNRYDSASYKHKLKKYGVKVVSAMENIADDPSGILLESVIEGMAEYYSAELSENVIRGQTENILEGKWAGGTVPLGYKLDAEKHLVLDEEKVPIVKLVFSMTLDGLGTTTIARELNRRGYRNARGKPFRMSNIYVILKNKHYLGKFSWRGIESPHAVPAIISESDFNEVQKIMNARRVNRVKAGERYMLSGKLFCGECGERMVGTSGTSRNGEIYYYYACPNHQRKNTRTCERTQIRADIIDSTVCDVTTRLLESDVAVEAIARQAVEVQTHTDMNAAIAATKKRMADVKKKIDNCVKAVESGIISDAIAKTLHDNEETLRDLECELAKQEIARKSSELTVDKIRFFFKSICRDAKKADKYRRILLSTLVRMVIVRGDTLEIRYNYANEYPALQNPVKAECSYNNRLVVSYDKSTNTIYLTPSYFYVLARL

SEQ ID NO: 5087 - protein, 512 aa, Unknown
  Description of Unknown: Integrase B5088 sequence
  PTHR30461:SF3,SM00857,G3DSA:1.10.10.2600,IPR036162,PF13408, IPR025827,G3DSA:3.40.50.1390,PS51737,IPR006119,IPR038109, PF07508,SSF53041,IPR011109,PTHR30461,Coil, PS51736,cd00338,PF00239
MKNAVIYARYSSDRQREESIEGQIRVCEDFARRNDMRILKIYTDRALTGRTDKRPEFQLMIKEAASRAFEVVIVYKLNRFARNRYDSASYKHKLKKYGVKVVSAMENIADDPSGILLESVIEGMAEYYSAELSENVIRGQTENILEGKWAGGTVPLGYKLDAEKHLVLDEEKVPIVKLVFSMTLDGLGTTTIARELNRRGYRNARGKPFRMSNIYVILKNKHYLGKFSWRGIESPHAVPAIISESDFNEVQKIMNARRVNRVKAGERYMLSGKLFCGECGERMVGTSGTSRSGEIYYYYACPNHQRKNTRTCERTQIRADIIDSTVCDVTTRLLESDAAVEAIARQAVEVQTHTDMNAAIAATKKRMADVKKKIDNCVKAVESGIISDAIAKTLHDNEETLRDLECELAKQEIARKSSELTVDKIRFFFKSICRDAKKADKYRRILLSTLVRMVIVRGDALEIRYNYANEYPALQNPVKAECSYNNRLVVSCDESTNTIYLTPSYFYILARL

SEQ ID NO: 5088 - protein, 512 aa, Unknown
  Description of Unknown: Integrase B5089 sequence
  PTHR30461:SF3,SM00857,G3DSA:1.10.10.2600,IPR036162,PF13408, PS51737,G3DSA:3.40.50.1390,IPR025827,IPR006119,IPR038109, PF07508,IPR011109,SSF53041,PTHR30461,Coil, PS51736,cd00338,PF00239
MRNAVIYARYSSDRQREESIEGQIRVCEDFARRNDMRILKIYTDRALTGRTDKRPEFQLMIKEAASRAFEVVIVYKLNRFARNRYDSASYKHKLKKYGVKVVSAMENIADDPSGILLESVIEGMAEYYSAELSENVIRGQTENILEGKWAGGTVPLGYKLNKEKRLILDEEKVHIVKLIFSMAAEGYGTTAIVRELNRRGYLNSRGKKFSASNVYVILKNKHYTGKFYWRGVESPVAIPIIIAPSDFEAVQKVMNTRKVSRVKTSEKYMLSGKLFCGECGARMLGVSGTSKNGIIYHYYACPNHRHKNTRTCERTQIRADIIDSTVCDVTTRLLESDAAVEAIARQAVEVQTHTDVNAAIAVTKKRMADIKKKIDNCVKAVESGIISEAIAKTLHDNEETLRDLECELAKQEIARKSSELTVDKIRFFFKSICRDAKKADKYRRILLSTLVRMVIVRGDVLEIRYNYANEYPALQNPVKAECSYNNRLVVSCDKSTNTIYLTPSYFYVLARL

SEQ ID NO: 5089 - protein, 512 aa, Unknown
  Description of Unknown: Integrase B5090 sequence
  PTHR30461:SF3,IPR036162,PS51737,IPR011109,PTHR30461, PF00239,G3DSA:1.10.10.2600,IPR006119,SSF53041,cd00338, SM00857,IPR025827,IPR038109,mobidb-lite,PS51736, PF13408,G3DSA:3.40.50.1390,PF07508,Coil
MAKKKKPAGGNAIIYARYSSHNQRDVSIEQQIEACRKHAAELGLTITDTYEDRAISGRTDNRPAFQRMMRDAEDGKFQYVLAWKSNRMGRNMMQAMVNESRLMDCGVKVFYAEEDFDDSAAGRFALRSMMNVNQFYSDNLAEDVRRGLMDNASKCMANGRQPLGYKRGEDGKVVVDEPAAAIVREIYTRIASGEMFMDIARDLNRRGIKTQSGSEWNKSSFKVLCRNERYRGIYIYGDTRIEGGIPPIVDDVLWYKVQEVLKVKKSKNRHHCPSDEDYLLTGKLRCGKCGGYMIGMSGRSKTGDVHHYYACQNRRVGHTCDKKNIRRDVVEPAVAQAIKQYCLTDDAIEWITDQTIAYWEDEDRKLQIDSIENDLSAVQSSISNVMKAIEMGVITETTRDRLIELERQQTDLKSKLALAKEEIVHVDRKDLISSLLAFRHGNVHDRAYQEKLFNAFLIAVYVYDDDHLKLVFNSFGKDDTVNIALDLGENDDNSGLSDVSKSSPILSNGQPD

SEQ ID NO: 5090 - protein, 512 aa, Unknown
  Description of Unknown: Integrase B5091 sequence
  PTHR30461:SF3,SM00857,G3DSA:1.10.10.2600,IPR036162,PS51737, G3DSA:3.40.50.1390,IPR006119,IPR038109,PF07508,IPR011109, SSF53041,PF00239,PTHR30461,PS51736,Coil, cd00338
MQTPRLKKRAASYVRVSTYQEKQEKSLADQIAMLNKIIDDDDTLINVGTYIDQGITGKYQSKRKQFLKLVRDCIEGRIDVVYVKQMRRFGRNTLETMQTIEKLRAYGVAVRFVMDGIDTIKDRGCSRLTMLANMAEEERDSLQETMIWSFQHRMEQGDYVFRPDLLFGYALNKNKEMVIVEEEAKAIKYIFETYAAGGRVVDIEAWLNEHGYVTRKGNPFCKSSIGDILQNEKYYGDLLIGKTRMDGPRRVRNEGESPMYLHEGHHEGIISKELFDKCQEVRQSRHYKTTKDYSDSDIFCKKVYCGQCGSLYYRQGRINCVSDFSQTAFACGLAVRSKRSKCRNKLQRIGTLKDGFVAVYNFLYDNRSTLNEIVVENEEYNEIVERLKELCESEKMYFEAEVKGLMNEQMKKNHTRLVGEVLNLEERKRFLLSRNFEISNCNSNLKKCNKVLRETGKIADFNDELFEIFIQRILVINRNNLVYELTSGHKINVEVLDNYKVRDEIRRVYVSE
